United States Patent Application Publication US 2019/0048337 A1 - sequence listing, part 19

SEQ ID NO: 624368 - RNA, 19 nt, Artificial Sequence
  Synthetic
uaugggucuaucuguuaau

SEQ ID NO: 624369 - RNA, 20 nt, Artificial Sequence
  Synthetic
auaugggucuaucuguuaau

SEQ ID NO: 624370 - RNA, 21 nt, Artificial Sequence
  Synthetic
uauaugggucuaucuguuaau

SEQ ID NO: 624371 - RNA, 22 nt, Artificial Sequence
  Synthetic
cuauaugggucuaucuguuaau

SEQ ID NO: 624372 - RNA, 23 nt, Artificial Sequence
  Synthetic
gcuauaugggucuaucuguuaau

SEQ ID NO: 624373 - RNA, 24 nt, Artificial Sequence
  Synthetic
ggcuauaugggucuaucuguuaau

SEQ ID NO: 624374 - RNA, 18 nt, Artificial Sequence
  Synthetic
cucuuggaauguguuaau

SEQ ID NO: 624375 - RNA, 19 nt, Artificial Sequence
  Synthetic
gcucuuggaauguguuaau

SEQ ID NO: 624376 - RNA, 20 nt, Artificial Sequence
  Synthetic
ggcucuuggaauguguuaau

SEQ ID NO: 624377 - RNA, 21 nt, Artificial Sequence
  Synthetic
uggcucuuggaauguguuaau

SEQ ID NO: 624378 - RNA, 22 nt, Artificial Sequence
  Synthetic
uuggcucuuggaauguguuaau

SEQ ID NO: 624379 - RNA, 23 nt, Artificial Sequence
  Synthetic
auuggcucuuggaauguguuaau

SEQ ID NO: 624380 - RNA, 24 nt, Artificial Sequence
  Synthetic
aauuggcucuuggaauguguuaau

SEQ ID NO: 624381 - RNA, 18 nt, Artificial Sequence
  Synthetic
aacagccuuauuguuaau

SEQ ID NO: 624382 - RNA, 19 nt, Artificial Sequence
  Synthetic
gaacagccuuauuguuaau

SEQ ID NO: 624383 - RNA, 20 nt, Artificial Sequence
  Synthetic
agaacagccuuauuguuaau

SEQ ID NO: 624384 - RNA, 21 nt, Artificial Sequence
  Synthetic
cagaacagccuuauuguuaau

SEQ ID NO: 624385 - RNA, 22 nt, Artificial Sequence
  Synthetic
gcagaacagccuuauuguuaau

SEQ ID NO: 624386 - RNA, 23 nt, Artificial Sequence
  Synthetic
agcagaacagccuuauuguuaau

SEQ ID NO: 624387 - RNA, 24 nt, Artificial Sequence
  Synthetic
aagcagaacagccuuauuguuaau

SEQ ID NO: 624388 - RNA, 18 nt, Artificial Sequence
  Synthetic
caauggauauuuguuaau

SEQ ID NO: 624389 - RNA, 19 nt, Artificial Sequence
  Synthetic
acaauggauauuuguuaau

SEQ ID NO: 624390 - RNA, 20 nt, Artificial Sequence
  Synthetic
aacaauggauauuuguuaau

SEQ ID NO: 624391 - RNA, 21 nt, Artificial Sequence
  Synthetic
uaacaauggauauuuguuaau

SEQ ID NO: 624392 - RNA, 22 nt, Artificial Sequence
  Synthetic
auaacaauggauauuuguuaau

SEQ ID NO: 624393 - RNA, 23 nt, Artificial Sequence
  Synthetic
uauaacaauggauauuuguuaau

SEQ ID NO: 624394 - RNA, 24 nt, Artificial Sequence
  Synthetic
uuauaacaauggauauuuguuaau

SEQ ID NO: 624395 - RNA, 18 nt, Artificial Sequence
  Synthetic
auagaguuagaauuuaau

SEQ ID NO: 624396 - RNA, 19 nt, Artificial Sequence
  Synthetic
gauagaguuagaauuuaau

SEQ ID NO: 624397 - RNA, 20 nt, Artificial Sequence
  Synthetic
ggauagaguuagaauuuaau

SEQ ID NO: 624398 - RNA, 21 nt, Artificial Sequence
  Synthetic
gggauagaguuagaauuuaau

SEQ ID NO: 624399 - RNA, 22 nt, Artificial Sequence
  Synthetic
ggggauagaguuagaauuuaau

SEQ ID NO: 624400 - RNA, 23 nt, Artificial Sequence
  Synthetic
uggggauagaguuagaauuuaau

SEQ ID NO: 624401 - RNA, 24 nt, Artificial Sequence
  Synthetic
guggggauagaguuagaauuuaau

SEQ ID NO: 624402 - RNA, 18 nt, Artificial Sequence
  Synthetic
auuuuuucauaauuuaau

SEQ ID NO: 624403 - RNA, 19 nt, Artificial Sequence
  Synthetic
uauuuuuucauaauuuaau

SEQ ID NO: 624404 - RNA, 20 nt, Artificial Sequence
  Synthetic
auauuuuuucauaauuuaau

SEQ ID NO: 624405 - RNA, 21 nt, Artificial Sequence
  Synthetic
aauauuuuuucauaauuuaau

SEQ ID NO: 624406 - RNA, 22 nt, Artificial Sequence
  Synthetic
uaauauuuuuucauaauuuaau

SEQ ID NO: 624407 - RNA, 23 nt, Artificial Sequence
  Synthetic
guaauauuuuuucauaauuuaau

SEQ ID NO: 624408 - RNA, 24 nt, Artificial Sequence
  Synthetic
uguaauauuuuuucauaauuuaau

SEQ ID NO: 624409 - RNA, 18 nt, Artificial Sequence
  Synthetic
caaaauuaaacauuuaau

SEQ ID NO: 624410 - RNA, 19 nt, Artificial Sequence
  Synthetic
acaaaauuaaacauuuaau

SEQ ID NO: 624411 - RNA, 20 nt, Artificial Sequence
  Synthetic
aacaaaauuaaacauuuaau

SEQ ID NO: 624412 - RNA, 21 nt, Artificial Sequence
  Synthetic
gaacaaaauuaaacauuuaau

SEQ ID NO: 624413 - RNA, 22 nt, Artificial Sequence
  Synthetic
ugaacaaaauuaaacauuuaau

SEQ ID NO: 624414 - RNA, 23 nt, Artificial Sequence
  Synthetic
cugaacaaaauuaaacauuuaau

SEQ ID NO: 624415 - RNA, 24 nt, Artificial Sequence
  Synthetic
ucugaacaaaauuaaacauuuaau

SEQ ID NO: 624416 - RNA, 18 nt, Artificial Sequence
  Synthetic
cuuucugccugauuuaau

SEQ ID NO: 624417 - RNA, 19 nt, Artificial Sequence
  Synthetic
acuuucugccugauuuaau

SEQ ID NO: 624418 - RNA, 20 nt, Artificial Sequence
  Synthetic
uacuuucugccugauuuaau

SEQ ID NO: 624419 - RNA, 21 nt, Artificial Sequence
  Synthetic
uuacuuucugccugauuuaau

SEQ ID NO: 624420 - RNA, 22 nt, Artificial Sequence
  Synthetic
uuuacuuucugccugauuuaau

SEQ ID NO: 624421 - RNA, 23 nt, Artificial Sequence
  Synthetic
auuuacuuucugccugauuuaau

SEQ ID NO: 624422 - RNA, 24 nt, Artificial Sequence
  Synthetic
cauuuacuuucugccugauuuaau

SEQ ID NO: 624423 - RNA, 18 nt, Artificial Sequence
  Synthetic
ucgaauuagauauuuaau

SEQ ID NO: 624424 - RNA, 19 nt, Artificial Sequence
  Synthetic
gucgaauuagauauuuaau

SEQ ID NO: 624425 - RNA, 20 nt, Artificial Sequence
  Synthetic
agucgaauuagauauuuaau

SEQ ID NO: 624426 - RNA, 21 nt, Artificial Sequence
  Synthetic
gagucgaauuagauauuuaau

SEQ ID NO: 624427 - RNA, 22 nt, Artificial Sequence
  Synthetic
ggagucgaauuagauauuuaau

SEQ ID NO: 624428 - RNA, 23 nt, Artificial Sequence
  Synthetic
aggagucgaauuagauauuuaau

SEQ ID NO: 624429 - RNA, 24 nt, Artificial Sequence
  Synthetic
aaggagucgaauuagauauuuaau

SEQ ID NO: 624430 - RNA, 18 nt, Artificial Sequence
  Synthetic
aaaacauauauauuuaau

SEQ ID NO: 624431 - RNA, 19 nt, Artificial Sequence
  Synthetic
aaaaacauauauauuuaau

SEQ ID NO: 624432 - RNA, 20 nt, Artificial Sequence
  Synthetic
uaaaaacauauauauuuaau

SEQ ID NO: 624433 - RNA, 21 nt, Artificial Sequence
  Synthetic
auaaaaacauauauauuuaau

SEQ ID NO: 624434 - RNA, 22 nt, Artificial Sequence
  Synthetic
aauaaaaacauauauauuuaau

SEQ ID NO: 624435 - RNA, 23 nt, Artificial Sequence
  Synthetic
uaauaaaaacauauauauuuaau

SEQ ID NO: 624436 - RNA, 24 nt, Artificial Sequence
  Synthetic
guaauaaaaacauauauauuuaau

SEQ ID NO: 624437 - RNA, 18 nt, Artificial Sequence
  Synthetic
ugcaguauuauauuuaau

SEQ ID NO: 624438 - RNA, 19 nt, Artificial Sequence
  Synthetic
augcaguauuauauuuaau

SEQ ID NO: 624439 - RNA, 20 nt, Artificial Sequence
  Synthetic
aaugcaguauuauauuuaau

SEQ ID NO: 624440 - RNA, 21 nt, Artificial Sequence
  Synthetic
uaaugcaguauuauauuuaau

SEQ ID NO: 624441 - RNA, 22 nt, Artificial Sequence
  Synthetic
auaaugcaguauuauauuuaau

SEQ ID NO: 624442 - RNA, 23 nt, Artificial Sequence
  Synthetic
aauaaugcaguauuauauuuaau

SEQ ID NO: 624443 - RNA, 24 nt, Artificial Sequence
  Synthetic
caauaaugcaguauuauauuuaau

SEQ ID NO: 624444 - RNA, 18 nt, Artificial Sequence
  Synthetic
uguaaaaaauuauuuaau

SEQ ID NO: 624445 - RNA, 19 nt, Artificial Sequence
  Synthetic
uuguaaaaaauuauuuaau

SEQ ID NO: 624446 - RNA, 20 nt, Artificial Sequence
  Synthetic
uuuguaaaaaauuauuuaau

SEQ ID NO: 624447 - RNA, 21 nt, Artificial Sequence
  Synthetic
uuuuguaaaaaauuauuuaau

SEQ ID NO: 624448 - RNA, 22 nt, Artificial Sequence
  Synthetic
cuuuuguaaaaaauuauuuaau

SEQ ID NO: 624449 - RNA, 23 nt, Artificial Sequence
  Synthetic
acuuuuguaaaaaauuauuuaau

SEQ ID NO: 624450 - RNA, 24 nt, Artificial Sequence
  Synthetic
uacuuuuguaaaaaauuauuuaau

SEQ ID NO: 624451 - RNA, 18 nt, Artificial Sequence
  Synthetic
guugcuuuauuauuuaau

SEQ ID NO: 624452 - RNA, 19 nt, Artificial Sequence
  Synthetic
gguugcuuuauuauuuaau

SEQ ID NO: 624453 - RNA, 20 nt, Artificial Sequence
  Synthetic
ggguugcuuuauuauuuaau

SEQ ID NO: 624454 - RNA, 21 nt, Artificial Sequence
  Synthetic
gggguugcuuuauuauuuaau

SEQ ID NO: 624455 - RNA, 22 nt, Artificial Sequence
  Synthetic
agggguugcuuuauuauuuaau

SEQ ID NO: 624456 - RNA, 23 nt, Artificial Sequence
  Synthetic
uagggguugcuuuauuauuuaau

SEQ ID NO: 624457 - RNA, 24 nt, Artificial Sequence
  Synthetic
guagggguugcuuuauuauuuaau

SEQ ID NO: 624458 - RNA, 18 nt, Artificial Sequence
  Synthetic
aacuuuagguuauuuaau

SEQ ID NO: 624459 - RNA, 19 nt, Artificial Sequence
  Synthetic
uaacuuuagguuauuuaau

SEQ ID NO: 624460 - RNA, 20 nt, Artificial Sequence
  Synthetic
uuaacuuuagguuauuuaau

SEQ ID NO: 624461 - RNA, 21 nt, Artificial Sequence
  Synthetic
uuuaacuuuagguuauuuaau

SEQ ID NO: 624462 - RNA, 22 nt, Artificial Sequence
  Synthetic
auuuaacuuuagguuauuuaau

SEQ ID NO: 624463 - RNA, 23 nt, Artificial Sequence
  Synthetic
aauuuaacuuuagguuauuuaau

SEQ ID NO: 624464 - RNA, 24 nt, Artificial Sequence
  Synthetic
caauuuaacuuuagguuauuuaau

SEQ ID NO: 624465 - RNA, 18 nt, Artificial Sequence
  Synthetic
uuuugacaaaacuuuaau

SEQ ID NO: 624466 - RNA, 19 nt, Artificial Sequence
  Synthetic
uuuuugacaaaacuuuaau

SEQ ID NO: 624467 - RNA, 20 nt, Artificial Sequence
  Synthetic
uuuuuugacaaaacuuuaau

SEQ ID NO: 624468 - RNA, 21 nt, Artificial Sequence
  Synthetic
auuuuuugacaaaacuuuaau

SEQ ID NO: 624469 - RNA, 22 nt, Artificial Sequence
  Synthetic
uauuuuuugacaaaacuuuaau

SEQ ID NO: 624470 - RNA, 23 nt, Artificial Sequence
  Synthetic
uuauuuuuugacaaaacuuuaau

SEQ ID NO: 624471 - RNA, 24 nt, Artificial Sequence
  Synthetic
cuuauuuuuugacaaaacuuuaau

SEQ ID NO: 624472 - RNA, 18 nt, Artificial Sequence
  Synthetic
aaguugaucaacuuuaau

SEQ ID NO: 624473 - RNA, 19 nt, Artificial Sequence
  Synthetic
uaaguugaucaacuuuaau

SEQ ID NO: 624474 - RNA, 20 nt, Artificial Sequence
  Synthetic
guaaguugaucaacuuuaau

SEQ ID NO: 624475 - RNA, 21 nt, Artificial Sequence
  Synthetic
aguaaguugaucaacuuuaau

SEQ ID NO: 624476 - RNA, 22 nt, Artificial Sequence
  Synthetic
aaguaaguugaucaacuuuaau

SEQ ID NO: 624477 - RNA, 23 nt, Artificial Sequence
  Synthetic
aaaguaaguugaucaacuuuaau

SEQ ID NO: 624478 - RNA, 24 nt, Artificial Sequence
  Synthetic
aaaaguaaguugaucaacuuuaau

SEQ ID NO: 624479 - RNA, 18 nt, Artificial Sequence
  Synthetic
ccauaagauuucuuuaau

SEQ ID NO: 624480 - RNA, 19 nt, Artificial Sequence
  Synthetic
cccauaagauuucuuuaau

SEQ ID NO: 624481 - RNA, 20 nt, Artificial Sequence
  Synthetic
gcccauaagauuucuuuaau

SEQ ID NO: 624482 - RNA, 21 nt, Artificial Sequence
  Synthetic
ggcccauaagauuucuuuaau

SEQ ID NO: 624483 - RNA, 22 nt, Artificial Sequence
  Synthetic
cggcccauaagauuucuuuaau

SEQ ID NO: 624484 - RNA, 23 nt, Artificial Sequence
  Synthetic
ccggcccauaagauuucuuuaau

SEQ ID NO: 624485 - RNA, 24 nt, Artificial Sequence
  Synthetic
cccggcccauaagauuucuuuaau

SEQ ID NO: 624486 - RNA, 18 nt, Artificial Sequence
  Synthetic
auauaaaauaaguuuaau

SEQ ID NO: 624487 - RNA, 19 nt, Artificial Sequence
  Synthetic
aauauaaaauaaguuuaau

SEQ ID NO: 624488 - RNA, 20 nt, Artificial Sequence
  Synthetic
caauauaaaauaaguuuaau

SEQ ID NO: 624489 - RNA, 21 nt, Artificial Sequence
  Synthetic
acaauauaaaauaaguuuaau

SEQ ID NO: 624490 - RNA, 22 nt, Artificial Sequence
  Synthetic
gacaauauaaaauaaguuuaau

SEQ ID NO: 624491 - RNA, 23 nt, Artificial Sequence
  Synthetic
ugacaauauaaaauaaguuuaau

SEQ ID NO: 624492 - RNA, 24 nt, Artificial Sequence
  Synthetic
augacaauauaaaauaaguuuaau

SEQ ID NO: 624493 - RNA, 18 nt, Artificial Sequence
  Synthetic
ucuaauauccauuuuaau

SEQ ID NO: 624494 - RNA, 19 nt, Artificial Sequence
  Synthetic
aucuaauauccauuuuaau

SEQ ID NO: 624495 - RNA, 20 nt, Artificial Sequence
  Synthetic
uaucuaauauccauuuuaau

SEQ ID NO: 624496 - RNA, 21 nt, Artificial Sequence
  Synthetic
auaucuaauauccauuuuaau

SEQ ID NO: 624497 - RNA, 22 nt, Artificial Sequence
  Synthetic
uauaucuaauauccauuuuaau

SEQ ID NO: 624498 - RNA, 23 nt, Artificial Sequence
  Synthetic
auauaucuaauauccauuuuaau

SEQ ID NO: 624499 - RNA, 24 nt, Artificial Sequence
  Synthetic
aauauaucuaauauccauuuuaau

SEQ ID NO: 624500 - RNA, 18 nt, Artificial Sequence
  Synthetic
cauaccacugauuuuaau

SEQ ID NO: 624501 - RNA, 19 nt, Artificial Sequence
  Synthetic
acauaccacugauuuuaau

SEQ ID NO: 624502 - RNA, 20 nt, Artificial Sequence
  Synthetic
uacauaccacugauuuuaau

SEQ ID NO: 624503 - RNA, 21 nt, Artificial Sequence
  Synthetic
uuacauaccacugauuuuaau

SEQ ID NO: 624504 - RNA, 22 nt, Artificial Sequence
  Synthetic
auuacauaccacugauuuuaau

SEQ ID NO: 624505 - RNA, 23 nt, Artificial Sequence
  Synthetic
cauuacauaccacugauuuuaau

SEQ ID NO: 624506 - RNA, 24 nt, Artificial Sequence
  Synthetic
acauuacauaccacugauuuuaau

SEQ ID NO: 624507 - RNA, 18 nt, Artificial Sequence
  Synthetic
acauagaaauauuuuaau

SEQ ID NO: 624508 - RNA, 19 nt, Artificial Sequence
  Synthetic
cacauagaaauauuuuaau

SEQ ID NO: 624509 - RNA, 20 nt, Artificial Sequence
  Synthetic
gcacauagaaauauuuuaau

SEQ ID NO: 624510 - RNA, 21 nt, Artificial Sequence
  Synthetic
ggcacauagaaauauuuuaau

SEQ ID NO: 624511 - RNA, 22 nt, Artificial Sequence
  Synthetic
uggcacauagaaauauuuuaau

SEQ ID NO: 624512 - RNA, 23 nt, Artificial Sequence
  Synthetic
auggcacauagaaauauuuuaau

SEQ ID NO: 624513 - RNA, 24 nt, Artificial Sequence
  Synthetic
uauggcacauagaaauauuuuaau

SEQ ID NO: 624514 - RNA, 18 nt, Artificial Sequence
  Synthetic
acuauuuaauauuuuaau

SEQ ID NO: 624515 - RNA, 19 nt, Artificial Sequence
  Synthetic
uacuauuuaauauuuuaau

SEQ ID NO: 624516 - RNA, 20 nt, Artificial Sequence
  Synthetic
cuacuauuuaauauuuuaau

SEQ ID NO: 624517 - RNA, 21 nt, Artificial Sequence
  Synthetic
ucuacuauuuaauauuuuaau

SEQ ID NO: 624518 - RNA, 22 nt, Artificial Sequence
  Synthetic
uucuacuauuuaauauuuuaau

SEQ ID NO: 624519 - RNA, 23 nt, Artificial Sequence
  Synthetic
uuucuacuauuuaauauuuuaau

SEQ ID NO: 624520 - RNA, 24 nt, Artificial Sequence
  Synthetic
auuucuacuauuuaauauuuuaau

SEQ ID NO: 624521 - RNA, 18 nt, Artificial Sequence
  Synthetic
uagcauuucuauuuuaau

SEQ ID NO: 624522 - RNA, 19 nt, Artificial Sequence
  Synthetic
uuagcauuucuauuuuaau

SEQ ID NO: 624523 - RNA, 20 nt, Artificial Sequence
  Synthetic
uuuagcauuucuauuuuaau

SEQ ID NO: 624524 - RNA, 21 nt, Artificial Sequence
  Synthetic
uuuuagcauuucuauuuuaau

SEQ ID NO: 624525 - RNA, 22 nt, Artificial Sequence
  Synthetic
auuuuagcauuucuauuuuaau

SEQ ID NO: 624526 - RNA, 23 nt, Artificial Sequence
  Synthetic
cauuuuagcauuucuauuuuaau

SEQ ID NO: 624527 - RNA, 24 nt, Artificial Sequence
  Synthetic
ccauuuuagcauuucuauuuuaau

SEQ ID NO: 624528 - RNA, 18 nt, Artificial Sequence
  Synthetic
aguaaauuuuauuuuaau

SEQ ID NO: 624529 - RNA, 19 nt, Artificial Sequence
  Synthetic
caguaaauuuuauuuuaau

SEQ ID NO: 624530 - RNA, 20 nt, Artificial Sequence
  Synthetic
ucaguaaauuuuauuuuaau

SEQ ID NO: 624531 - RNA, 21 nt, Artificial Sequence
  Synthetic
cucaguaaauuuuauuuuaau

SEQ ID NO: 624532 - RNA, 22 nt, Artificial Sequence
  Synthetic
acucaguaaauuuuauuuuaau

SEQ ID NO: 624533 - RNA, 23 nt, Artificial Sequence
  Synthetic
aacucaguaaauuuuauuuuaau

SEQ ID NO: 624534 - RNA, 24 nt, Artificial Sequence
  Synthetic
aaacucaguaaauuuuauuuuaau

SEQ ID NO: 624535 - RNA, 18 nt, Artificial Sequence
  Synthetic
cagucugugucuuuuaau

SEQ ID NO: 624536 - RNA, 19 nt, Artificial Sequence
  Synthetic
ccagucugugucuuuuaau

SEQ ID NO: 624537 - RNA, 20 nt, Artificial Sequence
  Synthetic
gccagucugugucuuuuaau

SEQ ID NO: 624538 - RNA, 21 nt, Artificial Sequence
  Synthetic
ugccagucugugucuuuuaau

SEQ ID NO: 624539 - RNA, 22 nt, Artificial Sequence
  Synthetic
uugccagucugugucuuuuaau

SEQ ID NO: 624540 - RNA, 23 nt, Artificial Sequence
  Synthetic
uuugccagucugugucuuuuaau

SEQ ID NO: 624541 - RNA, 24 nt, Artificial Sequence
  Synthetic
auuugccagucugugucuuuuaau

SEQ ID NO: 624542 - RNA, 18 nt, Artificial Sequence
  Synthetic
ugauuuguaaguuuuaau

SEQ ID NO: 624543 - RNA, 19 nt, Artificial Sequence
  Synthetic
augauuuguaaguuuuaau

SEQ ID NO: 624544 - RNA, 20 nt, Artificial Sequence
  Synthetic
caugauuuguaaguuuuaau

SEQ ID NO: 624545 - RNA, 21 nt, Artificial Sequence
  Synthetic
ucaugauuuguaaguuuuaau

SEQ ID NO: 624546 - RNA, 22 nt, Artificial Sequence
  Synthetic
cucaugauuuguaaguuuuaau

SEQ ID NO: 624547 - RNA, 23 nt, Artificial Sequence
  Synthetic
ccucaugauuuguaaguuuuaau

SEQ ID NO: 624548 - RNA, 24 nt, Artificial Sequence
  Synthetic
gccucaugauuuguaaguuuuaau

SEQ ID NO: 624549 - RNA, 18 nt, Artificial Sequence
  Synthetic
uagauuuggaguuuuaau

SEQ ID NO: 624550 - RNA, 19 nt, Artificial Sequence
  Synthetic
cuagauuuggaguuuuaau

SEQ ID NO: 624551 - RNA, 20 nt, Artificial Sequence
  Synthetic
ccuagauuuggaguuuuaau

SEQ ID NO: 624552 - RNA, 21 nt, Artificial Sequence
  Synthetic
accuagauuuggaguuuuaau

SEQ ID NO: 624553 - RNA, 22 nt, Artificial Sequence
  Synthetic
caccuagauuuggaguuuuaau

SEQ ID NO: 624554 - RNA, 23 nt, Artificial Sequence
  Synthetic
ucaccuagauuuggaguuuuaau

SEQ ID NO: 624555 - RNA, 24 nt, Artificial Sequence
  Synthetic
uucaccuagauuuggaguuuuaau

SEQ ID NO: 624556 - RNA, 18 nt, Artificial Sequence
  Synthetic
gacaacacauguuuuaau

SEQ ID NO: 624557 - RNA, 19 nt, Artificial Sequence
  Synthetic
ggacaacacauguuuuaau

SEQ ID NO: 624558 - RNA, 20 nt, Artificial Sequence
  Synthetic
aggacaacacauguuuuaau

SEQ ID NO: 624559 - RNA, 21 nt, Artificial Sequence
  Synthetic
aaggacaacacauguuuuaau

SEQ ID NO: 624560 - RNA, 22 nt, Artificial Sequence
  Synthetic
aaaggacaacacauguuuuaau

SEQ ID NO: 624561 - RNA, 23 nt, Artificial Sequence
  Synthetic
gaaaggacaacacauguuuuaau

SEQ ID NO: 624562 - RNA, 24 nt, Artificial Sequence
  Synthetic
agaaaggacaacacauguuuuaau

SEQ ID NO: 624563 - RNA, 18 nt, Artificial Sequence
  Synthetic
accaagucaauuuuuaau

SEQ ID NO: 624564 - RNA, 19 nt, Artificial Sequence
  Synthetic
aaccaagucaauuuuuaau

SEQ ID NO: 624565 - RNA, 20 nt, Artificial Sequence
  Synthetic
uaaccaagucaauuuuuaau

SEQ ID NO: 624566 - RNA, 21 nt, Artificial Sequence
  Synthetic
auaaccaagucaauuuuuaau

SEQ ID NO: 624567 - RNA, 22 nt, Artificial Sequence
  Synthetic
aauaaccaagucaauuuuuaau

SEQ ID NO: 624568 - RNA, 23 nt, Artificial Sequence
  Synthetic
uaauaaccaagucaauuuuuaau

SEQ ID NO: 624569 - RNA, 24 nt, Artificial Sequence
  Synthetic
uuaauaaccaagucaauuuuuaau

SEQ ID NO: 624570 - RNA, 18 nt, Artificial Sequence
  Synthetic
uuuuuuuuuuuuuuuaau

SEQ ID NO: 624571 - RNA, 19 nt, Artificial Sequence
  Synthetic
uuuuuuuuuuuuuuuuaau

SEQ ID NO: 624572 - RNA, 20 nt, Artificial Sequence
  Synthetic
uuuuuuuuuuuuuuuuuaau

SEQ ID NO: 624573 - RNA, 21 nt, Artificial Sequence
  Synthetic
uuuuuuuuuuuuuuuuuuaau

SEQ ID NO: 624574 - RNA, 22 nt, Artificial Sequence
  Synthetic
cuuuuuuuuuuuuuuuuuuaau

SEQ ID NO: 624575 - RNA, 23 nt, Artificial Sequence
  Synthetic
ucuuuuuuuuuuuuuuuuuuaau

SEQ ID NO: 624576 - RNA, 24 nt, Artificial Sequence
  Synthetic
gucuuuuuuuuuuuuuuuuuuaau

SEQ ID NO: 624577 - RNA, 18 nt, Artificial Sequence
  Synthetic
uaaaaacuacaaaaacau

SEQ ID NO: 624578 - RNA, 19 nt, Artificial Sequence
  Synthetic
cuaaaaacuacaaaaacau

SEQ ID NO: 624579 - RNA, 20 nt, Artificial Sequence
  Synthetic
acuaaaaacuacaaaaacau

SEQ ID NO: 624580 - RNA, 21 nt, Artificial Sequence
  Synthetic
aacuaaaaacuacaaaaacau

SEQ ID NO: 624581 - RNA, 22 nt, Artificial Sequence
  Synthetic
aaacuaaaaacuacaaaaacau

SEQ ID NO: 624582 - RNA, 23 nt, Artificial Sequence
  Synthetic
gaaacuaaaaacuacaaaaacau

SEQ ID NO: 624583 - RNA, 24 nt, Artificial Sequence
  Synthetic
ugaaacuaaaaacuacaaaaacau

SEQ ID NO: 624584 - RNA, 18 nt, Artificial Sequence
  Synthetic
aaaaguuuuuaaaaacau

SEQ ID NO: 624585 - RNA, 19 nt, Artificial Sequence
  Synthetic
gaaaaguuuuuaaaaacau

SEQ ID NO: 624586 - RNA, 20 nt, Artificial Sequence
  Synthetic
ugaaaaguuuuuaaaaacau

SEQ ID NO: 624587 - RNA, 21 nt, Artificial Sequence
  Synthetic
augaaaaguuuuuaaaaacau

SEQ ID NO: 624588 - RNA, 22 nt, Artificial Sequence
  Synthetic
gaugaaaaguuuuuaaaaacau

SEQ ID NO: 624589 - RNA, 23 nt, Artificial Sequence
  Synthetic
agaugaaaaguuuuuaaaaacau

SEQ ID NO: 624590 - RNA, 24 nt, Artificial Sequence
  Synthetic
cagaugaaaaguuuuuaaaaacau

SEQ ID NO: 624591 - RNA, 18 nt, Artificial Sequence
  Synthetic
acucauagaagaaaacau

SEQ ID NO: 624592 - RNA, 19 nt, Artificial Sequence
  Synthetic
aacucauagaagaaaacau

SEQ ID NO: 624593 - RNA, 20 nt, Artificial Sequence
  Synthetic
aaacucauagaagaaaacau

SEQ ID NO: 624594 - RNA, 21 nt, Artificial Sequence
  Synthetic
gaaacucauagaagaaaacau

SEQ ID NO: 624595 - RNA, 22 nt, Artificial Sequence
  Synthetic
ugaaacucauagaagaaaacau

SEQ ID NO: 624596 - RNA, 23 nt, Artificial Sequence
  Synthetic
augaaacucauagaagaaaacau

SEQ ID NO: 624597 - RNA, 24 nt, Artificial Sequence
  Synthetic
uaugaaacucauagaagaaaacau

SEQ ID NO: 624598 - RNA, 18 nt, Artificial Sequence
  Synthetic
cuggggacaggaaaacau

SEQ ID NO: 624599 - RNA, 19 nt, Artificial Sequence
  Synthetic
acuggggacaggaaaacau

SEQ ID NO: 624600 - RNA, 20 nt, Artificial Sequence
  Synthetic
cacuggggacaggaaaacau

SEQ ID NO: 624601 - RNA, 21 nt, Artificial Sequence
  Synthetic
ccacuggggacaggaaaacau

SEQ ID NO: 624602 - RNA, 22 nt, Artificial Sequence
  Synthetic
accacuggggacaggaaaacau

SEQ ID NO: 624603 - RNA, 23 nt, Artificial Sequence
  Synthetic
aaccacuggggacaggaaaacau

SEQ ID NO: 624604 - RNA, 24 nt, Artificial Sequence
  Synthetic
uaaccacuggggacaggaaaacau

SEQ ID NO: 624605 - RNA, 18 nt, Artificial Sequence
  Synthetic
gauaaacaaugaaaacau

SEQ ID NO: 624606 - RNA, 19 nt, Artificial Sequence
  Synthetic
agauaaacaaugaaaacau

SEQ ID NO: 624607 - RNA, 20 nt, Artificial Sequence
  Synthetic
gagauaaacaaugaaaacau

SEQ ID NO: 624608 - RNA, 21 nt, Artificial Sequence
  Synthetic
ggagauaaacaaugaaaacau

SEQ ID NO: 624609 - RNA, 22 nt, Artificial Sequence
  Synthetic
gggagauaaacaaugaaaacau

SEQ ID NO: 624610 - RNA, 23 nt, Artificial Sequence
  Synthetic
ugggagauaaacaaugaaaacau

SEQ ID NO: 624611 - RNA, 24 nt, Artificial Sequence
  Synthetic
gugggagauaaacaaugaaaacau

SEQ ID NO: 624612 - RNA, 18 nt, Artificial Sequence
  Synthetic
guuuugguaauaaaacau

SEQ ID NO: 624613 - RNA, 19 nt, Artificial Sequence
  Synthetic
uguuuugguaauaaaacau

SEQ ID NO: 624614 - RNA, 20 nt, Artificial Sequence
  Synthetic
cuguuuugguaauaaaacau

SEQ ID NO: 624615 - RNA, 21 nt, Artificial Sequence
  Synthetic
ccuguuuugguaauaaaacau

SEQ ID NO: 624616 - RNA, 22 nt, Artificial Sequence
  Synthetic
uccuguuuugguaauaaaacau

SEQ ID NO: 624617 - RNA, 23 nt, Artificial Sequence
  Synthetic
cuccuguuuugguaauaaaacau

SEQ ID NO: 624618 - RNA, 24 nt, Artificial Sequence
  Synthetic
ucuccuguuuugguaauaaaacau

SEQ ID NO: 624619 - RNA, 18 nt, Artificial Sequence
  Synthetic
caaugccuucuaaaacau

SEQ ID NO: 624620 - RNA, 19 nt, Artificial Sequence
  Synthetic
ucaaugccuucuaaaacau

SEQ ID NO: 624621 - RNA, 20 nt, Artificial Sequence
  Synthetic
uucaaugccuucuaaaacau

SEQ ID NO: 624622 - RNA, 21 nt, Artificial Sequence
  Synthetic
cuucaaugccuucuaaaacau

SEQ ID NO: 624623 - RNA, 22 nt, Artificial Sequence
  Synthetic
ccuucaaugccuucuaaaacau

SEQ ID NO: 624624 - RNA, 23 nt, Artificial Sequence
  Synthetic
accuucaaugccuucuaaaacau

SEQ ID NO: 624625 - RNA, 24 nt, Artificial Sequence
  Synthetic
caccuucaaugccuucuaaaacau

SEQ ID NO: 624626 - RNA, 18 nt, Artificial Sequence
  Synthetic
ucuucucacuuaaaacau

SEQ ID NO: 624627 - RNA, 19 nt, Artificial Sequence
  Synthetic
cucuucucacuuaaaacau

SEQ ID NO: 624628 - RNA, 20 nt, Artificial Sequence
  Synthetic
gcucuucucacuuaaaacau

SEQ ID NO: 624629 - RNA, 21 nt, Artificial Sequence
  Synthetic
ugcucuucucacuuaaaacau

SEQ ID NO: 624630 - RNA, 22 nt, Artificial Sequence
  Synthetic
augcucuucucacuuaaaacau

SEQ ID NO: 624631 - RNA, 23 nt, Artificial Sequence
  Synthetic
caugcucuucucacuuaaaacau

SEQ ID NO: 624632 - RNA, 24 nt, Artificial Sequence
  Synthetic
acaugcucuucucacuuaaaacau

SEQ ID NO: 624633 - RNA, 18 nt, Artificial Sequence
  Synthetic
uacgcggccaacaaacau

SEQ ID NO: 624634 - RNA, 19 nt, Artificial Sequence
  Synthetic
uuacgcggccaacaaacau

SEQ ID NO: 624635 - RNA, 20 nt, Artificial Sequence
  Synthetic
uuuacgcggccaacaaacau

SEQ ID NO: 624636 - RNA, 21 nt, Artificial Sequence
  Synthetic
auuuacgcggccaacaaacau

SEQ ID NO: 624637 - RNA, 22 nt, Artificial Sequence
  Synthetic
cauuuacgcggccaacaaacau

SEQ ID NO: 624638 - RNA, 23 nt, Artificial Sequence
  Synthetic
acauuuacgcggccaacaaacau

SEQ ID NO: 624639 - RNA, 24 nt, Artificial Sequence
  Synthetic
gacauuuacgcggccaacaaacau

SEQ ID NO: 624640 - RNA, 18 nt, Artificial Sequence
  Synthetic
uuuuuaauaaucaaacau

SEQ ID NO: 624641 - RNA, 19 nt, Artificial Sequence
  Synthetic
auuuuuaauaaucaaacau

SEQ ID NO: 624642 - RNA, 20 nt, Artificial Sequence
  Synthetic
uauuuuuaauaaucaaacau

SEQ ID NO: 624643 - RNA, 21 nt, Artificial Sequence
  Synthetic
guauuuuuaauaaucaaacau

SEQ ID NO: 624644 - RNA, 22 nt, Artificial Sequence
  Synthetic
gguauuuuuaauaaucaaacau

SEQ ID NO: 624645 - RNA, 23 nt, Artificial Sequence
  Synthetic
ggguauuuuuaauaaucaaacau

SEQ ID NO: 624646 - RNA, 24 nt, Artificial Sequence
  Synthetic
gggguauuuuuaauaaucaaacau

SEQ ID NO: 624647 - RNA, 18 nt, Artificial Sequence
  Synthetic
uaacaguccuucaaacau

SEQ ID NO: 624648 - RNA, 19 nt, Artificial Sequence
  Synthetic
guaacaguccuucaaacau

SEQ ID NO: 624649 - RNA, 20 nt, Artificial Sequence
  Synthetic
cguaacaguccuucaaacau

SEQ ID NO: 624650 - RNA, 21 nt, Artificial Sequence
  Synthetic
ccguaacaguccuucaaacau

SEQ ID NO: 624651 - RNA, 22 nt, Artificial Sequence
  Synthetic
uccguaacaguccuucaaacau

SEQ ID NO: 624652 - RNA, 23 nt, Artificial Sequence
  Synthetic
guccguaacaguccuucaaacau

SEQ ID NO: 624653 - RNA, 24 nt, Artificial Sequence
  Synthetic
uguccguaacaguccuucaaacau

SEQ ID NO: 624654 - RNA, 18 nt, Artificial Sequence
  Synthetic
uuuaugaaaaagaaacau

SEQ ID NO: 624655 - RNA, 19 nt, Artificial Sequence
  Synthetic
uuuuaugaaaaagaaacau

SEQ ID NO: 624656 - RNA, 20 nt, Artificial Sequence
  Synthetic
guuuuaugaaaaagaaacau

SEQ ID NO: 624657 - RNA, 21 nt, Artificial Sequence
  Synthetic
gguuuuaugaaaaagaaacau

SEQ ID NO: 624658 - RNA, 22 nt, Artificial Sequence
  Synthetic
ugguuuuaugaaaaagaaacau

SEQ ID NO: 624659 - RNA, 23 nt, Artificial Sequence
  Synthetic
gugguuuuaugaaaaagaaacau

SEQ ID NO: 624660 - RNA, 24 nt, Artificial Sequence
  Synthetic
cgugguuuuaugaaaaagaaacau

SEQ ID NO: 624661 - RNA, 18 nt, Artificial Sequence
  Synthetic
ggcugguggaagaaacau

SEQ ID NO: 624662 - RNA, 19 nt, Artificial Sequence
  Synthetic
gggcugguggaagaaacau

SEQ ID NO: 624663 - RNA, 20 nt, Artificial Sequence
  Synthetic
ggggcugguggaagaaacau

SEQ ID NO: 624664 - RNA, 21 nt, Artificial Sequence
  Synthetic
aggggcugguggaagaaacau

SEQ ID NO: 624665 - RNA, 22 nt, Artificial Sequence
  Synthetic
aaggggcugguggaagaaacau

SEQ ID NO: 624666 - RNA, 23 nt, Artificial Sequence
  Synthetic
uaaggggcugguggaagaaacau

SEQ ID NO: 624667 - RNA, 24 nt, Artificial Sequence
  Synthetic
auaaggggcugguggaagaaacau

SEQ ID NO: 624668 - RNA, 18 nt, Artificial Sequence
  Synthetic
uaaaacuuccagaaacau

SEQ ID NO: 624669 - RNA, 19 nt, Artificial Sequence
  Synthetic
auaaaacuuccagaaacau

SEQ ID NO: 624670 - RNA, 20 nt, Artificial Sequence
  Synthetic
aauaaaacuuccagaaacau

SEQ ID NO: 624671 - RNA, 21 nt, Artificial Sequence
  Synthetic
aaauaaaacuuccagaaacau

SEQ ID NO: 624672 - RNA, 22 nt, Artificial Sequence
  Synthetic
uaaauaaaacuuccagaaacau

SEQ ID NO: 624673 - RNA, 23 nt, Artificial Sequence
  Synthetic
guaaauaaaacuuccagaaacau

SEQ ID NO: 624674 - RNA, 24 nt, Artificial Sequence
  Synthetic
uguaaauaaaacuuccagaaacau

SEQ ID NO: 624675 - RNA, 18 nt, Artificial Sequence
  Synthetic
caucccugcuagaaacau

SEQ ID NO: 624676 - RNA, 19 nt, Artificial Sequence
  Synthetic
ccaucccugcuagaaacau

SEQ ID NO: 624677 - RNA, 20 nt, Artificial Sequence
  Synthetic
cccaucccugcuagaaacau

SEQ ID NO: 624678 - RNA, 21 nt, Artificial Sequence
  Synthetic
ccccaucccugcuagaaacau

SEQ ID NO: 624679 - RNA, 22 nt, Artificial Sequence
  Synthetic
gccccaucccugcuagaaacau

SEQ ID NO: 624680 - RNA, 23 nt, Artificial Sequence
  Synthetic
agccccaucccugcuagaaacau

SEQ ID NO: 624681 - RNA, 24 nt, Artificial Sequence
  Synthetic
uagccccaucccugcuagaaacau

SEQ ID NO: 624682 - RNA, 18 nt, Artificial Sequence
  Synthetic
acuacuacaaggaaacau

SEQ ID NO: 624683 - RNA, 19 nt, Artificial Sequence
  Synthetic
aacuacuacaaggaaacau

SEQ ID NO: 624684 - RNA, 20 nt, Artificial Sequence
  Synthetic
aaacuacuacaaggaaacau

SEQ ID NO: 624685 - RNA, 21 nt, Artificial Sequence
  Synthetic
gaaacuacuacaaggaaacau

SEQ ID NO: 624686 - RNA, 22 nt, Artificial Sequence
  Synthetic
agaaacuacuacaaggaaacau

SEQ ID NO: 624687 - RNA, 23 nt, Artificial Sequence
  Synthetic
aagaaacuacuacaaggaaacau

SEQ ID NO: 624688 - RNA, 24 nt, Artificial Sequence
  Synthetic
uaagaaacuacuacaaggaaacau

SEQ ID NO: 624689 - RNA, 18 nt, Artificial Sequence
  Synthetic
aucauguauaugaaacau

SEQ ID NO: 624690 - RNA, 19 nt, Artificial Sequence
  Synthetic
aaucauguauaugaaacau

SEQ ID NO: 624691 - RNA, 20 nt, Artificial Sequence
  Synthetic
uaaucauguauaugaaacau

SEQ ID NO: 624692 - RNA, 21 nt, Artificial Sequence
  Synthetic
auaaucauguauaugaaacau

SEQ ID NO: 624693 - RNA, 22 nt, Artificial Sequence
  Synthetic
gauaaucauguauaugaaacau

SEQ ID NO: 624694 - RNA, 23 nt, Artificial Sequence
  Synthetic
ugauaaucauguauaugaaacau

SEQ ID NO: 624695 - RNA, 24 nt, Artificial Sequence
  Synthetic
augauaaucauguauaugaaacau

SEQ ID NO: 624696 - RNA, 18 nt, Artificial Sequence
  Synthetic
aagugcugcaguaaacau

SEQ ID NO: 624697 - RNA, 19 nt, Artificial Sequence
  Synthetic
aaagugcugcaguaaacau

SEQ ID NO: 624698 - RNA, 20 nt, Artificial Sequence
  Synthetic
aaaagugcugcaguaaacau

SEQ ID NO: 624699 - RNA, 21 nt, Artificial Sequence
  Synthetic
gaaaagugcugcaguaaacau

SEQ ID NO: 624700 - RNA, 22 nt, Artificial Sequence
  Synthetic
ugaaaagugcugcaguaaacau

SEQ ID NO: 624701 - RNA, 23 nt, Artificial Sequence
  Synthetic
augaaaagugcugcaguaaacau

SEQ ID NO: 624702 - RNA, 24 nt, Artificial Sequence
  Synthetic
uaugaaaagugcugcaguaaacau

SEQ ID NO: 624703 - RNA, 18 nt, Artificial Sequence
  Synthetic
uuugaaucacuuaaacau

SEQ ID NO: 624704 - RNA, 19 nt, Artificial Sequence
  Synthetic
cuuugaaucacuuaaacau

SEQ ID NO: 624705 - RNA, 20 nt, Artificial Sequence
  Synthetic
ucuuugaaucacuuaaacau

SEQ ID NO: 624706 - RNA, 21 nt, Artificial Sequence
  Synthetic
uucuuugaaucacuuaaacau

SEQ ID NO: 624707 - RNA, 22 nt, Artificial Sequence
  Synthetic
uuucuuugaaucacuuaaacau

SEQ ID NO: 624708 - RNA, 23 nt, Artificial Sequence
  Synthetic
uuuucuuugaaucacuuaaacau

SEQ ID NO: 624709 - RNA, 24 nt, Artificial Sequence
  Synthetic
guuuucuuugaaucacuuaaacau

SEQ ID NO: 624710 - RNA, 18 nt, Artificial Sequence
  Synthetic
ucuggcacguuuaaacau

SEQ ID NO: 624711 - RNA, 19 nt, Artificial Sequence
  Synthetic
cucuggcacguuuaaacau

SEQ ID NO: 624712 - RNA, 20 nt, Artificial Sequence
  Synthetic
acucuggcacguuuaaacau

SEQ ID NO: 624713 - RNA, 21 nt, Artificial Sequence
  Synthetic
gacucuggcacguuuaaacau

SEQ ID NO: 624714 - RNA, 22 nt, Artificial Sequence
  Synthetic
ugacucuggcacguuuaaacau

SEQ ID NO: 624715 - RNA, 23 nt, Artificial Sequence
  Synthetic
augacucuggcacguuuaaacau

SEQ ID NO: 624716 - RNA, 24 nt, Artificial Sequence
  Synthetic
aaugacucuggcacguuuaaacau

SEQ ID NO: 624717 - RNA, 18 nt, Artificial Sequence
  Synthetic
ucaagcaguuuuaaacau

SEQ ID NO: 624718 - RNA, 19 nt, Artificial Sequence
  Synthetic
uucaagcaguuuuaaacau

SEQ ID NO: 624719 - RNA, 20 nt, Artificial Sequence
  Synthetic
uuucaagcaguuuuaaacau

SEQ ID NO: 624720 - RNA, 21 nt, Artificial Sequence
  Synthetic
uuuucaagcaguuuuaaacau

SEQ ID NO: 624721 - RNA, 22 nt, Artificial Sequence
  Synthetic
guuuucaagcaguuuuaaacau

SEQ ID NO: 624722 - RNA, 23 nt, Artificial Sequence
  Synthetic
uguuuucaagcaguuuuaaacau

SEQ ID NO: 624723 - RNA, 24 nt, Artificial Sequence
  Synthetic
cuguuuucaagcaguuuuaaacau

SEQ ID NO: 624724 - RNA, 18 nt, Artificial Sequence
  Synthetic
ugugacauauaacaacau

SEQ ID NO: 624725 - RNA, 19 nt, Artificial Sequence
  Synthetic
augugacauauaacaacau

SEQ ID NO: 624726 - RNA, 20 nt, Artificial Sequence
  Synthetic
uaugugacauauaacaacau

SEQ ID NO: 624727 - RNA, 21 nt, Artificial Sequence
  Synthetic
auaugugacauauaacaacau

SEQ ID NO: 624728 - RNA, 22 nt, Artificial Sequence
  Synthetic
aauaugugacauauaacaacau

SEQ ID NO: 624729 - RNA, 23 nt, Artificial Sequence
  Synthetic
gaauaugugacauauaacaacau

SEQ ID NO: 624730 - RNA, 24 nt, Artificial Sequence
  Synthetic
ugaauaugugacauauaacaacau

SEQ ID NO: 624731 - RNA, 18 nt, Artificial Sequence
  Synthetic
agguuuugaacacaacau

SEQ ID NO: 624732 - RNA, 19 nt, Artificial Sequence
  Synthetic
aagguuuugaacacaacau

SEQ ID NO: 624733 - RNA, 20 nt, Artificial Sequence
  Synthetic
aaagguuuugaacacaacau

SEQ ID NO: 624734 - RNA, 21 nt, Artificial Sequence
  Synthetic
gaaagguuuugaacacaacau

SEQ ID NO: 624735 - RNA, 22 nt, Artificial Sequence
  Synthetic
agaaagguuuugaacacaacau

SEQ ID NO: 624736 - RNA, 23 nt, Artificial Sequence
  Synthetic
uagaaagguuuugaacacaacau

SEQ ID NO: 624737 - RNA, 24 nt, Artificial Sequence
  Synthetic
uuagaaagguuuugaacacaacau

SEQ ID NO: 624738 - RNA, 18 nt, Artificial Sequence
  Synthetic
ucuagaaaaagacaacau

SEQ ID NO: 624739 - RNA, 19 nt, Artificial Sequence
  Synthetic
uucuagaaaaagacaacau

SEQ ID NO: 624740 - RNA, 20 nt, Artificial Sequence
  Synthetic
uuucuagaaaaagacaacau

SEQ ID NO: 624741 - RNA, 21 nt, Artificial Sequence
  Synthetic
auuucuagaaaaagacaacau

SEQ ID NO: 624742 - RNA, 22 nt, Artificial Sequence
  Synthetic
gauuucuagaaaaagacaacau

SEQ ID NO: 624743 - RNA, 23 nt, Artificial Sequence
  Synthetic
ggauuucuagaaaaagacaacau

SEQ ID NO: 624744 - RNA, 24 nt, Artificial Sequence
  Synthetic
aggauuucuagaaaaagacaacau

SEQ ID NO: 624745 - RNA, 18 nt, Artificial Sequence
  Synthetic
gcuuaguuaauacaacau

SEQ ID NO: 624746 - RNA, 19 nt, Artificial Sequence
  Synthetic
ggcuuaguuaauacaacau

SEQ ID NO: 624747 - RNA, 20 nt, Artificial Sequence
  Synthetic
uggcuuaguuaauacaacau

SEQ ID NO: 624748 - RNA, 21 nt, Artificial Sequence
  Synthetic
uuggcuuaguuaauacaacau

SEQ ID NO: 624749 - RNA, 22 nt, Artificial Sequence
  Synthetic
uuuggcuuaguuaauacaacau

SEQ ID NO: 624750 - RNA, 23 nt, Artificial Sequence
  Synthetic
guuuggcuuaguuaauacaacau

SEQ ID NO: 624751 - RNA, 24 nt, Artificial Sequence
  Synthetic
uguuuggcuuaguuaauacaacau

SEQ ID NO: 624752 - RNA, 21 nt, Artificial Sequence
  Synthetic
cgagaccagccugaccaacau

SEQ ID NO: 624753 - RNA, 22 nt, Artificial Sequence
  Synthetic
ucgagaccagccugaccaacau

SEQ ID NO: 624754 - RNA, 23 nt, Artificial Sequence
  Synthetic
uucgagaccagccugaccaacau

SEQ ID NO: 624755 - RNA, 24 nt, Artificial Sequence
  Synthetic
guucgagaccagccugaccaacau

SEQ ID NO: 624756 - RNA, 18 nt, Artificial Sequence
  Synthetic
caccucucuccccaacau

SEQ ID NO: 624757 - RNA, 19 nt, Artificial Sequence
  Synthetic
ccaccucucuccccaacau

SEQ ID NO: 624758 - RNA, 20 nt, Artificial Sequence
  Synthetic
accaccucucuccccaacau

SEQ ID NO: 624759 - RNA, 21 nt, Artificial Sequence
  Synthetic
caccaccucucuccccaacau

SEQ ID NO: 624760 - RNA, 22 nt, Artificial Sequence
  Synthetic
gcaccaccucucuccccaacau

SEQ ID NO: 624761 - RNA, 23 nt, Artificial Sequence
  Synthetic
ugcaccaccucucuccccaacau

SEQ ID NO: 624762 - RNA, 24 nt, Artificial Sequence
  Synthetic
cugcaccaccucucuccccaacau

SEQ ID NO: 624763 - RNA, 18 nt, Artificial Sequence
  Synthetic
aggcccugccuccaacau

SEQ ID NO: 624764 - RNA, 19 nt, Artificial Sequence
  Synthetic
caggcccugccuccaacau

SEQ ID NO: 624765 - RNA, 20 nt, Artificial Sequence
  Synthetic
ccaggcccugccuccaacau

SEQ ID NO: 624766 - RNA, 21 nt, Artificial Sequence
  Synthetic
accaggcccugccuccaacau

SEQ ID NO: 624767 - RNA, 22 nt, Artificial Sequence
  Synthetic
uaccaggcccugccuccaacau

SEQ ID NO: 624768 - RNA, 23 nt, Artificial Sequence
  Synthetic
cuaccaggcccugccuccaacau

SEQ ID NO: 624769 - RNA, 24 nt, Artificial Sequence
  Synthetic
ccuaccaggcccugccuccaacau

SEQ ID NO: 624770 - RNA, 18 nt, Artificial Sequence
  Synthetic
cugugauccuuccaacau

SEQ ID NO: 624771 - RNA, 19 nt, Artificial Sequence
  Synthetic
ucugugauccuuccaacau

SEQ ID NO: 624772 - RNA, 20 nt, Artificial Sequence
  Synthetic
cucugugauccuuccaacau

SEQ ID NO: 624773 - RNA, 21 nt, Artificial Sequence
  Synthetic
gcucugugauccuuccaacau

SEQ ID NO: 624774 - RNA, 22 nt, Artificial Sequence
  Synthetic
ugcucugugauccuuccaacau

SEQ ID NO: 624775 - RNA, 23 nt, Artificial Sequence
  Synthetic
augcucugugauccuuccaacau

SEQ ID NO: 624776 - RNA, 24 nt, Artificial Sequence
  Synthetic
aaugcucugugauccuuccaacau

SEQ ID NO: 624777 - RNA, 18 nt, Artificial Sequence
  Synthetic
ccuccauguaagcaacau

SEQ ID NO: 624778 - RNA, 19 nt, Artificial Sequence
  Synthetic
uccuccauguaagcaacau

SEQ ID NO: 624779 - RNA, 20 nt, Artificial Sequence
  Synthetic
cuccuccauguaagcaacau

SEQ ID NO: 624780 - RNA, 21 nt, Artificial Sequence
  Synthetic
ucuccuccauguaagcaacau

SEQ ID NO: 624781 - RNA, 22 nt, Artificial Sequence
  Synthetic
cucuccuccauguaagcaacau

SEQ ID NO: 624782 - RNA, 23 nt, Artificial Sequence
  Synthetic
acucuccuccauguaagcaacau

SEQ ID NO: 624783 - RNA, 24 nt, Artificial Sequence
  Synthetic
aacucuccuccauguaagcaacau

SEQ ID NO: 624784 - RNA, 18 nt, Artificial Sequence
  Synthetic
uaaaaaauuaagcaacau

SEQ ID NO: 624785 - RNA, 19 nt, Artificial Sequence
  Synthetic
uuaaaaaauuaagcaacau

SEQ ID NO: 624786 - RNA, 20 nt, Artificial Sequence
  Synthetic
guuaaaaaauuaagcaacau

SEQ ID NO: 624787 - RNA, 21 nt, Artificial Sequence
  Synthetic
gguuaaaaaauuaagcaacau

SEQ ID NO: 624788 - RNA, 22 nt, Artificial Sequence
  Synthetic
agguuaaaaaauuaagcaacau

SEQ ID NO: 624789 - RNA, 23 nt, Artificial Sequence
  Synthetic
gagguuaaaaaauuaagcaacau

SEQ ID NO: 624790 - RNA, 24 nt, Artificial Sequence
  Synthetic
ggagguuaaaaaauuaagcaacau

SEQ ID NO: 624791 - RNA, 18 nt, Artificial Sequence
  Synthetic
caccaaauuuagcaacau

SEQ ID NO: 624792 - RNA, 19 nt, Artificial Sequence
  Synthetic
ccaccaaauuuagcaacau

SEQ ID NO: 624793 - RNA, 20 nt, Artificial Sequence
  Synthetic
cccaccaaauuuagcaacau

SEQ ID NO: 624794 - RNA, 21 nt, Artificial Sequence
  Synthetic
acccaccaaauuuagcaacau

SEQ ID NO: 624795 - RNA, 22 nt, Artificial Sequence
  Synthetic
gacccaccaaauuuagcaacau

SEQ ID NO: 624796 - RNA, 23 nt, Artificial Sequence
  Synthetic
ggacccaccaaauuuagcaacau

SEQ ID NO: 624797 - RNA, 24 nt, Artificial Sequence
  Synthetic
aggacccaccaaauuuagcaacau

SEQ ID NO: 624798 - RNA, 18 nt, Artificial Sequence
  Synthetic
uuuagaaaaaggcaacau

SEQ ID NO: 624799 - RNA, 19 nt, Artificial Sequence
  Synthetic
guuuagaaaaaggcaacau

SEQ ID NO: 624800 - RNA, 20 nt, Artificial Sequence
  Synthetic
gguuuagaaaaaggcaacau

SEQ ID NO: 624801 - RNA, 21 nt, Artificial Sequence
  Synthetic
ugguuuagaaaaaggcaacau

SEQ ID NO: 624802 - RNA, 22 nt, Artificial Sequence
  Synthetic
gugguuuagaaaaaggcaacau

SEQ ID NO: 624803 - RNA, 23 nt, Artificial Sequence
  Synthetic
ggugguuuagaaaaaggcaacau

SEQ ID NO: 624804 - RNA, 24 nt, Artificial Sequence
  Synthetic
gggugguuuagaaaaaggcaacau

SEQ ID NO: 624805 - RNA, 18 nt, Artificial Sequence
  Synthetic
gguuucccagggcaacau

SEQ ID NO: 624806 - RNA, 19 nt, Artificial Sequence
  Synthetic
agguuucccagggcaacau

SEQ ID NO: 624807 - RNA, 20 nt, Artificial Sequence
  Synthetic
gagguuucccagggcaacau

SEQ ID NO: 624808 - RNA, 21 nt, Artificial Sequence
  Synthetic
ugagguuucccagggcaacau

SEQ ID NO: 624809 - RNA, 22 nt, Artificial Sequence
  Synthetic
augagguuucccagggcaacau

SEQ ID NO: 624810 - RNA, 23 nt, Artificial Sequence
  Synthetic
caugagguuucccagggcaacau

SEQ ID NO: 624811 - RNA, 24 nt, Artificial Sequence
  Synthetic
ucaugagguuucccagggcaacau

SEQ ID NO: 624812 - RNA, 18 nt, Artificial Sequence
  Synthetic
uuacagauguggcaacau

SEQ ID NO: 624813 - RNA, 19 nt, Artificial Sequence
  Synthetic
cuuacagauguggcaacau

SEQ ID NO: 624814 - RNA, 20 nt, Artificial Sequence
  Synthetic
acuuacagauguggcaacau

SEQ ID NO: 624815 - RNA, 21 nt, Artificial Sequence
  Synthetic
aacuuacagauguggcaacau

SEQ ID NO: 624816 - RNA, 22 nt, Artificial Sequence
  Synthetic
uaacuuacagauguggcaacau

SEQ ID NO: 624817 - RNA, 23 nt, Artificial Sequence
  Synthetic
guaacuuacagauguggcaacau

SEQ ID NO: 624818 - RNA, 24 nt, Artificial Sequence
  Synthetic
uguaacuuacagauguggcaacau

SEQ ID NO: 624819 - RNA, 18 nt, Artificial Sequence
  Synthetic
uuaaguguaaaucaacau

SEQ ID NO: 624820 - RNA, 19 nt, Artificial Sequence
  Synthetic
uuuaaguguaaaucaacau

SEQ ID NO: 624821 - RNA, 20 nt, Artificial Sequence
  Synthetic
auuuaaguguaaaucaacau

SEQ ID NO: 624822 - RNA, 21 nt, Artificial Sequence
  Synthetic
aauuuaaguguaaaucaacau

SEQ ID NO: 624823 - RNA, 22 nt, Artificial Sequence
  Synthetic
aaauuuaaguguaaaucaacau

SEQ ID NO: 624824 - RNA, 23 nt, Artificial Sequence
  Synthetic
aaaauuuaaguguaaaucaacau

SEQ ID NO: 624825 - RNA, 24 nt, Artificial Sequence
  Synthetic
uaaaauuuaaguguaaaucaacau

SEQ ID NO: 624826 - RNA, 18 nt, Artificial Sequence
  Synthetic
cuccacaucacucaacau

SEQ ID NO: 624827 - RNA, 19 nt, Artificial Sequence
  Synthetic
gcuccacaucacucaacau

SEQ ID NO: 624828 - RNA, 20 nt, Artificial Sequence
  Synthetic
ugcuccacaucacucaacau

SEQ ID NO: 624829 - RNA, 21 nt, Artificial Sequence
  Synthetic
augcuccacaucacucaacau

SEQ ID NO: 624830 - RNA, 22 nt, Artificial Sequence
  Synthetic
aaugcuccacaucacucaacau

SEQ ID NO: 624831 - RNA, 23 nt, Artificial Sequence
  Synthetic
aaaugcuccacaucacucaacau

SEQ ID NO: 624832 - RNA, 24 nt, Artificial Sequence
  Synthetic
aaaaugcuccacaucacucaacau

SEQ ID NO: 624833 - RNA, 18 nt, Artificial Sequence
  Synthetic
cucuuccauugucaacau

SEQ ID NO: 624834 - RNA, 19 nt, Artificial Sequence
  Synthetic
ucucuuccauugucaacau

SEQ ID NO: 624835 - RNA, 20 nt, Artificial Sequence
  Synthetic
gucucuuccauugucaacau

SEQ ID NO: 624836 - RNA, 21 nt, Artificial Sequence
  Synthetic
agucucuuccauugucaacau

SEQ ID NO: 624837 - RNA, 22 nt, Artificial Sequence
  Synthetic
gagucucuuccauugucaacau

SEQ ID NO: 624838 - RNA, 23 nt, Artificial Sequence
  Synthetic
cgagucucuuccauugucaacau

SEQ ID NO: 624839 - RNA, 24 nt, Artificial Sequence
  Synthetic
ucgagucucuuccauugucaacau

SEQ ID NO: 624840 - RNA, 18 nt, Artificial Sequence
  Synthetic
cauuagaggcaagaacau

SEQ ID NO: 624841 - RNA, 19 nt, Artificial Sequence
  Synthetic
acauuagaggcaagaacau

SEQ ID NO: 624842 - RNA, 20 nt, Artificial Sequence
  Synthetic
uacauuagaggcaagaacau

SEQ ID NO: 624843 - RNA, 21 nt, Artificial Sequence
  Synthetic
guacauuagaggcaagaacau

SEQ ID NO: 624844 - RNA, 22 nt, Artificial Sequence
  Synthetic
gguacauuagaggcaagaacau

SEQ ID NO: 624845 - RNA, 23 nt, Artificial Sequence
  Synthetic
agguacauuagaggcaagaacau

SEQ ID NO: 624846 - RNA, 24 nt, Artificial Sequence
  Synthetic
aagguacauuagaggcaagaacau

SEQ ID NO: 624847 - RNA, 18 nt, Artificial Sequence
  Synthetic
uagaagugggaagaacau

SEQ ID NO: 624848 - RNA, 19 nt, Artificial Sequence
  Synthetic
guagaagugggaagaacau

SEQ ID NO: 624849 - RNA, 20 nt, Artificial Sequence
  Synthetic
aguagaagugggaagaacau

SEQ ID NO: 624850 - RNA, 21 nt, Artificial Sequence
  Synthetic
uaguagaagugggaagaacau

SEQ ID NO: 624851 - RNA, 22 nt, Artificial Sequence
  Synthetic
guaguagaagugggaagaacau

SEQ ID NO: 624852 - RNA, 23 nt, Artificial Sequence
  Synthetic
aguaguagaagugggaagaacau

SEQ ID NO: 624853 - RNA, 24 nt, Artificial Sequence
  Synthetic
gaguaguagaagugggaagaacau

SEQ ID NO: 624854 - RNA, 18 nt, Artificial Sequence
  Synthetic
acgaguagguuagaacau

SEQ ID NO: 624855 - RNA, 19 nt, Artificial Sequence
  Synthetic
gacgaguagguuagaacau

SEQ ID NO: 624856 - RNA, 20 nt, Artificial Sequence
  Synthetic
ugacgaguagguuagaacau

SEQ ID NO: 624857 - RNA, 21 nt, Artificial Sequence
  Synthetic
cugacgaguagguuagaacau

SEQ ID NO: 624858 - RNA, 22 nt, Artificial Sequence
  Synthetic
acugacgaguagguuagaacau

SEQ ID NO: 624859 - RNA, 23 nt, Artificial Sequence
  Synthetic
aacugacgaguagguuagaacau

SEQ ID NO: 624860 - RNA, 24 nt, Artificial Sequence
  Synthetic
caacugacgaguagguuagaacau

SEQ ID NO: 624861 - RNA, 18 nt, Artificial Sequence
  Synthetic
auaacugggagggaacau

SEQ ID NO: 624862 - RNA, 19 nt, Artificial Sequence
  Synthetic
cauaacugggagggaacau

SEQ ID NO: 624863 - RNA, 20 nt, Artificial Sequence
  Synthetic
ucauaacugggagggaacau

SEQ ID NO: 624864 - RNA, 21 nt, Artificial Sequence
  Synthetic
cucauaacugggagggaacau

SEQ ID NO: 624865 - RNA, 22 nt, Artificial Sequence
  Synthetic
gcucauaacugggagggaacau

SEQ ID NO: 624866 - RNA, 23 nt, Artificial Sequence
  Synthetic
ggcucauaacugggagggaacau

SEQ ID NO: 624867 - RNA, 24 nt, Artificial Sequence
  Synthetic
aggcucauaacugggagggaacau

SEQ ID NO: 624868 - RNA, 18 nt, Artificial Sequence
  Synthetic
aggacagaaauggaacau

SEQ ID NO: 624869 - RNA, 19 nt, Artificial Sequence
  Synthetic
uaggacagaaauggaacau

SEQ ID NO: 624870 - RNA, 20 nt, Artificial Sequence
  Synthetic
auaggacagaaauggaacau

SEQ ID NO: 624871 - RNA, 21 nt, Artificial Sequence
  Synthetic
gauaggacagaaauggaacau

SEQ ID NO: 624872 - RNA, 22 nt, Artificial Sequence
  Synthetic
ugauaggacagaaauggaacau

SEQ ID NO: 624873 - RNA, 23 nt, Artificial Sequence
  Synthetic
cugauaggacagaaauggaacau

SEQ ID NO: 624874 - RNA, 24 nt, Artificial Sequence
  Synthetic
ucugauaggacagaaauggaacau

SEQ ID NO: 624875 - RNA, 18 nt, Artificial Sequence
  Synthetic
caaaaucugaaugaacau

SEQ ID NO: 624876 - RNA, 19 nt, Artificial Sequence
  Synthetic
acaaaaucugaaugaacau

SEQ ID NO: 624877 - RNA, 20 nt, Artificial Sequence
  Synthetic
gacaaaaucugaaugaacau

SEQ ID NO: 624878 - RNA, 21 nt, Artificial Sequence
  Synthetic
ggacaaaaucugaaugaacau

SEQ ID NO: 624879 - RNA, 22 nt, Artificial Sequence
  Synthetic
aggacaaaaucugaaugaacau

SEQ ID NO: 624880 - RNA, 23 nt, Artificial Sequence
  Synthetic
uaggacaaaaucugaaugaacau

SEQ ID NO: 624881 - RNA, 24 nt, Artificial Sequence
  Synthetic
auaggacaaaaucugaaugaacau

SEQ ID NO: 624882 - RNA, 18 nt, Artificial Sequence
  Synthetic
cuaauagaguaugaacau

SEQ ID NO: 624883 - RNA, 19 nt, Artificial Sequence
  Synthetic
ucuaauagaguaugaacau

SEQ ID NO: 624884 - RNA, 20 nt, Artificial Sequence
  Synthetic
uucuaauagaguaugaacau

SEQ ID NO: 624885 - RNA, 21 nt, Artificial Sequence
  Synthetic
auucuaauagaguaugaacau

SEQ ID NO: 624886 - RNA, 22 nt, Artificial Sequence
  Synthetic
gauucuaauagaguaugaacau

SEQ ID NO: 624887 - RNA, 23 nt, Artificial Sequence
  Synthetic
agauucuaauagaguaugaacau

SEQ ID NO: 624888 - RNA, 24 nt, Artificial Sequence
  Synthetic
cagauucuaauagaguaugaacau

SEQ ID NO: 624889 - RNA, 18 nt, Artificial Sequence
  Synthetic
gaagguacuuaugaacau

SEQ ID NO: 624890 - RNA, 19 nt, Artificial Sequence
  Synthetic
ugaagguacuuaugaacau

SEQ ID NO: 624891 - RNA, 20 nt, Artificial Sequence
  Synthetic
augaagguacuuaugaacau

SEQ ID NO: 624892 - RNA, 21 nt, Artificial Sequence
  Synthetic
caugaagguacuuaugaacau

SEQ ID NO: 624893 - RNA, 22 nt, Artificial Sequence
  Synthetic
ccaugaagguacuuaugaacau

SEQ ID NO: 624894 - RNA, 23 nt, Artificial Sequence
  Synthetic
cccaugaagguacuuaugaacau

SEQ ID NO: 624895 - RNA, 24 nt, Artificial Sequence
  Synthetic
acccaugaagguacuuaugaacau

SEQ ID NO: 624896 - RNA, 18 nt, Artificial Sequence
  Synthetic
guucugaaacuugaacau

SEQ ID NO: 624897 - RNA, 19 nt, Artificial Sequence
  Synthetic
cguucugaaacuugaacau

SEQ ID NO: 624898 - RNA, 20 nt, Artificial Sequence
  Synthetic
gcguucugaaacuugaacau

SEQ ID NO: 624899 - RNA, 21 nt, Artificial Sequence
  Synthetic
agcguucugaaacuugaacau

SEQ ID NO: 624900 - RNA, 22 nt, Artificial Sequence
  Synthetic
uagcguucugaaacuugaacau

SEQ ID NO: 624901 - RNA, 23 nt, Artificial Sequence
  Synthetic
guagcguucugaaacuugaacau

SEQ ID NO: 624902 - RNA, 24 nt, Artificial Sequence
  Synthetic
aguagcguucugaaacuugaacau

SEQ ID NO: 624903 - RNA, 18 nt, Artificial Sequence
  Synthetic
cacgaaaagcuugaacau

SEQ ID NO: 624904 - RNA, 19 nt, Artificial Sequence
  Synthetic
acacgaaaagcuugaacau

SEQ ID NO: 624905 - RNA, 20 nt, Artificial Sequence
  Synthetic
cacacgaaaagcuugaacau

SEQ ID NO: 624906 - RNA, 21 nt, Artificial Sequence
  Synthetic
gcacacgaaaagcuugaacau

SEQ ID NO: 624907 - RNA, 22 nt, Artificial Sequence
  Synthetic
ggcacacgaaaagcuugaacau

SEQ ID NO: 624908 - RNA, 23 nt, Artificial Sequence
  Synthetic
aggcacacgaaaagcuugaacau

SEQ ID NO: 624909 - RNA, 24 nt, Artificial Sequence
  Synthetic
gaggcacacgaaaagcuugaacau

SEQ ID NO: 624910 - RNA, 18 nt, Artificial Sequence
  Synthetic
auacauauauuugaacau

SEQ ID NO: 624911 - RNA, 19 nt, Artificial Sequence
  Synthetic
uauacauauauuugaacau

SEQ ID NO: 624912 - RNA, 20 nt, Artificial Sequence
  Synthetic
auauacauauauuugaacau

SEQ ID NO: 624913 - RNA, 21 nt, Artificial Sequence
  Synthetic
uauauacauauauuugaacau

SEQ ID NO: 624914 - RNA, 22 nt, Artificial Sequence
  Synthetic
auauauacauauauuugaacau

SEQ ID NO: 624915 - RNA, 23 nt, Artificial Sequence
  Synthetic
uauauauacauauauuugaacau

SEQ ID NO: 624916 - RNA, 24 nt, Artificial Sequence
  Synthetic
auauauauacauauauuugaacau

SEQ ID NO: 624917 - RNA, 18 nt, Artificial Sequence
  Synthetic
cuguggaauuuugaacau

SEQ ID NO: 624918 - RNA, 19 nt, Artificial Sequence
  Synthetic
ucuguggaauuuugaacau

SEQ ID NO: 624919 - RNA, 20 nt, Artificial Sequence
  Synthetic
aucuguggaauuuugaacau

SEQ ID NO: 624920 - RNA, 21 nt, Artificial Sequence
  Synthetic
gaucuguggaauuuugaacau

SEQ ID NO: 624921 - RNA, 22 nt, Artificial Sequence
  Synthetic
agaucuguggaauuuugaacau

SEQ ID NO: 624922 - RNA, 23 nt, Artificial Sequence
  Synthetic
gagaucuguggaauuuugaacau

SEQ ID NO: 624923 - RNA, 24 nt, Artificial Sequence
  Synthetic
agagaucuguggaauuuugaacau

SEQ ID NO: 624924 - RNA, 18 nt, Artificial Sequence
  Synthetic
uccuaggugaaauaacau

SEQ ID NO: 624925 - RNA, 19 nt, Artificial Sequence
  Synthetic
auccuaggugaaauaacau

SEQ ID NO: 624926 - RNA, 20 nt, Artificial Sequence
  Synthetic
uauccuaggugaaauaacau

SEQ ID NO: 624927 - RNA, 21 nt, Artificial Sequence
  Synthetic
uuauccuaggugaaauaacau

SEQ ID NO: 624928 - RNA, 22 nt, Artificial Sequence
  Synthetic
auuauccuaggugaaauaacau

SEQ ID NO: 624929 - RNA, 23 nt, Artificial Sequence
  Synthetic
cauuauccuaggugaaauaacau

SEQ ID NO: 624930 - RNA, 24 nt, Artificial Sequence
  Synthetic
ccauuauccuaggugaaauaacau

SEQ ID NO: 624931 - RNA, 18 nt, Artificial Sequence
  Synthetic
gaccuguaucaauaacau

SEQ ID NO: 624932 - RNA, 19 nt, Artificial Sequence
  Synthetic
agaccuguaucaauaacau

SEQ ID NO: 624933 - RNA, 20 nt, Artificial Sequence
  Synthetic
gagaccuguaucaauaacau

SEQ ID NO: 624934 - RNA, 21 nt, Artificial Sequence
  Synthetic
agagaccuguaucaauaacau

SEQ ID NO: 624935 - RNA, 22 nt, Artificial Sequence
  Synthetic
cagagaccuguaucaauaacau

SEQ ID NO: 624936 - RNA, 23 nt, Artificial Sequence
  Synthetic
acagagaccuguaucaauaacau

SEQ ID NO: 624937 - RNA, 24 nt, Artificial Sequence
  Synthetic
aacagagaccuguaucaauaacau

SEQ ID NO: 624938 - RNA, 18 nt, Artificial Sequence
  Synthetic
agugcaauuuaauaacau

SEQ ID NO: 624939 - RNA, 19 nt, Artificial Sequence
  Synthetic
uagugcaauuuaauaacau

SEQ ID NO: 624940 - RNA, 20 nt, Artificial Sequence
  Synthetic
auagugcaauuuaauaacau

SEQ ID NO: 624941 - RNA, 21 nt, Artificial Sequence
  Synthetic
aauagugcaauuuaauaacau

SEQ ID NO: 624942 - RNA, 22 nt, Artificial Sequence
  Synthetic
uaauagugcaauuuaauaacau

SEQ ID NO: 624943 - RNA, 23 nt, Artificial Sequence
  Synthetic
auaauagugcaauuuaauaacau

SEQ ID NO: 624944 - RNA, 24 nt, Artificial Sequence
  Synthetic
aauaauagugcaauuuaauaacau

SEQ ID NO: 624945 - RNA, 18 nt, Artificial Sequence
  Synthetic
uggcauguacgauaacau

SEQ ID NO: 624946 - RNA, 19 nt, Artificial Sequence
  Synthetic
auggcauguacgauaacau

SEQ ID NO: 624947 - RNA, 20 nt, Artificial Sequence
  Synthetic
aauggcauguacgauaacau

SEQ ID NO: 624948 - RNA, 21 nt, Artificial Sequence
  Synthetic
gaauggcauguacgauaacau

SEQ ID NO: 624949 - RNA, 22 nt, Artificial Sequence
  Synthetic
ggaauggcauguacgauaacau

SEQ ID NO: 624950 - RNA, 23 nt, Artificial Sequence
  Synthetic
cggaauggcauguacgauaacau

SEQ ID NO: 624951 - RNA, 24 nt, Artificial Sequence
  Synthetic
acggaauggcauguacgauaacau

SEQ ID NO: 624952 - RNA, 18 nt, Artificial Sequence
  Synthetic
accaauaaaugauaacau

SEQ ID NO: 624953 - RNA, 19 nt, Artificial Sequence
  Synthetic
caccaauaaaugauaacau

SEQ ID NO: 624954 - RNA, 20 nt, Artificial Sequence
  Synthetic
acaccaauaaaugauaacau

SEQ ID NO: 624955 - RNA, 21 nt, Artificial Sequence
  Synthetic
gacaccaauaaaugauaacau

SEQ ID NO: 624956 - RNA, 22 nt, Artificial Sequence
  Synthetic
agacaccaauaaaugauaacau

SEQ ID NO: 624957 - RNA, 23 nt, Artificial Sequence
  Synthetic
cagacaccaauaaaugauaacau

SEQ ID NO: 624958 - RNA, 24 nt, Artificial Sequence
  Synthetic
acagacaccaauaaaugauaacau

SEQ ID NO: 624959 - RNA, 18 nt, Artificial Sequence
  Synthetic
cuuuccugaguauaacau

SEQ ID NO: 624960 - RNA, 19 nt, Artificial Sequence
  Synthetic
ucuuuccugaguauaacau

SEQ ID NO: 624961 - RNA, 20 nt, Artificial Sequence
  Synthetic
gucuuuccugaguauaacau

SEQ ID NO: 624962 - RNA, 21 nt, Artificial Sequence
  Synthetic
cgucuuuccugaguauaacau

SEQ ID NO: 624963 - RNA, 22 nt, Artificial Sequence
  Synthetic
gcgucuuuccugaguauaacau

SEQ ID NO: 624964 - RNA, 23 nt, Artificial Sequence
  Synthetic
agcgucuuuccugaguauaacau

SEQ ID NO: 624965 - RNA, 24 nt, Artificial Sequence
  Synthetic
gagcgucuuuccugaguauaacau

SEQ ID NO: 624966 - RNA, 18 nt, Artificial Sequence
  Synthetic
aguaccagguucuaacau

SEQ ID NO: 624967 - RNA, 19 nt, Artificial Sequence
  Synthetic
aaguaccagguucuaacau

SEQ ID NO: 624968 - RNA, 20 nt, Artificial Sequence
  Synthetic
aaaguaccagguucuaacau

SEQ ID NO: 624969 - RNA, 21 nt, Artificial Sequence
  Synthetic
aaaaguaccagguucuaacau

SEQ ID NO: 624970 - RNA, 22 nt, Artificial Sequence
  Synthetic
caaaaguaccagguucuaacau

SEQ ID NO: 624971 - RNA, 23 nt, Artificial Sequence
  Synthetic
ccaaaaguaccagguucuaacau

SEQ ID NO: 624972 - RNA, 24 nt, Artificial Sequence
  Synthetic
cccaaaaguaccagguucuaacau

SEQ ID NO: 624973 - RNA, 18 nt, Artificial Sequence
  Synthetic
auuagcaagggguaacau

SEQ ID NO: 624974 - RNA, 19 nt, Artificial Sequence
  Synthetic
gauuagcaagggguaacau

SEQ ID NO: 624975 - RNA, 20 nt, Artificial Sequence
  Synthetic
ugauuagcaagggguaacau

SEQ ID NO: 624976 - RNA, 21 nt, Artificial Sequence
  Synthetic
gugauuagcaagggguaacau

SEQ ID NO: 624977 - RNA, 22 nt, Artificial Sequence
  Synthetic
ggugauuagcaagggguaacau

SEQ ID NO: 624978 - RNA, 23 nt, Artificial Sequence
  Synthetic
aggugauuagcaagggguaacau

SEQ ID NO: 624979 - RNA, 24 nt, Artificial Sequence
  Synthetic
aaggugauuagcaagggguaacau

SEQ ID NO: 624980 - RNA, 18 nt, Artificial Sequence
  Synthetic
aaggucuggccuuaacau

SEQ ID NO: 624981 - RNA, 19 nt, Artificial Sequence
  Synthetic
caaggucuggccuuaacau

SEQ ID NO: 624982 - RNA, 20 nt, Artificial Sequence
  Synthetic
ccaaggucuggccuuaacau

SEQ ID NO: 624983 - RNA, 21 nt, Artificial Sequence
  Synthetic
gccaaggucuggccuuaacau

SEQ ID NO: 624984 - RNA, 22 nt, Artificial Sequence
  Synthetic
ugccaaggucuggccuuaacau

SEQ ID NO: 624985 - RNA, 23 nt, Artificial Sequence
  Synthetic
gugccaaggucuggccuuaacau

SEQ ID NO: 624986 - RNA, 24 nt, Artificial Sequence
  Synthetic
ugugccaaggucuggccuuaacau

SEQ ID NO: 624987 - RNA, 18 nt, Artificial Sequence
  Synthetic
acauuaaaagguuaacau

SEQ ID NO: 624988 - RNA, 19 nt, Artificial Sequence
  Synthetic
aacauuaaaagguuaacau

SEQ ID NO: 624989 - RNA, 20 nt, Artificial Sequence
  Synthetic
aaacauuaaaagguuaacau

SEQ ID NO: 624990 - RNA, 21 nt, Artificial Sequence
  Synthetic
gaaacauuaaaagguuaacau

SEQ ID NO: 624991 - RNA, 22 nt, Artificial Sequence
  Synthetic
agaaacauuaaaagguuaacau

SEQ ID NO: 624992 - RNA, 23 nt, Artificial Sequence
  Synthetic
uagaaacauuaaaagguuaacau

SEQ ID NO: 624993 - RNA, 24 nt, Artificial Sequence
  Synthetic
uuagaaacauuaaaagguuaacau

SEQ ID NO: 624994 - RNA, 18 nt, Artificial Sequence
  Synthetic
agagcuccugguuaacau

SEQ ID NO: 624995 - RNA, 19 nt, Artificial Sequence
  Synthetic
cagagcuccugguuaacau

SEQ ID NO: 624996 - RNA, 20 nt, Artificial Sequence
  Synthetic
gcagagcuccugguuaacau

SEQ ID NO: 624997 - RNA, 21 nt, Artificial Sequence
  Synthetic
agcagagcuccugguuaacau

SEQ ID NO: 624998 - RNA, 22 nt, Artificial Sequence
  Synthetic
aagcagagcuccugguuaacau

SEQ ID NO: 624999 - RNA, 23 nt, Artificial Sequence
  Synthetic
caagcagagcuccugguuaacau

SEQ ID NO: 625000 - RNA, 24 nt, Artificial Sequence
  Synthetic
gcaagcagagcuccugguuaacau

SEQ ID NO: 625001 - RNA, 18 nt, Artificial Sequence
  Synthetic
uaacaauuguuuuaacau

SEQ ID NO: 625002 - RNA, 19 nt, Artificial Sequence
  Synthetic
cuaacaauuguuuuaacau

SEQ ID NO: 625003 - RNA, 20 nt, Artificial Sequence
  Synthetic
acuaacaauuguuuuaacau

SEQ ID NO: 625004 - RNA, 21 nt, Artificial Sequence
  Synthetic
aacuaacaauuguuuuaacau

SEQ ID NO: 625005 - RNA, 22 nt, Artificial Sequence
  Synthetic
gaacuaacaauuguuuuaacau

SEQ ID NO: 625006 - RNA, 23 nt, Artificial Sequence
  Synthetic
agaacuaacaauuguuuuaacau

SEQ ID NO: 625007 - RNA, 24 nt, Artificial Sequence
  Synthetic
gagaacuaacaauuguuuuaacau

SEQ ID NO: 625008 - RNA, 18 nt, Artificial Sequence
  Synthetic
caaugcuauuaaacacau

SEQ ID NO: 625009 - RNA, 19 nt, Artificial Sequence
  Synthetic
ucaaugcuauuaaacacau

SEQ ID NO: 625010 - RNA, 20 nt, Artificial Sequence
  Synthetic
aucaaugcuauuaaacacau

SEQ ID NO: 625011 - RNA, 21 nt, Artificial Sequence
  Synthetic
gaucaaugcuauuaaacacau

SEQ ID NO: 625012 - RNA, 22 nt, Artificial Sequence
  Synthetic
ggaucaaugcuauuaaacacau

SEQ ID NO: 625013 - RNA, 23 nt, Artificial Sequence
  Synthetic
aggaucaaugcuauuaaacacau

SEQ ID NO: 625014 - RNA, 24 nt, Artificial Sequence
  Synthetic
uaggaucaaugcuauuaaacacau

SEQ ID NO: 625015 - RNA, 18 nt, Artificial Sequence
  Synthetic
uccuuugcaggaacacau

SEQ ID NO: 625016 - RNA, 19 nt, Artificial Sequence
  Synthetic
guccuuugcaggaacacau

SEQ ID NO: 625017 - RNA, 20 nt, Artificial Sequence
  Synthetic
uguccuuugcaggaacacau

SEQ ID NO: 625018 - RNA, 21 nt, Artificial Sequence
  Synthetic
auguccuuugcaggaacacau

SEQ ID NO: 625019 - RNA, 22 nt, Artificial Sequence
  Synthetic
cauguccuuugcaggaacacau

SEQ ID NO: 625020 - RNA, 23 nt, Artificial Sequence
  Synthetic
ucauguccuuugcaggaacacau

SEQ ID NO: 625021 - RNA, 24 nt, Artificial Sequence
  Synthetic
aucauguccuuugcaggaacacau

SEQ ID NO: 625022 - RNA, 18 nt, Artificial Sequence
  Synthetic
ggacaacucugaacacau

SEQ ID NO: 625023 - RNA, 19 nt, Artificial Sequence
  Synthetic
uggacaacucugaacacau

SEQ ID NO: 625024 - RNA, 20 nt, Artificial Sequence
  Synthetic
uuggacaacucugaacacau

SEQ ID NO: 625025 - RNA, 21 nt, Artificial Sequence
  Synthetic
guuggacaacucugaacacau

SEQ ID NO: 625026 - RNA, 22 nt, Artificial Sequence
  Synthetic
aguuggacaacucugaacacau

SEQ ID NO: 625027 - RNA, 23 nt, Artificial Sequence
  Synthetic
aaguuggacaacucugaacacau

SEQ ID NO: 625028 - RNA, 24 nt, Artificial Sequence
  Synthetic
aaaguuggacaacucugaacacau

SEQ ID NO: 625029 - RNA, 18 nt, Artificial Sequence
  Synthetic
ugguguaugugcacacau

SEQ ID NO: 625030 - RNA, 19 nt, Artificial Sequence
  Synthetic
gugguguaugugcacacau

SEQ ID NO: 625031 - RNA, 20 nt, Artificial Sequence
  Synthetic
ugugguguaugugcacacau

SEQ ID NO: 625032 - RNA, 21 nt, Artificial Sequence
  Synthetic
gugugguguaugugcacacau

SEQ ID NO: 625033 - RNA, 22 nt, Artificial Sequence
  Synthetic
ugugugguguaugugcacacau

SEQ ID NO: 625034 - RNA, 23 nt, Artificial Sequence
  Synthetic
gugugugguguaugugcacacau

SEQ ID NO: 625035 - RNA, 24 nt, Artificial Sequence
  Synthetic
ugugugugguguaugugcacacau

SEQ ID NO: 625036 - RNA, 18 nt, Artificial Sequence
  Synthetic
acuaaaugccugacacau

SEQ ID NO: 625037 - RNA, 19 nt, Artificial Sequence
  Synthetic
aacuaaaugccugacacau

SEQ ID NO: 625038 - RNA, 20 nt, Artificial Sequence
  Synthetic
aaacuaaaugccugacacau

SEQ ID NO: 625039 - RNA, 21 nt, Artificial Sequence
  Synthetic
caaacuaaaugccugacacau

SEQ ID NO: 625040 - RNA, 22 nt, Artificial Sequence
  Synthetic
acaaacuaaaugccugacacau

SEQ ID NO: 625041 - RNA, 23 nt, Artificial Sequence
  Synthetic
uacaaacuaaaugccugacacau

SEQ ID NO: 625042 - RNA, 24 nt, Artificial Sequence
  Synthetic
guacaaacuaaaugccugacacau

SEQ ID NO: 625043 - RNA, 18 nt, Artificial Sequence
  Synthetic
cugaugauuuugacacau

SEQ ID NO: 625044 - RNA, 19 nt, Artificial Sequence
  Synthetic
acugaugauuuugacacau

SEQ ID NO: 625045 - RNA, 20 nt, Artificial Sequence
  Synthetic
aacugaugauuuugacacau

SEQ ID NO: 625046 - RNA, 21 nt, Artificial Sequence
  Synthetic
caacugaugauuuugacacau

SEQ ID NO: 625047 - RNA, 22 nt, Artificial Sequence
  Synthetic
ucaacugaugauuuugacacau

SEQ ID NO: 625048 - RNA, 23 nt, Artificial Sequence
  Synthetic
cucaacugaugauuuugacacau

SEQ ID NO: 625049 - RNA, 24 nt, Artificial Sequence
  Synthetic
ccucaacugaugauuuugacacau

SEQ ID NO: 625050 - RNA, 18 nt, Artificial Sequence
  Synthetic
cgagauaagaauacacau

SEQ ID NO: 625051 - RNA, 19 nt, Artificial Sequence
  Synthetic
acgagauaagaauacacau

SEQ ID NO: 625052 - RNA, 20 nt, Artificial Sequence
  Synthetic
gacgagauaagaauacacau

SEQ ID NO: 625053 - RNA, 21 nt, Artificial Sequence
  Synthetic
agacgagauaagaauacacau

SEQ ID NO: 625054 - RNA, 22 nt, Artificial Sequence
  Synthetic
aagacgagauaagaauacacau

SEQ ID NO: 625055 - RNA, 23 nt, Artificial Sequence
  Synthetic
uaagacgagauaagaauacacau

SEQ ID NO: 625056 - RNA, 24 nt, Artificial Sequence
  Synthetic
auaagacgagauaagaauacacau

SEQ ID NO: 625057 - RNA, 18 nt, Artificial Sequence
  Synthetic
gugguuaauaauacacau

SEQ ID NO: 625058 - RNA, 19 nt, Artificial Sequence
  Synthetic
ugugguuaauaauacacau

SEQ ID NO: 625059 - RNA, 20 nt, Artificial Sequence
  Synthetic
uugugguuaauaauacacau

SEQ ID NO: 625060 - RNA, 21 nt, Artificial Sequence
  Synthetic
cuugugguuaauaauacacau

SEQ ID NO: 625061 - RNA, 22 nt, Artificial Sequence
  Synthetic
ucuugugguuaauaauacacau

SEQ ID NO: 625062 - RNA, 23 nt, Artificial Sequence
  Synthetic
cucuugugguuaauaauacacau

SEQ ID NO: 625063 - RNA, 24 nt, Artificial Sequence
  Synthetic
ucucuugugguuaauaauacacau

SEQ ID NO: 625064 - RNA, 18 nt, Artificial Sequence
  Synthetic
uaagggaaugauacacau

SEQ ID NO: 625065 - RNA, 19 nt, Artificial Sequence
  Synthetic
auaagggaaugauacacau

SEQ ID NO: 625066 - RNA, 20 nt, Artificial Sequence
  Synthetic
aauaagggaaugauacacau

SEQ ID NO: 625067 - RNA, 21 nt, Artificial Sequence
  Synthetic
gaauaagggaaugauacacau

SEQ ID NO: 625068 - RNA, 22 nt, Artificial Sequence
  Synthetic
ugaauaagggaaugauacacau

SEQ ID NO: 625069 - RNA, 23 nt, Artificial Sequence
  Synthetic
augaauaagggaaugauacacau

SEQ ID NO: 625070 - RNA, 24 nt, Artificial Sequence
  Synthetic
uaugaauaagggaaugauacacau

SEQ ID NO: 625071 - RNA, 18 nt, Artificial Sequence
  Synthetic
auacaaauaccuacacau

SEQ ID NO: 625072 - RNA, 19 nt, Artificial Sequence
  Synthetic
cauacaaauaccuacacau

SEQ ID NO: 625073 - RNA, 20 nt, Artificial Sequence
  Synthetic
acauacaaauaccuacacau

SEQ ID NO: 625074 - RNA, 21 nt, Artificial Sequence
  Synthetic
aacauacaaauaccuacacau

SEQ ID NO: 625075 - RNA, 22 nt, Artificial Sequence
  Synthetic
aaacauacaaauaccuacacau

SEQ ID NO: 625076 - RNA, 23 nt, Artificial Sequence
  Synthetic
gaaacauacaaauaccuacacau

SEQ ID NO: 625077 - RNA, 24 nt, Artificial Sequence
  Synthetic
ugaaacauacaaauaccuacacau

SEQ ID NO: 625078 - RNA, 18 nt, Artificial Sequence
  Synthetic
ggaagaaagccuacacau

SEQ ID NO: 625079 - RNA, 19 nt, Artificial Sequence
  Synthetic
gggaagaaagccuacacau

SEQ ID NO: 625080 - RNA, 20 nt, Artificial Sequence
  Synthetic
ugggaagaaagccuacacau

SEQ ID NO: 625081 - RNA, 21 nt, Artificial Sequence
  Synthetic
augggaagaaagccuacacau

SEQ ID NO: 625082 - RNA, 22 nt, Artificial Sequence
  Synthetic
aaugggaagaaagccuacacau

SEQ ID NO: 625083 - RNA, 23 nt, Artificial Sequence
  Synthetic
aaaugggaagaaagccuacacau

SEQ ID NO: 625084 - RNA, 24 nt, Artificial Sequence
  Synthetic
aaaaugggaagaaagccuacacau

SEQ ID NO: 625085 - RNA, 18 nt, Artificial Sequence
  Synthetic
auucauuuuuuuacacau

SEQ ID NO: 625086 - RNA, 19 nt, Artificial Sequence
  Synthetic
uauucauuuuuuuacacau

SEQ ID NO: 625087 - RNA, 20 nt, Artificial Sequence
  Synthetic
auauucauuuuuuuacacau

SEQ ID NO: 625088 - RNA, 21 nt, Artificial Sequence
  Synthetic
uauauucauuuuuuuacacau

SEQ ID NO: 625089 - RNA, 22 nt, Artificial Sequence
  Synthetic
cuauauucauuuuuuuacacau

SEQ ID NO: 625090 - RNA, 23 nt, Artificial Sequence
  Synthetic
acuauauucauuuuuuuacacau

SEQ ID NO: 625091 - RNA, 24 nt, Artificial Sequence
  Synthetic
uacuauauucauuuuuuuacacau

SEQ ID NO: 625092 - RNA, 18 nt, Artificial Sequence
  Synthetic
ucacagagacaaccacau

SEQ ID NO: 625093 - RNA, 19 nt, Artificial Sequence
  Synthetic
gucacagagacaaccacau

SEQ ID NO: 625094 - RNA, 20 nt, Artificial Sequence
  Synthetic
agucacagagacaaccacau

SEQ ID NO: 625095 - RNA, 21 nt, Artificial Sequence
  Synthetic
aagucacagagacaaccacau

SEQ ID NO: 625096 - RNA, 22 nt, Artificial Sequence
  Synthetic
uaagucacagagacaaccacau

SEQ ID NO: 625097 - RNA, 23 nt, Artificial Sequence
  Synthetic
uuaagucacagagacaaccacau

SEQ ID NO: 625098 - RNA, 24 nt, Artificial Sequence
  Synthetic
uuuaagucacagagacaaccacau

SEQ ID NO: 625099 - RNA, 18 nt, Artificial Sequence
  Synthetic
ugaaggaaaugaccacau

SEQ ID NO: 625100 - RNA, 19 nt, Artificial Sequence
  Synthetic
gugaaggaaaugaccacau

SEQ ID NO: 625101 - RNA, 20 nt, Artificial Sequence
  Synthetic
agugaaggaaaugaccacau

SEQ ID NO: 625102 - RNA, 21 nt, Artificial Sequence
  Synthetic
cagugaaggaaaugaccacau

SEQ ID NO: 625103 - RNA, 22 nt, Artificial Sequence
  Synthetic
ucagugaaggaaaugaccacau

SEQ ID NO: 625104 - RNA, 23 nt, Artificial Sequence
  Synthetic
aucagugaaggaaaugaccacau

SEQ ID NO: 625105 - RNA, 24 nt, Artificial Sequence
  Synthetic
aaucagugaaggaaaugaccacau

SEQ ID NO: 625106 - RNA, 18 nt, Artificial Sequence
  Synthetic
ucaggaugcauaccacau

SEQ ID NO: 625107 - RNA, 19 nt, Artificial Sequence
  Synthetic
uucaggaugcauaccacau

SEQ ID NO: 625108 - RNA, 20 nt, Artificial Sequence
  Synthetic
cuucaggaugcauaccacau

SEQ ID NO: 625109 - RNA, 21 nt, Artificial Sequence
  Synthetic
ucuucaggaugcauaccacau

SEQ ID NO: 625110 - RNA, 22 nt, Artificial Sequence
  Synthetic
uucuucaggaugcauaccacau

SEQ ID NO: 625111 - RNA, 23 nt, Artificial Sequence
  Synthetic
uuucuucaggaugcauaccacau

SEQ ID NO: 625112 - RNA, 24 nt, Artificial Sequence
  Synthetic
uuuucuucaggaugcauaccacau

SEQ ID NO: 625113 - RNA, 18 nt, Artificial Sequence
  Synthetic
aggcuguuguuaccacau

SEQ ID NO: 625114 - RNA, 19 nt, Artificial Sequence
  Synthetic
uaggcuguuguuaccacau

SEQ ID NO: 625115 - RNA, 20 nt, Artificial Sequence
  Synthetic
guaggcuguuguuaccacau

SEQ ID NO: 625116 - RNA, 21 nt, Artificial Sequence
  Synthetic
gguaggcuguuguuaccacau

SEQ ID NO: 625117 - RNA, 22 nt, Artificial Sequence
  Synthetic
ugguaggcuguuguuaccacau

SEQ ID NO: 625118 - RNA, 23 nt, Artificial Sequence
  Synthetic
augguaggcuguuguuaccacau

SEQ ID NO: 625119 - RNA, 24 nt, Artificial Sequence
  Synthetic
uaugguaggcuguuguuaccacau

SEQ ID NO: 625120 - RNA, 18 nt, Artificial Sequence
  Synthetic
auauuuaaagccccacau

SEQ ID NO: 625121 - RNA, 19 nt, Artificial Sequence
  Synthetic
cauauuuaaagccccacau

SEQ ID NO: 625122 - RNA, 20 nt, Artificial Sequence
  Synthetic
acauauuuaaagccccacau

SEQ ID NO: 625123 - RNA, 21 nt, Artificial Sequence
  Synthetic
aacauauuuaaagccccacau

SEQ ID NO: 625124 - RNA, 22 nt, Artificial Sequence
  Synthetic
caacauauuuaaagccccacau

SEQ ID NO: 625125 - RNA, 23 nt, Artificial Sequence
  Synthetic
ccaacauauuuaaagccccacau

SEQ ID NO: 625126 - RNA, 24 nt, Artificial Sequence
  Synthetic
accaacauauuuaaagccccacau

SEQ ID NO: 625127 - RNA, 18 nt, Artificial Sequence
  Synthetic
auaagcucagucccacau

SEQ ID NO: 625128 - RNA, 19 nt, Artificial Sequence
  Synthetic
gauaagcucagucccacau

SEQ ID NO: 625129 - RNA, 20 nt, Artificial Sequence
  Synthetic
agauaagcucagucccacau

SEQ ID NO: 625130 - RNA, 21 nt, Artificial Sequence
  Synthetic
aagauaagcucagucccacau

SEQ ID NO: 625131 - RNA, 22 nt, Artificial Sequence
  Synthetic
uaagauaagcucagucccacau

SEQ ID NO: 625132 - RNA, 23 nt, Artificial Sequence
  Synthetic
uuaagauaagcucagucccacau

SEQ ID NO: 625133 - RNA, 24 nt, Artificial Sequence
  Synthetic
auuaagauaagcucagucccacau

SEQ ID NO: 625134 - RNA, 18 nt, Artificial Sequence
  Synthetic
uuagaauauuugccacau

SEQ ID NO: 625135 - RNA, 19 nt, Artificial Sequence
  Synthetic
uuuagaauauuugccacau

SEQ ID NO: 625136 - RNA, 20 nt, Artificial Sequence
  Synthetic
cuuuagaauauuugccacau

SEQ ID NO: 625137 - RNA, 21 nt, Artificial Sequence
  Synthetic
gcuuuagaauauuugccacau

SEQ ID NO: 625138 - RNA, 22 nt, Artificial Sequence
  Synthetic
agcuuuagaauauuugccacau

SEQ ID NO: 625139 - RNA, 23 nt, Artificial Sequence
  Synthetic
uagcuuuagaauauuugccacau

SEQ ID NO: 625140 - RNA, 24 nt, Artificial Sequence
  Synthetic
uuagcuuuagaauauuugccacau

SEQ ID NO: 625141 - RNA, 18 nt, Artificial Sequence
  Synthetic
gaagucagggcuccacau

SEQ ID NO: 625142 - RNA, 19 nt, Artificial Sequence
  Synthetic
ugaagucagggcuccacau

SEQ ID NO: 625143 - RNA, 20 nt, Artificial Sequence
  Synthetic
gugaagucagggcuccacau

SEQ ID NO: 625144 - RNA, 21 nt, Artificial Sequence
  Synthetic
ugugaagucagggcuccacau

SEQ ID NO: 625145 - RNA, 22 nt, Artificial Sequence
  Synthetic
augugaagucagggcuccacau

SEQ ID NO: 625146 - RNA, 23 nt, Artificial Sequence
  Synthetic
caugugaagucagggcuccacau

SEQ ID NO: 625147 - RNA, 24 nt, Artificial Sequence
  Synthetic
ucaugugaagucagggcuccacau

SEQ ID NO: 625148 - RNA, 18 nt, Artificial Sequence
  Synthetic
aaauuacagaguccacau

SEQ ID NO: 625149 - RNA, 19 nt, Artificial Sequence
  Synthetic
uaaauuacagaguccacau

SEQ ID NO: 625150 - RNA, 20 nt, Artificial Sequence
  Synthetic
auaaauuacagaguccacau

SEQ ID NO: 625151 - RNA, 21 nt, Artificial Sequence
  Synthetic
aauaaauuacagaguccacau

SEQ ID NO: 625152 - RNA, 22 nt, Artificial Sequence
  Synthetic
uaauaaauuacagaguccacau

SEQ ID NO: 625153 - RNA, 23 nt, Artificial Sequence
  Synthetic
cuaauaaauuacagaguccacau

SEQ ID NO: 625154 - RNA, 24 nt, Artificial Sequence
  Synthetic
ucuaauaaauuacagaguccacau

SEQ ID NO: 625155 - RNA, 18 nt, Artificial Sequence
  Synthetic
ucucuuaauuuuccacau

SEQ ID NO: 625156 - RNA, 19 nt, Artificial Sequence
  Synthetic
aucucuuaauuuuccacau

SEQ ID NO: 625157 - RNA, 20 nt, Artificial Sequence
  Synthetic
gaucucuuaauuuuccacau

SEQ ID NO: 625158 - RNA, 21 nt, Artificial Sequence
  Synthetic
agaucucuuaauuuuccacau

SEQ ID NO: 625159 - RNA, 22 nt, Artificial Sequence
  Synthetic
uagaucucuuaauuuuccacau

SEQ ID NO: 625160 - RNA, 23 nt, Artificial Sequence
  Synthetic
cuagaucucuuaauuuuccacau

SEQ ID NO: 625161 - RNA, 24 nt, Artificial Sequence
  Synthetic
acuagaucucuuaauuuuccacau

SEQ ID NO: 625162 - RNA, 18 nt, Artificial Sequence
  Synthetic
aggacuccucaagcacau

SEQ ID NO: 625163 - RNA, 19 nt, Artificial Sequence
  Synthetic
caggacuccucaagcacau

SEQ ID NO: 625164 - RNA, 20 nt, Artificial Sequence
  Synthetic
ucaggacuccucaagcacau

SEQ ID NO: 625165 - RNA, 21 nt, Artificial Sequence
  Synthetic
gucaggacuccucaagcacau

SEQ ID NO: 625166 - RNA, 22 nt, Artificial Sequence
  Synthetic
agucaggacuccucaagcacau

SEQ ID NO: 625167 - RNA, 23 nt, Artificial Sequence
  Synthetic
aagucaggacuccucaagcacau

SEQ ID NO: 625168 - RNA, 24 nt, Artificial Sequence
  Synthetic
caagucaggacuccucaagcacau

SEQ ID NO: 625169 - RNA, 18 nt, Artificial Sequence
  Synthetic
aaaaccuuggcagcacau

SEQ ID NO: 625170 - RNA, 19 nt, Artificial Sequence
  Synthetic
gaaaaccuuggcagcacau

SEQ ID NO: 625171 - RNA, 20 nt, Artificial Sequence
  Synthetic
ugaaaaccuuggcagcacau

SEQ ID NO: 625172 - RNA, 21 nt, Artificial Sequence
  Synthetic
cugaaaaccuuggcagcacau

SEQ ID NO: 625173 - RNA, 22 nt, Artificial Sequence
  Synthetic
acugaaaaccuuggcagcacau

SEQ ID NO: 625174 - RNA, 23 nt, Artificial Sequence
  Synthetic
aacugaaaaccuuggcagcacau

SEQ ID NO: 625175 - RNA, 24 nt, Artificial Sequence
  Synthetic
aaacugaaaaccuuggcagcacau

SEQ ID NO: 625176 - RNA, 18 nt, Artificial Sequence
  Synthetic
guuuuuagcagagcacau

SEQ ID NO: 625177 - RNA, 19 nt, Artificial Sequence
  Synthetic
aguuuuuagcagagcacau

SEQ ID NO: 625178 - RNA, 20 nt, Artificial Sequence
  Synthetic
caguuuuuagcagagcacau

SEQ ID NO: 625179 - RNA, 21 nt, Artificial Sequence
  Synthetic
acaguuuuuagcagagcacau

SEQ ID NO: 625180 - RNA, 22 nt, Artificial Sequence
  Synthetic
aacaguuuuuagcagagcacau

SEQ ID NO: 625181 - RNA, 23 nt, Artificial Sequence
  Synthetic
gaacaguuuuuagcagagcacau

SEQ ID NO: 625182 - RNA, 24 nt, Artificial Sequence
  Synthetic
ugaacaguuuuuagcagagcacau

SEQ ID NO: 625183 - RNA, 18 nt, Artificial Sequence
  Synthetic
ggggaauuaaaugcacau

SEQ ID NO: 625184 - RNA, 19 nt, Artificial Sequence
  Synthetic
gggggaauuaaaugcacau

SEQ ID NO: 625185 - RNA, 20 nt, Artificial Sequence
  Synthetic
ggggggaauuaaaugcacau

SEQ ID NO: 625186 - RNA, 21 nt, Artificial Sequence
  Synthetic
aggggggaauuaaaugcacau

SEQ ID NO: 625187 - RNA, 22 nt, Artificial Sequence
  Synthetic
aaggggggaauuaaaugcacau

SEQ ID NO: 625188 - RNA, 23 nt, Artificial Sequence
  Synthetic
aaaggggggaauuaaaugcacau

SEQ ID NO: 625189 - RNA, 24 nt, Artificial Sequence
  Synthetic
caaaggggggaauuaaaugcacau

SEQ ID NO: 625190 - RNA, 18 nt, Artificial Sequence
  Synthetic
gaguuguguucugcacau

SEQ ID NO: 625191 - RNA, 19 nt, Artificial Sequence
  Synthetic
ugaguuguguucugcacau

SEQ ID NO: 625192 - RNA, 20 nt, Artificial Sequence
  Synthetic
augaguuguguucugcacau

SEQ ID NO: 625193 - RNA, 21 nt, Artificial Sequence
  Synthetic
aaugaguuguguucugcacau

SEQ ID NO: 625194 - RNA, 22 nt, Artificial Sequence
  Synthetic
aaaugaguuguguucugcacau

SEQ ID NO: 625195 - RNA, 23 nt, Artificial Sequence
  Synthetic
caaaugaguuguguucugcacau

SEQ ID NO: 625196 - RNA, 24 nt, Artificial Sequence
  Synthetic
acaaaugaguuguguucugcacau

SEQ ID NO: 625197 - RNA, 18 nt, Artificial Sequence
  Synthetic
aauucuaccaaaucacau

SEQ ID NO: 625198 - RNA, 19 nt, Artificial Sequence
  Synthetic
aaauucuaccaaaucacau

SEQ ID NO: 625199 - RNA, 20 nt, Artificial Sequence
  Synthetic
uaaauucuaccaaaucacau

SEQ ID NO: 625200 - RNA, 21 nt, Artificial Sequence
  Synthetic
uuaaauucuaccaaaucacau

SEQ ID NO: 625201 - RNA, 22 nt, Artificial Sequence
  Synthetic
auuaaauucuaccaaaucacau

SEQ ID NO: 625202 - RNA, 23 nt, Artificial Sequence
  Synthetic
aauuaaauucuaccaaaucacau

SEQ ID NO: 625203 - RNA, 24 nt, Artificial Sequence
  Synthetic
uaauuaaauucuaccaaaucacau

SEQ ID NO: 625204 - RNA, 18 nt, Artificial Sequence
  Synthetic
aauuauuuacaaucacau

SEQ ID NO: 625205 - RNA, 19 nt, Artificial Sequence
  Synthetic
uaauuauuuacaaucacau

SEQ ID NO: 625206 - RNA, 20 nt, Artificial Sequence
  Synthetic
uuaauuauuuacaaucacau

SEQ ID NO: 625207 - RNA, 21 nt, Artificial Sequence
  Synthetic
auuaauuauuuacaaucacau

SEQ ID NO: 625208 - RNA, 22 nt, Artificial Sequence
  Synthetic
aauuaauuauuuacaaucacau

SEQ ID NO: 625209 - RNA, 23 nt, Artificial Sequence
  Synthetic
uaauuaauuauuuacaaucacau

SEQ ID NO: 625210 - RNA, 24 nt, Artificial Sequence
  Synthetic
auaauuaauuauuuacaaucacau

SEQ ID NO: 625211 - RNA, 18 nt, Artificial Sequence
  Synthetic
auauggauagaaucacau

SEQ ID NO: 625212 - RNA, 19 nt, Artificial Sequence
  Synthetic
aauauggauagaaucacau

SEQ ID NO: 625213 - RNA, 20 nt, Artificial Sequence
  Synthetic
gaauauggauagaaucacau

SEQ ID NO: 625214 - RNA, 21 nt, Artificial Sequence
  Synthetic
ggaauauggauagaaucacau

SEQ ID NO: 625215 - RNA, 22 nt, Artificial Sequence
  Synthetic
gggaauauggauagaaucacau

SEQ ID NO: 625216 - RNA, 23 nt, Artificial Sequence
  Synthetic
ggggaauauggauagaaucacau

SEQ ID NO: 625217 - RNA, 24 nt, Artificial Sequence
  Synthetic
aggggaauauggauagaaucacau

SEQ ID NO: 625218 - RNA, 18 nt, Artificial Sequence
  Synthetic
ugauaaagguaaucacau

SEQ ID NO: 625219 - RNA, 19 nt, Artificial Sequence
  Synthetic
augauaaagguaaucacau

SEQ ID NO: 625220 - RNA, 20 nt, Artificial Sequence
  Synthetic
aaugauaaagguaaucacau

SEQ ID NO: 625221 - RNA, 21 nt, Artificial Sequence
  Synthetic
aaaugauaaagguaaucacau

SEQ ID NO: 625222 - RNA, 22 nt, Artificial Sequence
  Synthetic
aaaaugauaaagguaaucacau

SEQ ID NO: 625223 - RNA, 23 nt, Artificial Sequence
  Synthetic
aaaaaugauaaagguaaucacau

SEQ ID NO: 625224 - RNA, 24 nt, Artificial Sequence
  Synthetic
aaaaaaugauaaagguaaucacau

SEQ ID NO: 625225 - RNA, 18 nt, Artificial Sequence
  Synthetic
ccuuuuuugcuaucacau

SEQ ID NO: 625226 - RNA, 19 nt, Artificial Sequence
  Synthetic
accuuuuuugcuaucacau

SEQ ID NO: 625227 - RNA, 20 nt, Artificial Sequence
  Synthetic
caccuuuuuugcuaucacau

SEQ ID NO: 625228 - RNA, 21 nt, Artificial Sequence
  Synthetic
gcaccuuuuuugcuaucacau

SEQ ID NO: 625229 - RNA, 22 nt, Artificial Sequence
  Synthetic
agcaccuuuuuugcuaucacau

SEQ ID NO: 625230 - RNA, 23 nt, Artificial Sequence
  Synthetic
cagcaccuuuuuugcuaucacau

SEQ ID NO: 625231 - RNA, 24 nt, Artificial Sequence
  Synthetic
gcagcaccuuuuuugcuaucacau

SEQ ID NO: 625232 - RNA, 18 nt, Artificial Sequence
  Synthetic
cacucgcauuuaucacau

SEQ ID NO: 625233 - RNA, 19 nt, Artificial Sequence
  Synthetic
acacucgcauuuaucacau

SEQ ID NO: 625234 - RNA, 20 nt, Artificial Sequence
  Synthetic
aacacucgcauuuaucacau

SEQ ID NO: 625235 - RNA, 21 nt, Artificial Sequence
  Synthetic
caacacucgcauuuaucacau

SEQ ID NO: 625236 - RNA, 22 nt, Artificial Sequence
  Synthetic
ucaacacucgcauuuaucacau

SEQ ID NO: 625237 - RNA, 23 nt, Artificial Sequence
  Synthetic
uucaacacucgcauuuaucacau

SEQ ID NO: 625238 - RNA, 24 nt, Artificial Sequence
  Synthetic
auucaacacucgcauuuaucacau

SEQ ID NO: 625239 - RNA, 18 nt, Artificial Sequence
  Synthetic
cuuaucagaaacucacau

SEQ ID NO: 625240 - RNA, 19 nt, Artificial Sequence
  Synthetic
ucuuaucagaaacucacau

SEQ ID NO: 625241 - RNA, 20 nt, Artificial Sequence
  Synthetic
uucuuaucagaaacucacau

SEQ ID NO: 625242 - RNA, 21 nt, Artificial Sequence
  Synthetic
auucuuaucagaaacucacau

SEQ ID NO: 625243 - RNA, 22 nt, Artificial Sequence
  Synthetic
aauucuuaucagaaacucacau

SEQ ID NO: 625244 - RNA, 23 nt, Artificial Sequence
  Synthetic
aaauucuuaucagaaacucacau

SEQ ID NO: 625245 - RNA, 24 nt, Artificial Sequence
  Synthetic
caaauucuuaucagaaacucacau

SEQ ID NO: 625246 - RNA, 18 nt, Artificial Sequence
  Synthetic
acacauaaacacucacau

SEQ ID NO: 625247 - RNA, 19 nt, Artificial Sequence
  Synthetic
gacacauaaacacucacau

SEQ ID NO: 625248 - RNA, 20 nt, Artificial Sequence
  Synthetic
agacacauaaacacucacau

SEQ ID NO: 625249 - RNA, 21 nt, Artificial Sequence
  Synthetic
uagacacauaaacacucacau

SEQ ID NO: 625250 - RNA, 22 nt, Artificial Sequence
  Synthetic
guagacacauaaacacucacau

SEQ ID NO: 625251 - RNA, 23 nt, Artificial Sequence
  Synthetic
cguagacacauaaacacucacau

SEQ ID NO: 625252 - RNA, 24 nt, Artificial Sequence
  Synthetic
ucguagacacauaaacacucacau

SEQ ID NO: 625253 - RNA, 18 nt, Artificial Sequence
  Synthetic
auguguugucacucacau

SEQ ID NO: 625254 - RNA, 19 nt, Artificial Sequence
  Synthetic
uauguguugucacucacau

SEQ ID NO: 625255 - RNA, 20 nt, Artificial Sequence
  Synthetic
uuauguguugucacucacau

SEQ ID NO: 625256 - RNA, 21 nt, Artificial Sequence
  Synthetic
auuauguguugucacucacau

SEQ ID NO: 625257 - RNA, 22 nt, Artificial Sequence
  Synthetic
uauuauguguugucacucacau

SEQ ID NO: 625258 - RNA, 23 nt, Artificial Sequence
  Synthetic
auauuauguguugucacucacau

SEQ ID NO: 625259 - RNA, 24 nt, Artificial Sequence
  Synthetic
aauauuauguguugucacucacau

SEQ ID NO: 625260 - RNA, 18 nt, Artificial Sequence
  Synthetic
caugaagucugcucacau

SEQ ID NO: 625261 - RNA, 19 nt, Artificial Sequence
  Synthetic
acaugaagucugcucacau

SEQ ID NO: 625262 - RNA, 20 nt, Artificial Sequence
  Synthetic
uacaugaagucugcucacau

SEQ ID NO: 625263 - RNA, 21 nt, Artificial Sequence
  Synthetic
uuacaugaagucugcucacau

SEQ ID NO: 625264 - RNA, 22 nt, Artificial Sequence
  Synthetic
auuacaugaagucugcucacau

SEQ ID NO: 625265 - RNA, 23 nt, Artificial Sequence
  Synthetic
aauuacaugaagucugcucacau

SEQ ID NO: 625266 - RNA, 24 nt, Artificial Sequence
  Synthetic
uaauuacaugaagucugcucacau

SEQ ID NO: 625267 - RNA, 18 nt, Artificial Sequence
  Synthetic
uucaucgaccucucacau

SEQ ID NO: 625268 - RNA, 19 nt, Artificial Sequence
  Synthetic
cuucaucgaccucucacau

SEQ ID NO: 625269 - RNA, 20 nt, Artificial Sequence
  Synthetic
ucuucaucgaccucucacau

SEQ ID NO: 625270 - RNA, 21 nt, Artificial Sequence
  Synthetic
aucuucaucgaccucucacau

SEQ ID NO: 625271 - RNA, 22 nt, Artificial Sequence
  Synthetic
aaucuucaucgaccucucacau

SEQ ID NO: 625272 - RNA, 23 nt, Artificial Sequence
  Synthetic
uaaucuucaucgaccucucacau

SEQ ID NO: 625273 - RNA, 24 nt, Artificial Sequence
  Synthetic
cuaaucuucaucgaccucucacau

SEQ ID NO: 625274 - RNA, 18 nt, Artificial Sequence
  Synthetic
ucuaguugcuauucacau

SEQ ID NO: 625275 - RNA, 19 nt, Artificial Sequence
  Synthetic
aucuaguugcuauucacau

SEQ ID NO: 625276 - RNA, 20 nt, Artificial Sequence
  Synthetic
uaucuaguugcuauucacau

SEQ ID NO: 625277 - RNA, 21 nt, Artificial Sequence
  Synthetic
guaucuaguugcuauucacau

SEQ ID NO: 625278 - RNA, 22 nt, Artificial Sequence
  Synthetic
aguaucuaguugcuauucacau

SEQ ID NO: 625279 - RNA, 23 nt, Artificial Sequence
  Synthetic
aaguaucuaguugcuauucacau

SEQ ID NO: 625280 - RNA, 24 nt, Artificial Sequence
  Synthetic
caaguaucuaguugcuauucacau

SEQ ID NO: 625281 - RNA, 18 nt, Artificial Sequence
  Synthetic
ugcauaaugacuucacau

SEQ ID NO: 625282 - RNA, 19 nt, Artificial Sequence
  Synthetic
uugcauaaugacuucacau

SEQ ID NO: 625283 - RNA, 20 nt, Artificial Sequence
  Synthetic
uuugcauaaugacuucacau

SEQ ID NO: 625284 - RNA, 21 nt, Artificial Sequence
  Synthetic
auuugcauaaugacuucacau

SEQ ID NO: 625285 - RNA, 22 nt, Artificial Sequence
  Synthetic
gauuugcauaaugacuucacau

SEQ ID NO: 625286 - RNA, 23 nt, Artificial Sequence
  Synthetic
agauuugcauaaugacuucacau

SEQ ID NO: 625287 - RNA, 24 nt, Artificial Sequence
  Synthetic
aagauuugcauaaugacuucacau

SEQ ID NO: 625288 - RNA, 18 nt, Artificial Sequence
  Synthetic
aucuuuuaauguucacau

SEQ ID NO: 625289 - RNA, 19 nt, Artificial Sequence
  Synthetic
caucuuuuaauguucacau

SEQ ID NO: 625290 - RNA, 20 nt, Artificial Sequence
  Synthetic
ucaucuuuuaauguucacau

SEQ ID NO: 625291 - RNA, 21 nt, Artificial Sequence
  Synthetic
gucaucuuuuaauguucacau

SEQ ID NO: 625292 - RNA, 22 nt, Artificial Sequence
  Synthetic
agucaucuuuuaauguucacau

SEQ ID NO: 625293 - RNA, 23 nt, Artificial Sequence
  Synthetic
aagucaucuuuuaauguucacau

SEQ ID NO: 625294 - RNA, 24 nt, Artificial Sequence
  Synthetic
uaagucaucuuuuaauguucacau

SEQ ID NO: 625295 - RNA, 18 nt, Artificial Sequence
  Synthetic
ucucuggacauuucacau

SEQ ID NO: 625296 - RNA, 19 nt, Artificial Sequence
  Synthetic
cucucuggacauuucacau

SEQ ID NO: 625297 - RNA, 20 nt, Artificial Sequence
  Synthetic
ucucucuggacauuucacau

SEQ ID NO: 625298 - RNA, 21 nt, Artificial Sequence
  Synthetic
uucucucuggacauuucacau

SEQ ID NO: 625299 - RNA, 22 nt, Artificial Sequence
  Synthetic
auucucucuggacauuucacau

SEQ ID NO: 625300 - RNA, 23 nt, Artificial Sequence
  Synthetic
cauucucucuggacauuucacau

SEQ ID NO: 625301 - RNA, 24 nt, Artificial Sequence
  Synthetic
ccauucucucuggacauuucacau

SEQ ID NO: 625302 - RNA, 18 nt, Artificial Sequence
  Synthetic
ucaaguuucaaaagacau

SEQ ID NO: 625303 - RNA, 19 nt, Artificial Sequence
  Synthetic
gucaaguuucaaaagacau

SEQ ID NO: 625304 - RNA, 20 nt, Artificial Sequence
  Synthetic
ggucaaguuucaaaagacau

SEQ ID NO: 625305 - RNA, 21 nt, Artificial Sequence
  Synthetic
aggucaaguuucaaaagacau

SEQ ID NO: 625306 - RNA, 22 nt, Artificial Sequence
  Synthetic
gaggucaaguuucaaaagacau

SEQ ID NO: 625307 - RNA, 23 nt, Artificial Sequence
  Synthetic
agaggucaaguuucaaaagacau

SEQ ID NO: 625308 - RNA, 24 nt, Artificial Sequence
  Synthetic
aagaggucaaguuucaaaagacau

SEQ ID NO: 625309 - RNA, 18 nt, Artificial Sequence
  Synthetic
augaggauacaaagacau

SEQ ID NO: 625310 - RNA, 19 nt, Artificial Sequence
  Synthetic
uaugaggauacaaagacau

SEQ ID NO: 625311 - RNA, 20 nt, Artificial Sequence
  Synthetic
cuaugaggauacaaagacau

SEQ ID NO: 625312 - RNA, 21 nt, Artificial Sequence
  Synthetic
gcuaugaggauacaaagacau

SEQ ID NO: 625313 - RNA, 22 nt, Artificial Sequence
  Synthetic
agcuaugaggauacaaagacau

SEQ ID NO: 625314 - RNA, 23 nt, Artificial Sequence
  Synthetic
aagcuaugaggauacaaagacau

SEQ ID NO: 625315 - RNA, 24 nt, Artificial Sequence
  Synthetic
uaagcuaugaggauacaaagacau

SEQ ID NO: 625316 - RNA, 18 nt, Artificial Sequence
  Synthetic
uccguauguuaaagacau

SEQ ID NO: 625317 - RNA, 19 nt, Artificial Sequence
  Synthetic
auccguauguuaaagacau

SEQ ID NO: 625318 - RNA, 20 nt, Artificial Sequence
  Synthetic
aauccguauguuaaagacau

SEQ ID NO: 625319 - RNA, 21 nt, Artificial Sequence
  Synthetic
aaauccguauguuaaagacau

SEQ ID NO: 625320 - RNA, 22 nt, Artificial Sequence
  Synthetic
gaaauccguauguuaaagacau

SEQ ID NO: 625321 - RNA, 23 nt, Artificial Sequence
  Synthetic
ugaaauccguauguuaaagacau

SEQ ID NO: 625322 - RNA, 24 nt, Artificial Sequence
  Synthetic
uugaaauccguauguuaaagacau

SEQ ID NO: 625323 - RNA, 18 nt, Artificial Sequence
  Synthetic
auucuauuaugaagacau

SEQ ID NO: 625324 - RNA, 19 nt, Artificial Sequence
  Synthetic
uauucuauuaugaagacau

SEQ ID NO: 625325 - RNA, 20 nt, Artificial Sequence
  Synthetic
auauucuauuaugaagacau

SEQ ID NO: 625326 - RNA, 21 nt, Artificial Sequence
  Synthetic
gauauucuauuaugaagacau

SEQ ID NO: 625327 - RNA, 22 nt, Artificial Sequence
  Synthetic
agauauucuauuaugaagacau

SEQ ID NO: 625328 - RNA, 23 nt, Artificial Sequence
  Synthetic
cagauauucuauuaugaagacau

SEQ ID NO: 625329 - RNA, 24 nt, Artificial Sequence
  Synthetic
acagauauucuauuaugaagacau

SEQ ID NO: 625330 - RNA, 18 nt, Artificial Sequence
  Synthetic
gaaaugugggacagacau

SEQ ID NO: 625331 - RNA, 19 nt, Artificial Sequence
  Synthetic
agaaaugugggacagacau

SEQ ID NO: 625332 - RNA, 20 nt, Artificial Sequence
  Synthetic
aagaaaugugggacagacau

SEQ ID NO: 625333 - RNA, 21 nt, Artificial Sequence
  Synthetic
uaagaaaugugggacagacau

SEQ ID NO: 625334 - RNA, 22 nt, Artificial Sequence
  Synthetic
guaagaaaugugggacagacau

SEQ ID NO: 625335 - RNA, 23 nt, Artificial Sequence
  Synthetic
aguaagaaaugugggacagacau

SEQ ID NO: 625336 - RNA, 24 nt, Artificial Sequence
  Synthetic
caguaagaaaugugggacagacau

SEQ ID NO: 625337 - RNA, 18 nt, Artificial Sequence
  Synthetic
caaaagagaaccagacau

SEQ ID NO: 625338 - RNA, 19 nt, Artificial Sequence
  Synthetic
ucaaaagagaaccagacau

SEQ ID NO: 625339 - RNA, 20 nt, Artificial Sequence
  Synthetic
aucaaaagagaaccagacau

SEQ ID NO: 625340 - RNA, 21 nt, Artificial Sequence
  Synthetic
aaucaaaagagaaccagacau

SEQ ID NO: 625341 - RNA, 22 nt, Artificial Sequence
  Synthetic
gaaucaaaagagaaccagacau

SEQ ID NO: 625342 - RNA, 23 nt, Artificial Sequence
  Synthetic
ugaaucaaaagagaaccagacau

SEQ ID NO: 625343 - RNA, 24 nt, Artificial Sequence
  Synthetic
uugaaucaaaagagaaccagacau

SEQ ID NO: 625344 - RNA, 18 nt, Artificial Sequence
  Synthetic
acucaaaaagagagacau

SEQ ID NO: 625345 - RNA, 19 nt, Artificial Sequence
  Synthetic
cacucaaaaagagagacau

SEQ ID NO: 625346 - RNA, 20 nt, Artificial Sequence
  Synthetic
acacucaaaaagagagacau

SEQ ID NO: 625347 - RNA, 21 nt, Artificial Sequence
  Synthetic
gacacucaaaaagagagacau

SEQ ID NO: 625348 - RNA, 22 nt, Artificial Sequence
  Synthetic
ugacacucaaaaagagagacau

SEQ ID NO: 625349 - RNA, 23 nt, Artificial Sequence
  Synthetic
augacacucaaaaagagagacau

SEQ ID NO: 625350 - RNA, 24 nt, Artificial Sequence
  Synthetic
aaugacacucaaaaagagagacau

SEQ ID NO: 625351 - RNA, 18 nt, Artificial Sequence
  Synthetic
ccauggagaaggagacau

SEQ ID NO: 625352 - RNA, 19 nt, Artificial Sequence
  Synthetic
uccauggagaaggagacau

SEQ ID NO: 625353 - RNA, 20 nt, Artificial Sequence
  Synthetic
uuccauggagaaggagacau

SEQ ID NO: 625354 - RNA, 21 nt, Artificial Sequence
  Synthetic
guuccauggagaaggagacau

SEQ ID NO: 625355 - RNA, 22 nt, Artificial Sequence
  Synthetic
gguuccauggagaaggagacau

SEQ ID NO: 625356 - RNA, 23 nt, Artificial Sequence
  Synthetic
agguuccauggagaaggagacau

SEQ ID NO: 625357 - RNA, 24 nt, Artificial Sequence
  Synthetic
aagguuccauggagaaggagacau

SEQ ID NO: 625358 - RNA, 18 nt, Artificial Sequence
  Synthetic
aauucugugcauagacau

SEQ ID NO: 625359 - RNA, 19 nt, Artificial Sequence
  Synthetic
aaauucugugcauagacau

SEQ ID NO: 625360 - RNA, 20 nt, Artificial Sequence
  Synthetic
aaaauucugugcauagacau

SEQ ID NO: 625361 - RNA, 21 nt, Artificial Sequence
  Synthetic
aaaaauucugugcauagacau

SEQ ID NO: 625362 - RNA, 22 nt, Artificial Sequence
  Synthetic
uaaaaauucugugcauagacau

SEQ ID NO: 625363 - RNA, 23 nt, Artificial Sequence
  Synthetic
cuaaaaauucugugcauagacau

SEQ ID NO: 625364 - RNA, 24 nt, Artificial Sequence
  Synthetic
ucuaaaaauucugugcauagacau

SEQ ID NO: 625365 - RNA, 18 nt, Artificial Sequence
  Synthetic
ucuccucgaacuagacau

SEQ ID NO: 625366 - RNA, 19 nt, Artificial Sequence
  Synthetic
gucuccucgaacuagacau

SEQ ID NO: 625367 - RNA, 20 nt, Artificial Sequence
  Synthetic
cgucuccucgaacuagacau

SEQ ID NO: 625368 - RNA, 21 nt, Artificial Sequence
  Synthetic
acgucuccucgaacuagacau

SEQ ID NO: 625369 - RNA, 22 nt, Artificial Sequence
  Synthetic
aacgucuccucgaacuagacau

SEQ ID NO: 625370 - RNA, 23 nt, Artificial Sequence
  Synthetic
aaacgucuccucgaacuagacau

SEQ ID NO: 625371 - RNA, 24 nt, Artificial Sequence
  Synthetic
uaaacgucuccucgaacuagacau

SEQ ID NO: 625372 - RNA, 18 nt, Artificial Sequence
  Synthetic
uccuaguacaguagacau

SEQ ID NO: 625373 - RNA, 19 nt, Artificial Sequence
  Synthetic
uuccuaguacaguagacau

SEQ ID NO: 625374 - RNA, 20 nt, Artificial Sequence
  Synthetic
uuuccuaguacaguagacau

SEQ ID NO: 625375 - RNA, 21 nt, Artificial Sequence
  Synthetic
uuuuccuaguacaguagacau

SEQ ID NO: 625376 - RNA, 22 nt, Artificial Sequence
  Synthetic
uuuuuccuaguacaguagacau

SEQ ID NO: 625377 - RNA, 23 nt, Artificial Sequence
  Synthetic
guuuuuccuaguacaguagacau

SEQ ID NO: 625378 - RNA, 24 nt, Artificial Sequence
  Synthetic
aguuuuuccuaguacaguagacau

SEQ ID NO: 625379 - RNA, 18 nt, Artificial Sequence
  Synthetic
gaugauuuacguagacau

SEQ ID NO: 625380 - RNA, 19 nt, Artificial Sequence
  Synthetic
ggaugauuuacguagacau

SEQ ID NO: 625381 - RNA, 20 nt, Artificial Sequence
  Synthetic
uggaugauuuacguagacau

SEQ ID NO: 625382 - RNA, 21 nt, Artificial Sequence
  Synthetic
uuggaugauuuacguagacau

SEQ ID NO: 625383 - RNA, 22 nt, Artificial Sequence
  Synthetic
auuggaugauuuacguagacau

SEQ ID NO: 625384 - RNA, 23 nt, Artificial Sequence
  Synthetic
aauuggaugauuuacguagacau

SEQ ID NO: 625385 - RNA, 24 nt, Artificial Sequence
  Synthetic
aaauuggaugauuuacguagacau

SEQ ID NO: 625386 - RNA, 18 nt, Artificial Sequence
  Synthetic
guacuuuuccuuagacau

SEQ ID NO: 625387 - RNA, 19 nt, Artificial Sequence
  Synthetic
aguacuuuuccuuagacau

SEQ ID NO: 625388 - RNA, 20 nt, Artificial Sequence
  Synthetic
uaguacuuuuccuuagacau

SEQ ID NO: 625389 - RNA, 21 nt, Artificial Sequence
  Synthetic
auaguacuuuuccuuagacau

SEQ ID NO: 625390 - RNA, 22 nt, Artificial Sequence
  Synthetic
uauaguacuuuuccuuagacau

SEQ ID NO: 625391 - RNA, 23 nt, Artificial Sequence
  Synthetic
auauaguacuuuuccuuagacau

SEQ ID NO: 625392 - RNA, 24 nt, Artificial Sequence
  Synthetic
aauauaguacuuuuccuuagacau

SEQ ID NO: 625393 - RNA, 18 nt, Artificial Sequence
  Synthetic
uguuaguaaugucgacau

SEQ ID NO: 625394 - RNA, 19 nt, Artificial Sequence
  Synthetic
cuguuaguaaugucgacau

SEQ ID NO: 625395 - RNA, 20 nt, Artificial Sequence
  Synthetic
gcuguuaguaaugucgacau

SEQ ID NO: 625396 - RNA, 21 nt, Artificial Sequence
  Synthetic
ugcuguuaguaaugucgacau

SEQ ID NO: 625397 - RNA, 22 nt, Artificial Sequence
  Synthetic
gugcuguuaguaaugucgacau

SEQ ID NO: 625398 - RNA, 23 nt, Artificial Sequence
  Synthetic
ggugcuguuaguaaugucgacau

SEQ ID NO: 625399 - RNA, 24 nt, Artificial Sequence
  Synthetic
uggugcuguuaguaaugucgacau

SEQ ID NO: 625400 - RNA, 18 nt, Artificial Sequence
  Synthetic
uuaucauucacaggacau

SEQ ID NO: 625401 - RNA, 19 nt, Artificial Sequence
  Synthetic
uuuaucauucacaggacau

SEQ ID NO: 625402 - RNA, 20 nt, Artificial Sequence
  Synthetic
uuuuaucauucacaggacau

SEQ ID NO: 625403 - RNA, 21 nt, Artificial Sequence
  Synthetic
auuuuaucauucacaggacau

SEQ ID NO: 625404 - RNA, 22 nt, Artificial Sequence
  Synthetic
aauuuuaucauucacaggacau

SEQ ID NO: 625405 - RNA, 23 nt, Artificial Sequence
  Synthetic
aaauuuuaucauucacaggacau

SEQ ID NO: 625406 - RNA, 24 nt, Artificial Sequence
  Synthetic
aaaauuuuaucauucacaggacau

SEQ ID NO: 625407 - RNA, 18 nt, Artificial Sequence
  Synthetic
cagcaauguggaggacau

SEQ ID NO: 625408 - RNA, 19 nt, Artificial Sequence
  Synthetic
gcagcaauguggaggacau

SEQ ID NO: 625409 - RNA, 20 nt, Artificial Sequence
  Synthetic
ggcagcaauguggaggacau

SEQ ID NO: 625410 - RNA, 21 nt, Artificial Sequence
  Synthetic
uggcagcaauguggaggacau

SEQ ID NO: 625411 - RNA, 22 nt, Artificial Sequence
  Synthetic
cuggcagcaauguggaggacau

SEQ ID NO: 625412 - RNA, 23 nt, Artificial Sequence
  Synthetic
acuggcagcaauguggaggacau

SEQ ID NO: 625413 - RNA, 24 nt, Artificial Sequence
  Synthetic
uacuggcagcaauguggaggacau

SEQ ID NO: 625414 - RNA, 18 nt, Artificial Sequence
  Synthetic
caacugucaaagggacau

SEQ ID NO: 625415 - RNA, 19 nt, Artificial Sequence
  Synthetic
ucaacugucaaagggacau

SEQ ID NO: 625416 - RNA, 20 nt, Artificial Sequence
  Synthetic
cucaacugucaaagggacau

SEQ ID NO: 625417 - RNA, 21 nt, Artificial Sequence
  Synthetic
gcucaacugucaaagggacau

SEQ ID NO: 625418 - RNA, 22 nt, Artificial Sequence
  Synthetic
agcucaacugucaaagggacau

SEQ ID NO: 625419 - RNA, 23 nt, Artificial Sequence
  Synthetic
gagcucaacugucaaagggacau

SEQ ID NO: 625420 - RNA, 24 nt, Artificial Sequence
  Synthetic
ugagcucaacugucaaagggacau

SEQ ID NO: 625421 - RNA, 18 nt, Artificial Sequence
  Synthetic
uugcuccccaagggacau

SEQ ID NO: 625422 - RNA, 19 nt, Artificial Sequence
  Synthetic
uuugcuccccaagggacau

SEQ ID NO: 625423 - RNA, 20 nt, Artificial Sequence
  Synthetic
uuuugcuccccaagggacau

SEQ ID NO: 625424 - RNA, 21 nt, Artificial Sequence
  Synthetic
auuuugcuccccaagggacau

SEQ ID NO: 625425 - RNA, 22 nt, Artificial Sequence
  Synthetic
gauuuugcuccccaagggacau

SEQ ID NO: 625426 - RNA, 23 nt, Artificial Sequence
  Synthetic
ugauuuugcuccccaagggacau

SEQ ID NO: 625427 - RNA, 24 nt, Artificial Sequence
  Synthetic
augauuuugcuccccaagggacau

SEQ ID NO: 625428 - RNA, 18 nt, Artificial Sequence
  Synthetic
gggaaaaugaagggacau

SEQ ID NO: 625429 - RNA, 19 nt, Artificial Sequence
  Synthetic
ugggaaaaugaagggacau

SEQ ID NO: 625430 - RNA, 20 nt, Artificial Sequence
  Synthetic
cugggaaaaugaagggacau

SEQ ID NO: 625431 - RNA, 21 nt, Artificial Sequence
  Synthetic
ccugggaaaaugaagggacau

SEQ ID NO: 625432 - RNA, 22 nt, Artificial Sequence
  Synthetic
uccugggaaaaugaagggacau

SEQ ID NO: 625433 - RNA, 23 nt, Artificial Sequence
  Synthetic
guccugggaaaaugaagggacau

SEQ ID NO: 625434 - RNA, 24 nt, Artificial Sequence
  Synthetic
aguccugggaaaaugaagggacau

SEQ ID NO: 625435 - RNA, 18 nt, Artificial Sequence
  Synthetic
uucagggugaugggacau

SEQ ID NO: 625436 - RNA, 19 nt, Artificial Sequence
  Synthetic
auucagggugaugggacau

SEQ ID NO: 625437 - RNA, 20 nt, Artificial Sequence
  Synthetic
aauucagggugaugggacau

SEQ ID NO: 625438 - RNA, 21 nt, Artificial Sequence
  Synthetic
aaauucagggugaugggacau

SEQ ID NO: 625439 - RNA, 22 nt, Artificial Sequence
  Synthetic
aaaauucagggugaugggacau

SEQ ID NO: 625440 - RNA, 23 nt, Artificial Sequence
  Synthetic
uaaaauucagggugaugggacau

SEQ ID NO: 625441 - RNA, 24 nt, Artificial Sequence
  Synthetic
cuaaaauucagggugaugggacau

SEQ ID NO: 625442 - RNA, 18 nt, Artificial Sequence
  Synthetic
gugcacaguuugggacau

SEQ ID NO: 625443 - RNA, 19 nt, Artificial Sequence
  Synthetic
cgugcacaguuugggacau

SEQ ID NO: 625444 - RNA, 20 nt, Artificial Sequence
  Synthetic
acgugcacaguuugggacau

SEQ ID NO: 625445 - RNA, 21 nt, Artificial Sequence
  Synthetic
aacgugcacaguuugggacau

SEQ ID NO: 625446 - RNA, 22 nt, Artificial Sequence
  Synthetic
uaacgugcacaguuugggacau

SEQ ID NO: 625447 - RNA, 23 nt, Artificial Sequence
  Synthetic
cuaacgugcacaguuugggacau

SEQ ID NO: 625448 - RNA, 24 nt, Artificial Sequence
  Synthetic
ccuaacgugcacaguuugggacau

SEQ ID NO: 625449 - RNA, 18 nt, Artificial Sequence
  Synthetic
auacucuaagguggacau

SEQ ID NO: 625450 - RNA, 19 nt, Artificial Sequence
  Synthetic
uauacucuaagguggacau

SEQ ID NO: 625451 - RNA, 20 nt, Artificial Sequence
  Synthetic
auauacucuaagguggacau

SEQ ID NO: 625452 - RNA, 21 nt, Artificial Sequence
  Synthetic
cauauacucuaagguggacau

SEQ ID NO: 625453 - RNA, 22 nt, Artificial Sequence
  Synthetic
ccauauacucuaagguggacau

SEQ ID NO: 625454 - RNA, 23 nt, Artificial Sequence
  Synthetic
gccauauacucuaagguggacau

SEQ ID NO: 625455 - RNA, 24 nt, Artificial Sequence
  Synthetic
agccauauacucuaagguggacau

SEQ ID NO: 625456 - RNA, 18 nt, Artificial Sequence
  Synthetic
cccucaaggugaugacau

SEQ ID NO: 625457 - RNA, 19 nt, Artificial Sequence
  Synthetic
acccucaaggugaugacau

SEQ ID NO: 625458 - RNA, 20 nt, Artificial Sequence
  Synthetic
cacccucaaggugaugacau

SEQ ID NO: 625459 - RNA, 21 nt, Artificial Sequence
  Synthetic
ucacccucaaggugaugacau

SEQ ID NO: 625460 - RNA, 22 nt, Artificial Sequence
  Synthetic
cucacccucaaggugaugacau

SEQ ID NO: 625461 - RNA, 23 nt, Artificial Sequence
  Synthetic
ccucacccucaaggugaugacau

SEQ ID NO: 625462 - RNA, 24 nt, Artificial Sequence
  Synthetic
uccucacccucaaggugaugacau

SEQ ID NO: 625463 - RNA, 18 nt, Artificial Sequence
  Synthetic
uccagagguguaugacau

SEQ ID NO: 625464 - RNA, 19 nt, Artificial Sequence
  Synthetic
cuccagagguguaugacau

SEQ ID NO: 625465 - RNA, 20 nt, Artificial Sequence
  Synthetic
ucuccagagguguaugacau

SEQ ID NO: 625466 - RNA, 21 nt, Artificial Sequence
  Synthetic
aucuccagagguguaugacau

SEQ ID NO: 625467 - RNA, 22 nt, Artificial Sequence
  Synthetic
uaucuccagagguguaugacau

SEQ ID NO: 625468 - RNA, 23 nt, Artificial Sequence
  Synthetic
uuaucuccagagguguaugacau

SEQ ID NO: 625469 - RNA, 24 nt, Artificial Sequence
  Synthetic
guuaucuccagagguguaugacau

SEQ ID NO: 625470 - RNA, 18 nt, Artificial Sequence
  Synthetic
aguaauguucacugacau

SEQ ID NO: 625471 - RNA, 19 nt, Artificial Sequence
  Synthetic
aaguaauguucacugacau

SEQ ID NO: 625472 - RNA, 20 nt, Artificial Sequence
  Synthetic
aaaguaauguucacugacau

SEQ ID NO: 625473 - RNA, 21 nt, Artificial Sequence
  Synthetic
aaaaguaauguucacugacau

SEQ ID NO: 625474 - RNA, 22 nt, Artificial Sequence
  Synthetic
gaaaaguaauguucacugacau

SEQ ID NO: 625475 - RNA, 23 nt, Artificial Sequence
  Synthetic
ggaaaaguaauguucacugacau

SEQ ID NO: 625476 - RNA, 24 nt, Artificial Sequence
  Synthetic
uggaaaaguaauguucacugacau

SEQ ID NO: 625477 - RNA, 18 nt, Artificial Sequence
  Synthetic
auuuuccuguccugacau

SEQ ID NO: 625478 - RNA, 19 nt, Artificial Sequence
  Synthetic
uauuuuccuguccugacau

SEQ ID NO: 625479 - RNA, 20 nt, Artificial Sequence
  Synthetic
auauuuuccuguccugacau

SEQ ID NO: 625480 - RNA, 21 nt, Artificial Sequence
  Synthetic
gauauuuuccuguccugacau

SEQ ID NO: 625481 - RNA, 22 nt, Artificial Sequence
  Synthetic
agauauuuuccuguccugacau

SEQ ID NO: 625482 - RNA, 23 nt, Artificial Sequence
  Synthetic
aagauauuuuccuguccugacau

SEQ ID NO: 625483 - RNA, 24 nt, Artificial Sequence
  Synthetic
gaagauauuuuccuguccugacau

SEQ ID NO: 625484 - RNA, 18 nt, Artificial Sequence
  Synthetic
aacugcgguagcugacau

SEQ ID NO: 625485 - RNA, 19 nt, Artificial Sequence
  Synthetic
aaacugcgguagcugacau

SEQ ID NO: 625486 - RNA, 20 nt, Artificial Sequence
  Synthetic
caaacugcgguagcugacau

SEQ ID NO: 625487 - RNA, 21 nt, Artificial Sequence
  Synthetic
ucaaacugcgguagcugacau

SEQ ID NO: 625488 - RNA, 22 nt, Artificial Sequence
  Synthetic
aucaaacugcgguagcugacau

SEQ ID NO: 625489 - RNA, 23 nt, Artificial Sequence
  Synthetic
aaucaaacugcgguagcugacau

SEQ ID NO: 625490 - RNA, 24 nt, Artificial Sequence
  Synthetic
gaaucaaacugcgguagcugacau

SEQ ID NO: 625491 - RNA, 18 nt, Artificial Sequence
  Synthetic
gaggagaaugagugacau

SEQ ID NO: 625492 - RNA, 19 nt, Artificial Sequence
  Synthetic
ggaggagaaugagugacau

SEQ ID NO: 625493 - RNA, 20 nt, Artificial Sequence
  Synthetic
aggaggagaaugagugacau

SEQ ID NO: 625494 - RNA, 21 nt, Artificial Sequence
  Synthetic
caggaggagaaugagugacau

SEQ ID NO: 625495 - RNA, 22 nt, Artificial Sequence
  Synthetic
ucaggaggagaaugagugacau

SEQ ID NO: 625496 - RNA, 23 nt, Artificial Sequence
  Synthetic
cucaggaggagaaugagugacau

SEQ ID NO: 625497 - RNA, 24 nt, Artificial Sequence
  Synthetic
ucucaggaggagaaugagugacau

SEQ ID NO: 625498 - RNA, 18 nt, Artificial Sequence
  Synthetic
ucuggucaucugugacau

SEQ ID NO: 625499 - RNA, 19 nt, Artificial Sequence
  Synthetic
cucuggucaucugugacau

SEQ ID NO: 625500 - RNA, 20 nt, Artificial Sequence
  Synthetic
acucuggucaucugugacau

SEQ ID NO: 625501 - RNA, 21 nt, Artificial Sequence
  Synthetic
aacucuggucaucugugacau

SEQ ID NO: 625502 - RNA, 22 nt, Artificial Sequence
  Synthetic
aaacucuggucaucugugacau

SEQ ID NO: 625503 - RNA, 23 nt, Artificial Sequence
  Synthetic
gaaacucuggucaucugugacau

SEQ ID NO: 625504 - RNA, 24 nt, Artificial Sequence
  Synthetic
ugaaacucuggucaucugugacau

SEQ ID NO: 625505 - RNA, 18 nt, Artificial Sequence
  Synthetic
auacuuuucuugugacau

SEQ ID NO: 625506 - RNA, 19 nt, Artificial Sequence
  Synthetic
gauacuuuucuugugacau

SEQ ID NO: 625507 - RNA, 20 nt, Artificial Sequence
  Synthetic
ugauacuuuucuugugacau

SEQ ID NO: 625508 - RNA, 21 nt, Artificial Sequence
  Synthetic
cugauacuuuucuugugacau

SEQ ID NO: 625509 - RNA, 22 nt, Artificial Sequence
  Synthetic
ucugauacuuuucuugugacau

SEQ ID NO: 625510 - RNA, 23 nt, Artificial Sequence
  Synthetic
gucugauacuuuucuugugacau

SEQ ID NO: 625511 - RNA, 24 nt, Artificial Sequence
  Synthetic
ugucugauacuuuucuugugacau

SEQ ID NO: 625512 - RNA, 18 nt, Artificial Sequence
  Synthetic
uggcuccacccuugacau

SEQ ID NO: 625513 - RNA, 19 nt, Artificial Sequence
  Synthetic
cuggcuccacccuugacau

SEQ ID NO: 625514 - RNA, 20 nt, Artificial Sequence
  Synthetic
ccuggcuccacccuugacau

SEQ ID NO: 625515 - RNA, 21 nt, Artificial Sequence
  Synthetic
accuggcuccacccuugacau

SEQ ID NO: 625516 - RNA, 22 nt, Artificial Sequence
  Synthetic
caccuggcuccacccuugacau

SEQ ID NO: 625517 - RNA, 23 nt, Artificial Sequence
  Synthetic
gcaccuggcuccacccuugacau

SEQ ID NO: 625518 - RNA, 24 nt, Artificial Sequence
  Synthetic
ugcaccuggcuccacccuugacau

SEQ ID NO: 625519 - RNA, 18 nt, Artificial Sequence
  Synthetic
gucucucucccuugacau

SEQ ID NO: 625520 - RNA, 19 nt, Artificial Sequence
  Synthetic
ggucucucucccuugacau

SEQ ID NO: 625521 - RNA, 20 nt, Artificial Sequence
  Synthetic
uggucucucucccuugacau

SEQ ID NO: 625522 - RNA, 21 nt, Artificial Sequence
  Synthetic
cuggucucucucccuugacau

SEQ ID NO: 625523 - RNA, 22 nt, Artificial Sequence
  Synthetic
ccuggucucucucccuugacau

SEQ ID NO: 625524 - RNA, 23 nt, Artificial Sequence
  Synthetic
accuggucucucucccuugacau

SEQ ID NO: 625525 - RNA, 24 nt, Artificial Sequence
  Synthetic
caccuggucucucucccuugacau

SEQ ID NO: 625526 - RNA, 18 nt, Artificial Sequence
  Synthetic
ggcuguggagcuugacau

SEQ ID NO: 625527 - RNA, 19 nt, Artificial Sequence
  Synthetic
aggcuguggagcuugacau

SEQ ID NO: 625528 - RNA, 20 nt, Artificial Sequence
  Synthetic
caggcuguggagcuugacau

SEQ ID NO: 625529 - RNA, 21 nt, Artificial Sequence
  Synthetic
acaggcuguggagcuugacau

SEQ ID NO: 625530 - RNA, 22 nt, Artificial Sequence
  Synthetic
cacaggcuguggagcuugacau

SEQ ID NO: 625531 - RNA, 23 nt, Artificial Sequence
  Synthetic
acacaggcuguggagcuugacau

SEQ ID NO: 625532 - RNA, 24 nt, Artificial Sequence
  Synthetic
aacacaggcuguggagcuugacau

SEQ ID NO: 625533 - RNA, 18 nt, Artificial Sequence
  Synthetic
gccugucagauuugacau

SEQ ID NO: 625534 - RNA, 19 nt, Artificial Sequence
  Synthetic
ggccugucagauuugacau

SEQ ID NO: 625535 - RNA, 20 nt, Artificial Sequence
  Synthetic
aggccugucagauuugacau

SEQ ID NO: 625536 - RNA, 21 nt, Artificial Sequence
  Synthetic
gaggccugucagauuugacau

SEQ ID NO: 625537 - RNA, 22 nt, Artificial Sequence
  Synthetic
ggaggccugucagauuugacau

SEQ ID NO: 625538 - RNA, 23 nt, Artificial Sequence
  Synthetic
gggaggccugucagauuugacau

SEQ ID NO: 625539 - RNA, 24 nt, Artificial Sequence
  Synthetic
ugggaggccugucagauuugacau

SEQ ID NO: 625540 - RNA, 18 nt, Artificial Sequence
  Synthetic
guaugcuguauuugacau

SEQ ID NO: 625541 - RNA, 19 nt, Artificial Sequence
  Synthetic
aguaugcuguauuugacau

SEQ ID NO: 625542 - RNA, 20 nt, Artificial Sequence
  Synthetic
caguaugcuguauuugacau

SEQ ID NO: 625543 - RNA, 21 nt, Artificial Sequence
  Synthetic
gcaguaugcuguauuugacau

SEQ ID NO: 625544 - RNA, 22 nt, Artificial Sequence
  Synthetic
ugcaguaugcuguauuugacau

SEQ ID NO: 625545 - RNA, 23 nt, Artificial Sequence
  Synthetic
uugcaguaugcuguauuugacau

SEQ ID NO: 625546 - RNA, 24 nt, Artificial Sequence
  Synthetic
auugcaguaugcuguauuugacau

SEQ ID NO: 625547 - RNA, 18 nt, Artificial Sequence
  Synthetic
aauuugaucaaaauacau

SEQ ID NO: 625548 - RNA, 19 nt, Artificial Sequence
  Synthetic
caauuugaucaaaauacau

SEQ ID NO: 625549 - RNA, 20 nt, Artificial Sequence
  Synthetic
gcaauuugaucaaaauacau

SEQ ID NO: 625550 - RNA, 21 nt, Artificial Sequence
  Synthetic
ugcaauuugaucaaaauacau

SEQ ID NO: 625551 - RNA, 22 nt, Artificial Sequence
  Synthetic
augcaauuugaucaaaauacau

SEQ ID NO: 625552 - RNA, 23 nt, Artificial Sequence
  Synthetic
gaugcaauuugaucaaaauacau

SEQ ID NO: 625553 - RNA, 24 nt, Artificial Sequence
  Synthetic
ugaugcaauuugaucaaaauacau

SEQ ID NO: 625554 - RNA, 18 nt, Artificial Sequence
  Synthetic
ucaauaucuaaaauacau

SEQ ID NO: 625555 - RNA, 19 nt, Artificial Sequence
  Synthetic
gucaauaucuaaaauacau

SEQ ID NO: 625556 - RNA, 20 nt, Artificial Sequence
  Synthetic
ugucaauaucuaaaauacau

SEQ ID NO: 625557 - RNA, 21 nt, Artificial Sequence
  Synthetic
gugucaauaucuaaaauacau

SEQ ID NO: 625558 - RNA, 22 nt, Artificial Sequence
  Synthetic
ggugucaauaucuaaaauacau

SEQ ID NO: 625559 - RNA, 23 nt, Artificial Sequence
  Synthetic
aggugucaauaucuaaaauacau

SEQ ID NO: 625560 - RNA, 24 nt, Artificial Sequence
  Synthetic
aaggugucaauaucuaaaauacau

SEQ ID NO: 625561 - RNA, 18 nt, Artificial Sequence
  Synthetic
uuauuuuaagaaauacau

SEQ ID NO: 625562 - RNA, 19 nt, Artificial Sequence
  Synthetic
guuauuuuaagaaauacau

SEQ ID NO: 625563 - RNA, 20 nt, Artificial Sequence
  Synthetic
uguuauuuuaagaaauacau

SEQ ID NO: 625564 - RNA, 21 nt, Artificial Sequence
  Synthetic
uuguuauuuuaagaaauacau

SEQ ID NO: 625565 - RNA, 22 nt, Artificial Sequence
  Synthetic
uuuguuauuuuaagaaauacau

SEQ ID NO: 625566 - RNA, 23 nt, Artificial Sequence
  Synthetic
uuuuguuauuuuaagaaauacau

SEQ ID NO: 625567 - RNA, 24 nt, Artificial Sequence
  Synthetic
auuuuguuauuuuaagaaauacau

SEQ ID NO: 625568 - RNA, 18 nt, Artificial Sequence
  Synthetic
uagacuugggaaauacau

SEQ ID NO: 625569 - RNA, 19 nt, Artificial Sequence
  Synthetic
auagacuugggaaauacau

SEQ ID NO: 625570 - RNA, 20 nt, Artificial Sequence
  Synthetic
gauagacuugggaaauacau

SEQ ID NO: 625571 - RNA, 21 nt, Artificial Sequence
  Synthetic
ggauagacuugggaaauacau

SEQ ID NO: 625572 - RNA, 22 nt, Artificial Sequence
  Synthetic
aggauagacuugggaaauacau

SEQ ID NO: 625573 - RNA, 23 nt, Artificial Sequence
  Synthetic
uaggauagacuugggaaauacau

SEQ ID NO: 625574 - RNA, 24 nt, Artificial Sequence
  Synthetic
cuaggauagacuugggaaauacau

SEQ ID NO: 625575 - RNA, 18 nt, Artificial Sequence
  Synthetic
auaugacacucaauacau

SEQ ID NO: 625576 - RNA, 19 nt, Artificial Sequence
  Synthetic
uauaugacacucaauacau

SEQ ID NO: 625577 - RNA, 20 nt, Artificial Sequence
  Synthetic
auauaugacacucaauacau

SEQ ID NO: 625578 - RNA, 21 nt, Artificial Sequence
  Synthetic
uauauaugacacucaauacau

SEQ ID NO: 625579 - RNA, 22 nt, Artificial Sequence
  Synthetic
cuauauaugacacucaauacau

SEQ ID NO: 625580 - RNA, 23 nt, Artificial Sequence
  Synthetic
acuauauaugacacucaauacau

SEQ ID NO: 625581 - RNA, 24 nt, Artificial Sequence
  Synthetic
uacuauauaugacacucaauacau

SEQ ID NO: 625582 - RNA, 18 nt, Artificial Sequence
  Synthetic
ccaagaagaagaauacau

SEQ ID NO: 625583 - RNA, 19 nt, Artificial Sequence
  Synthetic
cccaagaagaagaauacau

SEQ ID NO: 625584 - RNA, 20 nt, Artificial Sequence
  Synthetic
ccccaagaagaagaauacau

SEQ ID NO: 625585 - RNA, 21 nt, Artificial Sequence
  Synthetic
cccccaagaagaagaauacau

SEQ ID NO: 625586 - RNA, 22 nt, Artificial Sequence
  Synthetic
acccccaagaagaagaauacau

SEQ ID NO: 625587 - RNA, 23 nt, Artificial Sequence
  Synthetic
aacccccaagaagaagaauacau

SEQ ID NO: 625588 - RNA, 24 nt, Artificial Sequence
  Synthetic
gaacccccaagaagaagaauacau

SEQ ID NO: 625589 - RNA, 18 nt, Artificial Sequence
  Synthetic
ucaaaugacaacauacau

SEQ ID NO: 625590 - RNA, 19 nt, Artificial Sequence
  Synthetic
gucaaaugacaacauacau

SEQ ID NO: 625591 - RNA, 20 nt, Artificial Sequence
  Synthetic
agucaaaugacaacauacau

SEQ ID NO: 625592 - RNA, 21 nt, Artificial Sequence
  Synthetic
aagucaaaugacaacauacau

SEQ ID NO: 625593 - RNA, 22 nt, Artificial Sequence
  Synthetic
aaagucaaaugacaacauacau

SEQ ID NO: 625594 - RNA, 23 nt, Artificial Sequence
  Synthetic
aaaagucaaaugacaacauacau

SEQ ID NO: 625595 - RNA, 24 nt, Artificial Sequence
  Synthetic
aaaaagucaaaugacaacauacau

SEQ ID NO: 625596 - RNA, 18 nt, Artificial Sequence
  Synthetic
uaguacaguuacauacau

SEQ ID NO: 625597 - RNA, 19 nt, Artificial Sequence
  Synthetic
auaguacaguuacauacau

SEQ ID NO: 625598 - RNA, 20 nt, Artificial Sequence
  Synthetic
uauaguacaguuacauacau

SEQ ID NO: 625599 - RNA, 21 nt, Artificial Sequence
  Synthetic
uuauaguacaguuacauacau

SEQ ID NO: 625600 - RNA, 22 nt, Artificial Sequence
  Synthetic
cuuauaguacaguuacauacau

SEQ ID NO: 625601 - RNA, 23 nt, Artificial Sequence
  Synthetic
ucuuauaguacaguuacauacau

SEQ ID NO: 625602 - RNA, 24 nt, Artificial Sequence
  Synthetic
uucuuauaguacaguuacauacau

SEQ ID NO: 625603 - RNA, 18 nt, Artificial Sequence
  Synthetic
uaagucucuaggauacau

SEQ ID NO: 625604 - RNA, 19 nt, Artificial Sequence
  Synthetic
cuaagucucuaggauacau

SEQ ID NO: 625605 - RNA, 20 nt, Artificial Sequence
  Synthetic
ccuaagucucuaggauacau

SEQ ID NO: 625606 - RNA, 21 nt, Artificial Sequence
  Synthetic
cccuaagucucuaggauacau

SEQ ID NO: 625607 - RNA, 22 nt, Artificial Sequence
  Synthetic
ccccuaagucucuaggauacau

SEQ ID NO: 625608 - RNA, 23 nt, Artificial Sequence
  Synthetic
gccccuaagucucuaggauacau

SEQ ID NO: 625609 - RNA, 24 nt, Artificial Sequence
  Synthetic
ugccccuaagucucuaggauacau

SEQ ID NO: 625610 - RNA, 18 nt, Artificial Sequence
  Synthetic
auacaauaaaugauacau

SEQ ID NO: 625611 - RNA, 19 nt, Artificial Sequence
  Synthetic
aauacaauaaaugauacau

SEQ ID NO: 625612 - RNA, 20 nt, Artificial Sequence
  Synthetic
gaauacaauaaaugauacau

SEQ ID NO: 625613 - RNA, 21 nt, Artificial Sequence
  Synthetic
ugaauacaauaaaugauacau

SEQ ID NO: 625614 - RNA, 22 nt, Artificial Sequence
  Synthetic
uugaauacaauaaaugauacau

SEQ ID NO: 625615 - RNA, 23 nt, Artificial Sequence
  Synthetic
cuugaauacaauaaaugauacau

SEQ ID NO: 625616 - RNA, 24 nt, Artificial Sequence
  Synthetic
acuugaauacaauaaaugauacau

SEQ ID NO: 625617 - RNA, 18 nt, Artificial Sequence
  Synthetic
cugggaaaacugauacau

SEQ ID NO: 625618 - RNA, 19 nt, Artificial Sequence
  Synthetic
ccugggaaaacugauacau

SEQ ID NO: 625619 - RNA, 20 nt, Artificial Sequence
  Synthetic
uccugggaaaacugauacau

SEQ ID NO: 625620 - RNA, 21 nt, Artificial Sequence
  Synthetic
uuccugggaaaacugauacau

SEQ ID NO: 625621 - RNA, 22 nt, Artificial Sequence
  Synthetic
uuuccugggaaaacugauacau

SEQ ID NO: 625622 - RNA, 23 nt, Artificial Sequence
  Synthetic
uuuuccugggaaaacugauacau

SEQ ID NO: 625623 - RNA, 24 nt, Artificial Sequence
  Synthetic
uuuuuccugggaaaacugauacau

SEQ ID NO: 625624 - RNA, 18 nt, Artificial Sequence
  Synthetic
cauacuuuaaauauacau

SEQ ID NO: 625625 - RNA, 19 nt, Artificial Sequence
  Synthetic
ucauacuuuaaauauacau

SEQ ID NO: 625626 - RNA, 20 nt, Artificial Sequence
  Synthetic
uucauacuuuaaauauacau

SEQ ID NO: 625627 - RNA, 21 nt, Artificial Sequence
  Synthetic
auucauacuuuaaauauacau

SEQ ID NO: 625628 - RNA, 22 nt, Artificial Sequence
  Synthetic
uauucauacuuuaaauauacau

SEQ ID NO: 625629 - RNA, 23 nt, Artificial Sequence
  Synthetic
guauucauacuuuaaauauacau

SEQ ID NO: 625630 - RNA, 24 nt, Artificial Sequence
  Synthetic
uguauucauacuuuaaauauacau

SEQ ID NO: 625631 - RNA, 18 nt, Artificial Sequence
  Synthetic
caauucuagaauauacau

SEQ ID NO: 625632 - RNA, 19 nt, Artificial Sequence
  Synthetic
acaauucuagaauauacau

SEQ ID NO: 625633 - RNA, 20 nt, Artificial Sequence
  Synthetic
uacaauucuagaauauacau

SEQ ID NO: 625634 - RNA, 21 nt, Artificial Sequence
  Synthetic
cuacaauucuagaauauacau

SEQ ID NO: 625635 - RNA, 22 nt, Artificial Sequence
  Synthetic
ucuacaauucuagaauauacau

SEQ ID NO: 625636 - RNA, 23 nt, Artificial Sequence
  Synthetic
cucuacaauucuagaauauacau

SEQ ID NO: 625637 - RNA, 24 nt, Artificial Sequence
  Synthetic
gcucuacaauucuagaauauacau

SEQ ID NO: 625638 - RNA, 18 nt, Artificial Sequence
  Synthetic
aaugucuaaauuauacau

SEQ ID NO: 625639 - RNA, 19 nt, Artificial Sequence
  Synthetic
caaugucuaaauuauacau

SEQ ID NO: 625640 - RNA, 20 nt, Artificial Sequence
  Synthetic
acaaugucuaaauuauacau

SEQ ID NO: 625641 - RNA, 21 nt, Artificial Sequence
  Synthetic
uacaaugucuaaauuauacau

SEQ ID NO: 625642 - RNA, 22 nt, Artificial Sequence
  Synthetic
guacaaugucuaaauuauacau

SEQ ID NO: 625643 - RNA, 23 nt, Artificial Sequence
  Synthetic
uguacaaugucuaaauuauacau

SEQ ID NO: 625644 - RNA, 24 nt, Artificial Sequence
  Synthetic
auguacaaugucuaaauuauacau

SEQ ID NO: 625645 - RNA, 18 nt, Artificial Sequence
  Synthetic
aauucuaauuuuauacau

SEQ ID NO: 625646 - RNA, 19 nt, Artificial Sequence
  Synthetic
gaauucuaauuuuauacau

SEQ ID NO: 625647 - RNA, 20 nt, Artificial Sequence
  Synthetic
agaauucuaauuuuauacau

SEQ ID NO: 625648 - RNA, 21 nt, Artificial Sequence
  Synthetic
gagaauucuaauuuuauacau

SEQ ID NO: 625649 - RNA, 22 nt, Artificial Sequence
  Synthetic
ggagaauucuaauuuuauacau

SEQ ID NO: 625650 - RNA, 23 nt, Artificial Sequence
  Synthetic
uggagaauucuaauuuuauacau

SEQ ID NO: 625651 - RNA, 24 nt, Artificial Sequence
  Synthetic
uuggagaauucuaauuuuauacau

SEQ ID NO: 625652 - RNA, 18 nt, Artificial Sequence
  Synthetic
uuauccuauuuuauacau

SEQ ID NO: 625653 - RNA, 19 nt, Artificial Sequence
  Synthetic
cuuauccuauuuuauacau

SEQ ID NO: 625654 - RNA, 20 nt, Artificial Sequence
  Synthetic
ucuuauccuauuuuauacau

SEQ ID NO: 625655 - RNA, 21 nt, Artificial Sequence
  Synthetic
uucuuauccuauuuuauacau

SEQ ID NO: 625656 - RNA, 22 nt, Artificial Sequence
  Synthetic
auucuuauccuauuuuauacau

SEQ ID NO: 625657 - RNA, 23 nt, Artificial Sequence
  Synthetic
uauucuuauccuauuuuauacau

SEQ ID NO: 625658 - RNA, 24 nt, Artificial Sequence
  Synthetic
cuauucuuauccuauuuuauacau

SEQ ID NO: 625659 - RNA, 18 nt, Artificial Sequence
  Synthetic
gagagggaagaacuacau

SEQ ID NO: 625660 - RNA, 19 nt, Artificial Sequence
  Synthetic
ggagagggaagaacuacau

SEQ ID NO: 625661 - RNA, 20 nt, Artificial Sequence
  Synthetic
gggagagggaagaacuacau

SEQ ID NO: 625662 - RNA, 21 nt, Artificial Sequence
  Synthetic
agggagagggaagaacuacau

SEQ ID NO: 625663 - RNA, 22 nt, Artificial Sequence
  Synthetic
gagggagagggaagaacuacau

SEQ ID NO: 625664 - RNA, 23 nt, Artificial Sequence
  Synthetic
agagggagagggaagaacuacau

SEQ ID NO: 625665 - RNA, 24 nt, Artificial Sequence
  Synthetic
cagagggagagggaagaacuacau

SEQ ID NO: 625666 - RNA, 18 nt, Artificial Sequence
  Synthetic
ccggcgaaaccacuacau

SEQ ID NO: 625667 - RNA, 19 nt, Artificial Sequence
  Synthetic
cccggcgaaaccacuacau

SEQ ID NO: 625668 - RNA, 20 nt, Artificial Sequence
  Synthetic
ucccggcgaaaccacuacau

SEQ ID NO: 625669 - RNA, 21 nt, Artificial Sequence
  Synthetic
aucccggcgaaaccacuacau

SEQ ID NO: 625670 - RNA, 22 nt, Artificial Sequence
  Synthetic
aaucccggcgaaaccacuacau

SEQ ID NO: 625671 - RNA, 23 nt, Artificial Sequence
  Synthetic
gaaucccggcgaaaccacuacau

SEQ ID NO: 625672 - RNA, 24 nt, Artificial Sequence
  Synthetic
ugaaucccggcgaaaccacuacau

SEQ ID NO: 625673 - RNA, 18 nt, Artificial Sequence
  Synthetic
auugucagaagacuacau

SEQ ID NO: 625674 - RNA, 19 nt, Artificial Sequence
  Synthetic
uauugucagaagacuacau

SEQ ID NO: 625675 - RNA, 20 nt, Artificial Sequence
  Synthetic
auauugucagaagacuacau

SEQ ID NO: 625676 - RNA, 21 nt, Artificial Sequence
  Synthetic
aauauugucagaagacuacau

SEQ ID NO: 625677 - RNA, 22 nt, Artificial Sequence
  Synthetic
gaauauugucagaagacuacau

SEQ ID NO: 625678 - RNA, 23 nt, Artificial Sequence
  Synthetic
ugaauauugucagaagacuacau

SEQ ID NO: 625679 - RNA, 24 nt, Artificial Sequence
  Synthetic
uugaauauugucagaagacuacau

SEQ ID NO: 625680 - RNA, 18 nt, Artificial Sequence
  Synthetic
aaacucuguagacuacau

SEQ ID NO: 625681 - RNA, 19 nt, Artificial Sequence
  Synthetic
uaaacucuguagacuacau

SEQ ID NO: 625682 - RNA, 20 nt, Artificial Sequence
  Synthetic
uuaaacucuguagacuacau

SEQ ID NO: 625683 - RNA, 21 nt, Artificial Sequence
  Synthetic
uuuaaacucuguagacuacau

SEQ ID NO: 625684 - RNA, 22 nt, Artificial Sequence
  Synthetic
auuuaaacucuguagacuacau

SEQ ID NO: 625685 - RNA, 23 nt, Artificial Sequence
  Synthetic
uauuuaaacucuguagacuacau

SEQ ID NO: 625686 - RNA, 24 nt, Artificial Sequence
  Synthetic
cuauuuaaacucuguagacuacau

SEQ ID NO: 625687 - RNA, 18 nt, Artificial Sequence
  Synthetic
auauuauuaugacuacau

SEQ ID NO: 625688 - RNA, 19 nt, Artificial Sequence
  Synthetic
gauauuauuaugacuacau

SEQ ID NO: 625689 - RNA, 20 nt, Artificial Sequence
  Synthetic
agauauuauuaugacuacau

SEQ ID NO: 625690 - RNA, 21 nt, Artificial Sequence
  Synthetic
uagauauuauuaugacuacau

SEQ ID NO: 625691 - RNA, 22 nt, Artificial Sequence
  Synthetic
uuagauauuauuaugacuacau

SEQ ID NO: 625692 - RNA, 23 nt, Artificial Sequence
  Synthetic
uuuagauauuauuaugacuacau

SEQ ID NO: 625693 - RNA, 24 nt, Artificial Sequence
  Synthetic
uuuuagauauuauuaugacuacau

SEQ ID NO: 625694 - RNA, 18 nt, Artificial Sequence
  Synthetic
cccugaguuugacuacau

SEQ ID NO: 625695 - RNA, 19 nt, Artificial Sequence
  Synthetic
acccugaguuugacuacau

SEQ ID NO: 625696 - RNA, 20 nt, Artificial Sequence
  Synthetic
uacccugaguuugacuacau

SEQ ID NO: 625697 - RNA, 21 nt, Artificial Sequence
  Synthetic
auacccugaguuugacuacau

SEQ ID NO: 625698 - RNA, 22 nt, Artificial Sequence
  Synthetic
aauacccugaguuugacuacau

SEQ ID NO: 625699 - RNA, 23 nt, Artificial Sequence
  Synthetic
aaauacccugaguuugacuacau

SEQ ID NO: 625700 - RNA, 24 nt, Artificial Sequence
  Synthetic
aaaauacccugaguuugacuacau

SEQ ID NO: 625701 - RNA, 18 nt, Artificial Sequence
  Synthetic
uuuauucucggccuacau

SEQ ID NO: 625702 - RNA, 19 nt, Artificial Sequence
  Synthetic
uuuuauucucggccuacau

SEQ ID NO: 625703 - RNA, 20 nt, Artificial Sequence
  Synthetic
auuuuauucucggccuacau

SEQ ID NO: 625704 - RNA, 21 nt, Artificial Sequence
  Synthetic
aauuuuauucucggccuacau

SEQ ID NO: 625705 - RNA, 22 nt, Artificial Sequence
  Synthetic
uaauuuuauucucggccuacau

SEQ ID NO: 625706 - RNA, 23 nt, Artificial Sequence
  Synthetic
auaauuuuauucucggccuacau

SEQ ID NO: 625707 - RNA, 24 nt, Artificial Sequence
  Synthetic
gauaauuuuauucucggccuacau

SEQ ID NO: 625708 - RNA, 18 nt, Artificial Sequence
  Synthetic
uccacaaccugccuacau

SEQ ID NO: 625709 - RNA, 19 nt, Artificial Sequence
  Synthetic
cuccacaaccugccuacau

SEQ ID NO: 625710 - RNA, 20 nt, Artificial Sequence
  Synthetic
ucuccacaaccugccuacau

SEQ ID NO: 625711 - RNA, 21 nt, Artificial Sequence
  Synthetic
aucuccacaaccugccuacau

SEQ ID NO: 625712 - RNA, 22 nt, Artificial Sequence
  Synthetic
gaucuccacaaccugccuacau

SEQ ID NO: 625713 - RNA, 23 nt, Artificial Sequence
  Synthetic
ugaucuccacaaccugccuacau

SEQ ID NO: 625714 - RNA, 24 nt, Artificial Sequence
  Synthetic
augaucuccacaaccugccuacau

SEQ ID NO: 625715 - RNA, 18 nt, Artificial Sequence
  Synthetic
ccuauuuaaaaucuacau

SEQ ID NO: 625716 - RNA, 19 nt, Artificial Sequence
  Synthetic
uccuauuuaaaaucuacau

SEQ ID NO: 625717 - RNA, 20 nt, Artificial Sequence
  Synthetic
auccuauuuaaaaucuacau

SEQ ID NO: 625718 - RNA, 21 nt, Artificial Sequence
  Synthetic
gauccuauuuaaaaucuacau

SEQ ID NO: 625719 - RNA, 22 nt, Artificial Sequence
  Synthetic
ugauccuauuuaaaaucuacau

SEQ ID NO: 625720 - RNA, 23 nt, Artificial Sequence
  Synthetic
uugauccuauuuaaaaucuacau

SEQ ID NO: 625721 - RNA, 24 nt, Artificial Sequence
  Synthetic
cuugauccuauuuaaaaucuacau

SEQ ID NO: 625722 - RNA, 18 nt, Artificial Sequence
  Synthetic
aaaaaaaucaaucuacau

SEQ ID NO: 625723 - RNA, 19 nt, Artificial Sequence
  Synthetic
uaaaaaaaucaaucuacau

SEQ ID NO: 625724 - RNA, 20 nt, Artificial Sequence
  Synthetic
auaaaaaaaucaaucuacau

SEQ ID NO: 625725 - RNA, 21 nt, Artificial Sequence
  Synthetic
aauaaaaaaaucaaucuacau

SEQ ID NO: 625726 - RNA, 22 nt, Artificial Sequence
  Synthetic
gaauaaaaaaaucaaucuacau

SEQ ID NO: 625727 - RNA, 23 nt, Artificial Sequence
  Synthetic
agaauaaaaaaaucaaucuacau

SEQ ID NO: 625728 - RNA, 24 nt, Artificial Sequence
  Synthetic
uagaauaaaaaaaucaaucuacau

SEQ ID NO: 625729 - RNA, 18 nt, Artificial Sequence
  Synthetic
gccaggguuacucuacau

SEQ ID NO: 625730 - RNA, 19 nt, Artificial Sequence
  Synthetic
ggccaggguuacucuacau

SEQ ID NO: 625731 - RNA, 20 nt, Artificial Sequence
  Synthetic
uggccaggguuacucuacau

SEQ ID NO: 625732 - RNA, 21 nt, Artificial Sequence
  Synthetic
uuggccaggguuacucuacau

SEQ ID NO: 625733 - RNA, 22 nt, Artificial Sequence
  Synthetic
guuggccaggguuacucuacau

SEQ ID NO: 625734 - RNA, 23 nt, Artificial Sequence
  Synthetic
gguuggccaggguuacucuacau

SEQ ID NO: 625735 - RNA, 24 nt, Artificial Sequence
  Synthetic
ggguuggccaggguuacucuacau

SEQ ID NO: 625736 - RNA, 18 nt, Artificial Sequence
  Synthetic
uauuuuaagucucuacau

SEQ ID NO: 625737 - RNA, 19 nt, Artificial Sequence
  Synthetic
uuauuuuaagucucuacau

SEQ ID NO: 625738 - RNA, 20 nt, Artificial Sequence
  Synthetic
cuuauuuuaagucucuacau

SEQ ID NO: 625739 - RNA, 21 nt, Artificial Sequence
  Synthetic
ucuuauuuuaagucucuacau

SEQ ID NO: 625740 - RNA, 22 nt, Artificial Sequence
  Synthetic
uucuuauuuuaagucucuacau

SEQ ID NO: 625741 - RNA, 23 nt, Artificial Sequence
  Synthetic
auucuuauuuuaagucucuacau

SEQ ID NO: 625742 - RNA, 24 nt, Artificial Sequence
  Synthetic
gauucuuauuuuaagucucuacau

SEQ ID NO: 625743 - RNA, 18 nt, Artificial Sequence
  Synthetic
auagaacaaugucuacau

SEQ ID NO: 625744 - RNA, 19 nt, Artificial Sequence
  Synthetic
aauagaacaaugucuacau

SEQ ID NO: 625745 - RNA, 20 nt, Artificial Sequence
  Synthetic
gaauagaacaaugucuacau

SEQ ID NO: 625746 - RNA, 21 nt, Artificial Sequence
  Synthetic
agaauagaacaaugucuacau

SEQ ID NO: 625747 - RNA, 22 nt, Artificial Sequence
  Synthetic
cagaauagaacaaugucuacau

SEQ ID NO: 625748 - RNA, 23 nt, Artificial Sequence
  Synthetic
ucagaauagaacaaugucuacau

SEQ ID NO: 625749 - RNA, 24 nt, Artificial Sequence
  Synthetic
uucagaauagaacaaugucuacau

SEQ ID NO: 625750 - RNA, 18 nt, Artificial Sequence
  Synthetic
ugguuagguguucuacau

SEQ ID NO: 625751 - RNA, 19 nt, Artificial Sequence
  Synthetic
uugguuagguguucuacau

SEQ ID NO: 625752 - RNA, 20 nt, Artificial Sequence
  Synthetic
cuugguuagguguucuacau

SEQ ID NO: 625753 - RNA, 21 nt, Artificial Sequence
  Synthetic
ccuugguuagguguucuacau

SEQ ID NO: 625754 - RNA, 22 nt, Artificial Sequence
  Synthetic
accuugguuagguguucuacau

SEQ ID NO: 625755 - RNA, 23 nt, Artificial Sequence
  Synthetic
caccuugguuagguguucuacau

SEQ ID NO: 625756 - RNA, 24 nt, Artificial Sequence
  Synthetic
acaccuugguuagguguucuacau

SEQ ID NO: 625757 - RNA, 18 nt, Artificial Sequence
  Synthetic
aacugagaacaaguacau

SEQ ID NO: 625758 - RNA, 19 nt, Artificial Sequence
  Synthetic
caacugagaacaaguacau

SEQ ID NO: 625759 - RNA, 20 nt, Artificial Sequence
  Synthetic
ucaacugagaacaaguacau

SEQ ID NO: 625760 - RNA, 21 nt, Artificial Sequence
  Synthetic
uucaacugagaacaaguacau

SEQ ID NO: 625761 - RNA, 22 nt, Artificial Sequence
  Synthetic
uuucaacugagaacaaguacau

SEQ ID NO: 625762 - RNA, 23 nt, Artificial Sequence
  Synthetic
uuuucaacugagaacaaguacau

SEQ ID NO: 625763 - RNA, 24 nt, Artificial Sequence
  Synthetic
cuuuucaacugagaacaaguacau

SEQ ID NO: 625764 - RNA, 18 nt, Artificial Sequence
  Synthetic
caagccucugaaguacau

SEQ ID NO: 625765 - RNA, 19 nt, Artificial Sequence
  Synthetic
ucaagccucugaaguacau

SEQ ID NO: 625766 - RNA, 20 nt, Artificial Sequence
  Synthetic
cucaagccucugaaguacau

SEQ ID NO: 625767 - RNA, 21 nt, Artificial Sequence
  Synthetic
ucucaagccucugaaguacau

SEQ ID NO: 625768 - RNA, 22 nt, Artificial Sequence
  Synthetic
uucucaagccucugaaguacau

SEQ ID NO: 625769 - RNA, 23 nt, Artificial Sequence
  Synthetic
uuucucaagccucugaaguacau

SEQ ID NO: 625770 - RNA, 24 nt, Artificial Sequence
  Synthetic
uuuucucaagccucugaaguacau

SEQ ID NO: 625771 - RNA, 18 nt, Artificial Sequence
  Synthetic
uuacuucacacaguacau

SEQ ID NO: 625772 - RNA, 19 nt, Artificial Sequence
  Synthetic
cuuacuucacacaguacau

SEQ ID NO: 625773 - RNA, 20 nt, Artificial Sequence
  Synthetic
ucuuacuucacacaguacau

SEQ ID NO: 625774 - RNA, 21 nt, Artificial Sequence
  Synthetic
cucuuacuucacacaguacau

SEQ ID NO: 625775 - RNA, 22 nt, Artificial Sequence
  Synthetic
ucucuuacuucacacaguacau

SEQ ID NO: 625776 - RNA, 23 nt, Artificial Sequence
  Synthetic
cucucuuacuucacacaguacau

SEQ ID NO: 625777 - RNA, 24 nt, Artificial Sequence
  Synthetic
ucucucuuacuucacacaguacau

SEQ ID NO: 625778 - RNA, 18 nt, Artificial Sequence
  Synthetic
uucuugcaaagaguacau

SEQ ID NO: 625779 - RNA, 19 nt, Artificial Sequence
  Synthetic
auucuugcaaagaguacau

SEQ ID NO: 625780 - RNA, 20 nt, Artificial Sequence
  Synthetic
aauucuugcaaagaguacau

SEQ ID NO: 625781 - RNA, 21 nt, Artificial Sequence
  Synthetic
gaauucuugcaaagaguacau

SEQ ID NO: 625782 - RNA, 22 nt, Artificial Sequence
  Synthetic
ugaauucuugcaaagaguacau

SEQ ID NO: 625783 - RNA, 23 nt, Artificial Sequence
  Synthetic
augaauucuugcaaagaguacau

SEQ ID NO: 625784 - RNA, 24 nt, Artificial Sequence
  Synthetic
gaugaauucuugcaaagaguacau

SEQ ID NO: 625785 - RNA, 18 nt, Artificial Sequence
  Synthetic
gcuaaacacugaguacau

SEQ ID NO: 625786 - RNA, 19 nt, Artificial Sequence
  Synthetic
agcuaaacacugaguacau

SEQ ID NO: 625787 - RNA, 20 nt, Artificial Sequence
  Synthetic
gagcuaaacacugaguacau

SEQ ID NO: 625788 - RNA, 21 nt, Artificial Sequence
  Synthetic
ggagcuaaacacugaguacau

SEQ ID NO: 625789 - RNA, 22 nt, Artificial Sequence
  Synthetic
uggagcuaaacacugaguacau

SEQ ID NO: 625790 - RNA, 23 nt, Artificial Sequence
  Synthetic
guggagcuaaacacugaguacau

SEQ ID NO: 625791 - RNA, 24 nt, Artificial Sequence
  Synthetic
aguggagcuaaacacugaguacau

SEQ ID NO: 625792 - RNA, 18 nt, Artificial Sequence
  Synthetic
auauaaaggauaguacau

SEQ ID NO: 625793 - RNA, 19 nt, Artificial Sequence
  Synthetic
cauauaaaggauaguacau

SEQ ID NO: 625794 - RNA, 20 nt, Artificial Sequence
  Synthetic
acauauaaaggauaguacau

SEQ ID NO: 625795 - RNA, 21 nt, Artificial Sequence
  Synthetic
uacauauaaaggauaguacau

SEQ ID NO: 625796 - RNA, 22 nt, Artificial Sequence
  Synthetic
auacauauaaaggauaguacau

SEQ ID NO: 625797 - RNA, 23 nt, Artificial Sequence
  Synthetic
cauacauauaaaggauaguacau

SEQ ID NO: 625798 - RNA, 24 nt, Artificial Sequence
  Synthetic
acauacauauaaaggauaguacau

SEQ ID NO: 625799 - RNA, 18 nt, Artificial Sequence
  Synthetic
ggcagugaaaagguacau

SEQ ID NO: 625800 - RNA, 19 nt, Artificial Sequence
  Synthetic
uggcagugaaaagguacau

SEQ ID NO: 625801 - RNA, 20 nt, Artificial Sequence
  Synthetic
guggcagugaaaagguacau

SEQ ID NO: 625802 - RNA, 21 nt, Artificial Sequence
  Synthetic
gguggcagugaaaagguacau

SEQ ID NO: 625803 - RNA, 22 nt, Artificial Sequence
  Synthetic
ugguggcagugaaaagguacau

SEQ ID NO: 625804 - RNA, 23 nt, Artificial Sequence
  Synthetic
uugguggcagugaaaagguacau

SEQ ID NO: 625805 - RNA, 24 nt, Artificial Sequence
  Synthetic
cuugguggcagugaaaagguacau

SEQ ID NO: 625806 - RNA, 18 nt, Artificial Sequence
  Synthetic
aauuucugccugguacau

SEQ ID NO: 625807 - RNA, 19 nt, Artificial Sequence
  Synthetic
caauuucugccugguacau

SEQ ID NO: 625808 - RNA, 20 nt, Artificial Sequence
  Synthetic
ucaauuucugccugguacau

SEQ ID NO: 625809 - RNA, 21 nt, Artificial Sequence
  Synthetic
aucaauuucugccugguacau

SEQ ID NO: 625810 - RNA, 22 nt, Artificial Sequence
  Synthetic
gaucaauuucugccugguacau

SEQ ID NO: 625811 - RNA, 23 nt, Artificial Sequence
  Synthetic
agaucaauuucugccugguacau

SEQ ID NO: 625812 - RNA, 24 nt, Artificial Sequence
  Synthetic
cagaucaauuucugccugguacau

SEQ ID NO: 625813 - RNA, 18 nt, Artificial Sequence
  Synthetic
cacuuucagaauguacau

SEQ ID NO: 625814 - RNA, 19 nt, Artificial Sequence
  Synthetic
ucacuuucagaauguacau

SEQ ID NO: 625815 - RNA, 20 nt, Artificial Sequence
  Synthetic
cucacuuucagaauguacau

SEQ ID NO: 625816 - RNA, 21 nt, Artificial Sequence
  Synthetic
acucacuuucagaauguacau

SEQ ID NO: 625817 - RNA, 22 nt, Artificial Sequence
  Synthetic
cacucacuuucagaauguacau

SEQ ID NO: 625818 - RNA, 23 nt, Artificial Sequence
  Synthetic
ccacucacuuucagaauguacau

SEQ ID NO: 625819 - RNA, 24 nt, Artificial Sequence
  Synthetic
accacucacuuucagaauguacau

SEQ ID NO: 625820 - RNA, 18 nt, Artificial Sequence
  Synthetic
aagauacuccauguacau

SEQ ID NO: 625821 - RNA, 19 nt, Artificial Sequence
  Synthetic
aaagauacuccauguacau

SEQ ID NO: 625822 - RNA, 20 nt, Artificial Sequence
  Synthetic
aaaagauacuccauguacau

SEQ ID NO: 625823 - RNA, 21 nt, Artificial Sequence
  Synthetic
aaaaagauacuccauguacau

SEQ ID NO: 625824 - RNA, 22 nt, Artificial Sequence
  Synthetic
aaaaaagauacuccauguacau

SEQ ID NO: 625825 - RNA, 23 nt, Artificial Sequence
  Synthetic
gaaaaaagauacuccauguacau

SEQ ID NO: 625826 - RNA, 24 nt, Artificial Sequence
  Synthetic
ugaaaaaagauacuccauguacau

SEQ ID NO: 625827 - RNA, 18 nt, Artificial Sequence
  Synthetic
caugugaucccuguacau

SEQ ID NO: 625828 - RNA, 19 nt, Artificial Sequence
  Synthetic
ucaugugaucccuguacau

SEQ ID NO: 625829 - RNA, 20 nt, Artificial Sequence
  Synthetic
aucaugugaucccuguacau

SEQ ID NO: 625830 - RNA, 21 nt, Artificial Sequence
  Synthetic
aaucaugugaucccuguacau

SEQ ID NO: 625831 - RNA, 22 nt, Artificial Sequence
  Synthetic
caaucaugugaucccuguacau

SEQ ID NO: 625832 - RNA, 23 nt, Artificial Sequence
  Synthetic
ucaaucaugugaucccuguacau

SEQ ID NO: 625833 - RNA, 24 nt, Artificial Sequence
  Synthetic
aucaaucaugugaucccuguacau

SEQ ID NO: 625834 - RNA, 18 nt, Artificial Sequence
  Synthetic
uuacugaaaauuguacau

SEQ ID NO: 625835 - RNA, 19 nt, Artificial Sequence
  Synthetic
uuuacugaaaauuguacau

SEQ ID NO: 625836 - RNA, 20 nt, Artificial Sequence
  Synthetic
cuuuacugaaaauuguacau

SEQ ID NO: 625837 - RNA, 21 nt, Artificial Sequence
  Synthetic
ucuuuacugaaaauuguacau

SEQ ID NO: 625838 - RNA, 22 nt, Artificial Sequence
  Synthetic
uucuuuacugaaaauuguacau

SEQ ID NO: 625839 - RNA, 23 nt, Artificial Sequence
  Synthetic
uuucuuuacugaaaauuguacau

SEQ ID NO: 625840 - RNA, 24 nt, Artificial Sequence
  Synthetic
auuucuuuacugaaaauuguacau

SEQ ID NO: 625841 - RNA, 18 nt, Artificial Sequence
  Synthetic
gugcuagauauuguacau

SEQ ID NO: 625842 - RNA, 19 nt, Artificial Sequence
  Synthetic
ugugcuagauauuguacau

SEQ ID NO: 625843 - RNA, 20 nt, Artificial Sequence
  Synthetic
augugcuagauauuguacau

SEQ ID NO: 625844 - RNA, 21 nt, Artificial Sequence
  Synthetic
uaugugcuagauauuguacau

SEQ ID NO: 625845 - RNA, 22 nt, Artificial Sequence
  Synthetic
uuaugugcuagauauuguacau

SEQ ID NO: 625846 - RNA, 23 nt, Artificial Sequence
  Synthetic
auuaugugcuagauauuguacau

SEQ ID NO: 625847 - RNA, 24 nt, Artificial Sequence
  Synthetic
aauuaugugcuagauauuguacau

SEQ ID NO: 625848 - RNA, 18 nt, Artificial Sequence
  Synthetic
auuagaaaucaauuacau

SEQ ID NO: 625849 - RNA, 19 nt, Artificial Sequence
  Synthetic
aauuagaaaucaauuacau

SEQ ID NO: 625850 - RNA, 20 nt, Artificial Sequence
  Synthetic
aaauuagaaaucaauuacau

SEQ ID NO: 625851 - RNA, 21 nt, Artificial Sequence
  Synthetic
aaaauuagaaaucaauuacau

SEQ ID NO: 625852 - RNA, 22 nt, Artificial Sequence
  Synthetic
uaaaauuagaaaucaauuacau

SEQ ID NO: 625853 - RNA, 23 nt, Artificial Sequence
  Synthetic
auaaaauuagaaaucaauuacau

SEQ ID NO: 625854 - RNA, 24 nt, Artificial Sequence
  Synthetic
uauaaaauuagaaaucaauuacau

SEQ ID NO: 625855 - RNA, 18 nt, Artificial Sequence
  Synthetic
gcuaaaaucugauuacau

SEQ ID NO: 625856 - RNA, 19 nt, Artificial Sequence
  Synthetic
ugcuaaaaucugauuacau

SEQ ID NO: 625857 - RNA, 20 nt, Artificial Sequence
  Synthetic
uugcuaaaaucugauuacau

SEQ ID NO: 625858 - RNA, 21 nt, Artificial Sequence
  Synthetic
cuugcuaaaaucugauuacau

SEQ ID NO: 625859 - RNA, 22 nt, Artificial Sequence
  Synthetic
ucuugcuaaaaucugauuacau

SEQ ID NO: 625860 - RNA, 23 nt, Artificial Sequence
  Synthetic
aucuugcuaaaaucugauuacau

SEQ ID NO: 625861 - RNA, 24 nt, Artificial Sequence
  Synthetic
aaucuugcuaaaaucugauuacau

SEQ ID NO: 625862 - RNA, 18 nt, Artificial Sequence
  Synthetic
guauuauuauuauuacau

SEQ ID NO: 625863 - RNA, 19 nt, Artificial Sequence
  Synthetic
gguauuauuauuauuacau

SEQ ID NO: 625864 - RNA, 20 nt, Artificial Sequence
  Synthetic
ugguauuauuauuauuacau

SEQ ID NO: 625865 - RNA, 21 nt, Artificial Sequence
  Synthetic
uugguauuauuauuauuacau

SEQ ID NO: 625866 - RNA, 22 nt, Artificial Sequence
  Synthetic
cuugguauuauuauuauuacau

SEQ ID NO: 625867 - RNA, 23 nt, Artificial Sequence
  Synthetic
ucuugguauuauuauuauuacau

SEQ ID NO: 625868 - RNA, 24 nt, Artificial Sequence
  Synthetic
uucuugguauuauuauuauuacau

SEQ ID NO: 625869 - RNA, 18 nt, Artificial Sequence
  Synthetic
auuuagcuuagcuuacau

SEQ ID NO: 625870 - RNA, 19 nt, Artificial Sequence
  Synthetic
cauuuagcuuagcuuacau

SEQ ID NO: 625871 - RNA, 20 nt, Artificial Sequence
  Synthetic
ucauuuagcuuagcuuacau

SEQ ID NO: 625872 - RNA, 21 nt, Artificial Sequence
  Synthetic
aucauuuagcuuagcuuacau

SEQ ID NO: 625873 - RNA, 22 nt, Artificial Sequence
  Synthetic
aaucauuuagcuuagcuuacau

SEQ ID NO: 625874 - RNA, 23 nt, Artificial Sequence
  Synthetic
gaaucauuuagcuuagcuuacau

SEQ ID NO: 625875 - RNA, 24 nt, Artificial Sequence
  Synthetic
ugaaucauuuagcuuagcuuacau

SEQ ID NO: 625876 - RNA, 18 nt, Artificial Sequence
  Synthetic
auucuuucacucuuacau

SEQ ID NO: 625877 - RNA, 19 nt, Artificial Sequence
  Synthetic
uauucuuucacucuuacau

SEQ ID NO: 625878 - RNA, 20 nt, Artificial Sequence
  Synthetic
cuauucuuucacucuuacau

SEQ ID NO: 625879 - RNA, 21 nt, Artificial Sequence
  Synthetic
ccuauucuuucacucuuacau

SEQ ID NO: 625880 - RNA, 22 nt, Artificial Sequence
  Synthetic
cccuauucuuucacucuuacau

SEQ ID NO: 625881 - RNA, 23 nt, Artificial Sequence
  Synthetic
acccuauucuuucacucuuacau

SEQ ID NO: 625882 - RNA, 24 nt, Artificial Sequence
  Synthetic
aacccuauucuuucacucuuacau

SEQ ID NO: 625883 - RNA, 18 nt, Artificial Sequence
  Synthetic
acauuuacauucuuacau

SEQ ID NO: 625884 - RNA, 19 nt, Artificial Sequence
  Synthetic
aacauuuacauucuuacau

SEQ ID NO: 625885 - RNA, 20 nt, Artificial Sequence
  Synthetic
aaacauuuacauucuuacau

SEQ ID NO: 625886 - RNA, 21 nt, Artificial Sequence
  Synthetic
aaaacauuuacauucuuacau

SEQ ID NO: 625887 - RNA, 22 nt, Artificial Sequence
  Synthetic
gaaaacauuuacauucuuacau

SEQ ID NO: 625888 - RNA, 23 nt, Artificial Sequence
  Synthetic
agaaaacauuuacauucuuacau

SEQ ID NO: 625889 - RNA, 24 nt, Artificial Sequence
  Synthetic
cagaaaacauuuacauucuuacau

SEQ ID NO: 625890 - RNA, 18 nt, Artificial Sequence
  Synthetic
cauuaaaaauauuuacau

SEQ ID NO: 625891 - RNA, 19 nt, Artificial Sequence
  Synthetic
gcauuaaaaauauuuacau

SEQ ID NO: 625892 - RNA, 20 nt, Artificial Sequence
  Synthetic
agcauuaaaaauauuuacau

SEQ ID NO: 625893 - RNA, 21 nt, Artificial Sequence
  Synthetic
aagcauuaaaaauauuuacau

SEQ ID NO: 625894 - RNA, 22 nt, Artificial Sequence
  Synthetic
aaagcauuaaaaauauuuacau

SEQ ID NO: 625895 - RNA, 23 nt, Artificial Sequence
  Synthetic
aaaagcauuaaaaauauuuacau

SEQ ID NO: 625896 - RNA, 24 nt, Artificial Sequence
  Synthetic
uaaaagcauuaaaaauauuuacau

SEQ ID NO: 625897 - RNA, 18 nt, Artificial Sequence
  Synthetic
accuuagacuguuuacau

SEQ ID NO: 625898 - RNA, 19 nt, Artificial Sequence
  Synthetic
caccuuagacuguuuacau

SEQ ID NO: 625899 - RNA, 20 nt, Artificial Sequence
  Synthetic
ucaccuuagacuguuuacau

SEQ ID NO: 625900 - RNA, 21 nt, Artificial Sequence
  Synthetic
uucaccuuagacuguuuacau

SEQ ID NO: 625901 - RNA, 22 nt, Artificial Sequence
  Synthetic
auucaccuuagacuguuuacau

SEQ ID NO: 625902 - RNA, 23 nt, Artificial Sequence
  Synthetic
aauucaccuuagacuguuuacau

SEQ ID NO: 625903 - RNA, 24 nt, Artificial Sequence
  Synthetic
gaauucaccuuagacuguuuacau

SEQ ID NO: 625904 - RNA, 18 nt, Artificial Sequence
  Synthetic
uuuauccauuguuuacau

SEQ ID NO: 625905 - RNA, 19 nt, Artificial Sequence
  Synthetic
guuuauccauuguuuacau

SEQ ID NO: 625906 - RNA, 20 nt, Artificial Sequence
  Synthetic
aguuuauccauuguuuacau

SEQ ID NO: 625907 - RNA, 21 nt, Artificial Sequence
  Synthetic
caguuuauccauuguuuacau

SEQ ID NO: 625908 - RNA, 22 nt, Artificial Sequence
  Synthetic
acaguuuauccauuguuuacau

SEQ ID NO: 625909 - RNA, 23 nt, Artificial Sequence
  Synthetic
aacaguuuauccauuguuuacau

SEQ ID NO: 625910 - RNA, 24 nt, Artificial Sequence
  Synthetic
aaacaguuuauccauuguuuacau

SEQ ID NO: 625911 - RNA, 18 nt, Artificial Sequence
  Synthetic
aguaauaaaauuuuacau

SEQ ID NO: 625912 - RNA, 19 nt, Artificial Sequence
  Synthetic
caguaauaaaauuuuacau

SEQ ID NO: 625913 - RNA, 20 nt, Artificial Sequence
  Synthetic
ucaguaauaaaauuuuacau

SEQ ID NO: 625914 - RNA, 21 nt, Artificial Sequence
  Synthetic
cucaguaauaaaauuuuacau

SEQ ID NO: 625915 - RNA, 22 nt, Artificial Sequence
  Synthetic
ccucaguaauaaaauuuuacau

SEQ ID NO: 625916 - RNA, 23 nt, Artificial Sequence
  Synthetic
uccucaguaauaaaauuuuacau

SEQ ID NO: 625917 - RNA, 24 nt, Artificial Sequence
  Synthetic
uuccucaguaauaaaauuuuacau

SEQ ID NO: 625918 - RNA, 18 nt, Artificial Sequence
  Synthetic
uaacucauuguuuuacau

SEQ ID NO: 625919 - RNA, 19 nt, Artificial Sequence
  Synthetic
guaacucauuguuuuacau

SEQ ID NO: 625920 - RNA, 20 nt, Artificial Sequence
  Synthetic
aguaacucauuguuuuacau

SEQ ID NO: 625921 - RNA, 21 nt, Artificial Sequence
  Synthetic
uaguaacucauuguuuuacau

SEQ ID NO: 625922 - RNA, 22 nt, Artificial Sequence
  Synthetic
auaguaacucauuguuuuacau

SEQ ID NO: 625923 - RNA, 23 nt, Artificial Sequence
  Synthetic
cauaguaacucauuguuuuacau

SEQ ID NO: 625924 - RNA, 24 nt, Artificial Sequence
  Synthetic
acauaguaacucauuguuuuacau

SEQ ID NO: 625925 - RNA, 18 nt, Artificial Sequence
  Synthetic
agauugccaacaaaccau

SEQ ID NO: 625926 - RNA, 19 nt, Artificial Sequence
  Synthetic
aagauugccaacaaaccau

SEQ ID NO: 625927 - RNA, 20 nt, Artificial Sequence
  Synthetic
aaagauugccaacaaaccau

SEQ ID NO: 625928 - RNA, 21 nt, Artificial Sequence
  Synthetic
caaagauugccaacaaaccau

SEQ ID NO: 625929 - RNA, 22 nt, Artificial Sequence
  Synthetic
ccaaagauugccaacaaaccau

SEQ ID NO: 625930 - RNA, 23 nt, Artificial Sequence
  Synthetic
accaaagauugccaacaaaccau

SEQ ID NO: 625931 - RNA, 24 nt, Artificial Sequence
  Synthetic
caccaaagauugccaacaaaccau

SEQ ID NO: 625932 - RNA, 18 nt, Artificial Sequence
  Synthetic
ugggauuuuucaaaccau

SEQ ID NO: 625933 - RNA, 19 nt, Artificial Sequence
  Synthetic
cugggauuuuucaaaccau

SEQ ID NO: 625934 - RNA, 20 nt, Artificial Sequence
  Synthetic
gcugggauuuuucaaaccau

SEQ ID NO: 625935 - RNA, 21 nt, Artificial Sequence
  Synthetic
ggcugggauuuuucaaaccau

SEQ ID NO: 625936 - RNA, 22 nt, Artificial Sequence
  Synthetic
aggcugggauuuuucaaaccau

SEQ ID NO: 625937 - RNA, 23 nt, Artificial Sequence
  Synthetic
aaggcugggauuuuucaaaccau

SEQ ID NO: 625938 - RNA, 24 nt, Artificial Sequence
  Synthetic
gaaggcugggauuuuucaaaccau

SEQ ID NO: 625939 - RNA, 18 nt, Artificial Sequence
  Synthetic
cucagauucauaaaccau

SEQ ID NO: 625940 - RNA, 19 nt, Artificial Sequence
  Synthetic
ucucagauucauaaaccau

SEQ ID NO: 625941 - RNA, 20 nt, Artificial Sequence
  Synthetic
cucucagauucauaaaccau

SEQ ID NO: 625942 - RNA, 21 nt, Artificial Sequence
  Synthetic
acucucagauucauaaaccau

SEQ ID NO: 625943 - RNA, 22 nt, Artificial Sequence
  Synthetic
cacucucagauucauaaaccau

SEQ ID NO: 625944 - RNA, 23 nt, Artificial Sequence
  Synthetic
ucacucucagauucauaaaccau

SEQ ID NO: 625945 - RNA, 24 nt, Artificial Sequence
  Synthetic
cucacucucagauucauaaaccau

SEQ ID NO: 625946 - RNA, 18 nt, Artificial Sequence
  Synthetic
auauuaaagauaaaccau

SEQ ID NO: 625947 - RNA, 19 nt, Artificial Sequence
  Synthetic
cauauuaaagauaaaccau

SEQ ID NO: 625948 - RNA, 20 nt, Artificial Sequence
  Synthetic
acauauuaaagauaaaccau

SEQ ID NO: 625949 - RNA, 21 nt, Artificial Sequence
  Synthetic
aacauauuaaagauaaaccau

SEQ ID NO: 625950 - RNA, 22 nt, Artificial Sequence
  Synthetic
aaacauauuaaagauaaaccau

SEQ ID NO: 625951 - RNA, 23 nt, Artificial Sequence
  Synthetic
aaaacauauuaaagauaaaccau

SEQ ID NO: 625952 - RNA, 24 nt, Artificial Sequence
  Synthetic
uaaaacauauuaaagauaaaccau

SEQ ID NO: 625953 - RNA, 18 nt, Artificial Sequence
  Synthetic
auuaaggcuauaaaccau

SEQ ID NO: 625954 - RNA, 19 nt, Artificial Sequence
  Synthetic
aauuaaggcuauaaaccau

SEQ ID NO: 625955 - RNA, 20 nt, Artificial Sequence
  Synthetic
uaauuaaggcuauaaaccau

SEQ ID NO: 625956 - RNA, 21 nt, Artificial Sequence
  Synthetic
guaauuaaggcuauaaaccau

SEQ ID NO: 625957 - RNA, 22 nt, Artificial Sequence
  Synthetic
uguaauuaaggcuauaaaccau

SEQ ID NO: 625958 - RNA, 23 nt, Artificial Sequence
  Synthetic
auguaauuaaggcuauaaaccau

SEQ ID NO: 625959 - RNA, 24 nt, Artificial Sequence
  Synthetic
aauguaauuaaggcuauaaaccau

SEQ ID NO: 625960 - RNA, 18 nt, Artificial Sequence
  Synthetic
acagacuucgugaaccau

SEQ ID NO: 625961 - RNA, 19 nt, Artificial Sequence
  Synthetic
aacagacuucgugaaccau

SEQ ID NO: 625962 - RNA, 20 nt, Artificial Sequence
  Synthetic
gaacagacuucgugaaccau

SEQ ID NO: 625963 - RNA, 21 nt, Artificial Sequence
  Synthetic
ggaacagacuucgugaaccau

SEQ ID NO: 625964 - RNA, 22 nt, Artificial Sequence
  Synthetic
aggaacagacuucgugaaccau

SEQ ID NO: 625965 - RNA, 23 nt, Artificial Sequence
  Synthetic
caggaacagacuucgugaaccau

SEQ ID NO: 625966 - RNA, 24 nt, Artificial Sequence
  Synthetic
acaggaacagacuucgugaaccau

SEQ ID NO: 625967 - RNA, 18 nt, Artificial Sequence
  Synthetic
acaagaucacauaaccau

SEQ ID NO: 625968 - RNA, 19 nt, Artificial Sequence
  Synthetic
aacaagaucacauaaccau

SEQ ID NO: 625969 - RNA, 20 nt, Artificial Sequence
  Synthetic
uaacaagaucacauaaccau

SEQ ID NO: 625970 - RNA, 21 nt, Artificial Sequence
  Synthetic
uuaacaagaucacauaaccau

SEQ ID NO: 625971 - RNA, 22 nt, Artificial Sequence
  Synthetic
cuuaacaagaucacauaaccau

SEQ ID NO: 625972 - RNA, 23 nt, Artificial Sequence
  Synthetic
ucuuaacaagaucacauaaccau

SEQ ID NO: 625973 - RNA, 24 nt, Artificial Sequence
  Synthetic
aucuuaacaagaucacauaaccau

SEQ ID NO: 625974 - RNA, 18 nt, Artificial Sequence
  Synthetic
ccugcagaauguaaccau

SEQ ID NO: 625975 - RNA, 19 nt, Artificial Sequence
  Synthetic
gccugcagaauguaaccau

SEQ ID NO: 625976 - RNA, 20 nt, Artificial Sequence
  Synthetic
ugccugcagaauguaaccau

SEQ ID NO: 625977 - RNA, 21 nt, Artificial Sequence
  Synthetic
uugccugcagaauguaaccau

SEQ ID NO: 625978 - RNA, 22 nt, Artificial Sequence
  Synthetic
guugccugcagaauguaaccau

SEQ ID NO: 625979 - RNA, 23 nt, Artificial Sequence
  Synthetic
gguugccugcagaauguaaccau

SEQ ID NO: 625980 - RNA, 24 nt, Artificial Sequence
  Synthetic
agguugccugcagaauguaaccau

SEQ ID NO: 625981 - RNA, 18 nt, Artificial Sequence
  Synthetic
uuaacuuacagacaccau

SEQ ID NO: 625982 - RNA, 19 nt, Artificial Sequence
  Synthetic
auuaacuuacagacaccau

SEQ ID NO: 625983 - RNA, 20 nt, Artificial Sequence
  Synthetic
uauuaacuuacagacaccau

SEQ ID NO: 625984 - RNA, 21 nt, Artificial Sequence
  Synthetic
auauuaacuuacagacaccau

SEQ ID NO: 625985 - RNA, 22 nt, Artificial Sequence
  Synthetic
uauauuaacuuacagacaccau

SEQ ID NO: 625986 - RNA, 23 nt, Artificial Sequence
  Synthetic
auauauuaacuuacagacaccau

SEQ ID NO: 625987 - RNA, 24 nt, Artificial Sequence
  Synthetic
uauauauuaacuuacagacaccau

SEQ ID NO: 625988 - RNA, 18 nt, Artificial Sequence
  Synthetic
ggguuauagccccaccau

SEQ ID NO: 625989 - RNA, 19 nt, Artificial Sequence
  Synthetic
aggguuauagccccaccau

SEQ ID NO: 625990 - RNA, 20 nt, Artificial Sequence
  Synthetic
caggguuauagccccaccau

SEQ ID NO: 625991 - RNA, 21 nt, Artificial Sequence
  Synthetic
ucaggguuauagccccaccau

SEQ ID NO: 625992 - RNA, 22 nt, Artificial Sequence
  Synthetic
uucaggguuauagccccaccau

SEQ ID NO: 625993 - RNA, 23 nt, Artificial Sequence
  Synthetic
auucaggguuauagccccaccau

SEQ ID NO: 625994 - RNA, 24 nt, Artificial Sequence
  Synthetic
aauucaggguuauagccccaccau

SEQ ID NO: 625995 - RNA, 18 nt, Artificial Sequence
  Synthetic
ucuccuuucugccaccau

SEQ ID NO: 625996 - RNA, 19 nt, Artificial Sequence
  Synthetic
uucuccuuucugccaccau

SEQ ID NO: 625997 - RNA, 20 nt, Artificial Sequence
  Synthetic
cuucuccuuucugccaccau

SEQ ID NO: 625998 - RNA, 21 nt, Artificial Sequence
  Synthetic
acuucuccuuucugccaccau

SEQ ID NO: 625999 - RNA, 22 nt, Artificial Sequence
  Synthetic
cacuucuccuuucugccaccau

SEQ ID NO: 626000 - RNA, 23 nt, Artificial Sequence
  Synthetic
gcacuucuccuuucugccaccau

SEQ ID NO: 626001 - RNA, 24 nt, Artificial Sequence
  Synthetic
agcacuucuccuuucugccaccau

SEQ ID NO: 626002 - RNA, 18 nt, Artificial Sequence
  Synthetic
gccccccugauccaccau

SEQ ID NO: 626003 - RNA, 19 nt, Artificial Sequence
  Synthetic
ggccccccugauccaccau

SEQ ID NO: 626004 - RNA, 20 nt, Artificial Sequence
  Synthetic
gggccccccugauccaccau

SEQ ID NO: 626005 - RNA, 21 nt, Artificial Sequence
  Synthetic
ugggccccccugauccaccau

SEQ ID NO: 626006 - RNA, 22 nt, Artificial Sequence
  Synthetic
cugggccccccugauccaccau

SEQ ID NO: 626007 - RNA, 23 nt, Artificial Sequence
  Synthetic
ccugggccccccugauccaccau

SEQ ID NO: 626008 - RNA, 24 nt, Artificial Sequence
  Synthetic
cccugggccccccugauccaccau

SEQ ID NO: 626009 - RNA, 18 nt, Artificial Sequence
  Synthetic
acauacugaacucaccau

SEQ ID NO: 626010 - RNA, 19 nt, Artificial Sequence
  Synthetic
aacauacugaacucaccau

SEQ ID NO: 626011 - RNA, 20 nt, Artificial Sequence
  Synthetic
aaacauacugaacucaccau

SEQ ID NO: 626012 - RNA, 21 nt, Artificial Sequence
  Synthetic
uaaacauacugaacucaccau

SEQ ID NO: 626013 - RNA, 22 nt, Artificial Sequence
  Synthetic
uuaaacauacugaacucaccau

SEQ ID NO: 626014 - RNA, 23 nt, Artificial Sequence
  Synthetic
guuaaacauacugaacucaccau

SEQ ID NO: 626015 - RNA, 24 nt, Artificial Sequence
  Synthetic
uguuaaacauacugaacucaccau

SEQ ID NO: 626016 - RNA, 18 nt, Artificial Sequence
  Synthetic
uucaaaaugcuucaccau

SEQ ID NO: 626017 - RNA, 19 nt, Artificial Sequence
  Synthetic
guucaaaaugcuucaccau

SEQ ID NO: 626018 - RNA, 20 nt, Artificial Sequence
  Synthetic
aguucaaaaugcuucaccau

SEQ ID NO: 626019 - RNA, 21 nt, Artificial Sequence
  Synthetic
caguucaaaaugcuucaccau

SEQ ID NO: 626020 - RNA, 22 nt, Artificial Sequence
  Synthetic
ccaguucaaaaugcuucaccau

SEQ ID NO: 626021 - RNA, 23 nt, Artificial Sequence
  Synthetic
uccaguucaaaaugcuucaccau

SEQ ID NO: 626022 - RNA, 24 nt, Artificial Sequence
  Synthetic
auccaguucaaaaugcuucaccau

SEQ ID NO: 626023 - RNA, 18 nt, Artificial Sequence
  Synthetic
ggaaguugauuucaccau

SEQ ID NO: 626024 - RNA, 19 nt, Artificial Sequence
  Synthetic
uggaaguugauuucaccau

SEQ ID NO: 626025 - RNA, 20 nt, Artificial Sequence
  Synthetic
uuggaaguugauuucaccau

SEQ ID NO: 626026 - RNA, 21 nt, Artificial Sequence
  Synthetic
auuggaaguugauuucaccau

SEQ ID NO: 626027 - RNA, 22 nt, Artificial Sequence
  Synthetic
uauuggaaguugauuucaccau

SEQ ID NO: 626028 - RNA, 23 nt, Artificial Sequence
  Synthetic
cuauuggaaguugauuucaccau

SEQ ID NO: 626029 - RNA, 24 nt, Artificial Sequence
  Synthetic
gcuauuggaaguugauuucaccau

SEQ ID NO: 626030 - RNA, 18 nt, Artificial Sequence
  Synthetic
ucaaauuacaaagaccau

SEQ ID NO: 626031 - RNA, 19 nt, Artificial Sequence
  Synthetic
uucaaauuacaaagaccau

SEQ ID NO: 626032 - RNA, 20 nt, Artificial Sequence
  Synthetic
auucaaauuacaaagaccau

SEQ ID NO: 626033 - RNA, 21 nt, Artificial Sequence
  Synthetic
aauucaaauuacaaagaccau

SEQ ID NO: 626034 - RNA, 22 nt, Artificial Sequence
  Synthetic
gaauucaaauuacaaagaccau

SEQ ID NO: 626035 - RNA, 23 nt, Artificial Sequence
  Synthetic
agaauucaaauuacaaagaccau

SEQ ID NO: 626036 - RNA, 24 nt, Artificial Sequence
  Synthetic
cagaauucaaauuacaaagaccau

SEQ ID NO: 626037 - RNA, 18 nt, Artificial Sequence
  Synthetic
ggagcuuaccaagaccau

SEQ ID NO: 626038 - RNA, 19 nt, Artificial Sequence
  Synthetic
uggagcuuaccaagaccau

SEQ ID NO: 626039 - RNA, 20 nt, Artificial Sequence
  Synthetic
guggagcuuaccaagaccau

SEQ ID NO: 626040 - RNA, 21 nt, Artificial Sequence
  Synthetic
gguggagcuuaccaagaccau

SEQ ID NO: 626041 - RNA, 22 nt, Artificial Sequence
  Synthetic
ggguggagcuuaccaagaccau

SEQ ID NO: 626042 - RNA, 23 nt, Artificial Sequence
  Synthetic
gggguggagcuuaccaagaccau

SEQ ID NO: 626043 - RNA, 24 nt, Artificial Sequence
  Synthetic
agggguggagcuuaccaagaccau

SEQ ID NO: 626044 - RNA, 18 nt, Artificial Sequence
  Synthetic
guuuuguugccagaccau

SEQ ID NO: 626045 - RNA, 19 nt, Artificial Sequence
  Synthetic
uguuuuguugccagaccau

SEQ ID NO: 626046 - RNA, 20 nt, Artificial Sequence
  Synthetic
cuguuuuguugccagaccau

SEQ ID NO: 626047 - RNA, 21 nt, Artificial Sequence
  Synthetic
gcuguuuuguugccagaccau

SEQ ID NO: 626048 - RNA, 22 nt, Artificial Sequence
  Synthetic
agcuguuuuguugccagaccau

SEQ ID NO: 626049 - RNA, 23 nt, Artificial Sequence
  Synthetic
cagcuguuuuguugccagaccau

SEQ ID NO: 626050 - RNA, 24 nt, Artificial Sequence
  Synthetic
acagcuguuuuguugccagaccau

SEQ ID NO: 626051 - RNA, 18 nt, Artificial Sequence
  Synthetic
cgaaggaugagagaccau

SEQ ID NO: 626052 - RNA, 19 nt, Artificial Sequence
  Synthetic
ccgaaggaugagagaccau

SEQ ID NO: 626053 - RNA, 20 nt, Artificial Sequence
  Synthetic
gccgaaggaugagagaccau

SEQ ID NO: 626054 - RNA, 21 nt, Artificial Sequence
  Synthetic
ugccgaaggaugagagaccau

SEQ ID NO: 626055 - RNA, 22 nt, Artificial Sequence
  Synthetic
uugccgaaggaugagagaccau

SEQ ID NO: 626056 - RNA, 23 nt, Artificial Sequence
  Synthetic
cuugccgaaggaugagagaccau

SEQ ID NO: 626057 - RNA, 24 nt, Artificial Sequence
  Synthetic
gcuugccgaaggaugagagaccau

SEQ ID NO: 626058 - RNA, 18 nt, Artificial Sequence
  Synthetic
aggagaaaauaggaccau

SEQ ID NO: 626059 - RNA, 19 nt, Artificial Sequence
  Synthetic
uaggagaaaauaggaccau

SEQ ID NO: 626060 - RNA, 20 nt, Artificial Sequence
  Synthetic
uuaggagaaaauaggaccau

SEQ ID NO: 626061 - RNA, 21 nt, Artificial Sequence
  Synthetic
cuuaggagaaaauaggaccau

SEQ ID NO: 626062 - RNA, 22 nt, Artificial Sequence
  Synthetic
ucuuaggagaaaauaggaccau

SEQ ID NO: 626063 - RNA, 23 nt, Artificial Sequence
  Synthetic
aucuuaggagaaaauaggaccau

SEQ ID NO: 626064 - RNA, 24 nt, Artificial Sequence
  Synthetic
gaucuuaggagaaaauaggaccau

SEQ ID NO: 626065 - RNA, 18 nt, Artificial Sequence
  Synthetic
uguugugggagggaccau

SEQ ID NO: 626066 - RNA, 19 nt, Artificial Sequence
  Synthetic
guguugugggagggaccau

SEQ ID NO: 626067 - RNA, 20 nt, Artificial Sequence
  Synthetic
cguguugugggagggaccau

SEQ ID NO: 626068 - RNA, 21 nt, Artificial Sequence
  Synthetic
acguguugugggagggaccau

SEQ ID NO: 626069 - RNA, 22 nt, Artificial Sequence
  Synthetic
cacguguugugggagggaccau

SEQ ID NO: 626070 - RNA, 23 nt, Artificial Sequence
  Synthetic
ccacguguugugggagggaccau

SEQ ID NO: 626071 - RNA, 24 nt, Artificial Sequence
  Synthetic
cccacguguugugggagggaccau

SEQ ID NO: 626072 - RNA, 18 nt, Artificial Sequence
  Synthetic
auuugauggugggaccau

SEQ ID NO: 626073 - RNA, 19 nt, Artificial Sequence
  Synthetic
cauuugauggugggaccau

SEQ ID NO: 626074 - RNA, 20 nt, Artificial Sequence
  Synthetic
acauuugauggugggaccau

SEQ ID NO: 626075 - RNA, 21 nt, Artificial Sequence
  Synthetic
aacauuugauggugggaccau

SEQ ID NO: 626076 - RNA, 22 nt, Artificial Sequence
  Synthetic
caacauuugauggugggaccau

SEQ ID NO: 626077 - RNA, 23 nt, Artificial Sequence
  Synthetic
ucaacauuugauggugggaccau

SEQ ID NO: 626078 - RNA, 24 nt, Artificial Sequence
  Synthetic
uucaacauuugauggugggaccau

SEQ ID NO: 626079 - RNA, 18 nt, Artificial Sequence
  Synthetic
guaaugcuuauggaccau

SEQ ID NO: 626080 - RNA, 19 nt, Artificial Sequence
  Synthetic
gguaaugcuuauggaccau

SEQ ID NO: 626081 - RNA, 20 nt, Artificial Sequence
  Synthetic
agguaaugcuuauggaccau

SEQ ID NO: 626082 - RNA, 21 nt, Artificial Sequence
  Synthetic
aagguaaugcuuauggaccau

SEQ ID NO: 626083 - RNA, 22 nt, Artificial Sequence
  Synthetic
caagguaaugcuuauggaccau

SEQ ID NO: 626084 - RNA, 23 nt, Artificial Sequence
  Synthetic
ucaagguaaugcuuauggaccau

SEQ ID NO: 626085 - RNA, 24 nt, Artificial Sequence
  Synthetic
aucaagguaaugcuuauggaccau

SEQ ID NO: 626086 - RNA, 18 nt, Artificial Sequence
  Synthetic
uauaggucacuggaccau

SEQ ID NO: 626087 - RNA, 19 nt, Artificial Sequence
  Synthetic
uuauaggucacuggaccau

SEQ ID NO: 626088 - RNA, 20 nt, Artificial Sequence
  Synthetic
uuuauaggucacuggaccau

SEQ ID NO: 626089 - RNA, 21 nt, Artificial Sequence
  Synthetic
cuuuauaggucacuggaccau

SEQ ID NO: 626090 - RNA, 22 nt, Artificial Sequence
  Synthetic
acuuuauaggucacuggaccau

SEQ ID NO: 626091 - RNA, 23 nt, Artificial Sequence
  Synthetic
cacuuuauaggucacuggaccau

SEQ ID NO: 626092 - RNA, 24 nt, Artificial Sequence
  Synthetic
ucacuuuauaggucacuggaccau

SEQ ID NO: 626093 - RNA, 18 nt, Artificial Sequence
  Synthetic
aauuaggaaaaugaccau

SEQ ID NO: 626094 - RNA, 19 nt, Artificial Sequence
  Synthetic
gaauuaggaaaaugaccau

SEQ ID NO: 626095 - RNA, 20 nt, Artificial Sequence
  Synthetic
ggaauuaggaaaaugaccau

SEQ ID NO: 626096 - RNA, 21 nt, Artificial Sequence
  Synthetic
aggaauuaggaaaaugaccau

SEQ ID NO: 626097 - RNA, 22 nt, Artificial Sequence
  Synthetic
caggaauuaggaaaaugaccau

SEQ ID NO: 626098 - RNA, 23 nt, Artificial Sequence
  Synthetic
ccaggaauuaggaaaaugaccau

SEQ ID NO: 626099 - RNA, 24 nt, Artificial Sequence
  Synthetic
accaggaauuaggaaaaugaccau

SEQ ID NO: 626100 - RNA, 18 nt, Artificial Sequence
  Synthetic
uuuuauaugauauaccau

SEQ ID NO: 626101 - RNA, 19 nt, Artificial Sequence
  Synthetic
uuuuuauaugauauaccau

SEQ ID NO: 626102 - RNA, 20 nt, Artificial Sequence
  Synthetic
auuuuuauaugauauaccau

SEQ ID NO: 626103 - RNA, 21 nt, Artificial Sequence
  Synthetic
cauuuuuauaugauauaccau

SEQ ID NO: 626104 - RNA, 22 nt, Artificial Sequence
  Synthetic
ccauuuuuauaugauauaccau

SEQ ID NO: 626105 - RNA, 23 nt, Artificial Sequence
  Synthetic
uccauuuuuauaugauauaccau

SEQ ID NO: 626106 - RNA, 24 nt, Artificial Sequence
  Synthetic
uuccauuuuuauaugauauaccau

SEQ ID NO: 626107 - RNA, 23 nt, Artificial Sequence
  Synthetic
accacagaaauacaaacuaccau

SEQ ID NO: 626108 - RNA, 24 nt, Artificial Sequence
  Synthetic
caccacagaaauacaaacuaccau

SEQ ID NO: 626109 - RNA, 18 nt, Artificial Sequence
  Synthetic
uuuuaaaguugcuaccau

SEQ ID NO: 626110 - RNA, 19 nt, Artificial Sequence
  Synthetic
cuuuuaaaguugcuaccau

SEQ ID NO: 626111 - RNA, 20 nt, Artificial Sequence
  Synthetic
acuuuuaaaguugcuaccau

SEQ ID NO: 626112 - RNA, 21 nt, Artificial Sequence
  Synthetic
gacuuuuaaaguugcuaccau

SEQ ID NO: 626113 - RNA, 22 nt, Artificial Sequence
  Synthetic
ugacuuuuaaaguugcuaccau

SEQ ID NO: 626114 - RNA, 23 nt, Artificial Sequence
  Synthetic
gugacuuuuaaaguugcuaccau

SEQ ID NO: 626115 - RNA, 24 nt, Artificial Sequence
  Synthetic
ugugacuuuuaaaguugcuaccau

SEQ ID NO: 626116 - RNA, 18 nt, Artificial Sequence
  Synthetic
aaggacaauaucuaccau

SEQ ID NO: 626117 - RNA, 19 nt, Artificial Sequence
  Synthetic
uaaggacaauaucuaccau

SEQ ID NO: 626118 - RNA, 20 nt, Artificial Sequence
  Synthetic
auaaggacaauaucuaccau

SEQ ID NO: 626119 - RNA, 21 nt, Artificial Sequence
  Synthetic
aauaaggacaauaucuaccau

SEQ ID NO: 626120 - RNA, 22 nt, Artificial Sequence
  Synthetic
uaauaaggacaauaucuaccau

SEQ ID NO: 626121 - RNA, 23 nt, Artificial Sequence
  Synthetic
uuaauaaggacaauaucuaccau

SEQ ID NO: 626122 - RNA, 24 nt, Artificial Sequence
  Synthetic
cuuaauaaggacaauaucuaccau

SEQ ID NO: 626123 - RNA, 18 nt, Artificial Sequence
  Synthetic
ccauccucacucuaccau

SEQ ID NO: 626124 - RNA, 19 nt, Artificial Sequence
  Synthetic
gccauccucacucuaccau

SEQ ID NO: 626125 - RNA, 20 nt, Artificial Sequence
  Synthetic
ugccauccucacucuaccau

SEQ ID NO: 626126 - RNA, 21 nt, Artificial Sequence
  Synthetic
cugccauccucacucuaccau

SEQ ID NO: 626127 - RNA, 22 nt, Artificial Sequence
  Synthetic
acugccauccucacucuaccau

SEQ ID NO: 626128 - RNA, 23 nt, Artificial Sequence
  Synthetic
uacugccauccucacucuaccau

SEQ ID NO: 626129 - RNA, 24 nt, Artificial Sequence
  Synthetic
cuacugccauccucacucuaccau

SEQ ID NO: 626130 - RNA, 18 nt, Artificial Sequence
  Synthetic
caaaauauguucuaccau

SEQ ID NO: 626131 - RNA, 19 nt, Artificial Sequence
  Synthetic
ucaaaauauguucuaccau

SEQ ID NO: 626132 - RNA, 20 nt, Artificial Sequence
  Synthetic
uucaaaauauguucuaccau

SEQ ID NO: 626133 - RNA, 21 nt, Artificial Sequence
  Synthetic
uuucaaaauauguucuaccau

SEQ ID NO: 626134 - RNA, 22 nt, Artificial Sequence
  Synthetic
uuuucaaaauauguucuaccau

SEQ ID NO: 626135 - RNA, 23 nt, Artificial Sequence
  Synthetic
guuuucaaaauauguucuaccau

SEQ ID NO: 626136 - RNA, 24 nt, Artificial Sequence
  Synthetic
aguuuucaaaauauguucuaccau

SEQ ID NO: 626137 - RNA, 18 nt, Artificial Sequence
  Synthetic
agacuuauucaguaccau

SEQ ID NO: 626138 - RNA, 19 nt, Artificial Sequence
  Synthetic
gagacuuauucaguaccau

SEQ ID NO: 626139 - RNA, 20 nt, Artificial Sequence
  Synthetic
ugagacuuauucaguaccau

SEQ ID NO: 626140 - RNA, 21 nt, Artificial Sequence
  Synthetic
gugagacuuauucaguaccau

SEQ ID NO: 626141 - RNA, 22 nt, Artificial Sequence
  Synthetic
cgugagacuuauucaguaccau

SEQ ID NO: 626142 - RNA, 23 nt, Artificial Sequence
  Synthetic
ucgugagacuuauucaguaccau

SEQ ID NO: 626143 - RNA, 24 nt, Artificial Sequence
  Synthetic
cucgugagacuuauucaguaccau

SEQ ID NO: 626144 - RNA, 18 nt, Artificial Sequence
  Synthetic
uuauguuuuuuguaccau

SEQ ID NO: 626145 - RNA, 19 nt, Artificial Sequence
  Synthetic
auuauguuuuuuguaccau

SEQ ID NO: 626146 - RNA, 20 nt, Artificial Sequence
  Synthetic
uauuauguuuuuuguaccau

SEQ ID NO: 626147 - RNA, 21 nt, Artificial Sequence
  Synthetic
cuauuauguuuuuuguaccau

SEQ ID NO: 626148 - RNA, 22 nt, Artificial Sequence
  Synthetic
gcuauuauguuuuuuguaccau

SEQ ID NO: 626149 - RNA, 23 nt, Artificial Sequence
  Synthetic
ugcuauuauguuuuuuguaccau

SEQ ID NO: 626150 - RNA, 24 nt, Artificial Sequence
  Synthetic
gugcuauuauguuuuuuguaccau

SEQ ID NO: 626151 - RNA, 18 nt, Artificial Sequence
  Synthetic
aaagaaaacucuuaccau

SEQ ID NO: 626152 - RNA, 19 nt, Artificial Sequence
  Synthetic
aaaagaaaacucuuaccau

SEQ ID NO: 626153 - RNA, 20 nt, Artificial Sequence
  Synthetic
gaaaagaaaacucuuaccau

SEQ ID NO: 626154 - RNA, 21 nt, Artificial Sequence
  Synthetic
agaaaagaaaacucuuaccau

SEQ ID NO: 626155 - RNA, 22 nt, Artificial Sequence
  Synthetic
aagaaaagaaaacucuuaccau

SEQ ID NO: 626156 - RNA, 23 nt, Artificial Sequence
  Synthetic
uaagaaaagaaaacucuuaccau

SEQ ID NO: 626157 - RNA, 24 nt, Artificial Sequence
  Synthetic
uuaagaaaagaaaacucuuaccau

SEQ ID NO: 626158 - RNA, 18 nt, Artificial Sequence
  Synthetic
cauuauuguaguuaccau

SEQ ID NO: 626159 - RNA, 19 nt, Artificial Sequence
  Synthetic
acauuauuguaguuaccau

SEQ ID NO: 626160 - RNA, 20 nt, Artificial Sequence
  Synthetic
uacauuauuguaguuaccau

SEQ ID NO: 626161 - RNA, 21 nt, Artificial Sequence
  Synthetic
guacauuauuguaguuaccau

SEQ ID NO: 626162 - RNA, 22 nt, Artificial Sequence
  Synthetic
uguacauuauuguaguuaccau

SEQ ID NO: 626163 - RNA, 23 nt, Artificial Sequence
  Synthetic
cuguacauuauuguaguuaccau

SEQ ID NO: 626164 - RNA, 24 nt, Artificial Sequence
  Synthetic
acuguacauuauuguaguuaccau

SEQ ID NO: 626165 - RNA, 18 nt, Artificial Sequence
  Synthetic
gccuaaaacauuuaccau

SEQ ID NO: 626166 - RNA, 19 nt, Artificial Sequence
  Synthetic
agccuaaaacauuuaccau

SEQ ID NO: 626167 - RNA, 20 nt, Artificial Sequence
  Synthetic
aagccuaaaacauuuaccau

SEQ ID NO: 626168 - RNA, 21 nt, Artificial Sequence
  Synthetic
aaagccuaaaacauuuaccau

SEQ ID NO: 626169 - RNA, 22 nt, Artificial Sequence
  Synthetic
caaagccuaaaacauuuaccau

SEQ ID NO: 626170 - RNA, 23 nt, Artificial Sequence
  Synthetic
gcaaagccuaaaacauuuaccau

SEQ ID NO: 626171 - RNA, 24 nt, Artificial Sequence
  Synthetic
ugcaaagccuaaaacauuuaccau

SEQ ID NO: 626172 - RNA, 18 nt, Artificial Sequence
  Synthetic
agaaaaaaaaaaacccau

SEQ ID NO: 626173 - RNA, 19 nt, Artificial Sequence
  Synthetic
aagaaaaaaaaaaacccau

SEQ ID NO: 626174 - RNA, 20 nt, Artificial Sequence
  Synthetic
caagaaaaaaaaaaacccau

SEQ ID NO: 626175 - RNA, 21 nt, Artificial Sequence
  Synthetic
acaagaaaaaaaaaaacccau

SEQ ID NO: 626176 - RNA, 22 nt, Artificial Sequence
  Synthetic
uacaagaaaaaaaaaaacccau

SEQ ID NO: 626177 - RNA, 23 nt, Artificial Sequence
  Synthetic
uuacaagaaaaaaaaaaacccau

SEQ ID NO: 626178 - RNA, 24 nt, Artificial Sequence
  Synthetic
uuuacaagaaaaaaaaaaacccau

SEQ ID NO: 626179 - RNA, 18 nt, Artificial Sequence
  Synthetic
caagaaucuuaaacccau

SEQ ID NO: 626180 - RNA, 19 nt, Artificial Sequence
  Synthetic
ucaagaaucuuaaacccau

SEQ ID NO: 626181 - RNA, 20 nt, Artificial Sequence
  Synthetic
uucaagaaucuuaaacccau

SEQ ID NO: 626182 - RNA, 21 nt, Artificial Sequence
  Synthetic
cuucaagaaucuuaaacccau

SEQ ID NO: 626183 - RNA, 22 nt, Artificial Sequence
  Synthetic
ccuucaagaaucuuaaacccau

SEQ ID NO: 626184 - RNA, 23 nt, Artificial Sequence
  Synthetic
accuucaagaaucuuaaacccau

SEQ ID NO: 626185 - RNA, 24 nt, Artificial Sequence
  Synthetic
uaccuucaagaaucuuaaacccau

SEQ ID NO: 626186 - RNA, 18 nt, Artificial Sequence
  Synthetic
uucuggguauacacccau

SEQ ID NO: 626187 - RNA, 19 nt, Artificial Sequence
  Synthetic
guucuggguauacacccau

SEQ ID NO: 626188 - RNA, 20 nt, Artificial Sequence
  Synthetic
aguucuggguauacacccau

SEQ ID NO: 626189 - RNA, 21 nt, Artificial Sequence
  Synthetic
caguucuggguauacacccau

SEQ ID NO: 626190 - RNA, 22 nt, Artificial Sequence
  Synthetic
ucaguucuggguauacacccau

SEQ ID NO: 626191 - RNA, 23 nt, Artificial Sequence
  Synthetic
cucaguucuggguauacacccau

SEQ ID NO: 626192 - RNA, 24 nt, Artificial Sequence
  Synthetic
ucucaguucuggguauacacccau

SEQ ID NO: 626193 - RNA, 18 nt, Artificial Sequence
  Synthetic
accaucuuugagacccau

SEQ ID NO: 626194 - RNA, 19 nt, Artificial Sequence
  Synthetic
gaccaucuuugagacccau

SEQ ID NO: 626195 - RNA, 20 nt, Artificial Sequence
  Synthetic
ggaccaucuuugagacccau

SEQ ID NO: 626196 - RNA, 21 nt, Artificial Sequence
  Synthetic
aggaccaucuuugagacccau

SEQ ID NO: 626197 - RNA, 22 nt, Artificial Sequence
  Synthetic
caggaccaucuuugagacccau

SEQ ID NO: 626198 - RNA, 23 nt, Artificial Sequence
  Synthetic
acaggaccaucuuugagacccau

SEQ ID NO: 626199 - RNA, 24 nt, Artificial Sequence
  Synthetic
aacaggaccaucuuugagacccau

SEQ ID NO: 626200 - RNA, 18 nt, Artificial Sequence
  Synthetic
aaauaacccucuacccau

SEQ ID NO: 626201 - RNA, 19 nt, Artificial Sequence
  Synthetic
aaaauaacccucuacccau

SEQ ID NO: 626202 - RNA, 20 nt, Artificial Sequence
  Synthetic
aaaaauaacccucuacccau

SEQ ID NO: 626203 - RNA, 21 nt, Artificial Sequence
  Synthetic
aaaaaauaacccucuacccau

SEQ ID NO: 626204 - RNA, 22 nt, Artificial Sequence
  Synthetic
aaaaaaauaacccucuacccau

SEQ ID NO: 626205 - RNA, 23 nt, Artificial Sequence
  Synthetic
gaaaaaaauaacccucuacccau

SEQ ID NO: 626206 - RNA, 24 nt, Artificial Sequence
  Synthetic
agaaaaaaauaacccucuacccau

SEQ ID NO: 626207 - RNA, 18 nt, Artificial Sequence
  Synthetic
cagauuuuaaguacccau

SEQ ID NO: 626208 - RNA, 19 nt, Artificial Sequence
  Synthetic
acagauuuuaaguacccau

SEQ ID NO: 626209 - RNA, 20 nt, Artificial Sequence
  Synthetic
uacagauuuuaaguacccau

SEQ ID NO: 626210 - RNA, 21 nt, Artificial Sequence
  Synthetic
guacagauuuuaaguacccau

SEQ ID NO: 626211 - RNA, 22 nt, Artificial Sequence
  Synthetic
aguacagauuuuaaguacccau

SEQ ID NO: 626212 - RNA, 23 nt, Artificial Sequence
  Synthetic
uaguacagauuuuaaguacccau

SEQ ID NO: 626213 - RNA, 24 nt, Artificial Sequence
  Synthetic
auaguacagauuuuaaguacccau

SEQ ID NO: 626214 - RNA, 18 nt, Artificial Sequence
  Synthetic
cucauuuacuuuacccau

SEQ ID NO: 626215 - RNA, 19 nt, Artificial Sequence
  Synthetic
ucucauuuacuuuacccau

SEQ ID NO: 626216 - RNA, 20 nt, Artificial Sequence
  Synthetic
uucucauuuacuuuacccau

SEQ ID NO: 626217 - RNA, 21 nt, Artificial Sequence
  Synthetic
auucucauuuacuuuacccau

SEQ ID NO: 626218 - RNA, 22 nt, Artificial Sequence
  Synthetic
aauucucauuuacuuuacccau

SEQ ID NO: 626219 - RNA, 23 nt, Artificial Sequence
  Synthetic
aaauucucauuuacuuuacccau

SEQ ID NO: 626220 - RNA, 24 nt, Artificial Sequence
  Synthetic
aaaauucucauuuacuuuacccau

SEQ ID NO: 626221 - RNA, 18 nt, Artificial Sequence
  Synthetic
guucugccaaaaccccau

SEQ ID NO: 626222 - RNA, 19 nt, Artificial Sequence
  Synthetic
aguucugccaaaaccccau

SEQ ID NO: 626223 - RNA, 20 nt, Artificial Sequence
  Synthetic
uaguucugccaaaaccccau

SEQ ID NO: 626224 - RNA, 21 nt, Artificial Sequence
  Synthetic
cuaguucugccaaaaccccau

SEQ ID NO: 626225 - RNA, 22 nt, Artificial Sequence
  Synthetic
acuaguucugccaaaaccccau

SEQ ID NO: 626226 - RNA, 23 nt, Artificial Sequence
  Synthetic
aacuaguucugccaaaaccccau

SEQ ID NO: 626227 - RNA, 24 nt, Artificial Sequence
  Synthetic
gaacuaguucugccaaaaccccau

SEQ ID NO: 626228 - RNA, 18 nt, Artificial Sequence
  Synthetic
agaaaaaaaagaccccau

SEQ ID NO: 626229 - RNA, 19 nt, Artificial Sequence
  Synthetic
aagaaaaaaaagaccccau

SEQ ID NO: 626230 - RNA, 20 nt, Artificial Sequence
  Synthetic
caagaaaaaaaagaccccau

SEQ ID NO: 626231 - RNA, 21 nt, Artificial Sequence
  Synthetic
acaagaaaaaaaagaccccau

SEQ ID NO: 626232 - RNA, 22 nt, Artificial Sequence
  Synthetic
uacaagaaaaaaaagaccccau

SEQ ID NO: 626233 - RNA, 23 nt, Artificial Sequence
  Synthetic
uuacaagaaaaaaaagaccccau

SEQ ID NO: 626234 - RNA, 24 nt, Artificial Sequence
  Synthetic
uuuacaagaaaaaaaagaccccau

SEQ ID NO: 626235 - RNA, 18 nt, Artificial Sequence
  Synthetic
uugucuuuuucuccccau

SEQ ID NO: 626236 - RNA, 19 nt, Artificial Sequence
  Synthetic
uuugucuuuuucuccccau

SEQ ID NO: 626237 - RNA, 20 nt, Artificial Sequence
  Synthetic
auuugucuuuuucuccccau

SEQ ID NO: 626238 - RNA, 21 nt, Artificial Sequence
  Synthetic
uauuugucuuuuucuccccau

SEQ ID NO: 626239 - RNA, 22 nt, Artificial Sequence
  Synthetic
auauuugucuuuuucuccccau

SEQ ID NO: 626240 - RNA, 23 nt, Artificial Sequence
  Synthetic
uauauuugucuuuuucuccccau

SEQ ID NO: 626241 - RNA, 24 nt, Artificial Sequence
  Synthetic
auauauuugucuuuuucuccccau

SEQ ID NO: 626242 - RNA, 18 nt, Artificial Sequence
  Synthetic
augguuuauuguccccau

SEQ ID NO: 626243 - RNA, 19 nt, Artificial Sequence
  Synthetic
caugguuuauuguccccau

SEQ ID NO: 626244 - RNA, 20 nt, Artificial Sequence
  Synthetic
ucaugguuuauuguccccau

SEQ ID NO: 626245 - RNA, 21 nt, Artificial Sequence
  Synthetic
uucaugguuuauuguccccau

SEQ ID NO: 626246 - RNA, 22 nt, Artificial Sequence
  Synthetic
cuucaugguuuauuguccccau

SEQ ID NO: 626247 - RNA, 23 nt, Artificial Sequence
  Synthetic
ucuucaugguuuauuguccccau

SEQ ID NO: 626248 - RNA, 24 nt, Artificial Sequence
  Synthetic
uucuucaugguuuauuguccccau

SEQ ID NO: 626249 - RNA, 18 nt, Artificial Sequence
  Synthetic
ucauuuguaaaugcccau

SEQ ID NO: 626250 - RNA, 19 nt, Artificial Sequence
  Synthetic
cucauuuguaaaugcccau

SEQ ID NO: 626251 - RNA, 20 nt, Artificial Sequence
  Synthetic
acucauuuguaaaugcccau

SEQ ID NO: 626252 - RNA, 21 nt, Artificial Sequence
  Synthetic
gacucauuuguaaaugcccau

SEQ ID NO: 626253 - RNA, 22 nt, Artificial Sequence
  Synthetic
ugacucauuuguaaaugcccau

SEQ ID NO: 626254 - RNA, 23 nt, Artificial Sequence
  Synthetic
uugacucauuuguaaaugcccau

SEQ ID NO: 626255 - RNA, 24 nt, Artificial Sequence
  Synthetic
uuugacucauuuguaaaugcccau

SEQ ID NO: 626256 - RNA, 18 nt, Artificial Sequence
  Synthetic
ugauuugcuacugcccau

SEQ ID NO: 626257 - RNA, 19 nt, Artificial Sequence
  Synthetic
augauuugcuacugcccau

SEQ ID NO: 626258 - RNA, 20 nt, Artificial Sequence
  Synthetic
gaugauuugcuacugcccau

SEQ ID NO: 626259 - RNA, 21 nt, Artificial Sequence
  Synthetic
agaugauuugcuacugcccau

SEQ ID NO: 626260 - RNA, 22 nt, Artificial Sequence
  Synthetic
aagaugauuugcuacugcccau

SEQ ID NO: 626261 - RNA, 23 nt, Artificial Sequence
  Synthetic
caagaugauuugcuacugcccau

SEQ ID NO: 626262 - RNA, 24 nt, Artificial Sequence
  Synthetic
ucaagaugauuugcuacugcccau

SEQ ID NO: 626263 - RNA, 18 nt, Artificial Sequence
  Synthetic
ggugauaauuuugcccau

SEQ ID NO: 626264 - RNA, 19 nt, Artificial Sequence
  Synthetic
uggugauaauuuugcccau

SEQ ID NO: 626265 - RNA, 20 nt, Artificial Sequence
  Synthetic
uuggugauaauuuugcccau

SEQ ID NO: 626266 - RNA, 21 nt, Artificial Sequence
  Synthetic
guuggugauaauuuugcccau

SEQ ID NO: 626267 - RNA, 22 nt, Artificial Sequence
  Synthetic
uguuggugauaauuuugcccau

SEQ ID NO: 626268 - RNA, 23 nt, Artificial Sequence
  Synthetic
cuguuggugauaauuuugcccau

SEQ ID NO: 626269 - RNA, 24 nt, Artificial Sequence
  Synthetic
ucuguuggugauaauuuugcccau

SEQ ID NO: 626270 - RNA, 18 nt, Artificial Sequence
  Synthetic
caaguuaaaucaucccau

SEQ ID NO: 626271 - RNA, 19 nt, Artificial Sequence
  Synthetic
acaaguuaaaucaucccau

SEQ ID NO: 626272 - RNA, 20 nt, Artificial Sequence
  Synthetic
aacaaguuaaaucaucccau

SEQ ID NO: 626273 - RNA, 21 nt, Artificial Sequence
  Synthetic
gaacaaguuaaaucaucccau

SEQ ID NO: 626274 - RNA, 22 nt, Artificial Sequence
  Synthetic
agaacaaguuaaaucaucccau

SEQ ID NO: 626275 - RNA, 23 nt, Artificial Sequence
  Synthetic
cagaacaaguuaaaucaucccau

SEQ ID NO: 626276 - RNA, 24 nt, Artificial Sequence
  Synthetic
acagaacaaguuaaaucaucccau

SEQ ID NO: 626277 - RNA, 18 nt, Artificial Sequence
  Synthetic
agauguacuaacucccau

SEQ ID NO: 626278 - RNA, 19 nt, Artificial Sequence
  Synthetic
gagauguacuaacucccau

SEQ ID NO: 626279 - RNA, 20 nt, Artificial Sequence
  Synthetic
ugagauguacuaacucccau

SEQ ID NO: 626280 - RNA, 21 nt, Artificial Sequence
  Synthetic
uugagauguacuaacucccau

SEQ ID NO: 626281 - RNA, 22 nt, Artificial Sequence
  Synthetic
auugagauguacuaacucccau

SEQ ID NO: 626282 - RNA, 23 nt, Artificial Sequence
  Synthetic
uauugagauguacuaacucccau

SEQ ID NO: 626283 - RNA, 24 nt, Artificial Sequence
  Synthetic
guauugagauguacuaacucccau

SEQ ID NO: 626284 - RNA, 18 nt, Artificial Sequence
  Synthetic
ugggccaauuucucccau

SEQ ID NO: 626285 - RNA, 19 nt, Artificial Sequence
  Synthetic
uugggccaauuucucccau

SEQ ID NO: 626286 - RNA, 20 nt, Artificial Sequence
  Synthetic
uuugggccaauuucucccau

SEQ ID NO: 626287 - RNA, 21 nt, Artificial Sequence
  Synthetic
guuugggccaauuucucccau

SEQ ID NO: 626288 - RNA, 22 nt, Artificial Sequence
  Synthetic
uguuugggccaauuucucccau

SEQ ID NO: 626289 - RNA, 23 nt, Artificial Sequence
  Synthetic
uuguuugggccaauuucucccau

SEQ ID NO: 626290 - RNA, 24 nt, Artificial Sequence
  Synthetic
uuuguuugggccaauuucucccau

SEQ ID NO: 626291 - RNA, 18 nt, Artificial Sequence
  Synthetic
gcagcuagauggucccau

SEQ ID NO: 626292 - RNA, 19 nt, Artificial Sequence
  Synthetic
ugcagcuagauggucccau

SEQ ID NO: 626293 - RNA, 20 nt, Artificial Sequence
  Synthetic
cugcagcuagauggucccau

SEQ ID NO: 626294 - RNA, 21 nt, Artificial Sequence
  Synthetic
ccugcagcuagauggucccau

SEQ ID NO: 626295 - RNA, 22 nt, Artificial Sequence
  Synthetic
uccugcagcuagauggucccau

SEQ ID NO: 626296 - RNA, 23 nt, Artificial Sequence
  Synthetic
uuccugcagcuagauggucccau

SEQ ID NO: 626297 - RNA, 24 nt, Artificial Sequence
  Synthetic
uuuccugcagcuagauggucccau

SEQ ID NO: 626298 - RNA, 18 nt, Artificial Sequence
  Synthetic
guauguauugcuucccau

SEQ ID NO: 626299 - RNA, 19 nt, Artificial Sequence
  Synthetic
aguauguauugcuucccau

SEQ ID NO: 626300 - RNA, 20 nt, Artificial Sequence
  Synthetic
aaguauguauugcuucccau

SEQ ID NO: 626301 - RNA, 21 nt, Artificial Sequence
  Synthetic
gaaguauguauugcuucccau

SEQ ID NO: 626302 - RNA, 22 nt, Artificial Sequence
  Synthetic
ggaaguauguauugcuucccau

SEQ ID NO: 626303 - RNA, 23 nt, Artificial Sequence
  Synthetic
gggaaguauguauugcuucccau

SEQ ID NO: 626304 - RNA, 24 nt, Artificial Sequence
  Synthetic
agggaaguauguauugcuucccau

SEQ ID NO: 626305 - RNA, 18 nt, Artificial Sequence
  Synthetic
ggagcugaaauuucccau

SEQ ID NO: 626306 - RNA, 19 nt, Artificial Sequence
  Synthetic
gggagcugaaauuucccau

SEQ ID NO: 626307 - RNA, 20 nt, Artificial Sequence
  Synthetic
agggagcugaaauuucccau

SEQ ID NO: 626308 - RNA, 21 nt, Artificial Sequence
  Synthetic
uagggagcugaaauuucccau

SEQ ID NO: 626309 - RNA, 22 nt, Artificial Sequence
  Synthetic
uuagggagcugaaauuucccau

SEQ ID NO: 626310 - RNA, 23 nt, Artificial Sequence
  Synthetic
uuuagggagcugaaauuucccau

SEQ ID NO: 626311 - RNA, 24 nt, Artificial Sequence
  Synthetic
guuuagggagcugaaauuucccau

SEQ ID NO: 626312 - RNA, 18 nt, Artificial Sequence
  Synthetic
aaagagacccuuucccau

SEQ ID NO: 626313 - RNA, 19 nt, Artificial Sequence
  Synthetic
uaaagagacccuuucccau

SEQ ID NO: 626314 - RNA, 20 nt, Artificial Sequence
  Synthetic
uuaaagagacccuuucccau

SEQ ID NO: 626315 - RNA, 21 nt, Artificial Sequence
  Synthetic
auuaaagagacccuuucccau

SEQ ID NO: 626316 - RNA, 22 nt, Artificial Sequence
  Synthetic
gauuaaagagacccuuucccau

SEQ ID NO: 626317 - RNA, 23 nt, Artificial Sequence
  Synthetic
agauuaaagagacccuuucccau

SEQ ID NO: 626318 - RNA, 24 nt, Artificial Sequence
  Synthetic
cagauuaaagagacccuuucccau

SEQ ID NO: 626319 - RNA, 18 nt, Artificial Sequence
  Synthetic
uuguuaacuuuuucccau

SEQ ID NO: 626320 - RNA, 19 nt, Artificial Sequence
  Synthetic
uuuguuaacuuuuucccau

SEQ ID NO: 626321 - RNA, 20 nt, Artificial Sequence
  Synthetic
uuuuguuaacuuuuucccau

SEQ ID NO: 626322 - RNA, 21 nt, Artificial Sequence
  Synthetic
auuuuguuaacuuuuucccau

SEQ ID NO: 626323 - RNA, 22 nt, Artificial Sequence
  Synthetic
cauuuuguuaacuuuuucccau

SEQ ID NO: 626324 - RNA, 23 nt, Artificial Sequence
  Synthetic
acauuuuguuaacuuuuucccau

SEQ ID NO: 626325 - RNA, 24 nt, Artificial Sequence
  Synthetic
uacauuuuguuaacuuuuucccau

SEQ ID NO: 626326 - RNA, 18 nt, Artificial Sequence
  Synthetic
guuuugagcuaaagccau

SEQ ID NO: 626327 - RNA, 19 nt, Artificial Sequence
  Synthetic
uguuuugagcuaaagccau

SEQ ID NO: 626328 - RNA, 20 nt, Artificial Sequence
  Synthetic
uuguuuugagcuaaagccau

SEQ ID NO: 626329 - RNA, 21 nt, Artificial Sequence
  Synthetic
auuguuuugagcuaaagccau

SEQ ID NO: 626330 - RNA, 22 nt, Artificial Sequence
  Synthetic
aauuguuuugagcuaaagccau

SEQ ID NO: 626331 - RNA, 23 nt, Artificial Sequence
  Synthetic
aaauuguuuugagcuaaagccau

SEQ ID NO: 626332 - RNA, 24 nt, Artificial Sequence
  Synthetic
aaaauuguuuugagcuaaagccau

SEQ ID NO: 626333 - RNA, 18 nt, Artificial Sequence
  Synthetic
uauucuaucacaagccau

SEQ ID NO: 626334 - RNA, 19 nt, Artificial Sequence
  Synthetic
auauucuaucacaagccau

SEQ ID NO: 626335 - RNA, 20 nt, Artificial Sequence
  Synthetic
uauauucuaucacaagccau

SEQ ID NO: 626336 - RNA, 21 nt, Artificial Sequence
  Synthetic
uuauauucuaucacaagccau

SEQ ID NO: 626337 - RNA, 22 nt, Artificial Sequence
  Synthetic
cuuauauucuaucacaagccau

SEQ ID NO: 626338 - RNA, 23 nt, Artificial Sequence
  Synthetic
ccuuauauucuaucacaagccau

SEQ ID NO: 626339 - RNA, 24 nt, Artificial Sequence
  Synthetic
cccuuauauucuaucacaagccau

SEQ ID NO: 626340 - RNA, 18 nt, Artificial Sequence
  Synthetic
ccccacugcagaagccau

SEQ ID NO: 626341 - RNA, 19 nt, Artificial Sequence
  Synthetic
accccacugcagaagccau

SEQ ID NO: 626342 - RNA, 20 nt, Artificial Sequence
  Synthetic
aaccccacugcagaagccau

SEQ ID NO: 626343 - RNA, 21 nt, Artificial Sequence
  Synthetic
caaccccacugcagaagccau

SEQ ID NO: 626344 - RNA, 22 nt, Artificial Sequence
  Synthetic
ccaaccccacugcagaagccau

SEQ ID NO: 626345 - RNA, 23 nt, Artificial Sequence
  Synthetic
uccaaccccacugcagaagccau

SEQ ID NO: 626346 - RNA, 24 nt, Artificial Sequence
  Synthetic
uuccaaccccacugcagaagccau

SEQ ID NO: 626347 - RNA, 18 nt, Artificial Sequence
  Synthetic
ugaggccuacccagccau

SEQ ID NO: 626348 - RNA, 19 nt, Artificial Sequence
  Synthetic
cugaggccuacccagccau

SEQ ID NO: 626349 - RNA, 20 nt, Artificial Sequence
  Synthetic
ccugaggccuacccagccau

SEQ ID NO: 626350 - RNA, 21 nt, Artificial Sequence
  Synthetic
uccugaggccuacccagccau

SEQ ID NO: 626351 - RNA, 22 nt, Artificial Sequence
  Synthetic
uuccugaggccuacccagccau

SEQ ID NO: 626352 - RNA, 23 nt, Artificial Sequence
  Synthetic
uuuccugaggccuacccagccau

SEQ ID NO: 626353 - RNA, 24 nt, Artificial Sequence
  Synthetic
guuuccugaggccuacccagccau

SEQ ID NO: 626354 - RNA, 18 nt, Artificial Sequence
  Synthetic
ugaggccuccccagccau

SEQ ID NO: 626355 - RNA, 19 nt, Artificial Sequence
  Synthetic
cugaggccuccccagccau

SEQ ID NO: 626356 - RNA, 20 nt, Artificial Sequence
  Synthetic
ccugaggccuccccagccau

SEQ ID NO: 626357 - RNA, 21 nt, Artificial Sequence
  Synthetic
cccugaggccuccccagccau

SEQ ID NO: 626358 - RNA, 22 nt, Artificial Sequence
  Synthetic
ucccugaggccuccccagccau

SEQ ID NO: 626359 - RNA, 23 nt, Artificial Sequence
  Synthetic
uucccugaggccuccccagccau

SEQ ID NO: 626360 - RNA, 24 nt, Artificial Sequence
  Synthetic
uuucccugaggccuccccagccau

SEQ ID NO: 626361 - RNA, 18 nt, Artificial Sequence
  Synthetic
ugaggccucuccagccau

SEQ ID NO: 626362 - RNA, 19 nt, Artificial Sequence
  Synthetic
gugaggccucuccagccau

SEQ ID NO: 626363 - RNA, 20 nt, Artificial Sequence
  Synthetic
ugugaggccucuccagccau

SEQ ID NO: 626364 - RNA, 21 nt, Artificial Sequence
  Synthetic
uugugaggccucuccagccau

SEQ ID NO: 626365 - RNA, 22 nt, Artificial Sequence
  Synthetic
auugugaggccucuccagccau

SEQ ID NO: 626366 - RNA, 23 nt, Artificial Sequence
  Synthetic
gauugugaggccucuccagccau

SEQ ID NO: 626367 - RNA, 24 nt, Artificial Sequence
  Synthetic
ugauugugaggccucuccagccau

SEQ ID NO: 626368 - RNA, 18 nt, Artificial Sequence
  Synthetic
acccuuaacuucagccau

SEQ ID NO: 626369 - RNA, 19 nt, Artificial Sequence
  Synthetic
uacccuuaacuucagccau

SEQ ID NO: 626370 - RNA, 20 nt, Artificial Sequence
  Synthetic
auacccuuaacuucagccau

SEQ ID NO: 626371 - RNA, 21 nt, Artificial Sequence
  Synthetic
uauacccuuaacuucagccau

SEQ ID NO: 626372 - RNA, 22 nt, Artificial Sequence
  Synthetic
auauacccuuaacuucagccau

SEQ ID NO: 626373 - RNA, 23 nt, Artificial Sequence
  Synthetic
cauauacccuuaacuucagccau

SEQ ID NO: 626374 - RNA, 24 nt, Artificial Sequence
  Synthetic
ucauauacccuuaacuucagccau

SEQ ID NO: 626375 - RNA, 18 nt, Artificial Sequence
  Synthetic
uuugucuacaagagccau

SEQ ID NO: 626376 - RNA, 19 nt, Artificial Sequence
  Synthetic
cuuugucuacaagagccau

SEQ ID NO: 626377 - RNA, 20 nt, Artificial Sequence
  Synthetic
ucuuugucuacaagagccau

SEQ ID NO: 626378 - RNA, 21 nt, Artificial Sequence
  Synthetic
cucuuugucuacaagagccau

SEQ ID NO: 626379 - RNA, 22 nt, Artificial Sequence
  Synthetic
ucucuuugucuacaagagccau

SEQ ID NO: 626380 - RNA, 23 nt, Artificial Sequence
  Synthetic
aucucuuugucuacaagagccau

SEQ ID NO: 626381 - RNA, 24 nt, Artificial Sequence
  Synthetic
caucucuuugucuacaagagccau

SEQ ID NO: 626382 - RNA, 18 nt, Artificial Sequence
  Synthetic
ugacgaauuuugagccau

SEQ ID NO: 626383 - RNA, 19 nt, Artificial Sequence
  Synthetic
augacgaauuuugagccau

SEQ ID NO: 626384 - RNA, 20 nt, Artificial Sequence
  Synthetic
gaugacgaauuuugagccau

SEQ ID NO: 626385 - RNA, 21 nt, Artificial Sequence
  Synthetic
agaugacgaauuuugagccau

SEQ ID NO: 626386 - RNA, 22 nt, Artificial Sequence
  Synthetic
gagaugacgaauuuugagccau

SEQ ID NO: 626387 - RNA, 23 nt, Artificial Sequence
  Synthetic
agagaugacgaauuuugagccau

SEQ ID NO: 626388 - RNA, 24 nt, Artificial Sequence
  Synthetic
uagagaugacgaauuuugagccau

SEQ ID NO: 626389 - RNA, 18 nt, Artificial Sequence
  Synthetic
uuccagaauucuagccau

SEQ ID NO: 626390 - RNA, 19 nt, Artificial Sequence
  Synthetic
uuuccagaauucuagccau

SEQ ID NO: 626391 - RNA, 20 nt, Artificial Sequence
  Synthetic
guuuccagaauucuagccau

SEQ ID NO: 626392 - RNA, 21 nt, Artificial Sequence
  Synthetic
aguuuccagaauucuagccau

SEQ ID NO: 626393 - RNA, 22 nt, Artificial Sequence
  Synthetic
uaguuuccagaauucuagccau

SEQ ID NO: 626394 - RNA, 23 nt, Artificial Sequence
  Synthetic
auaguuuccagaauucuagccau

SEQ ID NO: 626395 - RNA, 24 nt, Artificial Sequence
  Synthetic
aauaguuuccagaauucuagccau

SEQ ID NO: 626396 - RNA, 18 nt, Artificial Sequence
  Synthetic
uguauagugaguagccau

SEQ ID NO: 626397 - RNA, 19 nt, Artificial Sequence
  Synthetic
uuguauagugaguagccau

SEQ ID NO: 626398 - RNA, 20 nt, Artificial Sequence
  Synthetic
uuuguauagugaguagccau

SEQ ID NO: 626399 - RNA, 21 nt, Artificial Sequence
  Synthetic
auuuguauagugaguagccau

SEQ ID NO: 626400 - RNA, 22 nt, Artificial Sequence
  Synthetic
uauuuguauagugaguagccau

SEQ ID NO: 626401 - RNA, 23 nt, Artificial Sequence
  Synthetic
auauuuguauagugaguagccau

SEQ ID NO: 626402 - RNA, 24 nt, Artificial Sequence
  Synthetic
aauauuuguauagugaguagccau

SEQ ID NO: 626403 - RNA, 18 nt, Artificial Sequence
  Synthetic
ucucucugcuuucgccau

SEQ ID NO: 626404 - RNA, 19 nt, Artificial Sequence
  Synthetic
cucucucugcuuucgccau

SEQ ID NO: 626405 - RNA, 20 nt, Artificial Sequence
  Synthetic
ucucucucugcuuucgccau

SEQ ID NO: 626406 - RNA, 21 nt, Artificial Sequence
  Synthetic
cucucucucugcuuucgccau

SEQ ID NO: 626407 - RNA, 22 nt, Artificial Sequence
  Synthetic
ucucucucucugcuuucgccau

SEQ ID NO: 626408 - RNA, 23 nt, Artificial Sequence
  Synthetic
cucucucucucugcuuucgccau

SEQ ID NO: 626409 - RNA, 24 nt, Artificial Sequence
  Synthetic
acucucucucucugcuuucgccau

SEQ ID NO: 626410 - RNA, 18 nt, Artificial Sequence
  Synthetic
caucauguugaaggccau

SEQ ID NO: 626411 - RNA, 19 nt, Artificial Sequence
  Synthetic
acaucauguugaaggccau

SEQ ID NO: 626412 - RNA, 20 nt, Artificial Sequence
  Synthetic
gacaucauguugaaggccau

SEQ ID NO: 626413 - RNA, 21 nt, Artificial Sequence
  Synthetic
ggacaucauguugaaggccau

SEQ ID NO: 626414 - RNA, 22 nt, Artificial Sequence
  Synthetic
aggacaucauguugaaggccau

SEQ ID NO: 626415 - RNA, 23 nt, Artificial Sequence
  Synthetic
aaggacaucauguugaaggccau

SEQ ID NO: 626416 - RNA, 24 nt, Artificial Sequence
  Synthetic
uaaggacaucauguugaaggccau

SEQ ID NO: 626417 - RNA, 24 nt, Artificial Sequence
  Synthetic
aaaaugcucaucaucacuggccau

SEQ ID NO: 626418 - RNA, 18 nt, Artificial Sequence
  Synthetic
ggcguaguggcuggccau

SEQ ID NO: 626419 - RNA, 19 nt, Artificial Sequence
  Synthetic
gggcguaguggcuggccau

SEQ ID NO: 626420 - RNA, 20 nt, Artificial Sequence
  Synthetic
ggggcguaguggcuggccau

SEQ ID NO: 626421 - RNA, 21 nt, Artificial Sequence
  Synthetic
aggggcguaguggcuggccau

SEQ ID NO: 626422 - RNA, 22 nt, Artificial Sequence
  Synthetic
gaggggcguaguggcuggccau

SEQ ID NO: 626423 - RNA, 23 nt, Artificial Sequence
  Synthetic
ugaggggcguaguggcuggccau

SEQ ID NO: 626424 - RNA, 24 nt, Artificial Sequence
  Synthetic
augaggggcguaguggcuggccau

SEQ ID NO: 626425 - RNA, 18 nt, Artificial Sequence
  Synthetic
uuuacauaucuuggccau

SEQ ID NO: 626426 - RNA, 19 nt, Artificial Sequence
  Synthetic
cuuuacauaucuuggccau

SEQ ID NO: 626427 - RNA, 20 nt, Artificial Sequence
  Synthetic
acuuuacauaucuuggccau

SEQ ID NO: 626428 - RNA, 21 nt, Artificial Sequence
  Synthetic
cacuuuacauaucuuggccau

SEQ ID NO: 626429 - RNA, 22 nt, Artificial Sequence
  Synthetic
gcacuuuacauaucuuggccau

SEQ ID NO: 626430 - RNA, 23 nt, Artificial Sequence
  Synthetic
agcacuuuacauaucuuggccau

SEQ ID NO: 626431 - RNA, 24 nt, Artificial Sequence
  Synthetic
gagcacuuuacauaucuuggccau

SEQ ID NO: 626432 - RNA, 18 nt, Artificial Sequence
  Synthetic
uucacaaaguuuggccau

SEQ ID NO: 626433 - RNA, 19 nt, Artificial Sequence
  Synthetic
uuucacaaaguuuggccau

SEQ ID NO: 626434 - RNA, 20 nt, Artificial Sequence
  Synthetic
guuucacaaaguuuggccau

SEQ ID NO: 626435 - RNA, 21 nt, Artificial Sequence
  Synthetic
aguuucacaaaguuuggccau

SEQ ID NO: 626436 - RNA, 22 nt, Artificial Sequence
  Synthetic
caguuucacaaaguuuggccau

SEQ ID NO: 626437 - RNA, 23 nt, Artificial Sequence
  Synthetic
acaguuucacaaaguuuggccau

SEQ ID NO: 626438 - RNA, 24 nt, Artificial Sequence
  Synthetic
uacaguuucacaaaguuuggccau

SEQ ID NO: 626439 - RNA, 18 nt, Artificial Sequence
  Synthetic
aauugauagcaaugccau

SEQ ID NO: 626440 - RNA, 19 nt, Artificial Sequence
  Synthetic
aaauugauagcaaugccau

SEQ ID NO: 626441 - RNA, 20 nt, Artificial Sequence
  Synthetic
gaaauugauagcaaugccau

SEQ ID NO: 626442 - RNA, 21 nt, Artificial Sequence
  Synthetic
ugaaauugauagcaaugccau

SEQ ID NO: 626443 - RNA, 22 nt, Artificial Sequence
  Synthetic
cugaaauugauagcaaugccau

SEQ ID NO: 626444 - RNA, 23 nt, Artificial Sequence
  Synthetic
acugaaauugauagcaaugccau

SEQ ID NO: 626445 - RNA, 24 nt, Artificial Sequence
  Synthetic
gacugaaauugauagcaaugccau

SEQ ID NO: 626446 - RNA, 18 nt, Artificial Sequence
  Synthetic
acacagggggcaugccau

SEQ ID NO: 626447 - RNA, 19 nt, Artificial Sequence
  Synthetic
uacacagggggcaugccau

SEQ ID NO: 626448 - RNA, 20 nt, Artificial Sequence
  Synthetic
guacacagggggcaugccau

SEQ ID NO: 626449 - RNA, 21 nt, Artificial Sequence
  Synthetic
cguacacagggggcaugccau

SEQ ID NO: 626450 - RNA, 22 nt, Artificial Sequence
  Synthetic
acguacacagggggcaugccau

SEQ ID NO: 626451 - RNA, 23 nt, Artificial Sequence
  Synthetic
cacguacacagggggcaugccau

SEQ ID NO: 626452 - RNA, 24 nt, Artificial Sequence
  Synthetic
acacguacacagggggcaugccau

SEQ ID NO: 626453 - RNA, 18 nt, Artificial Sequence
  Synthetic
uaaaaugcaugaugccau

SEQ ID NO: 626454 - RNA, 19 nt, Artificial Sequence
  Synthetic
cuaaaaugcaugaugccau

SEQ ID NO: 626455 - RNA, 20 nt, Artificial Sequence
  Synthetic
ucuaaaaugcaugaugccau

SEQ ID NO: 626456 - RNA, 21 nt, Artificial Sequence
  Synthetic
aucuaaaaugcaugaugccau

SEQ ID NO: 626457 - RNA, 22 nt, Artificial Sequence
  Synthetic
uaucuaaaaugcaugaugccau

SEQ ID NO: 626458 - RNA, 23 nt, Artificial Sequence
  Synthetic
uuaucuaaaaugcaugaugccau

SEQ ID NO: 626459 - RNA, 24 nt, Artificial Sequence
  Synthetic
uuuaucuaaaaugcaugaugccau

SEQ ID NO: 626460 - RNA, 18 nt, Artificial Sequence
  Synthetic
uaaaucuggauaugccau

SEQ ID NO: 626461 - RNA, 19 nt, Artificial Sequence
  Synthetic
auaaaucuggauaugccau

SEQ ID NO: 626462 - RNA, 20 nt, Artificial Sequence
  Synthetic
aauaaaucuggauaugccau

SEQ ID NO: 626463 - RNA, 21 nt, Artificial Sequence
  Synthetic
aaauaaaucuggauaugccau

SEQ ID NO: 626464 - RNA, 22 nt, Artificial Sequence
  Synthetic
uaaauaaaucuggauaugccau

SEQ ID NO: 626465 - RNA, 23 nt, Artificial Sequence
  Synthetic
auaaauaaaucuggauaugccau

SEQ ID NO: 626466 - RNA, 24 nt, Artificial Sequence
  Synthetic
cauaaauaaaucuggauaugccau

SEQ ID NO: 626467 - RNA, 18 nt, Artificial Sequence
  Synthetic
caaaucuagcacugccau

SEQ ID NO: 626468 - RNA, 19 nt, Artificial Sequence
  Synthetic
gcaaaucuagcacugccau

SEQ ID NO: 626469 - RNA, 20 nt, Artificial Sequence
  Synthetic
agcaaaucuagcacugccau

SEQ ID NO: 626470 - RNA, 21 nt, Artificial Sequence
  Synthetic
uagcaaaucuagcacugccau

SEQ ID NO: 626471 - RNA, 22 nt, Artificial Sequence
  Synthetic
uuagcaaaucuagcacugccau

SEQ ID NO: 626472 - RNA, 23 nt, Artificial Sequence
  Synthetic
uuuagcaaaucuagcacugccau

SEQ ID NO: 626473 - RNA, 24 nt, Artificial Sequence
  Synthetic
uuuuagcaaaucuagcacugccau

SEQ ID NO: 626474 - RNA, 18 nt, Artificial Sequence
  Synthetic
uacaaacuaugcugccau

SEQ ID NO: 626475 - RNA, 19 nt, Artificial Sequence
  Synthetic
uuacaaacuaugcugccau

SEQ ID NO: 626476 - RNA, 20 nt, Artificial Sequence
  Synthetic
cuuacaaacuaugcugccau

SEQ ID NO: 626477 - RNA, 21 nt, Artificial Sequence
  Synthetic
acuuacaaacuaugcugccau

SEQ ID NO: 626478 - RNA, 22 nt, Artificial Sequence
  Synthetic
cacuuacaaacuaugcugccau

SEQ ID NO: 626479 - RNA, 23 nt, Artificial Sequence
  Synthetic
gcacuuacaaacuaugcugccau

SEQ ID NO: 626480 - RNA, 24 nt, Artificial Sequence
  Synthetic
ugcacuuacaaacuaugcugccau

SEQ ID NO: 626481 - RNA, 18 nt, Artificial Sequence
  Synthetic
ccuccuuccugcugccau

SEQ ID NO: 626482 - RNA, 19 nt, Artificial Sequence
  Synthetic
uccuccuuccugcugccau

SEQ ID NO: 626483 - RNA, 20 nt, Artificial Sequence
  Synthetic
cuccuccuuccugcugccau

SEQ ID NO: 626484 - RNA, 21 nt, Artificial Sequence
  Synthetic
ucuccuccuuccugcugccau

SEQ ID NO: 626485 - RNA, 22 nt, Artificial Sequence
  Synthetic
uucuccuccuuccugcugccau

SEQ ID NO: 626486 - RNA, 23 nt, Artificial Sequence
  Synthetic
auucuccuccuuccugcugccau

SEQ ID NO: 626487 - RNA, 24 nt, Artificial Sequence
  Synthetic
cauucuccuccuuccugcugccau

SEQ ID NO: 626488 - RNA, 18 nt, Artificial Sequence
  Synthetic
aaugugaagacgugccau

SEQ ID NO: 626489 - RNA, 19 nt, Artificial Sequence
  Synthetic
aaaugugaagacgugccau

SEQ ID NO: 626490 - RNA, 20 nt, Artificial Sequence
  Synthetic
gaaaugugaagacgugccau

SEQ ID NO: 626491 - RNA, 21 nt, Artificial Sequence
  Synthetic
ugaaaugugaagacgugccau

SEQ ID NO: 626492 - RNA, 22 nt, Artificial Sequence
  Synthetic
uugaaaugugaagacgugccau

SEQ ID NO: 626493 - RNA, 23 nt, Artificial Sequence
  Synthetic
uuugaaaugugaagacgugccau

SEQ ID NO: 626494 - RNA, 24 nt, Artificial Sequence
  Synthetic
uuuugaaaugugaagacgugccau

SEQ ID NO: 626495 - RNA, 18 nt, Artificial Sequence
  Synthetic
cuucagcccuauugccau

SEQ ID NO: 626496 - RNA, 19 nt, Artificial Sequence
  Synthetic
gcuucagcccuauugccau

SEQ ID NO: 626497 - RNA, 20 nt, Artificial Sequence
  Synthetic
agcuucagcccuauugccau

SEQ ID NO: 626498 - RNA, 21 nt, Artificial Sequence
  Synthetic
cagcuucagcccuauugccau

SEQ ID NO: 626499 - RNA, 22 nt, Artificial Sequence
  Synthetic
ucagcuucagcccuauugccau

SEQ ID NO: 626500 - RNA, 23 nt, Artificial Sequence
  Synthetic
cucagcuucagcccuauugccau

SEQ ID NO: 626501 - RNA, 24 nt, Artificial Sequence
  Synthetic
ucucagcuucagcccuauugccau

SEQ ID NO: 626502 - RNA, 18 nt, Artificial Sequence
  Synthetic
ccuacauuuuauugccau

SEQ ID NO: 626503 - RNA, 19 nt, Artificial Sequence
  Synthetic
cccuacauuuuauugccau

SEQ ID NO: 626504 - RNA, 20 nt, Artificial Sequence
  Synthetic
acccuacauuuuauugccau

SEQ ID NO: 626505 - RNA, 21 nt, Artificial Sequence
  Synthetic
uacccuacauuuuauugccau

SEQ ID NO: 626506 - RNA, 22 nt, Artificial Sequence
  Synthetic
uuacccuacauuuuauugccau

SEQ ID NO: 626507 - RNA, 23 nt, Artificial Sequence
  Synthetic
uuuacccuacauuuuauugccau

SEQ ID NO: 626508 - RNA, 24 nt, Artificial Sequence
  Synthetic
auuuacccuacauuuuauugccau

SEQ ID NO: 626509 - RNA, 18 nt, Artificial Sequence
  Synthetic
aaacaagcagcuugccau

SEQ ID NO: 626510 - RNA, 19 nt, Artificial Sequence
  Synthetic
aaaacaagcagcuugccau

SEQ ID NO: 626511 - RNA, 20 nt, Artificial Sequence
  Synthetic
uaaaacaagcagcuugccau

SEQ ID NO: 626512 - RNA, 21 nt, Artificial Sequence
  Synthetic
uuaaaacaagcagcuugccau

SEQ ID NO: 626513 - RNA, 22 nt, Artificial Sequence
  Synthetic
uuuaaaacaagcagcuugccau

SEQ ID NO: 626514 - RNA, 23 nt, Artificial Sequence
  Synthetic
uuuuaaaacaagcagcuugccau

SEQ ID NO: 626515 - RNA, 24 nt, Artificial Sequence
  Synthetic
guuuuaaaacaagcagcuugccau

SEQ ID NO: 626516 - RNA, 18 nt, Artificial Sequence
  Synthetic
auauagacaguuugccau

SEQ ID NO: 626517 - RNA, 19 nt, Artificial Sequence
  Synthetic
aauauagacaguuugccau

SEQ ID NO: 626518 - RNA, 20 nt, Artificial Sequence
  Synthetic
uaauauagacaguuugccau

SEQ ID NO: 626519 - RNA, 21 nt, Artificial Sequence
  Synthetic
guaauauagacaguuugccau

SEQ ID NO: 626520 - RNA, 22 nt, Artificial Sequence
  Synthetic
uguaauauagacaguuugccau

SEQ ID NO: 626521 - RNA, 23 nt, Artificial Sequence
  Synthetic
auguaauauagacaguuugccau

SEQ ID NO: 626522 - RNA, 24 nt, Artificial Sequence
  Synthetic
aauguaauauagacaguuugccau

SEQ ID NO: 626523 - RNA, 18 nt, Artificial Sequence
  Synthetic
cuaauaagauaaauccau

SEQ ID NO: 626524 - RNA, 19 nt, Artificial Sequence
  Synthetic
ccuaauaagauaaauccau

SEQ ID NO: 626525 - RNA, 20 nt, Artificial Sequence
  Synthetic
uccuaauaagauaaauccau

SEQ ID NO: 626526 - RNA, 21 nt, Artificial Sequence
  Synthetic
auccuaauaagauaaauccau

SEQ ID NO: 626527 - RNA, 22 nt, Artificial Sequence
  Synthetic
cauccuaauaagauaaauccau

SEQ ID NO: 626528 - RNA, 23 nt, Artificial Sequence
  Synthetic
ucauccuaauaagauaaauccau

SEQ ID NO: 626529 - RNA, 24 nt, Artificial Sequence
  Synthetic
uucauccuaauaagauaaauccau

SEQ ID NO: 626530 - RNA, 18 nt, Artificial Sequence
  Synthetic
uuuucgagaagaauccau

SEQ ID NO: 626531 - RNA, 19 nt, Artificial Sequence
  Synthetic
uuuuucgagaagaauccau

SEQ ID NO: 626532 - RNA, 20 nt, Artificial Sequence
  Synthetic
guuuuucgagaagaauccau

SEQ ID NO: 626533 - RNA, 21 nt, Artificial Sequence
  Synthetic
aguuuuucgagaagaauccau

SEQ ID NO: 626534 - RNA, 22 nt, Artificial Sequence
  Synthetic
aaguuuuucgagaagaauccau

SEQ ID NO: 626535 - RNA, 23 nt, Artificial Sequence
  Synthetic
caaguuuuucgagaagaauccau

SEQ ID NO: 626536 - RNA, 24 nt, Artificial Sequence
  Synthetic
acaaguuuuucgagaagaauccau

SEQ ID NO: 626537 - RNA, 18 nt, Artificial Sequence
  Synthetic
uauuacaagauaauccau

SEQ ID NO: 626538 - RNA, 19 nt, Artificial Sequence
  Synthetic
cuauuacaagauaauccau

SEQ ID NO: 626539 - RNA, 20 nt, Artificial Sequence
  Synthetic
acuauuacaagauaauccau

SEQ ID NO: 626540 - RNA, 21 nt, Artificial Sequence
  Synthetic
uacuauuacaagauaauccau

SEQ ID NO: 626541 - RNA, 22 nt, Artificial Sequence
  Synthetic
uuacuauuacaagauaauccau

SEQ ID NO: 626542 - RNA, 23 nt, Artificial Sequence
  Synthetic
cuuacuauuacaagauaauccau

SEQ ID NO: 626543 - RNA, 24 nt, Artificial Sequence
  Synthetic
gcuuacuauuacaagauaauccau

SEQ ID NO: 626544 - RNA, 18 nt, Artificial Sequence
  Synthetic
uguucauuucuaauccau

SEQ ID NO: 626545 - RNA, 19 nt, Artificial Sequence
  Synthetic
auguucauuucuaauccau

SEQ ID NO: 626546 - RNA, 20 nt, Artificial Sequence
  Synthetic
uauguucauuucuaauccau

SEQ ID NO: 626547 - RNA, 21 nt, Artificial Sequence
  Synthetic
guauguucauuucuaauccau

SEQ ID NO: 626548 - RNA, 22 nt, Artificial Sequence
  Synthetic
uguauguucauuucuaauccau

SEQ ID NO: 626549 - RNA, 23 nt, Artificial Sequence
  Synthetic
auguauguucauuucuaauccau

SEQ ID NO: 626550 - RNA, 24 nt, Artificial Sequence
  Synthetic
uauguauguucauuucuaauccau

SEQ ID NO: 626551 - RNA, 18 nt, Artificial Sequence
  Synthetic
uaaaauaagguaauccau

SEQ ID NO: 626552 - RNA, 19 nt, Artificial Sequence
  Synthetic
uuaaaauaagguaauccau

SEQ ID NO: 626553 - RNA, 20 nt, Artificial Sequence
  Synthetic
uuuaaaauaagguaauccau

SEQ ID NO: 626554 - RNA, 21 nt, Artificial Sequence
  Synthetic
auuuaaaauaagguaauccau

SEQ ID NO: 626555 - RNA, 22 nt, Artificial Sequence
  Synthetic
aauuuaaaauaagguaauccau

SEQ ID NO: 626556 - RNA, 23 nt, Artificial Sequence
  Synthetic
gaauuuaaaauaagguaauccau

SEQ ID NO: 626557 - RNA, 24 nt, Artificial Sequence
  Synthetic
ggaauuuaaaauaagguaauccau

SEQ ID NO: 626558 - RNA, 18 nt, Artificial Sequence
  Synthetic
uaaaaucuaaacauccau

SEQ ID NO: 626559 - RNA, 19 nt, Artificial Sequence
  Synthetic
cuaaaaucuaaacauccau

SEQ ID NO: 626560 - RNA, 20 nt, Artificial Sequence
  Synthetic
acuaaaaucuaaacauccau

SEQ ID NO: 626561 - RNA, 21 nt, Artificial Sequence
  Synthetic
cacuaaaaucuaaacauccau

SEQ ID NO: 626562 - RNA, 22 nt, Artificial Sequence
  Synthetic
ucacuaaaaucuaaacauccau

SEQ ID NO: 626563 - RNA, 23 nt, Artificial Sequence
  Synthetic
gucacuaaaaucuaaacauccau

SEQ ID NO: 626564 - RNA, 24 nt, Artificial Sequence
  Synthetic
ugucacuaaaaucuaaacauccau

SEQ ID NO: 626565 - RNA, 18 nt, Artificial Sequence
  Synthetic
uuuugcccucacauccau

SEQ ID NO: 626566 - RNA, 19 nt, Artificial Sequence
  Synthetic
uuuuugcccucacauccau

SEQ ID NO: 626567 - RNA, 20 nt, Artificial Sequence
  Synthetic
uuuuuugcccucacauccau

SEQ ID NO: 626568 - RNA, 21 nt, Artificial Sequence
  Synthetic
auuuuuugcccucacauccau

SEQ ID NO: 626569 - RNA, 22 nt, Artificial Sequence
  Synthetic
cauuuuuugcccucacauccau

SEQ ID NO: 626570 - RNA, 23 nt, Artificial Sequence
  Synthetic
ucauuuuuugcccucacauccau

SEQ ID NO: 626571 - RNA, 24 nt, Artificial Sequence
  Synthetic
aucauuuuuugcccucacauccau

SEQ ID NO: 626572 - RNA, 18 nt, Artificial Sequence
  Synthetic
uuuagcugggccauccau

SEQ ID NO: 626573 - RNA, 19 nt, Artificial Sequence
  Synthetic
auuuagcugggccauccau

SEQ ID NO: 626574 - RNA, 20 nt, Artificial Sequence
  Synthetic
gauuuagcugggccauccau

SEQ ID NO: 626575 - RNA, 21 nt, Artificial Sequence
  Synthetic
ugauuuagcugggccauccau

SEQ ID NO: 626576 - RNA, 22 nt, Artificial Sequence
  Synthetic
cugauuuagcugggccauccau

SEQ ID NO: 626577 - RNA, 23 nt, Artificial Sequence
  Synthetic
ucugauuuagcugggccauccau

SEQ ID NO: 626578 - RNA, 24 nt, Artificial Sequence
  Synthetic
gucugauuuagcugggccauccau

SEQ ID NO: 626579 - RNA, 18 nt, Artificial Sequence
  Synthetic
gguaauaaguucauccau

SEQ ID NO: 626580 - RNA, 19 nt, Artificial Sequence
  Synthetic
agguaauaaguucauccau

SEQ ID NO: 626581 - RNA, 20 nt, Artificial Sequence
  Synthetic
uagguaauaaguucauccau

SEQ ID NO: 626582 - RNA, 21 nt, Artificial Sequence
  Synthetic
guagguaauaaguucauccau

SEQ ID NO: 626583 - RNA, 22 nt, Artificial Sequence
  Synthetic
aguagguaauaaguucauccau

SEQ ID NO: 626584 - RNA, 23 nt, Artificial Sequence
  Synthetic
caguagguaauaaguucauccau

SEQ ID NO: 626585 - RNA, 24 nt, Artificial Sequence
  Synthetic
gcaguagguaauaaguucauccau

SEQ ID NO: 626586 - RNA, 18 nt, Artificial Sequence
  Synthetic
cuagaccaugagauccau

SEQ ID NO: 626587 - RNA, 19 nt, Artificial Sequence
  Synthetic
acuagaccaugagauccau

SEQ ID NO: 626588 - RNA, 20 nt, Artificial Sequence
  Synthetic
gacuagaccaugagauccau

SEQ ID NO: 626589 - RNA, 21 nt, Artificial Sequence
  Synthetic
ugacuagaccaugagauccau

SEQ ID NO: 626590 - RNA, 22 nt, Artificial Sequence
  Synthetic
uugacuagaccaugagauccau

SEQ ID NO: 626591 - RNA, 23 nt, Artificial Sequence
  Synthetic
guugacuagaccaugagauccau

SEQ ID NO: 626592 - RNA, 24 nt, Artificial Sequence
  Synthetic
aguugacuagaccaugagauccau

SEQ ID NO: 626593 - RNA, 18 nt, Artificial Sequence
  Synthetic
uguucacacuauauccau

SEQ ID NO: 626594 - RNA, 19 nt, Artificial Sequence
  Synthetic
auguucacacuauauccau

SEQ ID NO: 626595 - RNA, 20 nt, Artificial Sequence
  Synthetic
aauguucacacuauauccau

SEQ ID NO: 626596 - RNA, 21 nt, Artificial Sequence
  Synthetic
uaauguucacacuauauccau

SEQ ID NO: 626597 - RNA, 22 nt, Artificial Sequence
  Synthetic
uuaauguucacacuauauccau

SEQ ID NO: 626598 - RNA, 23 nt, Artificial Sequence
  Synthetic
auuaauguucacacuauauccau

SEQ ID NO: 626599 - RNA, 24 nt, Artificial Sequence
  Synthetic
aauuaauguucacacuauauccau

SEQ ID NO: 626600 - RNA, 18 nt, Artificial Sequence
  Synthetic
uugucccucaguauccau

SEQ ID NO: 626601 - RNA, 19 nt, Artificial Sequence
  Synthetic
auugucccucaguauccau

SEQ ID NO: 626602 - RNA, 20 nt, Artificial Sequence
  Synthetic
aauugucccucaguauccau

SEQ ID NO: 626603 - RNA, 21 nt, Artificial Sequence
  Synthetic
caauugucccucaguauccau

SEQ ID NO: 626604 - RNA, 22 nt, Artificial Sequence
  Synthetic
acaauugucccucaguauccau

SEQ ID NO: 626605 - RNA, 23 nt, Artificial Sequence
  Synthetic
uacaauugucccucaguauccau

SEQ ID NO: 626606 - RNA, 24 nt, Artificial Sequence
  Synthetic
auacaauugucccucaguauccau

SEQ ID NO: 626607 - RNA, 18 nt, Artificial Sequence
  Synthetic
uagacugaaaaacuccau

SEQ ID NO: 626608 - RNA, 19 nt, Artificial Sequence
  Synthetic
cuagacugaaaaacuccau

SEQ ID NO: 626609 - RNA, 20 nt, Artificial Sequence
  Synthetic
acuagacugaaaaacuccau

SEQ ID NO: 626610 - RNA, 21 nt, Artificial Sequence
  Synthetic
cacuagacugaaaaacuccau

SEQ ID NO: 626611 - RNA, 22 nt, Artificial Sequence
  Synthetic
ccacuagacugaaaaacuccau

SEQ ID NO: 626612 - RNA, 23 nt, Artificial Sequence
  Synthetic
accacuagacugaaaaacuccau

SEQ ID NO: 626613 - RNA, 24 nt, Artificial Sequence
  Synthetic
caccacuagacugaaaaacuccau

SEQ ID NO: 626614 - RNA, 18 nt, Artificial Sequence
  Synthetic
acaacugcucuacuccau

SEQ ID NO: 626615 - RNA, 19 nt, Artificial Sequence
  Synthetic
aacaacugcucuacuccau

SEQ ID NO: 626616 - RNA, 20 nt, Artificial Sequence
  Synthetic
aaacaacugcucuacuccau

SEQ ID NO: 626617 - RNA, 21 nt, Artificial Sequence
  Synthetic
aaaacaacugcucuacuccau

SEQ ID NO: 626618 - RNA, 22 nt, Artificial Sequence
  Synthetic
gaaaacaacugcucuacuccau

SEQ ID NO: 626619 - RNA, 23 nt, Artificial Sequence
  Synthetic
ugaaaacaacugcucuacuccau

SEQ ID NO: 626620 - RNA, 24 nt, Artificial Sequence
  Synthetic
uugaaaacaacugcucuacuccau

SEQ ID NO: 626621 - RNA, 18 nt, Artificial Sequence
  Synthetic
caugcuaucacccuccau

SEQ ID NO: 626622 - RNA, 19 nt, Artificial Sequence
  Synthetic
ccaugcuaucacccuccau

SEQ ID NO: 626623 - RNA, 20 nt, Artificial Sequence
  Synthetic
cccaugcuaucacccuccau

SEQ ID NO: 626624 - RNA, 21 nt, Artificial Sequence
  Synthetic
gcccaugcuaucacccuccau

SEQ ID NO: 626625 - RNA, 22 nt, Artificial Sequence
  Synthetic
ggcccaugcuaucacccuccau

SEQ ID NO: 626626 - RNA, 23 nt, Artificial Sequence
  Synthetic
uggcccaugcuaucacccuccau

SEQ ID NO: 626627 - RNA, 24 nt, Artificial Sequence
  Synthetic
cuggcccaugcuaucacccuccau

SEQ ID NO: 626628 - RNA, 18 nt, Artificial Sequence
  Synthetic
uucuauaccuuccuccau

SEQ ID NO: 626629 - RNA, 19 nt, Artificial Sequence
  Synthetic
uuucuauaccuuccuccau

SEQ ID NO: 626630 - RNA, 20 nt, Artificial Sequence
  Synthetic
uuuucuauaccuuccuccau

SEQ ID NO: 626631 - RNA, 21 nt, Artificial Sequence
  Synthetic
uuuuucuauaccuuccuccau

SEQ ID NO: 626632 - RNA, 22 nt, Artificial Sequence
  Synthetic
auuuuucuauaccuuccuccau

SEQ ID NO: 626633 - RNA, 23 nt, Artificial Sequence
  Synthetic
aauuuuucuauaccuuccuccau

SEQ ID NO: 626634 - RNA, 24 nt, Artificial Sequence
  Synthetic
aaauuuuucuauaccuuccuccau

SEQ ID NO: 626635 - RNA, 18 nt, Artificial Sequence
  Synthetic
gaaauacaaaagcuccau

SEQ ID NO: 626636 - RNA, 19 nt, Artificial Sequence
  Synthetic
agaaauacaaaagcuccau

SEQ ID NO: 626637 - RNA, 20 nt, Artificial Sequence
  Synthetic
aagaaauacaaaagcuccau

SEQ ID NO: 626638 - RNA, 21 nt, Artificial Sequence
  Synthetic
aaagaaauacaaaagcuccau

SEQ ID NO: 626639 - RNA, 22 nt, Artificial Sequence
  Synthetic
gaaagaaauacaaaagcuccau

SEQ ID NO: 626640 - RNA, 23 nt, Artificial Sequence
  Synthetic
agaaagaaauacaaaagcuccau

SEQ ID NO: 626641 - RNA, 24 nt, Artificial Sequence
  Synthetic
aagaaagaaauacaaaagcuccau

SEQ ID NO: 626642 - RNA, 18 nt, Artificial Sequence
  Synthetic
auuuauugugagcuccau

SEQ ID NO: 626643 - RNA, 19 nt, Artificial Sequence
  Synthetic
cauuuauugugagcuccau

SEQ ID NO: 626644 - RNA, 20 nt, Artificial Sequence
  Synthetic
ucauuuauugugagcuccau

SEQ ID NO: 626645 - RNA, 21 nt, Artificial Sequence
  Synthetic
aucauuuauugugagcuccau

SEQ ID NO: 626646 - RNA, 22 nt, Artificial Sequence
  Synthetic
gaucauuuauugugagcuccau

SEQ ID NO: 626647 - RNA, 23 nt, Artificial Sequence
  Synthetic
agaucauuuauugugagcuccau

SEQ ID NO: 626648 - RNA, 24 nt, Artificial Sequence
  Synthetic
aagaucauuuauugugagcuccau

SEQ ID NO: 626649 - RNA, 18 nt, Artificial Sequence
  Synthetic
gaaguuccuaaucuccau

SEQ ID NO: 626650 - RNA, 19 nt, Artificial Sequence
  Synthetic
agaaguuccuaaucuccau

SEQ ID NO: 626651 - RNA, 20 nt, Artificial Sequence
  Synthetic
aagaaguuccuaaucuccau

SEQ ID NO: 626652 - RNA, 21 nt, Artificial Sequence
  Synthetic
caagaaguuccuaaucuccau

SEQ ID NO: 626653 - RNA, 22 nt, Artificial Sequence
  Synthetic
ccaagaaguuccuaaucuccau

SEQ ID NO: 626654 - RNA, 23 nt, Artificial Sequence
  Synthetic
cccaagaaguuccuaaucuccau

SEQ ID NO: 626655 - RNA, 24 nt, Artificial Sequence
  Synthetic
ucccaagaaguuccuaaucuccau

SEQ ID NO: 626656 - RNA, 18 nt, Artificial Sequence
  Synthetic
uaacuaaaauaucuccau

SEQ ID NO: 626657 - RNA, 19 nt, Artificial Sequence
  Synthetic
guaacuaaaauaucuccau

SEQ ID NO: 626658 - RNA, 20 nt, Artificial Sequence
  Synthetic
uguaacuaaaauaucuccau

SEQ ID NO: 626659 - RNA, 21 nt, Artificial Sequence
  Synthetic
guguaacuaaaauaucuccau

SEQ ID NO: 626660 - RNA, 22 nt, Artificial Sequence
  Synthetic
uguguaacuaaaauaucuccau

SEQ ID NO: 626661 - RNA, 23 nt, Artificial Sequence
  Synthetic
guguguaacuaaaauaucuccau

SEQ ID NO: 626662 - RNA, 24 nt, Artificial Sequence
  Synthetic
aguguguaacuaaaauaucuccau

SEQ ID NO: 626663 - RNA, 18 nt, Artificial Sequence
  Synthetic
ggugaaacaaaaguccau

SEQ ID NO: 626664 - RNA, 19 nt, Artificial Sequence
  Synthetic
aggugaaacaaaaguccau

SEQ ID NO: 626665 - RNA, 20 nt, Artificial Sequence
  Synthetic
aaggugaaacaaaaguccau

SEQ ID NO: 626666 - RNA, 21 nt, Artificial Sequence
  Synthetic
uaaggugaaacaaaaguccau

SEQ ID NO: 626667 - RNA, 22 nt, Artificial Sequence
  Synthetic
guaaggugaaacaaaaguccau

SEQ ID NO: 626668 - RNA, 23 nt, Artificial Sequence
  Synthetic
uguaaggugaaacaaaaguccau

SEQ ID NO: 626669 - RNA, 24 nt, Artificial Sequence
  Synthetic
uuguaaggugaaacaaaaguccau

SEQ ID NO: 626670 - RNA, 18 nt, Artificial Sequence
  Synthetic
uauucuucucaaguccau

SEQ ID NO: 626671 - RNA, 19 nt, Artificial Sequence
  Synthetic
guauucuucucaaguccau

SEQ ID NO: 626672 - RNA, 20 nt, Artificial Sequence
  Synthetic
gguauucuucucaaguccau

SEQ ID NO: 626673 - RNA, 21 nt, Artificial Sequence
  Synthetic
ggguauucuucucaaguccau

SEQ ID NO: 626674 - RNA, 22 nt, Artificial Sequence
  Synthetic
aggguauucuucucaaguccau

SEQ ID NO: 626675 - RNA, 23 nt, Artificial Sequence
  Synthetic
aaggguauucuucucaaguccau

SEQ ID NO: 626676 - RNA, 24 nt, Artificial Sequence
  Synthetic
uaaggguauucuucucaaguccau

SEQ ID NO: 626677 - RNA, 18 nt, Artificial Sequence
  Synthetic
aaagcucuagaaguccau

SEQ ID NO: 626678 - RNA, 19 nt, Artificial Sequence
  Synthetic
gaaagcucuagaaguccau

SEQ ID NO: 626679 - RNA, 20 nt, Artificial Sequence
  Synthetic
agaaagcucuagaaguccau

SEQ ID NO: 626680 - RNA, 21 nt, Artificial Sequence
  Synthetic
uagaaagcucuagaaguccau

SEQ ID NO: 626681 - RNA, 22 nt, Artificial Sequence
  Synthetic
uuagaaagcucuagaaguccau

SEQ ID NO: 626682 - RNA, 23 nt, Artificial Sequence
  Synthetic
auuagaaagcucuagaaguccau

SEQ ID NO: 626683 - RNA, 24 nt, Artificial Sequence
  Synthetic
aauuagaaagcucuagaaguccau

SEQ ID NO: 626684 - RNA, 18 nt, Artificial Sequence
  Synthetic
gaaaggacuuaaguccau

SEQ ID NO: 626685 - RNA, 19 nt, Artificial Sequence
  Synthetic
ugaaaggacuuaaguccau

SEQ ID NO: 626686 - RNA, 20 nt, Artificial Sequence
  Synthetic
cugaaaggacuuaaguccau

SEQ ID NO: 626687 - RNA, 21 nt, Artificial Sequence
  Synthetic
ucugaaaggacuuaaguccau

SEQ ID NO: 626688 - RNA, 22 nt, Artificial Sequence
  Synthetic
aucugaaaggacuuaaguccau

SEQ ID NO: 626689 - RNA, 23 nt, Artificial Sequence
  Synthetic
aaucugaaaggacuuaaguccau

SEQ ID NO: 626690 - RNA, 24 nt, Artificial Sequence
  Synthetic
gaaucugaaaggacuuaaguccau

SEQ ID NO: 626691 - RNA, 18 nt, Artificial Sequence
  Synthetic
cuauauuccacgguccau

SEQ ID NO: 626692 - RNA, 19 nt, Artificial Sequence
  Synthetic
ccuauauuccacgguccau

SEQ ID NO: 626693 - RNA, 20 nt, Artificial Sequence
  Synthetic
uccuauauuccacgguccau

SEQ ID NO: 626694 - RNA, 21 nt, Artificial Sequence
  Synthetic
uuccuauauuccacgguccau

SEQ ID NO: 626695 - RNA, 22 nt, Artificial Sequence
  Synthetic
uuuccuauauuccacgguccau

SEQ ID NO: 626696 - RNA, 23 nt, Artificial Sequence
  Synthetic
uuuuccuauauuccacgguccau

SEQ ID NO: 626697 - RNA, 24 nt, Artificial Sequence
  Synthetic
guuuuccuauauuccacgguccau

SEQ ID NO: 626698 - RNA, 18 nt, Artificial Sequence
  Synthetic
gaagaggaaaugguccau

SEQ ID NO: 626699 - RNA, 19 nt, Artificial Sequence
  Synthetic
agaagaggaaaugguccau

SEQ ID NO: 626700 - RNA, 20 nt, Artificial Sequence
  Synthetic
uagaagaggaaaugguccau

SEQ ID NO: 626701 - RNA, 21 nt, Artificial Sequence
  Synthetic
auagaagaggaaaugguccau

SEQ ID NO: 626702 - RNA, 22 nt, Artificial Sequence
  Synthetic
cauagaagaggaaaugguccau

SEQ ID NO: 626703 - RNA, 23 nt, Artificial Sequence
  Synthetic
acauagaagaggaaaugguccau

SEQ ID NO: 626704 - RNA, 24 nt, Artificial Sequence
  Synthetic
gacauagaagaggaaaugguccau

SEQ ID NO: 626705 - RNA, 18 nt, Artificial Sequence
  Synthetic
uugaugcuuacuguccau

SEQ ID NO: 626706 - RNA, 19 nt, Artificial Sequence
  Synthetic
uuugaugcuuacuguccau

SEQ ID NO: 626707 - RNA, 20 nt, Artificial Sequence
  Synthetic
guuugaugcuuacuguccau

SEQ ID NO: 626708 - RNA, 21 nt, Artificial Sequence
  Synthetic
cguuugaugcuuacuguccau

SEQ ID NO: 626709 - RNA, 22 nt, Artificial Sequence
  Synthetic
ccguuugaugcuuacuguccau

SEQ ID NO: 626710 - RNA, 23 nt, Artificial Sequence
  Synthetic
accguuugaugcuuacuguccau

SEQ ID NO: 626711 - RNA, 24 nt, Artificial Sequence
  Synthetic
aaccguuugaugcuuacuguccau

SEQ ID NO: 626712 - RNA, 18 nt, Artificial Sequence
  Synthetic
cuacacaucgcuguccau

SEQ ID NO: 626713 - RNA, 19 nt, Artificial Sequence
  Synthetic
ucuacacaucgcuguccau

SEQ ID NO: 626714 - RNA, 20 nt, Artificial Sequence
  Synthetic
gucuacacaucgcuguccau

SEQ ID NO: 626715 - RNA, 21 nt, Artificial Sequence
  Synthetic
agucuacacaucgcuguccau

SEQ ID NO: 626716 - RNA, 22 nt, Artificial Sequence
  Synthetic
aagucuacacaucgcuguccau

SEQ ID NO: 626717 - RNA, 23 nt, Artificial Sequence
  Synthetic
gaagucuacacaucgcuguccau

SEQ ID NO: 626718 - RNA, 24 nt, Artificial Sequence
  Synthetic
ugaagucuacacaucgcuguccau

SEQ ID NO: 626719 - RNA, 18 nt, Artificial Sequence
  Synthetic
aaaaacuuuuguguccau

SEQ ID NO: 626720 - RNA, 19 nt, Artificial Sequence
  Synthetic
uaaaaacuuuuguguccau

SEQ ID NO: 626721 - RNA, 20 nt, Artificial Sequence
  Synthetic
uuaaaaacuuuuguguccau

SEQ ID NO: 626722 - RNA, 21 nt, Artificial Sequence
  Synthetic
uuuaaaaacuuuuguguccau

SEQ ID NO: 626723 - RNA, 22 nt, Artificial Sequence
  Synthetic
cuuuaaaaacuuuuguguccau

SEQ ID NO: 626724 - RNA, 23 nt, Artificial Sequence
  Synthetic
ucuuuaaaaacuuuuguguccau

SEQ ID NO: 626725 - RNA, 24 nt, Artificial Sequence
  Synthetic
aucuuuaaaaacuuuuguguccau

SEQ ID NO: 626726 - RNA, 18 nt, Artificial Sequence
  Synthetic
uauuuuuaagaauuccau

SEQ ID NO: 626727 - RNA, 19 nt, Artificial Sequence
  Synthetic
guauuuuuaagaauuccau

SEQ ID NO: 626728 - RNA, 20 nt, Artificial Sequence
  Synthetic
aguauuuuuaagaauuccau

SEQ ID NO: 626729 - RNA, 21 nt, Artificial Sequence
  Synthetic
aaguauuuuuaagaauuccau

SEQ ID NO: 626730 - RNA, 22 nt, Artificial Sequence
  Synthetic
caaguauuuuuaagaauuccau

SEQ ID NO: 626731 - RNA, 23 nt, Artificial Sequence
  Synthetic
ucaaguauuuuuaagaauuccau

SEQ ID NO: 626732 - RNA, 24 nt, Artificial Sequence
  Synthetic
aucaaguauuuuuaagaauuccau

SEQ ID NO: 626733 - RNA, 18 nt, Artificial Sequence
  Synthetic
uaaugcauugaauuccau

SEQ ID NO: 626734 - RNA, 19 nt, Artificial Sequence
  Synthetic
uuaaugcauugaauuccau

SEQ ID NO: 626735 - RNA, 20 nt, Artificial Sequence
  Synthetic
auuaaugcauugaauuccau

SEQ ID NO: 626736 - RNA, 21 nt, Artificial Sequence
  Synthetic
cauuaaugcauugaauuccau

SEQ ID NO: 626737 - RNA, 22 nt, Artificial Sequence
  Synthetic
acauuaaugcauugaauuccau

SEQ ID NO: 626738 - RNA, 23 nt, Artificial Sequence
  Synthetic
aacauuaaugcauugaauuccau

SEQ ID NO: 626739 - RNA, 24 nt, Artificial Sequence
  Synthetic
aaacauuaaugcauugaauuccau

SEQ ID NO: 626740 - RNA, 18 nt, Artificial Sequence
  Synthetic
aggugaaaaauauuccau

SEQ ID NO: 626741 - RNA, 19 nt, Artificial Sequence
  Synthetic
uaggugaaaaauauuccau

SEQ ID NO: 626742 - RNA, 20 nt, Artificial Sequence
  Synthetic
cuaggugaaaaauauuccau

SEQ ID NO: 626743 - RNA, 21 nt, Artificial Sequence
  Synthetic
ucuaggugaaaaauauuccau

SEQ ID NO: 626744 - RNA, 22 nt, Artificial Sequence
  Synthetic
uucuaggugaaaaauauuccau

SEQ ID NO: 626745 - RNA, 23 nt, Artificial Sequence
  Synthetic
auucuaggugaaaaauauuccau

SEQ ID NO: 626746 - RNA, 24 nt, Artificial Sequence
  Synthetic
aauucuaggugaaaaauauuccau

SEQ ID NO: 626747 - RNA, 18 nt, Artificial Sequence
  Synthetic
acacuuuaauacuuccau

SEQ ID NO: 626748 - RNA, 19 nt, Artificial Sequence
  Synthetic
aacacuuuaauacuuccau

SEQ ID NO: 626749 - RNA, 20 nt, Artificial Sequence
  Synthetic
uaacacuuuaauacuuccau

SEQ ID NO: 626750 - RNA, 21 nt, Artificial Sequence
  Synthetic
uuaacacuuuaauacuuccau

SEQ ID NO: 626751 - RNA, 22 nt, Artificial Sequence
  Synthetic
cuuaacacuuuaauacuuccau

SEQ ID NO: 626752 - RNA, 23 nt, Artificial Sequence
  Synthetic
ucuuaacacuuuaauacuuccau

SEQ ID NO: 626753 - RNA, 24 nt, Artificial Sequence
  Synthetic
uucuuaacacuuuaauacuuccau

SEQ ID NO: 626754 - RNA, 18 nt, Artificial Sequence
  Synthetic
gggccuuuuuacuuccau

SEQ ID NO: 626755 - RNA, 19 nt, Artificial Sequence
  Synthetic
agggccuuuuuacuuccau

SEQ ID NO: 626756 - RNA, 20 nt, Artificial Sequence
  Synthetic
cagggccuuuuuacuuccau

SEQ ID NO: 626757 - RNA, 21 nt, Artificial Sequence
  Synthetic
ucagggccuuuuuacuuccau

SEQ ID NO: 626758 - RNA, 22 nt, Artificial Sequence
  Synthetic
uucagggccuuuuuacuuccau

SEQ ID NO: 626759 - RNA, 23 nt, Artificial Sequence
  Synthetic
auucagggccuuuuuacuuccau

SEQ ID NO: 626760 - RNA, 24 nt, Artificial Sequence
  Synthetic
cauucagggccuuuuuacuuccau

SEQ ID NO: 626761 - RNA, 18 nt, Artificial Sequence
  Synthetic
uuauggugugaguuccau

SEQ ID NO: 626762 - RNA, 19 nt, Artificial Sequence
  Synthetic
uuuauggugugaguuccau

SEQ ID NO: 626763 - RNA, 20 nt, Artificial Sequence
  Synthetic
uuuuauggugugaguuccau

SEQ ID NO: 626764 - RNA, 21 nt, Artificial Sequence
  Synthetic
uuuuuauggugugaguuccau

SEQ ID NO: 626765 - RNA, 22 nt, Artificial Sequence
  Synthetic
auuuuuauggugugaguuccau

SEQ ID NO: 626766 - RNA, 23 nt, Artificial Sequence
  Synthetic
uauuuuuauggugugaguuccau

SEQ ID NO: 626767 - RNA, 24 nt, Artificial Sequence
  Synthetic
auauuuuuauggugugaguuccau

SEQ ID NO: 626768 - RNA, 21 nt, Artificial Sequence
  Synthetic
ugggcucuuuuuugguuccau

SEQ ID NO: 626769 - RNA, 22 nt, Artificial Sequence
  Synthetic
gugggcucuuuuuugguuccau

SEQ ID NO: 626770 - RNA, 23 nt, Artificial Sequence
  Synthetic
ugugggcucuuuuuugguuccau

SEQ ID NO: 626771 - RNA, 24 nt, Artificial Sequence
  Synthetic
augugggcucuuuuuugguuccau

SEQ ID NO: 626772 - RNA, 18 nt, Artificial Sequence
  Synthetic
aucagaugauuguuccau

SEQ ID NO: 626773 - RNA, 19 nt, Artificial Sequence
  Synthetic
uaucagaugauuguuccau

SEQ ID NO: 626774 - RNA, 20 nt, Artificial Sequence
  Synthetic
cuaucagaugauuguuccau

SEQ ID NO: 626775 - RNA, 21 nt, Artificial Sequence
  Synthetic
gcuaucagaugauuguuccau

SEQ ID NO: 626776 - RNA, 22 nt, Artificial Sequence
  Synthetic
ugcuaucagaugauuguuccau

SEQ ID NO: 626777 - RNA, 23 nt, Artificial Sequence
  Synthetic
gugcuaucagaugauuguuccau

SEQ ID NO: 626778 - RNA, 24 nt, Artificial Sequence
  Synthetic
agugcuaucagaugauuguuccau

SEQ ID NO: 626779 - RNA, 18 nt, Artificial Sequence
  Synthetic
uugauuggggauuuccau

SEQ ID NO: 626780 - RNA, 19 nt, Artificial Sequence
  Synthetic
cuugauuggggauuuccau

SEQ ID NO: 626781 - RNA, 20 nt, Artificial Sequence
  Synthetic
acuugauuggggauuuccau

SEQ ID NO: 626782 - RNA, 21 nt, Artificial Sequence
  Synthetic
aacuugauuggggauuuccau

SEQ ID NO: 626783 - RNA, 22 nt, Artificial Sequence
  Synthetic
gaacuugauuggggauuuccau

SEQ ID NO: 626784 - RNA, 23 nt, Artificial Sequence
  Synthetic
ggaacuugauuggggauuuccau

SEQ ID NO: 626785 - RNA, 24 nt, Artificial Sequence
  Synthetic
aggaacuugauuggggauuuccau

SEQ ID NO: 626786 - RNA, 18 nt, Artificial Sequence
  Synthetic
uuuuuuucuaguuuccau

SEQ ID NO: 626787 - RNA, 19 nt, Artificial Sequence
  Synthetic
uuuuuuuucuaguuuccau

SEQ ID NO: 626788 - RNA, 20 nt, Artificial Sequence
  Synthetic
cuuuuuuuucuaguuuccau

SEQ ID NO: 626789 - RNA, 21 nt, Artificial Sequence
  Synthetic
ucuuuuuuuucuaguuuccau

SEQ ID NO: 626790 - RNA, 22 nt, Artificial Sequence
  Synthetic
cucuuuuuuuucuaguuuccau

SEQ ID NO: 626791 - RNA, 23 nt, Artificial Sequence
  Synthetic
ucucuuuuuuuucuaguuuccau

SEQ ID NO: 626792 - RNA, 24 nt, Artificial Sequence
  Synthetic
uucucuuuuuuuucuaguuuccau

SEQ ID NO: 626793 - RNA, 18 nt, Artificial Sequence
  Synthetic
auuauucccauuuuccau

SEQ ID NO: 626794 - RNA, 19 nt, Artificial Sequence
  Synthetic
uauuauucccauuuuccau

SEQ ID NO: 626795 - RNA, 20 nt, Artificial Sequence
  Synthetic
uuauuauucccauuuuccau

SEQ ID NO: 626796 - RNA, 21 nt, Artificial Sequence
  Synthetic
auuauuauucccauuuuccau

SEQ ID NO: 626797 - RNA, 22 nt, Artificial Sequence
  Synthetic
aauuauuauucccauuuuccau

SEQ ID NO: 626798 - RNA, 23 nt, Artificial Sequence
  Synthetic
caauuauuauucccauuuuccau

SEQ ID NO: 626799 - RNA, 24 nt, Artificial Sequence
  Synthetic
acaauuauuauucccauuuuccau

SEQ ID NO: 626800 - RNA, 18 nt, Artificial Sequence
  Synthetic
aauacccauauuuuccau

SEQ ID NO: 626801 - RNA, 19 nt, Artificial Sequence
  Synthetic
caauacccauauuuuccau

SEQ ID NO: 626802 - RNA, 20 nt, Artificial Sequence
  Synthetic
acaauacccauauuuuccau

SEQ ID NO: 626803 - RNA, 21 nt, Artificial Sequence
  Synthetic
uacaauacccauauuuuccau

SEQ ID NO: 626804 - RNA, 22 nt, Artificial Sequence
  Synthetic
uuacaauacccauauuuuccau

SEQ ID NO: 626805 - RNA, 23 nt, Artificial Sequence
  Synthetic
uuuacaauacccauauuuuccau

SEQ ID NO: 626806 - RNA, 24 nt, Artificial Sequence
  Synthetic
cuuuacaauacccauauuuuccau

SEQ ID NO: 626807 - RNA, 18 nt, Artificial Sequence
  Synthetic
auauaguauauuuuccau

SEQ ID NO: 626808 - RNA, 19 nt, Artificial Sequence
  Synthetic
aauauaguauauuuuccau

SEQ ID NO: 626809 - RNA, 20 nt, Artificial Sequence
  Synthetic
aaauauaguauauuuuccau

SEQ ID NO: 626810 - RNA, 21 nt, Artificial Sequence
  Synthetic
aaaauauaguauauuuuccau

SEQ ID NO: 626811 - RNA, 22 nt, Artificial Sequence
  Synthetic
aaaaauauaguauauuuuccau

SEQ ID NO: 626812 - RNA, 23 nt, Artificial Sequence
  Synthetic
uaaaaauauaguauauuuuccau

SEQ ID NO: 626813 - RNA, 24 nt, Artificial Sequence
  Synthetic
cuaaaaauauaguauauuuuccau

SEQ ID NO: 626814 - RNA, 18 nt, Artificial Sequence
  Synthetic
aacacuucaguuuuccau

SEQ ID NO: 626815 - RNA, 19 nt, Artificial Sequence
  Synthetic
caacacuucaguuuuccau

SEQ ID NO: 626816 - RNA, 20 nt, Artificial Sequence
  Synthetic
ucaacacuucaguuuuccau

SEQ ID NO: 626817 - RNA, 21 nt, Artificial Sequence
  Synthetic
aucaacacuucaguuuuccau

SEQ ID NO: 626818 - RNA, 22 nt, Artificial Sequence
  Synthetic
uaucaacacuucaguuuuccau

SEQ ID NO: 626819 - RNA, 23 nt, Artificial Sequence
  Synthetic
guaucaacacuucaguuuuccau

SEQ ID NO: 626820 - RNA, 24 nt, Artificial Sequence
  Synthetic
gguaucaacacuucaguuuuccau

SEQ ID NO: 626821 - RNA, 18 nt, Artificial Sequence
  Synthetic
agcagagagguuuuccau

SEQ ID NO: 626822 - RNA, 19 nt, Artificial Sequence
  Synthetic
cagcagagagguuuuccau

SEQ ID NO: 626823 - RNA, 20 nt, Artificial Sequence
  Synthetic
ccagcagagagguuuuccau

SEQ ID NO: 626824 - RNA, 21 nt, Artificial Sequence
  Synthetic
cccagcagagagguuuuccau

SEQ ID NO: 626825 - RNA, 22 nt, Artificial Sequence
  Synthetic
ucccagcagagagguuuuccau

SEQ ID NO: 626826 - RNA, 23 nt, Artificial Sequence
  Synthetic
gucccagcagagagguuuuccau

SEQ ID NO: 626827 - RNA, 24 nt, Artificial Sequence
  Synthetic
ugucccagcagagagguuuuccau

SEQ ID NO: 626828 - RNA, 18 nt, Artificial Sequence
  Synthetic
aucaacugaccaaagcau

SEQ ID NO: 626829 - RNA, 19 nt, Artificial Sequence
  Synthetic
caucaacugaccaaagcau

SEQ ID NO: 626830 - RNA, 20 nt, Artificial Sequence
  Synthetic
gcaucaacugaccaaagcau

SEQ ID NO: 626831 - RNA, 21 nt, Artificial Sequence
  Synthetic
agcaucaacugaccaaagcau

SEQ ID NO: 626832 - RNA, 22 nt, Artificial Sequence
  Synthetic
uagcaucaacugaccaaagcau

SEQ ID NO: 626833 - RNA, 23 nt, Artificial Sequence
  Synthetic
uuagcaucaacugaccaaagcau

SEQ ID NO: 626834 - RNA, 24 nt, Artificial Sequence
  Synthetic
uuuagcaucaacugaccaaagcau

SEQ ID NO: 626835 - RNA, 18 nt, Artificial Sequence
  Synthetic
cgaugaugaauaaagcau

SEQ ID NO: 626836 - RNA, 19 nt, Artificial Sequence
  Synthetic
gcgaugaugaauaaagcau

SEQ ID NO: 626837 - RNA, 20 nt, Artificial Sequence
  Synthetic
agcgaugaugaauaaagcau

SEQ ID NO: 626838 - RNA, 21 nt, Artificial Sequence
  Synthetic
aagcgaugaugaauaaagcau

SEQ ID NO: 626839 - RNA, 22 nt, Artificial Sequence
  Synthetic
caagcgaugaugaauaaagcau

SEQ ID NO: 626840 - RNA, 23 nt, Artificial Sequence
  Synthetic
ucaagcgaugaugaauaaagcau

SEQ ID NO: 626841 - RNA, 24 nt, Artificial Sequence
  Synthetic
uucaagcgaugaugaauaaagcau

SEQ ID NO: 626842 - RNA, 18 nt, Artificial Sequence
  Synthetic
uuuauuaagauaaagcau

SEQ ID NO: 626843 - RNA, 19 nt, Artificial Sequence
  Synthetic
cuuuauuaagauaaagcau

SEQ ID NO: 626844 - RNA, 20 nt, Artificial Sequence
  Synthetic
ucuuuauuaagauaaagcau

SEQ ID NO: 626845 - RNA, 21 nt, Artificial Sequence
  Synthetic
uucuuuauuaagauaaagcau

SEQ ID NO: 626846 - RNA, 22 nt, Artificial Sequence
  Synthetic
uuucuuuauuaagauaaagcau

SEQ ID NO: 626847 - RNA, 23 nt, Artificial Sequence
  Synthetic
auuucuuuauuaagauaaagcau

SEQ ID NO: 626848 - RNA, 24 nt, Artificial Sequence
  Synthetic
uauuucuuuauuaagauaaagcau

SEQ ID NO: 626849 - RNA, 18 nt, Artificial Sequence
  Synthetic
uuuucagugauaaagcau

SEQ ID NO: 626850 - RNA, 19 nt, Artificial Sequence
  Synthetic
guuuucagugauaaagcau

SEQ ID NO: 626851 - RNA, 20 nt, Artificial Sequence
  Synthetic
aguuuucagugauaaagcau

SEQ ID NO: 626852 - RNA, 21 nt, Artificial Sequence
  Synthetic
gaguuuucagugauaaagcau

SEQ ID NO: 626853 - RNA, 22 nt, Artificial Sequence
  Synthetic
agaguuuucagugauaaagcau

SEQ ID NO: 626854 - RNA, 23 nt, Artificial Sequence
  Synthetic
gagaguuuucagugauaaagcau

SEQ ID NO: 626855 - RNA, 24 nt, Artificial Sequence
  Synthetic
ggagaguuuucagugauaaagcau

SEQ ID NO: 626856 - RNA, 18 nt, Artificial Sequence
  Synthetic
augucacaguuaaagcau

SEQ ID NO: 626857 - RNA, 19 nt, Artificial Sequence
  Synthetic
aaugucacaguuaaagcau

SEQ ID NO: 626858 - RNA, 20 nt, Artificial Sequence
  Synthetic
aaaugucacaguuaaagcau

SEQ ID NO: 626859 - RNA, 21 nt, Artificial Sequence
  Synthetic
aaaaugucacaguuaaagcau

SEQ ID NO: 626860 - RNA, 22 nt, Artificial Sequence
  Synthetic
caaaaugucacaguuaaagcau

SEQ ID NO: 626861 - RNA, 23 nt, Artificial Sequence
  Synthetic
gcaaaaugucacaguuaaagcau

SEQ ID NO: 626862 - RNA, 24 nt, Artificial Sequence
  Synthetic
agcaaaaugucacaguuaaagcau

SEQ ID NO: 626863 - RNA, 18 nt, Artificial Sequence
  Synthetic
caaauggcaaacaagcau

SEQ ID NO: 626864 - RNA, 19 nt, Artificial Sequence
  Synthetic
acaaauggcaaacaagcau

SEQ ID NO: 626865 - RNA, 20 nt, Artificial Sequence
  Synthetic
uacaaauggcaaacaagcau

SEQ ID NO: 626866 - RNA, 21 nt, Artificial Sequence
  Synthetic
auacaaauggcaaacaagcau

SEQ ID NO: 626867 - RNA, 22 nt, Artificial Sequence
  Synthetic
cauacaaauggcaaacaagcau

SEQ ID NO: 626868 - RNA, 23 nt, Artificial Sequence
  Synthetic
acauacaaauggcaaacaagcau

SEQ ID NO: 626869 - RNA, 24 nt, Artificial Sequence
  Synthetic
uacauacaaauggcaaacaagcau

SEQ ID NO: 626870 - RNA, 18 nt, Artificial Sequence
  Synthetic
caugcgaccaacaagcau

SEQ ID NO: 626871 - RNA, 19 nt, Artificial Sequence
  Synthetic
acaugcgaccaacaagcau

SEQ ID NO: 626872 - RNA, 20 nt, Artificial Sequence
  Synthetic
uacaugcgaccaacaagcau

SEQ ID NO: 626873 - RNA, 21 nt, Artificial Sequence
  Synthetic
auacaugcgaccaacaagcau

SEQ ID NO: 626874 - RNA, 22 nt, Artificial Sequence
  Synthetic
cauacaugcgaccaacaagcau

SEQ ID NO: 626875 - RNA, 23 nt, Artificial Sequence
  Synthetic
acauacaugcgaccaacaagcau

SEQ ID NO: 626876 - RNA, 24 nt, Artificial Sequence
  Synthetic
aacauacaugcgaccaacaagcau

SEQ ID NO: 626877 - RNA, 18 nt, Artificial Sequence
  Synthetic
uacacagccaacaagcau

SEQ ID NO: 626878 - RNA, 19 nt, Artificial Sequence
  Synthetic
auacacagccaacaagcau

SEQ ID NO: 626879 - RNA, 20 nt, Artificial Sequence
  Synthetic
uauacacagccaacaagcau

SEQ ID NO: 626880 - RNA, 21 nt, Artificial Sequence
  Synthetic
auauacacagccaacaagcau

SEQ ID NO: 626881 - RNA, 22 nt, Artificial Sequence
  Synthetic
uauauacacagccaacaagcau

SEQ ID NO: 626882 - RNA, 23 nt, Artificial Sequence
  Synthetic
auauauacacagccaacaagcau

SEQ ID NO: 626883 - RNA, 24 nt, Artificial Sequence
  Synthetic
aauauauacacagccaacaagcau

SEQ ID NO: 626884 - RNA, 18 nt, Artificial Sequence
  Synthetic
caaauggcuaacaagcau

SEQ ID NO: 626885 - RNA, 19 nt, Artificial Sequence
  Synthetic
acaaauggcuaacaagcau

SEQ ID NO: 626886 - RNA, 20 nt, Artificial Sequence
  Synthetic
uacaaauggcuaacaagcau

SEQ ID NO: 626887 - RNA, 21 nt, Artificial Sequence
  Synthetic
auacaaauggcuaacaagcau

SEQ ID NO: 626888 - RNA, 22 nt, Artificial Sequence
  Synthetic
cauacaaauggcuaacaagcau

SEQ ID NO: 626889 - RNA, 23 nt, Artificial Sequence
  Synthetic
acauacaaauggcuaacaagcau

SEQ ID NO: 626890 - RNA, 24 nt, Artificial Sequence
  Synthetic
aacauacaaauggcuaacaagcau

SEQ ID NO: 626891 - RNA, 18 nt, Artificial Sequence
  Synthetic
auccaggaauccaagcau

SEQ ID NO: 626892 - RNA, 19 nt, Artificial Sequence
  Synthetic
uauccaggaauccaagcau

SEQ ID NO: 626893 - RNA, 20 nt, Artificial Sequence
  Synthetic
auauccaggaauccaagcau

SEQ ID NO: 626894 - RNA, 21 nt, Artificial Sequence
  Synthetic
cauauccaggaauccaagcau

SEQ ID NO: 626895 - RNA, 22 nt, Artificial Sequence
  Synthetic
acauauccaggaauccaagcau

SEQ ID NO: 626896 - RNA, 23 nt, Artificial Sequence
  Synthetic
uacauauccaggaauccaagcau

SEQ ID NO: 626897 - RNA, 24 nt, Artificial Sequence
  Synthetic
cuacauauccaggaauccaagcau

SEQ ID NO: 626898 - RNA, 18 nt, Artificial Sequence
  Synthetic
agugagauuaggaagcau

SEQ ID NO: 626899 - RNA, 19 nt, Artificial Sequence
  Synthetic
gagugagauuaggaagcau

SEQ ID NO: 626900 - RNA, 20 nt, Artificial Sequence
  Synthetic
ugagugagauuaggaagcau

SEQ ID NO: 626901 - RNA, 21 nt, Artificial Sequence
  Synthetic
cugagugagauuaggaagcau

SEQ ID NO: 626902 - RNA, 22 nt, Artificial Sequence
  Synthetic
ccugagugagauuaggaagcau

SEQ ID NO: 626903 - RNA, 23 nt, Artificial Sequence
  Synthetic
uccugagugagauuaggaagcau

SEQ ID NO: 626904 - RNA, 24 nt, Artificial Sequence
  Synthetic
auccugagugagauuaggaagcau

SEQ ID NO: 626905 - RNA, 18 nt, Artificial Sequence
  Synthetic
uauuuuguaaauaagcau

SEQ ID NO: 626906 - RNA, 19 nt, Artificial Sequence
  Synthetic
auauuuuguaaauaagcau

SEQ ID NO: 626907 - RNA, 20 nt, Artificial Sequence
  Synthetic
gauauuuuguaaauaagcau

SEQ ID NO: 626908 - RNA, 21 nt, Artificial Sequence
  Synthetic
agauauuuuguaaauaagcau

SEQ ID NO: 626909 - RNA, 22 nt, Artificial Sequence
  Synthetic
cagauauuuuguaaauaagcau

SEQ ID NO: 626910 - RNA, 23 nt, Artificial Sequence
  Synthetic
ucagauauuuuguaaauaagcau

SEQ ID NO: 626911 - RNA, 24 nt, Artificial Sequence
  Synthetic
uucagauauuuuguaaauaagcau

SEQ ID NO: 626912 - RNA, 18 nt, Artificial Sequence
  Synthetic
uauguauacaauaagcau

SEQ ID NO: 626913 - RNA, 19 nt, Artificial Sequence
  Synthetic
uuauguauacaauaagcau

SEQ ID NO: 626914 - RNA, 20 nt, Artificial Sequence
  Synthetic
uuuauguauacaauaagcau

SEQ ID NO: 626915 - RNA, 21 nt, Artificial Sequence
  Synthetic
auuuauguauacaauaagcau

SEQ ID NO: 626916 - RNA, 22 nt, Artificial Sequence
  Synthetic
uauuuauguauacaauaagcau

SEQ ID NO: 626917 - RNA, 23 nt, Artificial Sequence
  Synthetic
cuauuuauguauacaauaagcau

SEQ ID NO: 626918 - RNA, 24 nt, Artificial Sequence
  Synthetic
ccuauuuauguauacaauaagcau

SEQ ID NO: 626919 - RNA, 18 nt, Artificial Sequence
  Synthetic
caaaauaagacuaagcau

SEQ ID NO: 626920 - RNA, 19 nt, Artificial Sequence
  Synthetic
ccaaaauaagacuaagcau

SEQ ID NO: 626921 - RNA, 20 nt, Artificial Sequence
  Synthetic
accaaaauaagacuaagcau

SEQ ID NO: 626922 - RNA, 21 nt, Artificial Sequence
  Synthetic
aaccaaaauaagacuaagcau

SEQ ID NO: 626923 - RNA, 22 nt, Artificial Sequence
  Synthetic
aaaccaaaauaagacuaagcau

SEQ ID NO: 626924 - RNA, 23 nt, Artificial Sequence
  Synthetic
aaaaccaaaauaagacuaagcau

SEQ ID NO: 626925 - RNA, 24 nt, Artificial Sequence
  Synthetic
caaaaccaaaauaagacuaagcau

SEQ ID NO: 626926 - RNA, 18 nt, Artificial Sequence
  Synthetic
aguguugcauguaagcau

SEQ ID NO: 626927 - RNA, 19 nt, Artificial Sequence
  Synthetic
caguguugcauguaagcau

SEQ ID NO: 626928 - RNA, 20 nt, Artificial Sequence
  Synthetic
acaguguugcauguaagcau

SEQ ID NO: 626929 - RNA, 21 nt, Artificial Sequence
  Synthetic
aacaguguugcauguaagcau

SEQ ID NO: 626930 - RNA, 22 nt, Artificial Sequence
  Synthetic
caacaguguugcauguaagcau

SEQ ID NO: 626931 - RNA, 23 nt, Artificial Sequence
  Synthetic
ccaacaguguugcauguaagcau

SEQ ID NO: 626932 - RNA, 24 nt, Artificial Sequence
  Synthetic
uccaacaguguugcauguaagcau

SEQ ID NO: 626933 - RNA, 18 nt, Artificial Sequence
  Synthetic
cuaucacgacaacagcau

SEQ ID NO: 626934 - RNA, 19 nt, Artificial Sequence
  Synthetic
acuaucacgacaacagcau

SEQ ID NO: 626935 - RNA, 20 nt, Artificial Sequence
  Synthetic
cacuaucacgacaacagcau

SEQ ID NO: 626936 - RNA, 21 nt, Artificial Sequence
  Synthetic
ucacuaucacgacaacagcau

SEQ ID NO: 626937 - RNA, 22 nt, Artificial Sequence
  Synthetic
uucacuaucacgacaacagcau

SEQ ID NO: 626938 - RNA, 23 nt, Artificial Sequence
  Synthetic
auucacuaucacgacaacagcau

SEQ ID NO: 626939 - RNA, 24 nt, Artificial Sequence
  Synthetic
cauucacuaucacgacaacagcau

SEQ ID NO: 626940 - RNA, 18 nt, Artificial Sequence
  Synthetic
cuaucaggagaacagcau

SEQ ID NO: 626941 - RNA, 19 nt, Artificial Sequence
  Synthetic
acuaucaggagaacagcau

SEQ ID NO: 626942 - RNA, 20 nt, Artificial Sequence
  Synthetic
cacuaucaggagaacagcau

SEQ ID NO: 626943 - RNA, 21 nt, Artificial Sequence
  Synthetic
ucacuaucaggagaacagcau

SEQ ID NO: 626944 - RNA, 22 nt, Artificial Sequence
  Synthetic
cucacuaucaggagaacagcau

SEQ ID NO: 626945 - RNA, 23 nt, Artificial Sequence
  Synthetic
acucacuaucaggagaacagcau

SEQ ID NO: 626946 - RNA, 24 nt, Artificial Sequence
  Synthetic
cacucacuaucaggagaacagcau

SEQ ID NO: 626947 - RNA, 18 nt, Artificial Sequence
  Synthetic
aggggggagggacagcau

SEQ ID NO: 626948 - RNA, 19 nt, Artificial Sequence
  Synthetic
gaggggggagggacagcau

SEQ ID NO: 626949 - RNA, 20 nt, Artificial Sequence
  Synthetic
ggaggggggagggacagcau

SEQ ID NO: 626950 - RNA, 21 nt, Artificial Sequence
  Synthetic
gggaggggggagggacagcau

SEQ ID NO: 626951 - RNA, 22 nt, Artificial Sequence
  Synthetic
ggggaggggggagggacagcau

SEQ ID NO: 626952 - RNA, 23 nt, Artificial Sequence
  Synthetic
gggggaggggggagggacagcau

SEQ ID NO: 626953 - RNA, 24 nt, Artificial Sequence
  Synthetic
ggggggaggggggagggacagcau

SEQ ID NO: 626954 - RNA, 18 nt, Artificial Sequence
  Synthetic
uccagugggggacagcau

SEQ ID NO: 626955 - RNA, 19 nt, Artificial Sequence
  Synthetic
uuccagugggggacagcau

SEQ ID NO: 626956 - RNA, 20 nt, Artificial Sequence
  Synthetic
cuuccagugggggacagcau

SEQ ID NO: 626957 - RNA, 21 nt, Artificial Sequence
  Synthetic
ccuuccagugggggacagcau

SEQ ID NO: 626958 - RNA, 22 nt, Artificial Sequence
  Synthetic
accuuccagugggggacagcau

SEQ ID NO: 626959 - RNA, 23 nt, Artificial Sequence
  Synthetic
gaccuuccagugggggacagcau

SEQ ID NO: 626960 - RNA, 24 nt, Artificial Sequence
  Synthetic
agaccuuccagugggggacagcau

SEQ ID NO: 626961 - RNA, 18 nt, Artificial Sequence
  Synthetic
gguggguucuaccagcau

SEQ ID NO: 626962 - RNA, 19 nt, Artificial Sequence
  Synthetic
ggguggguucuaccagcau

SEQ ID NO: 626963 - RNA, 20 nt, Artificial Sequence
  Synthetic
gggguggguucuaccagcau

SEQ ID NO: 626964 - RNA, 21 nt, Artificial Sequence
  Synthetic
ugggguggguucuaccagcau

SEQ ID NO: 626965 - RNA, 22 nt, Artificial Sequence
  Synthetic
cugggguggguucuaccagcau

SEQ ID NO: 626966 - RNA, 23 nt, Artificial Sequence
  Synthetic
ccugggguggguucuaccagcau

SEQ ID NO: 626967 - RNA, 24 nt, Artificial Sequence
  Synthetic
uccugggguggguucuaccagcau

SEQ ID NO: 626968 - RNA, 18 nt, Artificial Sequence
  Synthetic
aguucuuuagagcagcau

SEQ ID NO: 626969 - RNA, 19 nt, Artificial Sequence
  Synthetic
caguucuuuagagcagcau

SEQ ID NO: 626970 - RNA, 20 nt, Artificial Sequence
  Synthetic
gcaguucuuuagagcagcau

SEQ ID NO: 626971 - RNA, 21 nt, Artificial Sequence
  Synthetic
ggcaguucuuuagagcagcau

SEQ ID NO: 626972 - RNA, 22 nt, Artificial Sequence
  Synthetic
gggcaguucuuuagagcagcau

SEQ ID NO: 626973 - RNA, 23 nt, Artificial Sequence
  Synthetic
ugggcaguucuuuagagcagcau

SEQ ID NO: 626974 - RNA, 24 nt, Artificial Sequence
  Synthetic
uugggcaguucuuuagagcagcau

SEQ ID NO: 626975 - RNA, 18 nt, Artificial Sequence
  Synthetic
aguucuuuauagcagcau

SEQ ID NO: 626976 - RNA, 19 nt, Artificial Sequence
  Synthetic
uaguucuuuauagcagcau

SEQ ID NO: 626977 - RNA, 20 nt, Artificial Sequence
  Synthetic
guaguucuuuauagcagcau

SEQ ID NO: 626978 - RNA, 21 nt, Artificial Sequence
  Synthetic
gguaguucuuuauagcagcau

SEQ ID NO: 626979 - RNA, 22 nt, Artificial Sequence
  Synthetic
agguaguucuuuauagcagcau

SEQ ID NO: 626980 - RNA, 23 nt, Artificial Sequence
  Synthetic
cagguaguucuuuauagcagcau

SEQ ID NO: 626981 - RNA, 24 nt, Artificial Sequence
  Synthetic
ucagguaguucuuuauagcagcau

SEQ ID NO: 626982 - RNA, 18 nt, Artificial Sequence
  Synthetic
gagaguuuaaaucagcau

SEQ ID NO: 626983 - RNA, 19 nt, Artificial Sequence
  Synthetic
ugagaguuuaaaucagcau

SEQ ID NO: 626984 - RNA, 20 nt, Artificial Sequence
  Synthetic
augagaguuuaaaucagcau

SEQ ID NO: 626985 - RNA, 21 nt, Artificial Sequence
  Synthetic
uaugagaguuuaaaucagcau

SEQ ID NO: 626986 - RNA, 22 nt, Artificial Sequence
  Synthetic
auaugagaguuuaaaucagcau

SEQ ID NO: 626987 - RNA, 23 nt, Artificial Sequence
  Synthetic
aauaugagaguuuaaaucagcau

SEQ ID NO: 626988 - RNA, 24 nt, Artificial Sequence
  Synthetic
aaauaugagaguuuaaaucagcau

SEQ ID NO: 626989 - RNA, 18 nt, Artificial Sequence
  Synthetic
uucacaguuguucagcau

SEQ ID NO: 626990 - RNA, 19 nt, Artificial Sequence
  Synthetic
uuucacaguuguucagcau

SEQ ID NO: 626991 - RNA, 20 nt, Artificial Sequence
  Synthetic
auuucacaguuguucagcau

SEQ ID NO: 626992 - RNA, 21 nt, Artificial Sequence
  Synthetic
cauuucacaguuguucagcau

SEQ ID NO: 626993 - RNA, 22 nt, Artificial Sequence
  Synthetic
ccauuucacaguuguucagcau

SEQ ID NO: 626994 - RNA, 23 nt, Artificial Sequence
  Synthetic
accauuucacaguuguucagcau

SEQ ID NO: 626995 - RNA, 24 nt, Artificial Sequence
  Synthetic
aaccauuucacaguuguucagcau

SEQ ID NO: 626996 - RNA, 18 nt, Artificial Sequence
  Synthetic
acugaggcauuucagcau

SEQ ID NO: 626997 - RNA, 19 nt, Artificial Sequence
  Synthetic
cacugaggcauuucagcau

SEQ ID NO: 626998 - RNA, 20 nt, Artificial Sequence
  Synthetic
gcacugaggcauuucagcau

SEQ ID NO: 626999 - RNA, 21 nt, Artificial Sequence
  Synthetic
agcacugaggcauuucagcau

SEQ ID NO: 627000 - RNA, 22 nt, Artificial Sequence
  Synthetic
gagcacugaggcauuucagcau

SEQ ID NO: 627001 - RNA, 23 nt, Artificial Sequence
  Synthetic
ugagcacugaggcauuucagcau

SEQ ID NO: 627002 - RNA, 24 nt, Artificial Sequence
  Synthetic
cugagcacugaggcauuucagcau

SEQ ID NO: 627003 - RNA, 18 nt, Artificial Sequence
  Synthetic
gcuagcuccuuucagcau

SEQ ID NO: 627004 - RNA, 19 nt, Artificial Sequence
  Synthetic
agcuagcuccuuucagcau

SEQ ID NO: 627005 - RNA, 20 nt, Artificial Sequence
  Synthetic
uagcuagcuccuuucagcau

SEQ ID NO: 627006 - RNA, 21 nt, Artificial Sequence
  Synthetic
cuagcuagcuccuuucagcau

SEQ ID NO: 627007 - RNA, 22 nt, Artificial Sequence
  Synthetic
gcuagcuagcuccuuucagcau

SEQ ID NO: 627008 - RNA, 23 nt, Artificial Sequence
  Synthetic
agcuagcuagcuccuuucagcau

SEQ ID NO: 627009 - RNA, 24 nt, Artificial Sequence
  Synthetic
gagcuagcuagcuccuuucagcau

SEQ ID NO: 627010 - RNA, 18 nt, Artificial Sequence
  Synthetic
ugggagacagaagagcau

SEQ ID NO: 627011 - RNA, 19 nt, Artificial Sequence
  Synthetic
gugggagacagaagagcau

SEQ ID NO: 627012 - RNA, 20 nt, Artificial Sequence
  Synthetic
agugggagacagaagagcau

SEQ ID NO: 627013 - RNA, 21 nt, Artificial Sequence
  Synthetic
uagugggagacagaagagcau

SEQ ID NO: 627014 - RNA, 22 nt, Artificial Sequence
  Synthetic
cuagugggagacagaagagcau

SEQ ID NO: 627015 - RNA, 23 nt, Artificial Sequence
  Synthetic
acuagugggagacagaagagcau

SEQ ID NO: 627016 - RNA, 24 nt, Artificial Sequence
  Synthetic
cacuagugggagacagaagagcau

SEQ ID NO: 627017 - RNA, 18 nt, Artificial Sequence
  Synthetic
caaggggacagagagcau

SEQ ID NO: 627018 - RNA, 19 nt, Artificial Sequence
  Synthetic
gcaaggggacagagagcau

SEQ ID NO: 627019 - RNA, 20 nt, Artificial Sequence
  Synthetic
ggcaaggggacagagagcau

SEQ ID NO: 627020 - RNA, 21 nt, Artificial Sequence
  Synthetic
gggcaaggggacagagagcau

SEQ ID NO: 627021 - RNA, 22 nt, Artificial Sequence
  Synthetic
ggggcaaggggacagagagcau

SEQ ID NO: 627022 - RNA, 23 nt, Artificial Sequence
  Synthetic
aggggcaaggggacagagagcau

SEQ ID NO: 627023 - RNA, 24 nt, Artificial Sequence
  Synthetic
gaggggcaaggggacagagagcau

SEQ ID NO: 627024 - RNA, 18 nt, Artificial Sequence
  Synthetic
aaaggugagggagagcau

SEQ ID NO: 627025 - RNA, 19 nt, Artificial Sequence
  Synthetic
aaaaggugagggagagcau

SEQ ID NO: 627026 - RNA, 20 nt, Artificial Sequence
  Synthetic
gaaaaggugagggagagcau

SEQ ID NO: 627027 - RNA, 21 nt, Artificial Sequence
  Synthetic
ggaaaaggugagggagagcau

SEQ ID NO: 627028 - RNA, 22 nt, Artificial Sequence
  Synthetic
gggaaaaggugagggagagcau

SEQ ID NO: 627029 - RNA, 23 nt, Artificial Sequence
  Synthetic
agggaaaaggugagggagagcau

SEQ ID NO: 627030 - RNA, 24 nt, Artificial Sequence
  Synthetic
cagggaaaaggugagggagagcau

SEQ ID NO: 627031 - RNA, 18 nt, Artificial Sequence
  Synthetic
uaugcaagaugagagcau

SEQ ID NO: 627032 - RNA, 19 nt, Artificial Sequence
  Synthetic
uuaugcaagaugagagcau

SEQ ID NO: 627033 - RNA, 20 nt, Artificial Sequence
  Synthetic
guuaugcaagaugagagcau

SEQ ID NO: 627034 - RNA, 21 nt, Artificial Sequence
  Synthetic
cguuaugcaagaugagagcau

SEQ ID NO: 627035 - RNA, 22 nt, Artificial Sequence
  Synthetic
acguuaugcaagaugagagcau

SEQ ID NO: 627036 - RNA, 23 nt, Artificial Sequence
  Synthetic
aacguuaugcaagaugagagcau

SEQ ID NO: 627037 - RNA, 24 nt, Artificial Sequence
  Synthetic
gaacguuaugcaagaugagagcau

SEQ ID NO: 627038 - RNA, 18 nt, Artificial Sequence
  Synthetic
uuuucacucaucgagcau

SEQ ID NO: 627039 - RNA, 19 nt, Artificial Sequence
  Synthetic
uuuuucacucaucgagcau

SEQ ID NO: 627040 - RNA, 20 nt, Artificial Sequence
  Synthetic
cuuuuucacucaucgagcau

SEQ ID NO: 627041 - RNA, 21 nt, Artificial Sequence
  Synthetic
ucuuuuucacucaucgagcau

SEQ ID NO: 627042 - RNA, 22 nt, Artificial Sequence
  Synthetic
uucuuuuucacucaucgagcau

SEQ ID NO: 627043 - RNA, 23 nt, Artificial Sequence
  Synthetic
uuucuuuuucacucaucgagcau

SEQ ID NO: 627044 - RNA, 24 nt, Artificial Sequence
  Synthetic
uuuucuuuuucacucaucgagcau

SEQ ID NO: 627045 - RNA, 18 nt, Artificial Sequence
  Synthetic
gucaucccuaaggagcau

SEQ ID NO: 627046 - RNA, 19 nt, Artificial Sequence
  Synthetic
ugucaucccuaaggagcau

SEQ ID NO: 627047 - RNA, 20 nt, Artificial Sequence
  Synthetic
uugucaucccuaaggagcau

SEQ ID NO: 627048 - RNA, 21 nt, Artificial Sequence
  Synthetic
guugucaucccuaaggagcau

SEQ ID NO: 627049 - RNA, 22 nt, Artificial Sequence
  Synthetic
uguugucaucccuaaggagcau

SEQ ID NO: 627050 - RNA, 23 nt, Artificial Sequence
  Synthetic
cuguugucaucccuaaggagcau

SEQ ID NO: 627051 - RNA, 24 nt, Artificial Sequence
  Synthetic
ccuguugucaucccuaaggagcau

SEQ ID NO: 627052 - RNA, 18 nt, Artificial Sequence
  Synthetic
aaaauaagucaggagcau

SEQ ID NO: 627053 - RNA, 19 nt, Artificial Sequence
  Synthetic
gaaaauaagucaggagcau

SEQ ID NO: 627054 - RNA, 20 nt, Artificial Sequence
  Synthetic
agaaaauaagucaggagcau

SEQ ID NO: 627055 - RNA, 21 nt, Artificial Sequence
  Synthetic
aagaaaauaagucaggagcau

SEQ ID NO: 627056 - RNA, 22 nt, Artificial Sequence
  Synthetic
aaagaaaauaagucaggagcau

SEQ ID NO: 627057 - RNA, 23 nt, Artificial Sequence
  Synthetic
aaaagaaaauaagucaggagcau

SEQ ID NO: 627058 - RNA, 24 nt, Artificial Sequence
  Synthetic
aaaaagaaaauaagucaggagcau

SEQ ID NO: 627059 - RNA, 18 nt, Artificial Sequence
  Synthetic
ccacagugggaggagcau

SEQ ID NO: 627060 - RNA, 19 nt, Artificial Sequence
  Synthetic
cccacagugggaggagcau

SEQ ID NO: 627061 - RNA, 20 nt, Artificial Sequence
  Synthetic
ccccacagugggaggagcau

SEQ ID NO: 627062 - RNA, 21 nt, Artificial Sequence
  Synthetic
uccccacagugggaggagcau

SEQ ID NO: 627063 - RNA, 22 nt, Artificial Sequence
  Synthetic
guccccacagugggaggagcau

SEQ ID NO: 627064 - RNA, 23 nt, Artificial Sequence
  Synthetic
uguccccacagugggaggagcau

SEQ ID NO: 627065 - RNA, 24 nt, Artificial Sequence
  Synthetic
uuguccccacagugggaggagcau

SEQ ID NO: 627066 - RNA, 18 nt, Artificial Sequence
  Synthetic
gagggggauggggagcau

SEQ ID NO: 627067 - RNA, 19 nt, Artificial Sequence
  Synthetic
ugagggggauggggagcau

SEQ ID NO: 627068 - RNA, 20 nt, Artificial Sequence
  Synthetic
uugagggggauggggagcau

SEQ ID NO: 627069 - RNA, 21 nt, Artificial Sequence
  Synthetic
uuugagggggauggggagcau

SEQ ID NO: 627070 - RNA, 22 nt, Artificial Sequence
  Synthetic
cuuugagggggauggggagcau

SEQ ID NO: 627071 - RNA, 23 nt, Artificial Sequence
  Synthetic
acuuugagggggauggggagcau

SEQ ID NO: 627072 - RNA, 24 nt, Artificial Sequence
  Synthetic
uacuuugagggggauggggagcau

SEQ ID NO: 627073 - RNA, 18 nt, Artificial Sequence
  Synthetic
aacauaauccuugagcau

SEQ ID NO: 627074 - RNA, 19 nt, Artificial Sequence
  Synthetic
gaacauaauccuugagcau

SEQ ID NO: 627075 - RNA, 20 nt, Artificial Sequence
  Synthetic
agaacauaauccuugagcau

SEQ ID NO: 627076 - RNA, 21 nt, Artificial Sequence
  Synthetic
aagaacauaauccuugagcau

SEQ ID NO: 627077 - RNA, 22 nt, Artificial Sequence
  Synthetic
gaagaacauaauccuugagcau

SEQ ID NO: 627078 - RNA, 23 nt, Artificial Sequence
  Synthetic
ggaagaacauaauccuugagcau

SEQ ID NO: 627079 - RNA, 24 nt, Artificial Sequence
  Synthetic
aggaagaacauaauccuugagcau

SEQ ID NO: 627080 - RNA, 18 nt, Artificial Sequence
  Synthetic
aagaguguuaaauagcau

SEQ ID NO: 627081 - RNA, 19 nt, Artificial Sequence
  Synthetic
gaagaguguuaaauagcau

SEQ ID NO: 627082 - RNA, 20 nt, Artificial Sequence
  Synthetic
ugaagaguguuaaauagcau

SEQ ID NO: 627083 - RNA, 21 nt, Artificial Sequence
  Synthetic
uugaagaguguuaaauagcau

SEQ ID NO: 627084 - RNA, 22 nt, Artificial Sequence
  Synthetic
cuugaagaguguuaaauagcau

SEQ ID NO: 627085 - RNA, 23 nt, Artificial Sequence
  Synthetic
ucuugaagaguguuaaauagcau

SEQ ID NO: 627086 - RNA, 24 nt, Artificial Sequence
  Synthetic
uucuugaagaguguuaaauagcau

SEQ ID NO: 627087 - RNA, 18 nt, Artificial Sequence
  Synthetic
cuaucaugagaauagcau

SEQ ID NO: 627088 - RNA, 19 nt, Artificial Sequence
  Synthetic
acuaucaugagaauagcau

SEQ ID NO: 627089 - RNA, 20 nt, Artificial Sequence
  Synthetic
cacuaucaugagaauagcau

SEQ ID NO: 627090 - RNA, 21 nt, Artificial Sequence
  Synthetic
ccacuaucaugagaauagcau

SEQ ID NO: 627091 - RNA, 22 nt, Artificial Sequence
  Synthetic
cccacuaucaugagaauagcau

SEQ ID NO: 627092 - RNA, 23 nt, Artificial Sequence
  Synthetic
acccacuaucaugagaauagcau

SEQ ID NO: 627093 - RNA, 24 nt, Artificial Sequence
  Synthetic
cacccacuaucaugagaauagcau

SEQ ID NO: 627094 - RNA, 18 nt, Artificial Sequence
  Synthetic
uauacuaaaggauagcau

SEQ ID NO: 627095 - RNA, 19 nt, Artificial Sequence
  Synthetic
cuauacuaaaggauagcau

SEQ ID NO: 627096 - RNA, 20 nt, Artificial Sequence
  Synthetic
acuauacuaaaggauagcau

SEQ ID NO: 627097 - RNA, 21 nt, Artificial Sequence
  Synthetic
aacuauacuaaaggauagcau

SEQ ID NO: 627098 - RNA, 22 nt, Artificial Sequence
  Synthetic
aaacuauacuaaaggauagcau

SEQ ID NO: 627099 - RNA, 23 nt, Artificial Sequence
  Synthetic
caaacuauacuaaaggauagcau

SEQ ID NO: 627100 - RNA, 24 nt, Artificial Sequence
  Synthetic
ucaaacuauacuaaaggauagcau

SEQ ID NO: 627101 - RNA, 18 nt, Artificial Sequence
  Synthetic
caaggggagggauagcau

SEQ ID NO: 627102 - RNA, 19 nt, Artificial Sequence
  Synthetic
gcaaggggagggauagcau

SEQ ID NO: 627103 - RNA, 20 nt, Artificial Sequence
  Synthetic
ggcaaggggagggauagcau

SEQ ID NO: 627104 - RNA, 21 nt, Artificial Sequence
  Synthetic
gggcaaggggagggauagcau

SEQ ID NO: 627105 - RNA, 22 nt, Artificial Sequence
  Synthetic
ggggcaaggggagggauagcau

SEQ ID NO: 627106 - RNA, 23 nt, Artificial Sequence
  Synthetic
gggggcaaggggagggauagcau

SEQ ID NO: 627107 - RNA, 24 nt, Artificial Sequence
  Synthetic
ggggggcaaggggagggauagcau

SEQ ID NO: 627108 - RNA, 18 nt, Artificial Sequence
  Synthetic
cuaggggagggauagcau

SEQ ID NO: 627109 - RNA, 19 nt, Artificial Sequence
  Synthetic
gcuaggggagggauagcau

SEQ ID NO: 627110 - RNA, 20 nt, Artificial Sequence
  Synthetic
ggcuaggggagggauagcau

SEQ ID NO: 627111 - RNA, 21 nt, Artificial Sequence
  Synthetic
gggcuaggggagggauagcau

SEQ ID NO: 627112 - RNA, 22 nt, Artificial Sequence
  Synthetic
ggggcuaggggagggauagcau

SEQ ID NO: 627113 - RNA, 23 nt, Artificial Sequence
  Synthetic
gggggcuaggggagggauagcau

SEQ ID NO: 627114 - RNA, 24 nt, Artificial Sequence
  Synthetic
ggggggcuaggggagggauagcau

SEQ ID NO: 627115 - RNA, 18 nt, Artificial Sequence
  Synthetic
uuaggggagggauagcau

SEQ ID NO: 627116 - RNA, 19 nt, Artificial Sequence
  Synthetic
guuaggggagggauagcau

SEQ ID NO: 627117 - RNA, 20 nt, Artificial Sequence
  Synthetic
gguuaggggagggauagcau

SEQ ID NO: 627118 - RNA, 21 nt, Artificial Sequence
  Synthetic
ggguuaggggagggauagcau

SEQ ID NO: 627119 - RNA, 22 nt, Artificial Sequence
  Synthetic
gggguuaggggagggauagcau

SEQ ID NO: 627120 - RNA, 23 nt, Artificial Sequence
  Synthetic
ggggguuaggggagggauagcau

SEQ ID NO: 627121 - RNA, 24 nt, Artificial Sequence
  Synthetic
gggggguuaggggagggauagcau

SEQ ID NO: 627122 - RNA, 18 nt, Artificial Sequence
  Synthetic
aagggggagggauagcau

SEQ ID NO: 627123 - RNA, 19 nt, Artificial Sequence
  Synthetic
gaagggggagggauagcau

SEQ ID NO: 627124 - RNA, 20 nt, Artificial Sequence
  Synthetic
ggaagggggagggauagcau

SEQ ID NO: 627125 - RNA, 21 nt, Artificial Sequence
  Synthetic
gggaagggggagggauagcau

SEQ ID NO: 627126 - RNA, 22 nt, Artificial Sequence
  Synthetic
ggggaagggggagggauagcau

SEQ ID NO: 627127 - RNA, 23 nt, Artificial Sequence
  Synthetic
gggggaagggggagggauagcau

SEQ ID NO: 627128 - RNA, 24 nt, Artificial Sequence
  Synthetic
ggggggaagggggagggauagcau

SEQ ID NO: 627129 - RNA, 18 nt, Artificial Sequence
  Synthetic
acgggggagggauagcau

SEQ ID NO: 627130 - RNA, 19 nt, Artificial Sequence
  Synthetic
gacgggggagggauagcau

SEQ ID NO: 627131 - RNA, 20 nt, Artificial Sequence
  Synthetic
ggacgggggagggauagcau

SEQ ID NO: 627132 - RNA, 21 nt, Artificial Sequence
  Synthetic
gggacgggggagggauagcau

SEQ ID NO: 627133 - RNA, 22 nt, Artificial Sequence
  Synthetic
ggggacgggggagggauagcau

SEQ ID NO: 627134 - RNA, 23 nt, Artificial Sequence
  Synthetic
aggggacgggggagggauagcau

SEQ ID NO: 627135 - RNA, 24 nt, Artificial Sequence
  Synthetic
gaggggacgggggagggauagcau

SEQ ID NO: 627136 - RNA, 24 nt, Artificial Sequence
  Synthetic
ggggggaggggggagggauagcau

SEQ ID NO: 627137 - RNA, 18 nt, Artificial Sequence
  Synthetic
gggggggagggauagcau

SEQ ID NO: 627138 - RNA, 19 nt, Artificial Sequence
  Synthetic
agggggggagggauagcau

SEQ ID NO: 627139 - RNA, 20 nt, Artificial Sequence
  Synthetic
gagggggggagggauagcau

SEQ ID NO: 627140 - RNA, 21 nt, Artificial Sequence
  Synthetic
ggagggggggagggauagcau

SEQ ID NO: 627141 - RNA, 22 nt, Artificial Sequence
  Synthetic
gggagggggggagggauagcau

SEQ ID NO: 627142 - RNA, 23 nt, Artificial Sequence
  Synthetic
ggggagggggggagggauagcau

SEQ ID NO: 627143 - RNA, 24 nt, Artificial Sequence
  Synthetic
gggggagggggggagggauagcau

SEQ ID NO: 627144 - RNA, 18 nt, Artificial Sequence
  Synthetic
gcuggggagggauagcau

SEQ ID NO: 627145 - RNA, 19 nt, Artificial Sequence
  Synthetic
ggcuggggagggauagcau

SEQ ID NO: 627146 - RNA, 20 nt, Artificial Sequence
  Synthetic
gggcuggggagggauagcau

SEQ ID NO: 627147 - RNA, 21 nt, Artificial Sequence
  Synthetic
ggggcuggggagggauagcau

SEQ ID NO: 627148 - RNA, 22 nt, Artificial Sequence
  Synthetic
gggggcuggggagggauagcau

SEQ ID NO: 627149 - RNA, 23 nt, Artificial Sequence
  Synthetic
ggggggcuggggagggauagcau

SEQ ID NO: 627150 - RNA, 24 nt, Artificial Sequence
  Synthetic
uggggggcuggggagggauagcau

SEQ ID NO: 627151 - RNA, 18 nt, Artificial Sequence
  Synthetic
cuaggguagggauagcau

SEQ ID NO: 627152 - RNA, 19 nt, Artificial Sequence
  Synthetic
gcuaggguagggauagcau

SEQ ID NO: 627153 - RNA, 20 nt, Artificial Sequence
  Synthetic
ggcuaggguagggauagcau

SEQ ID NO: 627154 - RNA, 21 nt, Artificial Sequence
  Synthetic
gggcuaggguagggauagcau

SEQ ID NO: 627155 - RNA, 22 nt, Artificial Sequence
  Synthetic
ggggcuaggguagggauagcau

SEQ ID NO: 627156 - RNA, 23 nt, Artificial Sequence
  Synthetic
gggggcuaggguagggauagcau

SEQ ID NO: 627157 - RNA, 24 nt, Artificial Sequence
  Synthetic
ggggggcuaggguagggauagcau

SEQ ID NO: 627158 - RNA, 18 nt, Artificial Sequence
  Synthetic
ucauuuugaugauagcau

SEQ ID NO: 627159 - RNA, 19 nt, Artificial Sequence
  Synthetic
uucauuuugaugauagcau

SEQ ID NO: 627160 - RNA, 20 nt, Artificial Sequence
  Synthetic
cuucauuuugaugauagcau

SEQ ID NO: 627161 - RNA, 21 nt, Artificial Sequence
  Synthetic
ccuucauuuugaugauagcau

SEQ ID NO: 627162 - RNA, 22 nt, Artificial Sequence
  Synthetic
gccuucauuuugaugauagcau

SEQ ID NO: 627163 - RNA, 23 nt, Artificial Sequence
  Synthetic
ugccuucauuuugaugauagcau

SEQ ID NO: 627164 - RNA, 24 nt, Artificial Sequence
  Synthetic
cugccuucauuuugaugauagcau

SEQ ID NO: 627165 - RNA, 18 nt, Artificial Sequence
  Synthetic
ccugggcagaucuagcau

SEQ ID NO: 627166 - RNA, 19 nt, Artificial Sequence
  Synthetic
uccugggcagaucuagcau

SEQ ID NO: 627167 - RNA, 20 nt, Artificial Sequence
  Synthetic
cuccugggcagaucuagcau

SEQ ID NO: 627168 - RNA, 21 nt, Artificial Sequence
  Synthetic
ccuccugggcagaucuagcau

SEQ ID NO: 627169 - RNA, 22 nt, Artificial Sequence
  Synthetic
cccuccugggcagaucuagcau

SEQ ID NO: 627170 - RNA, 23 nt, Artificial Sequence
  Synthetic
ccccuccugggcagaucuagcau

SEQ ID NO: 627171 - RNA, 24 nt, Artificial Sequence
  Synthetic
uccccuccugggcagaucuagcau

SEQ ID NO: 627172 - RNA, 18 nt, Artificial Sequence
  Synthetic
acucggugagucuagcau

SEQ ID NO: 627173 - RNA, 19 nt, Artificial Sequence
  Synthetic
aacucggugagucuagcau

SEQ ID NO: 627174 - RNA, 20 nt, Artificial Sequence
  Synthetic
uaacucggugagucuagcau

SEQ ID NO: 627175 - RNA, 21 nt, Artificial Sequence
  Synthetic
uuaacucggugagucuagcau

SEQ ID NO: 627176 - RNA, 22 nt, Artificial Sequence
  Synthetic
auuaacucggugagucuagcau

SEQ ID NO: 627177 - RNA, 23 nt, Artificial Sequence
  Synthetic
gauuaacucggugagucuagcau

SEQ ID NO: 627178 - RNA, 24 nt, Artificial Sequence
  Synthetic
ugauuaacucggugagucuagcau

SEQ ID NO: 627179 - RNA, 18 nt, Artificial Sequence
  Synthetic
uaauggaaaauguagcau

SEQ ID NO: 627180 - RNA, 19 nt, Artificial Sequence
  Synthetic
uuaauggaaaauguagcau

SEQ ID NO: 627181 - RNA, 20 nt, Artificial Sequence
  Synthetic
cuuaauggaaaauguagcau

SEQ ID NO: 627182 - RNA, 21 nt, Artificial Sequence
  Synthetic
ccuuaauggaaaauguagcau

SEQ ID NO: 627183 - RNA, 22 nt, Artificial Sequence
  Synthetic
gccuuaauggaaaauguagcau

SEQ ID NO: 627184 - RNA, 23 nt, Artificial Sequence
  Synthetic
agccuuaauggaaaauguagcau

SEQ ID NO: 627185 - RNA, 24 nt, Artificial Sequence
  Synthetic
gagccuuaauggaaaauguagcau

SEQ ID NO: 627186 - RNA, 18 nt, Artificial Sequence
  Synthetic
ucugcauuuacuuagcau

SEQ ID NO: 627187 - RNA, 19 nt, Artificial Sequence
  Synthetic
uucugcauuuacuuagcau

SEQ ID NO: 627188 - RNA, 20 nt, Artificial Sequence
  Synthetic
guucugcauuuacuuagcau

SEQ ID NO: 627189 - RNA, 21 nt, Artificial Sequence
  Synthetic
gguucugcauuuacuuagcau

SEQ ID NO: 627190 - RNA, 22 nt, Artificial Sequence
  Synthetic
ugguucugcauuuacuuagcau

SEQ ID NO: 627191 - RNA, 23 nt, Artificial Sequence
  Synthetic
augguucugcauuuacuuagcau

SEQ ID NO: 627192 - RNA, 24 nt, Artificial Sequence
  Synthetic
aaugguucugcauuuacuuagcau

SEQ ID NO: 627193 - RNA, 18 nt, Artificial Sequence
  Synthetic
gcuagaaaggaaacgcau

SEQ ID NO: 627194 - RNA, 19 nt, Artificial Sequence
  Synthetic
agcuagaaaggaaacgcau

SEQ ID NO: 627195 - RNA, 20 nt, Artificial Sequence
  Synthetic
gagcuagaaaggaaacgcau

SEQ ID NO: 627196 - RNA, 21 nt, Artificial Sequence
  Synthetic
ugagcuagaaaggaaacgcau

SEQ ID NO: 627197 - RNA, 22 nt, Artificial Sequence
  Synthetic
augagcuagaaaggaaacgcau

SEQ ID NO: 627198 - RNA, 23 nt, Artificial Sequence
  Synthetic
gaugagcuagaaaggaaacgcau

SEQ ID NO: 627199 - RNA, 24 nt, Artificial Sequence
  Synthetic
ugaugagcuagaaaggaaacgcau

SEQ ID NO: 627200 - RNA, 18 nt, Artificial Sequence
  Synthetic
uucagaauuuccacgcau

SEQ ID NO: 627201 - RNA, 19 nt, Artificial Sequence
  Synthetic
auucagaauuuccacgcau

SEQ ID NO: 627202 - RNA, 20 nt, Artificial Sequence
  Synthetic
uauucagaauuuccacgcau

SEQ ID NO: 627203 - RNA, 21 nt, Artificial Sequence
  Synthetic
uuauucagaauuuccacgcau

SEQ ID NO: 627204 - RNA, 22 nt, Artificial Sequence
  Synthetic
uuuauucagaauuuccacgcau

SEQ ID NO: 627205 - RNA, 23 nt, Artificial Sequence
  Synthetic
uuuuauucagaauuuccacgcau

SEQ ID NO: 627206 - RNA, 24 nt, Artificial Sequence
  Synthetic
auuuuauucagaauuuccacgcau

SEQ ID NO: 627207 - RNA, 18 nt, Artificial Sequence
  Synthetic
uaacucuucuguacgcau

SEQ ID NO: 627208 - RNA, 19 nt, Artificial Sequence
  Synthetic
auaacucuucuguacgcau

SEQ ID NO: 627209 - RNA, 20 nt, Artificial Sequence
  Synthetic
gauaacucuucuguacgcau

SEQ ID NO: 627210 - RNA, 21 nt, Artificial Sequence
  Synthetic
ugauaacucuucuguacgcau

SEQ ID NO: 627211 - RNA, 22 nt, Artificial Sequence
  Synthetic
augauaacucuucuguacgcau

SEQ ID NO: 627212 - RNA, 23 nt, Artificial Sequence
  Synthetic
aaugauaacucuucuguacgcau

SEQ ID NO: 627213 - RNA, 24 nt, Artificial Sequence
  Synthetic
uaaugauaacucuucuguacgcau

SEQ ID NO: 627214 - RNA, 18 nt, Artificial Sequence
  Synthetic
uauaacacuucaccgcau

SEQ ID NO: 627215 - RNA, 19 nt, Artificial Sequence
  Synthetic
uuauaacacuucaccgcau

SEQ ID NO: 627216 - RNA, 20 nt, Artificial Sequence
  Synthetic
uuuauaacacuucaccgcau

SEQ ID NO: 627217 - RNA, 21 nt, Artificial Sequence
  Synthetic
auuuauaacacuucaccgcau

SEQ ID NO: 627218 - RNA, 22 nt, Artificial Sequence
  Synthetic
uauuuauaacacuucaccgcau

SEQ ID NO: 627219 - RNA, 23 nt, Artificial Sequence
  Synthetic
uuauuuauaacacuucaccgcau

SEQ ID NO: 627220 - RNA, 24 nt, Artificial Sequence
  Synthetic
auuauuuauaacacuucaccgcau

SEQ ID NO: 627221 - RNA, 18 nt, Artificial Sequence
  Synthetic
cagauuuaaaauccgcau

SEQ ID NO: 627222 - RNA, 19 nt, Artificial Sequence
  Synthetic
gcagauuuaaaauccgcau

SEQ ID NO: 627223 - RNA, 20 nt, Artificial Sequence
  Synthetic
ugcagauuuaaaauccgcau

SEQ ID NO: 627224 - RNA, 21 nt, Artificial Sequence
  Synthetic
uugcagauuuaaaauccgcau

SEQ ID NO: 627225 - RNA, 22 nt, Artificial Sequence
  Synthetic
cuugcagauuuaaaauccgcau

SEQ ID NO: 627226 - RNA, 23 nt, Artificial Sequence
  Synthetic
ccuugcagauuuaaaauccgcau

SEQ ID NO: 627227 - RNA, 24 nt, Artificial Sequence
  Synthetic
cccuugcagauuuaaaauccgcau

SEQ ID NO: 627228 - RNA, 18 nt, Artificial Sequence
  Synthetic
cuaacauucuugucgcau

SEQ ID NO: 627229 - RNA, 19 nt, Artificial Sequence
  Synthetic
ccuaacauucuugucgcau

SEQ ID NO: 627230 - RNA, 20 nt, Artificial Sequence
  Synthetic
uccuaacauucuugucgcau

SEQ ID NO: 627231 - RNA, 21 nt, Artificial Sequence
  Synthetic
auccuaacauucuugucgcau

SEQ ID NO: 627232 - RNA, 22 nt, Artificial Sequence
  Synthetic
cauccuaacauucuugucgcau

SEQ ID NO: 627233 - RNA, 23 nt, Artificial Sequence
  Synthetic
acauccuaacauucuugucgcau

SEQ ID NO: 627234 - RNA, 24 nt, Artificial Sequence
  Synthetic
gacauccuaacauucuugucgcau

SEQ ID NO: 627235 - RNA, 18 nt, Artificial Sequence
  Synthetic
acaagguacauuucgcau

SEQ ID NO: 627236 - RNA, 19 nt, Artificial Sequence
  Synthetic
uacaagguacauuucgcau

SEQ ID NO: 627237 - RNA, 20 nt, Artificial Sequence
  Synthetic
cuacaagguacauuucgcau

SEQ ID NO: 627238 - RNA, 21 nt, Artificial Sequence
  Synthetic
acuacaagguacauuucgcau

SEQ ID NO: 627239 - RNA, 22 nt, Artificial Sequence
  Synthetic
gacuacaagguacauuucgcau

SEQ ID NO: 627240 - RNA, 23 nt, Artificial Sequence
  Synthetic
ggacuacaagguacauuucgcau

SEQ ID NO: 627241 - RNA, 24 nt, Artificial Sequence
  Synthetic
uggacuacaagguacauuucgcau

SEQ ID NO: 627242 - RNA, 18 nt, Artificial Sequence
  Synthetic
gucugaguccaaaggcau

SEQ ID NO: 627243 - RNA, 19 nt, Artificial Sequence
  Synthetic
ugucugaguccaaaggcau

SEQ ID NO: 627244 - RNA, 20 nt, Artificial Sequence
  Synthetic
cugucugaguccaaaggcau

SEQ ID NO: 627245 - RNA, 21 nt, Artificial Sequence
  Synthetic
ccugucugaguccaaaggcau

SEQ ID NO: 627246 - RNA, 22 nt, Artificial Sequence
  Synthetic
uccugucugaguccaaaggcau

SEQ ID NO: 627247 - RNA, 23 nt, Artificial Sequence
  Synthetic
uuccugucugaguccaaaggcau

SEQ ID NO: 627248 - RNA, 24 nt, Artificial Sequence
  Synthetic
guuccugucugaguccaaaggcau

SEQ ID NO: 627249 - RNA, 18 nt, Artificial Sequence
  Synthetic
cccagcuaccccaggcau

SEQ ID NO: 627250 - RNA, 19 nt, Artificial Sequence
  Synthetic
acccagcuaccccaggcau

SEQ ID NO: 627251 - RNA, 20 nt, Artificial Sequence
  Synthetic
cacccagcuaccccaggcau

SEQ ID NO: 627252 - RNA, 21 nt, Artificial Sequence
  Synthetic
ucacccagcuaccccaggcau

SEQ ID NO: 627253 - RNA, 22 nt, Artificial Sequence
  Synthetic
aucacccagcuaccccaggcau

SEQ ID NO: 627254 - RNA, 23 nt, Artificial Sequence
  Synthetic
aaucacccagcuaccccaggcau

SEQ ID NO: 627255 - RNA, 24 nt, Artificial Sequence
  Synthetic
aaaucacccagcuaccccaggcau

SEQ ID NO: 627256 - RNA, 18 nt, Artificial Sequence
  Synthetic
auuacauuauagaggcau

SEQ ID NO: 627257 - RNA, 19 nt, Artificial Sequence
  Synthetic
uauuacauuauagaggcau

SEQ ID NO: 627258 - RNA, 20 nt, Artificial Sequence
  Synthetic
uuauuacauuauagaggcau

SEQ ID NO: 627259 - RNA, 21 nt, Artificial Sequence
  Synthetic
auuauuacauuauagaggcau

SEQ ID NO: 627260 - RNA, 22 nt, Artificial Sequence
  Synthetic
cauuauuacauuauagaggcau

SEQ ID NO: 627261 - RNA, 23 nt, Artificial Sequence
  Synthetic
acauuauuacauuauagaggcau

SEQ ID NO: 627262 - RNA, 24 nt, Artificial Sequence
  Synthetic
gacauuauuacauuauagaggcau

SEQ ID NO: 627263 - RNA, 18 nt, Artificial Sequence
  Synthetic
cucagggggcugaggcau

SEQ ID NO: 627264 - RNA, 19 nt, Artificial Sequence
  Synthetic
acucagggggcugaggcau

SEQ ID NO: 627265 - RNA, 20 nt, Artificial Sequence
  Synthetic
uacucagggggcugaggcau

SEQ ID NO: 627266 - RNA, 21 nt, Artificial Sequence
  Synthetic
cuacucagggggcugaggcau

SEQ ID NO: 627267 - RNA, 22 nt, Artificial Sequence
  Synthetic
gcuacucagggggcugaggcau

SEQ ID NO: 627268 - RNA, 23 nt, Artificial Sequence
  Synthetic
agcuacucagggggcugaggcau

SEQ ID NO: 627269 - RNA, 24 nt, Artificial Sequence
  Synthetic
cagcuacucagggggcugaggcau

SEQ ID NO: 627270 - RNA, 18 nt, Artificial Sequence
  Synthetic
uaaguaaacccuaggcau

SEQ ID NO: 627271 - RNA, 19 nt, Artificial Sequence
  Synthetic
guaaguaaacccuaggcau

SEQ ID NO: 627272 - RNA, 20 nt, Artificial Sequence
  Synthetic
aguaaguaaacccuaggcau

SEQ ID NO: 627273 - RNA, 21 nt, Artificial Sequence
  Synthetic
aaguaaguaaacccuaggcau

SEQ ID NO: 627274 - RNA, 22 nt, Artificial Sequence
  Synthetic
uaaguaaguaaacccuaggcau

SEQ ID NO: 627275 - RNA, 23 nt, Artificial Sequence
  Synthetic
uuaaguaaguaaacccuaggcau

SEQ ID NO: 627276 - RNA, 24 nt, Artificial Sequence
  Synthetic
uuuaaguaaguaaacccuaggcau

SEQ ID NO: 627277 - RNA, 18 nt, Artificial Sequence
  Synthetic
guuucaaagccuaggcau

SEQ ID NO: 627278 - RNA, 19 nt, Artificial Sequence
  Synthetic
cguuucaaagccuaggcau

SEQ ID NO: 627279 - RNA, 20 nt, Artificial Sequence
  Synthetic
acguuucaaagccuaggcau

SEQ ID NO: 627280 - RNA, 21 nt, Artificial Sequence
  Synthetic
cacguuucaaagccuaggcau

SEQ ID NO: 627281 - RNA, 22 nt, Artificial Sequence
  Synthetic
acacguuucaaagccuaggcau

SEQ ID NO: 627282 - RNA, 23 nt, Artificial Sequence
  Synthetic
uacacguuucaaagccuaggcau

SEQ ID NO: 627283 - RNA, 24 nt, Artificial Sequence
  Synthetic
cuacacguuucaaagccuaggcau

SEQ ID NO: 627284 - RNA, 18 nt, Artificial Sequence
  Synthetic
uagguuaucuguaggcau

SEQ ID NO: 627285 - RNA, 19 nt, Artificial Sequence
  Synthetic
auagguuaucuguaggcau

SEQ ID NO: 627286 - RNA, 20 nt, Artificial Sequence
  Synthetic
uauagguuaucuguaggcau

SEQ ID NO: 627287 - RNA, 21 nt, Artificial Sequence
  Synthetic
uuauagguuaucuguaggcau

SEQ ID NO: 627288 - RNA, 22 nt, Artificial Sequence
  Synthetic
auuauagguuaucuguaggcau

SEQ ID NO: 627289 - RNA, 23 nt, Artificial Sequence
  Synthetic
cauuauagguuaucuguaggcau

SEQ ID NO: 627290 - RNA, 24 nt, Artificial Sequence
  Synthetic
acauuauagguuaucuguaggcau

SEQ ID NO: 627291 - RNA, 18 nt, Artificial Sequence
  Synthetic
uucaguaaaauuaggcau

SEQ ID NO: 627292 - RNA, 19 nt, Artificial Sequence
  Synthetic
uuucaguaaaauuaggcau

SEQ ID NO: 627293 - RNA, 20 nt, Artificial Sequence
  Synthetic
cuuucaguaaaauuaggcau

SEQ ID NO: 627294 - RNA, 21 nt, Artificial Sequence
  Synthetic
gcuuucaguaaaauuaggcau

SEQ ID NO: 627295 - RNA, 22 nt, Artificial Sequence
  Synthetic
ugcuuucaguaaaauuaggcau

SEQ ID NO: 627296 - RNA, 23 nt, Artificial Sequence
  Synthetic
augcuuucaguaaaauuaggcau

SEQ ID NO: 627297 - RNA, 24 nt, Artificial Sequence
  Synthetic
gaugcuuucaguaaaauuaggcau

SEQ ID NO: 627298 - RNA, 18 nt, Artificial Sequence
  Synthetic
aucguagaacuuaggcau

SEQ ID NO: 627299 - RNA, 19 nt, Artificial Sequence
  Synthetic
aaucguagaacuuaggcau

SEQ ID NO: 627300 - RNA, 20 nt, Artificial Sequence
  Synthetic
gaaucguagaacuuaggcau

SEQ ID NO: 627301 - RNA, 21 nt, Artificial Sequence
  Synthetic
agaaucguagaacuuaggcau

SEQ ID NO: 627302 - RNA, 22 nt, Artificial Sequence
  Synthetic
aagaaucguagaacuuaggcau

SEQ ID NO: 627303 - RNA, 23 nt, Artificial Sequence
  Synthetic
aaagaaucguagaacuuaggcau

SEQ ID NO: 627304 - RNA, 24 nt, Artificial Sequence
  Synthetic
uaaagaaucguagaacuuaggcau

SEQ ID NO: 627305 - RNA, 18 nt, Artificial Sequence
  Synthetic
acaaaaacacuuaggcau

SEQ ID NO: 627306 - RNA, 19 nt, Artificial Sequence
  Synthetic
aacaaaaacacuuaggcau

SEQ ID NO: 627307 - RNA, 20 nt, Artificial Sequence
  Synthetic
aaacaaaaacacuuaggcau

SEQ ID NO: 627308 - RNA, 21 nt, Artificial Sequence
  Synthetic
aaaacaaaaacacuuaggcau

SEQ ID NO: 627309 - RNA, 22 nt, Artificial Sequence
  Synthetic
caaaacaaaaacacuuaggcau

SEQ ID NO: 627310 - RNA, 23 nt, Artificial Sequence
  Synthetic
acaaaacaaaaacacuuaggcau

SEQ ID NO: 627311 - RNA, 24 nt, Artificial Sequence
  Synthetic
aacaaaacaaaaacacuuaggcau

SEQ ID NO: 627312 - RNA, 18 nt, Artificial Sequence
  Synthetic
auucuuugacuuaggcau

SEQ ID NO: 627313 - RNA, 19 nt, Artificial Sequence
  Synthetic
cauucuuugacuuaggcau

SEQ ID NO: 627314 - RNA, 20 nt, Artificial Sequence
  Synthetic
acauucuuugacuuaggcau

SEQ ID NO: 627315 - RNA, 21 nt, Artificial Sequence
  Synthetic
uacauucuuugacuuaggcau

SEQ ID NO: 627316 - RNA, 22 nt, Artificial Sequence
  Synthetic
uuacauucuuugacuuaggcau

SEQ ID NO: 627317 - RNA, 23 nt, Artificial Sequence
  Synthetic
uuuacauucuuugacuuaggcau

SEQ ID NO: 627318 - RNA, 24 nt, Artificial Sequence
  Synthetic
uuuuacauucuuugacuuaggcau

SEQ ID NO: 627319 - RNA, 18 nt, Artificial Sequence
  Synthetic
cauauacuauaacggcau

SEQ ID NO: 627320 - RNA, 19 nt, Artificial Sequence
  Synthetic
acauauacuauaacggcau

SEQ ID NO: 627321 - RNA, 20 nt, Artificial Sequence
  Synthetic
uacauauacuauaacggcau

SEQ ID NO: 627322 - RNA, 21 nt, Artificial Sequence
  Synthetic
auacauauacuauaacggcau

SEQ ID NO: 627323 - RNA, 22 nt, Artificial Sequence
  Synthetic
uauacauauacuauaacggcau

SEQ ID NO: 627324 - RNA, 23 nt, Artificial Sequence
  Synthetic
auauacauauacuauaacggcau

SEQ ID NO: 627325 - RNA, 24 nt, Artificial Sequence
  Synthetic
uauauacauauacuauaacggcau

SEQ ID NO: 627326 - RNA, 18 nt, Artificial Sequence
  Synthetic
caccacugugugcggcau

SEQ ID NO: 627327 - RNA, 19 nt, Artificial Sequence
  Synthetic
ccaccacugugugcggcau

SEQ ID NO: 627328 - RNA, 20 nt, Artificial Sequence
  Synthetic
cccaccacugugugcggcau

SEQ ID NO: 627329 - RNA, 21 nt, Artificial Sequence
  Synthetic
ccccaccacugugugcggcau

SEQ ID NO: 627330 - RNA, 22 nt, Artificial Sequence
  Synthetic
accccaccacugugugcggcau

SEQ ID NO: 627331 - RNA, 23 nt, Artificial Sequence
  Synthetic
aaccccaccacugugugcggcau

SEQ ID NO: 627332 - RNA, 24 nt, Artificial Sequence
  Synthetic
caaccccaccacugugugcggcau

SEQ ID NO: 627333 - RNA, 18 nt, Artificial Sequence
  Synthetic
cuggaagccaaagggcau

SEQ ID NO: 627334 - RNA, 19 nt, Artificial Sequence
  Synthetic
acuggaagccaaagggcau

SEQ ID NO: 627335 - RNA, 20 nt, Artificial Sequence
  Synthetic
aacuggaagccaaagggcau

SEQ ID NO: 627336 - RNA, 21 nt, Artificial Sequence
  Synthetic
caacuggaagccaaagggcau

SEQ ID NO: 627337 - RNA, 22 nt, Artificial Sequence
  Synthetic
ccaacuggaagccaaagggcau

SEQ ID NO: 627338 - RNA, 23 nt, Artificial Sequence
  Synthetic
accaacuggaagccaaagggcau

SEQ ID NO: 627339 - RNA, 24 nt, Artificial Sequence
  Synthetic
aaccaacuggaagccaaagggcau

SEQ ID NO: 627340 - RNA, 18 nt, Artificial Sequence
  Synthetic
ucuuaagagaaagggcau

SEQ ID NO: 627341 - RNA, 19 nt, Artificial Sequence
  Synthetic
uucuuaagagaaagggcau

SEQ ID NO: 627342 - RNA, 20 nt, Artificial Sequence
  Synthetic
auucuuaagagaaagggcau

SEQ ID NO: 627343 - RNA, 21 nt, Artificial Sequence
  Synthetic
aauucuuaagagaaagggcau

SEQ ID NO: 627344 - RNA, 22 nt, Artificial Sequence
  Synthetic
gaauucuuaagagaaagggcau

SEQ ID NO: 627345 - RNA, 23 nt, Artificial Sequence
  Synthetic
ggaauucuuaagagaaagggcau

SEQ ID NO: 627346 - RNA, 24 nt, Artificial Sequence
  Synthetic
gggaauucuuaagagaaagggcau

SEQ ID NO: 627347 - RNA, 18 nt, Artificial Sequence
  Synthetic
cggagagcagaagggcau

SEQ ID NO: 627348 - RNA, 19 nt, Artificial Sequence
  Synthetic
gcggagagcagaagggcau

SEQ ID NO: 627349 - RNA, 20 nt, Artificial Sequence
  Synthetic
ugcggagagcagaagggcau

SEQ ID NO: 627350 - RNA, 21 nt, Artificial Sequence
  Synthetic
cugcggagagcagaagggcau

SEQ ID NO: 627351 - RNA, 22 nt, Artificial Sequence
  Synthetic
ucugcggagagcagaagggcau

SEQ ID NO: 627352 - RNA, 23 nt, Artificial Sequence
  Synthetic
aucugcggagagcagaagggcau

SEQ ID NO: 627353 - RNA, 24 nt, Artificial Sequence
  Synthetic
uaucugcggagagcagaagggcau

SEQ ID NO: 627354 - RNA, 18 nt, Artificial Sequence
  Synthetic
aguggaauugaagggcau

SEQ ID NO: 627355 - RNA, 19 nt, Artificial Sequence
  Synthetic
aaguggaauugaagggcau

SEQ ID NO: 627356 - RNA, 20 nt, Artificial Sequence
  Synthetic
aaaguggaauugaagggcau

SEQ ID NO: 627357 - RNA, 21 nt, Artificial Sequence
  Synthetic
aaaaguggaauugaagggcau

SEQ ID NO: 627358 - RNA, 22 nt, Artificial Sequence
  Synthetic
uaaaaguggaauugaagggcau

SEQ ID NO: 627359 - RNA, 23 nt, Artificial Sequence
  Synthetic
guaaaaguggaauugaagggcau

SEQ ID NO: 627360 - RNA, 24 nt, Artificial Sequence
  Synthetic
cguaaaaguggaauugaagggcau

SEQ ID NO: 627361 - RNA, 18 nt, Artificial Sequence
  Synthetic
acuuacuuugaagggcau

SEQ ID NO: 627362 - RNA, 19 nt, Artificial Sequence
  Synthetic
aacuuacuuugaagggcau

SEQ ID NO: 627363 - RNA, 20 nt, Artificial Sequence
  Synthetic
caacuuacuuugaagggcau

SEQ ID NO: 627364 - RNA, 21 nt, Artificial Sequence
  Synthetic
ccaacuuacuuugaagggcau

SEQ ID NO: 627365 - RNA, 22 nt, Artificial Sequence
  Synthetic
accaacuuacuuugaagggcau

SEQ ID NO: 627366 - RNA, 23 nt, Artificial Sequence
  Synthetic
caccaacuuacuuugaagggcau

SEQ ID NO: 627367 - RNA, 24 nt, Artificial Sequence
  Synthetic
ucaccaacuuacuuugaagggcau

SEQ ID NO: 627368 - RNA, 18 nt, Artificial Sequence
  Synthetic
cagaaucucagagggcau

SEQ ID NO: 627369 - RNA, 19 nt, Artificial Sequence
  Synthetic
acagaaucucagagggcau

SEQ ID NO: 627370 - RNA, 20 nt, Artificial Sequence
  Synthetic
aacagaaucucagagggcau

SEQ ID NO: 627371 - RNA, 21 nt, Artificial Sequence
  Synthetic
gaacagaaucucagagggcau

SEQ ID NO: 627372 - RNA, 22 nt, Artificial Sequence
  Synthetic
agaacagaaucucagagggcau

SEQ ID NO: 627373 - RNA, 23 nt, Artificial Sequence
  Synthetic
cagaacagaaucucagagggcau

SEQ ID NO: 627374 - RNA, 24 nt, Artificial Sequence
  Synthetic
gcagaacagaaucucagagggcau

SEQ ID NO: 627375 - RNA, 18 nt, Artificial Sequence
  Synthetic
caaauaaaaugagggcau

SEQ ID NO: 627376 - RNA, 19 nt, Artificial Sequence
  Synthetic
ucaaauaaaaugagggcau

SEQ ID NO: 627377 - RNA, 20 nt, Artificial Sequence
  Synthetic
aucaaauaaaaugagggcau

SEQ ID NO: 627378 - RNA, 21 nt, Artificial Sequence
  Synthetic
aaucaaauaaaaugagggcau

SEQ ID NO: 627379 - RNA, 22 nt, Artificial Sequence
  Synthetic
aaaucaaauaaaaugagggcau

SEQ ID NO: 627380 - RNA, 23 nt, Artificial Sequence
  Synthetic
aaaaucaaauaaaaugagggcau

SEQ ID NO: 627381 - RNA, 24 nt, Artificial Sequence
  Synthetic
aaaaaucaaauaaaaugagggcau

SEQ ID NO: 627382 - RNA, 18 nt, Artificial Sequence
  Synthetic
aguuuuccauaugggcau

SEQ ID NO: 627383 - RNA, 19 nt, Artificial Sequence
  Synthetic
caguuuuccauaugggcau

SEQ ID NO: 627384 - RNA, 20 nt, Artificial Sequence
  Synthetic
ucaguuuuccauaugggcau

SEQ ID NO: 627385 - RNA, 21 nt, Artificial Sequence
  Synthetic
uucaguuuuccauaugggcau

SEQ ID NO: 627386 - RNA, 22 nt, Artificial Sequence
  Synthetic
cuucaguuuuccauaugggcau

SEQ ID NO: 627387 - RNA, 23 nt, Artificial Sequence
  Synthetic
acuucaguuuuccauaugggcau

SEQ ID NO: 627388 - RNA, 24 nt, Artificial Sequence
  Synthetic
cacuucaguuuuccauaugggcau

SEQ ID NO: 627389 - RNA, 18 nt, Artificial Sequence
  Synthetic
gaauuuucuucauggcau

SEQ ID NO: 627390 - RNA, 19 nt, Artificial Sequence
  Synthetic
ugaauuuucuucauggcau

SEQ ID NO: 627391 - RNA, 20 nt, Artificial Sequence
  Synthetic
augaauuuucuucauggcau

SEQ ID NO: 627392 - RNA, 21 nt, Artificial Sequence
  Synthetic
caugaauuuucuucauggcau

SEQ ID NO: 627393 - RNA, 22 nt, Artificial Sequence
  Synthetic
ucaugaauuuucuucauggcau

SEQ ID NO: 627394 - RNA, 23 nt, Artificial Sequence
  Synthetic
aucaugaauuuucuucauggcau

SEQ ID NO: 627395 - RNA, 24 nt, Artificial Sequence
  Synthetic
aaucaugaauuuucuucauggcau

SEQ ID NO: 627396 - RNA, 18 nt, Artificial Sequence
  Synthetic
guagcaacacacuggcau

SEQ ID NO: 627397 - RNA, 19 nt, Artificial Sequence
  Synthetic
aguagcaacacacuggcau

SEQ ID NO: 627398 - RNA, 20 nt, Artificial Sequence
  Synthetic
caguagcaacacacuggcau

SEQ ID NO: 627399 - RNA, 21 nt, Artificial Sequence
  Synthetic
gcaguagcaacacacuggcau

SEQ ID NO: 627400 - RNA, 22 nt, Artificial Sequence
  Synthetic
ugcaguagcaacacacuggcau

SEQ ID NO: 627401 - RNA, 23 nt, Artificial Sequence
  Synthetic
gugcaguagcaacacacuggcau

SEQ ID NO: 627402 - RNA, 24 nt, Artificial Sequence
  Synthetic
ugugcaguagcaacacacuggcau

SEQ ID NO: 627403 - RNA, 18 nt, Artificial Sequence
  Synthetic
uggacauugugcuggcau

SEQ ID NO: 627404 - RNA, 19 nt, Artificial Sequence
  Synthetic
cuggacauugugcuggcau

SEQ ID NO: 627405 - RNA, 20 nt, Artificial Sequence
  Synthetic
ucuggacauugugcuggcau

SEQ ID NO: 627406 - RNA, 21 nt, Artificial Sequence
  Synthetic
uucuggacauugugcuggcau

SEQ ID NO: 627407 - RNA, 22 nt, Artificial Sequence
  Synthetic
guucuggacauugugcuggcau

SEQ ID NO: 627408 - RNA, 23 nt, Artificial Sequence
  Synthetic
uguucuggacauugugcuggcau

SEQ ID NO: 627409 - RNA, 24 nt, Artificial Sequence
  Synthetic
cuguucuggacauugugcuggcau

SEQ ID NO: 627410 - RNA, 18 nt, Artificial Sequence
  Synthetic
cauggaaccaaguggcau

SEQ ID NO: 627411 - RNA, 19 nt, Artificial Sequence
  Synthetic
gcauggaaccaaguggcau

SEQ ID NO: 627412 - RNA, 20 nt, Artificial Sequence
  Synthetic
ugcauggaaccaaguggcau

SEQ ID NO: 627413 - RNA, 21 nt, Artificial Sequence
  Synthetic
gugcauggaaccaaguggcau

SEQ ID NO: 627414 - RNA, 22 nt, Artificial Sequence
  Synthetic
agugcauggaaccaaguggcau

SEQ ID NO: 627415 - RNA, 23 nt, Artificial Sequence
  Synthetic
aagugcauggaaccaaguggcau

SEQ ID NO: 627416 - RNA, 24 nt, Artificial Sequence
  Synthetic
gaagugcauggaaccaaguggcau

SEQ ID NO: 627417 - RNA, 18 nt, Artificial Sequence
  Synthetic
ggcaaagggagguggcau

SEQ ID NO: 627418 - RNA, 19 nt, Artificial Sequence
  Synthetic
gggcaaagggagguggcau

SEQ ID NO: 627419 - RNA, 20 nt, Artificial Sequence
  Synthetic
ggggcaaagggagguggcau

SEQ ID NO: 627420 - RNA, 21 nt, Artificial Sequence
  Synthetic
uggggcaaagggagguggcau

SEQ ID NO: 627421 - RNA, 22 nt, Artificial Sequence
  Synthetic
auggggcaaagggagguggcau

SEQ ID NO: 627422 - RNA, 23 nt, Artificial Sequence
  Synthetic
uauggggcaaagggagguggcau

SEQ ID NO: 627423 - RNA, 24 nt, Artificial Sequence
  Synthetic
guauggggcaaagggagguggcau

SEQ ID NO: 627424 - RNA, 18 nt, Artificial Sequence
  Synthetic
aguuuaaggaguuggcau

SEQ ID NO: 627425 - RNA, 19 nt, Artificial Sequence
  Synthetic
caguuuaaggaguuggcau

SEQ ID NO: 627426 - RNA, 20 nt, Artificial Sequence
  Synthetic
ucaguuuaaggaguuggcau

SEQ ID NO: 627427 - RNA, 21 nt, Artificial Sequence
  Synthetic
cucaguuuaaggaguuggcau

SEQ ID NO: 627428 - RNA, 22 nt, Artificial Sequence
  Synthetic
ccucaguuuaaggaguuggcau

SEQ ID NO: 627429 - RNA, 23 nt, Artificial Sequence
  Synthetic
accucaguuuaaggaguuggcau

SEQ ID NO: 627430 - RNA, 24 nt, Artificial Sequence
  Synthetic
aaccucaguuuaaggaguuggcau

SEQ ID NO: 627431 - RNA, 18 nt, Artificial Sequence
  Synthetic
caaacuaguguuuggcau

SEQ ID NO: 627432 - RNA, 19 nt, Artificial Sequence
  Synthetic
acaaacuaguguuuggcau

SEQ ID NO: 627433 - RNA, 20 nt, Artificial Sequence
  Synthetic
cacaaacuaguguuuggcau

SEQ ID NO: 627434 - RNA, 21 nt, Artificial Sequence
  Synthetic
gcacaaacuaguguuuggcau

SEQ ID NO: 627435 - RNA, 22 nt, Artificial Sequence
  Synthetic
ugcacaaacuaguguuuggcau

SEQ ID NO: 627436 - RNA, 23 nt, Artificial Sequence
  Synthetic
gugcacaaacuaguguuuggcau

SEQ ID NO: 627437 - RNA, 24 nt, Artificial Sequence
  Synthetic
agugcacaaacuaguguuuggcau

SEQ ID NO: 627438 - RNA, 18 nt, Artificial Sequence
  Synthetic
aaauuauaauuuuggcau

SEQ ID NO: 627439 - RNA, 19 nt, Artificial Sequence
  Synthetic
aaaauuauaauuuuggcau

SEQ ID NO: 627440 - RNA, 20 nt, Artificial Sequence
  Synthetic
uaaaauuauaauuuuggcau

SEQ ID NO: 627441 - RNA, 21 nt, Artificial Sequence
  Synthetic
uuaaaauuauaauuuuggcau

SEQ ID NO: 627442 - RNA, 22 nt, Artificial Sequence
  Synthetic
auuaaaauuauaauuuuggcau

SEQ ID NO: 627443 - RNA, 23 nt, Artificial Sequence
  Synthetic
cauuaaaauuauaauuuuggcau

SEQ ID NO: 627444 - RNA, 24 nt, Artificial Sequence
  Synthetic
gcauuaaaauuauaauuuuggcau

SEQ ID NO: 627445 - RNA, 18 nt, Artificial Sequence
  Synthetic
aaauacuaaaaaaugcau

SEQ ID NO: 627446 - RNA, 19 nt, Artificial Sequence
  Synthetic
gaaauacuaaaaaaugcau

SEQ ID NO: 627447 - RNA, 20 nt, Artificial Sequence
  Synthetic
ugaaauacuaaaaaaugcau

SEQ ID NO: 627448 - RNA, 21 nt, Artificial Sequence
  Synthetic
uugaaauacuaaaaaaugcau

SEQ ID NO: 627449 - RNA, 22 nt, Artificial Sequence
  Synthetic
guugaaauacuaaaaaaugcau

SEQ ID NO: 627450 - RNA, 23 nt, Artificial Sequence
  Synthetic
uguugaaauacuaaaaaaugcau

SEQ ID NO: 627451 - RNA, 24 nt, Artificial Sequence
  Synthetic
guguugaaauacuaaaaaaugcau

SEQ ID NO: 627452 - RNA, 18 nt, Artificial Sequence
  Synthetic
augggguggaaaaugcau

SEQ ID NO: 627453 - RNA, 19 nt, Artificial Sequence
  Synthetic
uaugggguggaaaaugcau

SEQ ID NO: 627454 - RNA, 20 nt, Artificial Sequence
  Synthetic
auaugggguggaaaaugcau

SEQ ID NO: 627455 - RNA, 21 nt, Artificial Sequence
  Synthetic
uauaugggguggaaaaugcau

SEQ ID NO: 627456 - RNA, 22 nt, Artificial Sequence
  Synthetic
cuauaugggguggaaaaugcau

SEQ ID NO: 627457 - RNA, 23 nt, Artificial Sequence
  Synthetic
gcuauaugggguggaaaaugcau

SEQ ID NO: 627458 - RNA, 24 nt, Artificial Sequence
  Synthetic
ggcuauaugggguggaaaaugcau

SEQ ID NO: 627459 - RNA, 18 nt, Artificial Sequence
  Synthetic
acagaagaagcaaugcau

SEQ ID NO: 627460 - RNA, 19 nt, Artificial Sequence
  Synthetic
cacagaagaagcaaugcau

SEQ ID NO: 627461 - RNA, 20 nt, Artificial Sequence
  Synthetic
ccacagaagaagcaaugcau

SEQ ID NO: 627462 - RNA, 21 nt, Artificial Sequence
  Synthetic
cccacagaagaagcaaugcau

SEQ ID NO: 627463 - RNA, 22 nt, Artificial Sequence
  Synthetic
ucccacagaagaagcaaugcau

SEQ ID NO: 627464 - RNA, 23 nt, Artificial Sequence
  Synthetic
uucccacagaagaagcaaugcau

SEQ ID NO: 627465 - RNA, 24 nt, Artificial Sequence
  Synthetic
guucccacagaagaagcaaugcau

SEQ ID NO: 627466 - RNA, 18 nt, Artificial Sequence
  Synthetic
uagauacgugcaaugcau

SEQ ID NO: 627467 - RNA, 19 nt, Artificial Sequence
  Synthetic
guagauacgugcaaugcau

SEQ ID NO: 627468 - RNA, 20 nt, Artificial Sequence
  Synthetic
gguagauacgugcaaugcau

SEQ ID NO: 627469 - RNA, 21 nt, Artificial Sequence
  Synthetic
ugguagauacgugcaaugcau

SEQ ID NO: 627470 - RNA, 22 nt, Artificial Sequence
  Synthetic
augguagauacgugcaaugcau

SEQ ID NO: 627471 - RNA, 23 nt, Artificial Sequence
  Synthetic
caugguagauacgugcaaugcau

SEQ ID NO: 627472 - RNA, 24 nt, Artificial Sequence
  Synthetic
ccaugguagauacgugcaaugcau

SEQ ID NO: 627473 - RNA, 18 nt, Artificial Sequence
  Synthetic
acaguggaaugaaugcau

SEQ ID NO: 627474 - RNA, 19 nt, Artificial Sequence
  Synthetic
uacaguggaaugaaugcau

SEQ ID NO: 627475 - RNA, 20 nt, Artificial Sequence
  Synthetic
guacaguggaaugaaugcau

SEQ ID NO: 627476 - RNA, 21 nt, Artificial Sequence
  Synthetic
aguacaguggaaugaaugcau

SEQ ID NO: 627477 - RNA, 22 nt, Artificial Sequence
  Synthetic
aaguacaguggaaugaaugcau

SEQ ID NO: 627478 - RNA, 23 nt, Artificial Sequence
  Synthetic
caaguacaguggaaugaaugcau

SEQ ID NO: 627479 - RNA, 24 nt, Artificial Sequence
  Synthetic
acaaguacaguggaaugaaugcau

SEQ ID NO: 627480 - RNA, 18 nt, Artificial Sequence
  Synthetic
uuaucauaaugaaugcau

SEQ ID NO: 627481 - RNA, 19 nt, Artificial Sequence
  Synthetic
auuaucauaaugaaugcau

SEQ ID NO: 627482 - RNA, 20 nt, Artificial Sequence
  Synthetic
cauuaucauaaugaaugcau

SEQ ID NO: 627483 - RNA, 21 nt, Artificial Sequence
  Synthetic
gcauuaucauaaugaaugcau

SEQ ID NO: 627484 - RNA, 22 nt, Artificial Sequence
  Synthetic
ugcauuaucauaaugaaugcau

SEQ ID NO: 627485 - RNA, 23 nt, Artificial Sequence
  Synthetic
augcauuaucauaaugaaugcau

SEQ ID NO: 627486 - RNA, 24 nt, Artificial Sequence
  Synthetic
gaugcauuaucauaaugaaugcau

SEQ ID NO: 627487 - RNA, 18 nt, Artificial Sequence
  Synthetic
gaagguucaugaaugcau

SEQ ID NO: 627488 - RNA, 19 nt, Artificial Sequence
  Synthetic
agaagguucaugaaugcau

SEQ ID NO: 627489 - RNA, 20 nt, Artificial Sequence
  Synthetic
cagaagguucaugaaugcau

SEQ ID NO: 627490 - RNA, 21 nt, Artificial Sequence
  Synthetic
gcagaagguucaugaaugcau

SEQ ID NO: 627491 - RNA, 22 nt, Artificial Sequence
  Synthetic
agcagaagguucaugaaugcau

SEQ ID NO: 627492 - RNA, 23 nt, Artificial Sequence
  Synthetic
cagcagaagguucaugaaugcau

SEQ ID NO: 627493 - RNA, 24 nt, Artificial Sequence
  Synthetic
ccagcagaagguucaugaaugcau

SEQ ID NO: 627494 - RNA, 18 nt, Artificial Sequence
  Synthetic
ugugauguaauaaugcau

SEQ ID NO: 627495 - RNA, 19 nt, Artificial Sequence
  Synthetic
augugauguaauaaugcau

SEQ ID NO: 627496 - RNA, 20 nt, Artificial Sequence
  Synthetic
caugugauguaauaaugcau

SEQ ID NO: 627497 - RNA, 21 nt, Artificial Sequence
  Synthetic
acaugugauguaauaaugcau

SEQ ID NO: 627498 - RNA, 22 nt, Artificial Sequence
  Synthetic
aacaugugauguaauaaugcau

SEQ ID NO: 627499 - RNA, 23 nt, Artificial Sequence
  Synthetic
caacaugugauguaauaaugcau

SEQ ID NO: 627500 - RNA, 24 nt, Artificial Sequence
  Synthetic
ccaacaugugauguaauaaugcau

SEQ ID NO: 627501 - RNA, 18 nt, Artificial Sequence
  Synthetic
acacaggacuuaaugcau

SEQ ID NO: 627502 - RNA, 19 nt, Artificial Sequence
  Synthetic
uacacaggacuuaaugcau

SEQ ID NO: 627503 - RNA, 20 nt, Artificial Sequence
  Synthetic
auacacaggacuuaaugcau

SEQ ID NO: 627504 - RNA, 21 nt, Artificial Sequence
  Synthetic
aauacacaggacuuaaugcau

SEQ ID NO: 627505 - RNA, 22 nt, Artificial Sequence
  Synthetic
aaauacacaggacuuaaugcau

SEQ ID NO: 627506 - RNA, 23 nt, Artificial Sequence
  Synthetic
uaaauacacaggacuuaaugcau

SEQ ID NO: 627507 - RNA, 24 nt, Artificial Sequence
  Synthetic
guaaauacacaggacuuaaugcau

SEQ ID NO: 627508 - RNA, 18 nt, Artificial Sequence
  Synthetic
uuuaaaacuuuaaugcau

SEQ ID NO: 627509 - RNA, 19 nt, Artificial Sequence
  Synthetic
auuuaaaacuuuaaugcau

SEQ ID NO: 627510 - RNA, 20 nt, Artificial Sequence
  Synthetic
cauuuaaaacuuuaaugcau

SEQ ID NO: 627511 - RNA, 21 nt, Artificial Sequence
  Synthetic
acauuuaaaacuuuaaugcau

SEQ ID NO: 627512 - RNA, 22 nt, Artificial Sequence
  Synthetic
uacauuuaaaacuuuaaugcau

SEQ ID NO: 627513 - RNA, 23 nt, Artificial Sequence
  Synthetic
uuacauuuaaaacuuuaaugcau

SEQ ID NO: 627514 - RNA, 24 nt, Artificial Sequence
  Synthetic
uuuacauuuaaaacuuuaaugcau

SEQ ID NO: 627515 - RNA, 18 nt, Artificial Sequence
  Synthetic
uuaguguggaacaugcau

SEQ ID NO: 627516 - RNA, 19 nt, Artificial Sequence
  Synthetic
uuuaguguggaacaugcau

SEQ ID NO: 627517 - RNA, 20 nt, Artificial Sequence
  Synthetic
uuuuaguguggaacaugcau

SEQ ID NO: 627518 - RNA, 21 nt, Artificial Sequence
  Synthetic
uuuuuaguguggaacaugcau

SEQ ID NO: 627519 - RNA, 22 nt, Artificial Sequence
  Synthetic
auuuuuaguguggaacaugcau

SEQ ID NO: 627520 - RNA, 23 nt, Artificial Sequence
  Synthetic
gauuuuuaguguggaacaugcau

SEQ ID NO: 627521 - RNA, 24 nt, Artificial Sequence
  Synthetic
agauuuuuaguguggaacaugcau

SEQ ID NO: 627522 - RNA, 18 nt, Artificial Sequence
  Synthetic
cacacagcuaagaugcau

SEQ ID NO: 627523 - RNA, 19 nt, Artificial Sequence
  Synthetic
ucacacagcuaagaugcau

SEQ ID NO: 627524 - RNA, 20 nt, Artificial Sequence
  Synthetic
uucacacagcuaagaugcau

SEQ ID NO: 627525 - RNA, 21 nt, Artificial Sequence
  Synthetic
uuucacacagcuaagaugcau

SEQ ID NO: 627526 - RNA, 22 nt, Artificial Sequence
  Synthetic
uuuucacacagcuaagaugcau

SEQ ID NO: 627527 - RNA, 23 nt, Artificial Sequence
  Synthetic
auuuucacacagcuaagaugcau

SEQ ID NO: 627528 - RNA, 24 nt, Artificial Sequence
  Synthetic
aauuuucacacagcuaagaugcau

SEQ ID NO: 627529 - RNA, 18 nt, Artificial Sequence
  Synthetic
ugaucaaacuagaugcau

SEQ ID NO: 627530 - RNA, 19 nt, Artificial Sequence
  Synthetic
gugaucaaacuagaugcau

SEQ ID NO: 627531 - RNA, 20 nt, Artificial Sequence
  Synthetic
ugugaucaaacuagaugcau

SEQ ID NO: 627532 - RNA, 21 nt, Artificial Sequence
  Synthetic
cugugaucaaacuagaugcau

SEQ ID NO: 627533 - RNA, 22 nt, Artificial Sequence
  Synthetic
acugugaucaaacuagaugcau

SEQ ID NO: 627534 - RNA, 23 nt, Artificial Sequence
  Synthetic
uacugugaucaaacuagaugcau

SEQ ID NO: 627535 - RNA, 24 nt, Artificial Sequence
  Synthetic
uuacugugaucaaacuagaugcau

SEQ ID NO: 627536 - RNA, 18 nt, Artificial Sequence
  Synthetic
agaaauuaucugaugcau

SEQ ID NO: 627537 - RNA, 19 nt, Artificial Sequence
  Synthetic
aagaaauuaucugaugcau

SEQ ID NO: 627538 - RNA, 20 nt, Artificial Sequence
  Synthetic
aaagaaauuaucugaugcau

SEQ ID NO: 627539 - RNA, 21 nt, Artificial Sequence
  Synthetic
aaaagaaauuaucugaugcau

SEQ ID NO: 627540 - RNA, 22 nt, Artificial Sequence
  Synthetic
aaaaagaaauuaucugaugcau

SEQ ID NO: 627541 - RNA, 23 nt, Artificial Sequence
  Synthetic
aaaaaagaaauuaucugaugcau

SEQ ID NO: 627542 - RNA, 24 nt, Artificial Sequence
  Synthetic
uaaaaaagaaauuaucugaugcau

SEQ ID NO: 627543 - RNA, 18 nt, Artificial Sequence
  Synthetic
aagacaggggauaugcau

SEQ ID NO: 627544 - RNA, 19 nt, Artificial Sequence
  Synthetic
gaagacaggggauaugcau

SEQ ID NO: 627545 - RNA, 20 nt, Artificial Sequence
  Synthetic
ggaagacaggggauaugcau

SEQ ID NO: 627546 - RNA, 21 nt, Artificial Sequence
  Synthetic
aggaagacaggggauaugcau

SEQ ID NO: 627547 - RNA, 22 nt, Artificial Sequence
  Synthetic
gaggaagacaggggauaugcau

SEQ ID NO: 627548 - RNA, 23 nt, Artificial Sequence
  Synthetic
ggaggaagacaggggauaugcau

SEQ ID NO: 627549 - RNA, 24 nt, Artificial Sequence
  Synthetic
aggaggaagacaggggauaugcau

SEQ ID NO: 627550 - RNA, 18 nt, Artificial Sequence
  Synthetic
gaaaggggauguaugcau

SEQ ID NO: 627551 - RNA, 19 nt, Artificial Sequence
  Synthetic
ugaaaggggauguaugcau

SEQ ID NO: 627552 - RNA, 20 nt, Artificial Sequence
  Synthetic
augaaaggggauguaugcau

SEQ ID NO: 627553 - RNA, 21 nt, Artificial Sequence
  Synthetic
caugaaaggggauguaugcau

SEQ ID NO: 627554 - RNA, 22 nt, Artificial Sequence
  Synthetic
gcaugaaaggggauguaugcau

SEQ ID NO: 627555 - RNA, 23 nt, Artificial Sequence
  Synthetic
agcaugaaaggggauguaugcau

SEQ ID NO: 627556 - RNA, 24 nt, Artificial Sequence
  Synthetic
uagcaugaaaggggauguaugcau

SEQ ID NO: 627557 - RNA, 18 nt, Artificial Sequence
  Synthetic
uuuucacuguuuaugcau

SEQ ID NO: 627558 - RNA, 19 nt, Artificial Sequence
  Synthetic
guuuucacuguuuaugcau

SEQ ID NO: 627559 - RNA, 20 nt, Artificial Sequence
  Synthetic
uguuuucacuguuuaugcau

SEQ ID NO: 627560 - RNA, 21 nt, Artificial Sequence
  Synthetic
cuguuuucacuguuuaugcau

SEQ ID NO: 627561 - RNA, 22 nt, Artificial Sequence
  Synthetic
ucuguuuucacuguuuaugcau

SEQ ID NO: 627562 - RNA, 23 nt, Artificial Sequence
  Synthetic
uucuguuuucacuguuuaugcau

SEQ ID NO: 627563 - RNA, 24 nt, Artificial Sequence
  Synthetic
guucuguuuucacuguuuaugcau

SEQ ID NO: 627564 - RNA, 18 nt, Artificial Sequence
  Synthetic
guucauauuuuuaugcau

SEQ ID NO: 627565 - RNA, 19 nt, Artificial Sequence
  Synthetic
uguucauauuuuuaugcau

SEQ ID NO: 627566 - RNA, 20 nt, Artificial Sequence
  Synthetic
cuguucauauuuuuaugcau

SEQ ID NO: 627567 - RNA, 21 nt, Artificial Sequence
  Synthetic
gcuguucauauuuuuaugcau

SEQ ID NO: 627568 - RNA, 22 nt, Artificial Sequence
  Synthetic
ugcuguucauauuuuuaugcau

SEQ ID NO: 627569 - RNA, 23 nt, Artificial Sequence
  Synthetic
cugcuguucauauuuuuaugcau

SEQ ID NO: 627570 - RNA, 24 nt, Artificial Sequence
  Synthetic
ccugcuguucauauuuuuaugcau

SEQ ID NO: 627571 - RNA, 18 nt, Artificial Sequence
  Synthetic
guacucauuacacugcau

SEQ ID NO: 627572 - RNA, 19 nt, Artificial Sequence
  Synthetic
gguacucauuacacugcau

SEQ ID NO: 627573 - RNA, 20 nt, Artificial Sequence
  Synthetic
ugguacucauuacacugcau

SEQ ID NO: 627574 - RNA, 21 nt, Artificial Sequence
  Synthetic
augguacucauuacacugcau

SEQ ID NO: 627575 - RNA, 22 nt, Artificial Sequence
  Synthetic
caugguacucauuacacugcau

SEQ ID NO: 627576 - RNA, 23 nt, Artificial Sequence
  Synthetic
ucaugguacucauuacacugcau

SEQ ID NO: 627577 - RNA, 24 nt, Artificial Sequence
  Synthetic
gucaugguacucauuacacugcau

SEQ ID NO: 627578 - RNA, 18 nt, Artificial Sequence
  Synthetic
acggugcuuccacugcau

SEQ ID NO: 627579 - RNA, 19 nt, Artificial Sequence
  Synthetic
aacggugcuuccacugcau

SEQ ID NO: 627580 - RNA, 20 nt, Artificial Sequence
  Synthetic
gaacggugcuuccacugcau

SEQ ID NO: 627581 - RNA, 21 nt, Artificial Sequence
  Synthetic
agaacggugcuuccacugcau

SEQ ID NO: 627582 - RNA, 22 nt, Artificial Sequence
  Synthetic
aagaacggugcuuccacugcau

SEQ ID NO: 627583 - RNA, 23 nt, Artificial Sequence
  Synthetic
aaagaacggugcuuccacugcau

SEQ ID NO: 627584 - RNA, 24 nt, Artificial Sequence
  Synthetic
gaaagaacggugcuuccacugcau

SEQ ID NO: 627585 - RNA, 18 nt, Artificial Sequence
  Synthetic
aauauuuuuagacugcau

SEQ ID NO: 627586 - RNA, 19 nt, Artificial Sequence
  Synthetic
aaauauuuuuagacugcau

SEQ ID NO: 627587 - RNA, 20 nt, Artificial Sequence
  Synthetic
aaaauauuuuuagacugcau

SEQ ID NO: 627588 - RNA, 21 nt, Artificial Sequence
  Synthetic
aaaaauauuuuuagacugcau

SEQ ID NO: 627589 - RNA, 22 nt, Artificial Sequence
  Synthetic
aaaaaauauuuuuagacugcau

SEQ ID NO: 627590 - RNA, 23 nt, Artificial Sequence
  Synthetic
aaaaaaauauuuuuagacugcau

SEQ ID NO: 627591 - RNA, 24 nt, Artificial Sequence
  Synthetic
caaaaaaauauuuuuagacugcau

SEQ ID NO: 627592 - RNA, 18 nt, Artificial Sequence
  Synthetic
uccugaaaagaccugcau

SEQ ID NO: 627593 - RNA, 19 nt, Artificial Sequence
  Synthetic
uuccugaaaagaccugcau

SEQ ID NO: 627594 - RNA, 20 nt, Artificial Sequence
  Synthetic
uuuccugaaaagaccugcau

SEQ ID NO: 627595 - RNA, 21 nt, Artificial Sequence
  Synthetic
cuuuccugaaaagaccugcau

SEQ ID NO: 627596 - RNA, 22 nt, Artificial Sequence
  Synthetic
acuuuccugaaaagaccugcau

SEQ ID NO: 627597 - RNA, 23 nt, Artificial Sequence
  Synthetic
uacuuuccugaaaagaccugcau

SEQ ID NO: 627598 - RNA, 24 nt, Artificial Sequence
  Synthetic
guacuuuccugaaaagaccugcau

SEQ ID NO: 627599 - RNA, 18 nt, Artificial Sequence
  Synthetic
guauacugagggcugcau

SEQ ID NO: 627600 - RNA, 19 nt, Artificial Sequence
  Synthetic
gguauacugagggcugcau

SEQ ID NO: 627601 - RNA, 20 nt, Artificial Sequence
  Synthetic
ugguauacugagggcugcau

SEQ ID NO: 627602 - RNA, 21 nt, Artificial Sequence
  Synthetic
cugguauacugagggcugcau

SEQ ID NO: 627603 - RNA, 22 nt, Artificial Sequence
  Synthetic
ccugguauacugagggcugcau

SEQ ID NO: 627604 - RNA, 23 nt, Artificial Sequence
  Synthetic
cccugguauacugagggcugcau

SEQ ID NO: 627605 - RNA, 24 nt, Artificial Sequence
  Synthetic
ucccugguauacugagggcugcau

SEQ ID NO: 627606 - RNA, 18 nt, Artificial Sequence
  Synthetic
cuauggcauaugcugcau

SEQ ID NO: 627607 - RNA, 19 nt, Artificial Sequence
  Synthetic
gcuauggcauaugcugcau

SEQ ID NO: 627608 - RNA, 20 nt, Artificial Sequence
  Synthetic
agcuauggcauaugcugcau

SEQ ID NO: 627609 - RNA, 21 nt, Artificial Sequence
  Synthetic
aagcuauggcauaugcugcau

SEQ ID NO: 627610 - RNA, 22 nt, Artificial Sequence
  Synthetic
gaagcuauggcauaugcugcau

SEQ ID NO: 627611 - RNA, 23 nt, Artificial Sequence
  Synthetic
ugaagcuauggcauaugcugcau

SEQ ID NO: 627612 - RNA, 24 nt, Artificial Sequence
  Synthetic
cugaagcuauggcauaugcugcau

SEQ ID NO: 627613 - RNA, 18 nt, Artificial Sequence
  Synthetic
uacaguuaugugcugcau

SEQ ID NO: 627614 - RNA, 19 nt, Artificial Sequence
  Synthetic
uuacaguuaugugcugcau

SEQ ID NO: 627615 - RNA, 20 nt, Artificial Sequence
  Synthetic
auuacaguuaugugcugcau

SEQ ID NO: 627616 - RNA, 21 nt, Artificial Sequence
  Synthetic
aauuacaguuaugugcugcau

SEQ ID NO: 627617 - RNA, 22 nt, Artificial Sequence
  Synthetic
uaauuacaguuaugugcugcau

SEQ ID NO: 627618 - RNA, 23 nt, Artificial Sequence
  Synthetic
auaauuacaguuaugugcugcau

SEQ ID NO: 627619 - RNA, 24 nt, Artificial Sequence
  Synthetic
gauaauuacaguuaugugcugcau

SEQ ID NO: 627620 - RNA, 18 nt, Artificial Sequence
  Synthetic
uucacagaucaucugcau

SEQ ID NO: 627621 - RNA, 19 nt, Artificial Sequence
  Synthetic
cuucacagaucaucugcau

SEQ ID NO: 627622 - RNA, 20 nt, Artificial Sequence
  Synthetic
ucuucacagaucaucugcau

SEQ ID NO: 627623 - RNA, 21 nt, Artificial Sequence
  Synthetic
uucuucacagaucaucugcau

SEQ ID NO: 627624 - RNA, 22 nt, Artificial Sequence
  Synthetic
cuucuucacagaucaucugcau

SEQ ID NO: 627625 - RNA, 23 nt, Artificial Sequence
  Synthetic
ucuucuucacagaucaucugcau

SEQ ID NO: 627626 - RNA, 24 nt, Artificial Sequence
  Synthetic
aucuucuucacagaucaucugcau

SEQ ID NO: 627627 - RNA, 18 nt, Artificial Sequence
  Synthetic
uuacacaaggaucugcau

SEQ ID NO: 627628 - RNA, 19 nt, Artificial Sequence
  Synthetic
guuacacaaggaucugcau

SEQ ID NO: 627629 - RNA, 20 nt, Artificial Sequence
  Synthetic
aguuacacaaggaucugcau

SEQ ID NO: 627630 - RNA, 21 nt, Artificial Sequence
  Synthetic
uaguuacacaaggaucugcau

SEQ ID NO: 627631 - RNA, 22 nt, Artificial Sequence
  Synthetic
uuaguuacacaaggaucugcau

SEQ ID NO: 627632 - RNA, 23 nt, Artificial Sequence
  Synthetic
guuaguuacacaaggaucugcau

SEQ ID NO: 627633 - RNA, 24 nt, Artificial Sequence
  Synthetic
aguuaguuacacaaggaucugcau

SEQ ID NO: 627634 - RNA, 18 nt, Artificial Sequence
  Synthetic
uuucuagaaugucugcau

SEQ ID NO: 627635 - RNA, 19 nt, Artificial Sequence
  Synthetic
cuuucuagaaugucugcau

SEQ ID NO: 627636 - RNA, 20 nt, Artificial Sequence
  Synthetic
acuuucuagaaugucugcau

SEQ ID NO: 627637 - RNA, 21 nt, Artificial Sequence
  Synthetic
aacuuucuagaaugucugcau

SEQ ID NO: 627638 - RNA, 22 nt, Artificial Sequence
  Synthetic
aaacuuucuagaaugucugcau

SEQ ID NO: 627639 - RNA, 23 nt, Artificial Sequence
  Synthetic
caaacuuucuagaaugucugcau

SEQ ID NO: 627640 - RNA, 24 nt, Artificial Sequence
  Synthetic
ucaaacuuucuagaaugucugcau

SEQ ID NO: 627641 - RNA, 18 nt, Artificial Sequence
  Synthetic
auuggaaaguuucugcau

SEQ ID NO: 627642 - RNA, 19 nt, Artificial Sequence
  Synthetic
uauuggaaaguuucugcau

SEQ ID NO: 627643 - RNA, 20 nt, Artificial Sequence
  Synthetic
auauuggaaaguuucugcau

SEQ ID NO: 627644 - RNA, 21 nt, Artificial Sequence
  Synthetic
aauauuggaaaguuucugcau

SEQ ID NO: 627645 - RNA, 22 nt, Artificial Sequence
  Synthetic
aaauauuggaaaguuucugcau

SEQ ID NO: 627646 - RNA, 23 nt, Artificial Sequence
  Synthetic
caaauauuggaaaguuucugcau

SEQ ID NO: 627647 - RNA, 24 nt, Artificial Sequence
  Synthetic
gcaaauauuggaaaguuucugcau

SEQ ID NO: 627648 - RNA, 18 nt, Artificial Sequence
  Synthetic
cuauauugccaagugcau

SEQ ID NO: 627649 - RNA, 19 nt, Artificial Sequence
  Synthetic
ccuauauugccaagugcau

SEQ ID NO: 627650 - RNA, 20 nt, Artificial Sequence
  Synthetic
uccuauauugccaagugcau

SEQ ID NO: 627651 - RNA, 21 nt, Artificial Sequence
  Synthetic
auccuauauugccaagugcau

SEQ ID NO: 627652 - RNA, 22 nt, Artificial Sequence
  Synthetic
uauccuauauugccaagugcau

SEQ ID NO: 627653 - RNA, 23 nt, Artificial Sequence
  Synthetic
uuauccuauauugccaagugcau

SEQ ID NO: 627654 - RNA, 24 nt, Artificial Sequence
  Synthetic
auuauccuauauugccaagugcau

SEQ ID NO: 627655 - RNA, 18 nt, Artificial Sequence
  Synthetic
caaacaugcugagugcau

SEQ ID NO: 627656 - RNA, 19 nt, Artificial Sequence
  Synthetic
gcaaacaugcugagugcau

SEQ ID NO: 627657 - RNA, 20 nt, Artificial Sequence
  Synthetic
ggcaaacaugcugagugcau

SEQ ID NO: 627658 - RNA, 21 nt, Artificial Sequence
  Synthetic
uggcaaacaugcugagugcau

SEQ ID NO: 627659 - RNA, 22 nt, Artificial Sequence
  Synthetic
cuggcaaacaugcugagugcau

SEQ ID NO: 627660 - RNA, 23 nt, Artificial Sequence
  Synthetic
gcuggcaaacaugcugagugcau

SEQ ID NO: 627661 - RNA, 24 nt, Artificial Sequence
  Synthetic
ugcuggcaaacaugcugagugcau

SEQ ID NO: 627662 - RNA, 18 nt, Artificial Sequence
  Synthetic
ccccgaacccuagugcau

SEQ ID NO: 627663 - RNA, 19 nt, Artificial Sequence
  Synthetic
uccccgaacccuagugcau

SEQ ID NO: 627664 - RNA, 20 nt, Artificial Sequence
  Synthetic
uuccccgaacccuagugcau

SEQ ID NO: 627665 - RNA, 21 nt, Artificial Sequence
  Synthetic
uuuccccgaacccuagugcau

SEQ ID NO: 627666 - RNA, 22 nt, Artificial Sequence
  Synthetic
auuuccccgaacccuagugcau

SEQ ID NO: 627667 - RNA, 23 nt, Artificial Sequence
  Synthetic
aauuuccccgaacccuagugcau

SEQ ID NO: 627668 - RNA, 24 nt, Artificial Sequence
  Synthetic
aaauuuccccgaacccuagugcau

SEQ ID NO: 627669 - RNA, 18 nt, Artificial Sequence
  Synthetic
augcuaaauuuagugcau

SEQ ID NO: 627670 - RNA, 19 nt, Artificial Sequence
  Synthetic
gaugcuaaauuuagugcau

SEQ ID NO: 627671 - RNA, 20 nt, Artificial Sequence
  Synthetic
ggaugcuaaauuuagugcau

SEQ ID NO: 627672 - RNA, 21 nt, Artificial Sequence
  Synthetic
cggaugcuaaauuuagugcau

SEQ ID NO: 627673 - RNA, 22 nt, Artificial Sequence
  Synthetic
acggaugcuaaauuuagugcau

SEQ ID NO: 627674 - RNA, 23 nt, Artificial Sequence
  Synthetic
aacggaugcuaaauuuagugcau

SEQ ID NO: 627675 - RNA, 24 nt, Artificial Sequence
  Synthetic
caacggaugcuaaauuuagugcau

SEQ ID NO: 627676 - RNA, 18 nt, Artificial Sequence
  Synthetic
caucaauaaaaggugcau

SEQ ID NO: 627677 - RNA, 19 nt, Artificial Sequence
  Synthetic
ucaucaauaaaaggugcau

SEQ ID NO: 627678 - RNA, 20 nt, Artificial Sequence
  Synthetic
uucaucaauaaaaggugcau

SEQ ID NO: 627679 - RNA, 21 nt, Artificial Sequence
  Synthetic
auucaucaauaaaaggugcau

SEQ ID NO: 627680 - RNA, 22 nt, Artificial Sequence
  Synthetic
uauucaucaauaaaaggugcau

SEQ ID NO: 627681 - RNA, 23 nt, Artificial Sequence
  Synthetic
guauucaucaauaaaaggugcau

SEQ ID NO: 627682 - RNA, 24 nt, Artificial Sequence
  Synthetic
gguauucaucaauaaaaggugcau

SEQ ID NO: 627683 - RNA, 18 nt, Artificial Sequence
  Synthetic
agcuugaaauaugugcau

SEQ ID NO: 627684 - RNA, 19 nt, Artificial Sequence
  Synthetic
cagcuugaaauaugugcau

SEQ ID NO: 627685 - RNA, 20 nt, Artificial Sequence
  Synthetic
acagcuugaaauaugugcau

SEQ ID NO: 627686 - RNA, 21 nt, Artificial Sequence
  Synthetic
uacagcuugaaauaugugcau

SEQ ID NO: 627687 - RNA, 22 nt, Artificial Sequence
  Synthetic
cuacagcuugaaauaugugcau

SEQ ID NO: 627688 - RNA, 23 nt, Artificial Sequence
  Synthetic
ucuacagcuugaaauaugugcau

SEQ ID NO: 627689 - RNA, 24 nt, Artificial Sequence
  Synthetic
aucuacagcuugaaauaugugcau

SEQ ID NO: 627690 - RNA, 18 nt, Artificial Sequence
  Synthetic
uauuuguuguaugugcau

SEQ ID NO: 627691 - RNA, 19 nt, Artificial Sequence
  Synthetic
guauuuguuguaugugcau

SEQ ID NO: 627692 - RNA, 20 nt, Artificial Sequence
  Synthetic
aguauuuguuguaugugcau

SEQ ID NO: 627693 - RNA, 21 nt, Artificial Sequence
  Synthetic
caguauuuguuguaugugcau

SEQ ID NO: 627694 - RNA, 22 nt, Artificial Sequence
  Synthetic
ucaguauuuguuguaugugcau

SEQ ID NO: 627695 - RNA, 23 nt, Artificial Sequence
  Synthetic
aucaguauuuguuguaugugcau

SEQ ID NO: 627696 - RNA, 24 nt, Artificial Sequence
  Synthetic
uaucaguauuuguuguaugugcau

SEQ ID NO: 627697 - RNA, 18 nt, Artificial Sequence
  Synthetic
cauucuuauucugugcau

SEQ ID NO: 627698 - RNA, 19 nt, Artificial Sequence
  Synthetic
ucauucuuauucugugcau

SEQ ID NO: 627699 - RNA, 20 nt, Artificial Sequence
  Synthetic
cucauucuuauucugugcau

SEQ ID NO: 627700 - RNA, 21 nt, Artificial Sequence
  Synthetic
ccucauucuuauucugugcau

SEQ ID NO: 627701 - RNA, 22 nt, Artificial Sequence
  Synthetic
cccucauucuuauucugugcau

SEQ ID NO: 627702 - RNA, 23 nt, Artificial Sequence
  Synthetic
ccccucauucuuauucugugcau

SEQ ID NO: 627703 - RNA, 24 nt, Artificial Sequence
  Synthetic
uccccucauucuuauucugugcau

SEQ ID NO: 627704 - RNA, 18 nt, Artificial Sequence
  Synthetic
gggggguguucugugcau

SEQ ID NO: 627705 - RNA, 19 nt, Artificial Sequence
  Synthetic
ggggggguguucugugcau

SEQ ID NO: 627706 - RNA, 20 nt, Artificial Sequence
  Synthetic
gggggggguguucugugcau

SEQ ID NO: 627707 - RNA, 21 nt, Artificial Sequence
  Synthetic
ugggggggguguucugugcau

SEQ ID NO: 627708 - RNA, 22 nt, Artificial Sequence
  Synthetic
gugggggggguguucugugcau

SEQ ID NO: 627709 - RNA, 23 nt, Artificial Sequence
  Synthetic
ugugggggggguguucugugcau

SEQ ID NO: 627710 - RNA, 24 nt, Artificial Sequence
  Synthetic
gugugggggggguguucugugcau

SEQ ID NO: 627711 - RNA, 18 nt, Artificial Sequence
  Synthetic
caguaacauauauugcau

SEQ ID NO: 627712 - RNA, 19 nt, Artificial Sequence
  Synthetic
ucaguaacauauauugcau

SEQ ID NO: 627713 - RNA, 20 nt, Artificial Sequence
  Synthetic
uucaguaacauauauugcau

SEQ ID NO: 627714 - RNA, 21 nt, Artificial Sequence
  Synthetic
guucaguaacauauauugcau

SEQ ID NO: 627715 - RNA, 22 nt, Artificial Sequence
  Synthetic
uguucaguaacauauauugcau

SEQ ID NO: 627716 - RNA, 23 nt, Artificial Sequence
  Synthetic
guguucaguaacauauauugcau

SEQ ID NO: 627717 - RNA, 24 nt, Artificial Sequence
  Synthetic
uguguucaguaacauauauugcau

SEQ ID NO: 627718 - RNA, 18 nt, Artificial Sequence
  Synthetic
caaauuaaauucuugcau

SEQ ID NO: 627719 - RNA, 19 nt, Artificial Sequence
  Synthetic
ucaaauuaaauucuugcau

SEQ ID NO: 627720 - RNA, 20 nt, Artificial Sequence
  Synthetic
aucaaauuaaauucuugcau

SEQ ID NO: 627721 - RNA, 21 nt, Artificial Sequence
  Synthetic
caucaaauuaaauucuugcau

SEQ ID NO: 627722 - RNA, 22 nt, Artificial Sequence
  Synthetic
ccaucaaauuaaauucuugcau

SEQ ID NO: 627723 - RNA, 23 nt, Artificial Sequence
  Synthetic
uccaucaaauuaaauucuugcau

SEQ ID NO: 627724 - RNA, 24 nt, Artificial Sequence
  Synthetic
auccaucaaauuaaauucuugcau

SEQ ID NO: 627725 - RNA, 18 nt, Artificial Sequence
  Synthetic
aacagaaguagguugcau

SEQ ID NO: 627726 - RNA, 19 nt, Artificial Sequence
  Synthetic
caacagaaguagguugcau

SEQ ID NO: 627727 - RNA, 20 nt, Artificial Sequence
  Synthetic
acaacagaaguagguugcau

SEQ ID NO: 627728 - RNA, 21 nt, Artificial Sequence
  Synthetic
gacaacagaaguagguugcau

SEQ ID NO: 627729 - RNA, 22 nt, Artificial Sequence
  Synthetic
ggacaacagaaguagguugcau

SEQ ID NO: 627730 - RNA, 23 nt, Artificial Sequence
  Synthetic
aggacaacagaaguagguugcau

SEQ ID NO: 627731 - RNA, 24 nt, Artificial Sequence
  Synthetic
aaggacaacagaaguagguugcau

SEQ ID NO: 627732 - RNA, 18 nt, Artificial Sequence
  Synthetic
auuaaccuauguuugcau

SEQ ID NO: 627733 - RNA, 19 nt, Artificial Sequence
  Synthetic
gauuaaccuauguuugcau

SEQ ID NO: 627734 - RNA, 20 nt, Artificial Sequence
  Synthetic
ugauuaaccuauguuugcau

SEQ ID NO: 627735 - RNA, 21 nt, Artificial Sequence
  Synthetic
augauuaaccuauguuugcau

SEQ ID NO: 627736 - RNA, 22 nt, Artificial Sequence
  Synthetic
aaugauuaaccuauguuugcau

SEQ ID NO: 627737 - RNA, 23 nt, Artificial Sequence
  Synthetic
aaaugauuaaccuauguuugcau

SEQ ID NO: 627738 - RNA, 24 nt, Artificial Sequence
  Synthetic
gaaaugauuaaccuauguuugcau

SEQ ID NO: 627739 - RNA, 18 nt, Artificial Sequence
  Synthetic
aucacauacuguuugcau

SEQ ID NO: 627740 - RNA, 19 nt, Artificial Sequence
  Synthetic
aaucacauacuguuugcau

SEQ ID NO: 627741 - RNA, 20 nt, Artificial Sequence
  Synthetic
uaaucacauacuguuugcau

SEQ ID NO: 627742 - RNA, 21 nt, Artificial Sequence
  Synthetic
auaaucacauacuguuugcau

SEQ ID NO: 627743 - RNA, 22 nt, Artificial Sequence
  Synthetic
uauaaucacauacuguuugcau

SEQ ID NO: 627744 - RNA, 23 nt, Artificial Sequence
  Synthetic
cuauaaucacauacuguuugcau

SEQ ID NO: 627745 - RNA, 24 nt, Artificial Sequence
  Synthetic
ccuauaaucacauacuguuugcau

SEQ ID NO: 627746 - RNA, 18 nt, Artificial Sequence
  Synthetic
cuauguguguguuugcau

SEQ ID NO: 627747 - RNA, 19 nt, Artificial Sequence
  Synthetic
ccuauguguguguuugcau

SEQ ID NO: 627748 - RNA, 20 nt, Artificial Sequence
  Synthetic
gccuauguguguguuugcau

SEQ ID NO: 627749 - RNA, 21 nt, Artificial Sequence
  Synthetic
agccuauguguguguuugcau

SEQ ID NO: 627750 - RNA, 22 nt, Artificial Sequence
  Synthetic
gagccuauguguguguuugcau

SEQ ID NO: 627751 - RNA, 23 nt, Artificial Sequence
  Synthetic
ugagccuauguguguguuugcau

SEQ ID NO: 627752 - RNA, 24 nt, Artificial Sequence
  Synthetic
uugagccuauguguguguuugcau

SEQ ID NO: 627753 - RNA, 18 nt, Artificial Sequence
  Synthetic
acaacuuuuuguuugcau

SEQ ID NO: 627754 - RNA, 19 nt, Artificial Sequence
  Synthetic
uacaacuuuuuguuugcau

SEQ ID NO: 627755 - RNA, 20 nt, Artificial Sequence
  Synthetic
auacaacuuuuuguuugcau

SEQ ID NO: 627756 - RNA, 21 nt, Artificial Sequence
  Synthetic
aauacaacuuuuuguuugcau

SEQ ID NO: 627757 - RNA, 22 nt, Artificial Sequence
  Synthetic
aaauacaacuuuuuguuugcau

SEQ ID NO: 627758 - RNA, 23 nt, Artificial Sequence
  Synthetic
aaaauacaacuuuuuguuugcau

SEQ ID NO: 627759 - RNA, 24 nt, Artificial Sequence
  Synthetic
aaaaauacaacuuuuuguuugcau

SEQ ID NO: 627760 - RNA, 18 nt, Artificial Sequence
  Synthetic
cgucaauguauuuugcau

SEQ ID NO: 627761 - RNA, 19 nt, Artificial Sequence
  Synthetic
gcgucaauguauuuugcau

SEQ ID NO: 627762 - RNA, 20 nt, Artificial Sequence
  Synthetic
ugcgucaauguauuuugcau

SEQ ID NO: 627763 - RNA, 21 nt, Artificial Sequence
  Synthetic
cugcgucaauguauuuugcau

SEQ ID NO: 627764 - RNA, 22 nt, Artificial Sequence
  Synthetic
ucugcgucaauguauuuugcau

SEQ ID NO: 627765 - RNA, 23 nt, Artificial Sequence
  Synthetic
gucugcgucaauguauuuugcau

SEQ ID NO: 627766 - RNA, 24 nt, Artificial Sequence
  Synthetic
ugucugcgucaauguauuuugcau

SEQ ID NO: 627767 - RNA, 18 nt, Artificial Sequence
  Synthetic
cuagcuuagccaaaucau

SEQ ID NO: 627768 - RNA, 19 nt, Artificial Sequence
  Synthetic
ucuagcuuagccaaaucau

SEQ ID NO: 627769 - RNA, 20 nt, Artificial Sequence
  Synthetic
uucuagcuuagccaaaucau

SEQ ID NO: 627770 - RNA, 21 nt, Artificial Sequence
  Synthetic
auucuagcuuagccaaaucau

SEQ ID NO: 627771 - RNA, 22 nt, Artificial Sequence
  Synthetic
aauucuagcuuagccaaaucau

SEQ ID NO: 627772 - RNA, 23 nt, Artificial Sequence
  Synthetic
aaauucuagcuuagccaaaucau

SEQ ID NO: 627773 - RNA, 24 nt, Artificial Sequence
  Synthetic
caaauucuagcuuagccaaaucau

SEQ ID NO: 627774 - RNA, 18 nt, Artificial Sequence
  Synthetic
auaauuaguagaaaucau

SEQ ID NO: 627775 - RNA, 19 nt, Artificial Sequence
  Synthetic
uauaauuaguagaaaucau

SEQ ID NO: 627776 - RNA, 20 nt, Artificial Sequence
  Synthetic
cuauaauuaguagaaaucau

SEQ ID NO: 627777 - RNA, 21 nt, Artificial Sequence
  Synthetic
acuauaauuaguagaaaucau

SEQ ID NO: 627778 - RNA, 22 nt, Artificial Sequence
  Synthetic
aacuauaauuaguagaaaucau

SEQ ID NO: 627779 - RNA, 23 nt, Artificial Sequence
  Synthetic
aaacuauaauuaguagaaaucau

SEQ ID NO: 627780 - RNA, 24 nt, Artificial Sequence
  Synthetic
uaaacuauaauuaguagaaaucau

SEQ ID NO: 627781 - RNA, 18 nt, Artificial Sequence
  Synthetic
aaggccaugggaaaucau

SEQ ID NO: 627782 - RNA, 19 nt, Artificial Sequence
  Synthetic
gaaggccaugggaaaucau

SEQ ID NO: 627783 - RNA, 20 nt, Artificial Sequence
  Synthetic
ugaaggccaugggaaaucau

SEQ ID NO: 627784 - RNA, 21 nt, Artificial Sequence
  Synthetic
uugaaggccaugggaaaucau

SEQ ID NO: 627785 - RNA, 22 nt, Artificial Sequence
  Synthetic
guugaaggccaugggaaaucau

SEQ ID NO: 627786 - RNA, 23 nt, Artificial Sequence
  Synthetic
uguugaaggccaugggaaaucau

SEQ ID NO: 627787 - RNA, 24 nt, Artificial Sequence
  Synthetic
auguugaaggccaugggaaaucau

SEQ ID NO: 627788 - RNA, 18 nt, Artificial Sequence
  Synthetic
uuuucuugaauaaaucau

SEQ ID NO: 627789 - RNA, 19 nt, Artificial Sequence
  Synthetic
cuuuucuugaauaaaucau

SEQ ID NO: 627790 - RNA, 20 nt, Artificial Sequence
  Synthetic
ucuuuucuugaauaaaucau

SEQ ID NO: 627791 - RNA, 21 nt, Artificial Sequence
  Synthetic
uucuuuucuugaauaaaucau

SEQ ID NO: 627792 - RNA, 22 nt, Artificial Sequence
  Synthetic
auucuuuucuugaauaaaucau

SEQ ID NO: 627793 - RNA, 23 nt, Artificial Sequence
  Synthetic
uauucuuuucuugaauaaaucau

SEQ ID NO: 627794 - RNA, 24 nt, Artificial Sequence
  Synthetic
auauucuuuucuugaauaaaucau

SEQ ID NO: 627795 - RNA, 18 nt, Artificial Sequence
  Synthetic
ucugauuccauaaaucau

SEQ ID NO: 627796 - RNA, 19 nt, Artificial Sequence
  Synthetic
aucugauuccauaaaucau

SEQ ID NO: 627797 - RNA, 20 nt, Artificial Sequence
  Synthetic
aaucugauuccauaaaucau

SEQ ID NO: 627798 - RNA, 21 nt, Artificial Sequence
  Synthetic
aaaucugauuccauaaaucau

SEQ ID NO: 627799 - RNA, 22 nt, Artificial Sequence
  Synthetic
aaaaucugauuccauaaaucau

SEQ ID NO: 627800 - RNA, 23 nt, Artificial Sequence
  Synthetic
aaaaaucugauuccauaaaucau

SEQ ID NO: 627801 - RNA, 24 nt, Artificial Sequence
  Synthetic
aaaaaaucugauuccauaaaucau

SEQ ID NO: 627802 - RNA, 18 nt, Artificial Sequence
  Synthetic
auuuauggaguaaaucau

SEQ ID NO: 627803 - RNA, 19 nt, Artificial Sequence
  Synthetic
gauuuauggaguaaaucau

SEQ ID NO: 627804 - RNA, 20 nt, Artificial Sequence
  Synthetic
ggauuuauggaguaaaucau

SEQ ID NO: 627805 - RNA, 21 nt, Artificial Sequence
  Synthetic
aggauuuauggaguaaaucau

SEQ ID NO: 627806 - RNA, 22 nt, Artificial Sequence
  Synthetic
aaggauuuauggaguaaaucau

SEQ ID NO: 627807 - RNA, 23 nt, Artificial Sequence
  Synthetic
aaaggauuuauggaguaaaucau

SEQ ID NO: 627808 - RNA, 24 nt, Artificial Sequence
  Synthetic
aaaaggauuuauggaguaaaucau

SEQ ID NO: 627809 - RNA, 18 nt, Artificial Sequence
  Synthetic
aaaaaugguaacaaucau

SEQ ID NO: 627810 - RNA, 19 nt, Artificial Sequence
  Synthetic
aaaaaaugguaacaaucau

SEQ ID NO: 627811 - RNA, 20 nt, Artificial Sequence
  Synthetic
aaaaaaaugguaacaaucau

SEQ ID NO: 627812 - RNA, 21 nt, Artificial Sequence
  Synthetic
aaaaaaaaugguaacaaucau

SEQ ID NO: 627813 - RNA, 22 nt, Artificial Sequence
  Synthetic
uaaaaaaaaugguaacaaucau

SEQ ID NO: 627814 - RNA, 23 nt, Artificial Sequence
  Synthetic
cuaaaaaaaaugguaacaaucau

SEQ ID NO: 627815 - RNA, 24 nt, Artificial Sequence
  Synthetic
ccuaaaaaaaaugguaacaaucau

SEQ ID NO: 627816 - RNA, 18 nt, Artificial Sequence
  Synthetic
cucaacaucgucaaucau

SEQ ID NO: 627817 - RNA, 19 nt, Artificial Sequence
  Synthetic
acucaacaucgucaaucau

SEQ ID NO: 627818 - RNA, 20 nt, Artificial Sequence
  Synthetic
uacucaacaucgucaaucau

SEQ ID NO: 627819 - RNA, 21 nt, Artificial Sequence
  Synthetic
auacucaacaucgucaaucau

SEQ ID NO: 627820 - RNA, 22 nt, Artificial Sequence
  Synthetic
cauacucaacaucgucaaucau

SEQ ID NO: 627821 - RNA, 23 nt, Artificial Sequence
  Synthetic
acauacucaacaucgucaaucau

SEQ ID NO: 627822 - RNA, 24 nt, Artificial Sequence
  Synthetic
aacauacucaacaucgucaaucau

SEQ ID NO: 627823 - RNA, 18 nt, Artificial Sequence
  Synthetic
cagaggcaggagaaucau

SEQ ID NO: 627824 - RNA, 19 nt, Artificial Sequence
  Synthetic
acagaggcaggagaaucau

SEQ ID NO: 627825 - RNA, 20 nt, Artificial Sequence
  Synthetic
gacagaggcaggagaaucau

SEQ ID NO: 627826 - RNA, 21 nt, Artificial Sequence
  Synthetic
agacagaggcaggagaaucau

SEQ ID NO: 627827 - RNA, 22 nt, Artificial Sequence
  Synthetic
aagacagaggcaggagaaucau

SEQ ID NO: 627828 - RNA, 23 nt, Artificial Sequence
  Synthetic
gaagacagaggcaggagaaucau

SEQ ID NO: 627829 - RNA, 24 nt, Artificial Sequence
  Synthetic
ggaagacagaggcaggagaaucau

SEQ ID NO: 627830 - RNA, 21 nt, Artificial Sequence
  Synthetic
aggcugaggcaggagaaucau

SEQ ID NO: 627831 - RNA, 22 nt, Artificial Sequence
  Synthetic
uaggcugaggcaggagaaucau

SEQ ID NO: 627832 - RNA, 23 nt, Artificial Sequence
  Synthetic
guaggcugaggcaggagaaucau

SEQ ID NO: 627833 - RNA, 24 nt, Artificial Sequence
  Synthetic
gguaggcugaggcaggagaaucau

SEQ ID NO: 627834 - RNA, 18 nt, Artificial Sequence
  Synthetic
uggagguaauggaaucau

SEQ ID NO: 627835 - RNA, 19 nt, Artificial Sequence
  Synthetic
guggagguaauggaaucau

SEQ ID NO: 627836 - RNA, 20 nt, Artificial Sequence
  Synthetic
gguggagguaauggaaucau

SEQ ID NO: 627837 - RNA, 21 nt, Artificial Sequence
  Synthetic
agguggagguaauggaaucau

SEQ ID NO: 627838 - RNA, 22 nt, Artificial Sequence
  Synthetic
cagguggagguaauggaaucau

SEQ ID NO: 627839 - RNA, 23 nt, Artificial Sequence
  Synthetic
ccagguggagguaauggaaucau

SEQ ID NO: 627840 - RNA, 24 nt, Artificial Sequence
  Synthetic
accagguggagguaauggaaucau

SEQ ID NO: 627841 - RNA, 18 nt, Artificial Sequence
  Synthetic
gauaaaugauggaaucau

SEQ ID NO: 627842 - RNA, 19 nt, Artificial Sequence
  Synthetic
agauaaaugauggaaucau

SEQ ID NO: 627843 - RNA, 20 nt, Artificial Sequence
  Synthetic
gagauaaaugauggaaucau

SEQ ID NO: 627844 - RNA, 21 nt, Artificial Sequence
  Synthetic
ggagauaaaugauggaaucau

SEQ ID NO: 627845 - RNA, 22 nt, Artificial Sequence
  Synthetic
gggagauaaaugauggaaucau

SEQ ID NO: 627846 - RNA, 23 nt, Artificial Sequence
  Synthetic
ugggagauaaaugauggaaucau

SEQ ID NO: 627847 - RNA, 24 nt, Artificial Sequence
  Synthetic
augggagauaaaugauggaaucau

SEQ ID NO: 627848 - RNA, 18 nt, Artificial Sequence
  Synthetic
aggcugaggaugaaucau

SEQ ID NO: 627849 - RNA, 19 nt, Artificial Sequence
  Synthetic
gaggcugaggaugaaucau

SEQ ID NO: 627850 - RNA, 20 nt, Artificial Sequence
  Synthetic
agaggcugaggaugaaucau

SEQ ID NO: 627851 - RNA, 21 nt, Artificial Sequence
  Synthetic
aagaggcugaggaugaaucau

SEQ ID NO: 627852 - RNA, 22 nt, Artificial Sequence
  Synthetic
gaagaggcugaggaugaaucau

SEQ ID NO: 627853 - RNA, 23 nt, Artificial Sequence
  Synthetic
ggaagaggcugaggaugaaucau

SEQ ID NO: 627854 - RNA, 24 nt, Artificial Sequence
  Synthetic
uggaagaggcugaggaugaaucau

SEQ ID NO: 627855 - RNA, 18 nt, Artificial Sequence
  Synthetic
ggucuguguaugaaucau

SEQ ID NO: 627856 - RNA, 19 nt, Artificial Sequence
  Synthetic
aggucuguguaugaaucau

SEQ ID NO: 627857 - RNA, 20 nt, Artificial Sequence
  Synthetic
caggucuguguaugaaucau

SEQ ID NO: 627858 - RNA, 21 nt, Artificial Sequence
  Synthetic
ccaggucuguguaugaaucau

SEQ ID NO: 627859 - RNA, 22 nt, Artificial Sequence
  Synthetic
accaggucuguguaugaaucau

SEQ ID NO: 627860 - RNA, 23 nt, Artificial Sequence
  Synthetic
gaccaggucuguguaugaaucau

SEQ ID NO: 627861 - RNA, 24 nt, Artificial Sequence
  Synthetic
agaccaggucuguguaugaaucau

SEQ ID NO: 627862 - RNA, 18 nt, Artificial Sequence
  Synthetic
gggagguaacugaaucau

SEQ ID NO: 627863 - RNA, 19 nt, Artificial Sequence
  Synthetic
ugggagguaacugaaucau

SEQ ID NO: 627864 - RNA, 20 nt, Artificial Sequence
  Synthetic
gugggagguaacugaaucau

SEQ ID NO: 627865 - RNA, 21 nt, Artificial Sequence
  Synthetic
agugggagguaacugaaucau

SEQ ID NO: 627866 - RNA, 22 nt, Artificial Sequence
  Synthetic
cagugggagguaacugaaucau

SEQ ID NO: 627867 - RNA, 23 nt, Artificial Sequence
  Synthetic
ccagugggagguaacugaaucau

SEQ ID NO: 627868 - RNA, 24 nt, Artificial Sequence
  Synthetic
uccagugggagguaacugaaucau

SEQ ID NO: 627869 - RNA, 18 nt, Artificial Sequence
  Synthetic
auuuuuuuucugaaucau

SEQ ID NO: 627870 - RNA, 19 nt, Artificial Sequence
  Synthetic
uauuuuuuuucugaaucau

SEQ ID NO: 627871 - RNA, 20 nt, Artificial Sequence
  Synthetic
auauuuuuuuucugaaucau

SEQ ID NO: 627872 - RNA, 21 nt, Artificial Sequence
  Synthetic
uauauuuuuuuucugaaucau

SEQ ID NO: 627873 - RNA, 22 nt, Artificial Sequence
  Synthetic
auauauuuuuuuucugaaucau

SEQ ID NO: 627874 - RNA, 23 nt, Artificial Sequence
  Synthetic
uauauauuuuuuuucugaaucau

SEQ ID NO: 627875 - RNA, 24 nt, Artificial Sequence
  Synthetic
auauauauuuuuuuucugaaucau

SEQ ID NO: 627876 - RNA, 18 nt, Artificial Sequence
  Synthetic
aagaaaguggugaaucau

SEQ ID NO: 627877 - RNA, 19 nt, Artificial Sequence
  Synthetic
aaagaaaguggugaaucau

SEQ ID NO: 627878 - RNA, 20 nt, Artificial Sequence
  Synthetic
caaagaaaguggugaaucau

SEQ ID NO: 627879 - RNA, 21 nt, Artificial Sequence
  Synthetic
acaaagaaaguggugaaucau

SEQ ID NO: 627880 - RNA, 22 nt, Artificial Sequence
  Synthetic
gacaaagaaaguggugaaucau

SEQ ID NO: 627881 - RNA, 23 nt, Artificial Sequence
  Synthetic
cgacaaagaaaguggugaaucau

SEQ ID NO: 627882 - RNA, 24 nt, Artificial Sequence
  Synthetic
acgacaaagaaaguggugaaucau

SEQ ID NO: 627883 - RNA, 18 nt, Artificial Sequence
  Synthetic
gggagguaauugaaucau

SEQ ID NO: 627884 - RNA, 19 nt, Artificial Sequence
  Synthetic
ugggagguaauugaaucau

SEQ ID NO: 627885 - RNA, 20 nt, Artificial Sequence
  Synthetic
gugggagguaauugaaucau

SEQ ID NO: 627886 - RNA, 21 nt, Artificial Sequence
  Synthetic
cgugggagguaauugaaucau

SEQ ID NO: 627887 - RNA, 22 nt, Artificial Sequence
  Synthetic
ucgugggagguaauugaaucau

SEQ ID NO: 627888 - RNA, 23 nt, Artificial Sequence
  Synthetic
cucgugggagguaauugaaucau

SEQ ID NO: 627889 - RNA, 24 nt, Artificial Sequence
  Synthetic
ccucgugggagguaauugaaucau

SEQ ID NO: 627890 - RNA, 18 nt, Artificial Sequence
  Synthetic
uaucuugugucuaaucau

SEQ ID NO: 627891 - RNA, 19 nt, Artificial Sequence
  Synthetic
auaucuugugucuaaucau

SEQ ID NO: 627892 - RNA, 20 nt, Artificial Sequence
  Synthetic
aauaucuugugucuaaucau

SEQ ID NO: 627893 - RNA, 21 nt, Artificial Sequence
  Synthetic
uaauaucuugugucuaaucau

SEQ ID NO: 627894 - RNA, 22 nt, Artificial Sequence
  Synthetic
cuaauaucuugugucuaaucau

SEQ ID NO: 627895 - RNA, 23 nt, Artificial Sequence
  Synthetic
ccuaauaucuugugucuaaucau

SEQ ID NO: 627896 - RNA, 24 nt, Artificial Sequence
  Synthetic
cccuaauaucuugugucuaaucau

SEQ ID NO: 627897 - RNA, 18 nt, Artificial Sequence
  Synthetic
gggagguaauuuaaucau

SEQ ID NO: 627898 - RNA, 19 nt, Artificial Sequence
  Synthetic
ugggagguaauuuaaucau

SEQ ID NO: 627899 - RNA, 20 nt, Artificial Sequence
  Synthetic
gugggagguaauuuaaucau

SEQ ID NO: 627900 - RNA, 21 nt, Artificial Sequence
  Synthetic
agugggagguaauuuaaucau

SEQ ID NO: 627901 - RNA, 22 nt, Artificial Sequence
  Synthetic
cagugggagguaauuuaaucau

SEQ ID NO: 627902 - RNA, 23 nt, Artificial Sequence
  Synthetic
ccagugggagguaauuuaaucau

SEQ ID NO: 627903 - RNA, 24 nt, Artificial Sequence
  Synthetic
cccagugggagguaauuuaaucau

SEQ ID NO: 627904 - RNA, 18 nt, Artificial Sequence
  Synthetic
aaacuuauaaaacaucau

SEQ ID NO: 627905 - RNA, 19 nt, Artificial Sequence
  Synthetic
caaacuuauaaaacaucau

SEQ ID NO: 627906 - RNA, 20 nt, Artificial Sequence
  Synthetic
acaaacuuauaaaacaucau

SEQ ID NO: 627907 - RNA, 21 nt, Artificial Sequence
  Synthetic
aacaaacuuauaaaacaucau

SEQ ID NO: 627908 - RNA, 22 nt, Artificial Sequence
  Synthetic
uaacaaacuuauaaaacaucau

SEQ ID NO: 627909 - RNA, 23 nt, Artificial Sequence
  Synthetic
uuaacaaacuuauaaaacaucau

SEQ ID NO: 627910 - RNA, 24 nt, Artificial Sequence
  Synthetic
uuuaacaaacuuauaaaacaucau

SEQ ID NO: 627911 - RNA, 18 nt, Artificial Sequence
  Synthetic
uucaggaaaacacaucau

SEQ ID NO: 627912 - RNA, 19 nt, Artificial Sequence
  Synthetic
cuucaggaaaacacaucau

SEQ ID NO: 627913 - RNA, 20 nt, Artificial Sequence
  Synthetic
ucuucaggaaaacacaucau

SEQ ID NO: 627914 - RNA, 21 nt, Artificial Sequence
  Synthetic
uucuucaggaaaacacaucau

SEQ ID NO: 627915 - RNA, 22 nt, Artificial Sequence
  Synthetic
uuucuucaggaaaacacaucau

SEQ ID NO: 627916 - RNA, 23 nt, Artificial Sequence
  Synthetic
auuucuucaggaaaacacaucau

SEQ ID NO: 627917 - RNA, 24 nt, Artificial Sequence
  Synthetic
cauuucuucaggaaaacacaucau

SEQ ID NO: 627918 - RNA, 18 nt, Artificial Sequence
  Synthetic
agccagccaccacaucau

SEQ ID NO: 627919 - RNA, 19 nt, Artificial Sequence
  Synthetic
aagccagccaccacaucau

SEQ ID NO: 627920 - RNA, 20 nt, Artificial Sequence
  Synthetic
uaagccagccaccacaucau

SEQ ID NO: 627921 - RNA, 21 nt, Artificial Sequence
  Synthetic
guaagccagccaccacaucau

SEQ ID NO: 627922 - RNA, 22 nt, Artificial Sequence
  Synthetic
gguaagccagccaccacaucau

SEQ ID NO: 627923 - RNA, 23 nt, Artificial Sequence
  Synthetic
ggguaagccagccaccacaucau

SEQ ID NO: 627924 - RNA, 24 nt, Artificial Sequence
  Synthetic
gggguaagccagccaccacaucau

SEQ ID NO: 627925 - RNA, 18 nt, Artificial Sequence
  Synthetic
uuucaaaauugacaucau

SEQ ID NO: 627926 - RNA, 19 nt, Artificial Sequence
  Synthetic
cuuucaaaauugacaucau

SEQ ID NO: 627927 - RNA, 20 nt, Artificial Sequence
  Synthetic
ucuuucaaaauugacaucau

SEQ ID NO: 627928 - RNA, 21 nt, Artificial Sequence
  Synthetic
aucuuucaaaauugacaucau

SEQ ID NO: 627929 - RNA, 22 nt, Artificial Sequence
  Synthetic
uaucuuucaaaauugacaucau

SEQ ID NO: 627930 - RNA, 23 nt, Artificial Sequence
  Synthetic
guaucuuucaaaauugacaucau

SEQ ID NO: 627931 - RNA, 24 nt, Artificial Sequence
  Synthetic
aguaucuuucaaaauugacaucau

SEQ ID NO: 627932 - RNA, 18 nt, Artificial Sequence
  Synthetic
aggccucacauacaucau

SEQ ID NO: 627933 - RNA, 19 nt, Artificial Sequence
  Synthetic
uaggccucacauacaucau

SEQ ID NO: 627934 - RNA, 20 nt, Artificial Sequence
  Synthetic
uuaggccucacauacaucau

SEQ ID NO: 627935 - RNA, 21 nt, Artificial Sequence
  Synthetic
auuaggccucacauacaucau

SEQ ID NO: 627936 - RNA, 22 nt, Artificial Sequence
  Synthetic
gauuaggccucacauacaucau

SEQ ID NO: 627937 - RNA, 23 nt, Artificial Sequence
  Synthetic
ugauuaggccucacauacaucau

SEQ ID NO: 627938 - RNA, 24 nt, Artificial Sequence
  Synthetic
uugauuaggccucacauacaucau

SEQ ID NO: 627939 - RNA, 18 nt, Artificial Sequence
  Synthetic
guucuuaucuuccaucau

SEQ ID NO: 627940 - RNA, 19 nt, Artificial Sequence
  Synthetic
uguucuuaucuuccaucau

SEQ ID NO: 627941 - RNA, 20 nt, Artificial Sequence
  Synthetic
uuguucuuaucuuccaucau

SEQ ID NO: 627942 - RNA, 21 nt, Artificial Sequence
  Synthetic
cuuguucuuaucuuccaucau

SEQ ID NO: 627943 - RNA, 22 nt, Artificial Sequence
  Synthetic
ccuuguucuuaucuuccaucau

SEQ ID NO: 627944 - RNA, 23 nt, Artificial Sequence
  Synthetic
cccuuguucuuaucuuccaucau

SEQ ID NO: 627945 - RNA, 24 nt, Artificial Sequence
  Synthetic
ccccuuguucuuaucuuccaucau

SEQ ID NO: 627946 - RNA, 18 nt, Artificial Sequence
  Synthetic
augcauuuccagcaucau

SEQ ID NO: 627947 - RNA, 19 nt, Artificial Sequence
  Synthetic
caugcauuuccagcaucau

SEQ ID NO: 627948 - RNA, 20 nt, Artificial Sequence
  Synthetic
gcaugcauuuccagcaucau

SEQ ID NO: 627949 - RNA, 21 nt, Artificial Sequence
  Synthetic
ugcaugcauuuccagcaucau

SEQ ID NO: 627950 - RNA, 22 nt, Artificial Sequence
  Synthetic
augcaugcauuuccagcaucau

SEQ ID NO: 627951 - RNA, 23 nt, Artificial Sequence
  Synthetic
caugcaugcauuuccagcaucau

SEQ ID NO: 627952 - RNA, 24 nt, Artificial Sequence
  Synthetic
acaugcaugcauuuccagcaucau

SEQ ID NO: 627953 - RNA, 18 nt, Artificial Sequence
  Synthetic
aagaggugauugcaucau

SEQ ID NO: 627954 - RNA, 19 nt, Artificial Sequence
  Synthetic
uaagaggugauugcaucau

SEQ ID NO: 627955 - RNA, 20 nt, Artificial Sequence
  Synthetic
uuaagaggugauugcaucau

SEQ ID NO: 627956 - RNA, 21 nt, Artificial Sequence
  Synthetic
uuuaagaggugauugcaucau

SEQ ID NO: 627957 - RNA, 22 nt, Artificial Sequence
  Synthetic
cuuuaagaggugauugcaucau

SEQ ID NO: 627958 - RNA, 23 nt, Artificial Sequence
  Synthetic
ccuuuaagaggugauugcaucau

SEQ ID NO: 627959 - RNA, 24 nt, Artificial Sequence
  Synthetic
gccuuuaagaggugauugcaucau

SEQ ID NO: 627960 - RNA, 18 nt, Artificial Sequence
  Synthetic
ucagcuagaaaucaucau

SEQ ID NO: 627961 - RNA, 19 nt, Artificial Sequence
  Synthetic
gucagcuagaaaucaucau

SEQ ID NO: 627962 - RNA, 20 nt, Artificial Sequence
  Synthetic
agucagcuagaaaucaucau

SEQ ID NO: 627963 - RNA, 21 nt, Artificial Sequence
  Synthetic
cagucagcuagaaaucaucau

SEQ ID NO: 627964 - RNA, 22 nt, Artificial Sequence
  Synthetic
ucagucagcuagaaaucaucau

SEQ ID NO: 627965 - RNA, 23 nt, Artificial Sequence
  Synthetic
uucagucagcuagaaaucaucau

SEQ ID NO: 627966 - RNA, 24 nt, Artificial Sequence
  Synthetic
cuucagucagcuagaaaucaucau

SEQ ID NO: 627967 - RNA, 18 nt, Artificial Sequence
  Synthetic
uagaagaaucaucaucau

SEQ ID NO: 627968 - RNA, 19 nt, Artificial Sequence
  Synthetic
uuagaagaaucaucaucau

SEQ ID NO: 627969 - RNA, 20 nt, Artificial Sequence
  Synthetic
auuagaagaaucaucaucau

SEQ ID NO: 627970 - RNA, 21 nt, Artificial Sequence
  Synthetic
uauuagaagaaucaucaucau

SEQ ID NO: 627971 - RNA, 22 nt, Artificial Sequence
  Synthetic
auauuagaagaaucaucaucau

SEQ ID NO: 627972 - RNA, 23 nt, Artificial Sequence
  Synthetic
gauauuagaagaaucaucaucau

SEQ ID NO: 627973 - RNA, 24 nt, Artificial Sequence
  Synthetic
agauauuagaagaaucaucaucau

SEQ ID NO: 627974 - RNA, 18 nt, Artificial Sequence
  Synthetic
cuaaaaucugaagaucau

SEQ ID NO: 627975 - RNA, 19 nt, Artificial Sequence
  Synthetic
ucuaaaaucugaagaucau

SEQ ID NO: 627976 - RNA, 20 nt, Artificial Sequence
  Synthetic
aucuaaaaucugaagaucau

SEQ ID NO: 627977 - RNA, 21 nt, Artificial Sequence
  Synthetic
aaucuaaaaucugaagaucau

SEQ ID NO: 627978 - RNA, 22 nt, Artificial Sequence
  Synthetic
aaaucuaaaaucugaagaucau

SEQ ID NO: 627979 - RNA, 23 nt, Artificial Sequence
  Synthetic
caaaucuaaaaucugaagaucau

SEQ ID NO: 627980 - RNA, 24 nt, Artificial Sequence
  Synthetic
gcaaaucuaaaaucugaagaucau

SEQ ID NO: 627981 - RNA, 18 nt, Artificial Sequence
  Synthetic
ccgaggcaggcagaucau

SEQ ID NO: 627982 - RNA, 19 nt, Artificial Sequence
  Synthetic
gccgaggcaggcagaucau

SEQ ID NO: 627983 - RNA, 20 nt, Artificial Sequence
  Synthetic
ggccgaggcaggcagaucau

SEQ ID NO: 627984 - RNA, 21 nt, Artificial Sequence
  Synthetic
aggccgaggcaggcagaucau

SEQ ID NO: 627985 - RNA, 22 nt, Artificial Sequence
  Synthetic
gaggccgaggcaggcagaucau

SEQ ID NO: 627986 - RNA, 23 nt, Artificial Sequence
  Synthetic
ggaggccgaggcaggcagaucau

SEQ ID NO: 627987 - RNA, 24 nt, Artificial Sequence
  Synthetic
gggaggccgaggcaggcagaucau

SEQ ID NO: 627988 - RNA, 18 nt, Artificial Sequence
  Synthetic
cugaggugggaggaucau

SEQ ID NO: 627989 - RNA, 19 nt, Artificial Sequence
  Synthetic
gcugaggugggaggaucau

SEQ ID NO: 627990 - RNA, 20 nt, Artificial Sequence
  Synthetic
ggcugaggugggaggaucau

SEQ ID NO: 627991 - RNA, 21 nt, Artificial Sequence
  Synthetic
aggcugaggugggaggaucau

SEQ ID NO: 627992 - RNA, 22 nt, Artificial Sequence
  Synthetic
gaggcugaggugggaggaucau

SEQ ID NO: 627993 - RNA, 23 nt, Artificial Sequence
  Synthetic
ggaggcugaggugggaggaucau

SEQ ID NO: 627994 - RNA, 24 nt, Artificial Sequence
  Synthetic
aggaggcugaggugggaggaucau

SEQ ID NO: 627995 - RNA, 18 nt, Artificial Sequence
  Synthetic
cugaugugggaggaucau

SEQ ID NO: 627996 - RNA, 19 nt, Artificial Sequence
  Synthetic
gcugaugugggaggaucau

SEQ ID NO: 627997 - RNA, 20 nt, Artificial Sequence
  Synthetic
ggcugaugugggaggaucau

SEQ ID NO: 627998 - RNA, 21 nt, Artificial Sequence
  Synthetic
aggcugaugugggaggaucau

SEQ ID NO: 627999 - RNA, 22 nt, Artificial Sequence
  Synthetic
gaggcugaugugggaggaucau

SEQ ID NO: 628000 - RNA, 23 nt, Artificial Sequence
  Synthetic
ggaggcugaugugggaggaucau

SEQ ID NO: 628001 - RNA, 24 nt, Artificial Sequence
  Synthetic
gggaggcugaugugggaggaucau

SEQ ID NO: 628002 - RNA, 18 nt, Artificial Sequence
  Synthetic
aagucguuuagggaucau

SEQ ID NO: 628003 - RNA, 19 nt, Artificial Sequence
  Synthetic
gaagucguuuagggaucau

SEQ ID NO: 628004 - RNA, 20 nt, Artificial Sequence
  Synthetic
ugaagucguuuagggaucau

SEQ ID NO: 628005 - RNA, 21 nt, Artificial Sequence
  Synthetic
cugaagucguuuagggaucau

SEQ ID NO: 628006 - RNA, 22 nt, Artificial Sequence
  Synthetic
ucugaagucguuuagggaucau

SEQ ID NO: 628007 - RNA, 23 nt, Artificial Sequence
  Synthetic
uucugaagucguuuagggaucau

SEQ ID NO: 628008 - RNA, 24 nt, Artificial Sequence
  Synthetic
guucugaagucguuuagggaucau

SEQ ID NO: 628009 - RNA, 18 nt, Artificial Sequence
  Synthetic
cugagguggauggaucau

SEQ ID NO: 628010 - RNA, 19 nt, Artificial Sequence
  Synthetic
gcugagguggauggaucau

SEQ ID NO: 628011 - RNA, 20 nt, Artificial Sequence
  Synthetic
ggcugagguggauggaucau

SEQ ID NO: 628012 - RNA, 21 nt, Artificial Sequence
  Synthetic
aggcugagguggauggaucau

SEQ ID NO: 628013 - RNA, 22 nt, Artificial Sequence
  Synthetic
gaggcugagguggauggaucau

SEQ ID NO: 628014 - RNA, 23 nt, Artificial Sequence
  Synthetic
ggaggcugagguggauggaucau

SEQ ID NO: 628015 - RNA, 24 nt, Artificial Sequence
  Synthetic
gggaggcugagguggauggaucau

SEQ ID NO: 628016 - RNA, 18 nt, Artificial Sequence
  Synthetic
cucaacaucacugaucau

SEQ ID NO: 628017 - RNA, 19 nt, Artificial Sequence
  Synthetic
gcucaacaucacugaucau

SEQ ID NO: 628018 - RNA, 20 nt, Artificial Sequence
  Synthetic
agcucaacaucacugaucau

SEQ ID NO: 628019 - RNA, 21 nt, Artificial Sequence
  Synthetic
aagcucaacaucacugaucau

SEQ ID NO: 628020 - RNA, 22 nt, Artificial Sequence
  Synthetic
aaagcucaacaucacugaucau

SEQ ID NO: 628021 - RNA, 23 nt, Artificial Sequence
  Synthetic
aaaagcucaacaucacugaucau

SEQ ID NO: 628022 - RNA, 24 nt, Artificial Sequence
  Synthetic
aaaaagcucaacaucacugaucau

SEQ ID NO: 628023 - RNA, 18 nt, Artificial Sequence
  Synthetic
gagaggaguugugaucau

SEQ ID NO: 628024 - RNA, 19 nt, Artificial Sequence
  Synthetic
ggagaggaguugugaucau

SEQ ID NO: 628025 - RNA, 20 nt, Artificial Sequence
  Synthetic
uggagaggaguugugaucau

SEQ ID NO: 628026 - RNA, 21 nt, Artificial Sequence
  Synthetic
cuggagaggaguugugaucau

SEQ ID NO: 628027 - RNA, 22 nt, Artificial Sequence
  Synthetic
gcuggagaggaguugugaucau

SEQ ID NO: 628028 - RNA, 23 nt, Artificial Sequence
  Synthetic
ugcuggagaggaguugugaucau

SEQ ID NO: 628029 - RNA, 24 nt, Artificial Sequence
  Synthetic
uugcuggagaggaguugugaucau

SEQ ID NO: 628030 - RNA, 18 nt, Artificial Sequence
  Synthetic
uuggauuccaaauaucau

SEQ ID NO: 628031 - RNA, 19 nt, Artificial Sequence
  Synthetic
uuuggauuccaaauaucau

SEQ ID NO: 628032 - RNA, 20 nt, Artificial Sequence
  Synthetic
uuuuggauuccaaauaucau

SEQ ID NO: 628033 - RNA, 21 nt, Artificial Sequence
  Synthetic
uuuuuggauuccaaauaucau

SEQ ID NO: 628034 - RNA, 22 nt, Artificial Sequence
  Synthetic
auuuuuggauuccaaauaucau

SEQ ID NO: 628035 - RNA, 23 nt, Artificial Sequence
  Synthetic
aauuuuuggauuccaaauaucau

SEQ ID NO: 628036 - RNA, 24 nt, Artificial Sequence
  Synthetic
uaauuuuuggauuccaaauaucau

SEQ ID NO: 628037 - RNA, 18 nt, Artificial Sequence
  Synthetic
gccacaaauaaauaucau

SEQ ID NO: 628038 - RNA, 19 nt, Artificial Sequence
  Synthetic
agccacaaauaaauaucau

SEQ ID NO: 628039 - RNA, 20 nt, Artificial Sequence
  Synthetic
uagccacaaauaaauaucau

SEQ ID NO: 628040 - RNA, 21 nt, Artificial Sequence
  Synthetic
guagccacaaauaaauaucau

SEQ ID NO: 628041 - RNA, 22 nt, Artificial Sequence
  Synthetic
aguagccacaaauaaauaucau

SEQ ID NO: 628042 - RNA, 23 nt, Artificial Sequence
  Synthetic
uaguagccacaaauaaauaucau

SEQ ID NO: 628043 - RNA, 24 nt, Artificial Sequence
  Synthetic
cuaguagccacaaauaaauaucau

SEQ ID NO: 628044 - RNA, 18 nt, Artificial Sequence
  Synthetic
auuuggagacaauaucau

SEQ ID NO: 628045 - RNA, 19 nt, Artificial Sequence
  Synthetic
uauuuggagacaauaucau

SEQ ID NO: 628046 - RNA, 20 nt, Artificial Sequence
  Synthetic
uuauuuggagacaauaucau

SEQ ID NO: 628047 - RNA, 21 nt, Artificial Sequence
  Synthetic
guuauuuggagacaauaucau

SEQ ID NO: 628048 - RNA, 22 nt, Artificial Sequence
  Synthetic
uguuauuuggagacaauaucau

SEQ ID NO: 628049 - RNA, 23 nt, Artificial Sequence
  Synthetic
cuguuauuuggagacaauaucau

SEQ ID NO: 628050 - RNA, 24 nt, Artificial Sequence
  Synthetic
acuguuauuuggagacaauaucau

SEQ ID NO: 628051 - RNA, 18 nt, Artificial Sequence
  Synthetic
cauauauauauauaucau

SEQ ID NO: 628052 - RNA, 19 nt, Artificial Sequence
  Synthetic
acauauauauauauaucau

SEQ ID NO: 628053 - RNA, 20 nt, Artificial Sequence
  Synthetic
cacauauauauauauaucau

SEQ ID NO: 628054 - RNA, 21 nt, Artificial Sequence
  Synthetic
ucacauauauauauauaucau

SEQ ID NO: 628055 - RNA, 22 nt, Artificial Sequence
  Synthetic
aucacauauauauauauaucau

SEQ ID NO: 628056 - RNA, 23 nt, Artificial Sequence
  Synthetic
caucacauauauauauauaucau

SEQ ID NO: 628057 - RNA, 24 nt, Artificial Sequence
  Synthetic
ccaucacauauauauauauaucau

SEQ ID NO: 628058 - RNA, 18 nt, Artificial Sequence
  Synthetic
cagaaugguuuauaucau

SEQ ID NO: 628059 - RNA, 19 nt, Artificial Sequence
  Synthetic
gcagaaugguuuauaucau

SEQ ID NO: 628060 - RNA, 20 nt, Artificial Sequence
  Synthetic
ggcagaaugguuuauaucau

SEQ ID NO: 628061 - RNA, 21 nt, Artificial Sequence
  Synthetic
uggcagaaugguuuauaucau

SEQ ID NO: 628062 - RNA, 22 nt, Artificial Sequence
  Synthetic
cuggcagaaugguuuauaucau

SEQ ID NO: 628063 - RNA, 23 nt, Artificial Sequence
  Synthetic
ccuggcagaaugguuuauaucau

SEQ ID NO: 628064 - RNA, 24 nt, Artificial Sequence
  Synthetic
uccuggcagaaugguuuauaucau

SEQ ID NO: 628065 - RNA, 18 nt, Artificial Sequence
  Synthetic
aauaacccuacguaucau

SEQ ID NO: 628066 - RNA, 19 nt, Artificial Sequence
  Synthetic
uaauaacccuacguaucau

SEQ ID NO: 628067 - RNA, 20 nt, Artificial Sequence
  Synthetic
cuaauaacccuacguaucau

SEQ ID NO: 628068 - RNA, 21 nt, Artificial Sequence
  Synthetic
acuaauaacccuacguaucau

SEQ ID NO: 628069 - RNA, 22 nt, Artificial Sequence
  Synthetic
aacuaauaacccuacguaucau

SEQ ID NO: 628070 - RNA, 23 nt, Artificial Sequence
  Synthetic
aaacuaauaacccuacguaucau

SEQ ID NO: 628071 - RNA, 24 nt, Artificial Sequence
  Synthetic
caaacuaauaacccuacguaucau

SEQ ID NO: 628072 - RNA, 18 nt, Artificial Sequence
  Synthetic
ggcuaucacugguaucau

SEQ ID NO: 628073 - RNA, 19 nt, Artificial Sequence
  Synthetic
aggcuaucacugguaucau

SEQ ID NO: 628074 - RNA, 20 nt, Artificial Sequence
  Synthetic
gaggcuaucacugguaucau

SEQ ID NO: 628075 - RNA, 21 nt, Artificial Sequence
  Synthetic
ugaggcuaucacugguaucau

SEQ ID NO: 628076 - RNA, 22 nt, Artificial Sequence
  Synthetic
uugaggcuaucacugguaucau

SEQ ID NO: 628077 - RNA, 23 nt, Artificial Sequence
  Synthetic
auugaggcuaucacugguaucau

SEQ ID NO: 628078 - RNA, 24 nt, Artificial Sequence
  Synthetic
uauugaggcuaucacugguaucau

SEQ ID NO: 628079 - RNA, 18 nt, Artificial Sequence
  Synthetic
gcaugaaaaaauuaucau

SEQ ID NO: 628080 - RNA, 19 nt, Artificial Sequence
  Synthetic
agcaugaaaaaauuaucau

SEQ ID NO: 628081 - RNA, 20 nt, Artificial Sequence
  Synthetic
gagcaugaaaaaauuaucau

SEQ ID NO: 628082 - RNA, 21 nt, Artificial Sequence
  Synthetic
cgagcaugaaaaaauuaucau

SEQ ID NO: 628083 - RNA, 22 nt, Artificial Sequence
  Synthetic
ucgagcaugaaaaaauuaucau

SEQ ID NO: 628084 - RNA, 23 nt, Artificial Sequence
  Synthetic
uucgagcaugaaaaaauuaucau

SEQ ID NO: 628085 - RNA, 24 nt, Artificial Sequence
  Synthetic
uuucgagcaugaaaaaauuaucau

SEQ ID NO: 628086 - RNA, 18 nt, Artificial Sequence
  Synthetic
accuagaaggauuaucau

SEQ ID NO: 628087 - RNA, 19 nt, Artificial Sequence
  Synthetic
gaccuagaaggauuaucau

SEQ ID NO: 628088 - RNA, 20 nt, Artificial Sequence
  Synthetic
ggaccuagaaggauuaucau

SEQ ID NO: 628089 - RNA, 21 nt, Artificial Sequence
  Synthetic
uggaccuagaaggauuaucau

SEQ ID NO: 628090 - RNA, 22 nt, Artificial Sequence
  Synthetic
auggaccuagaaggauuaucau

SEQ ID NO: 628091 - RNA, 23 nt, Artificial Sequence
  Synthetic
uauggaccuagaaggauuaucau

SEQ ID NO: 628092 - RNA, 24 nt, Artificial Sequence
  Synthetic
auauggaccuagaaggauuaucau

SEQ ID NO: 628093 - RNA, 18 nt, Artificial Sequence
  Synthetic
cuuuaggucccuuaucau

SEQ ID NO: 628094 - RNA, 19 nt, Artificial Sequence
  Synthetic
acuuuaggucccuuaucau

SEQ ID NO: 628095 - RNA, 20 nt, Artificial Sequence
  Synthetic
cacuuuaggucccuuaucau

SEQ ID NO: 628096 - RNA, 21 nt, Artificial Sequence
  Synthetic
ucacuuuaggucccuuaucau

SEQ ID NO: 628097 - RNA, 22 nt, Artificial Sequence
  Synthetic
aucacuuuaggucccuuaucau

SEQ ID NO: 628098 - RNA, 23 nt, Artificial Sequence
  Synthetic
aaucacuuuaggucccuuaucau

SEQ ID NO: 628099 - RNA, 24 nt, Artificial Sequence
  Synthetic
uaaucacuuuaggucccuuaucau

SEQ ID NO: 628100 - RNA, 18 nt, Artificial Sequence
  Synthetic
uucaauuauccuuaucau

SEQ ID NO: 628101 - RNA, 19 nt, Artificial Sequence
  Synthetic
uuucaauuauccuuaucau

SEQ ID NO: 628102 - RNA, 20 nt, Artificial Sequence
  Synthetic
cuuucaauuauccuuaucau

SEQ ID NO: 628103 - RNA, 21 nt, Artificial Sequence
  Synthetic
ucuuucaauuauccuuaucau

SEQ ID NO: 628104 - RNA, 22 nt, Artificial Sequence
  Synthetic
cucuuucaauuauccuuaucau

SEQ ID NO: 628105 - RNA, 23 nt, Artificial Sequence
  Synthetic
ucucuuucaauuauccuuaucau

SEQ ID NO: 628106 - RNA, 24 nt, Artificial Sequence
  Synthetic
cucucuuucaauuauccuuaucau

SEQ ID NO: 628107 - RNA, 18 nt, Artificial Sequence
  Synthetic
ggcaauaauucuuaucau

SEQ ID NO: 628108 - RNA, 19 nt, Artificial Sequence
  Synthetic
uggcaauaauucuuaucau

SEQ ID NO: 628109 - RNA, 20 nt, Artificial Sequence
  Synthetic
auggcaauaauucuuaucau

SEQ ID NO: 628110 - RNA, 21 nt, Artificial Sequence
  Synthetic
aauggcaauaauucuuaucau

SEQ ID NO: 628111 - RNA, 22 nt, Artificial Sequence
  Synthetic
aaauggcaauaauucuuaucau

SEQ ID NO: 628112 - RNA, 23 nt, Artificial Sequence
  Synthetic
aaaauggcaauaauucuuaucau

SEQ ID NO: 628113 - RNA, 24 nt, Artificial Sequence
  Synthetic
gaaaauggcaauaauucuuaucau

SEQ ID NO: 628114 - RNA, 18 nt, Artificial Sequence
  Synthetic
caaugacauucuuaucau

SEQ ID NO: 628115 - RNA, 19 nt, Artificial Sequence
  Synthetic
ccaaugacauucuuaucau

SEQ ID NO: 628116 - RNA, 20 nt, Artificial Sequence
  Synthetic
uccaaugacauucuuaucau

SEQ ID NO: 628117 - RNA, 21 nt, Artificial Sequence
  Synthetic
cuccaaugacauucuuaucau

SEQ ID NO: 628118 - RNA, 22 nt, Artificial Sequence
  Synthetic
ucuccaaugacauucuuaucau

SEQ ID NO: 628119 - RNA, 23 nt, Artificial Sequence
  Synthetic
cucuccaaugacauucuuaucau

SEQ ID NO: 628120 - RNA, 24 nt, Artificial Sequence
  Synthetic
gcucuccaaugacauucuuaucau

SEQ ID NO: 628121 - RNA, 18 nt, Artificial Sequence
  Synthetic
gauuugcgaauuuaucau

SEQ ID NO: 628122 - RNA, 19 nt, Artificial Sequence
  Synthetic
agauuugcgaauuuaucau

SEQ ID NO: 628123 - RNA, 20 nt, Artificial Sequence
  Synthetic
gagauuugcgaauuuaucau

SEQ ID NO: 628124 - RNA, 21 nt, Artificial Sequence
  Synthetic
agagauuugcgaauuuaucau

SEQ ID NO: 628125 - RNA, 22 nt, Artificial Sequence
  Synthetic
uagagauuugcgaauuuaucau

SEQ ID NO: 628126 - RNA, 23 nt, Artificial Sequence
  Synthetic
auagagauuugcgaauuuaucau

SEQ ID NO: 628127 - RNA, 24 nt, Artificial Sequence
  Synthetic
aauagagauuugcgaauuuaucau

SEQ ID NO: 628128 - RNA, 18 nt, Artificial Sequence
  Synthetic
ugcuccauucuuuaucau

SEQ ID NO: 628129 - RNA, 19 nt, Artificial Sequence
  Synthetic
augcuccauucuuuaucau

SEQ ID NO: 628130 - RNA, 20 nt, Artificial Sequence
  Synthetic
uaugcuccauucuuuaucau

SEQ ID NO: 628131 - RNA, 21 nt, Artificial Sequence
  Synthetic
cuaugcuccauucuuuaucau

SEQ ID NO: 628132 - RNA, 22 nt, Artificial Sequence
  Synthetic
acuaugcuccauucuuuaucau

SEQ ID NO: 628133 - RNA, 23 nt, Artificial Sequence
  Synthetic
aacuaugcuccauucuuuaucau

SEQ ID NO: 628134 - RNA, 24 nt, Artificial Sequence
  Synthetic
uaacuaugcuccauucuuuaucau

SEQ ID NO: 628135 - RNA, 18 nt, Artificial Sequence
  Synthetic
gcaguagaacaaacucau

SEQ ID NO: 628136 - RNA, 19 nt, Artificial Sequence
  Synthetic
ggcaguagaacaaacucau

SEQ ID NO: 628137 - RNA, 20 nt, Artificial Sequence
  Synthetic
uggcaguagaacaaacucau

SEQ ID NO: 628138 - RNA, 21 nt, Artificial Sequence
  Synthetic
uuggcaguagaacaaacucau

SEQ ID NO: 628139 - RNA, 22 nt, Artificial Sequence
  Synthetic
guuggcaguagaacaaacucau

SEQ ID NO: 628140 - RNA, 23 nt, Artificial Sequence
  Synthetic
uguuggcaguagaacaaacucau

SEQ ID NO: 628141 - RNA, 24 nt, Artificial Sequence
  Synthetic
auguuggcaguagaacaaacucau

SEQ ID NO: 628142 - RNA, 18 nt, Artificial Sequence
  Synthetic
cagucaacacaaacucau

SEQ ID NO: 628143 - RNA, 19 nt, Artificial Sequence
  Synthetic
ucagucaacacaaacucau

SEQ ID NO: 628144 - RNA, 20 nt, Artificial Sequence
  Synthetic
gucagucaacacaaacucau

SEQ ID NO: 628145 - RNA, 21 nt, Artificial Sequence
  Synthetic
agucagucaacacaaacucau

SEQ ID NO: 628146 - RNA, 22 nt, Artificial Sequence
  Synthetic
cagucagucaacacaaacucau

SEQ ID NO: 628147 - RNA, 23 nt, Artificial Sequence
  Synthetic
acagucagucaacacaaacucau

SEQ ID NO: 628148 - RNA, 24 nt, Artificial Sequence
  Synthetic
gacagucagucaacacaaacucau

SEQ ID NO: 628149 - RNA, 18 nt, Artificial Sequence
  Synthetic
gaaguacauuccacucau

SEQ ID NO: 628150 - RNA, 19 nt, Artificial Sequence
  Synthetic
ggaaguacauuccacucau

SEQ ID NO: 628151 - RNA, 20 nt, Artificial Sequence
  Synthetic
gggaaguacauuccacucau

SEQ ID NO: 628152 - RNA, 21 nt, Artificial Sequence
  Synthetic
ugggaaguacauuccacucau

SEQ ID NO: 628153 - RNA, 22 nt, Artificial Sequence
  Synthetic
uugggaaguacauuccacucau

SEQ ID NO: 628154 - RNA, 23 nt, Artificial Sequence
  Synthetic
guugggaaguacauuccacucau

SEQ ID NO: 628155 - RNA, 24 nt, Artificial Sequence
  Synthetic
gguugggaaguacauuccacucau

SEQ ID NO: 628156 - RNA, 18 nt, Artificial Sequence
  Synthetic
gcaaggguacauacucau

SEQ ID NO: 628157 - RNA, 19 nt, Artificial Sequence
  Synthetic
agcaaggguacauacucau

SEQ ID NO: 628158 - RNA, 20 nt, Artificial Sequence
  Synthetic
cagcaaggguacauacucau

SEQ ID NO: 628159 - RNA, 21 nt, Artificial Sequence
  Synthetic
ccagcaaggguacauacucau

SEQ ID NO: 628160 - RNA, 22 nt, Artificial Sequence
  Synthetic
accagcaaggguacauacucau

SEQ ID NO: 628161 - RNA, 23 nt, Artificial Sequence
  Synthetic
aaccagcaaggguacauacucau

SEQ ID NO: 628162 - RNA, 24 nt, Artificial Sequence
  Synthetic
gaaccagcaaggguacauacucau

SEQ ID NO: 628163 - RNA, 18 nt, Artificial Sequence
  Synthetic
aaggaauacacuacucau

SEQ ID NO: 628164 - RNA, 19 nt, Artificial Sequence
  Synthetic
uaaggaauacacuacucau

SEQ ID NO: 628165 - RNA, 20 nt, Artificial Sequence
  Synthetic
uuaaggaauacacuacucau

SEQ ID NO: 628166 - RNA, 21 nt, Artificial Sequence
  Synthetic
uuuaaggaauacacuacucau

SEQ ID NO: 628167 - RNA, 22 nt, Artificial Sequence
  Synthetic
auuuaaggaauacacuacucau

SEQ ID NO: 628168 - RNA, 23 nt, Artificial Sequence
  Synthetic
uauuuaaggaauacacuacucau

SEQ ID NO: 628169 - RNA, 24 nt, Artificial Sequence
  Synthetic
uuauuuaaggaauacacuacucau

SEQ ID NO: 628170 - RNA, 18 nt, Artificial Sequence
  Synthetic
uucucugaucuuacucau

SEQ ID NO: 628171 - RNA, 19 nt, Artificial Sequence
  Synthetic
cuucucugaucuuacucau

SEQ ID NO: 628172 - RNA, 20 nt, Artificial Sequence
  Synthetic
ccuucucugaucuuacucau

SEQ ID NO: 628173 - RNA, 21 nt, Artificial Sequence
  Synthetic
accuucucugaucuuacucau

SEQ ID NO: 628174 - RNA, 22 nt, Artificial Sequence
  Synthetic
uaccuucucugaucuuacucau

SEQ ID NO: 628175 - RNA, 23 nt, Artificial Sequence
  Synthetic
auaccuucucugaucuuacucau

SEQ ID NO: 628176 - RNA, 24 nt, Artificial Sequence
  Synthetic
aauaccuucucugaucuuacucau

SEQ ID NO: 628177 - RNA, 18 nt, Artificial Sequence
  Synthetic
acugcaaaaggaccucau

SEQ ID NO: 628178 - RNA, 19 nt, Artificial Sequence
  Synthetic
aacugcaaaaggaccucau

SEQ ID NO: 628179 - RNA, 20 nt, Artificial Sequence
  Synthetic
aaacugcaaaaggaccucau

SEQ ID NO: 628180 - RNA, 21 nt, Artificial Sequence
  Synthetic
uaaacugcaaaaggaccucau

SEQ ID NO: 628181 - RNA, 22 nt, Artificial Sequence
  Synthetic
guaaacugcaaaaggaccucau

SEQ ID NO: 628182 - RNA, 23 nt, Artificial Sequence
  Synthetic
uguaaacugcaaaaggaccucau

SEQ ID NO: 628183 - RNA, 24 nt, Artificial Sequence
  Synthetic
auguaaacugcaaaaggaccucau

SEQ ID NO: 628184 - RNA, 18 nt, Artificial Sequence
  Synthetic
gaagccugaggcccucau

SEQ ID NO: 628185 - RNA, 19 nt, Artificial Sequence
  Synthetic
agaagccugaggcccucau

SEQ ID NO: 628186 - RNA, 20 nt, Artificial Sequence
  Synthetic
aagaagccugaggcccucau

SEQ ID NO: 628187 - RNA, 21 nt, Artificial Sequence
  Synthetic
gaagaagccugaggcccucau

SEQ ID NO: 628188 - RNA, 22 nt, Artificial Sequence
  Synthetic
ggaagaagccugaggcccucau

SEQ ID NO: 628189 - RNA, 23 nt, Artificial Sequence
  Synthetic
uggaagaagccugaggcccucau

SEQ ID NO: 628190 - RNA, 24 nt, Artificial Sequence
  Synthetic
auggaagaagccugaggcccucau

SEQ ID NO: 628191 - RNA, 18 nt, Artificial Sequence
  Synthetic
ucuucuccccucccucau

SEQ ID NO: 628192 - RNA, 19 nt, Artificial Sequence
  Synthetic
cucuucuccccucccucau

SEQ ID NO: 628193 - RNA, 20 nt, Artificial Sequence
  Synthetic
acucuucuccccucccucau

SEQ ID NO: 628194 - RNA, 21 nt, Artificial Sequence
  Synthetic
cacucuucuccccucccucau

SEQ ID NO: 628195 - RNA, 22 nt, Artificial Sequence
  Synthetic
gcacucuucuccccucccucau

SEQ ID NO: 628196 - RNA, 23 nt, Artificial Sequence
  Synthetic
agcacucuucuccccucccucau

SEQ ID NO: 628197 - RNA, 24 nt, Artificial Sequence
  Synthetic
aagcacucuucuccccucccucau

SEQ ID NO: 628198 - RNA, 18 nt, Artificial Sequence
  Synthetic
uacucucaauggccucau

SEQ ID NO: 628199 - RNA, 19 nt, Artificial Sequence
  Synthetic
auacucucaauggccucau

SEQ ID NO: 628200 - RNA, 20 nt, Artificial Sequence
  Synthetic
gauacucucaauggccucau

SEQ ID NO: 628201 - RNA, 21 nt, Artificial Sequence
  Synthetic
agauacucucaauggccucau

SEQ ID NO: 628202 - RNA, 22 nt, Artificial Sequence
  Synthetic
uagauacucucaauggccucau

SEQ ID NO: 628203 - RNA, 23 nt, Artificial Sequence
  Synthetic
uuagauacucucaauggccucau

SEQ ID NO: 628204 - RNA, 24 nt, Artificial Sequence
  Synthetic
auuagauacucucaauggccucau

SEQ ID NO: 628205 - RNA, 18 nt, Artificial Sequence
  Synthetic
uacuuggacuauccucau

SEQ ID NO: 628206 - RNA, 19 nt, Artificial Sequence
  Synthetic
cuacuuggacuauccucau

SEQ ID NO: 628207 - RNA, 20 nt, Artificial Sequence
  Synthetic
gcuacuuggacuauccucau

SEQ ID NO: 628208 - RNA, 21 nt, Artificial Sequence
  Synthetic
ugcuacuuggacuauccucau

SEQ ID NO: 628209 - RNA, 22 nt, Artificial Sequence
  Synthetic
cugcuacuuggacuauccucau

SEQ ID NO: 628210 - RNA, 23 nt, Artificial Sequence
  Synthetic
acugcuacuuggacuauccucau

SEQ ID NO: 628211 - RNA, 24 nt, Artificial Sequence
  Synthetic
aacugcuacuuggacuauccucau

SEQ ID NO: 628212 - RNA, 18 nt, Artificial Sequence
  Synthetic
uuaagguugucuccucau

SEQ ID NO: 628213 - RNA, 19 nt, Artificial Sequence
  Synthetic
uuuaagguugucuccucau

SEQ ID NO: 628214 - RNA, 20 nt, Artificial Sequence
  Synthetic
uuuuaagguugucuccucau

SEQ ID NO: 628215 - RNA, 21 nt, Artificial Sequence
  Synthetic
cuuuuaagguugucuccucau

SEQ ID NO: 628216 - RNA, 22 nt, Artificial Sequence
  Synthetic
gcuuuuaagguugucuccucau

SEQ ID NO: 628217 - RNA, 23 nt, Artificial Sequence
  Synthetic
ugcuuuuaagguugucuccucau

SEQ ID NO: 628218 - RNA, 24 nt, Artificial Sequence
  Synthetic
gugcuuuuaagguugucuccucau

SEQ ID NO: 628219 - RNA, 18 nt, Artificial Sequence
  Synthetic
cucccuuuuguuccucau

SEQ ID NO: 628220 - RNA, 19 nt, Artificial Sequence
  Synthetic
ucucccuuuuguuccucau

SEQ ID NO: 628221 - RNA, 20 nt, Artificial Sequence
  Synthetic
uucucccuuuuguuccucau

SEQ ID NO: 628222 - RNA, 21 nt, Artificial Sequence
  Synthetic
uuucucccuuuuguuccucau

SEQ ID NO: 628223 - RNA, 22 nt, Artificial Sequence
  Synthetic
cuuucucccuuuuguuccucau

SEQ ID NO: 628224 - RNA, 23 nt, Artificial Sequence
  Synthetic
ucuuucucccuuuuguuccucau

SEQ ID NO: 628225 - RNA, 24 nt, Artificial Sequence
  Synthetic
uucuuucucccuuuuguuccucau

SEQ ID NO: 628226 - RNA, 18 nt, Artificial Sequence
  Synthetic
acaaaaugugaagcucau

SEQ ID NO: 628227 - RNA, 19 nt, Artificial Sequence
  Synthetic
aacaaaaugugaagcucau

SEQ ID NO: 628228 - RNA, 20 nt, Artificial Sequence
  Synthetic
aaacaaaaugugaagcucau

SEQ ID NO: 628229 - RNA, 21 nt, Artificial Sequence
  Synthetic
gaaacaaaaugugaagcucau

SEQ ID NO: 628230 - RNA, 22 nt, Artificial Sequence
  Synthetic
ugaaacaaaaugugaagcucau

SEQ ID NO: 628231 - RNA, 23 nt, Artificial Sequence
  Synthetic
uugaaacaaaaugugaagcucau

SEQ ID NO: 628232 - RNA, 24 nt, Artificial Sequence
  Synthetic
auugaaacaaaaugugaagcucau

SEQ ID NO: 628233 - RNA, 18 nt, Artificial Sequence
  Synthetic
uggguacagauagcucau

SEQ ID NO: 628234 - RNA, 19 nt, Artificial Sequence
  Synthetic
uuggguacagauagcucau

SEQ ID NO: 628235 - RNA, 20 nt, Artificial Sequence
  Synthetic
cuuggguacagauagcucau

SEQ ID NO: 628236 - RNA, 21 nt, Artificial Sequence
  Synthetic
acuuggguacagauagcucau

SEQ ID NO: 628237 - RNA, 22 nt, Artificial Sequence
  Synthetic
gacuuggguacagauagcucau

SEQ ID NO: 628238 - RNA, 23 nt, Artificial Sequence
  Synthetic
ggacuuggguacagauagcucau

SEQ ID NO: 628239 - RNA, 24 nt, Artificial Sequence
  Synthetic
aggacuuggguacagauagcucau

SEQ ID NO: 628240 - RNA, 18 nt, Artificial Sequence
  Synthetic
cacccucugggggcucau

SEQ ID NO: 628241 - RNA, 19 nt, Artificial Sequence
  Synthetic
ccacccucugggggcucau

SEQ ID NO: 628242 - RNA, 20 nt, Artificial Sequence
  Synthetic
cccacccucugggggcucau

SEQ ID NO: 628243 - RNA, 21 nt, Artificial Sequence
  Synthetic
ucccacccucugggggcucau

SEQ ID NO: 628244 - RNA, 22 nt, Artificial Sequence
  Synthetic
cucccacccucugggggcucau

SEQ ID NO: 628245 - RNA, 23 nt, Artificial Sequence
  Synthetic
ccucccacccucugggggcucau

SEQ ID NO: 628246 - RNA, 24 nt, Artificial Sequence
  Synthetic
gccucccacccucugggggcucau

SEQ ID NO: 628247 - RNA, 18 nt, Artificial Sequence
  Synthetic
agguugaauggggcucau

SEQ ID NO: 628248 - RNA, 19 nt, Artificial Sequence
  Synthetic
aagguugaauggggcucau

SEQ ID NO: 628249 - RNA, 20 nt, Artificial Sequence
  Synthetic
caagguugaauggggcucau

SEQ ID NO: 628250 - RNA, 21 nt, Artificial Sequence
  Synthetic
acaagguugaauggggcucau

SEQ ID NO: 628251 - RNA, 22 nt, Artificial Sequence
  Synthetic
cacaagguugaauggggcucau

SEQ ID NO: 628252 - RNA, 23 nt, Artificial Sequence
  Synthetic
acacaagguugaauggggcucau

SEQ ID NO: 628253 - RNA, 24 nt, Artificial Sequence
  Synthetic
aacacaagguugaauggggcucau

SEQ ID NO: 628254 - RNA, 18 nt, Artificial Sequence
  Synthetic
cagaaaauuguggcucau

SEQ ID NO: 628255 - RNA, 19 nt, Artificial Sequence
  Synthetic
ucagaaaauuguggcucau

SEQ ID NO: 628256 - RNA, 20 nt, Artificial Sequence
  Synthetic
aucagaaaauuguggcucau

SEQ ID NO: 628257 - RNA, 21 nt, Artificial Sequence
  Synthetic
aaucagaaaauuguggcucau

SEQ ID NO: 628258 - RNA, 22 nt, Artificial Sequence
  Synthetic
uaaucagaaaauuguggcucau

SEQ ID NO: 628259 - RNA, 23 nt, Artificial Sequence
  Synthetic
auaaucagaaaauuguggcucau

SEQ ID NO: 628260 - RNA, 24 nt, Artificial Sequence
  Synthetic
uauaaucagaaaauuguggcucau

SEQ ID NO: 628261 - RNA, 18 nt, Artificial Sequence
  Synthetic
aaauacacagcaucucau

SEQ ID NO: 628262 - RNA, 19 nt, Artificial Sequence
  Synthetic
aaaauacacagcaucucau

SEQ ID NO: 628263 - RNA, 20 nt, Artificial Sequence
  Synthetic
caaaauacacagcaucucau

SEQ ID NO: 628264 - RNA, 21 nt, Artificial Sequence
  Synthetic
acaaaauacacagcaucucau

SEQ ID NO: 628265 - RNA, 22 nt, Artificial Sequence
  Synthetic
uacaaaauacacagcaucucau

SEQ ID NO: 628266 - RNA, 23 nt, Artificial Sequence
  Synthetic
auacaaaauacacagcaucucau

SEQ ID NO: 628267 - RNA, 24 nt, Artificial Sequence
  Synthetic
aauacaaaauacacagcaucucau

SEQ ID NO: 628268 - RNA, 21 nt, Artificial Sequence
  Synthetic
uauaaaaccaucagaucucau

SEQ ID NO: 628269 - RNA, 22 nt, Artificial Sequence
  Synthetic
uuauaaaaccaucagaucucau

SEQ ID NO: 628270 - RNA, 23 nt, Artificial Sequence
  Synthetic
cuuauaaaaccaucagaucucau

SEQ ID NO: 628271 - RNA, 24 nt, Artificial Sequence
  Synthetic
acuuauaaaaccaucagaucucau

SEQ ID NO: 628272 - RNA, 24 nt, Artificial Sequence
  Synthetic
gcuuauaaaaccaucagaucucau

SEQ ID NO: 628273 - RNA, 18 nt, Artificial Sequence
  Synthetic
uuugcuuucauaucucau

SEQ ID NO: 628274 - RNA, 19 nt, Artificial Sequence
  Synthetic
cuuugcuuucauaucucau

SEQ ID NO: 628275 - RNA, 20 nt, Artificial Sequence
  Synthetic
ucuuugcuuucauaucucau

SEQ ID NO: 628276 - RNA, 21 nt, Artificial Sequence
  Synthetic
gucuuugcuuucauaucucau

SEQ ID NO: 628277 - RNA, 22 nt, Artificial Sequence
  Synthetic
ugucuuugcuuucauaucucau

SEQ ID NO: 628278 - RNA, 23 nt, Artificial Sequence
  Synthetic
uugucuuugcuuucauaucucau

SEQ ID NO: 628279 - RNA, 24 nt, Artificial Sequence
  Synthetic
guugucuuugcuuucauaucucau

SEQ ID NO: 628280 - RNA, 18 nt, Artificial Sequence
  Synthetic
cuuacacauguaucucau

SEQ ID NO: 628281 - RNA, 19 nt, Artificial Sequence
  Synthetic
ccuuacacauguaucucau

SEQ ID NO: 628282 - RNA, 20 nt, Artificial Sequence
  Synthetic
accuuacacauguaucucau

SEQ ID NO: 628283 - RNA, 21 nt, Artificial Sequence
  Synthetic
aaccuuacacauguaucucau

SEQ ID NO: 628284 - RNA, 22 nt, Artificial Sequence
  Synthetic
caaccuuacacauguaucucau

SEQ ID NO: 628285 - RNA, 23 nt, Artificial Sequence
  Synthetic
acaaccuuacacauguaucucau

SEQ ID NO: 628286 - RNA, 24 nt, Artificial Sequence
  Synthetic
uacaaccuuacacauguaucucau

SEQ ID NO: 628287 - RNA, 18 nt, Artificial Sequence
  Synthetic
augauagugagcucucau

SEQ ID NO: 628288 - RNA, 19 nt, Artificial Sequence
  Synthetic
uaugauagugagcucucau

SEQ ID NO: 628289 - RNA, 20 nt, Artificial Sequence
  Synthetic
uuaugauagugagcucucau

SEQ ID NO: 628290 - RNA, 21 nt, Artificial Sequence
  Synthetic
cuuaugauagugagcucucau

SEQ ID NO: 628291 - RNA, 22 nt, Artificial Sequence
  Synthetic
ucuuaugauagugagcucucau

SEQ ID NO: 628292 - RNA, 23 nt, Artificial Sequence
  Synthetic
uucuuaugauagugagcucucau

SEQ ID NO: 628293 - RNA, 24 nt, Artificial Sequence
  Synthetic
guucuuaugauagugagcucucau

SEQ ID NO: 628294 - RNA, 18 nt, Artificial Sequence
  Synthetic
gcugaaauauucucucau

SEQ ID NO: 628295 - RNA, 19 nt, Artificial Sequence
  Synthetic
ugcugaaauauucucucau

SEQ ID NO: 628296 - RNA, 20 nt, Artificial Sequence
  Synthetic
uugcugaaauauucucucau

SEQ ID NO: 628297 - RNA, 21 nt, Artificial Sequence
  Synthetic
cuugcugaaauauucucucau

SEQ ID NO: 628298 - RNA, 22 nt, Artificial Sequence
  Synthetic
ucuugcugaaauauucucucau

SEQ ID NO: 628299 - RNA, 23 nt, Artificial Sequence
  Synthetic
cucuugcugaaauauucucucau

SEQ ID NO: 628300 - RNA, 24 nt, Artificial Sequence
  Synthetic
ucucuugcugaaauauucucucau

SEQ ID NO: 628301 - RNA, 18 nt, Artificial Sequence
  Synthetic
gcagcauuagauucucau

SEQ ID NO: 628302 - RNA, 19 nt, Artificial Sequence
  Synthetic
ugcagcauuagauucucau

SEQ ID NO: 628303 - RNA, 20 nt, Artificial Sequence
  Synthetic
augcagcauuagauucucau

SEQ ID NO: 628304 - RNA, 21 nt, Artificial Sequence
  Synthetic
caugcagcauuagauucucau

SEQ ID NO: 628305 - RNA, 22 nt, Artificial Sequence
  Synthetic
ucaugcagcauuagauucucau

SEQ ID NO: 628306 - RNA, 23 nt, Artificial Sequence
  Synthetic
aucaugcagcauuagauucucau

SEQ ID NO: 628307 - RNA, 24 nt, Artificial Sequence
  Synthetic
gaucaugcagcauuagauucucau

SEQ ID NO: 628308 - RNA, 18 nt, Artificial Sequence
  Synthetic
caggcauuagauucucau

SEQ ID NO: 628309 - RNA, 19 nt, Artificial Sequence
  Synthetic
ucaggcauuagauucucau

SEQ ID NO: 628310 - RNA, 20 nt, Artificial Sequence
  Synthetic
uucaggcauuagauucucau

SEQ ID NO: 628311 - RNA, 21 nt, Artificial Sequence
  Synthetic
cuucaggcauuagauucucau

SEQ ID NO: 628312 - RNA, 22 nt, Artificial Sequence
  Synthetic
ucuucaggcauuagauucucau

SEQ ID NO: 628313 - RNA, 23 nt, Artificial Sequence
  Synthetic
aucuucaggcauuagauucucau

SEQ ID NO: 628314 - RNA, 24 nt, Artificial Sequence
  Synthetic
gaucuucaggcauuagauucucau

SEQ ID NO: 628315 - RNA, 18 nt, Artificial Sequence
  Synthetic
aauuuuuucucuucucau

SEQ ID NO: 628316 - RNA, 19 nt, Artificial Sequence
  Synthetic
aaauuuuuucucuucucau

SEQ ID NO: 628317 - RNA, 20 nt, Artificial Sequence
  Synthetic
uaaauuuuuucucuucucau

SEQ ID NO: 628318 - RNA, 21 nt, Artificial Sequence
  Synthetic
auaaauuuuuucucuucucau

SEQ ID NO: 628319 - RNA, 22 nt, Artificial Sequence
  Synthetic
uauaaauuuuuucucuucucau

SEQ ID NO: 628320 - RNA, 23 nt, Artificial Sequence
  Synthetic
uuauaaauuuuuucucuucucau

SEQ ID NO: 628321 - RNA, 24 nt, Artificial Sequence
  Synthetic
auuauaaauuuuuucucuucucau

SEQ ID NO: 628322 - RNA, 18 nt, Artificial Sequence
  Synthetic
aauaccacguguucucau

SEQ ID NO: 628323 - RNA, 19 nt, Artificial Sequence
  Synthetic
aaauaccacguguucucau

SEQ ID NO: 628324 - RNA, 20 nt, Artificial Sequence
  Synthetic
caaauaccacguguucucau

SEQ ID NO: 628325 - RNA, 21 nt, Artificial Sequence
  Synthetic
ccaaauaccacguguucucau

SEQ ID NO: 628326 - RNA, 22 nt, Artificial Sequence
  Synthetic
accaaauaccacguguucucau

SEQ ID NO: 628327 - RNA, 23 nt, Artificial Sequence
  Synthetic
uaccaaauaccacguguucucau

SEQ ID NO: 628328 - RNA, 24 nt, Artificial Sequence
  Synthetic
auaccaaauaccacguguucucau

SEQ ID NO: 628329 - RNA, 18 nt, Artificial Sequence
  Synthetic
gauuguacuaaaagucau

SEQ ID NO: 628330 - RNA, 19 nt, Artificial Sequence
  Synthetic
agauuguacuaaaagucau

SEQ ID NO: 628331 - RNA, 20 nt, Artificial Sequence
  Synthetic
gagauuguacuaaaagucau

SEQ ID NO: 628332 - RNA, 21 nt, Artificial Sequence
  Synthetic
ugagauuguacuaaaagucau

SEQ ID NO: 628333 - RNA, 22 nt, Artificial Sequence
  Synthetic
cugagauuguacuaaaagucau

SEQ ID NO: 628334 - RNA, 23 nt, Artificial Sequence
  Synthetic
ucugagauuguacuaaaagucau

SEQ ID NO: 628335 - RNA, 24 nt, Artificial Sequence
  Synthetic
aucugagauuguacuaaaagucau

SEQ ID NO: 628336 - RNA, 18 nt, Artificial Sequence
  Synthetic
augaauuugcaaagucau

SEQ ID NO: 628337 - RNA, 19 nt, Artificial Sequence
  Synthetic
gaugaauuugcaaagucau

SEQ ID NO: 628338 - RNA, 20 nt, Artificial Sequence
  Synthetic
ggaugaauuugcaaagucau

SEQ ID NO: 628339 - RNA, 21 nt, Artificial Sequence
  Synthetic
gggaugaauuugcaaagucau

SEQ ID NO: 628340 - RNA, 22 nt, Artificial Sequence
  Synthetic
agggaugaauuugcaaagucau

SEQ ID NO: 628341 - RNA, 23 nt, Artificial Sequence
  Synthetic
cagggaugaauuugcaaagucau

SEQ ID NO: 628342 - RNA, 24 nt, Artificial Sequence
  Synthetic
gcagggaugaauuugcaaagucau

SEQ ID NO: 628343 - RNA, 18 nt, Artificial Sequence
  Synthetic
guuggaggguaaagucau

SEQ ID NO: 628344 - RNA, 19 nt, Artificial Sequence
  Synthetic
aguuggaggguaaagucau

SEQ ID NO: 628345 - RNA, 20 nt, Artificial Sequence
  Synthetic
uaguuggaggguaaagucau

SEQ ID NO: 628346 - RNA, 21 nt, Artificial Sequence
  Synthetic
guaguuggaggguaaagucau

SEQ ID NO: 628347 - RNA, 22 nt, Artificial Sequence
  Synthetic
aguaguuggaggguaaagucau

SEQ ID NO: 628348 - RNA, 23 nt, Artificial Sequence
  Synthetic
caguaguuggaggguaaagucau

SEQ ID NO: 628349 - RNA, 24 nt, Artificial Sequence
  Synthetic
acaguaguuggaggguaaagucau

SEQ ID NO: 628350 - RNA, 18 nt, Artificial Sequence
  Synthetic
aaaagcacuuacagucau

SEQ ID NO: 628351 - RNA, 19 nt, Artificial Sequence
  Synthetic
caaaagcacuuacagucau

SEQ ID NO: 628352 - RNA, 20 nt, Artificial Sequence
  Synthetic
acaaaagcacuuacagucau

SEQ ID NO: 628353 - RNA, 21 nt, Artificial Sequence
  Synthetic
aacaaaagcacuuacagucau

SEQ ID NO: 628354 - RNA, 22 nt, Artificial Sequence
  Synthetic
gaacaaaagcacuuacagucau

SEQ ID NO: 628355 - RNA, 23 nt, Artificial Sequence
  Synthetic
agaacaaaagcacuuacagucau

SEQ ID NO: 628356 - RNA, 24 nt, Artificial Sequence
  Synthetic
aagaacaaaagcacuuacagucau

SEQ ID NO: 628357 - RNA, 18 nt, Artificial Sequence
  Synthetic
cuacuugaagccagucau

SEQ ID NO: 628358 - RNA, 19 nt, Artificial Sequence
  Synthetic
gcuacuugaagccagucau

SEQ ID NO: 628359 - RNA, 20 nt, Artificial Sequence
  Synthetic
ugcuacuugaagccagucau

SEQ ID NO: 628360 - RNA, 21 nt, Artificial Sequence
  Synthetic
gugcuacuugaagccagucau

SEQ ID NO: 628361 - RNA, 22 nt, Artificial Sequence
  Synthetic
cgugcuacuugaagccagucau

SEQ ID NO: 628362 - RNA, 23 nt, Artificial Sequence
  Synthetic
acgugcuacuugaagccagucau

SEQ ID NO: 628363 - RNA, 24 nt, Artificial Sequence
  Synthetic
aacgugcuacuugaagccagucau

SEQ ID NO: 628364 - RNA, 18 nt, Artificial Sequence
  Synthetic
gaaucgugccgcagucau

SEQ ID NO: 628365 - RNA, 19 nt, Artificial Sequence
  Synthetic
agaaucgugccgcagucau

SEQ ID NO: 628366 - RNA, 20 nt, Artificial Sequence
  Synthetic
uagaaucgugccgcagucau

SEQ ID NO: 628367 - RNA, 21 nt, Artificial Sequence
  Synthetic
guagaaucgugccgcagucau

SEQ ID NO: 628368 - RNA, 22 nt, Artificial Sequence
  Synthetic
aguagaaucgugccgcagucau

SEQ ID NO: 628369 - RNA, 23 nt, Artificial Sequence
  Synthetic
uaguagaaucgugccgcagucau

SEQ ID NO: 628370 - RNA, 24 nt, Artificial Sequence
  Synthetic
auaguagaaucgugccgcagucau

SEQ ID NO: 628371 - RNA, 18 nt, Artificial Sequence
  Synthetic
uuucacuauugcagucau

SEQ ID NO: 628372 - RNA, 19 nt, Artificial Sequence
  Synthetic
auuucacuauugcagucau

SEQ ID NO: 628373 - RNA, 20 nt, Artificial Sequence
  Synthetic
uauuucacuauugcagucau

SEQ ID NO: 628374 - RNA, 21 nt, Artificial Sequence
  Synthetic
guauuucacuauugcagucau

SEQ ID NO: 628375 - RNA, 22 nt, Artificial Sequence
  Synthetic
gguauuucacuauugcagucau

SEQ ID NO: 628376 - RNA, 23 nt, Artificial Sequence
  Synthetic
ugguauuucacuauugcagucau

SEQ ID NO: 628377 - RNA, 24 nt, Artificial Sequence
  Synthetic
gugguauuucacuauugcagucau

SEQ ID NO: 628378 - RNA, 18 nt, Artificial Sequence
  Synthetic
aagcuuuucaagagucau

SEQ ID NO: 628379 - RNA, 19 nt, Artificial Sequence
  Synthetic
aaagcuuuucaagagucau

SEQ ID NO: 628380 - RNA, 20 nt, Artificial Sequence
  Synthetic
gaaagcuuuucaagagucau

SEQ ID NO: 628381 - RNA, 21 nt, Artificial Sequence
  Synthetic
ugaaagcuuuucaagagucau

SEQ ID NO: 628382 - RNA, 22 nt, Artificial Sequence
  Synthetic
uugaaagcuuuucaagagucau

SEQ ID NO: 628383 - RNA, 23 nt, Artificial Sequence
  Synthetic
cuugaaagcuuuucaagagucau

SEQ ID NO: 628384 - RNA, 24 nt, Artificial Sequence
  Synthetic
ccuugaaagcuuuucaagagucau

SEQ ID NO: 628385 - RNA, 18 nt, Artificial Sequence
  Synthetic
augaugugacagagucau

SEQ ID NO: 628386 - RNA, 19 nt, Artificial Sequence
  Synthetic
uaugaugugacagagucau

SEQ ID NO: 628387 - RNA, 20 nt, Artificial Sequence
  Synthetic
uuaugaugugacagagucau

SEQ ID NO: 628388 - RNA, 21 nt, Artificial Sequence
  Synthetic
uuuaugaugugacagagucau

SEQ ID NO: 628389 - RNA, 22 nt, Artificial Sequence
  Synthetic
cuuuaugaugugacagagucau

SEQ ID NO: 628390 - RNA, 23 nt, Artificial Sequence
  Synthetic
acuuuaugaugugacagagucau

SEQ ID NO: 628391 - RNA, 24 nt, Artificial Sequence
  Synthetic
gacuuuaugaugugacagagucau

SEQ ID NO: 628392 - RNA, 18 nt, Artificial Sequence
  Synthetic
guuucccuuaauagucau

SEQ ID NO: 628393 - RNA, 19 nt, Artificial Sequence
  Synthetic
gguuucccuuaauagucau

SEQ ID NO: 628394 - RNA, 20 nt, Artificial Sequence
  Synthetic
agguuucccuuaauagucau

SEQ ID NO: 628395 - RNA, 21 nt, Artificial Sequence
  Synthetic
gagguuucccuuaauagucau

SEQ ID NO: 628396 - RNA, 22 nt, Artificial Sequence
  Synthetic
agagguuucccuuaauagucau

SEQ ID NO: 628397 - RNA, 23 nt, Artificial Sequence
  Synthetic
gagagguuucccuuaauagucau

SEQ ID NO: 628398 - RNA, 24 nt, Artificial Sequence
  Synthetic
agagagguuucccuuaauagucau

SEQ ID NO: 628399 - RNA, 18 nt, Artificial Sequence
  Synthetic
ugaggccucccuagucau

SEQ ID NO: 628400 - RNA, 19 nt, Artificial Sequence
  Synthetic
gugaggccucccuagucau

SEQ ID NO: 628401 - RNA, 20 nt, Artificial Sequence
  Synthetic
ugugaggccucccuagucau

SEQ ID NO: 628402 - RNA, 21 nt, Artificial Sequence
  Synthetic
uugugaggccucccuagucau

SEQ ID NO: 628403 - RNA, 22 nt, Artificial Sequence
  Synthetic
auugugaggccucccuagucau

SEQ ID NO: 628404 - RNA, 23 nt, Artificial Sequence
  Synthetic
gauugugaggccucccuagucau

SEQ ID NO: 628405 - RNA, 24 nt, Artificial Sequence
  Synthetic
ugauugugaggccucccuagucau

SEQ ID NO: 628406 - RNA, 18 nt, Artificial Sequence
  Synthetic
ucaugcugagcuagucau

SEQ ID NO: 628407 - RNA, 19 nt, Artificial Sequence
  Synthetic
uucaugcugagcuagucau

SEQ ID NO: 628408 - RNA, 20 nt, Artificial Sequence
  Synthetic
cuucaugcugagcuagucau

SEQ ID NO: 628409 - RNA, 21 nt, Artificial Sequence
  Synthetic
ucuucaugcugagcuagucau

SEQ ID NO: 628410 - RNA, 22 nt, Artificial Sequence
  Synthetic
uucuucaugcugagcuagucau

SEQ ID NO: 628411 - RNA, 23 nt, Artificial Sequence
  Synthetic
auucuucaugcugagcuagucau

SEQ ID NO: 628412 - RNA, 24 nt, Artificial Sequence
  Synthetic
cauucuucaugcugagcuagucau

SEQ ID NO: 628413 - RNA, 18 nt, Artificial Sequence
  Synthetic
aguuaacugauuagucau

SEQ ID NO: 628414 - RNA, 19 nt, Artificial Sequence
  Synthetic
aaguuaacugauuagucau

SEQ ID NO: 628415 - RNA, 20 nt, Artificial Sequence
  Synthetic
caaguuaacugauuagucau

SEQ ID NO: 628416 - RNA, 21 nt, Artificial Sequence
  Synthetic
ccaaguuaacugauuagucau

SEQ ID NO: 628417 - RNA, 22 nt, Artificial Sequence
  Synthetic
accaaguuaacugauuagucau

SEQ ID NO: 628418 - RNA, 23 nt, Artificial Sequence
  Synthetic
caccaaguuaacugauuagucau

SEQ ID NO: 628419 - RNA, 24 nt, Artificial Sequence
  Synthetic
gcaccaaguuaacugauuagucau

SEQ ID NO: 628420 - RNA, 18 nt, Artificial Sequence
  Synthetic
cuaaguaaacuuagucau

SEQ ID NO: 628421 - RNA, 19 nt, Artificial Sequence
  Synthetic
gcuaaguaaacuuagucau

SEQ ID NO: 628422 - RNA, 20 nt, Artificial Sequence
  Synthetic
ugcuaaguaaacuuagucau

SEQ ID NO: 628423 - RNA, 21 nt, Artificial Sequence
  Synthetic
uugcuaaguaaacuuagucau

SEQ ID NO: 628424 - RNA, 22 nt, Artificial Sequence
  Synthetic
uuugcuaaguaaacuuagucau

SEQ ID NO: 628425 - RNA, 23 nt, Artificial Sequence
  Synthetic
uuuugcuaaguaaacuuagucau

SEQ ID NO: 628426 - RNA, 24 nt, Artificial Sequence
  Synthetic
guuuugcuaaguaaacuuagucau

SEQ ID NO: 628427 - RNA, 18 nt, Artificial Sequence
  Synthetic
ucacauucuuaaggucau

SEQ ID NO: 628428 - RNA, 19 nt, Artificial Sequence
  Synthetic
cucacauucuuaaggucau

SEQ ID NO: 628429 - RNA, 20 nt, Artificial Sequence
  Synthetic
ucucacauucuuaaggucau

SEQ ID NO: 628430 - RNA, 21 nt, Artificial Sequence
  Synthetic
cucucacauucuuaaggucau

SEQ ID NO: 628431 - RNA, 22 nt, Artificial Sequence
  Synthetic
ucucucacauucuuaaggucau

SEQ ID NO: 628432 - RNA, 23 nt, Artificial Sequence
  Synthetic
uucucucacauucuuaaggucau

SEQ ID NO: 628433 - RNA, 24 nt, Artificial Sequence
  Synthetic
uuucucucacauucuuaaggucau

SEQ ID NO: 628434 - RNA, 18 nt, Artificial Sequence
  Synthetic
aucucugggcgaggucau

SEQ ID NO: 628435 - RNA, 19 nt, Artificial Sequence
  Synthetic
uaucucugggcgaggucau

SEQ ID NO: 628436 - RNA, 20 nt, Artificial Sequence
  Synthetic
guaucucugggcgaggucau

SEQ ID NO: 628437 - RNA, 21 nt, Artificial Sequence
  Synthetic
aguaucucugggcgaggucau

SEQ ID NO: 628438 - RNA, 22 nt, Artificial Sequence
  Synthetic
gaguaucucugggcgaggucau

SEQ ID NO: 628439 - RNA, 23 nt, Artificial Sequence
  Synthetic
agaguaucucugggcgaggucau

SEQ ID NO: 628440 - RNA, 24 nt, Artificial Sequence
  Synthetic
aagaguaucucugggcgaggucau

SEQ ID NO: 628441 - RNA, 18 nt, Artificial Sequence
  Synthetic
gaaagaccaugaggucau

SEQ ID NO: 628442 - RNA, 19 nt, Artificial Sequence
  Synthetic
cgaaagaccaugaggucau

SEQ ID NO: 628443 - RNA, 20 nt, Artificial Sequence
  Synthetic
acgaaagaccaugaggucau

SEQ ID NO: 628444 - RNA, 21 nt, Artificial Sequence
  Synthetic
gacgaaagaccaugaggucau

SEQ ID NO: 628445 - RNA, 22 nt, Artificial Sequence
  Synthetic
agacgaaagaccaugaggucau

SEQ ID NO: 628446 - RNA, 23 nt, Artificial Sequence
  Synthetic
aagacgaaagaccaugaggucau

SEQ ID NO: 628447 - RNA, 24 nt, Artificial Sequence
  Synthetic
uaagacgaaagaccaugaggucau

SEQ ID NO: 628448 - RNA, 18 nt, Artificial Sequence
  Synthetic
uauggaaacugcggucau

SEQ ID NO: 628449 - RNA, 19 nt, Artificial Sequence
  Synthetic
auauggaaacugcggucau

SEQ ID NO: 628450 - RNA, 20 nt, Artificial Sequence
  Synthetic
cauauggaaacugcggucau

SEQ ID NO: 628451 - RNA, 21 nt, Artificial Sequence
  Synthetic
ucauauggaaacugcggucau

SEQ ID NO: 628452 - RNA, 22 nt, Artificial Sequence
  Synthetic
gucauauggaaacugcggucau

SEQ ID NO: 628453 - RNA, 23 nt, Artificial Sequence
  Synthetic
agucauauggaaacugcggucau

SEQ ID NO: 628454 - RNA, 24 nt, Artificial Sequence
  Synthetic
aagucauauggaaacugcggucau

SEQ ID NO: 628455 - RNA, 18 nt, Artificial Sequence
  Synthetic
acuacucugaagggucau

SEQ ID NO: 628456 - RNA, 19 nt, Artificial Sequence
  Synthetic
gacuacucugaagggucau

SEQ ID NO: 628457 - RNA, 20 nt, Artificial Sequence
  Synthetic
ggacuacucugaagggucau

SEQ ID NO: 628458 - RNA, 21 nt, Artificial Sequence
  Synthetic
aggacuacucugaagggucau

SEQ ID NO: 628459 - RNA, 22 nt, Artificial Sequence
  Synthetic
caggacuacucugaagggucau

SEQ ID NO: 628460 - RNA, 23 nt, Artificial Sequence
  Synthetic
ucaggacuacucugaagggucau

SEQ ID NO: 628461 - RNA, 24 nt, Artificial Sequence
  Synthetic
cucaggacuacucugaagggucau

SEQ ID NO: 628462 - RNA, 18 nt, Artificial Sequence
  Synthetic
acccaaagagagggucau

SEQ ID NO: 628463 - RNA, 19 nt, Artificial Sequence
  Synthetic
aacccaaagagagggucau

SEQ ID NO: 628464 - RNA, 20 nt, Artificial Sequence
  Synthetic
gaacccaaagagagggucau

SEQ ID NO: 628465 - RNA, 21 nt, Artificial Sequence
  Synthetic
ugaacccaaagagagggucau

SEQ ID NO: 628466 - RNA, 22 nt, Artificial Sequence
  Synthetic
uugaacccaaagagagggucau

SEQ ID NO: 628467 - RNA, 23 nt, Artificial Sequence
  Synthetic
guugaacccaaagagagggucau

SEQ ID NO: 628468 - RNA, 24 nt, Artificial Sequence
  Synthetic
aguugaacccaaagagagggucau

SEQ ID NO: 628469 - RNA, 18 nt, Artificial Sequence
  Synthetic
gggagguuuuugggucau

SEQ ID NO: 628470 - RNA, 19 nt, Artificial Sequence
  Synthetic
cgggagguuuuugggucau

SEQ ID NO: 628471 - RNA, 20 nt, Artificial Sequence
  Synthetic
gcgggagguuuuugggucau

SEQ ID NO: 628472 - RNA, 21 nt, Artificial Sequence
  Synthetic
ggcgggagguuuuugggucau

SEQ ID NO: 628473 - RNA, 22 nt, Artificial Sequence
  Synthetic
uggcgggagguuuuugggucau

SEQ ID NO: 628474 - RNA, 23 nt, Artificial Sequence
  Synthetic
cuggcgggagguuuuugggucau

SEQ ID NO: 628475 - RNA, 24 nt, Artificial Sequence
  Synthetic
ccuggcgggagguuuuugggucau

SEQ ID NO: 628476 - RNA, 19 nt, Artificial Sequence
  Synthetic
ccucaucaucacuggucau

SEQ ID NO: 628477 - RNA, 20 nt, Artificial Sequence
  Synthetic
accucaucaucacuggucau

SEQ ID NO: 628478 - RNA, 21 nt, Artificial Sequence
  Synthetic
aaccucaucaucacuggucau

SEQ ID NO: 628479 - RNA, 22 nt, Artificial Sequence
  Synthetic
aaaccucaucaucacuggucau

SEQ ID NO: 628480 - RNA, 23 nt, Artificial Sequence
  Synthetic
aaaaccucaucaucacuggucau

SEQ ID NO: 628481 - RNA, 24 nt, Artificial Sequence
  Synthetic
aaaaaccucaucaucacuggucau

SEQ ID NO: 628482 - RNA, 20 nt, Artificial Sequence
  Synthetic
ugcucaucaucacuggucau

SEQ ID NO: 628483 - RNA, 21 nt, Artificial Sequence
  Synthetic
augcucaucaucacuggucau

SEQ ID NO: 628484 - RNA, 22 nt, Artificial Sequence
  Synthetic
aaugcucaucaucacuggucau

SEQ ID NO: 628485 - RNA, 23 nt, Artificial Sequence
  Synthetic
aaaugcucaucaucacuggucau

SEQ ID NO: 628486 - RNA, 24 nt, Artificial Sequence
  Synthetic
aaaaugcucaucaucacuggucau

SEQ ID NO: 628487 - RNA, 18 nt, Artificial Sequence
  Synthetic
cucauuaucacuggucau

SEQ ID NO: 628488 - RNA, 19 nt, Artificial Sequence
  Synthetic
gcucauuaucacuggucau

SEQ ID NO: 628489 - RNA, 20 nt, Artificial Sequence
  Synthetic
agcucauuaucacuggucau

SEQ ID NO: 628490 - RNA, 21 nt, Artificial Sequence
  Synthetic
aagcucauuaucacuggucau

SEQ ID NO: 628491 - RNA, 22 nt, Artificial Sequence
  Synthetic
aaagcucauuaucacuggucau

SEQ ID NO: 628492 - RNA, 23 nt, Artificial Sequence
  Synthetic
aaaagcucauuaucacuggucau

SEQ ID NO: 628493 - RNA, 24 nt, Artificial Sequence
  Synthetic
aaaaagcucauuaucacuggucau

SEQ ID NO: 628494 - RNA, 18 nt, Artificial Sequence
  Synthetic
aggcugaaggcuggucau

SEQ ID NO: 628495 - RNA, 19 nt, Artificial Sequence
  Synthetic
aaggcugaaggcuggucau

SEQ ID NO: 628496 - RNA, 20 nt, Artificial Sequence
  Synthetic
gaaggcugaaggcuggucau

SEQ ID NO: 628497 - RNA, 21 nt, Artificial Sequence
  Synthetic
ggaaggcugaaggcuggucau

SEQ ID NO: 628498 - RNA, 22 nt, Artificial Sequence
  Synthetic
uggaaggcugaaggcuggucau

SEQ ID NO: 628499 - RNA, 23 nt, Artificial Sequence
  Synthetic
guggaaggcugaaggcuggucau

SEQ ID NO: 628500 - RNA, 24 nt, Artificial Sequence
  Synthetic
aguggaaggcugaaggcuggucau

SEQ ID NO: 628501 - RNA, 18 nt, Artificial Sequence
  Synthetic
aguuaugcuguuggucau

SEQ ID NO: 628502 - RNA, 19 nt, Artificial Sequence
  Synthetic
aaguuaugcuguuggucau

SEQ ID NO: 628503 - RNA, 20 nt, Artificial Sequence
  Synthetic
caaguuaugcuguuggucau

SEQ ID NO: 628504 - RNA, 21 nt, Artificial Sequence
  Synthetic
gcaaguuaugcuguuggucau

SEQ ID NO: 628505 - RNA, 22 nt, Artificial Sequence
  Synthetic
ggcaaguuaugcuguuggucau

SEQ ID NO: 628506 - RNA, 23 nt, Artificial Sequence
  Synthetic
aggcaaguuaugcuguuggucau

SEQ ID NO: 628507 - RNA, 24 nt, Artificial Sequence
  Synthetic
aaggcaaguuaugcuguuggucau

SEQ ID NO: 628508 - RNA, 18 nt, Artificial Sequence
  Synthetic
uguacuugaaaaugucau

SEQ ID NO: 628509 - RNA, 19 nt, Artificial Sequence
  Synthetic
auguacuugaaaaugucau

SEQ ID NO: 628510 - RNA, 20 nt, Artificial Sequence
  Synthetic
gauguacuugaaaaugucau

SEQ ID NO: 628511 - RNA, 21 nt, Artificial Sequence
  Synthetic
agauguacuugaaaaugucau

SEQ ID NO: 628512 - RNA, 22 nt, Artificial Sequence
  Synthetic
aagauguacuugaaaaugucau

SEQ ID NO: 628513 - RNA, 23 nt, Artificial Sequence
  Synthetic
uaagauguacuugaaaaugucau

SEQ ID NO: 628514 - RNA, 24 nt, Artificial Sequence
  Synthetic
uuaagauguacuugaaaaugucau

SEQ ID NO: 628515 - RNA, 18 nt, Artificial Sequence
  Synthetic
uaacaggguaaaugucau

SEQ ID NO: 628516 - RNA, 19 nt, Artificial Sequence
  Synthetic
auaacaggguaaaugucau

SEQ ID NO: 628517 - RNA, 20 nt, Artificial Sequence
  Synthetic
aauaacaggguaaaugucau

SEQ ID NO: 628518 - RNA, 21 nt, Artificial Sequence
  Synthetic
uaauaacaggguaaaugucau

SEQ ID NO: 628519 - RNA, 22 nt, Artificial Sequence
  Synthetic
auaauaacaggguaaaugucau

SEQ ID NO: 628520 - RNA, 23 nt, Artificial Sequence
  Synthetic
aauaauaacaggguaaaugucau

SEQ ID NO: 628521 - RNA, 24 nt, Artificial Sequence
  Synthetic
gaauaauaacaggguaaaugucau

SEQ ID NO: 628522 - RNA, 18 nt, Artificial Sequence
  Synthetic
auaauccccagaugucau

SEQ ID NO: 628523 - RNA, 19 nt, Artificial Sequence
  Synthetic
cauaauccccagaugucau

SEQ ID NO: 628524 - RNA, 20 nt, Artificial Sequence
  Synthetic
ccauaauccccagaugucau

SEQ ID NO: 628525 - RNA, 21 nt, Artificial Sequence
  Synthetic
cccauaauccccagaugucau

SEQ ID NO: 628526 - RNA, 22 nt, Artificial Sequence
  Synthetic
ucccauaauccccagaugucau

SEQ ID NO: 628527 - RNA, 23 nt, Artificial Sequence
  Synthetic
uucccauaauccccagaugucau

SEQ ID NO: 628528 - RNA, 24 nt, Artificial Sequence
  Synthetic
guucccauaauccccagaugucau

SEQ ID NO: 628529 - RNA, 18 nt, Artificial Sequence
  Synthetic
gugcaccugagaugucau

SEQ ID NO: 628530 - RNA, 19 nt, Artificial Sequence
  Synthetic
ugugcaccugagaugucau

SEQ ID NO: 628531 - RNA, 20 nt, Artificial Sequence
  Synthetic
cugugcaccugagaugucau

SEQ ID NO: 628532 - RNA, 21 nt, Artificial Sequence
  Synthetic
ccugugcaccugagaugucau

SEQ ID NO: 628533 - RNA, 22 nt, Artificial Sequence
  Synthetic
uccugugcaccugagaugucau

SEQ ID NO: 628534 - RNA, 23 nt, Artificial Sequence
  Synthetic
uuccugugcaccugagaugucau

SEQ ID NO: 628535 - RNA, 24 nt, Artificial Sequence
  Synthetic
cuuccugugcaccugagaugucau

SEQ ID NO: 628536 - RNA, 18 nt, Artificial Sequence
  Synthetic
uuggaauguggaugucau

SEQ ID NO: 628537 - RNA, 19 nt, Artificial Sequence
  Synthetic
cuuggaauguggaugucau

SEQ ID NO: 628538 - RNA, 20 nt, Artificial Sequence
  Synthetic
ucuuggaauguggaugucau

SEQ ID NO: 628539 - RNA, 21 nt, Artificial Sequence
  Synthetic
uucuuggaauguggaugucau

SEQ ID NO: 628540 - RNA, 22 nt, Artificial Sequence
  Synthetic
cuucuuggaauguggaugucau

SEQ ID NO: 628541 - RNA, 23 nt, Artificial Sequence
  Synthetic
ccuucuuggaauguggaugucau

SEQ ID NO: 628542 - RNA, 24 nt, Artificial Sequence
  Synthetic
uccuucuuggaauguggaugucau

SEQ ID NO: 628543 - RNA, 18 nt, Artificial Sequence
  Synthetic
ucacaaaaguuaugucau

SEQ ID NO: 628544 - RNA, 19 nt, Artificial Sequence
  Synthetic
uucacaaaaguuaugucau

SEQ ID NO: 628545 - RNA, 20 nt, Artificial Sequence
  Synthetic
uuucacaaaaguuaugucau

SEQ ID NO: 628546 - RNA, 21 nt, Artificial Sequence
  Synthetic
auuucacaaaaguuaugucau

SEQ ID NO: 628547 - RNA, 22 nt, Artificial Sequence
  Synthetic
uauuucacaaaaguuaugucau

SEQ ID NO: 628548 - RNA, 23 nt, Artificial Sequence
  Synthetic
uuauuucacaaaaguuaugucau

SEQ ID NO: 628549 - RNA, 24 nt, Artificial Sequence
  Synthetic
cuuauuucacaaaaguuaugucau

SEQ ID NO: 628550 - RNA, 18 nt, Artificial Sequence
  Synthetic
gaacuaggacacugucau

SEQ ID NO: 628551 - RNA, 19 nt, Artificial Sequence
  Synthetic
agaacuaggacacugucau

SEQ ID NO: 628552 - RNA, 20 nt, Artificial Sequence
  Synthetic
aagaacuaggacacugucau

SEQ ID NO: 628553 - RNA, 21 nt, Artificial Sequence
  Synthetic
uaagaacuaggacacugucau

SEQ ID NO: 628554 - RNA, 22 nt, Artificial Sequence
  Synthetic
auaagaacuaggacacugucau

SEQ ID NO: 628555 - RNA, 23 nt, Artificial Sequence
  Synthetic
gauaagaacuaggacacugucau

SEQ ID NO: 628556 - RNA, 24 nt, Artificial Sequence
  Synthetic
agauaagaacuaggacacugucau

SEQ ID NO: 628557 - RNA, 18 nt, Artificial Sequence
  Synthetic
uaaguucugaccugucau

SEQ ID NO: 628558 - RNA, 19 nt, Artificial Sequence
  Synthetic
guaaguucugaccugucau

SEQ ID NO: 628559 - RNA, 20 nt, Artificial Sequence
  Synthetic
aguaaguucugaccugucau

SEQ ID NO: 628560 - RNA, 21 nt, Artificial Sequence
  Synthetic
aaguaaguucugaccugucau

SEQ ID NO: 628561 - RNA, 22 nt, Artificial Sequence
  Synthetic
uaaguaaguucugaccugucau

SEQ ID NO: 628562 - RNA, 23 nt, Artificial Sequence
  Synthetic
auaaguaaguucugaccugucau

SEQ ID NO: 628563 - RNA, 24 nt, Artificial Sequence
  Synthetic
aauaaguaaguucugaccugucau

SEQ ID NO: 628564 - RNA, 18 nt, Artificial Sequence
  Synthetic
agggucucacucugucau

SEQ ID NO: 628565 - RNA, 19 nt, Artificial Sequence
  Synthetic
cagggucucacucugucau

SEQ ID NO: 628566 - RNA, 20 nt, Artificial Sequence
  Synthetic
acagggucucacucugucau

SEQ ID NO: 628567 - RNA, 21 nt, Artificial Sequence
  Synthetic
gacagggucucacucugucau

SEQ ID NO: 628568 - RNA, 22 nt, Artificial Sequence
  Synthetic
agacagggucucacucugucau

SEQ ID NO: 628569 - RNA, 23 nt, Artificial Sequence
  Synthetic
aagacagggucucacucugucau

SEQ ID NO: 628570 - RNA, 24 nt, Artificial Sequence
  Synthetic
gaagacagggucucacucugucau

SEQ ID NO: 628571 - RNA, 18 nt, Artificial Sequence
  Synthetic
uuccugggagucugucau

SEQ ID NO: 628572 - RNA, 19 nt, Artificial Sequence
  Synthetic
auuccugggagucugucau

SEQ ID NO: 628573 - RNA, 20 nt, Artificial Sequence
  Synthetic
cauuccugggagucugucau

SEQ ID NO: 628574 - RNA, 21 nt, Artificial Sequence
  Synthetic
acauuccugggagucugucau

SEQ ID NO: 628575 - RNA, 22 nt, Artificial Sequence
  Synthetic
cacauuccugggagucugucau

SEQ ID NO: 628576 - RNA, 23 nt, Artificial Sequence
  Synthetic
gcacauuccugggagucugucau

SEQ ID NO: 628577 - RNA, 24 nt, Artificial Sequence
  Synthetic
agcacauuccugggagucugucau

SEQ ID NO: 628578 - RNA, 18 nt, Artificial Sequence
  Synthetic
ccuaggaaauucugucau

SEQ ID NO: 628579 - RNA, 19 nt, Artificial Sequence
  Synthetic
accuaggaaauucugucau

SEQ ID NO: 628580 - RNA, 20 nt, Artificial Sequence
  Synthetic
aaccuaggaaauucugucau

SEQ ID NO: 628581 - RNA, 21 nt, Artificial Sequence
  Synthetic
aaaccuaggaaauucugucau

SEQ ID NO: 628582 - RNA, 22 nt, Artificial Sequence
  Synthetic
aaaaccuaggaaauucugucau

SEQ ID NO: 628583 - RNA, 23 nt, Artificial Sequence
  Synthetic
aaaaaccuaggaaauucugucau

SEQ ID NO: 628584 - RNA, 24 nt, Artificial Sequence
  Synthetic
uaaaaaccuaggaaauucugucau

SEQ ID NO: 628585 - RNA, 18 nt, Artificial Sequence
  Synthetic
uugacauuguucugucau

SEQ ID NO: 628586 - RNA, 19 nt, Artificial Sequence
  Synthetic
guugacauuguucugucau

SEQ ID NO: 628587 - RNA, 20 nt, Artificial Sequence
  Synthetic
uguugacauuguucugucau

SEQ ID NO: 628588 - RNA, 21 nt, Artificial Sequence
  Synthetic
auguugacauuguucugucau

SEQ ID NO: 628589 - RNA, 22 nt, Artificial Sequence
  Synthetic
cauguugacauuguucugucau

SEQ ID NO: 628590 - RNA, 23 nt, Artificial Sequence
  Synthetic
ucauguugacauuguucugucau

SEQ ID NO: 628591 - RNA, 24 nt, Artificial Sequence
  Synthetic
aucauguugacauuguucugucau

SEQ ID NO: 628592 - RNA, 18 nt, Artificial Sequence
  Synthetic
aacaagaggaagugucau

SEQ ID NO: 628593 - RNA, 19 nt, Artificial Sequence
  Synthetic
uaacaagaggaagugucau

SEQ ID NO: 628594 - RNA, 20 nt, Artificial Sequence
  Synthetic
auaacaagaggaagugucau

SEQ ID NO: 628595 - RNA, 21 nt, Artificial Sequence
  Synthetic
uauaacaagaggaagugucau

SEQ ID NO: 628596 - RNA, 22 nt, Artificial Sequence
  Synthetic
uuauaacaagaggaagugucau

SEQ ID NO: 628597 - RNA, 23 nt, Artificial Sequence
  Synthetic
cuuauaacaagaggaagugucau

SEQ ID NO: 628598 - RNA, 24 nt, Artificial Sequence
  Synthetic
ccuuauaacaagaggaagugucau

SEQ ID NO: 628599 - RNA, 18 nt, Artificial Sequence
  Synthetic
guaauccccaugugucau

SEQ ID NO: 628600 - RNA, 19 nt, Artificial Sequence
  Synthetic
uguaauccccaugugucau

SEQ ID NO: 628601 - RNA, 20 nt, Artificial Sequence
  Synthetic
cuguaauccccaugugucau

SEQ ID NO: 628602 - RNA, 21 nt, Artificial Sequence
  Synthetic
ccuguaauccccaugugucau

SEQ ID NO: 628603 - RNA, 22 nt, Artificial Sequence
  Synthetic
uccuguaauccccaugugucau

SEQ ID NO: 628604 - RNA, 23 nt, Artificial Sequence
  Synthetic
uuccuguaauccccaugugucau

SEQ ID NO: 628605 - RNA, 24 nt, Artificial Sequence
  Synthetic
guuccuguaauccccaugugucau

SEQ ID NO: 628606 - RNA, 18 nt, Artificial Sequence
  Synthetic
ugaaggcuccugugucau

SEQ ID NO: 628607 - RNA, 19 nt, Artificial Sequence
  Synthetic
cugaaggcuccugugucau

SEQ ID NO: 628608 - RNA, 20 nt, Artificial Sequence
  Synthetic
ucugaaggcuccugugucau

SEQ ID NO: 628609 - RNA, 21 nt, Artificial Sequence
  Synthetic
uucugaaggcuccugugucau

SEQ ID NO: 628610 - RNA, 22 nt, Artificial Sequence
  Synthetic
uuucugaaggcuccugugucau

SEQ ID NO: 628611 - RNA, 23 nt, Artificial Sequence
  Synthetic
auuucugaaggcuccugugucau

SEQ ID NO: 628612 - RNA, 24 nt, Artificial Sequence
  Synthetic
cauuucugaaggcuccugugucau

SEQ ID NO: 628613 - RNA, 21 nt, Artificial Sequence
  Synthetic
acauagguaaacuugugucau

SEQ ID NO: 628614 - RNA, 22 nt, Artificial Sequence
  Synthetic
uacauagguaaacuugugucau

SEQ ID NO: 628615 - RNA, 23 nt, Artificial Sequence
  Synthetic
uuacauagguaaacuugugucau

SEQ ID NO: 628616 - RNA, 24 nt, Artificial Sequence
  Synthetic
guuacauagguaaacuugugucau

SEQ ID NO: 628617 - RNA, 18 nt, Artificial Sequence
  Synthetic
ugugcaucucauugucau

SEQ ID NO: 628618 - RNA, 19 nt, Artificial Sequence
  Synthetic
gugugcaucucauugucau

SEQ ID NO: 628619 - RNA, 20 nt, Artificial Sequence
  Synthetic
agugugcaucucauugucau

SEQ ID NO: 628620 - RNA, 21 nt, Artificial Sequence
  Synthetic
uagugugcaucucauugucau

SEQ ID NO: 628621 - RNA, 22 nt, Artificial Sequence
  Synthetic
auagugugcaucucauugucau

SEQ ID NO: 628622 - RNA, 23 nt, Artificial Sequence
  Synthetic
aauagugugcaucucauugucau

SEQ ID NO: 628623 - RNA, 24 nt, Artificial Sequence
  Synthetic
caauagugugcaucucauugucau

SEQ ID NO: 628624 - RNA, 18 nt, Artificial Sequence
  Synthetic
cauacgcuggguugucau

SEQ ID NO: 628625 - RNA, 19 nt, Artificial Sequence
  Synthetic
acauacgcuggguugucau

SEQ ID NO: 628626 - RNA, 20 nt, Artificial Sequence
  Synthetic
aacauacgcuggguugucau

SEQ ID NO: 628627 - RNA, 21 nt, Artificial Sequence
  Synthetic
aaacauacgcuggguugucau

SEQ ID NO: 628628 - RNA, 22 nt, Artificial Sequence
  Synthetic
aaaacauacgcuggguugucau

SEQ ID NO: 628629 - RNA, 23 nt, Artificial Sequence
  Synthetic
gaaaacauacgcuggguugucau

SEQ ID NO: 628630 - RNA, 24 nt, Artificial Sequence
  Synthetic
ggaaaacauacgcuggguugucau

SEQ ID NO: 628631 - RNA, 18 nt, Artificial Sequence
  Synthetic
uaagcacaauguugucau

SEQ ID NO: 628632 - RNA, 19 nt, Artificial Sequence
  Synthetic
auaagcacaauguugucau

SEQ ID NO: 628633 - RNA, 20 nt, Artificial Sequence
  Synthetic
aauaagcacaauguugucau

SEQ ID NO: 628634 - RNA, 21 nt, Artificial Sequence
  Synthetic
caauaagcacaauguugucau

SEQ ID NO: 628635 - RNA, 22 nt, Artificial Sequence
  Synthetic
acaauaagcacaauguugucau

SEQ ID NO: 628636 - RNA, 23 nt, Artificial Sequence
  Synthetic
aacaauaagcacaauguugucau

SEQ ID NO: 628637 - RNA, 24 nt, Artificial Sequence
  Synthetic
uaacaauaagcacaauguugucau

SEQ ID NO: 628638 - RNA, 18 nt, Artificial Sequence
  Synthetic
auagacagaaaaauucau

SEQ ID NO: 628639 - RNA, 19 nt, Artificial Sequence
  Synthetic
aauagacagaaaaauucau

SEQ ID NO: 628640 - RNA, 20 nt, Artificial Sequence
  Synthetic
caauagacagaaaaauucau

SEQ ID NO: 628641 - RNA, 21 nt, Artificial Sequence
  Synthetic
gcaauagacagaaaaauucau

SEQ ID NO: 628642 - RNA, 22 nt, Artificial Sequence
  Synthetic
agcaauagacagaaaaauucau

SEQ ID NO: 628643 - RNA, 23 nt, Artificial Sequence
  Synthetic
aagcaauagacagaaaaauucau

SEQ ID NO: 628644 - RNA, 24 nt, Artificial Sequence
  Synthetic
uaagcaauagacagaaaaauucau

SEQ ID NO: 628645 - RNA, 18 nt, Artificial Sequence
  Synthetic
aaauuuccuaaaauucau

SEQ ID NO: 628646 - RNA, 19 nt, Artificial Sequence
  Synthetic
uaaauuuccuaaaauucau

SEQ ID NO: 628647 - RNA, 20 nt, Artificial Sequence
  Synthetic
guaaauuuccuaaaauucau

SEQ ID NO: 628648 - RNA, 21 nt, Artificial Sequence
  Synthetic
gguaaauuuccuaaaauucau

SEQ ID NO: 628649 - RNA, 22 nt, Artificial Sequence
  Synthetic
agguaaauuuccuaaaauucau

SEQ ID NO: 628650 - RNA, 23 nt, Artificial Sequence
  Synthetic
aagguaaauuuccuaaaauucau

SEQ ID NO: 628651 - RNA, 24 nt, Artificial Sequence
  Synthetic
uaagguaaauuuccuaaaauucau

SEQ ID NO: 628652 - RNA, 18 nt, Artificial Sequence
  Synthetic
cauuagaauacaauucau

SEQ ID NO: 628653 - RNA, 19 nt, Artificial Sequence
  Synthetic
acauuagaauacaauucau

SEQ ID NO: 628654 - RNA, 20 nt, Artificial Sequence
  Synthetic
cacauuagaauacaauucau

SEQ ID NO: 628655 - RNA, 21 nt, Artificial Sequence
  Synthetic
ucacauuagaauacaauucau

SEQ ID NO: 628656 - RNA, 22 nt, Artificial Sequence
  Synthetic
aucacauuagaauacaauucau

SEQ ID NO: 628657 - RNA, 23 nt, Artificial Sequence
  Synthetic
uaucacauuagaauacaauucau

SEQ ID NO: 628658 - RNA, 24 nt, Artificial Sequence
  Synthetic
uuaucacauuagaauacaauucau

SEQ ID NO: 628659 - RNA, 18 nt, Artificial Sequence
  Synthetic
auguuugguagaauucau

SEQ ID NO: 628660 - RNA, 19 nt, Artificial Sequence
  Synthetic
uauguuugguagaauucau

SEQ ID NO: 628661 - RNA, 20 nt, Artificial Sequence
  Synthetic
auauguuugguagaauucau

SEQ ID NO: 628662 - RNA, 21 nt, Artificial Sequence
  Synthetic
uauauguuugguagaauucau

SEQ ID NO: 628663 - RNA, 22 nt, Artificial Sequence
  Synthetic
uuauauguuugguagaauucau

SEQ ID NO: 628664 - RNA, 23 nt, Artificial Sequence
  Synthetic
uuuauauguuugguagaauucau

SEQ ID NO: 628665 - RNA, 24 nt, Artificial Sequence
  Synthetic
guuuauauguuugguagaauucau

SEQ ID NO: 628666 - RNA, 18 nt, Artificial Sequence
  Synthetic
aaagugauauacauucau

SEQ ID NO: 628667 - RNA, 19 nt, Artificial Sequence
  Synthetic
gaaagugauauacauucau

SEQ ID NO: 628668 - RNA, 20 nt, Artificial Sequence
  Synthetic
agaaagugauauacauucau

SEQ ID NO: 628669 - RNA, 21 nt, Artificial Sequence
  Synthetic
gagaaagugauauacauucau

SEQ ID NO: 628670 - RNA, 22 nt, Artificial Sequence
  Synthetic
ugagaaagugauauacauucau

SEQ ID NO: 628671 - RNA, 23 nt, Artificial Sequence
  Synthetic
gugagaaagugauauacauucau

SEQ ID NO: 628672 - RNA, 24 nt, Artificial Sequence
  Synthetic
ggugagaaagugauauacauucau

SEQ ID NO: 628673 - RNA, 18 nt, Artificial Sequence
  Synthetic
ccuuucucaugcauucau

SEQ ID NO: 628674 - RNA, 19 nt, Artificial Sequence
  Synthetic
accuuucucaugcauucau

SEQ ID NO: 628675 - RNA, 20 nt, Artificial Sequence
  Synthetic
uaccuuucucaugcauucau

SEQ ID NO: 628676 - RNA, 21 nt, Artificial Sequence
  Synthetic
auaccuuucucaugcauucau

SEQ ID NO: 628677 - RNA, 22 nt, Artificial Sequence
  Synthetic
aauaccuuucucaugcauucau

SEQ ID NO: 628678 - RNA, 23 nt, Artificial Sequence
  Synthetic
uaauaccuuucucaugcauucau

SEQ ID NO: 628679 - RNA, 24 nt, Artificial Sequence
  Synthetic
auaauaccuuucucaugcauucau

SEQ ID NO: 628680 - RNA, 18 nt, Artificial Sequence
  Synthetic
gccuucuaacucauucau

SEQ ID NO: 628681 - RNA, 19 nt, Artificial Sequence
  Synthetic
cgccuucuaacucauucau

SEQ ID NO: 628682 - RNA, 20 nt, Artificial Sequence
  Synthetic
ucgccuucuaacucauucau

SEQ ID NO: 628683 - RNA, 21 nt, Artificial Sequence
  Synthetic
cucgccuucuaacucauucau

SEQ ID NO: 628684 - RNA, 22 nt, Artificial Sequence
  Synthetic
ucucgccuucuaacucauucau

SEQ ID NO: 628685 - RNA, 23 nt, Artificial Sequence
  Synthetic
uucucgccuucuaacucauucau

SEQ ID NO: 628686 - RNA, 24 nt, Artificial Sequence
  Synthetic
cuucucgccuucuaacucauucau

SEQ ID NO: 628687 - RNA, 18 nt, Artificial Sequence
  Synthetic
gaauacauuuucauucau

SEQ ID NO: 628688 - RNA, 19 nt, Artificial Sequence
  Synthetic
ugaauacauuuucauucau

SEQ ID NO: 628689 - RNA, 20 nt, Artificial Sequence
  Synthetic
uugaauacauuuucauucau

SEQ ID NO: 628690 - RNA, 21 nt, Artificial Sequence
  Synthetic
uuugaauacauuuucauucau

SEQ ID NO: 628691 - RNA, 22 nt, Artificial Sequence
  Synthetic
uuuugaauacauuuucauucau

SEQ ID NO: 628692 - RNA, 23 nt, Artificial Sequence
  Synthetic
guuuugaauacauuuucauucau

SEQ ID NO: 628693 - RNA, 24 nt, Artificial Sequence
  Synthetic
aguuuugaauacauuuucauucau

SEQ ID NO: 628694 - RNA, 18 nt, Artificial Sequence
  Synthetic
gguuuucauucuauucau

SEQ ID NO: 628695 - RNA, 19 nt, Artificial Sequence
  Synthetic
agguuuucauucuauucau

SEQ ID NO: 628696 - RNA, 20 nt, Artificial Sequence
  Synthetic
aagguuuucauucuauucau

SEQ ID NO: 628697 - RNA, 21 nt, Artificial Sequence
  Synthetic
aaagguuuucauucuauucau

SEQ ID NO: 628698 - RNA, 22 nt, Artificial Sequence
  Synthetic
aaaagguuuucauucuauucau

SEQ ID NO: 628699 - RNA, 23 nt, Artificial Sequence
  Synthetic
caaaagguuuucauucuauucau

SEQ ID NO: 628700 - RNA, 24 nt, Artificial Sequence
  Synthetic
ucaaaagguuuucauucuauucau

SEQ ID NO: 628701 - RNA, 18 nt, Artificial Sequence
  Synthetic
uggaaauguuuuauucau

SEQ ID NO: 628702 - RNA, 19 nt, Artificial Sequence
  Synthetic
cuggaaauguuuuauucau

SEQ ID NO: 628703 - RNA, 20 nt, Artificial Sequence
  Synthetic
ucuggaaauguuuuauucau

SEQ ID NO: 628704 - RNA, 21 nt, Artificial Sequence
  Synthetic
cucuggaaauguuuuauucau

SEQ ID NO: 628705 - RNA, 22 nt, Artificial Sequence
  Synthetic
ucucuggaaauguuuuauucau

SEQ ID NO: 628706 - RNA, 23 nt, Artificial Sequence
  Synthetic
cucucuggaaauguuuuauucau

SEQ ID NO: 628707 - RNA, 24 nt, Artificial Sequence
  Synthetic
ucucucuggaaauguuuuauucau

SEQ ID NO: 628708 - RNA, 18 nt, Artificial Sequence
  Synthetic
gauuaaauauaacuucau

SEQ ID NO: 628709 - RNA, 19 nt, Artificial Sequence
  Synthetic
ugauuaaauauaacuucau

SEQ ID NO: 628710 - RNA, 20 nt, Artificial Sequence
  Synthetic
augauuaaauauaacuucau

SEQ ID NO: 628711 - RNA, 21 nt, Artificial Sequence
  Synthetic
aaugauuaaauauaacuucau

SEQ ID NO: 628712 - RNA, 22 nt, Artificial Sequence
  Synthetic
uaaugauuaaauauaacuucau

SEQ ID NO: 628713 - RNA, 23 nt, Artificial Sequence
  Synthetic
cuaaugauuaaauauaacuucau

SEQ ID NO: 628714 - RNA, 24 nt, Artificial Sequence
  Synthetic
ucuaaugauuaaauauaacuucau

SEQ ID NO: 628715 - RNA, 18 nt, Artificial Sequence
  Synthetic
augaauagcacacuucau

SEQ ID NO: 628716 - RNA, 19 nt, Artificial Sequence
  Synthetic
aaugaauagcacacuucau

SEQ ID NO: 628717 - RNA, 20 nt, Artificial Sequence
  Synthetic
gaaugaauagcacacuucau

SEQ ID NO: 628718 - RNA, 21 nt, Artificial Sequence
  Synthetic
ugaaugaauagcacacuucau

SEQ ID NO: 628719 - RNA, 22 nt, Artificial Sequence
  Synthetic
gugaaugaauagcacacuucau

SEQ ID NO: 628720 - RNA, 23 nt, Artificial Sequence
  Synthetic
agugaaugaauagcacacuucau

SEQ ID NO: 628721 - RNA, 24 nt, Artificial Sequence
  Synthetic
cagugaaugaauagcacacuucau

SEQ ID NO: 628722 - RNA, 18 nt, Artificial Sequence
  Synthetic
gcucugcuuguacuucau

SEQ ID NO: 628723 - RNA, 19 nt, Artificial Sequence
  Synthetic
agcucugcuuguacuucau

SEQ ID NO: 628724 - RNA, 20 nt, Artificial Sequence
  Synthetic
gagcucugcuuguacuucau

SEQ ID NO: 628725 - RNA, 21 nt, Artificial Sequence
  Synthetic
agagcucugcuuguacuucau

SEQ ID NO: 628726 - RNA, 22 nt, Artificial Sequence
  Synthetic
cagagcucugcuuguacuucau

SEQ ID NO: 628727 - RNA, 23 nt, Artificial Sequence
  Synthetic
acagagcucugcuuguacuucau

SEQ ID NO: 628728 - RNA, 24 nt, Artificial Sequence
  Synthetic
gacagagcucugcuuguacuucau

SEQ ID NO: 628729 - RNA, 18 nt, Artificial Sequence
  Synthetic
ggucacugguuacuucau

SEQ ID NO: 628730 - RNA, 19 nt, Artificial Sequence
  Synthetic
gggucacugguuacuucau

SEQ ID NO: 628731 - RNA, 20 nt, Artificial Sequence
  Synthetic
agggucacugguuacuucau

SEQ ID NO: 628732 - RNA, 21 nt, Artificial Sequence
  Synthetic
aagggucacugguuacuucau

SEQ ID NO: 628733 - RNA, 22 nt, Artificial Sequence
  Synthetic
aaagggucacugguuacuucau

SEQ ID NO: 628734 - RNA, 23 nt, Artificial Sequence
  Synthetic
caaagggucacugguuacuucau

SEQ ID NO: 628735 - RNA, 24 nt, Artificial Sequence
  Synthetic
ucaaagggucacugguuacuucau

SEQ ID NO: 628736 - RNA, 18 nt, Artificial Sequence
  Synthetic
aaguaaaacacccuucau

SEQ ID NO: 628737 - RNA, 19 nt, Artificial Sequence
  Synthetic
aaaguaaaacacccuucau

SEQ ID NO: 628738 - RNA, 20 nt, Artificial Sequence
  Synthetic
aaaaguaaaacacccuucau

SEQ ID NO: 628739 - RNA, 21 nt, Artificial Sequence
  Synthetic
gaaaaguaaaacacccuucau

SEQ ID NO: 628740 - RNA, 22 nt, Artificial Sequence
  Synthetic
ggaaaaguaaaacacccuucau

SEQ ID NO: 628741 - RNA, 23 nt, Artificial Sequence
  Synthetic
aggaaaaguaaaacacccuucau

SEQ ID NO: 628742 - RNA, 24 nt, Artificial Sequence
  Synthetic
aaggaaaaguaaaacacccuucau

SEQ ID NO: 628743 - RNA, 18 nt, Artificial Sequence
  Synthetic
cuaaaccaaauccuucau

SEQ ID NO: 628744 - RNA, 19 nt, Artificial Sequence
  Synthetic
acuaaaccaaauccuucau

SEQ ID NO: 628745 - RNA, 20 nt, Artificial Sequence
  Synthetic
gacuaaaccaaauccuucau

SEQ ID NO: 628746 - RNA, 21 nt, Artificial Sequence
  Synthetic
agacuaaaccaaauccuucau

SEQ ID NO: 628747 - RNA, 22 nt, Artificial Sequence
  Synthetic
uagacuaaaccaaauccuucau

SEQ ID NO: 628748 - RNA, 23 nt, Artificial Sequence
  Synthetic
uuagacuaaaccaaauccuucau

SEQ ID NO: 628749 - RNA, 24 nt, Artificial Sequence
  Synthetic
auuagacuaaaccaaauccuucau

SEQ ID NO: 628750 - RNA, 18 nt, Artificial Sequence
  Synthetic
acugaauauauccuucau

SEQ ID NO: 628751 - RNA, 19 nt, Artificial Sequence
  Synthetic
uacugaauauauccuucau

SEQ ID NO: 628752 - RNA, 20 nt, Artificial Sequence
  Synthetic
auacugaauauauccuucau

SEQ ID NO: 628753 - RNA, 21 nt, Artificial Sequence
  Synthetic
aauacugaauauauccuucau

SEQ ID NO: 628754 - RNA, 22 nt, Artificial Sequence
  Synthetic
uaauacugaauauauccuucau

SEQ ID NO: 628755 - RNA, 23 nt, Artificial Sequence
  Synthetic
auaauacugaauauauccuucau

SEQ ID NO: 628756 - RNA, 24 nt, Artificial Sequence
  Synthetic
aauaauacugaauauauccuucau

SEQ ID NO: 628757 - RNA, 18 nt, Artificial Sequence
  Synthetic
auuuagugcuuccuucau

SEQ ID NO: 628758 - RNA, 19 nt, Artificial Sequence
  Synthetic
uauuuagugcuuccuucau

SEQ ID NO: 628759 - RNA, 20 nt, Artificial Sequence
  Synthetic
auauuuagugcuuccuucau

SEQ ID NO: 628760 - RNA, 21 nt, Artificial Sequence
  Synthetic
cauauuuagugcuuccuucau

SEQ ID NO: 628761 - RNA, 22 nt, Artificial Sequence
  Synthetic
ccauauuuagugcuuccuucau

SEQ ID NO: 628762 - RNA, 23 nt, Artificial Sequence
  Synthetic
uccauauuuagugcuuccuucau

SEQ ID NO: 628763 - RNA, 24 nt, Artificial Sequence
  Synthetic
uuccauauuuagugcuuccuucau

SEQ ID NO: 628764 - RNA, 18 nt, Artificial Sequence
  Synthetic
ugaggcuaauggcuucau

SEQ ID NO: 628765 - RNA, 19 nt, Artificial Sequence
  Synthetic
uugaggcuaauggcuucau

SEQ ID NO: 628766 - RNA, 20 nt, Artificial Sequence
  Synthetic
uuugaggcuaauggcuucau

SEQ ID NO: 628767 - RNA, 21 nt, Artificial Sequence
  Synthetic
guuugaggcuaauggcuucau

SEQ ID NO: 628768 - RNA, 22 nt, Artificial Sequence
  Synthetic
uguuugaggcuaauggcuucau

SEQ ID NO: 628769 - RNA, 23 nt, Artificial Sequence
  Synthetic
uuguuugaggcuaauggcuucau

SEQ ID NO: 628770 - RNA, 24 nt, Artificial Sequence
  Synthetic
uuuguuugaggcuaauggcuucau

SEQ ID NO: 628771 - RNA, 18 nt, Artificial Sequence
  Synthetic
aagaccagauggcuucau

SEQ ID NO: 628772 - RNA, 19 nt, Artificial Sequence
  Synthetic
caagaccagauggcuucau

SEQ ID NO: 628773 - RNA, 20 nt, Artificial Sequence
  Synthetic
ucaagaccagauggcuucau

SEQ ID NO: 628774 - RNA, 21 nt, Artificial Sequence
  Synthetic
cucaagaccagauggcuucau

SEQ ID NO: 628775 - RNA, 22 nt, Artificial Sequence
  Synthetic
gcucaagaccagauggcuucau

SEQ ID NO: 628776 - RNA, 23 nt, Artificial Sequence
  Synthetic
agcucaagaccagauggcuucau

SEQ ID NO: 628777 - RNA, 24 nt, Artificial Sequence
  Synthetic
aagcucaagaccagauggcuucau

SEQ ID NO: 628778 - RNA, 18 nt, Artificial Sequence
  Synthetic
gauauugauuugcuucau

SEQ ID NO: 628779 - RNA, 19 nt, Artificial Sequence
  Synthetic
agauauugauuugcuucau

SEQ ID NO: 628780 - RNA, 20 nt, Artificial Sequence
  Synthetic
gagauauugauuugcuucau

SEQ ID NO: 628781 - RNA, 21 nt, Artificial Sequence
  Synthetic
ugagauauugauuugcuucau

SEQ ID NO: 628782 - RNA, 22 nt, Artificial Sequence
  Synthetic
gugagauauugauuugcuucau

SEQ ID NO: 628783 - RNA, 23 nt, Artificial Sequence
  Synthetic
ggugagauauugauuugcuucau

SEQ ID NO: 628784 - RNA, 24 nt, Artificial Sequence
  Synthetic
aggugagauauugauuugcuucau

SEQ ID NO: 628785 - RNA, 18 nt, Artificial Sequence
  Synthetic
ggaugauuacaucuucau

SEQ ID NO: 628786 - RNA, 19 nt, Artificial Sequence
  Synthetic
uggaugauuacaucuucau

SEQ ID NO: 628787 - RNA, 20 nt, Artificial Sequence
  Synthetic
uuggaugauuacaucuucau

SEQ ID NO: 628788 - RNA, 21 nt, Artificial Sequence
  Synthetic
uuuggaugauuacaucuucau

SEQ ID NO: 628789 - RNA, 22 nt, Artificial Sequence
  Synthetic
guuuggaugauuacaucuucau

SEQ ID NO: 628790 - RNA, 23 nt, Artificial Sequence
  Synthetic
aguuuggaugauuacaucuucau

SEQ ID NO: 628791 - RNA, 24 nt, Artificial Sequence
  Synthetic
aaguuuggaugauuacaucuucau

SEQ ID NO: 628792 - RNA, 18 nt, Artificial Sequence
  Synthetic
aggaaguauucucuucau

SEQ ID NO: 628793 - RNA, 19 nt, Artificial Sequence
  Synthetic
aaggaaguauucucuucau

SEQ ID NO: 628794 - RNA, 20 nt, Artificial Sequence
  Synthetic
caaggaaguauucucuucau

SEQ ID NO: 628795 - RNA, 21 nt, Artificial Sequence
  Synthetic
ucaaggaaguauucucuucau

SEQ ID NO: 628796 - RNA, 22 nt, Artificial Sequence
  Synthetic
uucaaggaaguauucucuucau

SEQ ID NO: 628797 - RNA, 23 nt, Artificial Sequence
  Synthetic
uuucaaggaaguauucucuucau

SEQ ID NO: 628798 - RNA, 24 nt, Artificial Sequence
  Synthetic
uuuucaaggaaguauucucuucau

SEQ ID NO: 628799 - RNA, 18 nt, Artificial Sequence
  Synthetic
gugcuucaguuucuucau

SEQ ID NO: 628800 - RNA, 19 nt, Artificial Sequence
  Synthetic
ugugcuucaguuucuucau

SEQ ID NO: 628801 - RNA, 20 nt, Artificial Sequence
  Synthetic
cugugcuucaguuucuucau

SEQ ID NO: 628802 - RNA, 21 nt, Artificial Sequence
  Synthetic
ucugugcuucaguuucuucau

SEQ ID NO: 628803 - RNA, 22 nt, Artificial Sequence
  Synthetic
uucugugcuucaguuucuucau

SEQ ID NO: 628804 - RNA, 23 nt, Artificial Sequence
  Synthetic
uuucugugcuucaguuucuucau

SEQ ID NO: 628805 - RNA, 24 nt, Artificial Sequence
  Synthetic
cuuucugugcuucaguuucuucau

SEQ ID NO: 628806 - RNA, 21 nt, Artificial Sequence
  Synthetic
aaaaacuacuuuaaaguucau

SEQ ID NO: 628807 - RNA, 22 nt, Artificial Sequence
  Synthetic
aaaaaacuacuuuaaaguucau

SEQ ID NO: 628808 - RNA, 23 nt, Artificial Sequence
  Synthetic
gaaaaaacuacuuuaaaguucau

SEQ ID NO: 628809 - RNA, 24 nt, Artificial Sequence
  Synthetic
ggaaaaaacuacuuuaaaguucau

SEQ ID NO: 628810 - RNA, 18 nt, Artificial Sequence
  Synthetic
gugaaccaugcaguucau

SEQ ID NO: 628811 - RNA, 19 nt, Artificial Sequence
  Synthetic
ggugaaccaugcaguucau

SEQ ID NO: 628812 - RNA, 20 nt, Artificial Sequence
  Synthetic
aggugaaccaugcaguucau

SEQ ID NO: 628813 - RNA, 21 nt, Artificial Sequence
  Synthetic
aaggugaaccaugcaguucau

SEQ ID NO: 628814 - RNA, 22 nt, Artificial Sequence
  Synthetic
gaaggugaaccaugcaguucau

SEQ ID NO: 628815 - RNA, 23 nt, Artificial Sequence
  Synthetic
ggaaggugaaccaugcaguucau

SEQ ID NO: 628816 - RNA, 24 nt, Artificial Sequence
  Synthetic
aggaaggugaaccaugcaguucau

SEQ ID NO: 628817 - RNA, 18 nt, Artificial Sequence
  Synthetic
gauaagucauuaguucau

SEQ ID NO: 628818 - RNA, 19 nt, Artificial Sequence
  Synthetic
cgauaagucauuaguucau

SEQ ID NO: 628819 - RNA, 20 nt, Artificial Sequence
  Synthetic
ccgauaagucauuaguucau

SEQ ID NO: 628820 - RNA, 21 nt, Artificial Sequence
  Synthetic
accgauaagucauuaguucau

SEQ ID NO: 628821 - RNA, 22 nt, Artificial Sequence
  Synthetic
uaccgauaagucauuaguucau

SEQ ID NO: 628822 - RNA, 23 nt, Artificial Sequence
  Synthetic
auaccgauaagucauuaguucau

SEQ ID NO: 628823 - RNA, 24 nt, Artificial Sequence
  Synthetic
uauaccgauaagucauuaguucau

SEQ ID NO: 628824 - RNA, 18 nt, Artificial Sequence
  Synthetic
aagcugagcuuaguucau

SEQ ID NO: 628825 - RNA, 19 nt, Artificial Sequence
  Synthetic
uaagcugagcuuaguucau

SEQ ID NO: 628826 - RNA, 20 nt, Artificial Sequence
  Synthetic
cuaagcugagcuuaguucau

SEQ ID NO: 628827 - RNA, 21 nt, Artificial Sequence
  Synthetic
gcuaagcugagcuuaguucau

SEQ ID NO: 628828 - RNA, 22 nt, Artificial Sequence
  Synthetic
ugcuaagcugagcuuaguucau

SEQ ID NO: 628829 - RNA, 23 nt, Artificial Sequence
  Synthetic
augcuaagcugagcuuaguucau

SEQ ID NO: 628830 - RNA, 24 nt, Artificial Sequence
  Synthetic
aaugcuaagcugagcuuaguucau

SEQ ID NO: 628831 - RNA, 18 nt, Artificial Sequence
  Synthetic
ggccucgauuucguucau

SEQ ID NO: 628832 - RNA, 19 nt, Artificial Sequence
  Synthetic
gggccucgauuucguucau

SEQ ID NO: 628833 - RNA, 20 nt, Artificial Sequence
  Synthetic
agggccucgauuucguucau

SEQ ID NO: 628834 - RNA, 21 nt, Artificial Sequence
  Synthetic
cagggccucgauuucguucau

SEQ ID NO: 628835 - RNA, 22 nt, Artificial Sequence
  Synthetic
ucagggccucgauuucguucau

SEQ ID NO: 628836 - RNA, 23 nt, Artificial Sequence
  Synthetic
uucagggccucgauuucguucau

SEQ ID NO: 628837 - RNA, 24 nt, Artificial Sequence
  Synthetic
uuucagggccucgauuucguucau

SEQ ID NO: 628838 - RNA, 18 nt, Artificial Sequence
  Synthetic
uagauugcacugguucau

SEQ ID NO: 628839 - RNA, 19 nt, Artificial Sequence
  Synthetic
guagauugcacugguucau

SEQ ID NO: 628840 - RNA, 20 nt, Artificial Sequence
  Synthetic
uguagauugcacugguucau

SEQ ID NO: 628841 - RNA, 21 nt, Artificial Sequence
  Synthetic
cuguagauugcacugguucau

SEQ ID NO: 628842 - RNA, 22 nt, Artificial Sequence
  Synthetic
acuguagauugcacugguucau

SEQ ID NO: 628843 - RNA, 23 nt, Artificial Sequence
  Synthetic
uacuguagauugcacugguucau

SEQ ID NO: 628844 - RNA, 24 nt, Artificial Sequence
  Synthetic
uuacuguagauugcacugguucau

SEQ ID NO: 628845 - RNA, 18 nt, Artificial Sequence
  Synthetic
uauuaaaaacauguucau

SEQ ID NO: 628846 - RNA, 19 nt, Artificial Sequence
  Synthetic
guauuaaaaacauguucau

SEQ ID NO: 628847 - RNA, 20 nt, Artificial Sequence
  Synthetic
uguauuaaaaacauguucau

SEQ ID NO: 628848 - RNA, 21 nt, Artificial Sequence
  Synthetic
uuguauuaaaaacauguucau

SEQ ID NO: 628849 - RNA, 22 nt, Artificial Sequence
  Synthetic
uuuguauuaaaaacauguucau

SEQ ID NO: 628850 - RNA, 23 nt, Artificial Sequence
  Synthetic
auuuguauuaaaaacauguucau

SEQ ID NO: 628851 - RNA, 24 nt, Artificial Sequence
  Synthetic
uauuuguauuaaaaacauguucau

SEQ ID NO: 628852 - RNA, 18 nt, Artificial Sequence
  Synthetic
uuucgcauugauguucau

SEQ ID NO: 628853 - RNA, 19 nt, Artificial Sequence
  Synthetic
uuuucgcauugauguucau

SEQ ID NO: 628854 - RNA, 20 nt, Artificial Sequence
  Synthetic
auuuucgcauugauguucau

SEQ ID NO: 628855 - RNA, 21 nt, Artificial Sequence
  Synthetic
gauuuucgcauugauguucau

SEQ ID NO: 628856 - RNA, 22 nt, Artificial Sequence
  Synthetic
ggauuuucgcauugauguucau

SEQ ID NO: 628857 - RNA, 23 nt, Artificial Sequence
  Synthetic
aggauuuucgcauugauguucau

SEQ ID NO: 628858 - RNA, 24 nt, Artificial Sequence
  Synthetic
gaggauuuucgcauugauguucau

SEQ ID NO: 628859 - RNA, 18 nt, Artificial Sequence
  Synthetic
gggagguauccuguucau

SEQ ID NO: 628860 - RNA, 19 nt, Artificial Sequence
  Synthetic
agggagguauccuguucau

SEQ ID NO: 628861 - RNA, 20 nt, Artificial Sequence
  Synthetic
aagggagguauccuguucau

SEQ ID NO: 628862 - RNA, 21 nt, Artificial Sequence
  Synthetic
gaagggagguauccuguucau

SEQ ID NO: 628863 - RNA, 22 nt, Artificial Sequence
  Synthetic
ggaagggagguauccuguucau

SEQ ID NO: 628864 - RNA, 23 nt, Artificial Sequence
  Synthetic
aggaagggagguauccuguucau

SEQ ID NO: 628865 - RNA, 24 nt, Artificial Sequence
  Synthetic
caggaagggagguauccuguucau

SEQ ID NO: 628866 - RNA, 18 nt, Artificial Sequence
  Synthetic
auuguuguuuaauuucau

SEQ ID NO: 628867 - RNA, 19 nt, Artificial Sequence
  Synthetic
uauuguuguuuaauuucau

SEQ ID NO: 628868 - RNA, 20 nt, Artificial Sequence
  Synthetic
guauuguuguuuaauuucau

SEQ ID NO: 628869 - RNA, 21 nt, Artificial Sequence
  Synthetic
aguauuguuguuuaauuucau

SEQ ID NO: 628870 - RNA, 22 nt, Artificial Sequence
  Synthetic
gaguauuguuguuuaauuucau

SEQ ID NO: 628871 - RNA, 23 nt, Artificial Sequence
  Synthetic
agaguauuguuguuuaauuucau

SEQ ID NO: 628872 - RNA, 24 nt, Artificial Sequence
  Synthetic
gagaguauuguuguuuaauuucau

SEQ ID NO: 628873 - RNA, 18 nt, Artificial Sequence
  Synthetic
aacuacuuuacauuucau

SEQ ID NO: 628874 - RNA, 19 nt, Artificial Sequence
  Synthetic
aaacuacuuuacauuucau

SEQ ID NO: 628875 - RNA, 20 nt, Artificial Sequence
  Synthetic
caaacuacuuuacauuucau

SEQ ID NO: 628876 - RNA, 21 nt, Artificial Sequence
  Synthetic
acaaacuacuuuacauuucau

SEQ ID NO: 628877 - RNA, 22 nt, Artificial Sequence
  Synthetic
aacaaacuacuuuacauuucau

SEQ ID NO: 628878 - RNA, 23 nt, Artificial Sequence
  Synthetic
gaacaaacuacuuuacauuucau

SEQ ID NO: 628879 - RNA, 24 nt, Artificial Sequence
  Synthetic
agaacaaacuacuuuacauuucau

SEQ ID NO: 628880 - RNA, 18 nt, Artificial Sequence
  Synthetic
gauuauuuauuauuucau

SEQ ID NO: 628881 - RNA, 19 nt, Artificial Sequence
  Synthetic
cgauuauuuauuauuucau

SEQ ID NO: 628882 - RNA, 20 nt, Artificial Sequence
  Synthetic
gcgauuauuuauuauuucau

SEQ ID NO: 628883 - RNA, 21 nt, Artificial Sequence
  Synthetic
ugcgauuauuuauuauuucau

SEQ ID NO: 628884 - RNA, 22 nt, Artificial Sequence
  Synthetic
uugcgauuauuuauuauuucau

SEQ ID NO: 628885 - RNA, 23 nt, Artificial Sequence
  Synthetic
cuugcgauuauuuauuauuucau

SEQ ID NO: 628886 - RNA, 24 nt, Artificial Sequence
  Synthetic
acuugcgauuauuuauuauuucau

SEQ ID NO: 628887 - RNA, 18 nt, Artificial Sequence
  Synthetic
guuaaugaguuauuucau

SEQ ID NO: 628888 - RNA, 19 nt, Artificial Sequence
  Synthetic
aguuaaugaguuauuucau

SEQ ID NO: 628889 - RNA, 20 nt, Artificial Sequence
  Synthetic
aaguuaaugaguuauuucau

SEQ ID NO: 628890 - RNA, 21 nt, Artificial Sequence
  Synthetic
caaguuaaugaguuauuucau

SEQ ID NO: 628891 - RNA, 22 nt, Artificial Sequence
  Synthetic
ccaaguuaaugaguuauuucau

SEQ ID NO: 628892 - RNA, 23 nt, Artificial Sequence
  Synthetic
accaaguuaaugaguuauuucau

SEQ ID NO: 628893 - RNA, 24 nt, Artificial Sequence
  Synthetic
uaccaaguuaaugaguuauuucau

SEQ ID NO: 628894 - RNA, 18 nt, Artificial Sequence
  Synthetic
agucuucauuacuuucau

SEQ ID NO: 628895 - RNA, 19 nt, Artificial Sequence
  Synthetic
cagucuucauuacuuucau

SEQ ID NO: 628896 - RNA, 20 nt, Artificial Sequence
  Synthetic
ucagucuucauuacuuucau

SEQ ID NO: 628897 - RNA, 21 nt, Artificial Sequence
  Synthetic
cucagucuucauuacuuucau

SEQ ID NO: 628898 - RNA, 22 nt, Artificial Sequence
  Synthetic
ucucagucuucauuacuuucau

SEQ ID NO: 628899 - RNA, 23 nt, Artificial Sequence
  Synthetic
uucucagucuucauuacuuucau

SEQ ID NO: 628900 - RNA, 24 nt, Artificial Sequence
  Synthetic
uuucucagucuucauuacuuucau

SEQ ID NO: 628901 - RNA, 18 nt, Artificial Sequence
  Synthetic
ugggccugagccuuucau

SEQ ID NO: 628902 - RNA, 19 nt, Artificial Sequence
  Synthetic
cugggccugagccuuucau

SEQ ID NO: 628903 - RNA, 20 nt, Artificial Sequence
  Synthetic
ucugggccugagccuuucau

SEQ ID NO: 628904 - RNA, 21 nt, Artificial Sequence
  Synthetic
uucugggccugagccuuucau

SEQ ID NO: 628905 - RNA, 22 nt, Artificial Sequence
  Synthetic
cuucugggccugagccuuucau

SEQ ID NO: 628906 - RNA, 23 nt, Artificial Sequence
  Synthetic
acuucugggccugagccuuucau

SEQ ID NO: 628907 - RNA, 24 nt, Artificial Sequence
  Synthetic
gacuucugggccugagccuuucau

SEQ ID NO: 628908 - RNA, 18 nt, Artificial Sequence
  Synthetic
uuuguuuuuuccuuucau

SEQ ID NO: 628909 - RNA, 19 nt, Artificial Sequence
  Synthetic
auuuguuuuuuccuuucau

SEQ ID NO: 628910 - RNA, 20 nt, Artificial Sequence
  Synthetic
cauuuguuuuuuccuuucau

SEQ ID NO: 628911 - RNA, 21 nt, Artificial Sequence
  Synthetic
ucauuuguuuuuuccuuucau

SEQ ID NO: 628912 - RNA, 22 nt, Artificial Sequence
  Synthetic
gucauuuguuuuuuccuuucau

SEQ ID NO: 628913 - RNA, 23 nt, Artificial Sequence
  Synthetic
agucauuuguuuuuuccuuucau

SEQ ID NO: 628914 - RNA, 24 nt, Artificial Sequence
  Synthetic
aagucauuuguuuuuuccuuucau

SEQ ID NO: 628915 - RNA, 18 nt, Artificial Sequence
  Synthetic
cuguguucaugcuuucau

SEQ ID NO: 628916 - RNA, 19 nt, Artificial Sequence
  Synthetic
ucuguguucaugcuuucau

SEQ ID NO: 628917 - RNA, 20 nt, Artificial Sequence
  Synthetic
uucuguguucaugcuuucau

SEQ ID NO: 628918 - RNA, 21 nt, Artificial Sequence
  Synthetic
auucuguguucaugcuuucau

SEQ ID NO: 628919 - RNA, 22 nt, Artificial Sequence
  Synthetic
aauucuguguucaugcuuucau

SEQ ID NO: 628920 - RNA, 23 nt, Artificial Sequence
  Synthetic
aaauucuguguucaugcuuucau

SEQ ID NO: 628921 - RNA, 24 nt, Artificial Sequence
  Synthetic
gaaauucuguguucaugcuuucau

SEQ ID NO: 628922 - RNA, 18 nt, Artificial Sequence
  Synthetic
aauaucucaugguuucau

SEQ ID NO: 628923 - RNA, 19 nt, Artificial Sequence
  Synthetic
aaauaucucaugguuucau

SEQ ID NO: 628924 - RNA, 20 nt, Artificial Sequence
  Synthetic
aaaauaucucaugguuucau

SEQ ID NO: 628925 - RNA, 21 nt, Artificial Sequence
  Synthetic
gaaaauaucucaugguuucau

SEQ ID NO: 628926 - RNA, 22 nt, Artificial Sequence
  Synthetic
agaaaauaucucaugguuucau

SEQ ID NO: 628927 - RNA, 23 nt, Artificial Sequence
  Synthetic
cagaaaauaucucaugguuucau

SEQ ID NO: 628928 - RNA, 24 nt, Artificial Sequence
  Synthetic
acagaaaauaucucaugguuucau

SEQ ID NO: 628929 - RNA, 18 nt, Artificial Sequence
  Synthetic
gagagcugaugguuucau

SEQ ID NO: 628930 - RNA, 19 nt, Artificial Sequence
  Synthetic
ugagagcugaugguuucau

SEQ ID NO: 628931 - RNA, 20 nt, Artificial Sequence
  Synthetic
augagagcugaugguuucau

SEQ ID NO: 628932 - RNA, 21 nt, Artificial Sequence
  Synthetic
caugagagcugaugguuucau

SEQ ID NO: 628933 - RNA, 22 nt, Artificial Sequence
  Synthetic
ucaugagagcugaugguuucau

SEQ ID NO: 628934 - RNA, 23 nt, Artificial Sequence
  Synthetic
cucaugagagcugaugguuucau

SEQ ID NO: 628935 - RNA, 24 nt, Artificial Sequence
  Synthetic
ucucaugagagcugaugguuucau

SEQ ID NO: 628936 - RNA, 18 nt, Artificial Sequence
  Synthetic
uaucagugaauguuucau

SEQ ID NO: 628937 - RNA, 19 nt, Artificial Sequence
  Synthetic
auaucagugaauguuucau

SEQ ID NO: 628938 - RNA, 20 nt, Artificial Sequence
  Synthetic
uauaucagugaauguuucau

SEQ ID NO: 628939 - RNA, 21 nt, Artificial Sequence
  Synthetic
uuauaucagugaauguuucau

SEQ ID NO: 628940 - RNA, 22 nt, Artificial Sequence
  Synthetic
cuuauaucagugaauguuucau

SEQ ID NO: 628941 - RNA, 23 nt, Artificial Sequence
  Synthetic
gcuuauaucagugaauguuucau

SEQ ID NO: 628942 - RNA, 24 nt, Artificial Sequence
  Synthetic
ggcuuauaucagugaauguuucau

SEQ ID NO: 628943 - RNA, 18 nt, Artificial Sequence
  Synthetic
gaaaaugagaauuuucau

SEQ ID NO: 628944 - RNA, 19 nt, Artificial Sequence
  Synthetic
ugaaaaugagaauuuucau

SEQ ID NO: 628945 - RNA, 20 nt, Artificial Sequence
  Synthetic
uugaaaaugagaauuuucau

SEQ ID NO: 628946 - RNA, 21 nt, Artificial Sequence
  Synthetic
uuugaaaaugagaauuuucau

SEQ ID NO: 628947 - RNA, 22 nt, Artificial Sequence
  Synthetic
guuugaaaaugagaauuuucau

SEQ ID NO: 628948 - RNA, 23 nt, Artificial Sequence
  Synthetic
uguuugaaaaugagaauuuucau

SEQ ID NO: 628949 - RNA, 24 nt, Artificial Sequence
  Synthetic
uuguuugaaaaugagaauuuucau

SEQ ID NO: 628950 - RNA, 18 nt, Artificial Sequence
  Synthetic
aacuaagaugauuuucau

SEQ ID NO: 628951 - RNA, 19 nt, Artificial Sequence
  Synthetic
aaacuaagaugauuuucau

SEQ ID NO: 628952 - RNA, 20 nt, Artificial Sequence
  Synthetic
aaaacuaagaugauuuucau

SEQ ID NO: 628953 - RNA, 21 nt, Artificial Sequence
  Synthetic
aaaaacuaagaugauuuucau

SEQ ID NO: 628954 - RNA, 22 nt, Artificial Sequence
  Synthetic
uaaaaacuaagaugauuuucau

SEQ ID NO: 628955 - RNA, 23 nt, Artificial Sequence
  Synthetic
auaaaaacuaagaugauuuucau

SEQ ID NO: 628956 - RNA, 24 nt, Artificial Sequence
  Synthetic
gauaaaaacuaagaugauuuucau

SEQ ID NO: 628957 - RNA, 18 nt, Artificial Sequence
  Synthetic
uuuuuuaaaacuuuucau

SEQ ID NO: 628958 - RNA, 19 nt, Artificial Sequence
  Synthetic
cuuuuuuaaaacuuuucau

SEQ ID NO: 628959 - RNA, 20 nt, Artificial Sequence
  Synthetic
acuuuuuuaaaacuuuucau

SEQ ID NO: 628960 - RNA, 21 nt, Artificial Sequence
  Synthetic
cacuuuuuuaaaacuuuucau

SEQ ID NO: 628961 - RNA, 22 nt, Artificial Sequence
  Synthetic
gcacuuuuuuaaaacuuuucau

SEQ ID NO: 628962 - RNA, 23 nt, Artificial Sequence
  Synthetic
ggcacuuuuuuaaaacuuuucau

SEQ ID NO: 628963 - RNA, 24 nt, Artificial Sequence
  Synthetic
aggcacuuuuuuaaaacuuuucau

SEQ ID NO: 628964 - RNA, 18 nt, Artificial Sequence
  Synthetic
cuguaguuuucuuuucau

SEQ ID NO: 628965 - RNA, 19 nt, Artificial Sequence
  Synthetic
ucuguaguuuucuuuucau

SEQ ID NO: 628966 - RNA, 20 nt, Artificial Sequence
  Synthetic
aucuguaguuuucuuuucau

SEQ ID NO: 628967 - RNA, 21 nt, Artificial Sequence
  Synthetic
gaucuguaguuuucuuuucau

SEQ ID NO: 628968 - RNA, 22 nt, Artificial Sequence
  Synthetic
agaucuguaguuuucuuuucau

SEQ ID NO: 628969 - RNA, 23 nt, Artificial Sequence
  Synthetic
cagaucuguaguuuucuuuucau

SEQ ID NO: 628970 - RNA, 24 nt, Artificial Sequence
  Synthetic
acagaucuguaguuuucuuuucau

SEQ ID NO: 628971 - RNA, 18 nt, Artificial Sequence
  Synthetic
ccuucacuuuguuuucau

SEQ ID NO: 628972 - RNA, 19 nt, Artificial Sequence
  Synthetic
gccuucacuuuguuuucau

SEQ ID NO: 628973 - RNA, 20 nt, Artificial Sequence
  Synthetic
ggccuucacuuuguuuucau

SEQ ID NO: 628974 - RNA, 21 nt, Artificial Sequence
  Synthetic
uggccuucacuuuguuuucau

SEQ ID NO: 628975 - RNA, 22 nt, Artificial Sequence
  Synthetic
guggccuucacuuuguuuucau

SEQ ID NO: 628976 - RNA, 23 nt, Artificial Sequence
  Synthetic
aguggccuucacuuuguuuucau

SEQ ID NO: 628977 - RNA, 24 nt, Artificial Sequence
  Synthetic
aaguggccuucacuuuguuuucau

SEQ ID NO: 628978 - RNA, 18 nt, Artificial Sequence
  Synthetic
aguuugaucuuuuuucau

SEQ ID NO: 628979 - RNA, 19 nt, Artificial Sequence
  Synthetic
uaguuugaucuuuuuucau

SEQ ID NO: 628980 - RNA, 20 nt, Artificial Sequence
  Synthetic
auaguuugaucuuuuuucau

SEQ ID NO: 628981 - RNA, 21 nt, Artificial Sequence
  Synthetic
cauaguuugaucuuuuuucau

SEQ ID NO: 628982 - RNA, 22 nt, Artificial Sequence
  Synthetic
acauaguuugaucuuuuuucau

SEQ ID NO: 628983 - RNA, 23 nt, Artificial Sequence
  Synthetic
aacauaguuugaucuuuuuucau

SEQ ID NO: 628984 - RNA, 24 nt, Artificial Sequence
  Synthetic
uaacauaguuugaucuuuuuucau

SEQ ID NO: 628985 - RNA, 18 nt, Artificial Sequence
  Synthetic
uguguuuuuuuuuuucau

SEQ ID NO: 628986 - RNA, 19 nt, Artificial Sequence
  Synthetic
cuguguuuuuuuuuuucau

SEQ ID NO: 628987 - RNA, 20 nt, Artificial Sequence
  Synthetic
acuguguuuuuuuuuuucau

SEQ ID NO: 628988 - RNA, 21 nt, Artificial Sequence
  Synthetic
aacuguguuuuuuuuuuucau

SEQ ID NO: 628989 - RNA, 22 nt, Artificial Sequence
  Synthetic
gaacuguguuuuuuuuuuucau

SEQ ID NO: 628990 - RNA, 23 nt, Artificial Sequence
  Synthetic
ugaacuguguuuuuuuuuuucau

SEQ ID NO: 628991 - RNA, 24 nt, Artificial Sequence
  Synthetic
uugaacuguguuuuuuuuuuucau

SEQ ID NO: 628992 - RNA, 18 nt, Artificial Sequence
  Synthetic
auuuuaaaacaaaaagau

SEQ ID NO: 628993 - RNA, 19 nt, Artificial Sequence
  Synthetic
uauuuuaaaacaaaaagau

SEQ ID NO: 628994 - RNA, 20 nt, Artificial Sequence
  Synthetic
uuauuuuaaaacaaaaagau

SEQ ID NO: 628995 - RNA, 21 nt, Artificial Sequence
  Synthetic
auuauuuuaaaacaaaaagau

SEQ ID NO: 628996 - RNA, 22 nt, Artificial Sequence
  Synthetic
cauuauuuuaaaacaaaaagau

SEQ ID NO: 628997 - RNA, 23 nt, Artificial Sequence
  Synthetic
ccauuauuuuaaaacaaaaagau

SEQ ID NO: 628998 - RNA, 24 nt, Artificial Sequence
  Synthetic
uccauuauuuuaaaacaaaaagau

SEQ ID NO: 628999 - RNA, 18 nt, Artificial Sequence
  Synthetic
gaaaauuggacaaaagau

SEQ ID NO: 629000 - RNA, 19 nt, Artificial Sequence
  Synthetic
agaaaauuggacaaaagau

SEQ ID NO: 629001 - RNA, 20 nt, Artificial Sequence
  Synthetic
aagaaaauuggacaaaagau

SEQ ID NO: 629002 - RNA, 21 nt, Artificial Sequence
  Synthetic
aaagaaaauuggacaaaagau

SEQ ID NO: 629003 - RNA, 22 nt, Artificial Sequence
  Synthetic
aaaagaaaauuggacaaaagau

SEQ ID NO: 629004 - RNA, 23 nt, Artificial Sequence
  Synthetic
caaaagaaaauuggacaaaagau

SEQ ID NO: 629005 - RNA, 24 nt, Artificial Sequence
  Synthetic
ccaaaagaaaauuggacaaaagau

SEQ ID NO: 629006 - RNA, 18 nt, Artificial Sequence
  Synthetic
ggguuugugacaaaagau

SEQ ID NO: 629007 - RNA, 19 nt, Artificial Sequence
  Synthetic
gggguuugugacaaaagau

SEQ ID NO: 629008 - RNA, 20 nt, Artificial Sequence
  Synthetic
ugggguuugugacaaaagau

SEQ ID NO: 629009 - RNA, 21 nt, Artificial Sequence
  Synthetic
uugggguuugugacaaaagau

SEQ ID NO: 629010 - RNA, 22 nt, Artificial Sequence
  Synthetic
auugggguuugugacaaaagau

SEQ ID NO: 629011 - RNA, 23 nt, Artificial Sequence
  Synthetic
uauugggguuugugacaaaagau

SEQ ID NO: 629012 - RNA, 24 nt, Artificial Sequence
  Synthetic
auauugggguuugugacaaaagau

SEQ ID NO: 629013 - RNA, 18 nt, Artificial Sequence
  Synthetic
aauuccuggagaaaagau

SEQ ID NO: 629014 - RNA, 19 nt, Artificial Sequence
  Synthetic
aaauuccuggagaaaagau

SEQ ID NO: 629015 - RNA, 20 nt, Artificial Sequence
  Synthetic
caaauuccuggagaaaagau

SEQ ID NO: 629016 - RNA, 21 nt, Artificial Sequence
  Synthetic
ucaaauuccuggagaaaagau

SEQ ID NO: 629017 - RNA, 22 nt, Artificial Sequence
  Synthetic
aucaaauuccuggagaaaagau

SEQ ID NO: 629018 - RNA, 23 nt, Artificial Sequence
  Synthetic
aaucaaauuccuggagaaaagau

SEQ ID NO: 629019 - RNA, 24 nt, Artificial Sequence
  Synthetic
caaucaaauuccuggagaaaagau

SEQ ID NO: 629020 - RNA, 18 nt, Artificial Sequence
  Synthetic
auccauaaauuaaaagau

SEQ ID NO: 629021 - RNA, 19 nt, Artificial Sequence
  Synthetic
aauccauaaauuaaaagau

SEQ ID NO: 629022 - RNA, 20 nt, Artificial Sequence
  Synthetic
aaauccauaaauuaaaagau

SEQ ID NO: 629023 - RNA, 21 nt, Artificial Sequence
  Synthetic
aaaauccauaaauuaaaagau

SEQ ID NO: 629024 - RNA, 22 nt, Artificial Sequence
  Synthetic
uaaaauccauaaauuaaaagau

SEQ ID NO: 629025 - RNA, 23 nt, Artificial Sequence
  Synthetic
auaaaauccauaaauuaaaagau

SEQ ID NO: 629026 - RNA, 24 nt, Artificial Sequence
  Synthetic
uauaaaauccauaaauuaaaagau

SEQ ID NO: 629027 - RNA, 18 nt, Artificial Sequence
  Synthetic
gaaaauauuuuaaaagau

SEQ ID NO: 629028 - RNA, 19 nt, Artificial Sequence
  Synthetic
ugaaaauauuuuaaaagau

SEQ ID NO: 629029 - RNA, 20 nt, Artificial Sequence
  Synthetic
augaaaauauuuuaaaagau

SEQ ID NO: 629030 - RNA, 21 nt, Artificial Sequence
  Synthetic
caugaaaauauuuuaaaagau

SEQ ID NO: 629031 - RNA, 22 nt, Artificial Sequence
  Synthetic
acaugaaaauauuuuaaaagau

SEQ ID NO: 629032 - RNA, 23 nt, Artificial Sequence
  Synthetic
aacaugaaaauauuuuaaaagau

SEQ ID NO: 629033 - RNA, 24 nt, Artificial Sequence
  Synthetic
aaacaugaaaauauuuuaaaagau

SEQ ID NO: 629034 - RNA, 18 nt, Artificial Sequence
  Synthetic
gaagaaaauaacaaagau

SEQ ID NO: 629035 - RNA, 19 nt, Artificial Sequence
  Synthetic
agaagaaaauaacaaagau

SEQ ID NO: 629036 - RNA, 20 nt, Artificial Sequence
  Synthetic
aagaagaaaauaacaaagau

SEQ ID NO: 629037 - RNA, 21 nt, Artificial Sequence
  Synthetic
aaagaagaaaauaacaaagau

SEQ ID NO: 629038 - RNA, 22 nt, Artificial Sequence
  Synthetic
gaaagaagaaaauaacaaagau

SEQ ID NO: 629039 - RNA, 23 nt, Artificial Sequence
  Synthetic
agaaagaagaaaauaacaaagau

SEQ ID NO: 629040 - RNA, 24 nt, Artificial Sequence
  Synthetic
cagaaagaagaaaauaacaaagau

SEQ ID NO: 629041 - RNA, 18 nt, Artificial Sequence
  Synthetic
aaaagaaauaacaaagau

SEQ ID NO: 629042 - RNA, 19 nt, Artificial Sequence
  Synthetic
gaaaagaaauaacaaagau

SEQ ID NO: 629043 - RNA, 20 nt, Artificial Sequence
  Synthetic
agaaaagaaauaacaaagau

SEQ ID NO: 629044 - RNA, 21 nt, Artificial Sequence
  Synthetic
aagaaaagaaauaacaaagau

SEQ ID NO: 629045 - RNA, 22 nt, Artificial Sequence
  Synthetic
gaagaaaagaaauaacaaagau

SEQ ID NO: 629046 - RNA, 23 nt, Artificial Sequence
  Synthetic
agaagaaaagaaauaacaaagau

SEQ ID NO: 629047 - RNA, 24 nt, Artificial Sequence
  Synthetic
cagaagaaaagaaauaacaaagau

SEQ ID NO: 629048 - RNA, 18 nt, Artificial Sequence
  Synthetic
gcugugcuacacaaagau

SEQ ID NO: 629049 - RNA, 19 nt, Artificial Sequence
  Synthetic
agcugugcuacacaaagau

SEQ ID NO: 629050 - RNA, 20 nt, Artificial Sequence
  Synthetic
cagcugugcuacacaaagau

SEQ ID NO: 629051 - RNA, 21 nt, Artificial Sequence
  Synthetic
ucagcugugcuacacaaagau

SEQ ID NO: 629052 - RNA, 22 nt, Artificial Sequence
  Synthetic
aucagcugugcuacacaaagau

SEQ ID NO: 629053 - RNA, 23 nt, Artificial Sequence
  Synthetic
aaucagcugugcuacacaaagau

SEQ ID NO: 629054 - RNA, 24 nt, Artificial Sequence
  Synthetic
aaaucagcugugcuacacaaagau

SEQ ID NO: 629055 - RNA, 18 nt, Artificial Sequence
  Synthetic
gaucacugagacaaagau

SEQ ID NO: 629056 - RNA, 19 nt, Artificial Sequence
  Synthetic
agaucacugagacaaagau

SEQ ID NO: 629057 - RNA, 20 nt, Artificial Sequence
  Synthetic
gagaucacugagacaaagau

SEQ ID NO: 629058 - RNA, 21 nt, Artificial Sequence
  Synthetic
agagaucacugagacaaagau

SEQ ID NO: 629059 - RNA, 22 nt, Artificial Sequence
  Synthetic
cagagaucacugagacaaagau

SEQ ID NO: 629060 - RNA, 23 nt, Artificial Sequence
  Synthetic
acagagaucacugagacaaagau

SEQ ID NO: 629061 - RNA, 24 nt, Artificial Sequence
  Synthetic
cacagagaucacugagacaaagau

SEQ ID NO: 629062 - RNA, 18 nt, Artificial Sequence
  Synthetic
ccuguguguagcaaagau

SEQ ID NO: 629063 - RNA, 19 nt, Artificial Sequence
  Synthetic
gccuguguguagcaaagau

SEQ ID NO: 629064 - RNA, 20 nt, Artificial Sequence
  Synthetic
agccuguguguagcaaagau

SEQ ID NO: 629065 - RNA, 21 nt, Artificial Sequence
  Synthetic
gagccuguguguagcaaagau

SEQ ID NO: 629066 - RNA, 22 nt, Artificial Sequence
  Synthetic
ugagccuguguguagcaaagau

SEQ ID NO: 629067 - RNA, 23 nt, Artificial Sequence
  Synthetic
gugagccuguguguagcaaagau

SEQ ID NO: 629068 - RNA, 24 nt, Artificial Sequence
  Synthetic
ugugagccuguguguagcaaagau

SEQ ID NO: 629069 - RNA, 18 nt, Artificial Sequence
  Synthetic
cagaacuuuuucaaagau

SEQ ID NO: 629070 - RNA, 19 nt, Artificial Sequence
  Synthetic
acagaacuuuuucaaagau

SEQ ID NO: 629071 - RNA, 20 nt, Artificial Sequence
  Synthetic
uacagaacuuuuucaaagau

SEQ ID NO: 629072 - RNA, 21 nt, Artificial Sequence
  Synthetic
uuacagaacuuuuucaaagau

SEQ ID NO: 629073 - RNA, 22 nt, Artificial Sequence
  Synthetic
guuacagaacuuuuucaaagau

SEQ ID NO: 629074 - RNA, 23 nt, Artificial Sequence
  Synthetic
aguuacagaacuuuuucaaagau

SEQ ID NO: 629075 - RNA, 24 nt, Artificial Sequence
  Synthetic
uaguuacagaacuuuuucaaagau

SEQ ID NO: 629076 - RNA, 18 nt, Artificial Sequence
  Synthetic
cacaugagauggaaagau

SEQ ID NO: 629077 - RNA, 19 nt, Artificial Sequence
  Synthetic
ccacaugagauggaaagau

SEQ ID NO: 629078 - RNA, 20 nt, Artificial Sequence
  Synthetic
accacaugagauggaaagau

SEQ ID NO: 629079 - RNA, 21 nt, Artificial Sequence
  Synthetic
aaccacaugagauggaaagau

SEQ ID NO: 629080 - RNA, 22 nt, Artificial Sequence
  Synthetic
aaaccacaugagauggaaagau

SEQ ID NO: 629081 - RNA, 23 nt, Artificial Sequence
  Synthetic
gaaaccacaugagauggaaagau

SEQ ID NO: 629082 - RNA, 24 nt, Artificial Sequence
  Synthetic
agaaaccacaugagauggaaagau

SEQ ID NO: 629083 - RNA, 18 nt, Artificial Sequence
  Synthetic
ggugguagauggaaagau

SEQ ID NO: 629084 - RNA, 19 nt, Artificial Sequence
  Synthetic
gggugguagauggaaagau

SEQ ID NO: 629085 - RNA, 20 nt, Artificial Sequence
  Synthetic
ugggugguagauggaaagau

SEQ ID NO: 629086 - RNA, 21 nt, Artificial Sequence
  Synthetic
gugggugguagauggaaagau

SEQ ID NO: 629087 - RNA, 22 nt, Artificial Sequence
  Synthetic
ggugggugguagauggaaagau

SEQ ID NO: 629088 - RNA, 23 nt, Artificial Sequence
  Synthetic
uggugggugguagauggaaagau

SEQ ID NO: 629089 - RNA, 24 nt, Artificial Sequence
  Synthetic
auggugggugguagauggaaagau

SEQ ID NO: 629090 - RNA, 18 nt, Artificial Sequence
  Synthetic
ugguauuuaaauaaagau

SEQ ID NO: 629091 - RNA, 19 nt, Artificial Sequence
  Synthetic
gugguauuuaaauaaagau

SEQ ID NO: 629092 - RNA, 20 nt, Artificial Sequence
  Synthetic
ggugguauuuaaauaaagau

SEQ ID NO: 629093 - RNA, 21 nt, Artificial Sequence
  Synthetic
aggugguauuuaaauaaagau

SEQ ID NO: 629094 - RNA, 22 nt, Artificial Sequence
  Synthetic
uaggugguauuuaaauaaagau

SEQ ID NO: 629095 - RNA, 23 nt, Artificial Sequence
  Synthetic
guaggugguauuuaaauaaagau

SEQ ID NO: 629096 - RNA, 24 nt, Artificial Sequence
  Synthetic
aguaggugguauuuaaauaaagau

SEQ ID NO: 629097 - RNA, 18 nt, Artificial Sequence
  Synthetic
gaaagaaauaauaaagau

SEQ ID NO: 629098 - RNA, 19 nt, Artificial Sequence
  Synthetic
agaaagaaauaauaaagau

SEQ ID NO: 629099 - RNA, 20 nt, Artificial Sequence
  Synthetic
aagaaagaaauaauaaagau

SEQ ID NO: 629100 - RNA, 21 nt, Artificial Sequence
  Synthetic
gaagaaagaaauaauaaagau

SEQ ID NO: 629101 - RNA, 22 nt, Artificial Sequence
  Synthetic
ggaagaaagaaauaauaaagau

SEQ ID NO: 629102 - RNA, 23 nt, Artificial Sequence
  Synthetic
uggaagaaagaaauaauaaagau

SEQ ID NO: 629103 - RNA, 24 nt, Artificial Sequence
  Synthetic
guggaagaaagaaauaauaaagau

SEQ ID NO: 629104 - RNA, 18 nt, Artificial Sequence
  Synthetic
caguuuuuaaguaaagau

SEQ ID NO: 629105 - RNA, 19 nt, Artificial Sequence
  Synthetic
gcaguuuuuaaguaaagau

SEQ ID NO: 629106 - RNA, 20 nt, Artificial Sequence
  Synthetic
ggcaguuuuuaaguaaagau

SEQ ID NO: 629107 - RNA, 21 nt, Artificial Sequence
  Synthetic
aggcaguuuuuaaguaaagau

SEQ ID NO: 629108 - RNA, 22 nt, Artificial Sequence
  Synthetic
aaggcaguuuuuaaguaaagau

SEQ ID NO: 629109 - RNA, 23 nt, Artificial Sequence
  Synthetic
gaaggcaguuuuuaaguaaagau

SEQ ID NO: 629110 - RNA, 24 nt, Artificial Sequence
  Synthetic
ggaaggcaguuuuuaaguaaagau

SEQ ID NO: 629111 - RNA, 18 nt, Artificial Sequence
  Synthetic
augacaucgaguaaagau

SEQ ID NO: 629112 - RNA, 19 nt, Artificial Sequence
  Synthetic
gaugacaucgaguaaagau

SEQ ID NO: 629113 - RNA, 20 nt, Artificial Sequence
  Synthetic
ugaugacaucgaguaaagau

SEQ ID NO: 629114 - RNA, 21 nt, Artificial Sequence
  Synthetic
augaugacaucgaguaaagau

SEQ ID NO: 629115 - RNA, 22 nt, Artificial Sequence
  Synthetic
gaugaugacaucgaguaaagau

SEQ ID NO: 629116 - RNA, 23 nt, Artificial Sequence
  Synthetic
ugaugaugacaucgaguaaagau

SEQ ID NO: 629117 - RNA, 24 nt, Artificial Sequence
  Synthetic
cugaugaugacaucgaguaaagau

SEQ ID NO: 629118 - RNA, 18 nt, Artificial Sequence
  Synthetic
gguuuuggguguaaagau

SEQ ID NO: 629119 - RNA, 19 nt, Artificial Sequence
  Synthetic
ugguuuuggguguaaagau

SEQ ID NO: 629120 - RNA, 20 nt, Artificial Sequence
  Synthetic
uugguuuuggguguaaagau

SEQ ID NO: 629121 - RNA, 21 nt, Artificial Sequence
  Synthetic
uuugguuuuggguguaaagau

SEQ ID NO: 629122 - RNA, 22 nt, Artificial Sequence
  Synthetic
uuuugguuuuggguguaaagau

SEQ ID NO: 629123 - RNA, 23 nt, Artificial Sequence
  Synthetic
cuuuugguuuuggguguaaagau

SEQ ID NO: 629124 - RNA, 24 nt, Artificial Sequence
  Synthetic
acuuuugguuuuggguguaaagau

SEQ ID NO: 629125 - RNA, 18 nt, Artificial Sequence
  Synthetic
uacuagggaauuaaagau

SEQ ID NO: 629126 - RNA, 19 nt, Artificial Sequence
  Synthetic
cuacuagggaauuaaagau

SEQ ID NO: 629127 - RNA, 20 nt, Artificial Sequence
  Synthetic
ucuacuagggaauuaaagau

SEQ ID NO: 629128 - RNA, 21 nt, Artificial Sequence
  Synthetic
aucuacuagggaauuaaagau

SEQ ID NO: 629129 - RNA, 22 nt, Artificial Sequence
  Synthetic
caucuacuagggaauuaaagau

SEQ ID NO: 629130 - RNA, 23 nt, Artificial Sequence
  Synthetic
acaucuacuagggaauuaaagau

SEQ ID NO: 629131 - RNA, 24 nt, Artificial Sequence
  Synthetic
gacaucuacuagggaauuaaagau

SEQ ID NO: 629132 - RNA, 18 nt, Artificial Sequence
  Synthetic
aauugauuuuuuaaagau

SEQ ID NO: 629133 - RNA, 19 nt, Artificial Sequence
  Synthetic
aaauugauuuuuuaaagau

SEQ ID NO: 629134 - RNA, 20 nt, Artificial Sequence
  Synthetic
gaaauugauuuuuuaaagau

SEQ ID NO: 629135 - RNA, 21 nt, Artificial Sequence
  Synthetic
ggaaauugauuuuuuaaagau

SEQ ID NO: 629136 - RNA, 22 nt, Artificial Sequence
  Synthetic
cggaaauugauuuuuuaaagau

SEQ ID NO: 629137 - RNA, 23 nt, Artificial Sequence
  Synthetic
ucggaaauugauuuuuuaaagau

SEQ ID NO: 629138 - RNA, 24 nt, Artificial Sequence
  Synthetic
gucggaaauugauuuuuuaaagau

SEQ ID NO: 629139 - RNA, 18 nt, Artificial Sequence
  Synthetic
aaagcaacaaaacaagau

SEQ ID NO: 629140 - RNA, 19 nt, Artificial Sequence
  Synthetic
aaaagcaacaaaacaagau

SEQ ID NO: 629141 - RNA, 20 nt, Artificial Sequence
  Synthetic
caaaagcaacaaaacaagau

SEQ ID NO: 629142 - RNA, 21 nt, Artificial Sequence
  Synthetic
acaaaagcaacaaaacaagau

SEQ ID NO: 629143 - RNA, 22 nt, Artificial Sequence
  Synthetic
aacaaaagcaacaaaacaagau

SEQ ID NO: 629144 - RNA, 23 nt, Artificial Sequence
  Synthetic
uaacaaaagcaacaaaacaagau

SEQ ID NO: 629145 - RNA, 24 nt, Artificial Sequence
  Synthetic
uuaacaaaagcaacaaaacaagau

SEQ ID NO: 629146 - RNA, 18 nt, Artificial Sequence
  Synthetic
aauauauuugcacaagau

SEQ ID NO: 629147 - RNA, 19 nt, Artificial Sequence
  Synthetic
uaauauauuugcacaagau

SEQ ID NO: 629148 - RNA, 20 nt, Artificial Sequence
  Synthetic
auaauauauuugcacaagau

SEQ ID NO: 629149 - RNA, 21 nt, Artificial Sequence
  Synthetic
uauaauauauuugcacaagau

SEQ ID NO: 629150 - RNA, 22 nt, Artificial Sequence
  Synthetic
uuauaauauauuugcacaagau

SEQ ID NO: 629151 - RNA, 23 nt, Artificial Sequence
  Synthetic
auuauaauauauuugcacaagau

SEQ ID NO: 629152 - RNA, 24 nt, Artificial Sequence
  Synthetic
aauuauaauauauuugcacaagau

SEQ ID NO: 629153 - RNA, 18 nt, Artificial Sequence
  Synthetic
ugauuuacaagacaagau

SEQ ID NO: 629154 - RNA, 19 nt, Artificial Sequence
  Synthetic
augauuuacaagacaagau

SEQ ID NO: 629155 - RNA, 20 nt, Artificial Sequence
  Synthetic
uaugauuuacaagacaagau

SEQ ID NO: 629156 - RNA, 21 nt, Artificial Sequence
  Synthetic
auaugauuuacaagacaagau

SEQ ID NO: 629157 - RNA, 22 nt, Artificial Sequence
  Synthetic
gauaugauuuacaagacaagau

SEQ ID NO: 629158 - RNA, 23 nt, Artificial Sequence
  Synthetic
agauaugauuuacaagacaagau

SEQ ID NO: 629159 - RNA, 24 nt, Artificial Sequence
  Synthetic
cagauaugauuuacaagacaagau

SEQ ID NO: 629160 - RNA, 18 nt, Artificial Sequence
  Synthetic
uugcuuuuauuacaagau

SEQ ID NO: 629161 - RNA, 19 nt, Artificial Sequence
  Synthetic
guugcuuuuauuacaagau

SEQ ID NO: 629162 - RNA, 20 nt, Artificial Sequence
  Synthetic
aguugcuuuuauuacaagau

SEQ ID NO: 629163 - RNA, 21 nt, Artificial Sequence
  Synthetic
gaguugcuuuuauuacaagau

SEQ ID NO: 629164 - RNA, 22 nt, Artificial Sequence
  Synthetic
ugaguugcuuuuauuacaagau

SEQ ID NO: 629165 - RNA, 23 nt, Artificial Sequence
  Synthetic
augaguugcuuuuauuacaagau

SEQ ID NO: 629166 - RNA, 24 nt, Artificial Sequence
  Synthetic
aaugaguugcuuuuauuacaagau

SEQ ID NO: 629167 - RNA, 18 nt, Artificial Sequence
  Synthetic
auucacaauagccaagau

SEQ ID NO: 629168 - RNA, 19 nt, Artificial Sequence
  Synthetic
uauucacaauagccaagau

SEQ ID NO: 629169 - RNA, 20 nt, Artificial Sequence
  Synthetic
cuauucacaauagccaagau

SEQ ID NO: 629170 - RNA, 21 nt, Artificial Sequence
  Synthetic
gcuauucacaauagccaagau

SEQ ID NO: 629171 - RNA, 22 nt, Artificial Sequence
  Synthetic
cgcuauucacaauagccaagau

SEQ ID NO: 629172 - RNA, 23 nt, Artificial Sequence
  Synthetic
gcgcuauucacaauagccaagau

SEQ ID NO: 629173 - RNA, 24 nt, Artificial Sequence
  Synthetic
agcgcuauucacaauagccaagau

SEQ ID NO: 629174 - RNA, 18 nt, Artificial Sequence
  Synthetic
auuugcaauagccaagau

SEQ ID NO: 629175 - RNA, 19 nt, Artificial Sequence
  Synthetic
uauuugcaauagccaagau

SEQ ID NO: 629176 - RNA, 20 nt, Artificial Sequence
  Synthetic
cuauuugcaauagccaagau

SEQ ID NO: 629177 - RNA, 21 nt, Artificial Sequence
  Synthetic
acuauuugcaauagccaagau

SEQ ID NO: 629178 - RNA, 22 nt, Artificial Sequence
  Synthetic
cacuauuugcaauagccaagau

SEQ ID NO: 629179 - RNA, 23 nt, Artificial Sequence
  Synthetic
gcacuauuugcaauagccaagau

SEQ ID NO: 629180 - RNA, 24 nt, Artificial Sequence
  Synthetic
ggcacuauuugcaauagccaagau

SEQ ID NO: 629181 - RNA, 18 nt, Artificial Sequence
  Synthetic
guucauaauagccaagau

SEQ ID NO: 629182 - RNA, 19 nt, Artificial Sequence
  Synthetic
uguucauaauagccaagau

SEQ ID NO: 629183 - RNA, 20 nt, Artificial Sequence
  Synthetic
cuguucauaauagccaagau

SEQ ID NO: 629184 - RNA, 21 nt, Artificial Sequence
  Synthetic
acuguucauaauagccaagau

SEQ ID NO: 629185 - RNA, 22 nt, Artificial Sequence
  Synthetic
cacuguucauaauagccaagau

SEQ ID NO: 629186 - RNA, 23 nt, Artificial Sequence
  Synthetic
gcacuguucauaauagccaagau

SEQ ID NO: 629187 - RNA, 24 nt, Artificial Sequence
  Synthetic
agcacuguucauaauagccaagau

SEQ ID NO: 629188 - RNA, 18 nt, Artificial Sequence
  Synthetic
ucauuaggcauccaagau

SEQ ID NO: 629189 - RNA, 19 nt, Artificial Sequence
  Synthetic
cucauuaggcauccaagau

SEQ ID NO: 629190 - RNA, 20 nt, Artificial Sequence
  Synthetic
gcucauuaggcauccaagau

SEQ ID NO: 629191 - RNA, 21 nt, Artificial Sequence
  Synthetic
ugcucauuaggcauccaagau

SEQ ID NO: 629192 - RNA, 22 nt, Artificial Sequence
  Synthetic
augcucauuaggcauccaagau

SEQ ID NO: 629193 - RNA, 23 nt, Artificial Sequence
  Synthetic
gaugcucauuaggcauccaagau

SEQ ID NO: 629194 - RNA, 24 nt, Artificial Sequence
  Synthetic
agaugcucauuaggcauccaagau

SEQ ID NO: 629195 - RNA, 18 nt, Artificial Sequence
  Synthetic
guaguaagccuccaagau

SEQ ID NO: 629196 - RNA, 19 nt, Artificial Sequence
  Synthetic
uguaguaagccuccaagau

SEQ ID NO: 629197 - RNA, 20 nt, Artificial Sequence
  Synthetic
cuguaguaagccuccaagau

SEQ ID NO: 629198 - RNA, 21 nt, Artificial Sequence
  Synthetic
gcuguaguaagccuccaagau

SEQ ID NO: 629199 - RNA, 22 nt, Artificial Sequence
  Synthetic
ugcuguaguaagccuccaagau

SEQ ID NO: 629200 - RNA, 23 nt, Artificial Sequence
  Synthetic
cugcuguaguaagccuccaagau

SEQ ID NO: 629201 - RNA, 24 nt, Artificial Sequence
  Synthetic
ucugcuguaguaagccuccaagau

SEQ ID NO: 629202 - RNA, 18 nt, Artificial Sequence
  Synthetic
agaaauguauuccaagau

SEQ ID NO: 629203 - RNA, 19 nt, Artificial Sequence
  Synthetic
aagaaauguauuccaagau

SEQ ID NO: 629204 - RNA, 20 nt, Artificial Sequence
  Synthetic
aaagaaauguauuccaagau

SEQ ID NO: 629205 - RNA, 21 nt, Artificial Sequence
  Synthetic
aaaagaaauguauuccaagau

SEQ ID NO: 629206 - RNA, 22 nt, Artificial Sequence
  Synthetic
uaaaagaaauguauuccaagau

SEQ ID NO: 629207 - RNA, 23 nt, Artificial Sequence
  Synthetic
auaaaagaaauguauuccaagau

SEQ ID NO: 629208 - RNA, 24 nt, Artificial Sequence
  Synthetic
gauaaaagaaauguauuccaagau

SEQ ID NO: 629209 - RNA, 18 nt, Artificial Sequence
  Synthetic
guucacaacaggcaagau

SEQ ID NO: 629210 - RNA, 19 nt, Artificial Sequence
  Synthetic
uguucacaacaggcaagau

SEQ ID NO: 629211 - RNA, 20 nt, Artificial Sequence
  Synthetic
cuguucacaacaggcaagau

SEQ ID NO: 629212 - RNA, 21 nt, Artificial Sequence
  Synthetic
acuguucacaacaggcaagau

SEQ ID NO: 629213 - RNA, 22 nt, Artificial Sequence
  Synthetic
cacuguucacaacaggcaagau

SEQ ID NO: 629214 - RNA, 23 nt, Artificial Sequence
  Synthetic
gcacuguucacaacaggcaagau

SEQ ID NO: 629215 - RNA, 24 nt, Artificial Sequence
  Synthetic
agcacuguucacaacaggcaagau

SEQ ID NO: 629216 - RNA, 18 nt, Artificial Sequence
  Synthetic
augaacguuaugcaagau

SEQ ID NO: 629217 - RNA, 19 nt, Artificial Sequence
  Synthetic
aaugaacguuaugcaagau

SEQ ID NO: 629218 - RNA, 20 nt, Artificial Sequence
  Synthetic
aaaugaacguuaugcaagau

SEQ ID NO: 629219 - RNA, 21 nt, Artificial Sequence
  Synthetic
caaaugaacguuaugcaagau

SEQ ID NO: 629220 - RNA, 22 nt, Artificial Sequence
  Synthetic
gcaaaugaacguuaugcaagau

SEQ ID NO: 629221 - RNA, 23 nt, Artificial Sequence
  Synthetic
ugcaaaugaacguuaugcaagau

SEQ ID NO: 629222 - RNA, 24 nt, Artificial Sequence
  Synthetic
gugcaaaugaacguuaugcaagau

SEQ ID NO: 629223 - RNA, 18 nt, Artificial Sequence
  Synthetic
aauuugcaauugcaagau

SEQ ID NO: 629224 - RNA, 19 nt, Artificial Sequence
  Synthetic
caauuugcaauugcaagau

SEQ ID NO: 629225 - RNA, 20 nt, Artificial Sequence
  Synthetic
acaauuugcaauugcaagau

SEQ ID NO: 629226 - RNA, 21 nt, Artificial Sequence
  Synthetic
cacaauuugcaauugcaagau

SEQ ID NO: 629227 - RNA, 22 nt, Artificial Sequence
  Synthetic
gcacaauuugcaauugcaagau

SEQ ID NO: 629228 - RNA, 23 nt, Artificial Sequence
  Synthetic
agcacaauuugcaauugcaagau

SEQ ID NO: 629229 - RNA, 24 nt, Artificial Sequence
  Synthetic
cagcacaauuugcaauugcaagau

SEQ ID NO: 629230 - RNA, 18 nt, Artificial Sequence
  Synthetic
guuucaguuuugcaagau

SEQ ID NO: 629231 - RNA, 19 nt, Artificial Sequence
  Synthetic
aguuucaguuuugcaagau

SEQ ID NO: 629232 - RNA, 20 nt, Artificial Sequence
  Synthetic
gaguuucaguuuugcaagau

SEQ ID NO: 629233 - RNA, 21 nt, Artificial Sequence
  Synthetic
agaguuucaguuuugcaagau

SEQ ID NO: 629234 - RNA, 22 nt, Artificial Sequence
  Synthetic
uagaguuucaguuuugcaagau

SEQ ID NO: 629235 - RNA, 23 nt, Artificial Sequence
  Synthetic
auagaguuucaguuuugcaagau

SEQ ID NO: 629236 - RNA, 24 nt, Artificial Sequence
  Synthetic
cauagaguuucaguuuugcaagau

SEQ ID NO: 629237 - RNA, 18 nt, Artificial Sequence
  Synthetic
gcagauuuacaucaagau

SEQ ID NO: 629238 - RNA, 19 nt, Artificial Sequence
  Synthetic
ugcagauuuacaucaagau

SEQ ID NO: 629239 - RNA, 20 nt, Artificial Sequence
  Synthetic
uugcagauuuacaucaagau

SEQ ID NO: 629240 - RNA, 21 nt, Artificial Sequence
  Synthetic
auugcagauuuacaucaagau

SEQ ID NO: 629241 - RNA, 22 nt, Artificial Sequence
  Synthetic
cauugcagauuuacaucaagau

SEQ ID NO: 629242 - RNA, 23 nt, Artificial Sequence
  Synthetic
ucauugcagauuuacaucaagau

SEQ ID NO: 629243 - RNA, 24 nt, Artificial Sequence
  Synthetic
aucauugcagauuuacaucaagau

SEQ ID NO: 629244 - RNA, 18 nt, Artificial Sequence
  Synthetic
uggagggauguucaagau

SEQ ID NO: 629245 - RNA, 19 nt, Artificial Sequence
  Synthetic
cuggagggauguucaagau

SEQ ID NO: 629246 - RNA, 20 nt, Artificial Sequence
  Synthetic
gcuggagggauguucaagau

SEQ ID NO: 629247 - RNA, 21 nt, Artificial Sequence
  Synthetic
ugcuggagggauguucaagau

SEQ ID NO: 629248 - RNA, 22 nt, Artificial Sequence
  Synthetic
cugcuggagggauguucaagau

SEQ ID NO: 629249 - RNA, 23 nt, Artificial Sequence
  Synthetic
ccugcuggagggauguucaagau

SEQ ID NO: 629250 - RNA, 24 nt, Artificial Sequence
  Synthetic
gccugcuggagggauguucaagau

SEQ ID NO: 629251 - RNA, 18 nt, Artificial Sequence
  Synthetic
aauuccugcuuucaagau

SEQ ID NO: 629252 - RNA, 19 nt, Artificial Sequence
  Synthetic
aaauuccugcuuucaagau

SEQ ID NO: 629253 - RNA, 20 nt, Artificial Sequence
  Synthetic
caaauuccugcuuucaagau

SEQ ID NO: 629254 - RNA, 21 nt, Artificial Sequence
  Synthetic
ccaaauuccugcuuucaagau

SEQ ID NO: 629255 - RNA, 22 nt, Artificial Sequence
  Synthetic
uccaaauuccugcuuucaagau

SEQ ID NO: 629256 - RNA, 23 nt, Artificial Sequence
  Synthetic
auccaaauuccugcuuucaagau

SEQ ID NO: 629257 - RNA, 24 nt, Artificial Sequence
  Synthetic
aauccaaauuccugcuuucaagau

SEQ ID NO: 629258 - RNA, 18 nt, Artificial Sequence
  Synthetic
ccuacacagaaagaagau

SEQ ID NO: 629259 - RNA, 19 nt, Artificial Sequence
  Synthetic
gccuacacagaaagaagau

SEQ ID NO: 629260 - RNA, 20 nt, Artificial Sequence
  Synthetic
ugccuacacagaaagaagau

SEQ ID NO: 629261 - RNA, 21 nt, Artificial Sequence
  Synthetic
augccuacacagaaagaagau

SEQ ID NO: 629262 - RNA, 22 nt, Artificial Sequence
  Synthetic
gaugccuacacagaaagaagau

SEQ ID NO: 629263 - RNA, 23 nt, Artificial Sequence
  Synthetic
ggaugccuacacagaaagaagau

SEQ ID NO: 629264 - RNA, 24 nt, Artificial Sequence
  Synthetic
gggaugccuacacagaaagaagau

SEQ ID NO: 629265 - RNA, 18 nt, Artificial Sequence
  Synthetic
aggaagccuuaagaagau

SEQ ID NO: 629266 - RNA, 19 nt, Artificial Sequence
  Synthetic
gaggaagccuuaagaagau

SEQ ID NO: 629267 - RNA, 20 nt, Artificial Sequence
  Synthetic
ggaggaagccuuaagaagau

SEQ ID NO: 629268 - RNA, 21 nt, Artificial Sequence
  Synthetic
uggaggaagccuuaagaagau

SEQ ID NO: 629269 - RNA, 22 nt, Artificial Sequence
  Synthetic
cuggaggaagccuuaagaagau

SEQ ID NO: 629270 - RNA, 23 nt, Artificial Sequence
  Synthetic
ccuggaggaagccuuaagaagau

SEQ ID NO: 629271 - RNA, 24 nt, Artificial Sequence
  Synthetic
cccuggaggaagccuuaagaagau

SEQ ID NO: 629272 - RNA, 18 nt, Artificial Sequence
  Synthetic
agaauucacagagaagau

SEQ ID NO: 629273 - RNA, 19 nt, Artificial Sequence
  Synthetic
aagaauucacagagaagau

SEQ ID NO: 629274 - RNA, 20 nt, Artificial Sequence
  Synthetic
aaagaauucacagagaagau

SEQ ID NO: 629275 - RNA, 21 nt, Artificial Sequence
  Synthetic
aaaagaauucacagagaagau

SEQ ID NO: 629276 - RNA, 22 nt, Artificial Sequence
  Synthetic
gaaaagaauucacagagaagau

SEQ ID NO: 629277 - RNA, 23 nt, Artificial Sequence
  Synthetic
agaaaagaauucacagagaagau

SEQ ID NO: 629278 - RNA, 24 nt, Artificial Sequence
  Synthetic
gagaaaagaauucacagagaagau

SEQ ID NO: 629279 - RNA, 18 nt, Artificial Sequence
  Synthetic
ccugcuagcagagaagau

SEQ ID NO: 629280 - RNA, 19 nt, Artificial Sequence
  Synthetic
uccugcuagcagagaagau

SEQ ID NO: 629281 - RNA, 20 nt, Artificial Sequence
  Synthetic
auccugcuagcagagaagau

SEQ ID NO: 629282 - RNA, 21 nt, Artificial Sequence
  Synthetic
aauccugcuagcagagaagau

SEQ ID NO: 629283 - RNA, 22 nt, Artificial Sequence
  Synthetic
caauccugcuagcagagaagau

SEQ ID NO: 629284 - RNA, 23 nt, Artificial Sequence
  Synthetic
ccaauccugcuagcagagaagau

SEQ ID NO: 629285 - RNA, 24 nt, Artificial Sequence
  Synthetic
uccaauccugcuagcagagaagau

SEQ ID NO: 629286 - RNA, 18 nt, Artificial Sequence
  Synthetic
acugaugcuggagaagau

SEQ ID NO: 629287 - RNA, 19 nt, Artificial Sequence
  Synthetic
aacugaugcuggagaagau

SEQ ID NO: 629288 - RNA, 20 nt, Artificial Sequence
  Synthetic
caacugaugcuggagaagau

SEQ ID NO: 629289 - RNA, 21 nt, Artificial Sequence
  Synthetic
acaacugaugcuggagaagau

SEQ ID NO: 629290 - RNA, 22 nt, Artificial Sequence
  Synthetic
aacaacugaugcuggagaagau

SEQ ID NO: 629291 - RNA, 23 nt, Artificial Sequence
  Synthetic
aaacaacugaugcuggagaagau

SEQ ID NO: 629292 - RNA, 24 nt, Artificial Sequence
  Synthetic
gaaacaacugaugcuggagaagau

SEQ ID NO: 629293 - RNA, 18 nt, Artificial Sequence
  Synthetic
aguaguauacuagaagau

SEQ ID NO: 629294 - RNA, 19 nt, Artificial Sequence
  Synthetic
aaguaguauacuagaagau

SEQ ID NO: 629295 - RNA, 20 nt, Artificial Sequence
  Synthetic
caaguaguauacuagaagau

SEQ ID NO: 629296 - RNA, 21 nt, Artificial Sequence
  Synthetic
acaaguaguauacuagaagau

SEQ ID NO: 629297 - RNA, 22 nt, Artificial Sequence
  Synthetic
uacaaguaguauacuagaagau

SEQ ID NO: 629298 - RNA, 23 nt, Artificial Sequence
  Synthetic
auacaaguaguauacuagaagau

SEQ ID NO: 629299 - RNA, 24 nt, Artificial Sequence
  Synthetic
cauacaaguaguauacuagaagau

SEQ ID NO: 629300 - RNA, 18 nt, Artificial Sequence
  Synthetic
guagaguugguagaagau

SEQ ID NO: 629301 - RNA, 19 nt, Artificial Sequence
  Synthetic
aguagaguugguagaagau

SEQ ID NO: 629302 - RNA, 20 nt, Artificial Sequence
  Synthetic
caguagaguugguagaagau

SEQ ID NO: 629303 - RNA, 21 nt, Artificial Sequence
  Synthetic
acaguagaguugguagaagau

SEQ ID NO: 629304 - RNA, 22 nt, Artificial Sequence
  Synthetic
gacaguagaguugguagaagau

SEQ ID NO: 629305 - RNA, 23 nt, Artificial Sequence
  Synthetic
ggacaguagaguugguagaagau

SEQ ID NO: 629306 - RNA, 24 nt, Artificial Sequence
  Synthetic
aggacaguagaguugguagaagau

SEQ ID NO: 629307 - RNA, 18 nt, Artificial Sequence
  Synthetic
ggcuuccagaaggaagau

SEQ ID NO: 629308 - RNA, 19 nt, Artificial Sequence
  Synthetic
gggcuuccagaaggaagau

SEQ ID NO: 629309 - RNA, 20 nt, Artificial Sequence
  Synthetic
agggcuuccagaaggaagau

SEQ ID NO: 629310 - RNA, 21 nt, Artificial Sequence
  Synthetic
aagggcuuccagaaggaagau

SEQ ID NO: 629311 - RNA, 22 nt, Artificial Sequence
  Synthetic
caagggcuuccagaaggaagau

SEQ ID NO: 629312 - RNA, 23 nt, Artificial Sequence
  Synthetic
gcaagggcuuccagaaggaagau

SEQ ID NO: 629313 - RNA, 24 nt, Artificial Sequence
  Synthetic
ggcaagggcuuccagaaggaagau

SEQ ID NO: 629314 - RNA, 18 nt, Artificial Sequence
  Synthetic
gucagaagacaggaagau

SEQ ID NO: 629315 - RNA, 19 nt, Artificial Sequence
  Synthetic
ggucagaagacaggaagau

SEQ ID NO: 629316 - RNA, 20 nt, Artificial Sequence
  Synthetic
gggucagaagacaggaagau

SEQ ID NO: 629317 - RNA, 21 nt, Artificial Sequence
  Synthetic
ggggucagaagacaggaagau

SEQ ID NO: 629318 - RNA, 22 nt, Artificial Sequence
  Synthetic
aggggucagaagacaggaagau

SEQ ID NO: 629319 - RNA, 23 nt, Artificial Sequence
  Synthetic
gaggggucagaagacaggaagau

SEQ ID NO: 629320 - RNA, 24 nt, Artificial Sequence
  Synthetic
ggaggggucagaagacaggaagau

SEQ ID NO: 629321 - RNA, 18 nt, Artificial Sequence
  Synthetic
cagggaaaaagggaagau

SEQ ID NO: 629322 - RNA, 19 nt, Artificial Sequence
  Synthetic
ucagggaaaaagggaagau

SEQ ID NO: 629323 - RNA, 20 nt, Artificial Sequence
  Synthetic
cucagggaaaaagggaagau

SEQ ID NO: 629324 - RNA, 21 nt, Artificial Sequence
  Synthetic
gcucagggaaaaagggaagau

SEQ ID NO: 629325 - RNA, 22 nt, Artificial Sequence
  Synthetic
ggcucagggaaaaagggaagau

SEQ ID NO: 629326 - RNA, 23 nt, Artificial Sequence
  Synthetic
gggcucagggaaaaagggaagau

SEQ ID NO: 629327 - RNA, 24 nt, Artificial Sequence
  Synthetic
ggggcucagggaaaaagggaagau

SEQ ID NO: 629328 - RNA, 18 nt, Artificial Sequence
  Synthetic
uuguauuaaggggaagau

SEQ ID NO: 629329 - RNA, 19 nt, Artificial Sequence
  Synthetic
uuuguauuaaggggaagau

SEQ ID NO: 629330 - RNA, 20 nt, Artificial Sequence
  Synthetic
uuuuguauuaaggggaagau

SEQ ID NO: 629331 - RNA, 21 nt, Artificial Sequence
  Synthetic
cuuuuguauuaaggggaagau

SEQ ID NO: 629332 - RNA, 22 nt, Artificial Sequence
  Synthetic
gcuuuuguauuaaggggaagau

SEQ ID NO: 629333 - RNA, 23 nt, Artificial Sequence
  Synthetic
ggcuuuuguauuaaggggaagau

SEQ ID NO: 629334 - RNA, 24 nt, Artificial Sequence
  Synthetic
gggcuuuuguauuaaggggaagau

SEQ ID NO: 629335 - RNA, 18 nt, Artificial Sequence
  Synthetic
aaauauugaggggaagau

SEQ ID NO: 629336 - RNA, 19 nt, Artificial Sequence
  Synthetic
gaaauauugaggggaagau

SEQ ID NO: 629337 - RNA, 20 nt, Artificial Sequence
  Synthetic
ggaaauauugaggggaagau

SEQ ID NO: 629338 - RNA, 21 nt, Artificial Sequence
  Synthetic
uggaaauauugaggggaagau

SEQ ID NO: 629339 - RNA, 22 nt, Artificial Sequence
  Synthetic
auggaaauauugaggggaagau

SEQ ID NO: 629340 - RNA, 23 nt, Artificial Sequence
  Synthetic
gauggaaauauugaggggaagau

SEQ ID NO: 629341 - RNA, 24 nt, Artificial Sequence
  Synthetic
ggauggaaauauugaggggaagau

SEQ ID NO: 629342 - RNA, 18 nt, Artificial Sequence
  Synthetic
ucuuguugcaaugaagau

SEQ ID NO: 629343 - RNA, 19 nt, Artificial Sequence
  Synthetic
uucuuguugcaaugaagau

SEQ ID NO: 629344 - RNA, 20 nt, Artificial Sequence
  Synthetic
uuucuuguugcaaugaagau

SEQ ID NO: 629345 - RNA, 21 nt, Artificial Sequence
  Synthetic
uuuucuuguugcaaugaagau

SEQ ID NO: 629346 - RNA, 22 nt, Artificial Sequence
  Synthetic
cuuuucuuguugcaaugaagau

SEQ ID NO: 629347 - RNA, 23 nt, Artificial Sequence
  Synthetic
ucuuuucuuguugcaaugaagau

SEQ ID NO: 629348 - RNA, 24 nt, Artificial Sequence
  Synthetic
cucuuuucuuguugcaaugaagau

SEQ ID NO: 629349 - RNA, 18 nt, Artificial Sequence
  Synthetic
uaccuacugcaugaagau

SEQ ID NO: 629350 - RNA, 19 nt, Artificial Sequence
  Synthetic
auaccuacugcaugaagau

SEQ ID NO: 629351 - RNA, 20 nt, Artificial Sequence
  Synthetic
aauaccuacugcaugaagau

SEQ ID NO: 629352 - RNA, 21 nt, Artificial Sequence
  Synthetic
gaauaccuacugcaugaagau

SEQ ID NO: 629353 - RNA, 22 nt, Artificial Sequence
  Synthetic
cgaauaccuacugcaugaagau

SEQ ID NO: 629354 - RNA, 23 nt, Artificial Sequence
  Synthetic
acgaauaccuacugcaugaagau

SEQ ID NO: 629355 - RNA, 24 nt, Artificial Sequence
  Synthetic
aacgaauaccuacugcaugaagau

SEQ ID NO: 629356 - RNA, 18 nt, Artificial Sequence
  Synthetic
uaaaaaauagaugaagau

SEQ ID NO: 629357 - RNA, 19 nt, Artificial Sequence
  Synthetic
cuaaaaaauagaugaagau

SEQ ID NO: 629358 - RNA, 20 nt, Artificial Sequence
  Synthetic
ucuaaaaaauagaugaagau

SEQ ID NO: 629359 - RNA, 21 nt, Artificial Sequence
  Synthetic
cucuaaaaaauagaugaagau

SEQ ID NO: 629360 - RNA, 22 nt, Artificial Sequence
  Synthetic
acucuaaaaaauagaugaagau

SEQ ID NO: 629361 - RNA, 23 nt, Artificial Sequence
  Synthetic
gacucuaaaaaauagaugaagau

SEQ ID NO: 629362 - RNA, 24 nt, Artificial Sequence
  Synthetic
ugacucuaaaaaauagaugaagau

SEQ ID NO: 629363 - RNA, 18 nt, Artificial Sequence
  Synthetic
cauaaaaauacugaagau

SEQ ID NO: 629364 - RNA, 19 nt, Artificial Sequence
  Synthetic
ucauaaaaauacugaagau

SEQ ID NO: 629365 - RNA, 20 nt, Artificial Sequence
  Synthetic
uucauaaaaauacugaagau

SEQ ID NO: 629366 - RNA, 21 nt, Artificial Sequence
  Synthetic
uuucauaaaaauacugaagau

SEQ ID NO: 629367 - RNA, 22 nt, Artificial Sequence
  Synthetic
uuuucauaaaaauacugaagau

SEQ ID NO: 629368 - RNA, 23 nt, Artificial Sequence
  Synthetic
auuuucauaaaaauacugaagau

SEQ ID NO: 629369 - RNA, 24 nt, Artificial Sequence
  Synthetic
uauuuucauaaaaauacugaagau

SEQ ID NO: 629370 - RNA, 18 nt, Artificial Sequence
  Synthetic
cugaauaaaagugaagau

SEQ ID NO: 629371 - RNA, 19 nt, Artificial Sequence
  Synthetic
ucugaauaaaagugaagau

SEQ ID NO: 629372 - RNA, 20 nt, Artificial Sequence
  Synthetic
uucugaauaaaagugaagau

SEQ ID NO: 629373 - RNA, 21 nt, Artificial Sequence
  Synthetic
cuucugaauaaaagugaagau

SEQ ID NO: 629374 - RNA, 22 nt, Artificial Sequence
  Synthetic
acuucugaauaaaagugaagau

SEQ ID NO: 629375 - RNA, 23 nt, Artificial Sequence
  Synthetic
cacuucugaauaaaagugaagau

SEQ ID NO: 629376 - RNA, 24 nt, Artificial Sequence
  Synthetic
ccacuucugaauaaaagugaagau

SEQ ID NO: 629377 - RNA, 18 nt, Artificial Sequence
  Synthetic
cauuucaguggugaagau

SEQ ID NO: 629378 - RNA, 19 nt, Artificial Sequence
  Synthetic
acauuucaguggugaagau

SEQ ID NO: 629379 - RNA, 20 nt, Artificial Sequence
  Synthetic
aacauuucaguggugaagau

SEQ ID NO: 629380 - RNA, 21 nt, Artificial Sequence
  Synthetic
gaacauuucaguggugaagau

SEQ ID NO: 629381 - RNA, 22 nt, Artificial Sequence
  Synthetic
agaacauuucaguggugaagau

SEQ ID NO: 629382 - RNA, 23 nt, Artificial Sequence
  Synthetic
cagaacauuucaguggugaagau

SEQ ID NO: 629383 - RNA, 24 nt, Artificial Sequence
  Synthetic
ucagaacauuucaguggugaagau

SEQ ID NO: 629384 - RNA, 18 nt, Artificial Sequence
  Synthetic
cacauuucacuugaagau

SEQ ID NO: 629385 - RNA, 19 nt, Artificial Sequence
  Synthetic
ccacauuucacuugaagau

SEQ ID NO: 629386 - RNA, 20 nt, Artificial Sequence
  Synthetic
uccacauuucacuugaagau

SEQ ID NO: 629387 - RNA, 21 nt, Artificial Sequence
  Synthetic
auccacauuucacuugaagau

SEQ ID NO: 629388 - RNA, 22 nt, Artificial Sequence
  Synthetic
aauccacauuucacuugaagau

SEQ ID NO: 629389 - RNA, 23 nt, Artificial Sequence
  Synthetic
aaauccacauuucacuugaagau

SEQ ID NO: 629390 - RNA, 24 nt, Artificial Sequence
  Synthetic
aaaauccacauuucacuugaagau

SEQ ID NO: 629391 - RNA, 18 nt, Artificial Sequence
  Synthetic
gauaagagucuugaagau

SEQ ID NO: 629392 - RNA, 19 nt, Artificial Sequence
  Synthetic
agauaagagucuugaagau

SEQ ID NO: 629393 - RNA, 20 nt, Artificial Sequence
  Synthetic
gagauaagagucuugaagau

SEQ ID NO: 629394 - RNA, 21 nt, Artificial Sequence
  Synthetic
ggagauaagagucuugaagau

SEQ ID NO: 629395 - RNA, 22 nt, Artificial Sequence
  Synthetic
aggagauaagagucuugaagau

SEQ ID NO: 629396 - RNA, 23 nt, Artificial Sequence
  Synthetic
aaggagauaagagucuugaagau

SEQ ID NO: 629397 - RNA, 24 nt, Artificial Sequence
  Synthetic
aaaggagauaagagucuugaagau

SEQ ID NO: 629398 - RNA, 18 nt, Artificial Sequence
  Synthetic
aagacuuaaaaauaagau

SEQ ID NO: 629399 - RNA, 19 nt, Artificial Sequence
  Synthetic
aaagacuuaaaaauaagau

SEQ ID NO: 629400 - RNA, 20 nt, Artificial Sequence
  Synthetic
uaaagacuuaaaaauaagau

SEQ ID NO: 629401 - RNA, 21 nt, Artificial Sequence
  Synthetic
guaaagacuuaaaaauaagau

SEQ ID NO: 629402 - RNA, 22 nt, Artificial Sequence
  Synthetic
aguaaagacuuaaaaauaagau

SEQ ID NO: 629403 - RNA, 23 nt, Artificial Sequence
  Synthetic
gaguaaagacuuaaaaauaagau

SEQ ID NO: 629404 - RNA, 24 nt, Artificial Sequence
  Synthetic
ggaguaaagacuuaaaaauaagau

SEQ ID NO: 629405 - RNA, 18 nt, Artificial Sequence
  Synthetic
agggccuccaaauaagau

SEQ ID NO: 629406 - RNA, 19 nt, Artificial Sequence
  Synthetic
cagggccuccaaauaagau

SEQ ID NO: 629407 - RNA, 20 nt, Artificial Sequence
  Synthetic
ccagggccuccaaauaagau

SEQ ID NO: 629408 - RNA, 21 nt, Artificial Sequence
  Synthetic
uccagggccuccaaauaagau

SEQ ID NO: 629409 - RNA, 22 nt, Artificial Sequence
  Synthetic
auccagggccuccaaauaagau

SEQ ID NO: 629410 - RNA, 23 nt, Artificial Sequence
  Synthetic
gauccagggccuccaaauaagau

SEQ ID NO: 629411 - RNA, 24 nt, Artificial Sequence
  Synthetic
ugauccagggccuccaaauaagau

SEQ ID NO: 629412 - RNA, 18 nt, Artificial Sequence
  Synthetic
uaaaauaagaaauaagau

SEQ ID NO: 629413 - RNA, 19 nt, Artificial Sequence
  Synthetic
guaaaauaagaaauaagau

SEQ ID NO: 629414 - RNA, 20 nt, Artificial Sequence
  Synthetic
gguaaaauaagaaauaagau

SEQ ID NO: 629415 - RNA, 21 nt, Artificial Sequence
  Synthetic
agguaaaauaagaaauaagau

SEQ ID NO: 629416 - RNA, 22 nt, Artificial Sequence
  Synthetic
gagguaaaauaagaaauaagau

SEQ ID NO: 629417 - RNA, 23 nt, Artificial Sequence
  Synthetic
agagguaaaauaagaaauaagau

SEQ ID NO: 629418 - RNA, 24 nt, Artificial Sequence
  Synthetic
gagagguaaaauaagaaauaagau

SEQ ID NO: 629419 - RNA, 18 nt, Artificial Sequence
  Synthetic
aauuaggcuacauaagau

SEQ ID NO: 629420 - RNA, 19 nt, Artificial Sequence
  Synthetic
caauuaggcuacauaagau

SEQ ID NO: 629421 - RNA, 20 nt, Artificial Sequence
  Synthetic
ccaauuaggcuacauaagau

SEQ ID NO: 629422 - RNA, 21 nt, Artificial Sequence
  Synthetic
uccaauuaggcuacauaagau

SEQ ID NO: 629423 - RNA, 22 nt, Artificial Sequence
  Synthetic
cuccaauuaggcuacauaagau

SEQ ID NO: 629424 - RNA, 23 nt, Artificial Sequence
  Synthetic
ucuccaauuaggcuacauaagau

SEQ ID NO: 629425 - RNA, 24 nt, Artificial Sequence
  Synthetic
uucuccaauuaggcuacauaagau

SEQ ID NO: 629426 - RNA, 18 nt, Artificial Sequence
  Synthetic
guaagcccaucauaagau

SEQ ID NO: 629427 - RNA, 19 nt, Artificial Sequence
  Synthetic
uguaagcccaucauaagau

SEQ ID NO: 629428 - RNA, 20 nt, Artificial Sequence
  Synthetic
auguaagcccaucauaagau

SEQ ID NO: 629429 - RNA, 21 nt, Artificial Sequence
  Synthetic
aauguaagcccaucauaagau

SEQ ID NO: 629430 - RNA, 22 nt, Artificial Sequence
  Synthetic
aaauguaagcccaucauaagau

SEQ ID NO: 629431 - RNA, 23 nt, Artificial Sequence
  Synthetic
uaaauguaagcccaucauaagau

SEQ ID NO: 629432 - RNA, 24 nt, Artificial Sequence
  Synthetic
cuaaauguaagcccaucauaagau

SEQ ID NO: 629433 - RNA, 18 nt, Artificial Sequence
  Synthetic
ucuccucauucauaagau

SEQ ID NO: 629434 - RNA, 19 nt, Artificial Sequence
  Synthetic
aucuccucauucauaagau

SEQ ID NO: 629435 - RNA, 20 nt, Artificial Sequence
  Synthetic
aaucuccucauucauaagau

SEQ ID NO: 629436 - RNA, 21 nt, Artificial Sequence
  Synthetic
caaucuccucauucauaagau

SEQ ID NO: 629437 - RNA, 22 nt, Artificial Sequence
  Synthetic
ucaaucuccucauucauaagau

SEQ ID NO: 629438 - RNA, 23 nt, Artificial Sequence
  Synthetic
cucaaucuccucauucauaagau

SEQ ID NO: 629439 - RNA, 24 nt, Artificial Sequence
  Synthetic
acucaaucuccucauucauaagau

SEQ ID NO: 629440 - RNA, 18 nt, Artificial Sequence
  Synthetic
cuugaugacagauaagau

SEQ ID NO: 629441 - RNA, 19 nt, Artificial Sequence
  Synthetic
acuugaugacagauaagau

SEQ ID NO: 629442 - RNA, 20 nt, Artificial Sequence
  Synthetic
gacuugaugacagauaagau

SEQ ID NO: 629443 - RNA, 21 nt, Artificial Sequence
  Synthetic
agacuugaugacagauaagau

SEQ ID NO: 629444 - RNA, 22 nt, Artificial Sequence
  Synthetic
aagacuugaugacagauaagau

SEQ ID NO: 629445 - RNA, 23 nt, Artificial Sequence
  Synthetic
aaagacuugaugacagauaagau

SEQ ID NO: 629446 - RNA, 24 nt, Artificial Sequence
  Synthetic
aaaagacuugaugacagauaagau

SEQ ID NO: 629447 - RNA, 18 nt, Artificial Sequence
  Synthetic
cacauuucaauauaagau

SEQ ID NO: 629448 - RNA, 19 nt, Artificial Sequence
  Synthetic
ucacauuucaauauaagau

SEQ ID NO: 629449 - RNA, 20 nt, Artificial Sequence
  Synthetic
aucacauuucaauauaagau

SEQ ID NO: 629450 - RNA, 21 nt, Artificial Sequence
  Synthetic
aaucacauuucaauauaagau

SEQ ID NO: 629451 - RNA, 22 nt, Artificial Sequence
  Synthetic
aaaucacauuucaauauaagau

SEQ ID NO: 629452 - RNA, 23 nt, Artificial Sequence
  Synthetic
gaaaucacauuucaauauaagau

SEQ ID NO: 629453 - RNA, 24 nt, Artificial Sequence
  Synthetic
ggaaaucacauuucaauauaagau

SEQ ID NO: 629454 - RNA, 18 nt, Artificial Sequence
  Synthetic
ggugaccuggccuaagau

SEQ ID NO: 629455 - RNA, 19 nt, Artificial Sequence
  Synthetic
aggugaccuggccuaagau

SEQ ID NO: 629456 - RNA, 20 nt, Artificial Sequence
  Synthetic
gaggugaccuggccuaagau

SEQ ID NO: 629457 - RNA, 21 nt, Artificial Sequence
  Synthetic
agaggugaccuggccuaagau

SEQ ID NO: 629458 - RNA, 22 nt, Artificial Sequence
  Synthetic
cagaggugaccuggccuaagau

SEQ ID NO: 629459 - RNA, 23 nt, Artificial Sequence
  Synthetic
gcagaggugaccuggccuaagau

SEQ ID NO: 629460 - RNA, 24 nt, Artificial Sequence
  Synthetic
ggcagaggugaccuggccuaagau

SEQ ID NO: 629461 - RNA, 18 nt, Artificial Sequence
  Synthetic
aaggcuuuucucuaagau

SEQ ID NO: 629462 - RNA, 19 nt, Artificial Sequence
  Synthetic
gaaggcuuuucucuaagau

SEQ ID NO: 629463 - RNA, 20 nt, Artificial Sequence
  Synthetic
agaaggcuuuucucuaagau

SEQ ID NO: 629464 - RNA, 21 nt, Artificial Sequence
  Synthetic
uagaaggcuuuucucuaagau

SEQ ID NO: 629465 - RNA, 22 nt, Artificial Sequence
  Synthetic
guagaaggcuuuucucuaagau

SEQ ID NO: 629466 - RNA, 23 nt, Artificial Sequence
  Synthetic
cguagaaggcuuuucucuaagau

SEQ ID NO: 629467 - RNA, 24 nt, Artificial Sequence
  Synthetic
acguagaaggcuuuucucuaagau

SEQ ID NO: 629468 - RNA, 18 nt, Artificial Sequence
  Synthetic
acugccguaaaguaagau

SEQ ID NO: 629469 - RNA, 19 nt, Artificial Sequence
  Synthetic
cacugccguaaaguaagau

SEQ ID NO: 629470 - RNA, 20 nt, Artificial Sequence
  Synthetic
acacugccguaaaguaagau

SEQ ID NO: 629471 - RNA, 21 nt, Artificial Sequence
  Synthetic
aacacugccguaaaguaagau

SEQ ID NO: 629472 - RNA, 22 nt, Artificial Sequence
  Synthetic
aaacacugccguaaaguaagau

SEQ ID NO: 629473 - RNA, 23 nt, Artificial Sequence
  Synthetic
aaaacacugccguaaaguaagau

SEQ ID NO: 629474 - RNA, 24 nt, Artificial Sequence
  Synthetic
aaaaacacugccguaaaguaagau

SEQ ID NO: 629475 - RNA, 18 nt, Artificial Sequence
  Synthetic
cuagguuggaaguaagau

SEQ ID NO: 629476 - RNA, 19 nt, Artificial Sequence
  Synthetic
ccuagguuggaaguaagau

SEQ ID NO: 629477 - RNA, 20 nt, Artificial Sequence
  Synthetic
uccuagguuggaaguaagau

SEQ ID NO: 629478 - RNA, 21 nt, Artificial Sequence
  Synthetic
cuccuagguuggaaguaagau

SEQ ID NO: 629479 - RNA, 22 nt, Artificial Sequence
  Synthetic
ucuccuagguuggaaguaagau

SEQ ID NO: 629480 - RNA, 23 nt, Artificial Sequence
  Synthetic
aucuccuagguuggaaguaagau

SEQ ID NO: 629481 - RNA, 24 nt, Artificial Sequence
  Synthetic
gaucuccuagguuggaaguaagau

SEQ ID NO: 629482 - RNA, 18 nt, Artificial Sequence
  Synthetic
aguaagccagaguaagau

SEQ ID NO: 629483 - RNA, 19 nt, Artificial Sequence
  Synthetic
uaguaagccagaguaagau

SEQ ID NO: 629484 - RNA, 20 nt, Artificial Sequence
  Synthetic
uuaguaagccagaguaagau

SEQ ID NO: 629485 - RNA, 21 nt, Artificial Sequence
  Synthetic
uuuaguaagccagaguaagau

SEQ ID NO: 629486 - RNA, 22 nt, Artificial Sequence
  Synthetic
auuuaguaagccagaguaagau

SEQ ID NO: 629487 - RNA, 23 nt, Artificial Sequence
  Synthetic
aauuuaguaagccagaguaagau

SEQ ID NO: 629488 - RNA, 24 nt, Artificial Sequence
  Synthetic
gaauuuaguaagccagaguaagau

SEQ ID NO: 629489 - RNA, 18 nt, Artificial Sequence
  Synthetic
ugcauagcuauguaagau

SEQ ID NO: 629490 - RNA, 19 nt, Artificial Sequence
  Synthetic
gugcauagcuauguaagau

SEQ ID NO: 629491 - RNA, 20 nt, Artificial Sequence
  Synthetic
ugugcauagcuauguaagau

SEQ ID NO: 629492 - RNA, 21 nt, Artificial Sequence
  Synthetic
uugugcauagcuauguaagau

SEQ ID NO: 629493 - RNA, 22 nt, Artificial Sequence
  Synthetic
auugugcauagcuauguaagau

SEQ ID NO: 629494 - RNA, 23 nt, Artificial Sequence
  Synthetic
uauugugcauagcuauguaagau

SEQ ID NO: 629495 - RNA, 24 nt, Artificial Sequence
  Synthetic
auauugugcauagcuauguaagau

SEQ ID NO: 629496 - RNA, 18 nt, Artificial Sequence
  Synthetic
aaagaugguaauuaagau

SEQ ID NO: 629497 - RNA, 19 nt, Artificial Sequence
  Synthetic
aaaagaugguaauuaagau

SEQ ID NO: 629498 - RNA, 20 nt, Artificial Sequence
  Synthetic
gaaaagaugguaauuaagau

SEQ ID NO: 629499 - RNA, 21 nt, Artificial Sequence
  Synthetic
ggaaaagaugguaauuaagau

SEQ ID NO: 629500 - RNA, 22 nt, Artificial Sequence
  Synthetic
aggaaaagaugguaauuaagau

SEQ ID NO: 629501 - RNA, 23 nt, Artificial Sequence
  Synthetic
aaggaaaagaugguaauuaagau

SEQ ID NO: 629502 - RNA, 24 nt, Artificial Sequence
  Synthetic
aaaggaaaagaugguaauuaagau

SEQ ID NO: 629503 - RNA, 18 nt, Artificial Sequence
  Synthetic
gauacccuuuauuaagau

SEQ ID NO: 629504 - RNA, 19 nt, Artificial Sequence
  Synthetic
agauacccuuuauuaagau

SEQ ID NO: 629505 - RNA, 20 nt, Artificial Sequence
  Synthetic
uagauacccuuuauuaagau

SEQ ID NO: 629506 - RNA, 21 nt, Artificial Sequence
  Synthetic
guagauacccuuuauuaagau

SEQ ID NO: 629507 - RNA, 22 nt, Artificial Sequence
  Synthetic
uguagauacccuuuauuaagau

SEQ ID NO: 629508 - RNA, 23 nt, Artificial Sequence
  Synthetic
cuguagauacccuuuauuaagau

SEQ ID NO: 629509 - RNA, 24 nt, Artificial Sequence
  Synthetic
ucuguagauacccuuuauuaagau

SEQ ID NO: 629510 - RNA, 18 nt, Artificial Sequence
  Synthetic
aaucuuuucccuuaagau

SEQ ID NO: 629511 - RNA, 19 nt, Artificial Sequence
  Synthetic
aaaucuuuucccuuaagau

SEQ ID NO: 629512 - RNA, 20 nt, Artificial Sequence
  Synthetic
aaaaucuuuucccuuaagau

SEQ ID NO: 629513 - RNA, 21 nt, Artificial Sequence
  Synthetic
gaaaaucuuuucccuuaagau

SEQ ID NO: 629514 - RNA, 22 nt, Artificial Sequence
  Synthetic
ugaaaaucuuuucccuuaagau

SEQ ID NO: 629515 - RNA, 23 nt, Artificial Sequence
  Synthetic
cugaaaaucuuuucccuuaagau

SEQ ID NO: 629516 - RNA, 24 nt, Artificial Sequence
  Synthetic
acugaaaaucuuuucccuuaagau

SEQ ID NO: 629517 - RNA, 18 nt, Artificial Sequence
  Synthetic
cuacuauaguguuaagau

SEQ ID NO: 629518 - RNA, 19 nt, Artificial Sequence
  Synthetic
acuacuauaguguuaagau

SEQ ID NO: 629519 - RNA, 20 nt, Artificial Sequence
  Synthetic
gacuacuauaguguuaagau

SEQ ID NO: 629520 - RNA, 21 nt, Artificial Sequence
  Synthetic
agacuacuauaguguuaagau

SEQ ID NO: 629521 - RNA, 22 nt, Artificial Sequence
  Synthetic
aagacuacuauaguguuaagau

SEQ ID NO: 629522 - RNA, 23 nt, Artificial Sequence
  Synthetic
gaagacuacuauaguguuaagau

SEQ ID NO: 629523 - RNA, 24 nt, Artificial Sequence
  Synthetic
agaagacuacuauaguguuaagau

SEQ ID NO: 629524 - RNA, 18 nt, Artificial Sequence
  Synthetic
aagccuaaacuuuaagau

SEQ ID NO: 629525 - RNA, 19 nt, Artificial Sequence
  Synthetic
uaagccuaaacuuuaagau

SEQ ID NO: 629526 - RNA, 20 nt, Artificial Sequence
  Synthetic
uuaagccuaaacuuuaagau

SEQ ID NO: 629527 - RNA, 21 nt, Artificial Sequence
  Synthetic
auuaagccuaaacuuuaagau

SEQ ID NO: 629528 - RNA, 22 nt, Artificial Sequence
  Synthetic
cauuaagccuaaacuuuaagau

SEQ ID NO: 629529 - RNA, 23 nt, Artificial Sequence
  Synthetic
ucauuaagccuaaacuuuaagau

SEQ ID NO: 629530 - RNA, 24 nt, Artificial Sequence
  Synthetic
gucauuaagccuaaacuuuaagau

SEQ ID NO: 629531 - RNA, 18 nt, Artificial Sequence
  Synthetic
gugugcuuucuuuaagau

SEQ ID NO: 629532 - RNA, 19 nt, Artificial Sequence
  Synthetic
ugugugcuuucuuuaagau

SEQ ID NO: 629533 - RNA, 20 nt, Artificial Sequence
  Synthetic
gugugugcuuucuuuaagau

SEQ ID NO: 629534 - RNA, 21 nt, Artificial Sequence
  Synthetic
cgugugugcuuucuuuaagau

SEQ ID NO: 629535 - RNA, 22 nt, Artificial Sequence
  Synthetic
acgugugugcuuucuuuaagau

SEQ ID NO: 629536 - RNA, 23 nt, Artificial Sequence
  Synthetic
uacgugugugcuuucuuuaagau

SEQ ID NO: 629537 - RNA, 24 nt, Artificial Sequence
  Synthetic
guacgugugugcuuucuuuaagau

SEQ ID NO: 629538 - RNA, 18 nt, Artificial Sequence
  Synthetic
cacugagauacaacagau

SEQ ID NO: 629539 - RNA, 19 nt, Artificial Sequence
  Synthetic
ucacugagauacaacagau

SEQ ID NO: 629540 - RNA, 20 nt, Artificial Sequence
  Synthetic
uucacugagauacaacagau

SEQ ID NO: 629541 - RNA, 21 nt, Artificial Sequence
  Synthetic
guucacugagauacaacagau

SEQ ID NO: 629542 - RNA, 22 nt, Artificial Sequence
  Synthetic
aguucacugagauacaacagau

SEQ ID NO: 629543 - RNA, 23 nt, Artificial Sequence
  Synthetic
aaguucacugagauacaacagau

SEQ ID NO: 629544 - RNA, 24 nt, Artificial Sequence
  Synthetic
aaaguucacugagauacaacagau

SEQ ID NO: 629545 - RNA, 18 nt, Artificial Sequence
  Synthetic
auuugaggaucaacagau

SEQ ID NO: 629546 - RNA, 19 nt, Artificial Sequence
  Synthetic
cauuugaggaucaacagau

SEQ ID NO: 629547 - RNA, 20 nt, Artificial Sequence
  Synthetic
ccauuugaggaucaacagau

SEQ ID NO: 629548 - RNA, 21 nt, Artificial Sequence
  Synthetic
gccauuugaggaucaacagau

SEQ ID NO: 629549 - RNA, 22 nt, Artificial Sequence
  Synthetic
agccauuugaggaucaacagau

SEQ ID NO: 629550 - RNA, 23 nt, Artificial Sequence
  Synthetic
aagccauuugaggaucaacagau

SEQ ID NO: 629551 - RNA, 24 nt, Artificial Sequence
  Synthetic
aaagccauuugaggaucaacagau

SEQ ID NO: 629552 - RNA, 18 nt, Artificial Sequence
  Synthetic
agucaucagagaacagau

SEQ ID NO: 629553 - RNA, 19 nt, Artificial Sequence
  Synthetic
gagucaucagagaacagau

SEQ ID NO: 629554 - RNA, 20 nt, Artificial Sequence
  Synthetic
agagucaucagagaacagau

SEQ ID NO: 629555 - RNA, 21 nt, Artificial Sequence
  Synthetic
aagagucaucagagaacagau

SEQ ID NO: 629556 - RNA, 22 nt, Artificial Sequence
  Synthetic
caagagucaucagagaacagau

SEQ ID NO: 629557 - RNA, 23 nt, Artificial Sequence
  Synthetic
ucaagagucaucagagaacagau

SEQ ID NO: 629558 - RNA, 24 nt, Artificial Sequence
  Synthetic
uucaagagucaucagagaacagau

SEQ ID NO: 629559 - RNA, 18 nt, Artificial Sequence
  Synthetic
uagagauggagaacagau

SEQ ID NO: 629560 - RNA, 19 nt, Artificial Sequence
  Synthetic
auagagauggagaacagau

SEQ ID NO: 629561 - RNA, 20 nt, Artificial Sequence
  Synthetic
cauagagauggagaacagau

SEQ ID NO: 629562 - RNA, 21 nt, Artificial Sequence
  Synthetic
ucauagagauggagaacagau

SEQ ID NO: 629563 - RNA, 22 nt, Artificial Sequence
  Synthetic
aucauagagauggagaacagau

SEQ ID NO: 629564 - RNA, 23 nt, Artificial Sequence
  Synthetic
aaucauagagauggagaacagau

SEQ ID NO: 629565 - RNA, 24 nt, Artificial Sequence
  Synthetic
aaaucauagagauggagaacagau

SEQ ID NO: 629566 - RNA, 18 nt, Artificial Sequence
  Synthetic
ugaagaacuagaacagau

SEQ ID NO: 629567 - RNA, 19 nt, Artificial Sequence
  Synthetic
augaagaacuagaacagau

SEQ ID NO: 629568 - RNA, 20 nt, Artificial Sequence
  Synthetic
uaugaagaacuagaacagau

SEQ ID NO: 629569 - RNA, 21 nt, Artificial Sequence
  Synthetic
uuaugaagaacuagaacagau

SEQ ID NO: 629570 - RNA, 22 nt, Artificial Sequence
  Synthetic
cuuaugaagaacuagaacagau

SEQ ID NO: 629571 - RNA, 23 nt, Artificial Sequence
  Synthetic
ucuuaugaagaacuagaacagau

SEQ ID NO: 629572 - RNA, 24 nt, Artificial Sequence
  Synthetic
gucuuaugaagaacuagaacagau

SEQ ID NO: 629573 - RNA, 18 nt, Artificial Sequence
  Synthetic
agcacuuccauaacagau

SEQ ID NO: 629574 - RNA, 19 nt, Artificial Sequence
  Synthetic
uagcacuuccauaacagau

SEQ ID NO: 629575 - RNA, 20 nt, Artificial Sequence
  Synthetic
uuagcacuuccauaacagau

SEQ ID NO: 629576 - RNA, 21 nt, Artificial Sequence
  Synthetic
auuagcacuuccauaacagau

SEQ ID NO: 629577 - RNA, 22 nt, Artificial Sequence
  Synthetic
gauuagcacuuccauaacagau

SEQ ID NO: 629578 - RNA, 23 nt, Artificial Sequence
  Synthetic
agauuagcacuuccauaacagau

SEQ ID NO: 629579 - RNA, 24 nt, Artificial Sequence
  Synthetic
uagauuagcacuuccauaacagau

SEQ ID NO: 629580 - RNA, 18 nt, Artificial Sequence
  Synthetic
aagagacaacccacagau

SEQ ID NO: 629581 - RNA, 19 nt, Artificial Sequence
  Synthetic
aaagagacaacccacagau

SEQ ID NO: 629582 - RNA, 20 nt, Artificial Sequence
  Synthetic
uaaagagacaacccacagau

SEQ ID NO: 629583 - RNA, 21 nt, Artificial Sequence
  Synthetic
auaaagagacaacccacagau

SEQ ID NO: 629584 - RNA, 22 nt, Artificial Sequence
  Synthetic
aauaaagagacaacccacagau

SEQ ID NO: 629585 - RNA, 23 nt, Artificial Sequence
  Synthetic
gaauaaagagacaacccacagau

SEQ ID NO: 629586 - RNA, 24 nt, Artificial Sequence
  Synthetic
ggaauaaagagacaacccacagau

SEQ ID NO: 629587 - RNA, 18 nt, Artificial Sequence
  Synthetic
uucgagccacccacagau

SEQ ID NO: 629588 - RNA, 19 nt, Artificial Sequence
  Synthetic
cuucgagccacccacagau

SEQ ID NO: 629589 - RNA, 20 nt, Artificial Sequence
  Synthetic
ccuucgagccacccacagau

SEQ ID NO: 629590 - RNA, 21 nt, Artificial Sequence
  Synthetic
uccuucgagccacccacagau

SEQ ID NO: 629591 - RNA, 22 nt, Artificial Sequence
  Synthetic
uuccuucgagccacccacagau

SEQ ID NO: 629592 - RNA, 23 nt, Artificial Sequence
  Synthetic
auuccuucgagccacccacagau

SEQ ID NO: 629593 - RNA, 24 nt, Artificial Sequence
  Synthetic
uauuccuucgagccacccacagau

SEQ ID NO: 629594 - RNA, 18 nt, Artificial Sequence
  Synthetic
uacugaccugucacagau

SEQ ID NO: 629595 - RNA, 19 nt, Artificial Sequence
  Synthetic
uuacugaccugucacagau

SEQ ID NO: 629596 - RNA, 20 nt, Artificial Sequence
  Synthetic
uuuacugaccugucacagau

SEQ ID NO: 629597 - RNA, 21 nt, Artificial Sequence
  Synthetic
auuuacugaccugucacagau

SEQ ID NO: 629598 - RNA, 22 nt, Artificial Sequence
  Synthetic
gauuuacugaccugucacagau

SEQ ID NO: 629599 - RNA, 23 nt, Artificial Sequence
  Synthetic
ugauuuacugaccugucacagau

SEQ ID NO: 629600 - RNA, 24 nt, Artificial Sequence
  Synthetic
cugauuuacugaccugucacagau

SEQ ID NO: 629601 - RNA, 18 nt, Artificial Sequence
  Synthetic
uggcuauauuucacagau

SEQ ID NO: 629602 - RNA, 19 nt, Artificial Sequence
  Synthetic
uuggcuauauuucacagau

SEQ ID NO: 629603 - RNA, 20 nt, Artificial Sequence
  Synthetic
uuuggcuauauuucacagau

SEQ ID NO: 629604 - RNA, 21 nt, Artificial Sequence
  Synthetic
guuuggcuauauuucacagau

SEQ ID NO: 629605 - RNA, 22 nt, Artificial Sequence
  Synthetic
gguuuggcuauauuucacagau

SEQ ID NO: 629606 - RNA, 23 nt, Artificial Sequence
  Synthetic
ugguuuggcuauauuucacagau

SEQ ID NO: 629607 - RNA, 24 nt, Artificial Sequence
  Synthetic
uugguuuggcuauauuucacagau

SEQ ID NO: 629608 - RNA, 18 nt, Artificial Sequence
  Synthetic
uaaucuuauuucacagau

SEQ ID NO: 629609 - RNA, 19 nt, Artificial Sequence
  Synthetic
uuaaucuuauuucacagau

SEQ ID NO: 629610 - RNA, 20 nt, Artificial Sequence
  Synthetic
auuaaucuuauuucacagau

SEQ ID NO: 629611 - RNA, 21 nt, Artificial Sequence
  Synthetic
cauuaaucuuauuucacagau

SEQ ID NO: 629612 - RNA, 22 nt, Artificial Sequence
  Synthetic
ucauuaaucuuauuucacagau

SEQ ID NO: 629613 - RNA, 23 nt, Artificial Sequence
  Synthetic
gucauuaaucuuauuucacagau

SEQ ID NO: 629614 - RNA, 24 nt, Artificial Sequence
  Synthetic
ugucauuaaucuuauuucacagau

SEQ ID NO: 629615 - RNA, 18 nt, Artificial Sequence
  Synthetic
uagccccacaugacagau

SEQ ID NO: 629616 - RNA, 19 nt, Artificial Sequence
  Synthetic
uuagccccacaugacagau

SEQ ID NO: 629617 - RNA, 20 nt, Artificial Sequence
  Synthetic
auuagccccacaugacagau

SEQ ID NO: 629618 - RNA, 21 nt, Artificial Sequence
  Synthetic
uauuagccccacaugacagau

SEQ ID NO: 629619 - RNA, 22 nt, Artificial Sequence
  Synthetic
uuauuagccccacaugacagau

SEQ ID NO: 629620 - RNA, 23 nt, Artificial Sequence
  Synthetic
auuauuagccccacaugacagau

SEQ ID NO: 629621 - RNA, 24 nt, Artificial Sequence
  Synthetic
uauuauuagccccacaugacagau

SEQ ID NO: 629622 - RNA, 18 nt, Artificial Sequence
  Synthetic
ucacauacaaauacagau

SEQ ID NO: 629623 - RNA, 19 nt, Artificial Sequence
  Synthetic
cucacauacaaauacagau

SEQ ID NO: 629624 - RNA, 20 nt, Artificial Sequence
  Synthetic
acucacauacaaauacagau

SEQ ID NO: 629625 - RNA, 21 nt, Artificial Sequence
  Synthetic
uacucacauacaaauacagau

SEQ ID NO: 629626 - RNA, 22 nt, Artificial Sequence
  Synthetic
auacucacauacaaauacagau

SEQ ID NO: 629627 - RNA, 23 nt, Artificial Sequence
  Synthetic
gauacucacauacaaauacagau

SEQ ID NO: 629628 - RNA, 24 nt, Artificial Sequence
  Synthetic
ugauacucacauacaaauacagau

SEQ ID NO: 629629 - RNA, 18 nt, Artificial Sequence
  Synthetic
aacaggcaaacuacagau

SEQ ID NO: 629630 - RNA, 19 nt, Artificial Sequence
  Synthetic
gaacaggcaaacuacagau

SEQ ID NO: 629631 - RNA, 20 nt, Artificial Sequence
  Synthetic
ugaacaggcaaacuacagau

SEQ ID NO: 629632 - RNA, 21 nt, Artificial Sequence
  Synthetic
gugaacaggcaaacuacagau

SEQ ID NO: 629633 - RNA, 22 nt, Artificial Sequence
  Synthetic
agugaacaggcaaacuacagau

SEQ ID NO: 629634 - RNA, 23 nt, Artificial Sequence
  Synthetic
gagugaacaggcaaacuacagau

SEQ ID NO: 629635 - RNA, 24 nt, Artificial Sequence
  Synthetic
agagugaacaggcaaacuacagau

SEQ ID NO: 629636 - RNA, 18 nt, Artificial Sequence
  Synthetic
aggauucagccuacagau

SEQ ID NO: 629637 - RNA, 19 nt, Artificial Sequence
  Synthetic
uaggauucagccuacagau

SEQ ID NO: 629638 - RNA, 20 nt, Artificial Sequence
  Synthetic
uuaggauucagccuacagau

SEQ ID NO: 629639 - RNA, 21 nt, Artificial Sequence
  Synthetic
auuaggauucagccuacagau

SEQ ID NO: 629640 - RNA, 22 nt, Artificial Sequence
  Synthetic
uauuaggauucagccuacagau

SEQ ID NO: 629641 - RNA, 23 nt, Artificial Sequence
  Synthetic
auauuaggauucagccuacagau

SEQ ID NO: 629642 - RNA, 24 nt, Artificial Sequence
  Synthetic
aauauuaggauucagccuacagau

SEQ ID NO: 629643 - RNA, 18 nt, Artificial Sequence
  Synthetic
ucuuaaguuuguacagau

SEQ ID NO: 629644 - RNA, 19 nt, Artificial Sequence
  Synthetic
aucuuaaguuuguacagau

SEQ ID NO: 629645 - RNA, 20 nt, Artificial Sequence
  Synthetic
caucuuaaguuuguacagau

SEQ ID NO: 629646 - RNA, 21 nt, Artificial Sequence
  Synthetic
acaucuuaaguuuguacagau

SEQ ID NO: 629647 - RNA, 22 nt, Artificial Sequence
  Synthetic
aacaucuuaaguuuguacagau

SEQ ID NO: 629648 - RNA, 23 nt, Artificial Sequence
  Synthetic
gaacaucuuaaguuuguacagau

SEQ ID NO: 629649 - RNA, 24 nt, Artificial Sequence
  Synthetic
ugaacaucuuaaguuuguacagau

SEQ ID NO: 629650 - RNA, 18 nt, Artificial Sequence
  Synthetic
cucaaagaccuuacagau

SEQ ID NO: 629651 - RNA, 19 nt, Artificial Sequence
  Synthetic
gcucaaagaccuuacagau

SEQ ID NO: 629652 - RNA, 20 nt, Artificial Sequence
  Synthetic
agcucaaagaccuuacagau

SEQ ID NO: 629653 - RNA, 21 nt, Artificial Sequence
  Synthetic
aagcucaaagaccuuacagau

SEQ ID NO: 629654 - RNA, 22 nt, Artificial Sequence
  Synthetic
gaagcucaaagaccuuacagau

SEQ ID NO: 629655 - RNA, 23 nt, Artificial Sequence
  Synthetic
agaagcucaaagaccuuacagau

SEQ ID NO: 629656 - RNA, 24 nt, Artificial Sequence
  Synthetic
gagaagcucaaagaccuuacagau

SEQ ID NO: 629657 - RNA, 18 nt, Artificial Sequence
  Synthetic
gaauugacaguuacagau

SEQ ID NO: 629658 - RNA, 19 nt, Artificial Sequence
  Synthetic
ugaauugacaguuacagau

SEQ ID NO: 629659 - RNA, 20 nt, Artificial Sequence
  Synthetic
uugaauugacaguuacagau

SEQ ID NO: 629660 - RNA, 21 nt, Artificial Sequence
  Synthetic
cuugaauugacaguuacagau

SEQ ID NO: 629661 - RNA, 22 nt, Artificial Sequence
  Synthetic
ccuugaauugacaguuacagau

SEQ ID NO: 629662 - RNA, 23 nt, Artificial Sequence
  Synthetic
accuugaauugacaguuacagau

SEQ ID NO: 629663 - RNA, 24 nt, Artificial Sequence
  Synthetic
gaccuugaauugacaguuacagau

SEQ ID NO: 629664 - RNA, 18 nt, Artificial Sequence
  Synthetic
gauugccacuuuacagau

SEQ ID NO: 629665 - RNA, 19 nt, Artificial Sequence
  Synthetic
agauugccacuuuacagau

SEQ ID NO: 629666 - RNA, 20 nt, Artificial Sequence
  Synthetic
cagauugccacuuuacagau

SEQ ID NO: 629667 - RNA, 21 nt, Artificial Sequence
  Synthetic
acagauugccacuuuacagau

SEQ ID NO: 629668 - RNA, 22 nt, Artificial Sequence
  Synthetic
aacagauugccacuuuacagau

SEQ ID NO: 629669 - RNA, 23 nt, Artificial Sequence
  Synthetic
caacagauugccacuuuacagau

SEQ ID NO: 629670 - RNA, 24 nt, Artificial Sequence
  Synthetic
ccaacagauugccacuuuacagau

SEQ ID NO: 629671 - RNA, 18 nt, Artificial Sequence
  Synthetic
gaucccaguuuuacagau

SEQ ID NO: 629672 - RNA, 19 nt, Artificial Sequence
  Synthetic
ggaucccaguuuuacagau

SEQ ID NO: 629673 - RNA, 20 nt, Artificial Sequence
  Synthetic
aggaucccaguuuuacagau

SEQ ID NO: 629674 - RNA, 21 nt, Artificial Sequence
  Synthetic
caggaucccaguuuuacagau

SEQ ID NO: 629675 - RNA, 22 nt, Artificial Sequence
  Synthetic
ucaggaucccaguuuuacagau

SEQ ID NO: 629676 - RNA, 23 nt, Artificial Sequence
  Synthetic
aucaggaucccaguuuuacagau

SEQ ID NO: 629677 - RNA, 24 nt, Artificial Sequence
  Synthetic
uaucaggaucccaguuuuacagau

SEQ ID NO: 629678 - RNA, 18 nt, Artificial Sequence
  Synthetic
cuuguuuaaaaaccagau

SEQ ID NO: 629679 - RNA, 19 nt, Artificial Sequence
  Synthetic
acuuguuuaaaaaccagau

SEQ ID NO: 629680 - RNA, 20 nt, Artificial Sequence
  Synthetic
uacuuguuuaaaaaccagau

SEQ ID NO: 629681 - RNA, 21 nt, Artificial Sequence
  Synthetic
auacuuguuuaaaaaccagau

SEQ ID NO: 629682 - RNA, 22 nt, Artificial Sequence
  Synthetic
uauacuuguuuaaaaaccagau

SEQ ID NO: 629683 - RNA, 23 nt, Artificial Sequence
  Synthetic
auauacuuguuuaaaaaccagau

SEQ ID NO: 629684 - RNA, 24 nt, Artificial Sequence
  Synthetic
uauauacuuguuuaaaaaccagau

SEQ ID NO: 629685 - RNA, 18 nt, Artificial Sequence
  Synthetic
aguugccaggaaccagau

SEQ ID NO: 629686 - RNA, 19 nt, Artificial Sequence
  Synthetic
caguugccaggaaccagau

SEQ ID NO: 629687 - RNA, 20 nt, Artificial Sequence
  Synthetic
acaguugccaggaaccagau

SEQ ID NO: 629688 - RNA, 21 nt, Artificial Sequence
  Synthetic
cacaguugccaggaaccagau

SEQ ID NO: 629689 - RNA, 22 nt, Artificial Sequence
  Synthetic
ucacaguugccaggaaccagau

SEQ ID NO: 629690 - RNA, 23 nt, Artificial Sequence
  Synthetic
aucacaguugccaggaaccagau

SEQ ID NO: 629691 - RNA, 24 nt, Artificial Sequence
  Synthetic
aaucacaguugccaggaaccagau

SEQ ID NO: 629692 - RNA, 18 nt, Artificial Sequence
  Synthetic
ggagguuccuaaccagau

SEQ ID NO: 629693 - RNA, 19 nt, Artificial Sequence
  Synthetic
cggagguuccuaaccagau

SEQ ID NO: 629694 - RNA, 20 nt, Artificial Sequence
  Synthetic
ccggagguuccuaaccagau

SEQ ID NO: 629695 - RNA, 21 nt, Artificial Sequence
  Synthetic
accggagguuccuaaccagau

SEQ ID NO: 629696 - RNA, 22 nt, Artificial Sequence
  Synthetic
caccggagguuccuaaccagau

SEQ ID NO: 629697 - RNA, 23 nt, Artificial Sequence
  Synthetic
ccaccggagguuccuaaccagau

SEQ ID NO: 629698 - RNA, 24 nt, Artificial Sequence
  Synthetic
accaccggagguuccuaaccagau

SEQ ID NO: 629699 - RNA, 18 nt, Artificial Sequence
  Synthetic
uuuggaaagacaccagau

SEQ ID NO: 629700 - RNA, 19 nt, Artificial Sequence
  Synthetic
guuuggaaagacaccagau

SEQ ID NO: 629701 - RNA, 20 nt, Artificial Sequence
  Synthetic
uguuuggaaagacaccagau

SEQ ID NO: 629702 - RNA, 21 nt, Artificial Sequence
  Synthetic
cuguuuggaaagacaccagau

SEQ ID NO: 629703 - RNA, 22 nt, Artificial Sequence
  Synthetic
gcuguuuggaaagacaccagau

SEQ ID NO: 629704 - RNA, 23 nt, Artificial Sequence
  Synthetic
ugcuguuuggaaagacaccagau

SEQ ID NO: 629705 - RNA, 24 nt, Artificial Sequence
  Synthetic
cugcuguuuggaaagacaccagau

SEQ ID NO: 629706 - RNA, 18 nt, Artificial Sequence
  Synthetic
ccuugaaugucaccagau

SEQ ID NO: 629707 - RNA, 19 nt, Artificial Sequence
  Synthetic
accuugaaugucaccagau

SEQ ID NO: 629708 - RNA, 20 nt, Artificial Sequence
  Synthetic
aaccuugaaugucaccagau

SEQ ID NO: 629709 - RNA, 21 nt, Artificial Sequence
  Synthetic
aaaccuugaaugucaccagau

SEQ ID NO: 629710 - RNA, 22 nt, Artificial Sequence
  Synthetic
gaaaccuugaaugucaccagau

SEQ ID NO: 629711 - RNA, 23 nt, Artificial Sequence
  Synthetic
ugaaaccuugaaugucaccagau

SEQ ID NO: 629712 - RNA, 24 nt, Artificial Sequence
  Synthetic
cugaaaccuugaaugucaccagau

SEQ ID NO: 629713 - RNA, 18 nt, Artificial Sequence
  Synthetic
ggucaacaaaggccagau

SEQ ID NO: 629714 - RNA, 19 nt, Artificial Sequence
  Synthetic
aggucaacaaaggccagau

SEQ ID NO: 629715 - RNA, 20 nt, Artificial Sequence
  Synthetic
caggucaacaaaggccagau

SEQ ID NO: 629716 - RNA, 21 nt, Artificial Sequence
  Synthetic
acaggucaacaaaggccagau

SEQ ID NO: 629717 - RNA, 22 nt, Artificial Sequence
  Synthetic
gacaggucaacaaaggccagau

SEQ ID NO: 629718 - RNA, 23 nt, Artificial Sequence
  Synthetic
agacaggucaacaaaggccagau

SEQ ID NO: 629719 - RNA, 24 nt, Artificial Sequence
  Synthetic
aagacaggucaacaaaggccagau

SEQ ID NO: 629720 - RNA, 18 nt, Artificial Sequence
  Synthetic
uguugaaguaauccagau

SEQ ID NO: 629721 - RNA, 19 nt, Artificial Sequence
  Synthetic
uuguugaaguaauccagau

SEQ ID NO: 629722 - RNA, 20 nt, Artificial Sequence
  Synthetic
guuguugaaguaauccagau

SEQ ID NO: 629723 - RNA, 21 nt, Artificial Sequence
  Synthetic
gguuguugaaguaauccagau

SEQ ID NO: 629724 - RNA, 22 nt, Artificial Sequence
  Synthetic
agguuguugaaguaauccagau

SEQ ID NO: 629725 - RNA, 23 nt, Artificial Sequence
  Synthetic
gagguuguugaaguaauccagau

SEQ ID NO: 629726 - RNA, 24 nt, Artificial Sequence
  Synthetic
agagguuguugaaguaauccagau

SEQ ID NO: 629727 - RNA, 18 nt, Artificial Sequence
  Synthetic
gcggagagauauccagau

SEQ ID NO: 629728 - RNA, 19 nt, Artificial Sequence
  Synthetic
agcggagagauauccagau

SEQ ID NO: 629729 - RNA, 20 nt, Artificial Sequence
  Synthetic
uagcggagagauauccagau

SEQ ID NO: 629730 - RNA, 21 nt, Artificial Sequence
  Synthetic
guagcggagagauauccagau

SEQ ID NO: 629731 - RNA, 22 nt, Artificial Sequence
  Synthetic
aguagcggagagauauccagau

SEQ ID NO: 629732 - RNA, 23 nt, Artificial Sequence
  Synthetic
aaguagcggagagauauccagau

SEQ ID NO: 629733 - RNA, 24 nt, Artificial Sequence
  Synthetic
aaaguagcggagagauauccagau

SEQ ID NO: 629734 - RNA, 18 nt, Artificial Sequence
  Synthetic
cuucagauuuauccagau

SEQ ID NO: 629735 - RNA, 19 nt, Artificial Sequence
  Synthetic
gcuucagauuuauccagau

SEQ ID NO: 629736 - RNA, 20 nt, Artificial Sequence
  Synthetic
ugcuucagauuuauccagau

SEQ ID NO: 629737 - RNA, 21 nt, Artificial Sequence
  Synthetic
augcuucagauuuauccagau

SEQ ID NO: 629738 - RNA, 22 nt, Artificial Sequence
  Synthetic
aaugcuucagauuuauccagau

SEQ ID NO: 629739 - RNA, 23 nt, Artificial Sequence
  Synthetic
uaaugcuucagauuuauccagau

SEQ ID NO: 629740 - RNA, 24 nt, Artificial Sequence
  Synthetic
auaaugcuucagauuuauccagau

SEQ ID NO: 629741 - RNA, 18 nt, Artificial Sequence
  Synthetic
gucugaaagccuccagau

SEQ ID NO: 629742 - RNA, 19 nt, Artificial Sequence
  Synthetic
ggucugaaagccuccagau

SEQ ID NO: 629743 - RNA, 20 nt, Artificial Sequence
  Synthetic
uggucugaaagccuccagau

SEQ ID NO: 629744 - RNA, 21 nt, Artificial Sequence
  Synthetic
auggucugaaagccuccagau

SEQ ID NO: 629745 - RNA, 22 nt, Artificial Sequence
  Synthetic
cauggucugaaagccuccagau

SEQ ID NO: 629746 - RNA, 23 nt, Artificial Sequence
  Synthetic
gcauggucugaaagccuccagau

SEQ ID NO: 629747 - RNA, 24 nt, Artificial Sequence
  Synthetic
ugcauggucugaaagccuccagau

SEQ ID NO: 629748 - RNA, 18 nt, Artificial Sequence
  Synthetic
uucuauauuaaagcagau

SEQ ID NO: 629749 - RNA, 19 nt, Artificial Sequence
  Synthetic
cuucuauauuaaagcagau

SEQ ID NO: 629750 - RNA, 20 nt, Artificial Sequence
  Synthetic
ucuucuauauuaaagcagau

SEQ ID NO: 629751 - RNA, 21 nt, Artificial Sequence
  Synthetic
aucuucuauauuaaagcagau

SEQ ID NO: 629752 - RNA, 22 nt, Artificial Sequence
  Synthetic
uaucuucuauauuaaagcagau

SEQ ID NO: 629753 - RNA, 23 nt, Artificial Sequence
  Synthetic
guaucuucuauauuaaagcagau

SEQ ID NO: 629754 - RNA, 24 nt, Artificial Sequence
  Synthetic
uguaucuucuauauuaaagcagau

SEQ ID NO: 629755 - RNA, 18 nt, Artificial Sequence
  Synthetic
guuccccuauaagcagau

SEQ ID NO: 629756 - RNA, 19 nt, Artificial Sequence
  Synthetic
aguuccccuauaagcagau

SEQ ID NO: 629757 - RNA, 20 nt, Artificial Sequence
  Synthetic
gaguuccccuauaagcagau

SEQ ID NO: 629758 - RNA, 21 nt, Artificial Sequence
  Synthetic
agaguuccccuauaagcagau

SEQ ID NO: 629759 - RNA, 22 nt, Artificial Sequence
  Synthetic
uagaguuccccuauaagcagau

SEQ ID NO: 629760 - RNA, 23 nt, Artificial Sequence
  Synthetic
auagaguuccccuauaagcagau

SEQ ID NO: 629761 - RNA, 24 nt, Artificial Sequence
  Synthetic
gauagaguuccccuauaagcagau

SEQ ID NO: 629762 - RNA, 18 nt, Artificial Sequence
  Synthetic
uacagagaaugagcagau

SEQ ID NO: 629763 - RNA, 19 nt, Artificial Sequence
  Synthetic
guacagagaaugagcagau

SEQ ID NO: 629764 - RNA, 20 nt, Artificial Sequence
  Synthetic
aguacagagaaugagcagau

SEQ ID NO: 629765 - RNA, 21 nt, Artificial Sequence
  Synthetic
gaguacagagaaugagcagau

SEQ ID NO: 629766 - RNA, 22 nt, Artificial Sequence
  Synthetic
ggaguacagagaaugagcagau

SEQ ID NO: 629767 - RNA, 23 nt, Artificial Sequence
  Synthetic
uggaguacagagaaugagcagau

SEQ ID NO: 629768 - RNA, 24 nt, Artificial Sequence
  Synthetic
uuggaguacagagaaugagcagau

SEQ ID NO: 629769 - RNA, 18 nt, Artificial Sequence
  Synthetic
aaauaaucauacgcagau

SEQ ID NO: 629770 - RNA, 19 nt, Artificial Sequence
  Synthetic
aaaauaaucauacgcagau

SEQ ID NO: 629771 - RNA, 20 nt, Artificial Sequence
  Synthetic
aaaaauaaucauacgcagau

SEQ ID NO: 629772 - RNA, 21 nt, Artificial Sequence
  Synthetic
gaaaaauaaucauacgcagau

SEQ ID NO: 629773 - RNA, 22 nt, Artificial Sequence
  Synthetic
ugaaaaauaaucauacgcagau

SEQ ID NO: 629774 - RNA, 23 nt, Artificial Sequence
  Synthetic
augaaaaauaaucauacgcagau

SEQ ID NO: 629775 - RNA, 24 nt, Artificial Sequence
  Synthetic
aaugaaaaauaaucauacgcagau

SEQ ID NO: 629776 - RNA, 18 nt, Artificial Sequence
  Synthetic
auaacucuagcggcagau

SEQ ID NO: 629777 - RNA, 19 nt, Artificial Sequence
  Synthetic
gauaacucuagcggcagau

SEQ ID NO: 629778 - RNA, 20 nt, Artificial Sequence
  Synthetic
ugauaacucuagcggcagau

SEQ ID NO: 629779 - RNA, 21 nt, Artificial Sequence
  Synthetic
augauaacucuagcggcagau

SEQ ID NO: 629780 - RNA, 22 nt, Artificial Sequence
  Synthetic
gaugauaacucuagcggcagau

SEQ ID NO: 629781 - RNA, 23 nt, Artificial Sequence
  Synthetic
agaugauaacucuagcggcagau

SEQ ID NO: 629782 - RNA, 24 nt, Artificial Sequence
  Synthetic
aagaugauaacucuagcggcagau

SEQ ID NO: 629783 - RNA, 18 nt, Artificial Sequence
  Synthetic
cuuaauggaagggcagau

SEQ ID NO: 629784 - RNA, 19 nt, Artificial Sequence
  Synthetic
acuuaauggaagggcagau

SEQ ID NO: 629785 - RNA, 20 nt, Artificial Sequence
  Synthetic
uacuuaauggaagggcagau

SEQ ID NO: 629786 - RNA, 21 nt, Artificial Sequence
  Synthetic
auacuuaauggaagggcagau

SEQ ID NO: 629787 - RNA, 22 nt, Artificial Sequence
  Synthetic
aauacuuaauggaagggcagau

SEQ ID NO: 629788 - RNA, 23 nt, Artificial Sequence
  Synthetic
caauacuuaauggaagggcagau

SEQ ID NO: 629789 - RNA, 24 nt, Artificial Sequence
  Synthetic
ucaauacuuaauggaagggcagau

SEQ ID NO: 629790 - RNA, 18 nt, Artificial Sequence
  Synthetic
gcuugcuugggggcagau

SEQ ID NO: 629791 - RNA, 19 nt, Artificial Sequence
  Synthetic
ugcuugcuugggggcagau

SEQ ID NO: 629792 - RNA, 20 nt, Artificial Sequence
  Synthetic
cugcuugcuugggggcagau

SEQ ID NO: 629793 - RNA, 21 nt, Artificial Sequence
  Synthetic
ucugcuugcuugggggcagau

SEQ ID NO: 629794 - RNA, 22 nt, Artificial Sequence
  Synthetic
gucugcuugcuugggggcagau

SEQ ID NO: 629795 - RNA, 23 nt, Artificial Sequence
  Synthetic
agucugcuugcuugggggcagau

SEQ ID NO: 629796 - RNA, 24 nt, Artificial Sequence
  Synthetic
cagucugcuugcuugggggcagau

SEQ ID NO: 629797 - RNA, 18 nt, Artificial Sequence
  Synthetic
gaagagaaauaugcagau

SEQ ID NO: 629798 - RNA, 19 nt, Artificial Sequence
  Synthetic
ggaagagaaauaugcagau

SEQ ID NO: 629799 - RNA, 20 nt, Artificial Sequence
  Synthetic
uggaagagaaauaugcagau

SEQ ID NO: 629800 - RNA, 21 nt, Artificial Sequence
  Synthetic
auggaagagaaauaugcagau

SEQ ID NO: 629801 - RNA, 22 nt, Artificial Sequence
  Synthetic
cauggaagagaaauaugcagau

SEQ ID NO: 629802 - RNA, 23 nt, Artificial Sequence
  Synthetic
acauggaagagaaauaugcagau

SEQ ID NO: 629803 - RNA, 24 nt, Artificial Sequence
  Synthetic
gacauggaagagaaauaugcagau

SEQ ID NO: 629804 - RNA, 18 nt, Artificial Sequence
  Synthetic
gaagaacccuaugcagau

SEQ ID NO: 629805 - RNA, 19 nt, Artificial Sequence
  Synthetic
agaagaacccuaugcagau

SEQ ID NO: 629806 - RNA, 20 nt, Artificial Sequence
  Synthetic
cagaagaacccuaugcagau

SEQ ID NO: 629807 - RNA, 21 nt, Artificial Sequence
  Synthetic
gcagaagaacccuaugcagau

SEQ ID NO: 629808 - RNA, 22 nt, Artificial Sequence
  Synthetic
agcagaagaacccuaugcagau

SEQ ID NO: 629809 - RNA, 23 nt, Artificial Sequence
  Synthetic
gagcagaagaacccuaugcagau

SEQ ID NO: 629810 - RNA, 24 nt, Artificial Sequence
  Synthetic
ugagcagaagaacccuaugcagau

SEQ ID NO: 629811 - RNA, 18 nt, Artificial Sequence
  Synthetic
auaccuuucuaugcagau

SEQ ID NO: 629812 - RNA, 19 nt, Artificial Sequence
  Synthetic
gauaccuuucuaugcagau

SEQ ID NO: 629813 - RNA, 20 nt, Artificial Sequence
  Synthetic
ugauaccuuucuaugcagau

SEQ ID NO: 629814 - RNA, 21 nt, Artificial Sequence
  Synthetic
augauaccuuucuaugcagau

SEQ ID NO: 629815 - RNA, 22 nt, Artificial Sequence
  Synthetic
uaugauaccuuucuaugcagau

SEQ ID NO: 629816 - RNA, 23 nt, Artificial Sequence
  Synthetic
uuaugauaccuuucuaugcagau

SEQ ID NO: 629817 - RNA, 24 nt, Artificial Sequence
  Synthetic
auuaugauaccuuucuaugcagau

SEQ ID NO: 629818 - RNA, 18 nt, Artificial Sequence
  Synthetic
augguaguugcugcagau

SEQ ID NO: 629819 - RNA, 19 nt, Artificial Sequence
  Synthetic
gaugguaguugcugcagau

SEQ ID NO: 629820 - RNA, 20 nt, Artificial Sequence
  Synthetic
ugaugguaguugcugcagau

SEQ ID NO: 629821 - RNA, 21 nt, Artificial Sequence
  Synthetic
augaugguaguugcugcagau

SEQ ID NO: 629822 - RNA, 22 nt, Artificial Sequence
  Synthetic
uaugaugguaguugcugcagau

SEQ ID NO: 629823 - RNA, 23 nt, Artificial Sequence
  Synthetic
auaugaugguaguugcugcagau

SEQ ID NO: 629824 - RNA, 24 nt, Artificial Sequence
  Synthetic
gauaugaugguaguugcugcagau

SEQ ID NO: 629825 - RNA, 18 nt, Artificial Sequence
  Synthetic
gaagcguagugugcagau

SEQ ID NO: 629826 - RNA, 19 nt, Artificial Sequence
  Synthetic
agaagcguagugugcagau

SEQ ID NO: 629827 - RNA, 20 nt, Artificial Sequence
  Synthetic
aagaagcguagugugcagau

SEQ ID NO: 629828 - RNA, 21 nt, Artificial Sequence
  Synthetic
aaagaagcguagugugcagau

SEQ ID NO: 629829 - RNA, 22 nt, Artificial Sequence
  Synthetic
aaaagaagcguagugugcagau

SEQ ID NO: 629830 - RNA, 23 nt, Artificial Sequence
  Synthetic
aaaaagaagcguagugugcagau

SEQ ID NO: 629831 - RNA, 24 nt, Artificial Sequence
  Synthetic
caaaaagaagcguagugugcagau

SEQ ID NO: 629832 - RNA, 18 nt, Artificial Sequence
  Synthetic
cugguugaaauugcagau

SEQ ID NO: 629833 - RNA, 19 nt, Artificial Sequence
  Synthetic
acugguugaaauugcagau

SEQ ID NO: 629834 - RNA, 20 nt, Artificial Sequence
  Synthetic
gacugguugaaauugcagau

SEQ ID NO: 629835 - RNA, 21 nt, Artificial Sequence
  Synthetic
agacugguugaaauugcagau

SEQ ID NO: 629836 - RNA, 22 nt, Artificial Sequence
  Synthetic
cagacugguugaaauugcagau

SEQ ID NO: 629837 - RNA, 23 nt, Artificial Sequence
  Synthetic
acagacugguugaaauugcagau

SEQ ID NO: 629838 - RNA, 24 nt, Artificial Sequence
  Synthetic
aacagacugguugaaauugcagau

SEQ ID NO: 629839 - RNA, 18 nt, Artificial Sequence
  Synthetic
ggccucagaguugcagau

SEQ ID NO: 629840 - RNA, 19 nt, Artificial Sequence
  Synthetic
aggccucagaguugcagau

SEQ ID NO: 629841 - RNA, 20 nt, Artificial Sequence
  Synthetic
uaggccucagaguugcagau

SEQ ID NO: 629842 - RNA, 21 nt, Artificial Sequence
  Synthetic
auaggccucagaguugcagau

SEQ ID NO: 629843 - RNA, 22 nt, Artificial Sequence
  Synthetic
cauaggccucagaguugcagau

SEQ ID NO: 629844 - RNA, 23 nt, Artificial Sequence
  Synthetic
gcauaggccucagaguugcagau

SEQ ID NO: 629845 - RNA, 24 nt, Artificial Sequence
  Synthetic
agcauaggccucagaguugcagau

SEQ ID NO: 629846 - RNA, 18 nt, Artificial Sequence
  Synthetic
acuauccauuuugcagau

SEQ ID NO: 629847 - RNA, 19 nt, Artificial Sequence
  Synthetic
aacuauccauuuugcagau

SEQ ID NO: 629848 - RNA, 20 nt, Artificial Sequence
  Synthetic
aaacuauccauuuugcagau

SEQ ID NO: 629849 - RNA, 21 nt, Artificial Sequence
  Synthetic
aaaacuauccauuuugcagau

SEQ ID NO: 629850 - RNA, 22 nt, Artificial Sequence
  Synthetic
uaaaacuauccauuuugcagau

SEQ ID NO: 629851 - RNA, 23 nt, Artificial Sequence
  Synthetic
auaaaacuauccauuuugcagau

SEQ ID NO: 629852 - RNA, 24 nt, Artificial Sequence
  Synthetic
cauaaaacuauccauuuugcagau

SEQ ID NO: 629853 - RNA, 18 nt, Artificial Sequence
  Synthetic
auuuucuguuuugcagau

SEQ ID NO: 629854 - RNA, 19 nt, Artificial Sequence
  Synthetic
cauuuucuguuuugcagau

SEQ ID NO: 629855 - RNA, 20 nt, Artificial Sequence
  Synthetic
acauuuucuguuuugcagau

SEQ ID NO: 629856 - RNA, 21 nt, Artificial Sequence
  Synthetic
cacauuuucuguuuugcagau

SEQ ID NO: 629857 - RNA, 22 nt, Artificial Sequence
  Synthetic
ucacauuuucuguuuugcagau

SEQ ID NO: 629858 - RNA, 23 nt, Artificial Sequence
  Synthetic
aucacauuuucuguuuugcagau

SEQ ID NO: 629859 - RNA, 24 nt, Artificial Sequence
  Synthetic
caucacauuuucuguuuugcagau

SEQ ID NO: 629860 - RNA, 18 nt, Artificial Sequence
  Synthetic
ggggaaaucccaucagau

SEQ ID NO: 629861 - RNA, 19 nt, Artificial Sequence
  Synthetic
aggggaaaucccaucagau

SEQ ID NO: 629862 - RNA, 20 nt, Artificial Sequence
  Synthetic
aaggggaaaucccaucagau

SEQ ID NO: 629863 - RNA, 21 nt, Artificial Sequence
  Synthetic
aaaggggaaaucccaucagau

SEQ ID NO: 629864 - RNA, 22 nt, Artificial Sequence
  Synthetic
caaaggggaaaucccaucagau

SEQ ID NO: 629865 - RNA, 23 nt, Artificial Sequence
  Synthetic
acaaaggggaaaucccaucagau

SEQ ID NO: 629866 - RNA, 24 nt, Artificial Sequence
  Synthetic
uacaaaggggaaaucccaucagau

SEQ ID NO: 629867 - RNA, 18 nt, Artificial Sequence
  Synthetic
auagcucugaucucagau

SEQ ID NO: 629868 - RNA, 19 nt, Artificial Sequence
  Synthetic
aauagcucugaucucagau

SEQ ID NO: 629869 - RNA, 20 nt, Artificial Sequence
  Synthetic
aaauagcucugaucucagau

SEQ ID NO: 629870 - RNA, 21 nt, Artificial Sequence
  Synthetic
gaaauagcucugaucucagau

SEQ ID NO: 629871 - RNA, 22 nt, Artificial Sequence
  Synthetic
agaaauagcucugaucucagau

SEQ ID NO: 629872 - RNA, 23 nt, Artificial Sequence
  Synthetic
uagaaauagcucugaucucagau

SEQ ID NO: 629873 - RNA, 24 nt, Artificial Sequence
  Synthetic
guagaaauagcucugaucucagau

SEQ ID NO: 629874 - RNA, 18 nt, Artificial Sequence
  Synthetic
uuugaauuacagucagau

SEQ ID NO: 629875 - RNA, 19 nt, Artificial Sequence
  Synthetic
cuuugaauuacagucagau

SEQ ID NO: 629876 - RNA, 20 nt, Artificial Sequence
  Synthetic
ucuuugaauuacagucagau

SEQ ID NO: 629877 - RNA, 21 nt, Artificial Sequence
  Synthetic
uucuuugaauuacagucagau

SEQ ID NO: 629878 - RNA, 22 nt, Artificial Sequence
  Synthetic
uuucuuugaauuacagucagau

SEQ ID NO: 629879 - RNA, 23 nt, Artificial Sequence
  Synthetic
guuucuuugaauuacagucagau

SEQ ID NO: 629880 - RNA, 24 nt, Artificial Sequence
  Synthetic
gguuucuuugaauuacagucagau

SEQ ID NO: 629881 - RNA, 18 nt, Artificial Sequence
  Synthetic
guagauagcuagucagau

SEQ ID NO: 629882 - RNA, 19 nt, Artificial Sequence
  Synthetic
aguagauagcuagucagau

SEQ ID NO: 629883 - RNA, 20 nt, Artificial Sequence
  Synthetic
caguagauagcuagucagau

SEQ ID NO: 629884 - RNA, 21 nt, Artificial Sequence
  Synthetic
acaguagauagcuagucagau

SEQ ID NO: 629885 - RNA, 22 nt, Artificial Sequence
  Synthetic
uacaguagauagcuagucagau

SEQ ID NO: 629886 - RNA, 23 nt, Artificial Sequence
  Synthetic
uuacaguagauagcuagucagau

SEQ ID NO: 629887 - RNA, 24 nt, Artificial Sequence
  Synthetic
guuacaguagauagcuagucagau

SEQ ID NO: 629888 - RNA, 18 nt, Artificial Sequence
  Synthetic
ggaaaaaaaaggucagau

SEQ ID NO: 629889 - RNA, 19 nt, Artificial Sequence
  Synthetic
aggaaaaaaaaggucagau

SEQ ID NO: 629890 - RNA, 20 nt, Artificial Sequence
  Synthetic
caggaaaaaaaaggucagau

SEQ ID NO: 629891 - RNA, 21 nt, Artificial Sequence
  Synthetic
acaggaaaaaaaaggucagau

SEQ ID NO: 629892 - RNA, 22 nt, Artificial Sequence
  Synthetic
aacaggaaaaaaaaggucagau

SEQ ID NO: 629893 - RNA, 23 nt, Artificial Sequence
  Synthetic
aaacaggaaaaaaaaggucagau

SEQ ID NO: 629894 - RNA, 24 nt, Artificial Sequence
  Synthetic
gaaacaggaaaaaaaaggucagau

SEQ ID NO: 629895 - RNA, 18 nt, Artificial Sequence
  Synthetic
guuaagaucaugucagau

SEQ ID NO: 629896 - RNA, 19 nt, Artificial Sequence
  Synthetic
uguuaagaucaugucagau

SEQ ID NO: 629897 - RNA, 20 nt, Artificial Sequence
  Synthetic
auguuaagaucaugucagau

SEQ ID NO: 629898 - RNA, 21 nt, Artificial Sequence
  Synthetic
aauguuaagaucaugucagau

SEQ ID NO: 629899 - RNA, 22 nt, Artificial Sequence
  Synthetic
aaauguuaagaucaugucagau

SEQ ID NO: 629900 - RNA, 23 nt, Artificial Sequence
  Synthetic
uaaauguuaagaucaugucagau

SEQ ID NO: 629901 - RNA, 24 nt, Artificial Sequence
  Synthetic
guaaauguuaagaucaugucagau

SEQ ID NO: 629902 - RNA, 18 nt, Artificial Sequence
  Synthetic
cugcacucaaguucagau

SEQ ID NO: 629903 - RNA, 19 nt, Artificial Sequence
  Synthetic
acugcacucaaguucagau

SEQ ID NO: 629904 - RNA, 20 nt, Artificial Sequence
  Synthetic
cacugcacucaaguucagau

SEQ ID NO: 629905 - RNA, 21 nt, Artificial Sequence
  Synthetic
acacugcacucaaguucagau

SEQ ID NO: 629906 - RNA, 22 nt, Artificial Sequence
  Synthetic
aacacugcacucaaguucagau

SEQ ID NO: 629907 - RNA, 23 nt, Artificial Sequence
  Synthetic
uaacacugcacucaaguucagau

SEQ ID NO: 629908 - RNA, 24 nt, Artificial Sequence
  Synthetic
auaacacugcacucaaguucagau

SEQ ID NO: 629909 - RNA, 18 nt, Artificial Sequence
  Synthetic
aaaaccugggguucagau

SEQ ID NO: 629910 - RNA, 19 nt, Artificial Sequence
  Synthetic
aaaaaccugggguucagau

SEQ ID NO: 629911 - RNA, 20 nt, Artificial Sequence
  Synthetic
caaaaaccugggguucagau

SEQ ID NO: 629912 - RNA, 21 nt, Artificial Sequence
  Synthetic
gcaaaaaccugggguucagau

SEQ ID NO: 629913 - RNA, 22 nt, Artificial Sequence
  Synthetic
ugcaaaaaccugggguucagau

SEQ ID NO: 629914 - RNA, 23 nt, Artificial Sequence
  Synthetic
augcaaaaaccugggguucagau

SEQ ID NO: 629915 - RNA, 24 nt, Artificial Sequence
  Synthetic
gaugcaaaaaccugggguucagau

SEQ ID NO: 629916 - RNA, 18 nt, Artificial Sequence
  Synthetic
acuaaauagcuuucagau

SEQ ID NO: 629917 - RNA, 19 nt, Artificial Sequence
  Synthetic
cacuaaauagcuuucagau

SEQ ID NO: 629918 - RNA, 20 nt, Artificial Sequence
  Synthetic
ccacuaaauagcuuucagau

SEQ ID NO: 629919 - RNA, 21 nt, Artificial Sequence
  Synthetic
accacuaaauagcuuucagau

SEQ ID NO: 629920 - RNA, 22 nt, Artificial Sequence
  Synthetic
caccacuaaauagcuuucagau

SEQ ID NO: 629921 - RNA, 23 nt, Artificial Sequence
  Synthetic
ccaccacuaaauagcuuucagau

SEQ ID NO: 629922 - RNA, 24 nt, Artificial Sequence
  Synthetic
accaccacuaaauagcuuucagau

SEQ ID NO: 629923 - RNA, 18 nt, Artificial Sequence
  Synthetic
uucuuuuguuuuucagau

SEQ ID NO: 629924 - RNA, 19 nt, Artificial Sequence
  Synthetic
cuucuuuuguuuuucagau

SEQ ID NO: 629925 - RNA, 20 nt, Artificial Sequence
  Synthetic
gcuucuuuuguuuuucagau

SEQ ID NO: 629926 - RNA, 21 nt, Artificial Sequence
  Synthetic
agcuucuuuuguuuuucagau

SEQ ID NO: 629927 - RNA, 22 nt, Artificial Sequence
  Synthetic
uagcuucuuuuguuuuucagau

SEQ ID NO: 629928 - RNA, 23 nt, Artificial Sequence
  Synthetic
uuagcuucuuuuguuuuucagau

SEQ ID NO: 629929 - RNA, 24 nt, Artificial Sequence
  Synthetic
auuagcuucuuuuguuuuucagau

SEQ ID NO: 629930 - RNA, 18 nt, Artificial Sequence
  Synthetic
gcauuuggagaaagagau

SEQ ID NO: 629931 - RNA, 19 nt, Artificial Sequence
  Synthetic
ugcauuuggagaaagagau

SEQ ID NO: 629932 - RNA, 20 nt, Artificial Sequence
  Synthetic
uugcauuuggagaaagagau

SEQ ID NO: 629933 - RNA, 21 nt, Artificial Sequence
  Synthetic
guugcauuuggagaaagagau

SEQ ID NO: 629934 - RNA, 22 nt, Artificial Sequence
  Synthetic
gguugcauuuggagaaagagau

SEQ ID NO: 629935 - RNA, 23 nt, Artificial Sequence
  Synthetic
agguugcauuuggagaaagagau

SEQ ID NO: 629936 - RNA, 24 nt, Artificial Sequence
  Synthetic
uagguugcauuuggagaaagagau

SEQ ID NO: 629937 - RNA, 18 nt, Artificial Sequence
  Synthetic
caagauggguaaagagau

SEQ ID NO: 629938 - RNA, 19 nt, Artificial Sequence
  Synthetic
ccaagauggguaaagagau

SEQ ID NO: 629939 - RNA, 20 nt, Artificial Sequence
  Synthetic
uccaagauggguaaagagau

SEQ ID NO: 629940 - RNA, 21 nt, Artificial Sequence
  Synthetic
guccaagauggguaaagagau

SEQ ID NO: 629941 - RNA, 22 nt, Artificial Sequence
  Synthetic
uguccaagauggguaaagagau

SEQ ID NO: 629942 - RNA, 23 nt, Artificial Sequence
  Synthetic
guguccaagauggguaaagagau

SEQ ID NO: 629943 - RNA, 24 nt, Artificial Sequence
  Synthetic
gguguccaagauggguaaagagau

SEQ ID NO: 629944 - RNA, 18 nt, Artificial Sequence
  Synthetic
uuuaauaaaucaagagau

SEQ ID NO: 629945 - RNA, 19 nt, Artificial Sequence
  Synthetic
guuuaauaaaucaagagau

SEQ ID NO: 629946 - RNA, 20 nt, Artificial Sequence
  Synthetic
aguuuaauaaaucaagagau

SEQ ID NO: 629947 - RNA, 21 nt, Artificial Sequence
  Synthetic
uaguuuaauaaaucaagagau

SEQ ID NO: 629948 - RNA, 22 nt, Artificial Sequence
  Synthetic
cuaguuuaauaaaucaagagau

SEQ ID NO: 629949 - RNA, 23 nt, Artificial Sequence
  Synthetic
acuaguuuaauaaaucaagagau

SEQ ID NO: 629950 - RNA, 24 nt, Artificial Sequence
  Synthetic
uacuaguuuaauaaaucaagagau

SEQ ID NO: 629951 - RNA, 18 nt, Artificial Sequence
  Synthetic
cagugcuaaauaagagau

SEQ ID NO: 629952 - RNA, 19 nt, Artificial Sequence
  Synthetic
gcagugcuaaauaagagau

SEQ ID NO: 629953 - RNA, 20 nt, Artificial Sequence
  Synthetic
ugcagugcuaaauaagagau

SEQ ID NO: 629954 - RNA, 21 nt, Artificial Sequence
  Synthetic
uugcagugcuaaauaagagau

SEQ ID NO: 629955 - RNA, 22 nt, Artificial Sequence
  Synthetic
auugcagugcuaaauaagagau

SEQ ID NO: 629956 - RNA, 23 nt, Artificial Sequence
  Synthetic
aauugcagugcuaaauaagagau

SEQ ID NO: 629957 - RNA, 24 nt, Artificial Sequence
  Synthetic
aaauugcagugcuaaauaagagau

SEQ ID NO: 629958 - RNA, 18 nt, Artificial Sequence
  Synthetic
aggcaauagauaagagau

SEQ ID NO: 629959 - RNA, 19 nt, Artificial Sequence
  Synthetic
aaggcaauagauaagagau

SEQ ID NO: 629960 - RNA, 20 nt, Artificial Sequence
  Synthetic
uaaggcaauagauaagagau

SEQ ID NO: 629961 - RNA, 21 nt, Artificial Sequence
  Synthetic
cuaaggcaauagauaagagau

SEQ ID NO: 629962 - RNA, 22 nt, Artificial Sequence
  Synthetic
ucuaaggcaauagauaagagau

SEQ ID NO: 629963 - RNA, 23 nt, Artificial Sequence
  Synthetic
aucuaaggcaauagauaagagau

SEQ ID NO: 629964 - RNA, 24 nt, Artificial Sequence
  Synthetic
gaucuaaggcaauagauaagagau

SEQ ID NO: 629965 - RNA, 18 nt, Artificial Sequence
  Synthetic
gagaaaagaaacagagau

SEQ ID NO: 629966 - RNA, 19 nt, Artificial Sequence
  Synthetic
agagaaaagaaacagagau

SEQ ID NO: 629967 - RNA, 20 nt, Artificial Sequence
  Synthetic
cagagaaaagaaacagagau

SEQ ID NO: 629968 - RNA, 21 nt, Artificial Sequence
  Synthetic
gcagagaaaagaaacagagau

SEQ ID NO: 629969 - RNA, 22 nt, Artificial Sequence
  Synthetic
ugcagagaaaagaaacagagau

SEQ ID NO: 629970 - RNA, 23 nt, Artificial Sequence
  Synthetic
gugcagagaaaagaaacagagau

SEQ ID NO: 629971 - RNA, 24 nt, Artificial Sequence
  Synthetic
ggugcagagaaaagaaacagagau

SEQ ID NO: 629972 - RNA, 18 nt, Artificial Sequence
  Synthetic
gaggagaacuacagagau

SEQ ID NO: 629973 - RNA, 19 nt, Artificial Sequence
  Synthetic
agaggagaacuacagagau

SEQ ID NO: 629974 - RNA, 20 nt, Artificial Sequence
  Synthetic
cagaggagaacuacagagau

SEQ ID NO: 629975 - RNA, 21 nt, Artificial Sequence
  Synthetic
ccagaggagaacuacagagau

SEQ ID NO: 629976 - RNA, 22 nt, Artificial Sequence
  Synthetic
accagaggagaacuacagagau

SEQ ID NO: 629977 - RNA, 23 nt, Artificial Sequence
  Synthetic
caccagaggagaacuacagagau

SEQ ID NO: 629978 - RNA, 24 nt, Artificial Sequence
  Synthetic
acaccagaggagaacuacagagau

SEQ ID NO: 629979 - RNA, 18 nt, Artificial Sequence
  Synthetic
acuccugucaccagagau

SEQ ID NO: 629980 - RNA, 19 nt, Artificial Sequence
  Synthetic
gacuccugucaccagagau

SEQ ID NO: 629981 - RNA, 20 nt, Artificial Sequence
  Synthetic
ugacuccugucaccagagau

SEQ ID NO: 629982 - RNA, 21 nt, Artificial Sequence
  Synthetic
gugacuccugucaccagagau

SEQ ID NO: 629983 - RNA, 22 nt, Artificial Sequence
  Synthetic
agugacuccugucaccagagau

SEQ ID NO: 629984 - RNA, 23 nt, Artificial Sequence
  Synthetic
gagugacuccugucaccagagau

SEQ ID NO: 629985 - RNA, 24 nt, Artificial Sequence
  Synthetic
agagugacuccugucaccagagau

SEQ ID NO: 629986 - RNA, 18 nt, Artificial Sequence
  Synthetic
uuggugguuaccagagau

SEQ ID NO: 629987 - RNA, 19 nt, Artificial Sequence
  Synthetic
cuuggugguuaccagagau

SEQ ID NO: 629988 - RNA, 20 nt, Artificial Sequence
  Synthetic
ccuuggugguuaccagagau

SEQ ID NO: 629989 - RNA, 21 nt, Artificial Sequence
  Synthetic
accuuggugguuaccagagau

SEQ ID NO: 629990 - RNA, 22 nt, Artificial Sequence
  Synthetic
uaccuuggugguuaccagagau

SEQ ID NO: 629991 - RNA, 23 nt, Artificial Sequence
  Synthetic
cuaccuuggugguuaccagagau

SEQ ID NO: 629992 - RNA, 24 nt, Artificial Sequence
  Synthetic
acuaccuuggugguuaccagagau

SEQ ID NO: 629993 - RNA, 18 nt, Artificial Sequence
  Synthetic
agucugcacuccagagau

SEQ ID NO: 629994 - RNA, 19 nt, Artificial Sequence
  Synthetic
aagucugcacuccagagau

SEQ ID NO: 629995 - RNA, 20 nt, Artificial Sequence
  Synthetic
gaagucugcacuccagagau

SEQ ID NO: 629996 - RNA, 21 nt, Artificial Sequence
  Synthetic
ugaagucugcacuccagagau

SEQ ID NO: 629997 - RNA, 22 nt, Artificial Sequence
  Synthetic
uugaagucugcacuccagagau

SEQ ID NO: 629998 - RNA, 23 nt, Artificial Sequence
  Synthetic
uuugaagucugcacuccagagau

SEQ ID NO: 629999 - RNA, 24 nt, Artificial Sequence
  Synthetic
uuuugaagucugcacuccagagau

SEQ ID NO: 630000 - RNA, 18 nt, Artificial Sequence
  Synthetic
ccacauggauucagagau

SEQ ID NO: 630001 - RNA, 19 nt, Artificial Sequence
  Synthetic
gccacauggauucagagau

SEQ ID NO: 630002 - RNA, 20 nt, Artificial Sequence
  Synthetic
ugccacauggauucagagau

SEQ ID NO: 630003 - RNA, 21 nt, Artificial Sequence
  Synthetic
augccacauggauucagagau

SEQ ID NO: 630004 - RNA, 22 nt, Artificial Sequence
  Synthetic
aaugccacauggauucagagau

SEQ ID NO: 630005 - RNA, 23 nt, Artificial Sequence
  Synthetic
uaaugccacauggauucagagau

SEQ ID NO: 630006 - RNA, 24 nt, Artificial Sequence
  Synthetic
guaaugccacauggauucagagau

SEQ ID NO: 630007 - RNA, 18 nt, Artificial Sequence
  Synthetic
ugcuuuugaaagagagau

SEQ ID NO: 630008 - RNA, 19 nt, Artificial Sequence
  Synthetic
cugcuuuugaaagagagau

SEQ ID NO: 630009 - RNA, 20 nt, Artificial Sequence
  Synthetic
acugcuuuugaaagagagau

SEQ ID NO: 630010 - RNA, 21 nt, Artificial Sequence
  Synthetic
aacugcuuuugaaagagagau

SEQ ID NO: 630011 - RNA, 22 nt, Artificial Sequence
  Synthetic
caacugcuuuugaaagagagau

SEQ ID NO: 630012 - RNA, 23 nt, Artificial Sequence
  Synthetic
ccaacugcuuuugaaagagagau

SEQ ID NO: 630013 - RNA, 24 nt, Artificial Sequence
  Synthetic
uccaacugcuuuugaaagagagau

SEQ ID NO: 630014 - RNA, 18 nt, Artificial Sequence
  Synthetic
agagaucagaagagagau

SEQ ID NO: 630015 - RNA, 19 nt, Artificial Sequence
  Synthetic
cagagaucagaagagagau

SEQ ID NO: 630016 - RNA, 20 nt, Artificial Sequence
  Synthetic
ucagagaucagaagagagau

SEQ ID NO: 630017 - RNA, 21 nt, Artificial Sequence
  Synthetic
uucagagaucagaagagagau

SEQ ID NO: 630018 - RNA, 22 nt, Artificial Sequence
  Synthetic
auucagagaucagaagagagau

SEQ ID NO: 630019 - RNA, 23 nt, Artificial Sequence
  Synthetic
gauucagagaucagaagagagau

SEQ ID NO: 630020 - RNA, 24 nt, Artificial Sequence
  Synthetic
ggauucagagaucagaagagagau

SEQ ID NO: 630021 - RNA, 18 nt, Artificial Sequence
  Synthetic
aaggagaggaagagagau

SEQ ID NO: 630022 - RNA, 19 nt, Artificial Sequence
  Synthetic
caaggagaggaagagagau

SEQ ID NO: 630023 - RNA, 20 nt, Artificial Sequence
  Synthetic
ccaaggagaggaagagagau

SEQ ID NO: 630024 - RNA, 21 nt, Artificial Sequence
  Synthetic
cccaaggagaggaagagagau

SEQ ID NO: 630025 - RNA, 22 nt, Artificial Sequence
  Synthetic
gcccaaggagaggaagagagau

SEQ ID NO: 630026 - RNA, 23 nt, Artificial Sequence
  Synthetic
ggcccaaggagaggaagagagau

SEQ ID NO: 630027 - RNA, 24 nt, Artificial Sequence
  Synthetic
aggcccaaggagaggaagagagau

SEQ ID NO: 630028 - RNA, 18 nt, Artificial Sequence
  Synthetic
gaagaaaccgagagagau

SEQ ID NO: 630029 - RNA, 19 nt, Artificial Sequence
  Synthetic
ugaagaaaccgagagagau

SEQ ID NO: 630030 - RNA, 20 nt, Artificial Sequence
  Synthetic
gugaagaaaccgagagagau

SEQ ID NO: 630031 - RNA, 21 nt, Artificial Sequence
  Synthetic
agugaagaaaccgagagagau

SEQ ID NO: 630032 - RNA, 22 nt, Artificial Sequence
  Synthetic
aagugaagaaaccgagagagau

SEQ ID NO: 630033 - RNA, 23 nt, Artificial Sequence
  Synthetic
gaagugaagaaaccgagagagau

SEQ ID NO: 630034 - RNA, 24 nt, Artificial Sequence
  Synthetic
agaagugaagaaaccgagagagau

SEQ ID NO: 630035 - RNA, 18 nt, Artificial Sequence
  Synthetic
acaaauagguggagagau

SEQ ID NO: 630036 - RNA, 19 nt, Artificial Sequence
  Synthetic
aacaaauagguggagagau

SEQ ID NO: 630037 - RNA, 20 nt, Artificial Sequence
  Synthetic
gaacaaauagguggagagau

SEQ ID NO: 630038 - RNA, 21 nt, Artificial Sequence
  Synthetic
ggaacaaauagguggagagau

SEQ ID NO: 630039 - RNA, 22 nt, Artificial Sequence
  Synthetic
aggaacaaauagguggagagau

SEQ ID NO: 630040 - RNA, 23 nt, Artificial Sequence
  Synthetic
aaggaacaaauagguggagagau

SEQ ID NO: 630041 - RNA, 24 nt, Artificial Sequence
  Synthetic
aaaggaacaaauagguggagagau

SEQ ID NO: 630042 - RNA, 18 nt, Artificial Sequence
  Synthetic
ccuacauuacugagagau

SEQ ID NO: 630043 - RNA, 19 nt, Artificial Sequence
  Synthetic
uccuacauuacugagagau

SEQ ID NO: 630044 - RNA, 20 nt, Artificial Sequence
  Synthetic
cuccuacauuacugagagau

SEQ ID NO: 630045 - RNA, 21 nt, Artificial Sequence
  Synthetic
acuccuacauuacugagagau

SEQ ID NO: 630046 - RNA, 22 nt, Artificial Sequence
  Synthetic
cacuccuacauuacugagagau

SEQ ID NO: 630047 - RNA, 23 nt, Artificial Sequence
  Synthetic
ucacuccuacauuacugagagau

SEQ ID NO: 630048 - RNA, 24 nt, Artificial Sequence
  Synthetic
gucacuccuacauuacugagagau

SEQ ID NO: 630049 - RNA, 18 nt, Artificial Sequence
  Synthetic
uguauacuugugagagau

SEQ ID NO: 630050 - RNA, 19 nt, Artificial Sequence
  Synthetic
guguauacuugugagagau

SEQ ID NO: 630051 - RNA, 20 nt, Artificial Sequence
  Synthetic
uguguauacuugugagagau

SEQ ID NO: 630052 - RNA, 21 nt, Artificial Sequence
  Synthetic
auguguauacuugugagagau

SEQ ID NO: 630053 - RNA, 22 nt, Artificial Sequence
  Synthetic
aauguguauacuugugagagau

SEQ ID NO: 630054 - RNA, 23 nt, Artificial Sequence
  Synthetic
aaauguguauacuugugagagau

SEQ ID NO: 630055 - RNA, 24 nt, Artificial Sequence
  Synthetic
caaauguguauacuugugagagau

SEQ ID NO: 630056 - RNA, 18 nt, Artificial Sequence
  Synthetic
ugguggugugguagagau

SEQ ID NO: 630057 - RNA, 19 nt, Artificial Sequence
  Synthetic
gugguggugugguagagau

SEQ ID NO: 630058 - RNA, 20 nt, Artificial Sequence
  Synthetic
ugugguggugugguagagau

SEQ ID NO: 630059 - RNA, 21 nt, Artificial Sequence
  Synthetic
gugugguggugugguagagau

SEQ ID NO: 630060 - RNA, 22 nt, Artificial Sequence
  Synthetic
ugugugguggugugguagagau

SEQ ID NO: 630061 - RNA, 23 nt, Artificial Sequence
  Synthetic
augugugguggugugguagagau

SEQ ID NO: 630062 - RNA, 24 nt, Artificial Sequence
  Synthetic
aaugugugguggugugguagagau

SEQ ID NO: 630063 - RNA, 18 nt, Artificial Sequence
  Synthetic
caggauuuugguagagau

SEQ ID NO: 630064 - RNA, 19 nt, Artificial Sequence
  Synthetic
acaggauuuugguagagau

SEQ ID NO: 630065 - RNA, 20 nt, Artificial Sequence
  Synthetic
gacaggauuuugguagagau

SEQ ID NO: 630066 - RNA, 21 nt, Artificial Sequence
  Synthetic
ugacaggauuuugguagagau

SEQ ID NO: 630067 - RNA, 22 nt, Artificial Sequence
  Synthetic
cugacaggauuuugguagagau

SEQ ID NO: 630068 - RNA, 23 nt, Artificial Sequence
  Synthetic
gcugacaggauuuugguagagau

SEQ ID NO: 630069 - RNA, 24 nt, Artificial Sequence
  Synthetic
ugcugacaggauuuugguagagau

SEQ ID NO: 630070 - RNA, 18 nt, Artificial Sequence
  Synthetic
caucuuauuauuagagau

SEQ ID NO: 630071 - RNA, 19 nt, Artificial Sequence
  Synthetic
acaucuuauuauuagagau

SEQ ID NO: 630072 - RNA, 20 nt, Artificial Sequence
  Synthetic
cacaucuuauuauuagagau

SEQ ID NO: 630073 - RNA, 21 nt, Artificial Sequence
  Synthetic
ucacaucuuauuauuagagau

SEQ ID NO: 630074 - RNA, 22 nt, Artificial Sequence
  Synthetic
uucacaucuuauuauuagagau

SEQ ID NO: 630075 - RNA, 23 nt, Artificial Sequence
  Synthetic
guucacaucuuauuauuagagau

SEQ ID NO: 630076 - RNA, 24 nt, Artificial Sequence
  Synthetic
aguucacaucuuauuauuagagau

SEQ ID NO: 630077 - RNA, 18 nt, Artificial Sequence
  Synthetic
guagguaaaacacgagau

SEQ ID NO: 630078 - RNA, 19 nt, Artificial Sequence
  Synthetic
cguagguaaaacacgagau

SEQ ID NO: 630079 - RNA, 20 nt, Artificial Sequence
  Synthetic
acguagguaaaacacgagau

SEQ ID NO: 630080 - RNA, 21 nt, Artificial Sequence
  Synthetic
gacguagguaaaacacgagau

SEQ ID NO: 630081 - RNA, 22 nt, Artificial Sequence
  Synthetic
agacguagguaaaacacgagau

SEQ ID NO: 630082 - RNA, 23 nt, Artificial Sequence
  Synthetic
gagacguagguaaaacacgagau

SEQ ID NO: 630083 - RNA, 24 nt, Artificial Sequence
  Synthetic
ggagacguagguaaaacacgagau

SEQ ID NO: 630084 - RNA, 18 nt, Artificial Sequence
  Synthetic
aggcaacagagacgagau

SEQ ID NO: 630085 - RNA, 19 nt, Artificial Sequence
  Synthetic
aaggcaacagagacgagau

SEQ ID NO: 630086 - RNA, 20 nt, Artificial Sequence
  Synthetic
aaaggcaacagagacgagau

SEQ ID NO: 630087 - RNA, 21 nt, Artificial Sequence
  Synthetic
gaaaggcaacagagacgagau

SEQ ID NO: 630088 - RNA, 22 nt, Artificial Sequence
  Synthetic
agaaaggcaacagagacgagau

SEQ ID NO: 630089 - RNA, 23 nt, Artificial Sequence
  Synthetic
gagaaaggcaacagagacgagau

SEQ ID NO: 630090 - RNA, 24 nt, Artificial Sequence
  Synthetic
ggagaaaggcaacagagacgagau

SEQ ID NO: 630091 - RNA, 18 nt, Artificial Sequence
  Synthetic
uugaauuuccaaggagau

SEQ ID NO: 630092 - RNA, 19 nt, Artificial Sequence
  Synthetic
guugaauuuccaaggagau

SEQ ID NO: 630093 - RNA, 20 nt, Artificial Sequence
  Synthetic
uguugaauuuccaaggagau

SEQ ID NO: 630094 - RNA, 21 nt, Artificial Sequence
  Synthetic
guguugaauuuccaaggagau

SEQ ID NO: 630095 - RNA, 22 nt, Artificial Sequence
  Synthetic
aguguugaauuuccaaggagau

SEQ ID NO: 630096 - RNA, 23 nt, Artificial Sequence
  Synthetic
aaguguugaauuuccaaggagau

SEQ ID NO: 630097 - RNA, 24 nt, Artificial Sequence
  Synthetic
aaaguguugaauuuccaaggagau

SEQ ID NO: 630098 - RNA, 18 nt, Artificial Sequence
  Synthetic
auaaacaaagcaggagau

SEQ ID NO: 630099 - RNA, 19 nt, Artificial Sequence
  Synthetic
uauaaacaaagcaggagau

SEQ ID NO: 630100 - RNA, 20 nt, Artificial Sequence
  Synthetic
uuauaaacaaagcaggagau

SEQ ID NO: 630101 - RNA, 21 nt, Artificial Sequence
  Synthetic
uuuauaaacaaagcaggagau

SEQ ID NO: 630102 - RNA, 22 nt, Artificial Sequence
  Synthetic
cuuuauaaacaaagcaggagau

SEQ ID NO: 630103 - RNA, 23 nt, Artificial Sequence
  Synthetic
gcuuuauaaacaaagcaggagau

SEQ ID NO: 630104 - RNA, 24 nt, Artificial Sequence
  Synthetic
agcuuuauaaacaaagcaggagau

SEQ ID NO: 630105 - RNA, 18 nt, Artificial Sequence
  Synthetic
aaaucaaacucaggagau

SEQ ID NO: 630106 - RNA, 19 nt, Artificial Sequence
  Synthetic
gaaaucaaacucaggagau

SEQ ID NO: 630107 - RNA, 20 nt, Artificial Sequence
  Synthetic
ugaaaucaaacucaggagau

SEQ ID NO: 630108 - RNA, 21 nt, Artificial Sequence
  Synthetic
cugaaaucaaacucaggagau

SEQ ID NO: 630109 - RNA, 22 nt, Artificial Sequence
  Synthetic
acugaaaucaaacucaggagau

SEQ ID NO: 630110 - RNA, 23 nt, Artificial Sequence
  Synthetic
gacugaaaucaaacucaggagau

SEQ ID NO: 630111 - RNA, 24 nt, Artificial Sequence
  Synthetic
ggacugaaaucaaacucaggagau

SEQ ID NO: 630112 - RNA, 18 nt, Artificial Sequence
  Synthetic
aaauuaaacucaggagau

SEQ ID NO: 630113 - RNA, 19 nt, Artificial Sequence
  Synthetic
gaaauuaaacucaggagau

SEQ ID NO: 630114 - RNA, 20 nt, Artificial Sequence
  Synthetic
ugaaauuaaacucaggagau

SEQ ID NO: 630115 - RNA, 21 nt, Artificial Sequence
  Synthetic
cugaaauuaaacucaggagau

SEQ ID NO: 630116 - RNA, 22 nt, Artificial Sequence
  Synthetic
acugaaauuaaacucaggagau

SEQ ID NO: 630117 - RNA, 23 nt, Artificial Sequence
  Synthetic
cacugaaauuaaacucaggagau

SEQ ID NO: 630118 - RNA, 24 nt, Artificial Sequence
  Synthetic
gcacugaaauuaaacucaggagau

SEQ ID NO: 630119 - RNA, 18 nt, Artificial Sequence
  Synthetic
aucacaaggucaggagau

SEQ ID NO: 630120 - RNA, 19 nt, Artificial Sequence
  Synthetic
gaucacaaggucaggagau

SEQ ID NO: 630121 - RNA, 20 nt, Artificial Sequence
  Synthetic
ggaucacaaggucaggagau

SEQ ID NO: 630122 - RNA, 21 nt, Artificial Sequence
  Synthetic
uggaucacaaggucaggagau

SEQ ID NO: 630123 - RNA, 22 nt, Artificial Sequence
  Synthetic
guggaucacaaggucaggagau

SEQ ID NO: 630124 - RNA, 23 nt, Artificial Sequence
  Synthetic
gguggaucacaaggucaggagau

SEQ ID NO: 630125 - RNA, 24 nt, Artificial Sequence
  Synthetic
ggguggaucacaaggucaggagau

SEQ ID NO: 630126 - RNA, 18 nt, Artificial Sequence
  Synthetic
acggaguacagaggagau

SEQ ID NO: 630127 - RNA, 19 nt, Artificial Sequence
  Synthetic
cacggaguacagaggagau

SEQ ID NO: 630128 - RNA, 20 nt, Artificial Sequence
  Synthetic
acacggaguacagaggagau

SEQ ID NO: 630129 - RNA, 21 nt, Artificial Sequence
  Synthetic
gacacggaguacagaggagau

SEQ ID NO: 630130 - RNA, 22 nt, Artificial Sequence
  Synthetic
ggacacggaguacagaggagau

SEQ ID NO: 630131 - RNA, 23 nt, Artificial Sequence
  Synthetic
gggacacggaguacagaggagau

SEQ ID NO: 630132 - RNA, 24 nt, Artificial Sequence
  Synthetic
ugggacacggaguacagaggagau

SEQ ID NO: 630133 - RNA, 18 nt, Artificial Sequence
  Synthetic
acaaaaaucagaggagau

SEQ ID NO: 630134 - RNA, 19 nt, Artificial Sequence
  Synthetic
aacaaaaaucagaggagau

SEQ ID NO: 630135 - RNA, 20 nt, Artificial Sequence
  Synthetic
gaacaaaaaucagaggagau

SEQ ID NO: 630136 - RNA, 21 nt, Artificial Sequence
  Synthetic
ggaacaaaaaucagaggagau

SEQ ID NO: 630137 - RNA, 22 nt, Artificial Sequence
  Synthetic
uggaacaaaaaucagaggagau

SEQ ID NO: 630138 - RNA, 23 nt, Artificial Sequence
  Synthetic
cuggaacaaaaaucagaggagau

SEQ ID NO: 630139 - RNA, 24 nt, Artificial Sequence
  Synthetic
acuggaacaaaaaucagaggagau

SEQ ID NO: 630140 - RNA, 18 nt, Artificial Sequence
  Synthetic
ugaaaagcaauaggagau

SEQ ID NO: 630141 - RNA, 19 nt, Artificial Sequence
  Synthetic
gugaaaagcaauaggagau

SEQ ID NO: 630142 - RNA, 20 nt, Artificial Sequence
  Synthetic
agugaaaagcaauaggagau

SEQ ID NO: 630143 - RNA, 21 nt, Artificial Sequence
  Synthetic
cagugaaaagcaauaggagau

SEQ ID NO: 630144 - RNA, 22 nt, Artificial Sequence
  Synthetic
acagugaaaagcaauaggagau

SEQ ID NO: 630145 - RNA, 23 nt, Artificial Sequence
  Synthetic
aacagugaaaagcaauaggagau

SEQ ID NO: 630146 - RNA, 24 nt, Artificial Sequence
  Synthetic
aaacagugaaaagcaauaggagau

SEQ ID NO: 630147 - RNA, 18 nt, Artificial Sequence
  Synthetic
caggauuagguaggagau

SEQ ID NO: 630148 - RNA, 19 nt, Artificial Sequence
  Synthetic
gcaggauuagguaggagau

SEQ ID NO: 630149 - RNA, 20 nt, Artificial Sequence
  Synthetic
ugcaggauuagguaggagau

SEQ ID NO: 630150 - RNA, 21 nt, Artificial Sequence
  Synthetic
cugcaggauuagguaggagau

SEQ ID NO: 630151 - RNA, 22 nt, Artificial Sequence
  Synthetic
ucugcaggauuagguaggagau

SEQ ID NO: 630152 - RNA, 23 nt, Artificial Sequence
  Synthetic
gucugcaggauuagguaggagau

SEQ ID NO: 630153 - RNA, 24 nt, Artificial Sequence
  Synthetic
agucugcaggauuagguaggagau

SEQ ID NO: 630154 - RNA, 18 nt, Artificial Sequence
  Synthetic
guggucucagagggagau

SEQ ID NO: 630155 - RNA, 19 nt, Artificial Sequence
  Synthetic
gguggucucagagggagau

SEQ ID NO: 630156 - RNA, 20 nt, Artificial Sequence
  Synthetic
agguggucucagagggagau

SEQ ID NO: 630157 - RNA, 21 nt, Artificial Sequence
  Synthetic
gagguggucucagagggagau

SEQ ID NO: 630158 - RNA, 22 nt, Artificial Sequence
  Synthetic
ugagguggucucagagggagau

SEQ ID NO: 630159 - RNA, 23 nt, Artificial Sequence
  Synthetic
cugagguggucucagagggagau

SEQ ID NO: 630160 - RNA, 24 nt, Artificial Sequence
  Synthetic
acugagguggucucagagggagau

SEQ ID NO: 630161 - RNA, 18 nt, Artificial Sequence
  Synthetic
uaaaugaaugagggagau

SEQ ID NO: 630162 - RNA, 19 nt, Artificial Sequence
  Synthetic
auaaaugaaugagggagau

SEQ ID NO: 630163 - RNA, 20 nt, Artificial Sequence
  Synthetic
aauaaaugaaugagggagau

SEQ ID NO: 630164 - RNA, 21 nt, Artificial Sequence
  Synthetic
aaauaaaugaaugagggagau

SEQ ID NO: 630165 - RNA, 22 nt, Artificial Sequence
  Synthetic
caaauaaaugaaugagggagau

SEQ ID NO: 630166 - RNA, 23 nt, Artificial Sequence
  Synthetic
acaaauaaaugaaugagggagau

SEQ ID NO: 630167 - RNA, 24 nt, Artificial Sequence
  Synthetic
aacaaauaaaugaaugagggagau

SEQ ID NO: 630168 - RNA, 18 nt, Artificial Sequence
  Synthetic
agcuuagcugagggagau

SEQ ID NO: 630169 - RNA, 19 nt, Artificial Sequence
  Synthetic
uagcuuagcugagggagau

SEQ ID NO: 630170 - RNA, 20 nt, Artificial Sequence
  Synthetic
auagcuuagcugagggagau

SEQ ID NO: 630171 - RNA, 21 nt, Artificial Sequence
  Synthetic
uauagcuuagcugagggagau

SEQ ID NO: 630172 - RNA, 22 nt, Artificial Sequence
  Synthetic
guauagcuuagcugagggagau

SEQ ID NO: 630173 - RNA, 23 nt, Artificial Sequence
  Synthetic
uguauagcuuagcugagggagau

SEQ ID NO: 630174 - RNA, 24 nt, Artificial Sequence
  Synthetic
cuguauagcuuagcugagggagau

SEQ ID NO: 630175 - RNA, 18 nt, Artificial Sequence
  Synthetic
uauacaaaauagggagau

SEQ ID NO: 630176 - RNA, 19 nt, Artificial Sequence
  Synthetic
auauacaaaauagggagau

SEQ ID NO: 630177 - RNA, 20 nt, Artificial Sequence
  Synthetic
cauauacaaaauagggagau

SEQ ID NO: 630178 - RNA, 21 nt, Artificial Sequence
  Synthetic
ucauauacaaaauagggagau

SEQ ID NO: 630179 - RNA, 22 nt, Artificial Sequence
  Synthetic
uucauauacaaaauagggagau

SEQ ID NO: 630180 - RNA, 23 nt, Artificial Sequence
  Synthetic
auucauauacaaaauagggagau

SEQ ID NO: 630181 - RNA, 24 nt, Artificial Sequence
  Synthetic
aauucauauacaaaauagggagau

SEQ ID NO: 630182 - RNA, 18 nt, Artificial Sequence
  Synthetic
gauugguaauggggagau

SEQ ID NO: 630183 - RNA, 19 nt, Artificial Sequence
  Synthetic
agauugguaauggggagau

SEQ ID NO: 630184 - RNA, 20 nt, Artificial Sequence
  Synthetic
gagauugguaauggggagau

SEQ ID NO: 630185 - RNA, 21 nt, Artificial Sequence
  Synthetic
agagauugguaauggggagau

SEQ ID NO: 630186 - RNA, 22 nt, Artificial Sequence
  Synthetic
gagagauugguaauggggagau

SEQ ID NO: 630187 - RNA, 23 nt, Artificial Sequence
  Synthetic
ugagagauugguaauggggagau

SEQ ID NO: 630188 - RNA, 24 nt, Artificial Sequence
  Synthetic
gugagagauugguaauggggagau

SEQ ID NO: 630189 - RNA, 18 nt, Artificial Sequence
  Synthetic
aagcuauucuggggagau

SEQ ID NO: 630190 - RNA, 19 nt, Artificial Sequence
  Synthetic
aaagcuauucuggggagau

SEQ ID NO: 630191 - RNA, 20 nt, Artificial Sequence
  Synthetic
uaaagcuauucuggggagau

SEQ ID NO: 630192 - RNA, 21 nt, Artificial Sequence
  Synthetic
guaaagcuauucuggggagau

SEQ ID NO: 630193 - RNA, 22 nt, Artificial Sequence
  Synthetic
uguaaagcuauucuggggagau

SEQ ID NO: 630194 - RNA, 23 nt, Artificial Sequence
  Synthetic
uuguaaagcuauucuggggagau

SEQ ID NO: 630195 - RNA, 24 nt, Artificial Sequence
  Synthetic
uuuguaaagcuauucuggggagau

SEQ ID NO: 630196 - RNA, 18 nt, Artificial Sequence
  Synthetic
uccucgggguggggagau

SEQ ID NO: 630197 - RNA, 19 nt, Artificial Sequence
  Synthetic
auccucgggguggggagau

SEQ ID NO: 630198 - RNA, 20 nt, Artificial Sequence
  Synthetic
cauccucgggguggggagau

SEQ ID NO: 630199 - RNA, 21 nt, Artificial Sequence
  Synthetic
acauccucgggguggggagau

SEQ ID NO: 630200 - RNA, 22 nt, Artificial Sequence
  Synthetic
aacauccucgggguggggagau

SEQ ID NO: 630201 - RNA, 23 nt, Artificial Sequence
  Synthetic
uaacauccucgggguggggagau

SEQ ID NO: 630202 - RNA, 24 nt, Artificial Sequence
  Synthetic
auaacauccucgggguggggagau

SEQ ID NO: 630203 - RNA, 18 nt, Artificial Sequence
  Synthetic
ccugagauuccuggagau

SEQ ID NO: 630204 - RNA, 19 nt, Artificial Sequence
  Synthetic
gccugagauuccuggagau

SEQ ID NO: 630205 - RNA, 20 nt, Artificial Sequence
  Synthetic
ugccugagauuccuggagau

SEQ ID NO: 630206 - RNA, 21 nt, Artificial Sequence
  Synthetic
gugccugagauuccuggagau

SEQ ID NO: 630207 - RNA, 22 nt, Artificial Sequence
  Synthetic
ggugccugagauuccuggagau

SEQ ID NO: 630208 - RNA, 23 nt, Artificial Sequence
  Synthetic
aggugccugagauuccuggagau

SEQ ID NO: 630209 - RNA, 24 nt, Artificial Sequence
  Synthetic
uaggugccugagauuccuggagau

SEQ ID NO: 630210 - RNA, 18 nt, Artificial Sequence
  Synthetic
aaguacaguucuggagau

SEQ ID NO: 630211 - RNA, 19 nt, Artificial Sequence
  Synthetic
aaaguacaguucuggagau

SEQ ID NO: 630212 - RNA, 20 nt, Artificial Sequence
  Synthetic
gaaaguacaguucuggagau

SEQ ID NO: 630213 - RNA, 21 nt, Artificial Sequence
  Synthetic
agaaaguacaguucuggagau

SEQ ID NO: 630214 - RNA, 22 nt, Artificial Sequence
  Synthetic
cagaaaguacaguucuggagau

SEQ ID NO: 630215 - RNA, 23 nt, Artificial Sequence
  Synthetic
gcagaaaguacaguucuggagau

SEQ ID NO: 630216 - RNA, 24 nt, Artificial Sequence
  Synthetic
ggcagaaaguacaguucuggagau

SEQ ID NO: 630217 - RNA, 18 nt, Artificial Sequence
  Synthetic
ggaggucaauguggagau

SEQ ID NO: 630218 - RNA, 19 nt, Artificial Sequence
  Synthetic
gggaggucaauguggagau

SEQ ID NO: 630219 - RNA, 20 nt, Artificial Sequence
  Synthetic
agggaggucaauguggagau

SEQ ID NO: 630220 - RNA, 21 nt, Artificial Sequence
  Synthetic
gagggaggucaauguggagau

SEQ ID NO: 630221 - RNA, 22 nt, Artificial Sequence
  Synthetic
ggagggaggucaauguggagau

SEQ ID NO: 630222 - RNA, 23 nt, Artificial Sequence
  Synthetic
aggagggaggucaauguggagau

SEQ ID NO: 630223 - RNA, 24 nt, Artificial Sequence
  Synthetic
uaggagggaggucaauguggagau

SEQ ID NO: 630224 - RNA, 18 nt, Artificial Sequence
  Synthetic
gugaaagggacaugagau

SEQ ID NO: 630225 - RNA, 19 nt, Artificial Sequence
  Synthetic
ugugaaagggacaugagau

SEQ ID NO: 630226 - RNA, 20 nt, Artificial Sequence
  Synthetic
augugaaagggacaugagau

SEQ ID NO: 630227 - RNA, 21 nt, Artificial Sequence
  Synthetic
aaugugaaagggacaugagau

SEQ ID NO: 630228 - RNA, 22 nt, Artificial Sequence
  Synthetic
aaaugugaaagggacaugagau

SEQ ID NO: 630229 - RNA, 23 nt, Artificial Sequence
  Synthetic
gaaaugugaaagggacaugagau

SEQ ID NO: 630230 - RNA, 24 nt, Artificial Sequence
  Synthetic
ugaaaugugaaagggacaugagau

SEQ ID NO: 630231 - RNA, 18 nt, Artificial Sequence
  Synthetic
accccuuguccaugagau

SEQ ID NO: 630232 - RNA, 19 nt, Artificial Sequence
  Synthetic
caccccuuguccaugagau

SEQ ID NO: 630233 - RNA, 20 nt, Artificial Sequence
  Synthetic
ccaccccuuguccaugagau

SEQ ID NO: 630234 - RNA, 21 nt, Artificial Sequence
  Synthetic
uccaccccuuguccaugagau

SEQ ID NO: 630235 - RNA, 22 nt, Artificial Sequence
  Synthetic
uuccaccccuuguccaugagau

SEQ ID NO: 630236 - RNA, 23 nt, Artificial Sequence
  Synthetic
cuuccaccccuuguccaugagau

SEQ ID NO: 630237 - RNA, 24 nt, Artificial Sequence
  Synthetic
acuuccaccccuuguccaugagau

SEQ ID NO: 630238 - RNA, 18 nt, Artificial Sequence
  Synthetic
gugaacggaucaugagau

SEQ ID NO: 630239 - RNA, 19 nt, Artificial Sequence
  Synthetic
ggugaacggaucaugagau

SEQ ID NO: 630240 - RNA, 20 nt, Artificial Sequence
  Synthetic
aggugaacggaucaugagau

SEQ ID NO: 630241 - RNA, 21 nt, Artificial Sequence
  Synthetic
gaggugaacggaucaugagau

SEQ ID NO: 630242 - RNA, 22 nt, Artificial Sequence
  Synthetic
cgaggugaacggaucaugagau

SEQ ID NO: 630243 - RNA, 23 nt, Artificial Sequence
  Synthetic
ccgaggugaacggaucaugagau

SEQ ID NO: 630244 - RNA, 24 nt, Artificial Sequence
  Synthetic
gccgaggugaacggaucaugagau

SEQ ID NO: 630245 - RNA, 18 nt, Artificial Sequence
  Synthetic
uuagucacaggaugagau

SEQ ID NO: 630246 - RNA, 19 nt, Artificial Sequence
  Synthetic
cuuagucacaggaugagau

SEQ ID NO: 630247 - RNA, 20 nt, Artificial Sequence
  Synthetic
ucuuagucacaggaugagau

SEQ ID NO: 630248 - RNA, 21 nt, Artificial Sequence
  Synthetic
uucuuagucacaggaugagau

SEQ ID NO: 630249 - RNA, 22 nt, Artificial Sequence
  Synthetic
auucuuagucacaggaugagau

SEQ ID NO: 630250 - RNA, 23 nt, Artificial Sequence
  Synthetic
cauucuuagucacaggaugagau

SEQ ID NO: 630251 - RNA, 24 nt, Artificial Sequence
  Synthetic
gcauucuuagucacaggaugagau

SEQ ID NO: 630252 - RNA, 18 nt, Artificial Sequence
  Synthetic
gaaaugaaaugaugagau

SEQ ID NO: 630253 - RNA, 19 nt, Artificial Sequence
  Synthetic
agaaaugaaaugaugagau

SEQ ID NO: 630254 - RNA, 20 nt, Artificial Sequence
  Synthetic
cagaaaugaaaugaugagau

SEQ ID NO: 630255 - RNA, 21 nt, Artificial Sequence
  Synthetic
gcagaaaugaaaugaugagau

SEQ ID NO: 630256 - RNA, 22 nt, Artificial Sequence
  Synthetic
ugcagaaaugaaaugaugagau

SEQ ID NO: 630257 - RNA, 23 nt, Artificial Sequence
  Synthetic
gugcagaaaugaaaugaugagau

SEQ ID NO: 630258 - RNA, 24 nt, Artificial Sequence
  Synthetic
ugugcagaaaugaaaugaugagau

SEQ ID NO: 630259 - RNA, 18 nt, Artificial Sequence
  Synthetic
ccauauuauuacugagau

SEQ ID NO: 630260 - RNA, 19 nt, Artificial Sequence
  Synthetic
cccauauuauuacugagau

SEQ ID NO: 630261 - RNA, 20 nt, Artificial Sequence
  Synthetic
gcccauauuauuacugagau

SEQ ID NO: 630262 - RNA, 21 nt, Artificial Sequence
  Synthetic
ugcccauauuauuacugagau

SEQ ID NO: 630263 - RNA, 22 nt, Artificial Sequence
  Synthetic
cugcccauauuauuacugagau

SEQ ID NO: 630264 - RNA, 23 nt, Artificial Sequence
  Synthetic
acugcccauauuauuacugagau

SEQ ID NO: 630265 - RNA, 24 nt, Artificial Sequence
  Synthetic
gacugcccauauuauuacugagau

SEQ ID NO: 630266 - RNA, 18 nt, Artificial Sequence
  Synthetic
auuuuuugaugcugagau

SEQ ID NO: 630267 - RNA, 19 nt, Artificial Sequence
  Synthetic
uauuuuuugaugcugagau

SEQ ID NO: 630268 - RNA, 20 nt, Artificial Sequence
  Synthetic
guauuuuuugaugcugagau

SEQ ID NO: 630269 - RNA, 21 nt, Artificial Sequence
  Synthetic
uguauuuuuugaugcugagau

SEQ ID NO: 630270 - RNA, 22 nt, Artificial Sequence
  Synthetic
uuguauuuuuugaugcugagau

SEQ ID NO: 630271 - RNA, 23 nt, Artificial Sequence
  Synthetic
uuuguauuuuuugaugcugagau

SEQ ID NO: 630272 - RNA, 24 nt, Artificial Sequence
  Synthetic
cuuuguauuuuuugaugcugagau

SEQ ID NO: 630273 - RNA, 18 nt, Artificial Sequence
  Synthetic
auauggugaaucugagau

SEQ ID NO: 630274 - RNA, 19 nt, Artificial Sequence
  Synthetic
cauauggugaaucugagau

SEQ ID NO: 630275 - RNA, 20 nt, Artificial Sequence
  Synthetic
acauauggugaaucugagau

SEQ ID NO: 630276 - RNA, 21 nt, Artificial Sequence
  Synthetic
aacauauggugaaucugagau

SEQ ID NO: 630277 - RNA, 22 nt, Artificial Sequence
  Synthetic
uaacauauggugaaucugagau

SEQ ID NO: 630278 - RNA, 23 nt, Artificial Sequence
  Synthetic
cuaacauauggugaaucugagau

SEQ ID NO: 630279 - RNA, 24 nt, Artificial Sequence
  Synthetic
ccuaacauauggugaaucugagau

SEQ ID NO: 630280 - RNA, 18 nt, Artificial Sequence
  Synthetic
agaguuuucaagugagau

SEQ ID NO: 630281 - RNA, 19 nt, Artificial Sequence
  Synthetic
uagaguuuucaagugagau

SEQ ID NO: 630282 - RNA, 20 nt, Artificial Sequence
  Synthetic
cuagaguuuucaagugagau

SEQ ID NO: 630283 - RNA, 21 nt, Artificial Sequence
  Synthetic
ccuagaguuuucaagugagau

SEQ ID NO: 630284 - RNA, 22 nt, Artificial Sequence
  Synthetic
cccuagaguuuucaagugagau

SEQ ID NO: 630285 - RNA, 23 nt, Artificial Sequence
  Synthetic
ccccuagaguuuucaagugagau

SEQ ID NO: 630286 - RNA, 24 nt, Artificial Sequence
  Synthetic
cccccuagaguuuucaagugagau

SEQ ID NO: 630287 - RNA, 18 nt, Artificial Sequence
  Synthetic
gggaaaaugaagugagau

SEQ ID NO: 630288 - RNA, 19 nt, Artificial Sequence
  Synthetic
agggaaaaugaagugagau

SEQ ID NO: 630289 - RNA, 20 nt, Artificial Sequence
  Synthetic
aagggaaaaugaagugagau

SEQ ID NO: 630290 - RNA, 21 nt, Artificial Sequence
  Synthetic
uaagggaaaaugaagugagau

SEQ ID NO: 630291 - RNA, 22 nt, Artificial Sequence
  Synthetic
guaagggaaaaugaagugagau

SEQ ID NO: 630292 - RNA, 23 nt, Artificial Sequence
  Synthetic
gguaagggaaaaugaagugagau

SEQ ID NO: 630293 - RNA, 24 nt, Artificial Sequence
  Synthetic
ugguaagggaaaaugaagugagau

SEQ ID NO: 630294 - RNA, 18 nt, Artificial Sequence
  Synthetic
uguuauccugagugagau

SEQ ID NO: 630295 - RNA, 19 nt, Artificial Sequence
  Synthetic
cuguuauccugagugagau

SEQ ID NO: 630296 - RNA, 20 nt, Artificial Sequence
  Synthetic
gcuguuauccugagugagau

SEQ ID NO: 630297 - RNA, 21 nt, Artificial Sequence
  Synthetic
ggcuguuauccugagugagau

SEQ ID NO: 630298 - RNA, 22 nt, Artificial Sequence
  Synthetic
uggcuguuauccugagugagau

SEQ ID NO: 630299 - RNA, 23 nt, Artificial Sequence
  Synthetic
uuggcuguuauccugagugagau

SEQ ID NO: 630300 - RNA, 24 nt, Artificial Sequence
  Synthetic
cuuggcuguuauccugagugagau

SEQ ID NO: 630301 - RNA, 18 nt, Artificial Sequence
  Synthetic
cagccucaaaugugagau

SEQ ID NO: 630302 - RNA, 19 nt, Artificial Sequence
  Synthetic
ucagccucaaaugugagau

SEQ ID NO: 630303 - RNA, 20 nt, Artificial Sequence
  Synthetic
aucagccucaaaugugagau

SEQ ID NO: 630304 - RNA, 21 nt, Artificial Sequence
  Synthetic
uaucagccucaaaugugagau

SEQ ID NO: 630305 - RNA, 22 nt, Artificial Sequence
  Synthetic
auaucagccucaaaugugagau

SEQ ID NO: 630306 - RNA, 23 nt, Artificial Sequence
  Synthetic
aauaucagccucaaaugugagau

SEQ ID NO: 630307 - RNA, 24 nt, Artificial Sequence
  Synthetic
uaauaucagccucaaaugugagau

SEQ ID NO: 630308 - RNA, 18 nt, Artificial Sequence
  Synthetic
agucuuuaucugugagau

SEQ ID NO: 630309 - RNA, 19 nt, Artificial Sequence
  Synthetic
gagucuuuaucugugagau

SEQ ID NO: 630310 - RNA, 20 nt, Artificial Sequence
  Synthetic
ugagucuuuaucugugagau

SEQ ID NO: 630311 - RNA, 21 nt, Artificial Sequence
  Synthetic
cugagucuuuaucugugagau

SEQ ID NO: 630312 - RNA, 22 nt, Artificial Sequence
  Synthetic
ucugagucuuuaucugugagau

SEQ ID NO: 630313 - RNA, 23 nt, Artificial Sequence
  Synthetic
cucugagucuuuaucugugagau

SEQ ID NO: 630314 - RNA, 24 nt, Artificial Sequence
  Synthetic
ucucugagucuuuaucugugagau

SEQ ID NO: 630315 - RNA, 18 nt, Artificial Sequence
  Synthetic
gcaaggucuaauugagau

SEQ ID NO: 630316 - RNA, 19 nt, Artificial Sequence
  Synthetic
agcaaggucuaauugagau

SEQ ID NO: 630317 - RNA, 20 nt, Artificial Sequence
  Synthetic
aagcaaggucuaauugagau

SEQ ID NO: 630318 - RNA, 21 nt, Artificial Sequence
  Synthetic
aaagcaaggucuaauugagau

SEQ ID NO: 630319 - RNA, 22 nt, Artificial Sequence
  Synthetic
caaagcaaggucuaauugagau

SEQ ID NO: 630320 - RNA, 23 nt, Artificial Sequence
  Synthetic
ucaaagcaaggucuaauugagau

SEQ ID NO: 630321 - RNA, 24 nt, Artificial Sequence
  Synthetic
cucaaagcaaggucuaauugagau

SEQ ID NO: 630322 - RNA, 18 nt, Artificial Sequence
  Synthetic
aucuuuucuuauugagau

SEQ ID NO: 630323 - RNA, 19 nt, Artificial Sequence
  Synthetic
caucuuuucuuauugagau

SEQ ID NO: 630324 - RNA, 20 nt, Artificial Sequence
  Synthetic
ucaucuuuucuuauugagau

SEQ ID NO: 630325 - RNA, 21 nt, Artificial Sequence
  Synthetic
aucaucuuuucuuauugagau

SEQ ID NO: 630326 - RNA, 22 nt, Artificial Sequence
  Synthetic
aaucaucuuuucuuauugagau

SEQ ID NO: 630327 - RNA, 23 nt, Artificial Sequence
  Synthetic
uaaucaucuuuucuuauugagau

SEQ ID NO: 630328 - RNA, 24 nt, Artificial Sequence
  Synthetic
auaaucaucuuuucuuauugagau

SEQ ID NO: 630329 - RNA, 18 nt, Artificial Sequence
  Synthetic
gggcggaucacuugagau

SEQ ID NO: 630330 - RNA, 19 nt, Artificial Sequence
  Synthetic
cgggcggaucacuugagau

SEQ ID NO: 630331 - RNA, 20 nt, Artificial Sequence
  Synthetic
gcgggcggaucacuugagau

SEQ ID NO: 630332 - RNA, 21 nt, Artificial Sequence
  Synthetic
ggcgggcggaucacuugagau

SEQ ID NO: 630333 - RNA, 22 nt, Artificial Sequence
  Synthetic
aggcgggcggaucacuugagau

SEQ ID NO: 630334 - RNA, 23 nt, Artificial Sequence
  Synthetic
aaggcgggcggaucacuugagau

SEQ ID NO: 630335 - RNA, 24 nt, Artificial Sequence
  Synthetic
caaggcgggcggaucacuugagau

SEQ ID NO: 630336 - RNA, 18 nt, Artificial Sequence
  Synthetic
ccuaauguaccuugagau

SEQ ID NO: 630337 - RNA, 19 nt, Artificial Sequence
  Synthetic
uccuaauguaccuugagau

SEQ ID NO: 630338 - RNA, 20 nt, Artificial Sequence
  Synthetic
uuccuaauguaccuugagau

SEQ ID NO: 630339 - RNA, 21 nt, Artificial Sequence
  Synthetic
guuccuaauguaccuugagau

SEQ ID NO: 630340 - RNA, 22 nt, Artificial Sequence
  Synthetic
aguuccuaauguaccuugagau

SEQ ID NO: 630341 - RNA, 23 nt, Artificial Sequence
  Synthetic
caguuccuaauguaccuugagau

SEQ ID NO: 630342 - RNA, 24 nt, Artificial Sequence
  Synthetic
acaguuccuaauguaccuugagau

SEQ ID NO: 630343 - RNA, 18 nt, Artificial Sequence
  Synthetic
cuugauaccucuugagau

SEQ ID NO: 630344 - RNA, 19 nt, Artificial Sequence
  Synthetic
gcuugauaccucuugagau

SEQ ID NO: 630345 - RNA, 20 nt, Artificial Sequence
  Synthetic
ugcuugauaccucuugagau

SEQ ID NO: 630346 - RNA, 21 nt, Artificial Sequence
  Synthetic
augcuugauaccucuugagau

SEQ ID NO: 630347 - RNA, 22 nt, Artificial Sequence
  Synthetic
aaugcuugauaccucuugagau

SEQ ID NO: 630348 - RNA, 23 nt, Artificial Sequence
  Synthetic
caaugcuugauaccucuugagau

SEQ ID NO: 630349 - RNA, 24 nt, Artificial Sequence
  Synthetic
ccaaugcuugauaccucuugagau

SEQ ID NO: 630350 - RNA, 18 nt, Artificial Sequence
  Synthetic
cuugcaguuucuugagau

SEQ ID NO: 630351 - RNA, 19 nt, Artificial Sequence
  Synthetic
gcuugcaguuucuugagau

SEQ ID NO: 630352 - RNA, 20 nt, Artificial Sequence
  Synthetic
agcuugcaguuucuugagau

SEQ ID NO: 630353 - RNA, 21 nt, Artificial Sequence
  Synthetic
aagcuugcaguuucuugagau

SEQ ID NO: 630354 - RNA, 22 nt, Artificial Sequence
  Synthetic
gaagcuugcaguuucuugagau

SEQ ID NO: 630355 - RNA, 23 nt, Artificial Sequence
  Synthetic
agaagcuugcaguuucuugagau

SEQ ID NO: 630356 - RNA, 24 nt, Artificial Sequence
  Synthetic
cagaagcuugcaguuucuugagau

SEQ ID NO: 630357 - RNA, 18 nt, Artificial Sequence
  Synthetic
gaagcaggugguugagau

SEQ ID NO: 630358 - RNA, 19 nt, Artificial Sequence
  Synthetic
agaagcaggugguugagau

SEQ ID NO: 630359 - RNA, 20 nt, Artificial Sequence
  Synthetic
cagaagcaggugguugagau

SEQ ID NO: 630360 - RNA, 21 nt, Artificial Sequence
  Synthetic
acagaagcaggugguugagau

SEQ ID NO: 630361 - RNA, 22 nt, Artificial Sequence
  Synthetic
aacagaagcaggugguugagau

SEQ ID NO: 630362 - RNA, 23 nt, Artificial Sequence
  Synthetic
aaacagaagcaggugguugagau

SEQ ID NO: 630363 - RNA, 24 nt, Artificial Sequence
  Synthetic
uaaacagaagcaggugguugagau

SEQ ID NO: 630364 - RNA, 18 nt, Artificial Sequence
  Synthetic
aaauuugcaguuugagau

SEQ ID NO: 630365 - RNA, 19 nt, Artificial Sequence
  Synthetic
uaaauuugcaguuugagau

SEQ ID NO: 630366 - RNA, 20 nt, Artificial Sequence
  Synthetic
uuaaauuugcaguuugagau

SEQ ID NO: 630367 - RNA, 21 nt, Artificial Sequence
  Synthetic
uuuaaauuugcaguuugagau

SEQ ID NO: 630368 - RNA, 22 nt, Artificial Sequence
  Synthetic
uuuuaaauuugcaguuugagau

SEQ ID NO: 630369 - RNA, 23 nt, Artificial Sequence
  Synthetic
uuuuuaaauuugcaguuugagau

SEQ ID NO: 630370 - RNA, 24 nt, Artificial Sequence
  Synthetic
auuuuuaaauuugcaguuugagau

SEQ ID NO: 630371 - RNA, 18 nt, Artificial Sequence
  Synthetic
uaggguguagaaauagau

SEQ ID NO: 630372 - RNA, 19 nt, Artificial Sequence
  Synthetic
cuaggguguagaaauagau

SEQ ID NO: 630373 - RNA, 20 nt, Artificial Sequence
  Synthetic
ucuaggguguagaaauagau

SEQ ID NO: 630374 - RNA, 21 nt, Artificial Sequence
  Synthetic
gucuaggguguagaaauagau

SEQ ID NO: 630375 - RNA, 22 nt, Artificial Sequence
  Synthetic
agucuaggguguagaaauagau

SEQ ID NO: 630376 - RNA, 23 nt, Artificial Sequence
  Synthetic
gagucuaggguguagaaauagau

SEQ ID NO: 630377 - RNA, 24 nt, Artificial Sequence
  Synthetic
agagucuaggguguagaaauagau

SEQ ID NO: 630378 - RNA, 18 nt, Artificial Sequence
  Synthetic
uuuuguguagaaauagau

SEQ ID NO: 630379 - RNA, 19 nt, Artificial Sequence
  Synthetic
cuuuuguguagaaauagau

SEQ ID NO: 630380 - RNA, 20 nt, Artificial Sequence
  Synthetic
gcuuuuguguagaaauagau

SEQ ID NO: 630381 - RNA, 21 nt, Artificial Sequence
  Synthetic
agcuuuuguguagaaauagau

SEQ ID NO: 630382 - RNA, 22 nt, Artificial Sequence
  Synthetic
uagcuuuuguguagaaauagau

SEQ ID NO: 630383 - RNA, 23 nt, Artificial Sequence
  Synthetic
cuagcuuuuguguagaaauagau

SEQ ID NO: 630384 - RNA, 24 nt, Artificial Sequence
  Synthetic
ucuagcuuuuguguagaaauagau

SEQ ID NO: 630385 - RNA, 18 nt, Artificial Sequence
  Synthetic
uacuacugugaaauagau

SEQ ID NO: 630386 - RNA, 19 nt, Artificial Sequence
  Synthetic
auacuacugugaaauagau

SEQ ID NO: 630387 - RNA, 20 nt, Artificial Sequence
  Synthetic
gauacuacugugaaauagau

SEQ ID NO: 630388 - RNA, 21 nt, Artificial Sequence
  Synthetic
agauacuacugugaaauagau

SEQ ID NO: 630389 - RNA, 22 nt, Artificial Sequence
  Synthetic
aagauacuacugugaaauagau

SEQ ID NO: 630390 - RNA, 23 nt, Artificial Sequence
  Synthetic
gaagauacuacugugaaauagau

SEQ ID NO: 630391 - RNA, 24 nt, Artificial Sequence
  Synthetic
agaagauacuacugugaaauagau

SEQ ID NO: 630392 - RNA, 18 nt, Artificial Sequence
  Synthetic
ggaucuaaggcaauagau

SEQ ID NO: 630393 - RNA, 19 nt, Artificial Sequence
  Synthetic
uggaucuaaggcaauagau

SEQ ID NO: 630394 - RNA, 20 nt, Artificial Sequence
  Synthetic
auggaucuaaggcaauagau

SEQ ID NO: 630395 - RNA, 21 nt, Artificial Sequence
  Synthetic
gauggaucuaaggcaauagau

SEQ ID NO: 630396 - RNA, 22 nt, Artificial Sequence
  Synthetic
agauggaucuaaggcaauagau

SEQ ID NO: 630397 - RNA, 23 nt, Artificial Sequence
  Synthetic
uagauggaucuaaggcaauagau

SEQ ID NO: 630398 - RNA, 24 nt, Artificial Sequence
  Synthetic
uuagauggaucuaaggcaauagau

SEQ ID NO: 630399 - RNA, 18 nt, Artificial Sequence
  Synthetic
aauuugcaacuaauagau

SEQ ID NO: 630400 - RNA, 19 nt, Artificial Sequence
  Synthetic
uaauuugcaacuaauagau

SEQ ID NO: 630401 - RNA, 20 nt, Artificial Sequence
  Synthetic
auaauuugcaacuaauagau

SEQ ID NO: 630402 - RNA, 21 nt, Artificial Sequence
  Synthetic
aauaauuugcaacuaauagau

SEQ ID NO: 630403 - RNA, 22 nt, Artificial Sequence
  Synthetic
aaauaauuugcaacuaauagau

SEQ ID NO: 630404 - RNA, 23 nt, Artificial Sequence
  Synthetic
aaaauaauuugcaacuaauagau

SEQ ID NO: 630405 - RNA, 24 nt, Artificial Sequence
  Synthetic
uaaaauaauuugcaacuaauagau

SEQ ID NO: 630406 - RNA, 18 nt, Artificial Sequence
  Synthetic
uuuggugacuuaauagau

SEQ ID NO: 630407 - RNA, 19 nt, Artificial Sequence
  Synthetic
auuuggugacuuaauagau

SEQ ID NO: 630408 - RNA, 20 nt, Artificial Sequence
  Synthetic
uauuuggugacuuaauagau

SEQ ID NO: 630409 - RNA, 21 nt, Artificial Sequence
  Synthetic
uuauuuggugacuuaauagau

SEQ ID NO: 630410 - RNA, 22 nt, Artificial Sequence
  Synthetic
uuuauuuggugacuuaauagau

SEQ ID NO: 630411 - RNA, 23 nt, Artificial Sequence
  Synthetic
cuuuauuuggugacuuaauagau

SEQ ID NO: 630412 - RNA, 24 nt, Artificial Sequence
  Synthetic
acuuuauuuggugacuuaauagau

SEQ ID NO: 630413 - RNA, 18 nt, Artificial Sequence
  Synthetic
gcagcaugagucauagau

SEQ ID NO: 630414 - RNA, 19 nt, Artificial Sequence
  Synthetic
ggcagcaugagucauagau

SEQ ID NO: 630415 - RNA, 20 nt, Artificial Sequence
  Synthetic
aggcagcaugagucauagau

SEQ ID NO: 630416 - RNA, 21 nt, Artificial Sequence
  Synthetic
aaggcagcaugagucauagau

SEQ ID NO: 630417 - RNA, 22 nt, Artificial Sequence
  Synthetic
uaaggcagcaugagucauagau

SEQ ID NO: 630418 - RNA, 23 nt, Artificial Sequence
  Synthetic
auaaggcagcaugagucauagau

SEQ ID NO: 630419 - RNA, 24 nt, Artificial Sequence
  Synthetic
aauaaggcagcaugagucauagau

SEQ ID NO: 630420 - RNA, 18 nt, Artificial Sequence
  Synthetic
uuuaugucugucauagau

SEQ ID NO: 630421 - RNA, 19 nt, Artificial Sequence
  Synthetic
cuuuaugucugucauagau

SEQ ID NO: 630422 - RNA, 20 nt, Artificial Sequence
  Synthetic
ucuuuaugucugucauagau

SEQ ID NO: 630423 - RNA, 21 nt, Artificial Sequence
  Synthetic
aucuuuaugucugucauagau

SEQ ID NO: 630424 - RNA, 22 nt, Artificial Sequence
  Synthetic
caucuuuaugucugucauagau

SEQ ID NO: 630425 - RNA, 23 nt, Artificial Sequence
  Synthetic
ucaucuuuaugucugucauagau

SEQ ID NO: 630426 - RNA, 24 nt, Artificial Sequence
  Synthetic
uucaucuuuaugucugucauagau

SEQ ID NO: 630427 - RNA, 18 nt, Artificial Sequence
  Synthetic
aggagguuaaugauagau

SEQ ID NO: 630428 - RNA, 19 nt, Artificial Sequence
  Synthetic
aaggagguuaaugauagau

SEQ ID NO: 630429 - RNA, 20 nt, Artificial Sequence
  Synthetic
caaggagguuaaugauagau

SEQ ID NO: 630430 - RNA, 21 nt, Artificial Sequence
  Synthetic
acaaggagguuaaugauagau

SEQ ID NO: 630431 - RNA, 22 nt, Artificial Sequence
  Synthetic
cacaaggagguuaaugauagau

SEQ ID NO: 630432 - RNA, 23 nt, Artificial Sequence
  Synthetic
gcacaaggagguuaaugauagau

SEQ ID NO: 630433 - RNA, 24 nt, Artificial Sequence
  Synthetic
ggcacaaggagguuaaugauagau

SEQ ID NO: 630434 - RNA, 18 nt, Artificial Sequence
  Synthetic
ggagagauagugauagau

SEQ ID NO: 630435 - RNA, 19 nt, Artificial Sequence
  Synthetic
aggagagauagugauagau

SEQ ID NO: 630436 - RNA, 20 nt, Artificial Sequence
  Synthetic
aaggagagauagugauagau

SEQ ID NO: 630437 - RNA, 21 nt, Artificial Sequence
  Synthetic
aaaggagagauagugauagau

SEQ ID NO: 630438 - RNA, 22 nt, Artificial Sequence
  Synthetic
aaaaggagagauagugauagau

SEQ ID NO: 630439 - RNA, 23 nt, Artificial Sequence
  Synthetic
gaaaaggagagauagugauagau

SEQ ID NO: 630440 - RNA, 24 nt, Artificial Sequence
  Synthetic
agaaaaggagagauagugauagau

SEQ ID NO: 630441 - RNA, 18 nt, Artificial Sequence
  Synthetic
aucuauauauauauagau

SEQ ID NO: 630442 - RNA, 19 nt, Artificial Sequence
  Synthetic
caucuauauauauauagau

SEQ ID NO: 630443 - RNA, 20 nt, Artificial Sequence
  Synthetic
acaucuauauauauauagau

SEQ ID NO: 630444 - RNA, 21 nt, Artificial Sequence
  Synthetic
uacaucuauauauauauagau

SEQ ID NO: 630445 - RNA, 22 nt, Artificial Sequence
  Synthetic
auacaucuauauauauauagau

SEQ ID NO: 630446 - RNA, 23 nt, Artificial Sequence
  Synthetic
uauacaucuauauauauauagau

SEQ ID NO: 630447 - RNA, 24 nt, Artificial Sequence
  Synthetic
auauacaucuauauauauauagau

SEQ ID NO: 630448 - RNA, 18 nt, Artificial Sequence
  Synthetic
cuacugaugucuauagau

SEQ ID NO: 630449 - RNA, 19 nt, Artificial Sequence
  Synthetic
ucuacugaugucuauagau

SEQ ID NO: 630450 - RNA, 20 nt, Artificial Sequence
  Synthetic
uucuacugaugucuauagau

SEQ ID NO: 630451 - RNA, 21 nt, Artificial Sequence
  Synthetic
uuucuacugaugucuauagau

SEQ ID NO: 630452 - RNA, 22 nt, Artificial Sequence
  Synthetic
guuucuacugaugucuauagau

SEQ ID NO: 630453 - RNA, 23 nt, Artificial Sequence
  Synthetic
uguuucuacugaugucuauagau

SEQ ID NO: 630454 - RNA, 24 nt, Artificial Sequence
  Synthetic
uuguuucuacugaugucuauagau

SEQ ID NO: 630455 - RNA, 18 nt, Artificial Sequence
  Synthetic
aucuuagcuauuauagau

SEQ ID NO: 630456 - RNA, 19 nt, Artificial Sequence
  Synthetic
uaucuuagcuauuauagau

SEQ ID NO: 630457 - RNA, 20 nt, Artificial Sequence
  Synthetic
cuaucuuagcuauuauagau

SEQ ID NO: 630458 - RNA, 21 nt, Artificial Sequence
  Synthetic
ccuaucuuagcuauuauagau

SEQ ID NO: 630459 - RNA, 22 nt, Artificial Sequence
  Synthetic
gccuaucuuagcuauuauagau

SEQ ID NO: 630460 - RNA, 23 nt, Artificial Sequence
  Synthetic
agccuaucuuagcuauuauagau

SEQ ID NO: 630461 - RNA, 24 nt, Artificial Sequence
  Synthetic
uagccuaucuuagcuauuauagau

SEQ ID NO: 630462 - RNA, 18 nt, Artificial Sequence
  Synthetic
caugaacaguuuauagau

SEQ ID NO: 630463 - RNA, 19 nt, Artificial Sequence
  Synthetic
ucaugaacaguuuauagau

SEQ ID NO: 630464 - RNA, 20 nt, Artificial Sequence
  Synthetic
aucaugaacaguuuauagau

SEQ ID NO: 630465 - RNA, 21 nt, Artificial Sequence
  Synthetic
uaucaugaacaguuuauagau

SEQ ID NO: 630466 - RNA, 22 nt, Artificial Sequence
  Synthetic
uuaucaugaacaguuuauagau

SEQ ID NO: 630467 - RNA, 23 nt, Artificial Sequence
  Synthetic
auuaucaugaacaguuuauagau

SEQ ID NO: 630468 - RNA, 24 nt, Artificial Sequence
  Synthetic
aauuaucaugaacaguuuauagau

SEQ ID NO: 630469 - RNA, 18 nt, Artificial Sequence
  Synthetic
ucuucuuuucaccuagau

SEQ ID NO: 630470 - RNA, 19 nt, Artificial Sequence
  Synthetic
uucuucuuuucaccuagau

SEQ ID NO: 630471 - RNA, 20 nt, Artificial Sequence
  Synthetic
uuucuucuuuucaccuagau

SEQ ID NO: 630472 - RNA, 21 nt, Artificial Sequence
  Synthetic
uuuucuucuuuucaccuagau

SEQ ID NO: 630473 - RNA, 22 nt, Artificial Sequence
  Synthetic
guuuucuucuuuucaccuagau

SEQ ID NO: 630474 - RNA, 23 nt, Artificial Sequence
  Synthetic
aguuuucuucuuuucaccuagau

SEQ ID NO: 630475 - RNA, 24 nt, Artificial Sequence
  Synthetic
gaguuuucuucuuuucaccuagau

SEQ ID NO: 630476 - RNA, 18 nt, Artificial Sequence
  Synthetic
aucauaacaacccuagau

SEQ ID NO: 630477 - RNA, 19 nt, Artificial Sequence
  Synthetic
gaucauaacaacccuagau

SEQ ID NO: 630478 - RNA, 20 nt, Artificial Sequence
  Synthetic
agaucauaacaacccuagau

SEQ ID NO: 630479 - RNA, 21 nt, Artificial Sequence
  Synthetic
aagaucauaacaacccuagau

SEQ ID NO: 630480 - RNA, 22 nt, Artificial Sequence
  Synthetic
gaagaucauaacaacccuagau

SEQ ID NO: 630481 - RNA, 23 nt, Artificial Sequence
  Synthetic
ugaagaucauaacaacccuagau

SEQ ID NO: 630482 - RNA, 24 nt, Artificial Sequence
  Synthetic
uugaagaucauaacaacccuagau

SEQ ID NO: 630483 - RNA, 18 nt, Artificial Sequence
  Synthetic
aauaaauuauagcuagau

SEQ ID NO: 630484 - RNA, 19 nt, Artificial Sequence
  Synthetic
aaauaaauuauagcuagau

SEQ ID NO: 630485 - RNA, 20 nt, Artificial Sequence
  Synthetic
aaaauaaauuauagcuagau

SEQ ID NO: 630486 - RNA, 21 nt, Artificial Sequence
  Synthetic
aaaaauaaauuauagcuagau

SEQ ID NO: 630487 - RNA, 22 nt, Artificial Sequence
  Synthetic
uaaaaauaaauuauagcuagau

SEQ ID NO: 630488 - RNA, 23 nt, Artificial Sequence
  Synthetic
uuaaaaauaaauuauagcuagau

SEQ ID NO: 630489 - RNA, 24 nt, Artificial Sequence
  Synthetic
uuuaaaaauaaauuauagcuagau

SEQ ID NO: 630490 - RNA, 18 nt, Artificial Sequence
  Synthetic
uuuccuggaaaucuagau

SEQ ID NO: 630491 - RNA, 19 nt, Artificial Sequence
  Synthetic
uuuuccuggaaaucuagau

SEQ ID NO: 630492 - RNA, 20 nt, Artificial Sequence
  Synthetic
auuuuccuggaaaucuagau

SEQ ID NO: 630493 - RNA, 21 nt, Artificial Sequence
  Synthetic
aauuuuccuggaaaucuagau

SEQ ID NO: 630494 - RNA, 22 nt, Artificial Sequence
  Synthetic
uaauuuuccuggaaaucuagau

SEQ ID NO: 630495 - RNA, 23 nt, Artificial Sequence
  Synthetic
cuaauuuuccuggaaaucuagau

SEQ ID NO: 630496 - RNA, 24 nt, Artificial Sequence
  Synthetic
ucuaauuuuccuggaaaucuagau

SEQ ID NO: 630497 - RNA, 18 nt, Artificial Sequence
  Synthetic
uuccuaagauaucuagau

SEQ ID NO: 630498 - RNA, 19 nt, Artificial Sequence
  Synthetic
uuuccuaagauaucuagau

SEQ ID NO: 630499 - RNA, 20 nt, Artificial Sequence
  Synthetic
uuuuccuaagauaucuagau

SEQ ID NO: 630500 - RNA, 21 nt, Artificial Sequence
  Synthetic
uuuuuccuaagauaucuagau

SEQ ID NO: 630501 - RNA, 22 nt, Artificial Sequence
  Synthetic
uuuuuuccuaagauaucuagau

SEQ ID NO: 630502 - RNA, 23 nt, Artificial Sequence
  Synthetic
cuuuuuuccuaagauaucuagau

SEQ ID NO: 630503 - RNA, 24 nt, Artificial Sequence
  Synthetic
ucuuuuuuccuaagauaucuagau

SEQ ID NO: 630504 - RNA, 18 nt, Artificial Sequence
  Synthetic
acuauuaagccucuagau

SEQ ID NO: 630505 - RNA, 19 nt, Artificial Sequence
  Synthetic
gacuauuaagccucuagau

SEQ ID NO: 630506 - RNA, 20 nt, Artificial Sequence
  Synthetic
agacuauuaagccucuagau

SEQ ID NO: 630507 - RNA, 21 nt, Artificial Sequence
  Synthetic
uagacuauuaagccucuagau

SEQ ID NO: 630508 - RNA, 22 nt, Artificial Sequence
  Synthetic
auagacuauuaagccucuagau

SEQ ID NO: 630509 - RNA, 23 nt, Artificial Sequence
  Synthetic
uauagacuauuaagccucuagau

SEQ ID NO: 630510 - RNA, 24 nt, Artificial Sequence
  Synthetic
auauagacuauuaagccucuagau

SEQ ID NO: 630511 - RNA, 18 nt, Artificial Sequence
  Synthetic
caucaaguaagucuagau

SEQ ID NO: 630512 - RNA, 19 nt, Artificial Sequence
  Synthetic
ucaucaaguaagucuagau

SEQ ID NO: 630513 - RNA, 20 nt, Artificial Sequence
  Synthetic
aucaucaaguaagucuagau

SEQ ID NO: 630514 - RNA, 21 nt, Artificial Sequence
  Synthetic
caucaucaaguaagucuagau

SEQ ID NO: 630515 - RNA, 22 nt, Artificial Sequence
  Synthetic
gcaucaucaaguaagucuagau

SEQ ID NO: 630516 - RNA, 23 nt, Artificial Sequence
  Synthetic
agcaucaucaaguaagucuagau

SEQ ID NO: 630517 - RNA, 24 nt, Artificial Sequence
  Synthetic
aagcaucaucaaguaagucuagau

SEQ ID NO: 630518 - RNA, 18 nt, Artificial Sequence
  Synthetic
uacugcaacugucuagau

SEQ ID NO: 630519 - RNA, 19 nt, Artificial Sequence
  Synthetic
cuacugcaacugucuagau

SEQ ID NO: 630520 - RNA, 20 nt, Artificial Sequence
  Synthetic
ucuacugcaacugucuagau

SEQ ID NO: 630521 - RNA, 21 nt, Artificial Sequence
  Synthetic
uucuacugcaacugucuagau

SEQ ID NO: 630522 - RNA, 22 nt, Artificial Sequence
  Synthetic
uuucuacugcaacugucuagau

SEQ ID NO: 630523 - RNA, 23 nt, Artificial Sequence
  Synthetic
uuuucuacugcaacugucuagau

SEQ ID NO: 630524 - RNA, 24 nt, Artificial Sequence
  Synthetic
cuuuucuacugcaacugucuagau

SEQ ID NO: 630525 - RNA, 18 nt, Artificial Sequence
  Synthetic
ugcacccauuuucuagau

SEQ ID NO: 630526 - RNA, 19 nt, Artificial Sequence
  Synthetic
gugcacccauuuucuagau

SEQ ID NO: 630527 - RNA, 20 nt, Artificial Sequence
  Synthetic
cgugcacccauuuucuagau

SEQ ID NO: 630528 - RNA, 21 nt, Artificial Sequence
  Synthetic
ucgugcacccauuuucuagau

SEQ ID NO: 630529 - RNA, 22 nt, Artificial Sequence
  Synthetic
uucgugcacccauuuucuagau

SEQ ID NO: 630530 - RNA, 23 nt, Artificial Sequence
  Synthetic
auucgugcacccauuuucuagau

SEQ ID NO: 630531 - RNA, 24 nt, Artificial Sequence
  Synthetic
uauucgugcacccauuuucuagau

SEQ ID NO: 630532 - RNA, 18 nt, Artificial Sequence
  Synthetic
ggaagaaaacaaguagau

SEQ ID NO: 630533 - RNA, 19 nt, Artificial Sequence
  Synthetic
uggaagaaaacaaguagau

SEQ ID NO: 630534 - RNA, 20 nt, Artificial Sequence
  Synthetic
auggaagaaaacaaguagau

SEQ ID NO: 630535 - RNA, 21 nt, Artificial Sequence
  Synthetic
aauggaagaaaacaaguagau

SEQ ID NO: 630536 - RNA, 22 nt, Artificial Sequence
  Synthetic
gaauggaagaaaacaaguagau

SEQ ID NO: 630537 - RNA, 23 nt, Artificial Sequence
  Synthetic
agaauggaagaaaacaaguagau

SEQ ID NO: 630538 - RNA, 24 nt, Artificial Sequence
  Synthetic
uagaauggaagaaaacaaguagau

SEQ ID NO: 630539 - RNA, 18 nt, Artificial Sequence
  Synthetic
cuuaccaaucaaguagau

SEQ ID NO: 630540 - RNA, 19 nt, Artificial Sequence
  Synthetic
gcuuaccaaucaaguagau

SEQ ID NO: 630541 - RNA, 20 nt, Artificial Sequence
  Synthetic
ugcuuaccaaucaaguagau

SEQ ID NO: 630542 - RNA, 21 nt, Artificial Sequence
  Synthetic
cugcuuaccaaucaaguagau

SEQ ID NO: 630543 - RNA, 22 nt, Artificial Sequence
  Synthetic
ucugcuuaccaaucaaguagau

SEQ ID NO: 630544 - RNA, 23 nt, Artificial Sequence
  Synthetic
cucugcuuaccaaucaaguagau

SEQ ID NO: 630545 - RNA, 24 nt, Artificial Sequence
  Synthetic
acucugcuuaccaaucaaguagau

SEQ ID NO: 630546 - RNA, 18 nt, Artificial Sequence
  Synthetic
uuuguauuuuaaguagau

SEQ ID NO: 630547 - RNA, 19 nt, Artificial Sequence
  Synthetic
uuuuguauuuuaaguagau

SEQ ID NO: 630548 - RNA, 20 nt, Artificial Sequence
  Synthetic
uuuuuguauuuuaaguagau

SEQ ID NO: 630549 - RNA, 21 nt, Artificial Sequence
  Synthetic
uuuuuuguauuuuaaguagau

SEQ ID NO: 630550 - RNA, 22 nt, Artificial Sequence
  Synthetic
auuuuuuguauuuuaaguagau

SEQ ID NO: 630551 - RNA, 23 nt, Artificial Sequence
  Synthetic
aauuuuuuguauuuuaaguagau

SEQ ID NO: 630552 - RNA, 24 nt, Artificial Sequence
  Synthetic
uaauuuuuuguauuuuaaguagau

SEQ ID NO: 630553 - RNA, 18 nt, Artificial Sequence
  Synthetic
auacaugugucaguagau

SEQ ID NO: 630554 - RNA, 19 nt, Artificial Sequence
  Synthetic
aauacaugugucaguagau

SEQ ID NO: 630555 - RNA, 20 nt, Artificial Sequence
  Synthetic
uaauacaugugucaguagau

SEQ ID NO: 630556 - RNA, 21 nt, Artificial Sequence
  Synthetic
uuaauacaugugucaguagau

SEQ ID NO: 630557 - RNA, 22 nt, Artificial Sequence
  Synthetic
uuuaauacaugugucaguagau

SEQ ID NO: 630558 - RNA, 23 nt, Artificial Sequence
  Synthetic
guuuaauacaugugucaguagau

SEQ ID NO: 630559 - RNA, 24 nt, Artificial Sequence
  Synthetic
aguuuaauacaugugucaguagau

SEQ ID NO: 630560 - RNA, 18 nt, Artificial Sequence
  Synthetic
gcuaauuggagaguagau

SEQ ID NO: 630561 - RNA, 19 nt, Artificial Sequence
  Synthetic
ugcuaauuggagaguagau

SEQ ID NO: 630562 - RNA, 20 nt, Artificial Sequence
  Synthetic
uugcuaauuggagaguagau

SEQ ID NO: 630563 - RNA, 21 nt, Artificial Sequence
  Synthetic
guugcuaauuggagaguagau

SEQ ID NO: 630564 - RNA, 22 nt, Artificial Sequence
  Synthetic
uguugcuaauuggagaguagau

SEQ ID NO: 630565 - RNA, 23 nt, Artificial Sequence
  Synthetic
auguugcuaauuggagaguagau

SEQ ID NO: 630566 - RNA, 24 nt, Artificial Sequence
  Synthetic
cauguugcuaauuggagaguagau

SEQ ID NO: 630567 - RNA, 18 nt, Artificial Sequence
  Synthetic
uucugagagggaguagau

SEQ ID NO: 630568 - RNA, 19 nt, Artificial Sequence
  Synthetic
auucugagagggaguagau

SEQ ID NO: 630569 - RNA, 20 nt, Artificial Sequence
  Synthetic
aauucugagagggaguagau

SEQ ID NO: 630570 - RNA, 21 nt, Artificial Sequence
  Synthetic
aaauucugagagggaguagau

SEQ ID NO: 630571 - RNA, 22 nt, Artificial Sequence
  Synthetic
aaaauucugagagggaguagau

SEQ ID NO: 630572 - RNA, 23 nt, Artificial Sequence
  Synthetic
aaaaauucugagagggaguagau

SEQ ID NO: 630573 - RNA, 24 nt, Artificial Sequence
  Synthetic
caaaaauucugagagggaguagau

SEQ ID NO: 630574 - RNA, 18 nt, Artificial Sequence
  Synthetic
agcaacuuuugaguagau

SEQ ID NO: 630575 - RNA, 19 nt, Artificial Sequence
  Synthetic
uagcaacuuuugaguagau

SEQ ID NO: 630576 - RNA, 20 nt, Artificial Sequence
  Synthetic
uuagcaacuuuugaguagau

SEQ ID NO: 630577 - RNA, 21 nt, Artificial Sequence
  Synthetic
auuagcaacuuuugaguagau

SEQ ID NO: 630578 - RNA, 22 nt, Artificial Sequence
  Synthetic
gauuagcaacuuuugaguagau

SEQ ID NO: 630579 - RNA, 23 nt, Artificial Sequence
  Synthetic
ugauuagcaacuuuugaguagau

SEQ ID NO: 630580 - RNA, 24 nt, Artificial Sequence
  Synthetic
augauuagcaacuuuugaguagau

SEQ ID NO: 630581 - RNA, 18 nt, Artificial Sequence
  Synthetic
uaccgcggacuaguagau

SEQ ID NO: 630582 - RNA, 19 nt, Artificial Sequence
  Synthetic
auaccgcggacuaguagau

SEQ ID NO: 630583 - RNA, 20 nt, Artificial Sequence
  Synthetic
gauaccgcggacuaguagau

SEQ ID NO: 630584 - RNA, 21 nt, Artificial Sequence
  Synthetic
agauaccgcggacuaguagau

SEQ ID NO: 630585 - RNA, 22 nt, Artificial Sequence
  Synthetic
cagauaccgcggacuaguagau

SEQ ID NO: 630586 - RNA, 23 nt, Artificial Sequence
  Synthetic
acagauaccgcggacuaguagau

SEQ ID NO: 630587 - RNA, 24 nt, Artificial Sequence
  Synthetic
aacagauaccgcggacuaguagau

SEQ ID NO: 630588 - RNA, 18 nt, Artificial Sequence
  Synthetic
augccaauuaacguagau

SEQ ID NO: 630589 - RNA, 19 nt, Artificial Sequence
  Synthetic
gaugccaauuaacguagau

SEQ ID NO: 630590 - RNA, 20 nt, Artificial Sequence
  Synthetic
agaugccaauuaacguagau

SEQ ID NO: 630591 - RNA, 21 nt, Artificial Sequence
  Synthetic
uagaugccaauuaacguagau

SEQ ID NO: 630592 - RNA, 22 nt, Artificial Sequence
  Synthetic
guagaugccaauuaacguagau

SEQ ID NO: 630593 - RNA, 23 nt, Artificial Sequence
  Synthetic
gguagaugccaauuaacguagau

SEQ ID NO: 630594 - RNA, 24 nt, Artificial Sequence
  Synthetic
ugguagaugccaauuaacguagau

SEQ ID NO: 630595 - RNA, 18 nt, Artificial Sequence
  Synthetic
aaaaucuuuugcguagau

SEQ ID NO: 630596 - RNA, 19 nt, Artificial Sequence
  Synthetic
aaaaaucuuuugcguagau

SEQ ID NO: 630597 - RNA, 20 nt, Artificial Sequence
  Synthetic
caaaaaucuuuugcguagau

SEQ ID NO: 630598 - RNA, 21 nt, Artificial Sequence
  Synthetic
ucaaaaaucuuuugcguagau

SEQ ID NO: 630599 - RNA, 22 nt, Artificial Sequence
  Synthetic
aucaaaaaucuuuugcguagau

SEQ ID NO: 630600 - RNA, 23 nt, Artificial Sequence
  Synthetic
aaucaaaaaucuuuugcguagau

SEQ ID NO: 630601 - RNA, 24 nt, Artificial Sequence
  Synthetic
gaaucaaaaaucuuuugcguagau

SEQ ID NO: 630602 - RNA, 18 nt, Artificial Sequence
  Synthetic
ugguugcucuagguagau

SEQ ID NO: 630603 - RNA, 19 nt, Artificial Sequence
  Synthetic
cugguugcucuagguagau

SEQ ID NO: 630604 - RNA, 20 nt, Artificial Sequence
  Synthetic
ccugguugcucuagguagau

SEQ ID NO: 630605 - RNA, 21 nt, Artificial Sequence
  Synthetic
gccugguugcucuagguagau

SEQ ID NO: 630606 - RNA, 22 nt, Artificial Sequence
  Synthetic
agccugguugcucuagguagau

SEQ ID NO: 630607 - RNA, 23 nt, Artificial Sequence
  Synthetic
gagccugguugcucuagguagau

SEQ ID NO: 630608 - RNA, 24 nt, Artificial Sequence
  Synthetic
ggagccugguugcucuagguagau

SEQ ID NO: 630609 - RNA, 18 nt, Artificial Sequence
  Synthetic
ugucuucacaugguagau

SEQ ID NO: 630610 - RNA, 19 nt, Artificial Sequence
  Synthetic
cugucuucacaugguagau

SEQ ID NO: 630611 - RNA, 20 nt, Artificial Sequence
  Synthetic
gcugucuucacaugguagau

SEQ ID NO: 630612 - RNA, 21 nt, Artificial Sequence
  Synthetic
ugcugucuucacaugguagau

SEQ ID NO: 630613 - RNA, 22 nt, Artificial Sequence
  Synthetic
cugcugucuucacaugguagau

SEQ ID NO: 630614 - RNA, 23 nt, Artificial Sequence
  Synthetic
ucugcugucuucacaugguagau

SEQ ID NO: 630615 - RNA, 24 nt, Artificial Sequence
  Synthetic
uucugcugucuucacaugguagau

SEQ ID NO: 630616 - RNA, 18 nt, Artificial Sequence
  Synthetic
auuaaaauauauguagau

SEQ ID NO: 630617 - RNA, 19 nt, Artificial Sequence
  Synthetic
aauuaaaauauauguagau

SEQ ID NO: 630618 - RNA, 20 nt, Artificial Sequence
  Synthetic
caauuaaaauauauguagau

SEQ ID NO: 630619 - RNA, 21 nt, Artificial Sequence
  Synthetic
acaauuaaaauauauguagau

SEQ ID NO: 630620 - RNA, 22 nt, Artificial Sequence
  Synthetic
gacaauuaaaauauauguagau

SEQ ID NO: 630621 - RNA, 23 nt, Artificial Sequence
  Synthetic
agacaauuaaaauauauguagau

SEQ ID NO: 630622 - RNA, 24 nt, Artificial Sequence
  Synthetic
uagacaauuaaaauauauguagau

SEQ ID NO: 630623 - RNA, 18 nt, Artificial Sequence
  Synthetic
cugauacuaccuguagau

SEQ ID NO: 630624 - RNA, 19 nt, Artificial Sequence
  Synthetic
gcugauacuaccuguagau

SEQ ID NO: 630625 - RNA, 20 nt, Artificial Sequence
  Synthetic
cgcugauacuaccuguagau

SEQ ID NO: 630626 - RNA, 21 nt, Artificial Sequence
  Synthetic
ucgcugauacuaccuguagau

SEQ ID NO: 630627 - RNA, 22 nt, Artificial Sequence
  Synthetic
uucgcugauacuaccuguagau

SEQ ID NO: 630628 - RNA, 23 nt, Artificial Sequence
  Synthetic
auucgcugauacuaccuguagau

SEQ ID NO: 630629 - RNA, 24 nt, Artificial Sequence
  Synthetic
cauucgcugauacuaccuguagau

SEQ ID NO: 630630 - RNA, 18 nt, Artificial Sequence
  Synthetic
aaugccuccucuguagau

SEQ ID NO: 630631 - RNA, 19 nt, Artificial Sequence
  Synthetic
caaugccuccucuguagau

SEQ ID NO: 630632 - RNA, 20 nt, Artificial Sequence
  Synthetic
ucaaugccuccucuguagau

SEQ ID NO: 630633 - RNA, 21 nt, Artificial Sequence
  Synthetic
cucaaugccuccucuguagau

SEQ ID NO: 630634 - RNA, 22 nt, Artificial Sequence
  Synthetic
ucucaaugccuccucuguagau

SEQ ID NO: 630635 - RNA, 23 nt, Artificial Sequence
  Synthetic
cucucaaugccuccucuguagau

SEQ ID NO: 630636 - RNA, 24 nt, Artificial Sequence
  Synthetic
acucucaaugccuccucuguagau

SEQ ID NO: 630637 - RNA, 18 nt, Artificial Sequence
  Synthetic
aaaaguauguguguagau

SEQ ID NO: 630638 - RNA, 19 nt, Artificial Sequence
  Synthetic
uaaaaguauguguguagau

SEQ ID NO: 630639 - RNA, 20 nt, Artificial Sequence
  Synthetic
auaaaaguauguguguagau

SEQ ID NO: 630640 - RNA, 21 nt, Artificial Sequence
  Synthetic
aauaaaaguauguguguagau

SEQ ID NO: 630641 - RNA, 22 nt, Artificial Sequence
  Synthetic
aaauaaaaguauguguguagau

SEQ ID NO: 630642 - RNA, 23 nt, Artificial Sequence
  Synthetic
uaaauaaaaguauguguguagau

SEQ ID NO: 630643 - RNA, 24 nt, Artificial Sequence
  Synthetic
auaaauaaaaguauguguguagau

SEQ ID NO: 630644 - RNA, 18 nt, Artificial Sequence
  Synthetic
uagccagaacaauuagau

SEQ ID NO: 630645 - RNA, 19 nt, Artificial Sequence
  Synthetic
cuagccagaacaauuagau

SEQ ID NO: 630646 - RNA, 20 nt, Artificial Sequence
  Synthetic
acuagccagaacaauuagau

SEQ ID NO: 630647 - RNA, 21 nt, Artificial Sequence
  Synthetic
uacuagccagaacaauuagau

SEQ ID NO: 630648 - RNA, 22 nt, Artificial Sequence
  Synthetic
guacuagccagaacaauuagau

SEQ ID NO: 630649 - RNA, 23 nt, Artificial Sequence
  Synthetic
aguacuagccagaacaauuagau

SEQ ID NO: 630650 - RNA, 24 nt, Artificial Sequence
  Synthetic
aaguacuagccagaacaauuagau

SEQ ID NO: 630651 - RNA, 18 nt, Artificial Sequence
  Synthetic
uccuucauggaauuagau

SEQ ID NO: 630652 - RNA, 19 nt, Artificial Sequence
  Synthetic
cuccuucauggaauuagau

SEQ ID NO: 630653 - RNA, 20 nt, Artificial Sequence
  Synthetic
ucuccuucauggaauuagau

SEQ ID NO: 630654 - RNA, 21 nt, Artificial Sequence
  Synthetic
cucuccuucauggaauuagau

SEQ ID NO: 630655 - RNA, 22 nt, Artificial Sequence
  Synthetic
acucuccuucauggaauuagau

SEQ ID NO: 630656 - RNA, 23 nt, Artificial Sequence
  Synthetic
uacucuccuucauggaauuagau

SEQ ID NO: 630657 - RNA, 24 nt, Artificial Sequence
  Synthetic
cuacucuccuucauggaauuagau

SEQ ID NO: 630658 - RNA, 18 nt, Artificial Sequence
  Synthetic
aaagucuaauaauuagau

SEQ ID NO: 630659 - RNA, 19 nt, Artificial Sequence
  Synthetic
aaaagucuaauaauuagau

SEQ ID NO: 630660 - RNA, 20 nt, Artificial Sequence
  Synthetic
aaaaagucuaauaauuagau

SEQ ID NO: 630661 - RNA, 21 nt, Artificial Sequence
  Synthetic
gaaaaagucuaauaauuagau

SEQ ID NO: 630662 - RNA, 22 nt, Artificial Sequence
  Synthetic
ggaaaaagucuaauaauuagau

SEQ ID NO: 630663 - RNA, 23 nt, Artificial Sequence
  Synthetic
aggaaaaagucuaauaauuagau

SEQ ID NO: 630664 - RNA, 24 nt, Artificial Sequence
  Synthetic
uaggaaaaagucuaauaauuagau

SEQ ID NO: 630665 - RNA, 18 nt, Artificial Sequence
  Synthetic
gaaauauuaagauuagau

SEQ ID NO: 630666 - RNA, 19 nt, Artificial Sequence
  Synthetic
ggaaauauuaagauuagau

SEQ ID NO: 630667 - RNA, 20 nt, Artificial Sequence
  Synthetic
aggaaauauuaagauuagau

SEQ ID NO: 630668 - RNA, 21 nt, Artificial Sequence
  Synthetic
aaggaaauauuaagauuagau

SEQ ID NO: 630669 - RNA, 22 nt, Artificial Sequence
  Synthetic
gaaggaaauauuaagauuagau

SEQ ID NO: 630670 - RNA, 23 nt, Artificial Sequence
  Synthetic
ggaaggaaauauuaagauuagau

SEQ ID NO: 630671 - RNA, 24 nt, Artificial Sequence
  Synthetic
gggaaggaaauauuaagauuagau

SEQ ID NO: 630672 - RNA, 18 nt, Artificial Sequence
  Synthetic
agcuuggaguuauuagau

SEQ ID NO: 630673 - RNA, 19 nt, Artificial Sequence
  Synthetic
aagcuuggaguuauuagau

SEQ ID NO: 630674 - RNA, 20 nt, Artificial Sequence
  Synthetic
uaagcuuggaguuauuagau

SEQ ID NO: 630675 - RNA, 21 nt, Artificial Sequence
  Synthetic
uuaagcuuggaguuauuagau

SEQ ID NO: 630676 - RNA, 22 nt, Artificial Sequence
  Synthetic
auuaagcuuggaguuauuagau

SEQ ID NO: 630677 - RNA, 23 nt, Artificial Sequence
  Synthetic
aauuaagcuuggaguuauuagau

SEQ ID NO: 630678 - RNA, 24 nt, Artificial Sequence
  Synthetic
gaauuaagcuuggaguuauuagau

SEQ ID NO: 630679 - RNA, 18 nt, Artificial Sequence
  Synthetic
caauauguuauguuagau

SEQ ID NO: 630680 - RNA, 19 nt, Artificial Sequence
  Synthetic
acaauauguuauguuagau

SEQ ID NO: 630681 - RNA, 20 nt, Artificial Sequence
  Synthetic
cacaauauguuauguuagau

SEQ ID NO: 630682 - RNA, 21 nt, Artificial Sequence
  Synthetic
acacaauauguuauguuagau

SEQ ID NO: 630683 - RNA, 22 nt, Artificial Sequence
  Synthetic
gacacaauauguuauguuagau

SEQ ID NO: 630684 - RNA, 23 nt, Artificial Sequence
  Synthetic
ugacacaauauguuauguuagau

SEQ ID NO: 630685 - RNA, 24 nt, Artificial Sequence
  Synthetic
uugacacaauauguuauguuagau

SEQ ID NO: 630686 - RNA, 18 nt, Artificial Sequence
  Synthetic
cggcaguaccuguuagau

SEQ ID NO: 630687 - RNA, 19 nt, Artificial Sequence
  Synthetic
acggcaguaccuguuagau

SEQ ID NO: 630688 - RNA, 20 nt, Artificial Sequence
  Synthetic
aacggcaguaccuguuagau

SEQ ID NO: 630689 - RNA, 21 nt, Artificial Sequence
  Synthetic
caacggcaguaccuguuagau

SEQ ID NO: 630690 - RNA, 22 nt, Artificial Sequence
  Synthetic
ucaacggcaguaccuguuagau

SEQ ID NO: 630691 - RNA, 23 nt, Artificial Sequence
  Synthetic
uucaacggcaguaccuguuagau

SEQ ID NO: 630692 - RNA, 24 nt, Artificial Sequence
  Synthetic
uuucaacggcaguaccuguuagau

SEQ ID NO: 630693 - RNA, 18 nt, Artificial Sequence
  Synthetic
uuggagacuguguuagau

SEQ ID NO: 630694 - RNA, 19 nt, Artificial Sequence
  Synthetic
guuggagacuguguuagau

SEQ ID NO: 630695 - RNA, 20 nt, Artificial Sequence
  Synthetic
aguuggagacuguguuagau

SEQ ID NO: 630696 - RNA, 21 nt, Artificial Sequence
  Synthetic
aaguuggagacuguguuagau

SEQ ID NO: 630697 - RNA, 22 nt, Artificial Sequence
  Synthetic
uaaguuggagacuguguuagau

SEQ ID NO: 630698 - RNA, 23 nt, Artificial Sequence
  Synthetic
guaaguuggagacuguguuagau

SEQ ID NO: 630699 - RNA, 24 nt, Artificial Sequence
  Synthetic
uguaaguuggagacuguguuagau

SEQ ID NO: 630700 - RNA, 18 nt, Artificial Sequence
  Synthetic
uacaaaccuuuguuagau

SEQ ID NO: 630701 - RNA, 19 nt, Artificial Sequence
  Synthetic
uuacaaaccuuuguuagau

SEQ ID NO: 630702 - RNA, 20 nt, Artificial Sequence
  Synthetic
auuacaaaccuuuguuagau

SEQ ID NO: 630703 - RNA, 21 nt, Artificial Sequence
  Synthetic
aauuacaaaccuuuguuagau

SEQ ID NO: 630704 - RNA, 22 nt, Artificial Sequence
  Synthetic
aaauuacaaaccuuuguuagau

SEQ ID NO: 630705 - RNA, 23 nt, Artificial Sequence
  Synthetic
gaaauuacaaaccuuuguuagau

SEQ ID NO: 630706 - RNA, 24 nt, Artificial Sequence
  Synthetic
agaaauuacaaaccuuuguuagau

SEQ ID NO: 630707 - RNA, 18 nt, Artificial Sequence
  Synthetic
uucaaagcaaauuuagau

SEQ ID NO: 630708 - RNA, 19 nt, Artificial Sequence
  Synthetic
uuucaaagcaaauuuagau

SEQ ID NO: 630709 - RNA, 20 nt, Artificial Sequence
  Synthetic
uuuucaaagcaaauuuagau

SEQ ID NO: 630710 - RNA, 21 nt, Artificial Sequence
  Synthetic
auuuucaaagcaaauuuagau

SEQ ID NO: 630711 - RNA, 22 nt, Artificial Sequence
  Synthetic
uauuuucaaagcaaauuuagau

SEQ ID NO: 630712 - RNA, 23 nt, Artificial Sequence
  Synthetic
auauuuucaaagcaaauuuagau

SEQ ID NO: 630713 - RNA, 24 nt, Artificial Sequence
  Synthetic
cauauuuucaaagcaaauuuagau

SEQ ID NO: 630714 - RNA, 18 nt, Artificial Sequence
  Synthetic
acccucaagaauuuagau

SEQ ID NO: 630715 - RNA, 19 nt, Artificial Sequence
  Synthetic
gacccucaagaauuuagau

SEQ ID NO: 630716 - RNA, 20 nt, Artificial Sequence
  Synthetic
ugacccucaagaauuuagau

SEQ ID NO: 630717 - RNA, 21 nt, Artificial Sequence
  Synthetic
gugacccucaagaauuuagau

SEQ ID NO: 630718 - RNA, 22 nt, Artificial Sequence
  Synthetic
ggugacccucaagaauuuagau

SEQ ID NO: 630719 - RNA, 23 nt, Artificial Sequence
  Synthetic
gggugacccucaagaauuuagau

SEQ ID NO: 630720 - RNA, 24 nt, Artificial Sequence
  Synthetic
ugggugacccucaagaauuuagau

SEQ ID NO: 630721 - RNA, 18 nt, Artificial Sequence
  Synthetic
gagcuguccuauuuagau

SEQ ID NO: 630722 - RNA, 19 nt, Artificial Sequence
  Synthetic
ugagcuguccuauuuagau

SEQ ID NO: 630723 - RNA, 20 nt, Artificial Sequence
  Synthetic
uugagcuguccuauuuagau

SEQ ID NO: 630724 - RNA, 21 nt, Artificial Sequence
  Synthetic
cuugagcuguccuauuuagau

SEQ ID NO: 630725 - RNA, 22 nt, Artificial Sequence
  Synthetic
acuugagcuguccuauuuagau

SEQ ID NO: 630726 - RNA, 23 nt, Artificial Sequence
  Synthetic
aacuugagcuguccuauuuagau

SEQ ID NO: 630727 - RNA, 24 nt, Artificial Sequence
  Synthetic
uaacuugagcuguccuauuuagau

SEQ ID NO: 630728 - RNA, 18 nt, Artificial Sequence
  Synthetic
uuaaguaagauuuuagau

SEQ ID NO: 630729 - RNA, 19 nt, Artificial Sequence
  Synthetic
guuaaguaagauuuuagau

SEQ ID NO: 630730 - RNA, 20 nt, Artificial Sequence
  Synthetic
aguuaaguaagauuuuagau

SEQ ID NO: 630731 - RNA, 21 nt, Artificial Sequence
  Synthetic
uaguuaaguaagauuuuagau

SEQ ID NO: 630732 - RNA, 22 nt, Artificial Sequence
  Synthetic
cuaguuaaguaagauuuuagau

SEQ ID NO: 630733 - RNA, 23 nt, Artificial Sequence
  Synthetic
gcuaguuaaguaagauuuuagau

SEQ ID NO: 630734 - RNA, 24 nt, Artificial Sequence
  Synthetic
agcuaguuaaguaagauuuuagau

SEQ ID NO: 630735 - RNA, 18 nt, Artificial Sequence
  Synthetic
aucaaaacauuuuuagau

SEQ ID NO: 630736 - RNA, 19 nt, Artificial Sequence
  Synthetic
aaucaaaacauuuuuagau

SEQ ID NO: 630737 - RNA, 20 nt, Artificial Sequence
  Synthetic
aaaucaaaacauuuuuagau

SEQ ID NO: 630738 - RNA, 21 nt, Artificial Sequence
  Synthetic
uaaaucaaaacauuuuuagau

SEQ ID NO: 630739 - RNA, 22 nt, Artificial Sequence
  Synthetic
guaaaucaaaacauuuuuagau

SEQ ID NO: 630740 - RNA, 23 nt, Artificial Sequence
  Synthetic
uguaaaucaaaacauuuuuagau

SEQ ID NO: 630741 - RNA, 24 nt, Artificial Sequence
  Synthetic
uuguaaaucaaaacauuuuuagau

SEQ ID NO: 630742 - RNA, 18 nt, Artificial Sequence
  Synthetic
aauaauaauaaaaacgau

SEQ ID NO: 630743 - RNA, 19 nt, Artificial Sequence
  Synthetic
aaauaauaauaaaaacgau

SEQ ID NO: 630744 - RNA, 20 nt, Artificial Sequence
  Synthetic
gaaauaauaauaaaaacgau

SEQ ID NO: 630745 - RNA, 21 nt, Artificial Sequence
  Synthetic
ugaaauaauaauaaaaacgau

SEQ ID NO: 630746 - RNA, 22 nt, Artificial Sequence
  Synthetic
uugaaauaauaauaaaaacgau

SEQ ID NO: 630747 - RNA, 23 nt, Artificial Sequence
  Synthetic
auugaaauaauaauaaaaacgau

SEQ ID NO: 630748 - RNA, 24 nt, Artificial Sequence
  Synthetic
cauugaaauaauaauaaaaacgau

SEQ ID NO: 630749 - RNA, 18 nt, Artificial Sequence
  Synthetic
guagauguggaaaacgau

SEQ ID NO: 630750 - RNA, 19 nt, Artificial Sequence
  Synthetic
aguagauguggaaaacgau

SEQ ID NO: 630751 - RNA, 20 nt, Artificial Sequence
  Synthetic
gaguagauguggaaaacgau

SEQ ID NO: 630752 - RNA, 21 nt, Artificial Sequence
  Synthetic
ugaguagauguggaaaacgau

SEQ ID NO: 630753 - RNA, 22 nt, Artificial Sequence
  Synthetic
uugaguagauguggaaaacgau

SEQ ID NO: 630754 - RNA, 23 nt, Artificial Sequence
  Synthetic
uuugaguagauguggaaaacgau

SEQ ID NO: 630755 - RNA, 24 nt, Artificial Sequence
  Synthetic
uuuugaguagauguggaaaacgau

SEQ ID NO: 630756 - RNA, 18 nt, Artificial Sequence
  Synthetic
caggagaaggagaacgau

SEQ ID NO: 630757 - RNA, 19 nt, Artificial Sequence
  Synthetic
acaggagaaggagaacgau

SEQ ID NO: 630758 - RNA, 20 nt, Artificial Sequence
  Synthetic
aacaggagaaggagaacgau

SEQ ID NO: 630759 - RNA, 21 nt, Artificial Sequence
  Synthetic
aaacaggagaaggagaacgau

SEQ ID NO: 630760 - RNA, 22 nt, Artificial Sequence
  Synthetic
aaaacaggagaaggagaacgau

SEQ ID NO: 630761 - RNA, 23 nt, Artificial Sequence
  Synthetic
aaaaacaggagaaggagaacgau

SEQ ID NO: 630762 - RNA, 24 nt, Artificial Sequence
  Synthetic
gaaaaacaggagaaggagaacgau

SEQ ID NO: 630763 - RNA, 18 nt, Artificial Sequence
  Synthetic
gucuuuacaaugaacgau

SEQ ID NO: 630764 - RNA, 19 nt, Artificial Sequence
  Synthetic
agucuuuacaaugaacgau

SEQ ID NO: 630765 - RNA, 20 nt, Artificial Sequence
  Synthetic
cagucuuuacaaugaacgau

SEQ ID NO: 630766 - RNA, 21 nt, Artificial Sequence
  Synthetic
gcagucuuuacaaugaacgau

SEQ ID NO: 630767 - RNA, 22 nt, Artificial Sequence
  Synthetic
agcagucuuuacaaugaacgau

SEQ ID NO: 630768 - RNA, 23 nt, Artificial Sequence
  Synthetic
gagcagucuuuacaaugaacgau

SEQ ID NO: 630769 - RNA, 24 nt, Artificial Sequence
  Synthetic
ggagcagucuuuacaaugaacgau

SEQ ID NO: 630770 - RNA, 21 nt, Artificial Sequence
  Synthetic
cauaagugggaguugaacgau

SEQ ID NO: 630771 - RNA, 22 nt, Artificial Sequence
  Synthetic
ccauaagugggaguugaacgau

SEQ ID NO: 630772 - RNA, 23 nt, Artificial Sequence
  Synthetic
cccauaagugggaguugaacgau

SEQ ID NO: 630773 - RNA, 24 nt, Artificial Sequence
  Synthetic
acccauaagugggaguugaacgau

SEQ ID NO: 630774 - RNA, 18 nt, Artificial Sequence
  Synthetic
aucauuugagcccacgau

SEQ ID NO: 630775 - RNA, 19 nt, Artificial Sequence
  Synthetic
aaucauuugagcccacgau

SEQ ID NO: 630776 - RNA, 20 nt, Artificial Sequence
  Synthetic
gaaucauuugagcccacgau

SEQ ID NO: 630777 - RNA, 21 nt, Artificial Sequence
  Synthetic
agaaucauuugagcccacgau

SEQ ID NO: 630778 - RNA, 22 nt, Artificial Sequence
  Synthetic
gagaaucauuugagcccacgau

SEQ ID NO: 630779 - RNA, 23 nt, Artificial Sequence
  Synthetic
ggagaaucauuugagcccacgau

SEQ ID NO: 630780 - RNA, 24 nt, Artificial Sequence
  Synthetic
aggagaaucauuugagcccacgau

SEQ ID NO: 630781 - RNA, 18 nt, Artificial Sequence
  Synthetic
uagugggcauagcacgau

SEQ ID NO: 630782 - RNA, 19 nt, Artificial Sequence
  Synthetic
guagugggcauagcacgau

SEQ ID NO: 630783 - RNA, 20 nt, Artificial Sequence
  Synthetic
uguagugggcauagcacgau

SEQ ID NO: 630784 - RNA, 21 nt, Artificial Sequence
  Synthetic
auguagugggcauagcacgau

SEQ ID NO: 630785 - RNA, 22 nt, Artificial Sequence
  Synthetic
cauguagugggcauagcacgau

SEQ ID NO: 630786 - RNA, 23 nt, Artificial Sequence
  Synthetic
ucauguagugggcauagcacgau

SEQ ID NO: 630787 - RNA, 24 nt, Artificial Sequence
  Synthetic
gucauguagugggcauagcacgau

SEQ ID NO: 630788 - RNA, 18 nt, Artificial Sequence
  Synthetic
uguguaucuuggcacgau

SEQ ID NO: 630789 - RNA, 19 nt, Artificial Sequence
  Synthetic
auguguaucuuggcacgau

SEQ ID NO: 630790 - RNA, 20 nt, Artificial Sequence
  Synthetic
uauguguaucuuggcacgau

SEQ ID NO: 630791 - RNA, 21 nt, Artificial Sequence
  Synthetic
uuauguguaucuuggcacgau

SEQ ID NO: 630792 - RNA, 22 nt, Artificial Sequence
  Synthetic
guuauguguaucuuggcacgau

SEQ ID NO: 630793 - RNA, 23 nt, Artificial Sequence
  Synthetic
aguuauguguaucuuggcacgau

SEQ ID NO: 630794 - RNA, 24 nt, Artificial Sequence
  Synthetic
aaguuauguguaucuuggcacgau

SEQ ID NO: 630795 - RNA, 18 nt, Artificial Sequence
  Synthetic
ucugaauacagagacgau

SEQ ID NO: 630796 - RNA, 19 nt, Artificial Sequence
  Synthetic
gucugaauacagagacgau

SEQ ID NO: 630797 - RNA, 20 nt, Artificial Sequence
  Synthetic
ugucugaauacagagacgau

SEQ ID NO: 630798 - RNA, 21 nt, Artificial Sequence
  Synthetic
cugucugaauacagagacgau

SEQ ID NO: 630799 - RNA, 22 nt, Artificial Sequence
  Synthetic
acugucugaauacagagacgau

SEQ ID NO: 630800 - RNA, 23 nt, Artificial Sequence
  Synthetic
uacugucugaauacagagacgau

SEQ ID NO: 630801 - RNA, 24 nt, Artificial Sequence
  Synthetic
cuacugucugaauacagagacgau

SEQ ID NO: 630802 - RNA, 18 nt, Artificial Sequence
  Synthetic
gguuugaggugagacgau

SEQ ID NO: 630803 - RNA, 19 nt, Artificial Sequence
  Synthetic
agguuugaggugagacgau

SEQ ID NO: 630804 - RNA, 20 nt, Artificial Sequence
  Synthetic
aagguuugaggugagacgau

SEQ ID NO: 630805 - RNA, 21 nt, Artificial Sequence
  Synthetic
uaagguuugaggugagacgau

SEQ ID NO: 630806 - RNA, 22 nt, Artificial Sequence
  Synthetic
guaagguuugaggugagacgau

SEQ ID NO: 630807 - RNA, 23 nt, Artificial Sequence
  Synthetic
uguaagguuugaggugagacgau

SEQ ID NO: 630808 - RNA, 24 nt, Artificial Sequence
  Synthetic
uuguaagguuugaggugagacgau

SEQ ID NO: 630809 - RNA, 18 nt, Artificial Sequence
  Synthetic
uugagggauguauacgau

SEQ ID NO: 630810 - RNA, 19 nt, Artificial Sequence
  Synthetic
cuugagggauguauacgau

SEQ ID NO: 630811 - RNA, 20 nt, Artificial Sequence
  Synthetic
ccuugagggauguauacgau

SEQ ID NO: 630812 - RNA, 21 nt, Artificial Sequence
  Synthetic
gccuugagggauguauacgau

SEQ ID NO: 630813 - RNA, 22 nt, Artificial Sequence
  Synthetic
agccuugagggauguauacgau

SEQ ID NO: 630814 - RNA, 23 nt, Artificial Sequence
  Synthetic
gagccuugagggauguauacgau

SEQ ID NO: 630815 - RNA, 24 nt, Artificial Sequence
  Synthetic
ugagccuugagggauguauacgau

SEQ ID NO: 630816 - RNA, 18 nt, Artificial Sequence
  Synthetic
cucuguaaggacuacgau

SEQ ID NO: 630817 - RNA, 19 nt, Artificial Sequence
  Synthetic
acucuguaaggacuacgau

SEQ ID NO: 630818 - RNA, 20 nt, Artificial Sequence
  Synthetic
gacucuguaaggacuacgau

SEQ ID NO: 630819 - RNA, 21 nt, Artificial Sequence
  Synthetic
ggacucuguaaggacuacgau

SEQ ID NO: 630820 - RNA, 22 nt, Artificial Sequence
  Synthetic
uggacucuguaaggacuacgau

SEQ ID NO: 630821 - RNA, 23 nt, Artificial Sequence
  Synthetic
auggacucuguaaggacuacgau

SEQ ID NO: 630822 - RNA, 24 nt, Artificial Sequence
  Synthetic
cauggacucuguaaggacuacgau

SEQ ID NO: 630823 - RNA, 18 nt, Artificial Sequence
  Synthetic
guugacgauuguuacgau

SEQ ID NO: 630824 - RNA, 19 nt, Artificial Sequence
  Synthetic
uguugacgauuguuacgau

SEQ ID NO: 630825 - RNA, 20 nt, Artificial Sequence
  Synthetic
guguugacgauuguuacgau

SEQ ID NO: 630826 - RNA, 21 nt, Artificial Sequence
  Synthetic
uguguugacgauuguuacgau

SEQ ID NO: 630827 - RNA, 22 nt, Artificial Sequence
  Synthetic
cuguguugacgauuguuacgau

SEQ ID NO: 630828 - RNA, 23 nt, Artificial Sequence
  Synthetic
ucuguguugacgauuguuacgau

SEQ ID NO: 630829 - RNA, 24 nt, Artificial Sequence
  Synthetic
uucuguguugacgauuguuacgau

SEQ ID NO: 630830 - RNA, 18 nt, Artificial Sequence
  Synthetic
cguacaaaaugacccgau

SEQ ID NO: 630831 - RNA, 19 nt, Artificial Sequence
  Synthetic
acguacaaaaugacccgau

SEQ ID NO: 630832 - RNA, 20 nt, Artificial Sequence
  Synthetic
uacguacaaaaugacccgau

SEQ ID NO: 630833 - RNA, 21 nt, Artificial Sequence
  Synthetic
cuacguacaaaaugacccgau

SEQ ID NO: 630834 - RNA, 22 nt, Artificial Sequence
  Synthetic
ccuacguacaaaaugacccgau

SEQ ID NO: 630835 - RNA, 23 nt, Artificial Sequence
  Synthetic
gccuacguacaaaaugacccgau

SEQ ID NO: 630836 - RNA, 24 nt, Artificial Sequence
  Synthetic
agccuacguacaaaaugacccgau

SEQ ID NO: 630837 - RNA, 18 nt, Artificial Sequence
  Synthetic
gcgcuuagggaggccgau

SEQ ID NO: 630838 - RNA, 19 nt, Artificial Sequence
  Synthetic
agcgcuuagggaggccgau

SEQ ID NO: 630839 - RNA, 20 nt, Artificial Sequence
  Synthetic
uagcgcuuagggaggccgau

SEQ ID NO: 630840 - RNA, 21 nt, Artificial Sequence
  Synthetic
cuagcgcuuagggaggccgau

SEQ ID NO: 630841 - RNA, 22 nt, Artificial Sequence
  Synthetic
ccuagcgcuuagggaggccgau

SEQ ID NO: 630842 - RNA, 23 nt, Artificial Sequence
  Synthetic
cccuagcgcuuagggaggccgau

SEQ ID NO: 630843 - RNA, 24 nt, Artificial Sequence
  Synthetic
acccuagcgcuuagggaggccgau

SEQ ID NO: 630844 - RNA, 18 nt, Artificial Sequence
  Synthetic
auggaccuuacauccgau

SEQ ID NO: 630845 - RNA, 19 nt, Artificial Sequence
  Synthetic
cauggaccuuacauccgau

SEQ ID NO: 630846 - RNA, 20 nt, Artificial Sequence
  Synthetic
ucauggaccuuacauccgau

SEQ ID NO: 630847 - RNA, 21 nt, Artificial Sequence
  Synthetic
cucauggaccuuacauccgau

SEQ ID NO: 630848 - RNA, 22 nt, Artificial Sequence
  Synthetic
ccucauggaccuuacauccgau

SEQ ID NO: 630849 - RNA, 23 nt, Artificial Sequence
  Synthetic
gccucauggaccuuacauccgau

SEQ ID NO: 630850 - RNA, 24 nt, Artificial Sequence
  Synthetic
ugccucauggaccuuacauccgau

SEQ ID NO: 630851 - RNA, 18 nt, Artificial Sequence
  Synthetic
auccaacuuacaagcgau

SEQ ID NO: 630852 - RNA, 19 nt, Artificial Sequence
  Synthetic
aauccaacuuacaagcgau

SEQ ID NO: 630853 - RNA, 20 nt, Artificial Sequence
  Synthetic
gaauccaacuuacaagcgau

SEQ ID NO: 630854 - RNA, 21 nt, Artificial Sequence
  Synthetic
ggaauccaacuuacaagcgau

SEQ ID NO: 630855 - RNA, 22 nt, Artificial Sequence
  Synthetic
aggaauccaacuuacaagcgau

SEQ ID NO: 630856 - RNA, 23 nt, Artificial Sequence
  Synthetic
uaggaauccaacuuacaagcgau

SEQ ID NO: 630857 - RNA, 24 nt, Artificial Sequence
  Synthetic
cuaggaauccaacuuacaagcgau

SEQ ID NO: 630858 - RNA, 18 nt, Artificial Sequence
  Synthetic
acccuccaacagagcgau

SEQ ID NO: 630859 - RNA, 19 nt, Artificial Sequence
  Synthetic
cacccuccaacagagcgau

SEQ ID NO: 630860 - RNA, 20 nt, Artificial Sequence
  Synthetic
ccacccuccaacagagcgau

SEQ ID NO: 630861 - RNA, 21 nt, Artificial Sequence
  Synthetic
gccacccuccaacagagcgau

SEQ ID NO: 630862 - RNA, 22 nt, Artificial Sequence
  Synthetic
ggccacccuccaacagagcgau

SEQ ID NO: 630863 - RNA, 23 nt, Artificial Sequence
  Synthetic
aggccacccuccaacagagcgau

SEQ ID NO: 630864 - RNA, 24 nt, Artificial Sequence
  Synthetic
aaggccacccuccaacagagcgau

SEQ ID NO: 630865 - RNA, 18 nt, Artificial Sequence
  Synthetic
ggguucagaaaaggcgau

SEQ ID NO: 630866 - RNA, 19 nt, Artificial Sequence
  Synthetic
aggguucagaaaaggcgau

SEQ ID NO: 630867 - RNA, 20 nt, Artificial Sequence
  Synthetic
caggguucagaaaaggcgau

SEQ ID NO: 630868 - RNA, 21 nt, Artificial Sequence
  Synthetic
ccaggguucagaaaaggcgau

SEQ ID NO: 630869 - RNA, 22 nt, Artificial Sequence
  Synthetic
cccaggguucagaaaaggcgau

SEQ ID NO: 630870 - RNA, 23 nt, Artificial Sequence
  Synthetic
ucccaggguucagaaaaggcgau

SEQ ID NO: 630871 - RNA, 24 nt, Artificial Sequence
  Synthetic
uucccaggguucagaaaaggcgau

SEQ ID NO: 630872 - RNA, 21 nt, Artificial Sequence
  Synthetic
gcucaggauugacuuggcgau

SEQ ID NO: 630873 - RNA, 22 nt, Artificial Sequence
  Synthetic
ggcucaggauugacuuggcgau

SEQ ID NO: 630874 - RNA, 23 nt, Artificial Sequence
  Synthetic
uggcucaggauugacuuggcgau

SEQ ID NO: 630875 - RNA, 24 nt, Artificial Sequence
  Synthetic
uuggcucaggauugacuuggcgau

SEQ ID NO: 630876 - RNA, 18 nt, Artificial Sequence
  Synthetic
gcuuauugugaaugcgau

SEQ ID NO: 630877 - RNA, 19 nt, Artificial Sequence
  Synthetic
ugcuuauugugaaugcgau

SEQ ID NO: 630878 - RNA, 20 nt, Artificial Sequence
  Synthetic
gugcuuauugugaaugcgau

SEQ ID NO: 630879 - RNA, 21 nt, Artificial Sequence
  Synthetic
cgugcuuauugugaaugcgau

SEQ ID NO: 630880 - RNA, 22 nt, Artificial Sequence
  Synthetic
acgugcuuauugugaaugcgau

SEQ ID NO: 630881 - RNA, 23 nt, Artificial Sequence
  Synthetic
gacgugcuuauugugaaugcgau

SEQ ID NO: 630882 - RNA, 24 nt, Artificial Sequence
  Synthetic
ugacgugcuuauugugaaugcgau

SEQ ID NO: 630883 - RNA, 18 nt, Artificial Sequence
  Synthetic
caaugaccuggaugcgau

SEQ ID NO: 630884 - RNA, 19 nt, Artificial Sequence
  Synthetic
gcaaugaccuggaugcgau

SEQ ID NO: 630885 - RNA, 20 nt, Artificial Sequence
  Synthetic
ugcaaugaccuggaugcgau

SEQ ID NO: 630886 - RNA, 21 nt, Artificial Sequence
  Synthetic
uugcaaugaccuggaugcgau

SEQ ID NO: 630887 - RNA, 22 nt, Artificial Sequence
  Synthetic
uuugcaaugaccuggaugcgau

SEQ ID NO: 630888 - RNA, 23 nt, Artificial Sequence
  Synthetic
auuugcaaugaccuggaugcgau

SEQ ID NO: 630889 - RNA, 24 nt, Artificial Sequence
  Synthetic
cauuugcaaugaccuggaugcgau

SEQ ID NO: 630890 - RNA, 18 nt, Artificial Sequence
  Synthetic
ggagugcaauggugcgau

SEQ ID NO: 630891 - RNA, 19 nt, Artificial Sequence
  Synthetic
uggagugcaauggugcgau

SEQ ID NO: 630892 - RNA, 20 nt, Artificial Sequence
  Synthetic
cuggagugcaauggugcgau

SEQ ID NO: 630893 - RNA, 21 nt, Artificial Sequence
  Synthetic
gcuggagugcaauggugcgau

SEQ ID NO: 630894 - RNA, 22 nt, Artificial Sequence
  Synthetic
ggcuggagugcaauggugcgau

SEQ ID NO: 630895 - RNA, 23 nt, Artificial Sequence
  Synthetic
cggcuggagugcaauggugcgau

SEQ ID NO: 630896 - RNA, 24 nt, Artificial Sequence
  Synthetic
ccggcuggagugcaauggugcgau

SEQ ID NO: 630897 - RNA, 18 nt, Artificial Sequence
  Synthetic
aauuucaaaagccucgau

SEQ ID NO: 630898 - RNA, 19 nt, Artificial Sequence
  Synthetic
aaauuucaaaagccucgau

SEQ ID NO: 630899 - RNA, 20 nt, Artificial Sequence
  Synthetic
gaaauuucaaaagccucgau

SEQ ID NO: 630900 - RNA, 21 nt, Artificial Sequence
  Synthetic
ugaaauuucaaaagccucgau

SEQ ID NO: 630901 - RNA, 22 nt, Artificial Sequence
  Synthetic
cugaaauuucaaaagccucgau

SEQ ID NO: 630902 - RNA, 23 nt, Artificial Sequence
  Synthetic
ucugaaauuucaaaagccucgau

SEQ ID NO: 630903 - RNA, 24 nt, Artificial Sequence
  Synthetic
uucugaaauuucaaaagccucgau

SEQ ID NO: 630904 - RNA, 18 nt, Artificial Sequence
  Synthetic
gcucugucugucuucgau

SEQ ID NO: 630905 - RNA, 19 nt, Artificial Sequence
  Synthetic
agcucugucugucuucgau

SEQ ID NO: 630906 - RNA, 20 nt, Artificial Sequence
  Synthetic
uagcucugucugucuucgau

SEQ ID NO: 630907 - RNA, 21 nt, Artificial Sequence
  Synthetic
auagcucugucugucuucgau

SEQ ID NO: 630908 - RNA, 22 nt, Artificial Sequence
  Synthetic
gauagcucugucugucuucgau

SEQ ID NO: 630909 - RNA, 23 nt, Artificial Sequence
  Synthetic
ugauagcucugucugucuucgau

SEQ ID NO: 630910 - RNA, 24 nt, Artificial Sequence
  Synthetic
augauagcucugucugucuucgau

SEQ ID NO: 630911 - RNA, 18 nt, Artificial Sequence
  Synthetic
uggcuuuaugcuuucgau

SEQ ID NO: 630912 - RNA, 19 nt, Artificial Sequence
  Synthetic
auggcuuuaugcuuucgau

SEQ ID NO: 630913 - RNA, 20 nt, Artificial Sequence
  Synthetic
aauggcuuuaugcuuucgau

SEQ ID NO: 630914 - RNA, 21 nt, Artificial Sequence
  Synthetic
aaauggcuuuaugcuuucgau

SEQ ID NO: 630915 - RNA, 22 nt, Artificial Sequence
  Synthetic
uaaauggcuuuaugcuuucgau

SEQ ID NO: 630916 - RNA, 23 nt, Artificial Sequence
  Synthetic
auaaauggcuuuaugcuuucgau

SEQ ID NO: 630917 - RNA, 24 nt, Artificial Sequence
  Synthetic
aauaaauggcuuuaugcuuucgau

SEQ ID NO: 630918 - RNA, 18 nt, Artificial Sequence
  Synthetic
aaaaaaaaaaaaaaggau

SEQ ID NO: 630919 - RNA, 19 nt, Artificial Sequence
  Synthetic
caaaaaaaaaaaaaaggau

SEQ ID NO: 630920 - RNA, 20 nt, Artificial Sequence
  Synthetic
acaaaaaaaaaaaaaaggau

SEQ ID NO: 630921 - RNA, 21 nt, Artificial Sequence
  Synthetic
gacaaaaaaaaaaaaaaggau

SEQ ID NO: 630922 - RNA, 22 nt, Artificial Sequence
  Synthetic
ugacaaaaaaaaaaaaaaggau

SEQ ID NO: 630923 - RNA, 23 nt, Artificial Sequence
  Synthetic
uugacaaaaaaaaaaaaaaggau

SEQ ID NO: 630924 - RNA, 24 nt, Artificial Sequence
  Synthetic
auugacaaaaaaaaaaaaaaggau

SEQ ID NO: 630925 - RNA, 18 nt, Artificial Sequence
  Synthetic
aaaucuccaaaaaaggau

SEQ ID NO: 630926 - RNA, 19 nt, Artificial Sequence
  Synthetic
aaaaucuccaaaaaaggau

SEQ ID NO: 630927 - RNA, 20 nt, Artificial Sequence
  Synthetic
aaaaaucuccaaaaaaggau

SEQ ID NO: 630928 - RNA, 21 nt, Artificial Sequence
  Synthetic
aaaaaaucuccaaaaaaggau

SEQ ID NO: 630929 - RNA, 22 nt, Artificial Sequence
  Synthetic
uaaaaaaucuccaaaaaaggau

SEQ ID NO: 630930 - RNA, 23 nt, Artificial Sequence
  Synthetic
uuaaaaaaucuccaaaaaaggau

SEQ ID NO: 630931 - RNA, 24 nt, Artificial Sequence
  Synthetic
uuuaaaaaaucuccaaaaaaggau

SEQ ID NO: 630932 - RNA, 18 nt, Artificial Sequence
  Synthetic
uuucuaagaaaaaaggau

SEQ ID NO: 630933 - RNA, 19 nt, Artificial Sequence
  Synthetic
auuucuaagaaaaaaggau

SEQ ID NO: 630934 - RNA, 20 nt, Artificial Sequence
  Synthetic
cauuucuaagaaaaaaggau

SEQ ID NO: 630935 - RNA, 21 nt, Artificial Sequence
  Synthetic
ucauuucuaagaaaaaaggau

SEQ ID NO: 630936 - RNA, 22 nt, Artificial Sequence
  Synthetic
uucauuucuaagaaaaaaggau

SEQ ID NO: 630937 - RNA, 23 nt, Artificial Sequence
  Synthetic
uuucauuucuaagaaaaaaggau

SEQ ID NO: 630938 - RNA, 24 nt, Artificial Sequence
  Synthetic
cuuucauuucuaagaaaaaaggau

SEQ ID NO: 630939 - RNA, 18 nt, Artificial Sequence
  Synthetic
uauauaccccaaaaggau

SEQ ID NO: 630940 - RNA, 19 nt, Artificial Sequence
  Synthetic
uuauauaccccaaaaggau

SEQ ID NO: 630941 - RNA, 20 nt, Artificial Sequence
  Synthetic
auuauauaccccaaaaggau

SEQ ID NO: 630942 - RNA, 21 nt, Artificial Sequence
  Synthetic
gauuauauaccccaaaaggau

SEQ ID NO: 630943 - RNA, 22 nt, Artificial Sequence
  Synthetic
ggauuauauaccccaaaaggau

SEQ ID NO: 630944 - RNA, 23 nt, Artificial Sequence
  Synthetic
uggauuauauaccccaaaaggau

SEQ ID NO: 630945 - RNA, 24 nt, Artificial Sequence
  Synthetic
cuggauuauauaccccaaaaggau

SEQ ID NO: 630946 - RNA, 18 nt, Artificial Sequence
  Synthetic
aaaaaaagccaaaaggau

SEQ ID NO: 630947 - RNA, 19 nt, Artificial Sequence
  Synthetic
aaaaaaaagccaaaaggau

SEQ ID NO: 630948 - RNA, 20 nt, Artificial Sequence
  Synthetic
aaaaaaaaagccaaaaggau

SEQ ID NO: 630949 - RNA, 21 nt, Artificial Sequence
  Synthetic
aaaaaaaaaagccaaaaggau

SEQ ID NO: 630950 - RNA, 22 nt, Artificial Sequence
  Synthetic
aaaaaaaaaaagccaaaaggau

SEQ ID NO: 630951 - RNA, 23 nt, Artificial Sequence
  Synthetic
aaaaaaaaaaaagccaaaaggau

SEQ ID NO: 630952 - RNA, 24 nt, Artificial Sequence
  Synthetic
aaaaaaaaaaaaagccaaaaggau

SEQ ID NO: 630953 - RNA, 21 nt, Artificial Sequence
  Synthetic
auccaugucccuacaaaggau

SEQ ID NO: 630954 - RNA, 22 nt, Artificial Sequence
  Synthetic
cauccaugucccuacaaaggau

SEQ ID NO: 630955 - RNA, 23 nt, Artificial Sequence
  Synthetic
ucauccaugucccuacaaaggau

SEQ ID NO: 630956 - RNA, 24 nt, Artificial Sequence
  Synthetic
uucauccaugucccuacaaaggau

SEQ ID NO: 630957 - RNA, 18 nt, Artificial Sequence
  Synthetic
agaaagugggcaaaggau

SEQ ID NO: 630958 - RNA, 19 nt, Artificial Sequence
  Synthetic
cagaaagugggcaaaggau

SEQ ID NO: 630959 - RNA, 20 nt, Artificial Sequence
  Synthetic
ucagaaagugggcaaaggau

SEQ ID NO: 630960 - RNA, 21 nt, Artificial Sequence
  Synthetic
aucagaaagugggcaaaggau

SEQ ID NO: 630961 - RNA, 22 nt, Artificial Sequence
  Synthetic
caucagaaagugggcaaaggau

SEQ ID NO: 630962 - RNA, 23 nt, Artificial Sequence
  Synthetic
ccaucagaaagugggcaaaggau

SEQ ID NO: 630963 - RNA, 24 nt, Artificial Sequence
  Synthetic
cccaucagaaagugggcaaaggau

SEQ ID NO: 630964 - RNA, 18 nt, Artificial Sequence
  Synthetic
caaagugagugaaaggau

SEQ ID NO: 630965 - RNA, 19 nt, Artificial Sequence
  Synthetic
ucaaagugagugaaaggau

SEQ ID NO: 630966 - RNA, 20 nt, Artificial Sequence
  Synthetic
aucaaagugagugaaaggau

SEQ ID NO: 630967 - RNA, 21 nt, Artificial Sequence
  Synthetic
uaucaaagugagugaaaggau

SEQ ID NO: 630968 - RNA, 22 nt, Artificial Sequence
  Synthetic
uuaucaaagugagugaaaggau

SEQ ID NO: 630969 - RNA, 23 nt, Artificial Sequence
  Synthetic
cuuaucaaagugagugaaaggau

SEQ ID NO: 630970 - RNA, 24 nt, Artificial Sequence
  Synthetic
ccuuaucaaagugagugaaaggau

SEQ ID NO: 630971 - RNA, 18 nt, Artificial Sequence
  Synthetic
aaaugcaugaacaaggau

SEQ ID NO: 630972 - RNA, 19 nt, Artificial Sequence
  Synthetic
uaaaugcaugaacaaggau

SEQ ID NO: 630973 - RNA, 20 nt, Artificial Sequence
  Synthetic
cuaaaugcaugaacaaggau

SEQ ID NO: 630974 - RNA, 21 nt, Artificial Sequence
  Synthetic
acuaaaugcaugaacaaggau

SEQ ID NO: 630975 - RNA, 22 nt, Artificial Sequence
  Synthetic
aacuaaaugcaugaacaaggau

SEQ ID NO: 630976 - RNA, 23 nt, Artificial Sequence
  Synthetic
aaacuaaaugcaugaacaaggau

SEQ ID NO: 630977 - RNA, 24 nt, Artificial Sequence
  Synthetic
caaacuaaaugcaugaacaaggau

SEQ ID NO: 630978 - RNA, 18 nt, Artificial Sequence
  Synthetic
gagaacaaucccaaggau

SEQ ID NO: 630979 - RNA, 19 nt, Artificial Sequence
  Synthetic
ggagaacaaucccaaggau

SEQ ID NO: 630980 - RNA, 20 nt, Artificial Sequence
  Synthetic
uggagaacaaucccaaggau

SEQ ID NO: 630981 - RNA, 21 nt, Artificial Sequence
  Synthetic
auggagaacaaucccaaggau

SEQ ID NO: 630982 - RNA, 22 nt, Artificial Sequence
  Synthetic
aauggagaacaaucccaaggau

SEQ ID NO: 630983 - RNA, 23 nt, Artificial Sequence
  Synthetic
uaauggagaacaaucccaaggau

SEQ ID NO: 630984 - RNA, 24 nt, Artificial Sequence
  Synthetic
cuaauggagaacaaucccaaggau

SEQ ID NO: 630985 - RNA, 18 nt, Artificial Sequence
  Synthetic
ggaccaacagccaaggau

SEQ ID NO: 630986 - RNA, 19 nt, Artificial Sequence
  Synthetic
uggaccaacagccaaggau

SEQ ID NO: 630987 - RNA, 20 nt, Artificial Sequence
  Synthetic
uuggaccaacagccaaggau

SEQ ID NO: 630988 - RNA, 21 nt, Artificial Sequence
  Synthetic
cuuggaccaacagccaaggau

SEQ ID NO: 630989 - RNA, 22 nt, Artificial Sequence
  Synthetic
gcuuggaccaacagccaaggau

SEQ ID NO: 630990 - RNA, 23 nt, Artificial Sequence
  Synthetic
ugcuuggaccaacagccaaggau

SEQ ID NO: 630991 - RNA, 24 nt, Artificial Sequence
  Synthetic
cugcuuggaccaacagccaaggau

SEQ ID NO: 630992 - RNA, 18 nt, Artificial Sequence
  Synthetic
gaaaagucggccaaggau

SEQ ID NO: 630993 - RNA, 19 nt, Artificial Sequence
  Synthetic
cgaaaagucggccaaggau

SEQ ID NO: 630994 - RNA, 20 nt, Artificial Sequence
  Synthetic
ucgaaaagucggccaaggau

SEQ ID NO: 630995 - RNA, 21 nt, Artificial Sequence
  Synthetic
aucgaaaagucggccaaggau

SEQ ID NO: 630996 - RNA, 22 nt, Artificial Sequence
  Synthetic
caucgaaaagucggccaaggau

SEQ ID NO: 630997 - RNA, 23 nt, Artificial Sequence
  Synthetic
ucaucgaaaagucggccaaggau

SEQ ID NO: 630998 - RNA, 24 nt, Artificial Sequence
  Synthetic
cucaucgaaaagucggccaaggau

SEQ ID NO: 630999 - RNA, 18 nt, Artificial Sequence
  Synthetic
acaugugcuggcaaggau

SEQ ID NO: 631000 - RNA, 19 nt, Artificial Sequence
  Synthetic
aacaugugcuggcaaggau

SEQ ID NO: 631001 - RNA, 20 nt, Artificial Sequence
  Synthetic
uaacaugugcuggcaaggau

SEQ ID NO: 631002 - RNA, 21 nt, Artificial Sequence
  Synthetic
auaacaugugcuggcaaggau

SEQ ID NO: 631003 - RNA, 22 nt, Artificial Sequence
  Synthetic
aauaacaugugcuggcaaggau

SEQ ID NO: 631004 - RNA, 23 nt, Artificial Sequence
  Synthetic
aaauaacaugugcuggcaaggau

SEQ ID NO: 631005 - RNA, 24 nt, Artificial Sequence
  Synthetic
aaaauaacaugugcuggcaaggau

SEQ ID NO: 631006 - RNA, 18 nt, Artificial Sequence
  Synthetic
ucuauuaaugagaaggau

SEQ ID NO: 631007 - RNA, 19 nt, Artificial Sequence
  Synthetic
uucuauuaaugagaaggau

SEQ ID NO: 631008 - RNA, 20 nt, Artificial Sequence
  Synthetic
uuucuauuaaugagaaggau

SEQ ID NO: 631009 - RNA, 21 nt, Artificial Sequence
  Synthetic
guuucuauuaaugagaaggau

SEQ ID NO: 631010 - RNA, 22 nt, Artificial Sequence
  Synthetic
uguuucuauuaaugagaaggau

SEQ ID NO: 631011 - RNA, 23 nt, Artificial Sequence
  Synthetic
auguuucuauuaaugagaaggau

SEQ ID NO: 631012 - RNA, 24 nt, Artificial Sequence
  Synthetic
cauguuucuauuaaugagaaggau

SEQ ID NO: 631013 - RNA, 18 nt, Artificial Sequence
  Synthetic
uggccucaugagaaggau

SEQ ID NO: 631014 - RNA, 19 nt, Artificial Sequence
  Synthetic
auggccucaugagaaggau

SEQ ID NO: 631015 - RNA, 20 nt, Artificial Sequence
  Synthetic
aauggccucaugagaaggau

SEQ ID NO: 631016 - RNA, 21 nt, Artificial Sequence
  Synthetic
caauggccucaugagaaggau

SEQ ID NO: 631017 - RNA, 22 nt, Artificial Sequence
  Synthetic
ucaauggccucaugagaaggau

SEQ ID NO: 631018 - RNA, 23 nt, Artificial Sequence
  Synthetic
cucaauggccucaugagaaggau

SEQ ID NO: 631019 - RNA, 24 nt, Artificial Sequence
  Synthetic
ucucaauggccucaugagaaggau

SEQ ID NO: 631020 - RNA, 18 nt, Artificial Sequence
  Synthetic
gagcgcuugccgaaggau

SEQ ID NO: 631021 - RNA, 19 nt, Artificial Sequence
  Synthetic
ggagcgcuugccgaaggau

SEQ ID NO: 631022 - RNA, 20 nt, Artificial Sequence
  Synthetic
aggagcgcuugccgaaggau

SEQ ID NO: 631023 - RNA, 21 nt, Artificial Sequence
  Synthetic
caggagcgcuugccgaaggau

SEQ ID NO: 631024 - RNA, 22 nt, Artificial Sequence
  Synthetic
ccaggagcgcuugccgaaggau

SEQ ID NO: 631025 - RNA, 23 nt, Artificial Sequence
  Synthetic
cccaggagcgcuugccgaaggau

SEQ ID NO: 631026 - RNA, 24 nt, Artificial Sequence
  Synthetic
gcccaggagcgcuugccgaaggau

SEQ ID NO: 631027 - RNA, 18 nt, Artificial Sequence
  Synthetic
gggaugggggcgaaggau

SEQ ID NO: 631028 - RNA, 19 nt, Artificial Sequence
  Synthetic
ugggaugggggcgaaggau

SEQ ID NO: 631029 - RNA, 20 nt, Artificial Sequence
  Synthetic
gugggaugggggcgaaggau

SEQ ID NO: 631030 - RNA, 21 nt, Artificial Sequence
  Synthetic
ggugggaugggggcgaaggau

SEQ ID NO: 631031 - RNA, 22 nt, Artificial Sequence
  Synthetic
gggugggaugggggcgaaggau

SEQ ID NO: 631032 - RNA, 23 nt, Artificial Sequence
  Synthetic
agggugggaugggggcgaaggau

SEQ ID NO: 631033 - RNA, 24 nt, Artificial Sequence
  Synthetic
gagggugggaugggggcgaaggau

SEQ ID NO: 631034 - RNA, 18 nt, Artificial Sequence
  Synthetic
aaaaagugggcgaaggau

SEQ ID NO: 631035 - RNA, 19 nt, Artificial Sequence
  Synthetic
caaaaagugggcgaaggau

SEQ ID NO: 631036 - RNA, 20 nt, Artificial Sequence
  Synthetic
ucaaaaagugggcgaaggau

SEQ ID NO: 631037 - RNA, 21 nt, Artificial Sequence
  Synthetic
aucaaaaagugggcgaaggau

SEQ ID NO: 631038 - RNA, 22 nt, Artificial Sequence
  Synthetic
caucaaaaagugggcgaaggau

SEQ ID NO: 631039 - RNA, 23 nt, Artificial Sequence
  Synthetic
ccaucaaaaagugggcgaaggau

SEQ ID NO: 631040 - RNA, 24 nt, Artificial Sequence
  Synthetic
cccaucaaaaagugggcgaaggau

SEQ ID NO: 631041 - RNA, 18 nt, Artificial Sequence
  Synthetic
aaagcaacuaggaaggau

SEQ ID NO: 631042 - RNA, 19 nt, Artificial Sequence
  Synthetic
aaaagcaacuaggaaggau

SEQ ID NO: 631043 - RNA, 20 nt, Artificial Sequence
  Synthetic
gaaaagcaacuaggaaggau

SEQ ID NO: 631044 - RNA, 21 nt, Artificial Sequence
  Synthetic
agaaaagcaacuaggaaggau

SEQ ID NO: 631045 - RNA, 22 nt, Artificial Sequence
  Synthetic
uagaaaagcaacuaggaaggau

SEQ ID NO: 631046 - RNA, 23 nt, Artificial Sequence
  Synthetic
auagaaaagcaacuaggaaggau

SEQ ID NO: 631047 - RNA, 24 nt, Artificial Sequence
  Synthetic
uauagaaaagcaacuaggaaggau

SEQ ID NO: 631048 - RNA, 18 nt, Artificial Sequence
  Synthetic
ggcaugcuguggaaggau

SEQ ID NO: 631049 - RNA, 19 nt, Artificial Sequence
  Synthetic
gggcaugcuguggaaggau

SEQ ID NO: 631050 - RNA, 20 nt, Artificial Sequence
  Synthetic
ugggcaugcuguggaaggau

SEQ ID NO: 631051 - RNA, 21 nt, Artificial Sequence
  Synthetic
cugggcaugcuguggaaggau

SEQ ID NO: 631052 - RNA, 22 nt, Artificial Sequence
  Synthetic
acugggcaugcuguggaaggau

SEQ ID NO: 631053 - RNA, 23 nt, Artificial Sequence
  Synthetic
uacugggcaugcuguggaaggau

SEQ ID NO: 631054 - RNA, 24 nt, Artificial Sequence
  Synthetic
auacugggcaugcuguggaaggau

SEQ ID NO: 631055 - RNA, 18 nt, Artificial Sequence
  Synthetic
uucaauaaagugaaggau

SEQ ID NO: 631056 - RNA, 19 nt, Artificial Sequence
  Synthetic
uuucaauaaagugaaggau

SEQ ID NO: 631057 - RNA, 20 nt, Artificial Sequence
  Synthetic
auuucaauaaagugaaggau

SEQ ID NO: 631058 - RNA, 21 nt, Artificial Sequence
  Synthetic
aauuucaauaaagugaaggau

SEQ ID NO: 631059 - RNA, 22 nt, Artificial Sequence
  Synthetic
aaauuucaauaaagugaaggau

SEQ ID NO: 631060 - RNA, 23 nt, Artificial Sequence
  Synthetic
uaaauuucaauaaagugaaggau

SEQ ID NO: 631061 - RNA, 24 nt, Artificial Sequence
  Synthetic
cuaaauuucaauaaagugaaggau

SEQ ID NO: 631062 - RNA, 18 nt, Artificial Sequence
  Synthetic
uuaggcuaucauaaggau

SEQ ID NO: 631063 - RNA, 19 nt, Artificial Sequence
  Synthetic
uuuaggcuaucauaaggau

SEQ ID NO: 631064 - RNA, 20 nt, Artificial Sequence
  Synthetic
uuuuaggcuaucauaaggau

SEQ ID NO: 631065 - RNA, 21 nt, Artificial Sequence
  Synthetic
uuuuuaggcuaucauaaggau

SEQ ID NO: 631066 - RNA, 22 nt, Artificial Sequence
  Synthetic
cuuuuuaggcuaucauaaggau

SEQ ID NO: 631067 - RNA, 23 nt, Artificial Sequence
  Synthetic
ccuuuuuaggcuaucauaaggau

SEQ ID NO: 631068 - RNA, 24 nt, Artificial Sequence
  Synthetic
accuuuuuaggcuaucauaaggau

SEQ ID NO: 631069 - RNA, 18 nt, Artificial Sequence
  Synthetic
aaagaucaagauaaggau

SEQ ID NO: 631070 - RNA, 19 nt, Artificial Sequence
  Synthetic
caaagaucaagauaaggau

SEQ ID NO: 631071 - RNA, 20 nt, Artificial Sequence
  Synthetic
ucaaagaucaagauaaggau

SEQ ID NO: 631072 - RNA, 21 nt, Artificial Sequence
  Synthetic
gucaaagaucaagauaaggau

SEQ ID NO: 631073 - RNA, 22 nt, Artificial Sequence
  Synthetic
cgucaaagaucaagauaaggau

SEQ ID NO: 631074 - RNA, 23 nt, Artificial Sequence
  Synthetic
gcgucaaagaucaagauaaggau

SEQ ID NO: 631075 - RNA, 24 nt, Artificial Sequence
  Synthetic
ugcgucaaagaucaagauaaggau

SEQ ID NO: 631076 - RNA, 18 nt, Artificial Sequence
  Synthetic
uuuugcuuguauaaggau

SEQ ID NO: 631077 - RNA, 19 nt, Artificial Sequence
  Synthetic
guuuugcuuguauaaggau

SEQ ID NO: 631078 - RNA, 20 nt, Artificial Sequence
  Synthetic
aguuuugcuuguauaaggau

SEQ ID NO: 631079 - RNA, 21 nt, Artificial Sequence
  Synthetic
gaguuuugcuuguauaaggau

SEQ ID NO: 631080 - RNA, 22 nt, Artificial Sequence
  Synthetic
ggaguuuugcuuguauaaggau

SEQ ID NO: 631081 - RNA, 23 nt, Artificial Sequence
  Synthetic
aggaguuuugcuuguauaaggau

SEQ ID NO: 631082 - RNA, 24 nt, Artificial Sequence
  Synthetic
gaggaguuuugcuuguauaaggau

SEQ ID NO: 631083 - RNA, 18 nt, Artificial Sequence
  Synthetic
agaaagugggcuaaggau

SEQ ID NO: 631084 - RNA, 19 nt, Artificial Sequence
  Synthetic
cagaaagugggcuaaggau

SEQ ID NO: 631085 - RNA, 20 nt, Artificial Sequence
  Synthetic
ucagaaagugggcuaaggau

SEQ ID NO: 631086 - RNA, 21 nt, Artificial Sequence
  Synthetic
aucagaaagugggcuaaggau

SEQ ID NO: 631087 - RNA, 22 nt, Artificial Sequence
  Synthetic
caucagaaagugggcuaaggau

SEQ ID NO: 631088 - RNA, 23 nt, Artificial Sequence
  Synthetic
ccaucagaaagugggcuaaggau

SEQ ID NO: 631089 - RNA, 24 nt, Artificial Sequence
  Synthetic
cccaucagaaagugggcuaaggau

SEQ ID NO: 631090 - RNA, 18 nt, Artificial Sequence
  Synthetic
acaaacugaauuaaggau

SEQ ID NO: 631091 - RNA, 19 nt, Artificial Sequence
  Synthetic
uacaaacugaauuaaggau

SEQ ID NO: 631092 - RNA, 20 nt, Artificial Sequence
  Synthetic
uuacaaacugaauuaaggau

SEQ ID NO: 631093 - RNA, 21 nt, Artificial Sequence
  Synthetic
auuacaaacugaauuaaggau

SEQ ID NO: 631094 - RNA, 22 nt, Artificial Sequence
  Synthetic
aauuacaaacugaauuaaggau

SEQ ID NO: 631095 - RNA, 23 nt, Artificial Sequence
  Synthetic
uaauuacaaacugaauuaaggau

SEQ ID NO: 631096 - RNA, 24 nt, Artificial Sequence
  Synthetic
guaauuacaaacugaauuaaggau

SEQ ID NO: 631097 - RNA, 18 nt, Artificial Sequence
  Synthetic
aggcaagauuuuaaggau

SEQ ID NO: 631098 - RNA, 19 nt, Artificial Sequence
  Synthetic
gaggcaagauuuuaaggau

SEQ ID NO: 631099 - RNA, 20 nt, Artificial Sequence
  Synthetic
ggaggcaagauuuuaaggau

SEQ ID NO: 631100 - RNA, 21 nt, Artificial Sequence
  Synthetic
uggaggcaagauuuuaaggau

SEQ ID NO: 631101 - RNA, 22 nt, Artificial Sequence
  Synthetic
uuggaggcaagauuuuaaggau

SEQ ID NO: 631102 - RNA, 23 nt, Artificial Sequence
  Synthetic
auuggaggcaagauuuuaaggau

SEQ ID NO: 631103 - RNA, 24 nt, Artificial Sequence
  Synthetic
gauuggaggcaagauuuuaaggau

SEQ ID NO: 631104 - RNA, 18 nt, Artificial Sequence
  Synthetic
agguaauagacacaggau

SEQ ID NO: 631105 - RNA, 19 nt, Artificial Sequence
  Synthetic
gagguaauagacacaggau

SEQ ID NO: 631106 - RNA, 20 nt, Artificial Sequence
  Synthetic
ugagguaauagacacaggau

SEQ ID NO: 631107 - RNA, 21 nt, Artificial Sequence
  Synthetic
cugagguaauagacacaggau

SEQ ID NO: 631108 - RNA, 22 nt, Artificial Sequence
  Synthetic
acugagguaauagacacaggau

SEQ ID NO: 631109 - RNA, 23 nt, Artificial Sequence
  Synthetic
aacugagguaauagacacaggau

SEQ ID NO: 631110 - RNA, 24 nt, Artificial Sequence
  Synthetic
aaacugagguaauagacacaggau

SEQ ID NO: 631111 - RNA, 18 nt, Artificial Sequence
  Synthetic
uauucgccuccacaggau

SEQ ID NO: 631112 - RNA, 19 nt, Artificial Sequence
  Synthetic
guauucgccuccacaggau

SEQ ID NO: 631113 - RNA, 20 nt, Artificial Sequence
  Synthetic
gguauucgccuccacaggau

SEQ ID NO: 631114 - RNA, 21 nt, Artificial Sequence
  Synthetic
agguauucgccuccacaggau

SEQ ID NO: 631115 - RNA, 22 nt, Artificial Sequence
  Synthetic
uagguauucgccuccacaggau

SEQ ID NO: 631116 - RNA, 23 nt, Artificial Sequence
  Synthetic
uuagguauucgccuccacaggau

SEQ ID NO: 631117 - RNA, 24 nt, Artificial Sequence
  Synthetic
auuagguauucgccuccacaggau

SEQ ID NO: 631118 - RNA, 18 nt, Artificial Sequence
  Synthetic
ucugacccuacccaggau

SEQ ID NO: 631119 - RNA, 19 nt, Artificial Sequence
  Synthetic
cucugacccuacccaggau

SEQ ID NO: 631120 - RNA, 20 nt, Artificial Sequence
  Synthetic
ucucugacccuacccaggau

SEQ ID NO: 631121 - RNA, 21 nt, Artificial Sequence
  Synthetic
uucucugacccuacccaggau

SEQ ID NO: 631122 - RNA, 22 nt, Artificial Sequence
  Synthetic
uuucucugacccuacccaggau

SEQ ID NO: 631123 - RNA, 23 nt, Artificial Sequence
  Synthetic
cuuucucugacccuacccaggau

SEQ ID NO: 631124 - RNA, 24 nt, Artificial Sequence
  Synthetic
gcuuucucugacccuacccaggau

SEQ ID NO: 631125 - RNA, 18 nt, Artificial Sequence
  Synthetic
gaagaaugaaagcaggau

SEQ ID NO: 631126 - RNA, 19 nt, Artificial Sequence
  Synthetic
ugaagaaugaaagcaggau

SEQ ID NO: 631127 - RNA, 20 nt, Artificial Sequence
  Synthetic
gugaagaaugaaagcaggau

SEQ ID NO: 631128 - RNA, 21 nt, Artificial Sequence
  Synthetic
ugugaagaaugaaagcaggau

SEQ ID NO: 631129 - RNA, 22 nt, Artificial Sequence
  Synthetic
augugaagaaugaaagcaggau

SEQ ID NO: 631130 - RNA, 23 nt, Artificial Sequence
  Synthetic
aaugugaagaaugaaagcaggau

SEQ ID NO: 631131 - RNA, 24 nt, Artificial Sequence
  Synthetic
caaugugaagaaugaaagcaggau

SEQ ID NO: 631132 - RNA, 18 nt, Artificial Sequence
  Synthetic
cgggaugaacagcaggau

SEQ ID NO: 631133 - RNA, 19 nt, Artificial Sequence
  Synthetic
ccgggaugaacagcaggau

SEQ ID NO: 631134 - RNA, 20 nt, Artificial Sequence
  Synthetic
accgggaugaacagcaggau

SEQ ID NO: 631135 - RNA, 21 nt, Artificial Sequence
  Synthetic
uaccgggaugaacagcaggau

SEQ ID NO: 631136 - RNA, 22 nt, Artificial Sequence
  Synthetic
guaccgggaugaacagcaggau

SEQ ID NO: 631137 - RNA, 23 nt, Artificial Sequence
  Synthetic
gguaccgggaugaacagcaggau

SEQ ID NO: 631138 - RNA, 24 nt, Artificial Sequence
  Synthetic
ugguaccgggaugaacagcaggau

SEQ ID NO: 631139 - RNA, 18 nt, Artificial Sequence
  Synthetic
cauugaguuuuucaggau

SEQ ID NO: 631140 - RNA, 19 nt, Artificial Sequence
  Synthetic
gcauugaguuuuucaggau

SEQ ID NO: 631141 - RNA, 20 nt, Artificial Sequence
  Synthetic
agcauugaguuuuucaggau

SEQ ID NO: 631142 - RNA, 21 nt, Artificial Sequence
  Synthetic
cagcauugaguuuuucaggau

SEQ ID NO: 631143 - RNA, 22 nt, Artificial Sequence
  Synthetic
ccagcauugaguuuuucaggau

SEQ ID NO: 631144 - RNA, 23 nt, Artificial Sequence
  Synthetic
uccagcauugaguuuuucaggau

SEQ ID NO: 631145 - RNA, 24 nt, Artificial Sequence
  Synthetic
guccagcauugaguuuuucaggau

SEQ ID NO: 631146 - RNA, 18 nt, Artificial Sequence
  Synthetic
aaacagaaauaagaggau

SEQ ID NO: 631147 - RNA, 19 nt, Artificial Sequence
  Synthetic
uaaacagaaauaagaggau

SEQ ID NO: 631148 - RNA, 20 nt, Artificial Sequence
  Synthetic
auaaacagaaauaagaggau

SEQ ID NO: 631149 - RNA, 21 nt, Artificial Sequence
  Synthetic
gauaaacagaaauaagaggau

SEQ ID NO: 631150 - RNA, 22 nt, Artificial Sequence
  Synthetic
agauaaacagaaauaagaggau

SEQ ID NO: 631151 - RNA, 23 nt, Artificial Sequence
  Synthetic
gagauaaacagaaauaagaggau

SEQ ID NO: 631152 - RNA, 24 nt, Artificial Sequence
  Synthetic
ugagauaaacagaaauaagaggau

SEQ ID NO: 631153 - RNA, 18 nt, Artificial Sequence
  Synthetic
aagcaucgaacagaggau

SEQ ID NO: 631154 - RNA, 19 nt, Artificial Sequence
  Synthetic
aaagcaucgaacagaggau

SEQ ID NO: 631155 - RNA, 20 nt, Artificial Sequence
  Synthetic
caaagcaucgaacagaggau

SEQ ID NO: 631156 - RNA, 21 nt, Artificial Sequence
  Synthetic
acaaagcaucgaacagaggau

SEQ ID NO: 631157 - RNA, 22 nt, Artificial Sequence
  Synthetic
aacaaagcaucgaacagaggau

SEQ ID NO: 631158 - RNA, 23 nt, Artificial Sequence
  Synthetic
uaacaaagcaucgaacagaggau

SEQ ID NO: 631159 - RNA, 24 nt, Artificial Sequence
  Synthetic
auaacaaagcaucgaacagaggau

SEQ ID NO: 631160 - RNA, 18 nt, Artificial Sequence
  Synthetic
uugcuuuuuccagaggau

SEQ ID NO: 631161 - RNA, 19 nt, Artificial Sequence
  Synthetic
cuugcuuuuuccagaggau

SEQ ID NO: 631162 - RNA, 20 nt, Artificial Sequence
  Synthetic
ucuugcuuuuuccagaggau

SEQ ID NO: 631163 - RNA, 21 nt, Artificial Sequence
  Synthetic
aucuugcuuuuuccagaggau

SEQ ID NO: 631164 - RNA, 22 nt, Artificial Sequence
  Synthetic
uaucuugcuuuuuccagaggau

SEQ ID NO: 631165 - RNA, 23 nt, Artificial Sequence
  Synthetic
guaucuugcuuuuuccagaggau

SEQ ID NO: 631166 - RNA, 24 nt, Artificial Sequence
  Synthetic
uguaucuugcuuuuuccagaggau

SEQ ID NO: 631167 - RNA, 18 nt, Artificial Sequence
  Synthetic
ugggaggagcgagaggau

SEQ ID NO: 631168 - RNA, 19 nt, Artificial Sequence
  Synthetic
gugggaggagcgagaggau

SEQ ID NO: 631169 - RNA, 20 nt, Artificial Sequence
  Synthetic
ggugggaggagcgagaggau

SEQ ID NO: 631170 - RNA, 21 nt, Artificial Sequence
  Synthetic
gggugggaggagcgagaggau

SEQ ID NO: 631171 - RNA, 22 nt, Artificial Sequence
  Synthetic
agggugggaggagcgagaggau

SEQ ID NO: 631172 - RNA, 23 nt, Artificial Sequence
  Synthetic
gagggugggaggagcgagaggau

SEQ ID NO: 631173 - RNA, 24 nt, Artificial Sequence
  Synthetic
ggagggugggaggagcgagaggau

SEQ ID NO: 631174 - RNA, 21 nt, Artificial Sequence
  Synthetic
acaacagaugcuggagaggau

SEQ ID NO: 631175 - RNA, 22 nt, Artificial Sequence
  Synthetic
aacaacagaugcuggagaggau

SEQ ID NO: 631176 - RNA, 23 nt, Artificial Sequence
  Synthetic
aaacaacagaugcuggagaggau

SEQ ID NO: 631177 - RNA, 24 nt, Artificial Sequence
  Synthetic
gaaacaacagaugcuggagaggau

SEQ ID NO: 631178 - RNA, 23 nt, Artificial Sequence
  Synthetic
caacaacagaugcuggagaggau

SEQ ID NO: 631179 - RNA, 24 nt, Artificial Sequence
  Synthetic
gcaacaacagaugcuggagaggau

SEQ ID NO: 631180 - RNA, 21 nt, Artificial Sequence
  Synthetic
acaacaggugcuggagaggau

SEQ ID NO: 631181 - RNA, 22 nt, Artificial Sequence
  Synthetic
aacaacaggugcuggagaggau

SEQ ID NO: 631182 - RNA, 23 nt, Artificial Sequence
  Synthetic
aaacaacaggugcuggagaggau

SEQ ID NO: 631183 - RNA, 24 nt, Artificial Sequence
  Synthetic
gaaacaacaggugcuggagaggau

SEQ ID NO: 631184 - RNA, 18 nt, Artificial Sequence
  Synthetic
uaccacuuuugagaggau

SEQ ID NO: 631185 - RNA, 19 nt, Artificial Sequence
  Synthetic
guaccacuuuugagaggau

SEQ ID NO: 631186 - RNA, 20 nt, Artificial Sequence
  Synthetic
uguaccacuuuugagaggau

SEQ ID NO: 631187 - RNA, 21 nt, Artificial Sequence
  Synthetic
uuguaccacuuuugagaggau

SEQ ID NO: 631188 - RNA, 22 nt, Artificial Sequence
  Synthetic
cuuguaccacuuuugagaggau

SEQ ID NO: 631189 - RNA, 23 nt, Artificial Sequence
  Synthetic
gcuuguaccacuuuugagaggau

SEQ ID NO: 631190 - RNA, 24 nt, Artificial Sequence
  Synthetic
agcuuguaccacuuuugagaggau

SEQ ID NO: 631191 - RNA, 18 nt, Artificial Sequence
  Synthetic
gacgaacaggaggaggau

SEQ ID NO: 631192 - RNA, 19 nt, Artificial Sequence
  Synthetic
agacgaacaggaggaggau

SEQ ID NO: 631193 - RNA, 20 nt, Artificial Sequence
  Synthetic
aagacgaacaggaggaggau

SEQ ID NO: 631194 - RNA, 21 nt, Artificial Sequence
  Synthetic
gaagacgaacaggaggaggau

SEQ ID NO: 631195 - RNA, 22 nt, Artificial Sequence
  Synthetic
agaagacgaacaggaggaggau

SEQ ID NO: 631196 - RNA, 23 nt, Artificial Sequence
  Synthetic
cagaagacgaacaggaggaggau

SEQ ID NO: 631197 - RNA, 24 nt, Artificial Sequence
  Synthetic
ucagaagacgaacaggaggaggau

SEQ ID NO: 631198 - RNA, 18 nt, Artificial Sequence
  Synthetic
cauagcugcugggaggau

SEQ ID NO: 631199 - RNA, 19 nt, Artificial Sequence
  Synthetic
acauagcugcugggaggau

SEQ ID NO: 631200 - RNA, 20 nt, Artificial Sequence
  Synthetic
aacauagcugcugggaggau

SEQ ID NO: 631201 - RNA, 21 nt, Artificial Sequence
  Synthetic
aaacauagcugcugggaggau

SEQ ID NO: 631202 - RNA, 22 nt, Artificial Sequence
  Synthetic
gaaacauagcugcugggaggau

SEQ ID NO: 631203 - RNA, 23 nt, Artificial Sequence
  Synthetic
agaaacauagcugcugggaggau

SEQ ID NO: 631204 - RNA, 24 nt, Artificial Sequence
  Synthetic
gagaaacauagcugcugggaggau

SEQ ID NO: 631205 - RNA, 18 nt, Artificial Sequence
  Synthetic
ugcccaaaggaugaggau

SEQ ID NO: 631206 - RNA, 19 nt, Artificial Sequence
  Synthetic
cugcccaaaggaugaggau

SEQ ID NO: 631207 - RNA, 20 nt, Artificial Sequence
  Synthetic
gcugcccaaaggaugaggau

SEQ ID NO: 631208 - RNA, 21 nt, Artificial Sequence
  Synthetic
ugcugcccaaaggaugaggau

SEQ ID NO: 631209 - RNA, 22 nt, Artificial Sequence
  Synthetic
gugcugcccaaaggaugaggau

SEQ ID NO: 631210 - RNA, 23 nt, Artificial Sequence
  Synthetic
cgugcugcccaaaggaugaggau

SEQ ID NO: 631211 - RNA, 24 nt, Artificial Sequence
  Synthetic
ccgugcugcccaaaggaugaggau

SEQ ID NO: 631212 - RNA, 18 nt, Artificial Sequence
  Synthetic
ggaugguuaccugaggau

SEQ ID NO: 631213 - RNA, 19 nt, Artificial Sequence
  Synthetic
aggaugguuaccugaggau

SEQ ID NO: 631214 - RNA, 20 nt, Artificial Sequence
  Synthetic
aaggaugguuaccugaggau

SEQ ID NO: 631215 - RNA, 21 nt, Artificial Sequence
  Synthetic
gaaggaugguuaccugaggau

SEQ ID NO: 631216 - RNA, 22 nt, Artificial Sequence
  Synthetic
agaaggaugguuaccugaggau

SEQ ID NO: 631217 - RNA, 23 nt, Artificial Sequence
  Synthetic
uagaaggaugguuaccugaggau

SEQ ID NO: 631218 - RNA, 24 nt, Artificial Sequence
  Synthetic
guagaaggaugguuaccugaggau

SEQ ID NO: 631219 - RNA, 18 nt, Artificial Sequence
  Synthetic
uguauacucucugaggau

SEQ ID NO: 631220 - RNA, 19 nt, Artificial Sequence
  Synthetic
auguauacucucugaggau

SEQ ID NO: 631221 - RNA, 20 nt, Artificial Sequence
  Synthetic
uauguauacucucugaggau

SEQ ID NO: 631222 - RNA, 21 nt, Artificial Sequence
  Synthetic
guauguauacucucugaggau

SEQ ID NO: 631223 - RNA, 22 nt, Artificial Sequence
  Synthetic
uguauguauacucucugaggau

SEQ ID NO: 631224 - RNA, 23 nt, Artificial Sequence
  Synthetic
guguauguauacucucugaggau

SEQ ID NO: 631225 - RNA, 24 nt, Artificial Sequence
  Synthetic
uguguauguauacucucugaggau

SEQ ID NO: 631226 - RNA, 18 nt, Artificial Sequence
  Synthetic
uucuuaaauugugaggau

SEQ ID NO: 631227 - RNA, 19 nt, Artificial Sequence
  Synthetic
auucuuaaauugugaggau

SEQ ID NO: 631228 - RNA, 20 nt, Artificial Sequence
  Synthetic
aauucuuaaauugugaggau

SEQ ID NO: 631229 - RNA, 21 nt, Artificial Sequence
  Synthetic
uaauucuuaaauugugaggau

SEQ ID NO: 631230 - RNA, 22 nt, Artificial Sequence
  Synthetic
uuaauucuuaaauugugaggau

SEQ ID NO: 631231 - RNA, 23 nt, Artificial Sequence
  Synthetic
auuaauucuuaaauugugaggau

SEQ ID NO: 631232 - RNA, 24 nt, Artificial Sequence
  Synthetic
aauuaauucuuaaauugugaggau

SEQ ID NO: 631233 - RNA, 18 nt, Artificial Sequence
  Synthetic
uaagaauucguugaggau

SEQ ID NO: 631234 - RNA, 19 nt, Artificial Sequence
  Synthetic
auaagaauucguugaggau

SEQ ID NO: 631235 - RNA, 20 nt, Artificial Sequence
  Synthetic
aauaagaauucguugaggau

SEQ ID NO: 631236 - RNA, 21 nt, Artificial Sequence
  Synthetic
gaauaagaauucguugaggau

SEQ ID NO: 631237 - RNA, 22 nt, Artificial Sequence
  Synthetic
agaauaagaauucguugaggau

SEQ ID NO: 631238 - RNA, 23 nt, Artificial Sequence
  Synthetic
aagaauaagaauucguugaggau

SEQ ID NO: 631239 - RNA, 24 nt, Artificial Sequence
  Synthetic
aaagaauaagaauucguugaggau

SEQ ID NO: 631240 - RNA, 18 nt, Artificial Sequence
  Synthetic
guggccauggaauaggau

SEQ ID NO: 631241 - RNA, 19 nt, Artificial Sequence
  Synthetic
aguggccauggaauaggau

SEQ ID NO: 631242 - RNA, 20 nt, Artificial Sequence
  Synthetic
caguggccauggaauaggau

SEQ ID NO: 631243 - RNA, 21 nt, Artificial Sequence
  Synthetic
acaguggccauggaauaggau

SEQ ID NO: 631244 - RNA, 22 nt, Artificial Sequence
  Synthetic
aacaguggccauggaauaggau

SEQ ID NO: 631245 - RNA, 23 nt, Artificial Sequence
  Synthetic
aaacaguggccauggaauaggau

SEQ ID NO: 631246 - RNA, 24 nt, Artificial Sequence
  Synthetic
aaaacaguggccauggaauaggau

SEQ ID NO: 631247 - RNA, 18 nt, Artificial Sequence
  Synthetic
cuggcagauagauaggau

SEQ ID NO: 631248 - RNA, 19 nt, Artificial Sequence
  Synthetic
acuggcagauagauaggau

SEQ ID NO: 631249 - RNA, 20 nt, Artificial Sequence
  Synthetic
cacuggcagauagauaggau

SEQ ID NO: 631250 - RNA, 21 nt, Artificial Sequence
  Synthetic
gcacuggcagauagauaggau

SEQ ID NO: 631251 - RNA, 22 nt, Artificial Sequence
  Synthetic
ggcacuggcagauagauaggau

SEQ ID NO: 631252 - RNA, 23 nt, Artificial Sequence
  Synthetic
aggcacuggcagauagauaggau

SEQ ID NO: 631253 - RNA, 24 nt, Artificial Sequence
  Synthetic
aaggcacuggcagauagauaggau

SEQ ID NO: 631254 - RNA, 18 nt, Artificial Sequence
  Synthetic
aaaugacagggauaggau

SEQ ID NO: 631255 - RNA, 19 nt, Artificial Sequence
  Synthetic
aaaaugacagggauaggau

SEQ ID NO: 631256 - RNA, 20 nt, Artificial Sequence
  Synthetic
aaaaaugacagggauaggau

SEQ ID NO: 631257 - RNA, 21 nt, Artificial Sequence
  Synthetic
gaaaaaugacagggauaggau

SEQ ID NO: 631258 - RNA, 22 nt, Artificial Sequence
  Synthetic
ggaaaaaugacagggauaggau

SEQ ID NO: 631259 - RNA, 23 nt, Artificial Sequence
  Synthetic
aggaaaaaugacagggauaggau

SEQ ID NO: 631260 - RNA, 24 nt, Artificial Sequence
  Synthetic
caggaaaaaugacagggauaggau

SEQ ID NO: 631261 - RNA, 18 nt, Artificial Sequence
  Synthetic
cauaauuucauauaggau

SEQ ID NO: 631262 - RNA, 19 nt, Artificial Sequence
  Synthetic
acauaauuucauauaggau

SEQ ID NO: 631263 - RNA, 20 nt, Artificial Sequence
  Synthetic
aacauaauuucauauaggau

SEQ ID NO: 631264 - RNA, 21 nt, Artificial Sequence
  Synthetic
gaacauaauuucauauaggau

SEQ ID NO: 631265 - RNA, 22 nt, Artificial Sequence
  Synthetic
ugaacauaauuucauauaggau

SEQ ID NO: 631266 - RNA, 23 nt, Artificial Sequence
  Synthetic
gugaacauaauuucauauaggau

SEQ ID NO: 631267 - RNA, 24 nt, Artificial Sequence
  Synthetic
ugugaacauaauuucauauaggau

SEQ ID NO: 631268 - RNA, 18 nt, Artificial Sequence
  Synthetic
uaauagcauuuauaggau

SEQ ID NO: 631269 - RNA, 19 nt, Artificial Sequence
  Synthetic
guaauagcauuuauaggau

SEQ ID NO: 631270 - RNA, 20 nt, Artificial Sequence
  Synthetic
gguaauagcauuuauaggau

SEQ ID NO: 631271 - RNA, 21 nt, Artificial Sequence
  Synthetic
agguaauagcauuuauaggau

SEQ ID NO: 631272 - RNA, 22 nt, Artificial Sequence
  Synthetic
cagguaauagcauuuauaggau

SEQ ID NO: 631273 - RNA, 23 nt, Artificial Sequence
  Synthetic
ccagguaauagcauuuauaggau

SEQ ID NO: 631274 - RNA, 24 nt, Artificial Sequence
  Synthetic
cccagguaauagcauuuauaggau

SEQ ID NO: 631275 - RNA, 18 nt, Artificial Sequence
  Synthetic
ugguaaccaagcuaggau

SEQ ID NO: 631276 - RNA, 19 nt, Artificial Sequence
  Synthetic
augguaaccaagcuaggau

SEQ ID NO: 631277 - RNA, 20 nt, Artificial Sequence
  Synthetic
aaugguaaccaagcuaggau

SEQ ID NO: 631278 - RNA, 21 nt, Artificial Sequence
  Synthetic
aaaugguaaccaagcuaggau

SEQ ID NO: 631279 - RNA, 22 nt, Artificial Sequence
  Synthetic
gaaaugguaaccaagcuaggau

SEQ ID NO: 631280 - RNA, 23 nt, Artificial Sequence
  Synthetic
ugaaaugguaaccaagcuaggau

SEQ ID NO: 631281 - RNA, 24 nt, Artificial Sequence
  Synthetic
gugaaaugguaaccaagcuaggau

SEQ ID NO: 631282 - RNA, 18 nt, Artificial Sequence
  Synthetic
auuuacuuagucuaggau

SEQ ID NO: 631283 - RNA, 19 nt, Artificial Sequence
  Synthetic
aauuuacuuagucuaggau

SEQ ID NO: 631284 - RNA, 20 nt, Artificial Sequence
  Synthetic
aaauuuacuuagucuaggau

SEQ ID NO: 631285 - RNA, 21 nt, Artificial Sequence
  Synthetic
uaaauuuacuuagucuaggau

SEQ ID NO: 631286 - RNA, 22 nt, Artificial Sequence
  Synthetic
auaaauuuacuuagucuaggau

SEQ ID NO: 631287 - RNA, 23 nt, Artificial Sequence
  Synthetic
aauaaauuuacuuagucuaggau

SEQ ID NO: 631288 - RNA, 24 nt, Artificial Sequence
  Synthetic
uaauaaauuuacuuagucuaggau

SEQ ID NO: 631289 - RNA, 18 nt, Artificial Sequence
  Synthetic
auucagugggucuaggau

SEQ ID NO: 631290 - RNA, 19 nt, Artificial Sequence
  Synthetic
gauucagugggucuaggau

SEQ ID NO: 631291 - RNA, 20 nt, Artificial Sequence
  Synthetic
ugauucagugggucuaggau

SEQ ID NO: 631292 - RNA, 21 nt, Artificial Sequence
  Synthetic
gugauucagugggucuaggau

SEQ ID NO: 631293 - RNA, 22 nt, Artificial Sequence
  Synthetic
ugugauucagugggucuaggau

SEQ ID NO: 631294 - RNA, 23 nt, Artificial Sequence
  Synthetic
uugugauucagugggucuaggau

SEQ ID NO: 631295 - RNA, 24 nt, Artificial Sequence
  Synthetic
auugugauucagugggucuaggau

SEQ ID NO: 631296 - RNA, 18 nt, Artificial Sequence
  Synthetic
ucucccagauucuaggau

SEQ ID NO: 631297 - RNA, 19 nt, Artificial Sequence
  Synthetic
cucucccagauucuaggau

SEQ ID NO: 631298 - RNA, 20 nt, Artificial Sequence
  Synthetic
ccucucccagauucuaggau

SEQ ID NO: 631299 - RNA, 21 nt, Artificial Sequence
  Synthetic
uccucucccagauucuaggau

SEQ ID NO: 631300 - RNA, 22 nt, Artificial Sequence
  Synthetic
cuccucucccagauucuaggau

SEQ ID NO: 631301 - RNA, 23 nt, Artificial Sequence
  Synthetic
ucuccucucccagauucuaggau

SEQ ID NO: 631302 - RNA, 24 nt, Artificial Sequence
  Synthetic
uucuccucucccagauucuaggau

SEQ ID NO: 631303 - RNA, 18 nt, Artificial Sequence
  Synthetic
aagugcugaggguaggau

SEQ ID NO: 631304 - RNA, 19 nt, Artificial Sequence
  Synthetic
gaagugcugaggguaggau

SEQ ID NO: 631305 - RNA, 20 nt, Artificial Sequence
  Synthetic
agaagugcugaggguaggau

SEQ ID NO: 631306 - RNA, 21 nt, Artificial Sequence
  Synthetic
aagaagugcugaggguaggau

SEQ ID NO: 631307 - RNA, 22 nt, Artificial Sequence
  Synthetic
gaagaagugcugaggguaggau

SEQ ID NO: 631308 - RNA, 23 nt, Artificial Sequence
  Synthetic
ugaagaagugcugaggguaggau

SEQ ID NO: 631309 - RNA, 24 nt, Artificial Sequence
  Synthetic
gugaagaagugcugaggguaggau

SEQ ID NO: 631310 - RNA, 18 nt, Artificial Sequence
  Synthetic
gguuccugggauuaggau

SEQ ID NO: 631311 - RNA, 19 nt, Artificial Sequence
  Synthetic
agguuccugggauuaggau

SEQ ID NO: 631312 - RNA, 20 nt, Artificial Sequence
  Synthetic
cagguuccugggauuaggau

SEQ ID NO: 631313 - RNA, 21 nt, Artificial Sequence
  Synthetic
acagguuccugggauuaggau

SEQ ID NO: 631314 - RNA, 22 nt, Artificial Sequence
  Synthetic
cacagguuccugggauuaggau

SEQ ID NO: 631315 - RNA, 23 nt, Artificial Sequence
  Synthetic
ucacagguuccugggauuaggau

SEQ ID NO: 631316 - RNA, 24 nt, Artificial Sequence
  Synthetic
uucacagguuccugggauuaggau

SEQ ID NO: 631317 - RNA, 18 nt, Artificial Sequence
  Synthetic
aaaaaguucucuuaggau

SEQ ID NO: 631318 - RNA, 19 nt, Artificial Sequence
  Synthetic
aaaaaaguucucuuaggau

SEQ ID NO: 631319 - RNA, 20 nt, Artificial Sequence
  Synthetic
uaaaaaaguucucuuaggau

SEQ ID NO: 631320 - RNA, 21 nt, Artificial Sequence
  Synthetic
cuaaaaaaguucucuuaggau

SEQ ID NO: 631321 - RNA, 22 nt, Artificial Sequence
  Synthetic
acuaaaaaaguucucuuaggau

SEQ ID NO: 631322 - RNA, 23 nt, Artificial Sequence
  Synthetic
uacuaaaaaaguucucuuaggau

SEQ ID NO: 631323 - RNA, 24 nt, Artificial Sequence
  Synthetic
auacuaaaaaaguucucuuaggau

SEQ ID NO: 631324 - RNA, 18 nt, Artificial Sequence
  Synthetic
uuucuuuacauuuaggau

SEQ ID NO: 631325 - RNA, 19 nt, Artificial Sequence
  Synthetic
guuucuuuacauuuaggau

SEQ ID NO: 631326 - RNA, 20 nt, Artificial Sequence
  Synthetic
aguuucuuuacauuuaggau

SEQ ID NO: 631327 - RNA, 21 nt, Artificial Sequence
  Synthetic
aaguuucuuuacauuuaggau

SEQ ID NO: 631328 - RNA, 22 nt, Artificial Sequence
  Synthetic
caaguuucuuuacauuuaggau

SEQ ID NO: 631329 - RNA, 23 nt, Artificial Sequence
  Synthetic
gcaaguuucuuuacauuuaggau

SEQ ID NO: 631330 - RNA, 24 nt, Artificial Sequence
  Synthetic
ggcaaguuucuuuacauuuaggau

SEQ ID NO: 631331 - RNA, 18 nt, Artificial Sequence
  Synthetic
ggaaaauguuaaacggau

SEQ ID NO: 631332 - RNA, 19 nt, Artificial Sequence
  Synthetic
gggaaaauguuaaacggau

SEQ ID NO: 631333 - RNA, 20 nt, Artificial Sequence
  Synthetic
agggaaaauguuaaacggau

SEQ ID NO: 631334 - RNA, 21 nt, Artificial Sequence
  Synthetic
cagggaaaauguuaaacggau

SEQ ID NO: 631335 - RNA, 22 nt, Artificial Sequence
  Synthetic
gcagggaaaauguuaaacggau

SEQ ID NO: 631336 - RNA, 23 nt, Artificial Sequence
  Synthetic
agcagggaaaauguuaaacggau

SEQ ID NO: 631337 - RNA, 24 nt, Artificial Sequence
  Synthetic
cagcagggaaaauguuaaacggau

SEQ ID NO: 631338 - RNA, 18 nt, Artificial Sequence
  Synthetic
gcaacuuauauuacggau

SEQ ID NO: 631339 - RNA, 19 nt, Artificial Sequence
  Synthetic
ugcaacuuauauuacggau

SEQ ID NO: 631340 - RNA, 20 nt, Artificial Sequence
  Synthetic
uugcaacuuauauuacggau

SEQ ID NO: 631341 - RNA, 21 nt, Artificial Sequence
  Synthetic
uuugcaacuuauauuacggau

SEQ ID NO: 631342 - RNA, 22 nt, Artificial Sequence
  Synthetic
cuuugcaacuuauauuacggau

SEQ ID NO: 631343 - RNA, 23 nt, Artificial Sequence
  Synthetic
ccuuugcaacuuauauuacggau

SEQ ID NO: 631344 - RNA, 24 nt, Artificial Sequence
  Synthetic
uccuuugcaacuuauauuacggau

SEQ ID NO: 631345 - RNA, 18 nt, Artificial Sequence
  Synthetic
cagaggcuacuagcggau

SEQ ID NO: 631346 - RNA, 19 nt, Artificial Sequence
  Synthetic
ccagaggcuacuagcggau

SEQ ID NO: 631347 - RNA, 20 nt, Artificial Sequence
  Synthetic
uccagaggcuacuagcggau

SEQ ID NO: 631348 - RNA, 21 nt, Artificial Sequence
  Synthetic
guccagaggcuacuagcggau

SEQ ID NO: 631349 - RNA, 22 nt, Artificial Sequence
  Synthetic
aguccagaggcuacuagcggau

SEQ ID NO: 631350 - RNA, 23 nt, Artificial Sequence
  Synthetic
uaguccagaggcuacuagcggau

SEQ ID NO: 631351 - RNA, 24 nt, Artificial Sequence
  Synthetic
guaguccagaggcuacuagcggau

SEQ ID NO: 631352 - RNA, 18 nt, Artificial Sequence
  Synthetic
ggguuuggaguuucggau

SEQ ID NO: 631353 - RNA, 19 nt, Artificial Sequence
  Synthetic
uggguuuggaguuucggau

SEQ ID NO: 631354 - RNA, 20 nt, Artificial Sequence
  Synthetic
guggguuuggaguuucggau

SEQ ID NO: 631355 - RNA, 21 nt, Artificial Sequence
  Synthetic
aguggguuuggaguuucggau

SEQ ID NO: 631356 - RNA, 22 nt, Artificial Sequence
  Synthetic
caguggguuuggaguuucggau

SEQ ID NO: 631357 - RNA, 23 nt, Artificial Sequence
  Synthetic
ucaguggguuuggaguuucggau

SEQ ID NO: 631358 - RNA, 24 nt, Artificial Sequence
  Synthetic
uucaguggguuuggaguuucggau

SEQ ID NO: 631359 - RNA, 18 nt, Artificial Sequence
  Synthetic
auaacaagacaaagggau

SEQ ID NO: 631360 - RNA, 19 nt, Artificial Sequence
  Synthetic
gauaacaagacaaagggau

SEQ ID NO: 631361 - RNA, 20 nt, Artificial Sequence
  Synthetic
ggauaacaagacaaagggau

SEQ ID NO: 631362 - RNA, 21 nt, Artificial Sequence
  Synthetic
aggauaacaagacaaagggau

SEQ ID NO: 631363 - RNA, 22 nt, Artificial Sequence
  Synthetic
gaggauaacaagacaaagggau

SEQ ID NO: 631364 - RNA, 23 nt, Artificial Sequence
  Synthetic
agaggauaacaagacaaagggau

SEQ ID NO: 631365 - RNA, 24 nt, Artificial Sequence
  Synthetic
gagaggauaacaagacaaagggau

SEQ ID NO: 631366 - RNA, 18 nt, Artificial Sequence
  Synthetic
auacaacuuacaagggau

SEQ ID NO: 631367 - RNA, 19 nt, Artificial Sequence
  Synthetic
aauacaacuuacaagggau

SEQ ID NO: 631368 - RNA, 20 nt, Artificial Sequence
  Synthetic
aaauacaacuuacaagggau

SEQ ID NO: 631369 - RNA, 21 nt, Artificial Sequence
  Synthetic
caaauacaacuuacaagggau

SEQ ID NO: 631370 - RNA, 22 nt, Artificial Sequence
  Synthetic
acaaauacaacuuacaagggau

SEQ ID NO: 631371 - RNA, 23 nt, Artificial Sequence
  Synthetic
uacaaauacaacuuacaagggau

SEQ ID NO: 631372 - RNA, 24 nt, Artificial Sequence
  Synthetic
cuacaaauacaacuuacaagggau

SEQ ID NO: 631373 - RNA, 20 nt, Artificial Sequence
  Synthetic
gaauacaacuuacaagggau

SEQ ID NO: 631374 - RNA, 21 nt, Artificial Sequence
  Synthetic
ggaauacaacuuacaagggau

SEQ ID NO: 631375 - RNA, 22 nt, Artificial Sequence
  Synthetic
aggaauacaacuuacaagggau

SEQ ID NO: 631376 - RNA, 23 nt, Artificial Sequence
  Synthetic
uaggaauacaacuuacaagggau

SEQ ID NO: 631377 - RNA, 24 nt, Artificial Sequence
  Synthetic
cuaggaauacaacuuacaagggau

SEQ ID NO: 631378 - RNA, 21 nt, Artificial Sequence
  Synthetic
ggaauccaacuuacaagggau

SEQ ID NO: 631379 - RNA, 22 nt, Artificial Sequence
  Synthetic
aggaauccaacuuacaagggau

SEQ ID NO: 631380 - RNA, 23 nt, Artificial Sequence
  Synthetic
uaggaauccaacuuacaagggau

SEQ ID NO: 631381 - RNA, 24 nt, Artificial Sequence
  Synthetic
cuaggaauccaacuuacaagggau

SEQ ID NO: 631382 - RNA, 18 nt, Artificial Sequence
  Synthetic
caucuaggcccaagggau

SEQ ID NO: 631383 - RNA, 19 nt, Artificial Sequence
  Synthetic
acaucuaggcccaagggau

SEQ ID NO: 631384 - RNA, 20 nt, Artificial Sequence
  Synthetic
uacaucuaggcccaagggau

SEQ ID NO: 631385 - RNA, 21 nt, Artificial Sequence
  Synthetic
cuacaucuaggcccaagggau

SEQ ID NO: 631386 - RNA, 22 nt, Artificial Sequence
  Synthetic
acuacaucuaggcccaagggau

SEQ ID NO: 631387 - RNA, 23 nt, Artificial Sequence
  Synthetic
uacuacaucuaggcccaagggau

SEQ ID NO: 631388 - RNA, 24 nt, Artificial Sequence
  Synthetic
uuacuacaucuaggcccaagggau

SEQ ID NO: 631389 - RNA, 18 nt, Artificial Sequence
  Synthetic
auacaacuugcaagggau

SEQ ID NO: 631390 - RNA, 19 nt, Artificial Sequence
  Synthetic
aauacaacuugcaagggau

SEQ ID NO: 631391 - RNA, 20 nt, Artificial Sequence
  Synthetic
gaauacaacuugcaagggau

SEQ ID NO: 631392 - RNA, 21 nt, Artificial Sequence
  Synthetic
ggaauacaacuugcaagggau

SEQ ID NO: 631393 - RNA, 22 nt, Artificial Sequence
  Synthetic
aggaauacaacuugcaagggau

SEQ ID NO: 631394 - RNA, 23 nt, Artificial Sequence
  Synthetic
uaggaauacaacuugcaagggau

SEQ ID NO: 631395 - RNA, 24 nt, Artificial Sequence
  Synthetic
cuaggaauacaacuugcaagggau

SEQ ID NO: 631396 - RNA, 18 nt, Artificial Sequence
  Synthetic
ggaacaguaagaagggau

SEQ ID NO: 631397 - RNA, 19 nt, Artificial Sequence
  Synthetic
gggaacaguaagaagggau

SEQ ID NO: 631398 - RNA, 20 nt, Artificial Sequence
  Synthetic
agggaacaguaagaagggau

SEQ ID NO: 631399 - RNA, 21 nt, Artificial Sequence
  Synthetic
uagggaacaguaagaagggau

SEQ ID NO: 631400 - RNA, 22 nt, Artificial Sequence
  Synthetic
cuagggaacaguaagaagggau

SEQ ID NO: 631401 - RNA, 23 nt, Artificial Sequence
  Synthetic
ucuagggaacaguaagaagggau

SEQ ID NO: 631402 - RNA, 24 nt, Artificial Sequence
  Synthetic
uucuagggaacaguaagaagggau

SEQ ID NO: 631403 - RNA, 18 nt, Artificial Sequence
  Synthetic
aagguagggggaagggau

SEQ ID NO: 631404 - RNA, 19 nt, Artificial Sequence
  Synthetic
aaagguagggggaagggau

SEQ ID NO: 631405 - RNA, 20 nt, Artificial Sequence
  Synthetic
uaaagguagggggaagggau

SEQ ID NO: 631406 - RNA, 21 nt, Artificial Sequence
  Synthetic
auaaagguagggggaagggau

SEQ ID NO: 631407 - RNA, 22 nt, Artificial Sequence
  Synthetic
aauaaagguagggggaagggau

SEQ ID NO: 631408 - RNA, 23 nt, Artificial Sequence
  Synthetic
aaauaaagguagggggaagggau

SEQ ID NO: 631409 - RNA, 24 nt, Artificial Sequence
  Synthetic
aaaauaaagguagggggaagggau

SEQ ID NO: 631410 - RNA, 18 nt, Artificial Sequence
  Synthetic
guggaauauugaagggau

SEQ ID NO: 631411 - RNA, 19 nt, Artificial Sequence
  Synthetic
uguggaauauugaagggau

SEQ ID NO: 631412 - RNA, 20 nt, Artificial Sequence
  Synthetic
auguggaauauugaagggau

SEQ ID NO: 631413 - RNA, 21 nt, Artificial Sequence
  Synthetic
aauguggaauauugaagggau

SEQ ID NO: 631414 - RNA, 22 nt, Artificial Sequence
  Synthetic
caauguggaauauugaagggau

SEQ ID NO: 631415 - RNA, 23 nt, Artificial Sequence
  Synthetic
gcaauguggaauauugaagggau

SEQ ID NO: 631416 - RNA, 24 nt, Artificial Sequence
  Synthetic
ugcaauguggaauauugaagggau

SEQ ID NO: 631417 - RNA, 18 nt, Artificial Sequence
  Synthetic
aagcaaacauuaagggau

SEQ ID NO: 631418 - RNA, 19 nt, Artificial Sequence
  Synthetic
aaagcaaacauuaagggau

SEQ ID NO: 631419 - RNA, 20 nt, Artificial Sequence
  Synthetic
uaaagcaaacauuaagggau

SEQ ID NO: 631420 - RNA, 21 nt, Artificial Sequence
  Synthetic
auaaagcaaacauuaagggau

SEQ ID NO: 631421 - RNA, 22 nt, Artificial Sequence
  Synthetic
uauaaagcaaacauuaagggau

SEQ ID NO: 631422 - RNA, 23 nt, Artificial Sequence
  Synthetic
auauaaagcaaacauuaagggau

SEQ ID NO: 631423 - RNA, 24 nt, Artificial Sequence
  Synthetic
uauauaaagcaaacauuaagggau

SEQ ID NO: 631424 - RNA, 18 nt, Artificial Sequence
  Synthetic
ggauaaagggacagggau

SEQ ID NO: 631425 - RNA, 19 nt, Artificial Sequence
  Synthetic
uggauaaagggacagggau

SEQ ID NO: 631426 - RNA, 20 nt, Artificial Sequence
  Synthetic
auggauaaagggacagggau

SEQ ID NO: 631427 - RNA, 21 nt, Artificial Sequence
  Synthetic
aauggauaaagggacagggau

SEQ ID NO: 631428 - RNA, 22 nt, Artificial Sequence
  Synthetic
gaauggauaaagggacagggau

SEQ ID NO: 631429 - RNA, 23 nt, Artificial Sequence
  Synthetic
ggaauggauaaagggacagggau

SEQ ID NO: 631430 - RNA, 24 nt, Artificial Sequence
  Synthetic
aggaauggauaaagggacagggau

SEQ ID NO: 631431 - RNA, 18 nt, Artificial Sequence
  Synthetic
guuuccacucccagggau

SEQ ID NO: 631432 - RNA, 19 nt, Artificial Sequence
  Synthetic
aguuuccacucccagggau

SEQ ID NO: 631433 - RNA, 20 nt, Artificial Sequence
  Synthetic
uaguuuccacucccagggau

SEQ ID NO: 631434 - RNA, 21 nt, Artificial Sequence
  Synthetic
uuaguuuccacucccagggau

SEQ ID NO: 631435 - RNA, 22 nt, Artificial Sequence
  Synthetic
cuuaguuuccacucccagggau

SEQ ID NO: 631436 - RNA, 23 nt, Artificial Sequence
  Synthetic
acuuaguuuccacucccagggau

SEQ ID NO: 631437 - RNA, 24 nt, Artificial Sequence
  Synthetic
uacuuaguuuccacucccagggau

SEQ ID NO: 631438 - RNA, 18 nt, Artificial Sequence
  Synthetic
uaacgugcagccagggau

SEQ ID NO: 631439 - RNA, 19 nt, Artificial Sequence
  Synthetic
cuaacgugcagccagggau

SEQ ID NO: 631440 - RNA, 20 nt, Artificial Sequence
  Synthetic
ucuaacgugcagccagggau

SEQ ID NO: 631441 - RNA, 21 nt, Artificial Sequence
  Synthetic
uucuaacgugcagccagggau

SEQ ID NO: 631442 - RNA, 22 nt, Artificial Sequence
  Synthetic
auucuaacgugcagccagggau

SEQ ID NO: 631443 - RNA, 23 nt, Artificial Sequence
  Synthetic
gauucuaacgugcagccagggau

SEQ ID NO: 631444 - RNA, 24 nt, Artificial Sequence
  Synthetic
ugauucuaacgugcagccagggau

SEQ ID NO: 631445 - RNA, 18 nt, Artificial Sequence
  Synthetic
caucgagaagugagggau

SEQ ID NO: 631446 - RNA, 19 nt, Artificial Sequence
  Synthetic
acaucgagaagugagggau

SEQ ID NO: 631447 - RNA, 20 nt, Artificial Sequence
  Synthetic
gacaucgagaagugagggau

SEQ ID NO: 631448 - RNA, 21 nt, Artificial Sequence
  Synthetic
ugacaucgagaagugagggau

SEQ ID NO: 631449 - RNA, 22 nt, Artificial Sequence
  Synthetic
augacaucgagaagugagggau

SEQ ID NO: 631450 - RNA, 23 nt, Artificial Sequence
  Synthetic
caugacaucgagaagugagggau

SEQ ID NO: 631451 - RNA, 24 nt, Artificial Sequence
  Synthetic
acaugacaucgagaagugagggau

SEQ ID NO: 631452 - RNA, 18 nt, Artificial Sequence
  Synthetic
uacugguaggauagggau

SEQ ID NO: 631453 - RNA, 19 nt, Artificial Sequence
  Synthetic
auacugguaggauagggau

SEQ ID NO: 631454 - RNA, 20 nt, Artificial Sequence
  Synthetic
gauacugguaggauagggau

SEQ ID NO: 631455 - RNA, 21 nt, Artificial Sequence
  Synthetic
ugauacugguaggauagggau

SEQ ID NO: 631456 - RNA, 22 nt, Artificial Sequence
  Synthetic
augauacugguaggauagggau

SEQ ID NO: 631457 - RNA, 23 nt, Artificial Sequence
  Synthetic
gaugauacugguaggauagggau

SEQ ID NO: 631458 - RNA, 24 nt, Artificial Sequence
  Synthetic
ugaugauacugguaggauagggau

SEQ ID NO: 631459 - RNA, 18 nt, Artificial Sequence
  Synthetic
gcucacacauuuagggau

SEQ ID NO: 631460 - RNA, 19 nt, Artificial Sequence
  Synthetic
ggcucacacauuuagggau

SEQ ID NO: 631461 - RNA, 20 nt, Artificial Sequence
  Synthetic
uggcucacacauuuagggau

SEQ ID NO: 631462 - RNA, 21 nt, Artificial Sequence
  Synthetic
guggcucacacauuuagggau

SEQ ID NO: 631463 - RNA, 22 nt, Artificial Sequence
  Synthetic
uguggcucacacauuuagggau

SEQ ID NO: 631464 - RNA, 23 nt, Artificial Sequence
  Synthetic
cuguggcucacacauuuagggau

SEQ ID NO: 631465 - RNA, 24 nt, Artificial Sequence
  Synthetic
acuguggcucacacauuuagggau

SEQ ID NO: 631466 - RNA, 18 nt, Artificial Sequence
  Synthetic
ggaggugggaaaggggau

SEQ ID NO: 631467 - RNA, 19 nt, Artificial Sequence
  Synthetic
gggaggugggaaaggggau

SEQ ID NO: 631468 - RNA, 20 nt, Artificial Sequence
  Synthetic
ggggaggugggaaaggggau

SEQ ID NO: 631469 - RNA, 21 nt, Artificial Sequence
  Synthetic
aggggaggugggaaaggggau

SEQ ID NO: 631470 - RNA, 22 nt, Artificial Sequence
  Synthetic
uaggggaggugggaaaggggau

SEQ ID NO: 631471 - RNA, 23 nt, Artificial Sequence
  Synthetic
uuaggggaggugggaaaggggau

SEQ ID NO: 631472 - RNA, 24 nt, Artificial Sequence
  Synthetic
uuuaggggaggugggaaaggggau

SEQ ID NO: 631473 - RNA, 18 nt, Artificial Sequence
  Synthetic
agacaaaaagaaggggau

SEQ ID NO: 631474 - RNA, 19 nt, Artificial Sequence
  Synthetic
aagacaaaaagaaggggau

SEQ ID NO: 631475 - RNA, 20 nt, Artificial Sequence
  Synthetic
aaagacaaaaagaaggggau

SEQ ID NO: 631476 - RNA, 21 nt, Artificial Sequence
  Synthetic
aaaagacaaaaagaaggggau

SEQ ID NO: 631477 - RNA, 22 nt, Artificial Sequence
  Synthetic
gaaaagacaaaaagaaggggau

SEQ ID NO: 631478 - RNA, 23 nt, Artificial Sequence
  Synthetic
ggaaaagacaaaaagaaggggau

SEQ ID NO: 631479 - RNA, 24 nt, Artificial Sequence
  Synthetic
aggaaaagacaaaaagaaggggau

SEQ ID NO: 631480 - RNA, 18 nt, Artificial Sequence
  Synthetic
cggggccucucaggggau

SEQ ID NO: 631481 - RNA, 19 nt, Artificial Sequence
  Synthetic
ccggggccucucaggggau

SEQ ID NO: 631482 - RNA, 20 nt, Artificial Sequence
  Synthetic
accggggccucucaggggau

SEQ ID NO: 631483 - RNA, 21 nt, Artificial Sequence
  Synthetic
caccggggccucucaggggau

SEQ ID NO: 631484 - RNA, 22 nt, Artificial Sequence
  Synthetic
acaccggggccucucaggggau

SEQ ID NO: 631485 - RNA, 23 nt, Artificial Sequence
  Synthetic
cacaccggggccucucaggggau

SEQ ID NO: 631486 - RNA, 24 nt, Artificial Sequence
  Synthetic
acacaccggggccucucaggggau

SEQ ID NO: 631487 - RNA, 18 nt, Artificial Sequence
  Synthetic
aauauuaagggaggggau

SEQ ID NO: 631488 - RNA, 19 nt, Artificial Sequence
  Synthetic
uaauauuaagggaggggau

SEQ ID NO: 631489 - RNA, 20 nt, Artificial Sequence
  Synthetic
uuaauauuaagggaggggau

SEQ ID NO: 631490 - RNA, 21 nt, Artificial Sequence
  Synthetic
guuaauauuaagggaggggau

SEQ ID NO: 631491 - RNA, 22 nt, Artificial Sequence
  Synthetic
uguuaauauuaagggaggggau

SEQ ID NO: 631492 - RNA, 23 nt, Artificial Sequence
  Synthetic
auguuaauauuaagggaggggau

SEQ ID NO: 631493 - RNA, 24 nt, Artificial Sequence
  Synthetic
aauguuaauauuaagggaggggau

SEQ ID NO: 631494 - RNA, 18 nt, Artificial Sequence
  Synthetic
aguggaaauaagggggau

SEQ ID NO: 631495 - RNA, 19 nt, Artificial Sequence
  Synthetic
aaguggaaauaagggggau

SEQ ID NO: 631496 - RNA, 20 nt, Artificial Sequence
  Synthetic
uaaguggaaauaagggggau

SEQ ID NO: 631497 - RNA, 21 nt, Artificial Sequence
  Synthetic
cuaaguggaaauaagggggau

SEQ ID NO: 631498 - RNA, 22 nt, Artificial Sequence
  Synthetic
ucuaaguggaaauaagggggau

SEQ ID NO: 631499 - RNA, 23 nt, Artificial Sequence
  Synthetic
uucuaaguggaaauaagggggau

SEQ ID NO: 631500 - RNA, 24 nt, Artificial Sequence
  Synthetic
guucuaaguggaaauaagggggau

SEQ ID NO: 631501 - RNA, 18 nt, Artificial Sequence
  Synthetic
guuuacuuugagggggau

SEQ ID NO: 631502 - RNA, 19 nt, Artificial Sequence
  Synthetic
uguuuacuuugagggggau

SEQ ID NO: 631503 - RNA, 20 nt, Artificial Sequence
  Synthetic
cuguuuacuuugagggggau

SEQ ID NO: 631504 - RNA, 21 nt, Artificial Sequence
  Synthetic
ccuguuuacuuugagggggau

SEQ ID NO: 631505 - RNA, 22 nt, Artificial Sequence
  Synthetic
cccuguuuacuuugagggggau

SEQ ID NO: 631506 - RNA, 23 nt, Artificial Sequence
  Synthetic
ucccuguuuacuuugagggggau

SEQ ID NO: 631507 - RNA, 24 nt, Artificial Sequence
  Synthetic
uucccuguuuacuuugagggggau

SEQ ID NO: 631508 - RNA, 18 nt, Artificial Sequence
  Synthetic
aagcaggcccugggggau

SEQ ID NO: 631509 - RNA, 19 nt, Artificial Sequence
  Synthetic
caagcaggcccugggggau

SEQ ID NO: 631510 - RNA, 20 nt, Artificial Sequence
  Synthetic
gcaagcaggcccugggggau

SEQ ID NO: 631511 - RNA, 21 nt, Artificial Sequence
  Synthetic
ugcaagcaggcccugggggau

SEQ ID NO: 631512 - RNA, 22 nt, Artificial Sequence
  Synthetic
augcaagcaggcccugggggau

SEQ ID NO: 631513 - RNA, 23 nt, Artificial Sequence
  Synthetic
uaugcaagcaggcccugggggau

SEQ ID NO: 631514 - RNA, 24 nt, Artificial Sequence
  Synthetic
uuaugcaagcaggcccugggggau

SEQ ID NO: 631515 - RNA, 18 nt, Artificial Sequence
  Synthetic
uguacguucagaugggau

SEQ ID NO: 631516 - RNA, 19 nt, Artificial Sequence
  Synthetic
guguacguucagaugggau

SEQ ID NO: 631517 - RNA, 20 nt, Artificial Sequence
  Synthetic
cguguacguucagaugggau

SEQ ID NO: 631518 - RNA, 21 nt, Artificial Sequence
  Synthetic
ccguguacguucagaugggau

SEQ ID NO: 631519 - RNA, 22 nt, Artificial Sequence
  Synthetic
accguguacguucagaugggau

SEQ ID NO: 631520 - RNA, 23 nt, Artificial Sequence
  Synthetic
uaccguguacguucagaugggau

SEQ ID NO: 631521 - RNA, 24 nt, Artificial Sequence
  Synthetic
auaccguguacguucagaugggau

SEQ ID NO: 631522 - RNA, 18 nt, Artificial Sequence
  Synthetic
aggcaggcucuaugggau

SEQ ID NO: 631523 - RNA, 19 nt, Artificial Sequence
  Synthetic
aaggcaggcucuaugggau

SEQ ID NO: 631524 - RNA, 20 nt, Artificial Sequence
  Synthetic
caaggcaggcucuaugggau

SEQ ID NO: 631525 - RNA, 21 nt, Artificial Sequence
  Synthetic
acaaggcaggcucuaugggau

SEQ ID NO: 631526 - RNA, 22 nt, Artificial Sequence
  Synthetic
gacaaggcaggcucuaugggau

SEQ ID NO: 631527 - RNA, 23 nt, Artificial Sequence
  Synthetic
ugacaaggcaggcucuaugggau

SEQ ID NO: 631528 - RNA, 24 nt, Artificial Sequence
  Synthetic
augacaaggcaggcucuaugggau

SEQ ID NO: 631529 - RNA, 18 nt, Artificial Sequence
  Synthetic
ccgcuaggguccugggau

SEQ ID NO: 631530 - RNA, 19 nt, Artificial Sequence
  Synthetic
uccgcuaggguccugggau

SEQ ID NO: 631531 - RNA, 20 nt, Artificial Sequence
  Synthetic
uuccgcuaggguccugggau

SEQ ID NO: 631532 - RNA, 21 nt, Artificial Sequence
  Synthetic
uuuccgcuaggguccugggau

SEQ ID NO: 631533 - RNA, 22 nt, Artificial Sequence
  Synthetic
cuuuccgcuaggguccugggau

SEQ ID NO: 631534 - RNA, 23 nt, Artificial Sequence
  Synthetic
ucuuuccgcuaggguccugggau

SEQ ID NO: 631535 - RNA, 24 nt, Artificial Sequence
  Synthetic
cucuuuccgcuaggguccugggau

SEQ ID NO: 631536 - RNA, 18 nt, Artificial Sequence
  Synthetic
cucccgaguagcugggau

SEQ ID NO: 631537 - RNA, 19 nt, Artificial Sequence
  Synthetic
ccucccgaguagcugggau

SEQ ID NO: 631538 - RNA, 20 nt, Artificial Sequence
  Synthetic
gccucccgaguagcugggau

SEQ ID NO: 631539 - RNA, 21 nt, Artificial Sequence
  Synthetic
agccucccgaguagcugggau

SEQ ID NO: 631540 - RNA, 22 nt, Artificial Sequence
  Synthetic
cagccucccgaguagcugggau

SEQ ID NO: 631541 - RNA, 23 nt, Artificial Sequence
  Synthetic
ucagccucccgaguagcugggau

SEQ ID NO: 631542 - RNA, 24 nt, Artificial Sequence
  Synthetic
cucagccucccgaguagcugggau

SEQ ID NO: 631543 - RNA, 18 nt, Artificial Sequence
  Synthetic
uccaggugacgcugggau

SEQ ID NO: 631544 - RNA, 19 nt, Artificial Sequence
  Synthetic
uuccaggugacgcugggau

SEQ ID NO: 631545 - RNA, 20 nt, Artificial Sequence
  Synthetic
guuccaggugacgcugggau

SEQ ID NO: 631546 - RNA, 21 nt, Artificial Sequence
  Synthetic
uguuccaggugacgcugggau

SEQ ID NO: 631547 - RNA, 22 nt, Artificial Sequence
  Synthetic
guguuccaggugacgcugggau

SEQ ID NO: 631548 - RNA, 23 nt, Artificial Sequence
  Synthetic
gguguuccaggugacgcugggau

SEQ ID NO: 631549 - RNA, 24 nt, Artificial Sequence
  Synthetic
ugguguuccaggugacgcugggau

SEQ ID NO: 631550 - RNA, 18 nt, Artificial Sequence
  Synthetic
acucacgucugcugggau

SEQ ID NO: 631551 - RNA, 19 nt, Artificial Sequence
  Synthetic
cacucacgucugcugggau

SEQ ID NO: 631552 - RNA, 20 nt, Artificial Sequence
  Synthetic
ucacucacgucugcugggau

SEQ ID NO: 631553 - RNA, 21 nt, Artificial Sequence
  Synthetic
cucacucacgucugcugggau

SEQ ID NO: 631554 - RNA, 22 nt, Artificial Sequence
  Synthetic
acucacucacgucugcugggau

SEQ ID NO: 631555 - RNA, 23 nt, Artificial Sequence
  Synthetic
cacucacucacgucugcugggau

SEQ ID NO: 631556 - RNA, 24 nt, Artificial Sequence
  Synthetic
ccacucacucacgucugcugggau

SEQ ID NO: 631557 - RNA, 18 nt, Artificial Sequence
  Synthetic
guucauucaaagugggau

SEQ ID NO: 631558 - RNA, 19 nt, Artificial Sequence
  Synthetic
aguucauucaaagugggau

SEQ ID NO: 631559 - RNA, 20 nt, Artificial Sequence
  Synthetic
uaguucauucaaagugggau

SEQ ID NO: 631560 - RNA, 21 nt, Artificial Sequence
  Synthetic
auaguucauucaaagugggau

SEQ ID NO: 631561 - RNA, 22 nt, Artificial Sequence
  Synthetic
aauaguucauucaaagugggau

SEQ ID NO: 631562 - RNA, 23 nt, Artificial Sequence
  Synthetic
aaauaguucauucaaagugggau

SEQ ID NO: 631563 - RNA, 24 nt, Artificial Sequence
  Synthetic
uaaauaguucauucaaagugggau

SEQ ID NO: 631564 - RNA, 18 nt, Artificial Sequence
  Synthetic
cccacaaccucgugggau

SEQ ID NO: 631565 - RNA, 19 nt, Artificial Sequence
  Synthetic
gcccacaaccucgugggau

SEQ ID NO: 631566 - RNA, 20 nt, Artificial Sequence
  Synthetic
ugcccacaaccucgugggau

SEQ ID NO: 631567 - RNA, 21 nt, Artificial Sequence
  Synthetic
uugcccacaaccucgugggau

SEQ ID NO: 631568 - RNA, 22 nt, Artificial Sequence
  Synthetic
cuugcccacaaccucgugggau

SEQ ID NO: 631569 - RNA, 23 nt, Artificial Sequence
  Synthetic
gcuugcccacaaccucgugggau

SEQ ID NO: 631570 - RNA, 24 nt, Artificial Sequence
  Synthetic
agcuugcccacaaccucgugggau

SEQ ID NO: 631571 - RNA, 18 nt, Artificial Sequence
  Synthetic
agggcgagagggugggau

SEQ ID NO: 631572 - RNA, 19 nt, Artificial Sequence
  Synthetic
aagggcgagagggugggau

SEQ ID NO: 631573 - RNA, 20 nt, Artificial Sequence
  Synthetic
gaagggcgagagggugggau

SEQ ID NO: 631574 - RNA, 21 nt, Artificial Sequence
  Synthetic
agaagggcgagagggugggau

SEQ ID NO: 631575 - RNA, 22 nt, Artificial Sequence
  Synthetic
cagaagggcgagagggugggau

SEQ ID NO: 631576 - RNA, 23 nt, Artificial Sequence
  Synthetic
ucagaagggcgagagggugggau

SEQ ID NO: 631577 - RNA, 24 nt, Artificial Sequence
  Synthetic
cucagaagggcgagagggugggau

SEQ ID NO: 631578 - RNA, 18 nt, Artificial Sequence
  Synthetic
aaauaccaucugugggau

SEQ ID NO: 631579 - RNA, 19 nt, Artificial Sequence
  Synthetic
aaaauaccaucugugggau

SEQ ID NO: 631580 - RNA, 20 nt, Artificial Sequence
  Synthetic
aaaaauaccaucugugggau

SEQ ID NO: 631581 - RNA, 21 nt, Artificial Sequence
  Synthetic
aaaaaauaccaucugugggau

SEQ ID NO: 631582 - RNA, 22 nt, Artificial Sequence
  Synthetic
aaaaaaauaccaucugugggau

SEQ ID NO: 631583 - RNA, 23 nt, Artificial Sequence
  Synthetic
gaaaaaaauaccaucugugggau

SEQ ID NO: 631584 - RNA, 24 nt, Artificial Sequence
  Synthetic
agaaaaaaauaccaucugugggau

SEQ ID NO: 631585 - RNA, 18 nt, Artificial Sequence
  Synthetic
uuuguauuucugugggau

SEQ ID NO: 631586 - RNA, 19 nt, Artificial Sequence
  Synthetic
guuuguauuucugugggau

SEQ ID NO: 631587 - RNA, 20 nt, Artificial Sequence
  Synthetic
aguuuguauuucugugggau

SEQ ID NO: 631588 - RNA, 21 nt, Artificial Sequence
  Synthetic
uaguuuguauuucugugggau

SEQ ID NO: 631589 - RNA, 22 nt, Artificial Sequence
  Synthetic
guaguuuguauuucugugggau

SEQ ID NO: 631590 - RNA, 23 nt, Artificial Sequence
  Synthetic
gguaguuuguauuucugugggau

SEQ ID NO: 631591 - RNA, 24 nt, Artificial Sequence
  Synthetic
ugguaguuuguauuucugugggau

SEQ ID NO: 631592 - RNA, 18 nt, Artificial Sequence
  Synthetic
gcacuuuugaauugggau

SEQ ID NO: 631593 - RNA, 19 nt, Artificial Sequence
  Synthetic
ugcacuuuugaauugggau

SEQ ID NO: 631594 - RNA, 20 nt, Artificial Sequence
  Synthetic
cugcacuuuugaauugggau

SEQ ID NO: 631595 - RNA, 21 nt, Artificial Sequence
  Synthetic
ucugcacuuuugaauugggau

SEQ ID NO: 631596 - RNA, 22 nt, Artificial Sequence
  Synthetic
cucugcacuuuugaauugggau

SEQ ID NO: 631597 - RNA, 23 nt, Artificial Sequence
  Synthetic
acucugcacuuuugaauugggau

SEQ ID NO: 631598 - RNA, 24 nt, Artificial Sequence
  Synthetic
aacucugcacuuuugaauugggau

SEQ ID NO: 631599 - RNA, 18 nt, Artificial Sequence
  Synthetic
cuauaagcacauugggau

SEQ ID NO: 631600 - RNA, 19 nt, Artificial Sequence
  Synthetic
gcuauaagcacauugggau

SEQ ID NO: 631601 - RNA, 20 nt, Artificial Sequence
  Synthetic
agcuauaagcacauugggau

SEQ ID NO: 631602 - RNA, 21 nt, Artificial Sequence
  Synthetic
uagcuauaagcacauugggau

SEQ ID NO: 631603 - RNA, 22 nt, Artificial Sequence
  Synthetic
guagcuauaagcacauugggau

SEQ ID NO: 631604 - RNA, 23 nt, Artificial Sequence
  Synthetic
uguagcuauaagcacauugggau

SEQ ID NO: 631605 - RNA, 24 nt, Artificial Sequence
  Synthetic
uuguagcuauaagcacauugggau

SEQ ID NO: 631606 - RNA, 18 nt, Artificial Sequence
  Synthetic
auccaaaaugcuugggau

SEQ ID NO: 631607 - RNA, 19 nt, Artificial Sequence
  Synthetic
uauccaaaaugcuugggau

SEQ ID NO: 631608 - RNA, 20 nt, Artificial Sequence
  Synthetic
auauccaaaaugcuugggau

SEQ ID NO: 631609 - RNA, 21 nt, Artificial Sequence
  Synthetic
cauauccaaaaugcuugggau

SEQ ID NO: 631610 - RNA, 22 nt, Artificial Sequence
  Synthetic
ccauauccaaaaugcuugggau

SEQ ID NO: 631611 - RNA, 23 nt, Artificial Sequence
  Synthetic
cccauauccaaaaugcuugggau

SEQ ID NO: 631612 - RNA, 24 nt, Artificial Sequence
  Synthetic
ucccauauccaaaaugcuugggau

SEQ ID NO: 631613 - RNA, 18 nt, Artificial Sequence
  Synthetic
ccucuggugucuugggau

SEQ ID NO: 631614 - RNA, 19 nt, Artificial Sequence
  Synthetic
uccucuggugucuugggau

SEQ ID NO: 631615 - RNA, 20 nt, Artificial Sequence
  Synthetic
uuccucuggugucuugggau

SEQ ID NO: 631616 - RNA, 21 nt, Artificial Sequence
  Synthetic
auuccucuggugucuugggau

SEQ ID NO: 631617 - RNA, 22 nt, Artificial Sequence
  Synthetic
aauuccucuggugucuugggau

SEQ ID NO: 631618 - RNA, 23 nt, Artificial Sequence
  Synthetic
aaauuccucuggugucuugggau

SEQ ID NO: 631619 - RNA, 24 nt, Artificial Sequence
  Synthetic
uaaauuccucuggugucuugggau

SEQ ID NO: 631620 - RNA, 18 nt, Artificial Sequence
  Synthetic
uaaacuauuuguugggau

SEQ ID NO: 631621 - RNA, 19 nt, Artificial Sequence
  Synthetic
cuaaacuauuuguugggau

SEQ ID NO: 631622 - RNA, 20 nt, Artificial Sequence
  Synthetic
ucuaaacuauuuguugggau

SEQ ID NO: 631623 - RNA, 21 nt, Artificial Sequence
  Synthetic
uucuaaacuauuuguugggau

SEQ ID NO: 631624 - RNA, 22 nt, Artificial Sequence
  Synthetic
uuucuaaacuauuuguugggau

SEQ ID NO: 631625 - RNA, 23 nt, Artificial Sequence
  Synthetic
auuucuaaacuauuuguugggau

SEQ ID NO: 631626 - RNA, 24 nt, Artificial Sequence
  Synthetic
gauuucuaaacuauuuguugggau

SEQ ID NO: 631627 - RNA, 18 nt, Artificial Sequence
  Synthetic
uaaguaaauauuugggau

SEQ ID NO: 631628 - RNA, 19 nt, Artificial Sequence
  Synthetic
uuaaguaaauauuugggau

SEQ ID NO: 631629 - RNA, 20 nt, Artificial Sequence
  Synthetic
guuaaguaaauauuugggau

SEQ ID NO: 631630 - RNA, 21 nt, Artificial Sequence
  Synthetic
aguuaaguaaauauuugggau

SEQ ID NO: 631631 - RNA, 22 nt, Artificial Sequence
  Synthetic
caguuaaguaaauauuugggau

SEQ ID NO: 631632 - RNA, 23 nt, Artificial Sequence
  Synthetic
ucaguuaaguaaauauuugggau

SEQ ID NO: 631633 - RNA, 24 nt, Artificial Sequence
  Synthetic
uucaguuaaguaaauauuugggau

SEQ ID NO: 631634 - RNA, 18 nt, Artificial Sequence
  Synthetic
uuucaugagcuuugggau

SEQ ID NO: 631635 - RNA, 19 nt, Artificial Sequence
  Synthetic
uuuucaugagcuuugggau

SEQ ID NO: 631636 - RNA, 20 nt, Artificial Sequence
  Synthetic
guuuucaugagcuuugggau

SEQ ID NO: 631637 - RNA, 21 nt, Artificial Sequence
  Synthetic
uguuuucaugagcuuugggau

SEQ ID NO: 631638 - RNA, 22 nt, Artificial Sequence
  Synthetic
auguuuucaugagcuuugggau

SEQ ID NO: 631639 - RNA, 23 nt, Artificial Sequence
  Synthetic
uauguuuucaugagcuuugggau

SEQ ID NO: 631640 - RNA, 24 nt, Artificial Sequence
  Synthetic
uuauguuuucaugagcuuugggau

SEQ ID NO: 631641 - RNA, 18 nt, Artificial Sequence
  Synthetic
auaugcaucuuuugggau

SEQ ID NO: 631642 - RNA, 19 nt, Artificial Sequence
  Synthetic
aauaugcaucuuuugggau

SEQ ID NO: 631643 - RNA, 20 nt, Artificial Sequence
  Synthetic
aaauaugcaucuuuugggau

SEQ ID NO: 631644 - RNA, 21 nt, Artificial Sequence
  Synthetic
gaaauaugcaucuuuugggau

SEQ ID NO: 631645 - RNA, 22 nt, Artificial Sequence
  Synthetic
ggaaauaugcaucuuuugggau

SEQ ID NO: 631646 - RNA, 23 nt, Artificial Sequence
  Synthetic
gggaaauaugcaucuuuugggau

SEQ ID NO: 631647 - RNA, 24 nt, Artificial Sequence
  Synthetic
ugggaaauaugcaucuuuugggau

SEQ ID NO: 631648 - RNA, 18 nt, Artificial Sequence
  Synthetic
uuuaauauaaaaauggau

SEQ ID NO: 631649 - RNA, 19 nt, Artificial Sequence
  Synthetic
uuuuaauauaaaaauggau

SEQ ID NO: 631650 - RNA, 20 nt, Artificial Sequence
  Synthetic
guuuuaauauaaaaauggau

SEQ ID NO: 631651 - RNA, 21 nt, Artificial Sequence
  Synthetic
aguuuuaauauaaaaauggau

SEQ ID NO: 631652 - RNA, 22 nt, Artificial Sequence
  Synthetic
gaguuuuaauauaaaaauggau

SEQ ID NO: 631653 - RNA, 23 nt, Artificial Sequence
  Synthetic
ugaguuuuaauauaaaaauggau

SEQ ID NO: 631654 - RNA, 24 nt, Artificial Sequence
  Synthetic
cugaguuuuaauauaaaaauggau

SEQ ID NO: 631655 - RNA, 18 nt, Artificial Sequence
  Synthetic
gcuggaggaugaauggau

SEQ ID NO: 631656 - RNA, 19 nt, Artificial Sequence
  Synthetic
ugcuggaggaugaauggau

SEQ ID NO: 631657 - RNA, 20 nt, Artificial Sequence
  Synthetic
cugcuggaggaugaauggau

SEQ ID NO: 631658 - RNA, 21 nt, Artificial Sequence
  Synthetic
ucugcuggaggaugaauggau

SEQ ID NO: 631659 - RNA, 22 nt, Artificial Sequence
  Synthetic
cucugcuggaggaugaauggau

SEQ ID NO: 631660 - RNA, 23 nt, Artificial Sequence
  Synthetic
ucucugcuggaggaugaauggau

SEQ ID NO: 631661 - RNA, 24 nt, Artificial Sequence
  Synthetic
uucucugcuggaggaugaauggau

SEQ ID NO: 631662 - RNA, 18 nt, Artificial Sequence
  Synthetic
aucuaaugacuaauggau

SEQ ID NO: 631663 - RNA, 19 nt, Artificial Sequence
  Synthetic
caucuaaugacuaauggau

SEQ ID NO: 631664 - RNA, 20 nt, Artificial Sequence
  Synthetic
acaucuaaugacuaauggau

SEQ ID NO: 631665 - RNA, 21 nt, Artificial Sequence
  Synthetic
cacaucuaaugacuaauggau

SEQ ID NO: 631666 - RNA, 22 nt, Artificial Sequence
  Synthetic
ucacaucuaaugacuaauggau

SEQ ID NO: 631667 - RNA, 23 nt, Artificial Sequence
  Synthetic
cucacaucuaaugacuaauggau

SEQ ID NO: 631668 - RNA, 24 nt, Artificial Sequence
  Synthetic
gcucacaucuaaugacuaauggau

SEQ ID NO: 631669 - RNA, 18 nt, Artificial Sequence
  Synthetic
cuagacuucaacauggau

SEQ ID NO: 631670 - RNA, 19 nt, Artificial Sequence
  Synthetic
ccuagacuucaacauggau

SEQ ID NO: 631671 - RNA, 20 nt, Artificial Sequence
  Synthetic
accuagacuucaacauggau

SEQ ID NO: 631672 - RNA, 21 nt, Artificial Sequence
  Synthetic
gaccuagacuucaacauggau

SEQ ID NO: 631673 - RNA, 22 nt, Artificial Sequence
  Synthetic
ugaccuagacuucaacauggau

SEQ ID NO: 631674 - RNA, 23 nt, Artificial Sequence
  Synthetic
gugaccuagacuucaacauggau

SEQ ID NO: 631675 - RNA, 24 nt, Artificial Sequence
  Synthetic
ugugaccuagacuucaacauggau

SEQ ID NO: 631676 - RNA, 18 nt, Artificial Sequence
  Synthetic
gacaauuuuuccauggau

SEQ ID NO: 631677 - RNA, 19 nt, Artificial Sequence
  Synthetic
agacaauuuuuccauggau

SEQ ID NO: 631678 - RNA, 20 nt, Artificial Sequence
  Synthetic
aagacaauuuuuccauggau

SEQ ID NO: 631679 - RNA, 21 nt, Artificial Sequence
  Synthetic
gaagacaauuuuuccauggau

SEQ ID NO: 631680 - RNA, 22 nt, Artificial Sequence
  Synthetic
ggaagacaauuuuuccauggau

SEQ ID NO: 631681 - RNA, 23 nt, Artificial Sequence
  Synthetic
aggaagacaauuuuuccauggau

SEQ ID NO: 631682 - RNA, 24 nt, Artificial Sequence
  Synthetic
gaggaagacaauuuuuccauggau

SEQ ID NO: 631683 - RNA, 18 nt, Artificial Sequence
  Synthetic
acuucugaaaagauggau

SEQ ID NO: 631684 - RNA, 19 nt, Artificial Sequence
  Synthetic
uacuucugaaaagauggau

SEQ ID NO: 631685 - RNA, 20 nt, Artificial Sequence
  Synthetic
cuacuucugaaaagauggau

SEQ ID NO: 631686 - RNA, 21 nt, Artificial Sequence
  Synthetic
acuacuucugaaaagauggau

SEQ ID NO: 631687 - RNA, 22 nt, Artificial Sequence
  Synthetic
uacuacuucugaaaagauggau

SEQ ID NO: 631688 - RNA, 23 nt, Artificial Sequence
  Synthetic
uuacuacuucugaaaagauggau

SEQ ID NO: 631689 - RNA, 24 nt, Artificial Sequence
  Synthetic
uuuacuacuucugaaaagauggau

SEQ ID NO: 631690 - RNA, 18 nt, Artificial Sequence
  Synthetic
gcuguuacaaagauggau

SEQ ID NO: 631691 - RNA, 19 nt, Artificial Sequence
  Synthetic
ggcuguuacaaagauggau

SEQ ID NO: 631692 - RNA, 20 nt, Artificial Sequence
  Synthetic
gggcuguuacaaagauggau

SEQ ID NO: 631693 - RNA, 21 nt, Artificial Sequence
  Synthetic
agggcuguuacaaagauggau

SEQ ID NO: 631694 - RNA, 22 nt, Artificial Sequence
  Synthetic
uagggcuguuacaaagauggau

SEQ ID NO: 631695 - RNA, 23 nt, Artificial Sequence
  Synthetic
uuagggcuguuacaaagauggau

SEQ ID NO: 631696 - RNA, 24 nt, Artificial Sequence
  Synthetic
uuuagggcuguuacaaagauggau

SEQ ID NO: 631697 - RNA, 18 nt, Artificial Sequence
  Synthetic
uucuuguuuaagauggau

SEQ ID NO: 631698 - RNA, 19 nt, Artificial Sequence
  Synthetic
cuucuuguuuaagauggau

SEQ ID NO: 631699 - RNA, 20 nt, Artificial Sequence
  Synthetic
gcuucuuguuuaagauggau

SEQ ID NO: 631700 - RNA, 21 nt, Artificial Sequence
  Synthetic
ugcuucuuguuuaagauggau

SEQ ID NO: 631701 - RNA, 22 nt, Artificial Sequence
  Synthetic
uugcuucuuguuuaagauggau

SEQ ID NO: 631702 - RNA, 23 nt, Artificial Sequence
  Synthetic
auugcuucuuguuuaagauggau

SEQ ID NO: 631703 - RNA, 24 nt, Artificial Sequence
  Synthetic
cauugcuucuuguuuaagauggau

SEQ ID NO: 631704 - RNA, 18 nt, Artificial Sequence
  Synthetic
gcagggacauagauggau

SEQ ID NO: 631705 - RNA, 19 nt, Artificial Sequence
  Synthetic
ugcagggacauagauggau

SEQ ID NO: 631706 - RNA, 20 nt, Artificial Sequence
  Synthetic
uugcagggacauagauggau

SEQ ID NO: 631707 - RNA, 21 nt, Artificial Sequence
  Synthetic
uuugcagggacauagauggau

SEQ ID NO: 631708 - RNA, 22 nt, Artificial Sequence
  Synthetic
cuuugcagggacauagauggau

SEQ ID NO: 631709 - RNA, 23 nt, Artificial Sequence
  Synthetic
ccuuugcagggacauagauggau

SEQ ID NO: 631710 - RNA, 24 nt, Artificial Sequence
  Synthetic
uccuuugcagggacauagauggau

SEQ ID NO: 631711 - RNA, 18 nt, Artificial Sequence
  Synthetic
uaucagucuauuauggau

SEQ ID NO: 631712 - RNA, 19 nt, Artificial Sequence
  Synthetic
guaucagucuauuauggau

SEQ ID NO: 631713 - RNA, 20 nt, Artificial Sequence
  Synthetic
aguaucagucuauuauggau

SEQ ID NO: 631714 - RNA, 21 nt, Artificial Sequence
  Synthetic
aaguaucagucuauuauggau

SEQ ID NO: 631715 - RNA, 22 nt, Artificial Sequence
  Synthetic
aaaguaucagucuauuauggau

SEQ ID NO: 631716 - RNA, 23 nt, Artificial Sequence
  Synthetic
aaaaguaucagucuauuauggau

SEQ ID NO: 631717 - RNA, 24 nt, Artificial Sequence
  Synthetic
caaaaguaucagucuauuauggau

SEQ ID NO: 631718 - RNA, 18 nt, Artificial Sequence
  Synthetic
agccaaauauuuauggau

SEQ ID NO: 631719 - RNA, 19 nt, Artificial Sequence
  Synthetic
uagccaaauauuuauggau

SEQ ID NO: 631720 - RNA, 20 nt, Artificial Sequence
  Synthetic
auagccaaauauuuauggau

SEQ ID NO: 631721 - RNA, 21 nt, Artificial Sequence
  Synthetic
cauagccaaauauuuauggau

SEQ ID NO: 631722 - RNA, 22 nt, Artificial Sequence
  Synthetic
acauagccaaauauuuauggau

SEQ ID NO: 631723 - RNA, 23 nt, Artificial Sequence
  Synthetic
gacauagccaaauauuuauggau

SEQ ID NO: 631724 - RNA, 24 nt, Artificial Sequence
  Synthetic
ugacauagccaaauauuuauggau

SEQ ID NO: 631725 - RNA, 18 nt, Artificial Sequence
  Synthetic
guggaaucuaaacuggau

SEQ ID NO: 631726 - RNA, 19 nt, Artificial Sequence
  Synthetic
uguggaaucuaaacuggau

SEQ ID NO: 631727 - RNA, 20 nt, Artificial Sequence
  Synthetic
cuguggaaucuaaacuggau

SEQ ID NO: 631728 - RNA, 21 nt, Artificial Sequence
  Synthetic
acuguggaaucuaaacuggau

SEQ ID NO: 631729 - RNA, 22 nt, Artificial Sequence
  Synthetic
uacuguggaaucuaaacuggau

SEQ ID NO: 631730 - RNA, 23 nt, Artificial Sequence
  Synthetic
auacuguggaaucuaaacuggau

SEQ ID NO: 631731 - RNA, 24 nt, Artificial Sequence
  Synthetic
uauacuguggaaucuaaacuggau

SEQ ID NO: 631732 - RNA, 18 nt, Artificial Sequence
  Synthetic
uaggggaagucacuggau

SEQ ID NO: 631733 - RNA, 19 nt, Artificial Sequence
  Synthetic
guaggggaagucacuggau

SEQ ID NO: 631734 - RNA, 20 nt, Artificial Sequence
  Synthetic
aguaggggaagucacuggau

SEQ ID NO: 631735 - RNA, 21 nt, Artificial Sequence
  Synthetic
uaguaggggaagucacuggau

SEQ ID NO: 631736 - RNA, 22 nt, Artificial Sequence
  Synthetic
uuaguaggggaagucacuggau

SEQ ID NO: 631737 - RNA, 23 nt, Artificial Sequence
  Synthetic
uuuaguaggggaagucacuggau

SEQ ID NO: 631738 - RNA, 24 nt, Artificial Sequence
  Synthetic
cuuuaguaggggaagucacuggau

SEQ ID NO: 631739 - RNA, 18 nt, Artificial Sequence
  Synthetic
caucagcgugaccuggau

SEQ ID NO: 631740 - RNA, 19 nt, Artificial Sequence
  Synthetic
gcaucagcgugaccuggau

SEQ ID NO: 631741 - RNA, 20 nt, Artificial Sequence
  Synthetic
ugcaucagcgugaccuggau

SEQ ID NO: 631742 - RNA, 21 nt, Artificial Sequence
  Synthetic
uugcaucagcgugaccuggau

SEQ ID NO: 631743 - RNA, 22 nt, Artificial Sequence
  Synthetic
cuugcaucagcgugaccuggau

SEQ ID NO: 631744 - RNA, 23 nt, Artificial Sequence
  Synthetic
ccuugcaucagcgugaccuggau

SEQ ID NO: 631745 - RNA, 24 nt, Artificial Sequence
  Synthetic
accuugcaucagcgugaccuggau

SEQ ID NO: 631746 - RNA, 18 nt, Artificial Sequence
  Synthetic
caucaguguuaccuggau

SEQ ID NO: 631747 - RNA, 19 nt, Artificial Sequence
  Synthetic
gcaucaguguuaccuggau

SEQ ID NO: 631748 - RNA, 20 nt, Artificial Sequence
  Synthetic
ugcaucaguguuaccuggau

SEQ ID NO: 631749 - RNA, 21 nt, Artificial Sequence
  Synthetic
uugcaucaguguuaccuggau

SEQ ID NO: 631750 - RNA, 22 nt, Artificial Sequence
  Synthetic
cuugcaucaguguuaccuggau

SEQ ID NO: 631751 - RNA, 23 nt, Artificial Sequence
  Synthetic
ucuugcaucaguguuaccuggau

SEQ ID NO: 631752 - RNA, 24 nt, Artificial Sequence
  Synthetic
cucuugcaucaguguuaccuggau

SEQ ID NO: 631753 - RNA, 18 nt, Artificial Sequence
  Synthetic
ugaaaacagggccuggau

SEQ ID NO: 631754 - RNA, 19 nt, Artificial Sequence
  Synthetic
cugaaaacagggccuggau

SEQ ID NO: 631755 - RNA, 20 nt, Artificial Sequence
  Synthetic
ccugaaaacagggccuggau

SEQ ID NO: 631756 - RNA, 21 nt, Artificial Sequence
  Synthetic
cccugaaaacagggccuggau

SEQ ID NO: 631757 - RNA, 22 nt, Artificial Sequence
  Synthetic
ccccugaaaacagggccuggau

SEQ ID NO: 631758 - RNA, 23 nt, Artificial Sequence
  Synthetic
uccccugaaaacagggccuggau

SEQ ID NO: 631759 - RNA, 24 nt, Artificial Sequence
  Synthetic
guccccugaaaacagggccuggau

SEQ ID NO: 631760 - RNA, 18 nt, Artificial Sequence
  Synthetic
aagagugaccagcuggau

SEQ ID NO: 631761 - RNA, 19 nt, Artificial Sequence
  Synthetic
gaagagugaccagcuggau

SEQ ID NO: 631762 - RNA, 20 nt, Artificial Sequence
  Synthetic
agaagagugaccagcuggau

SEQ ID NO: 631763 - RNA, 21 nt, Artificial Sequence
  Synthetic
cagaagagugaccagcuggau

SEQ ID NO: 631764 - RNA, 22 nt, Artificial Sequence
  Synthetic
gcagaagagugaccagcuggau

SEQ ID NO: 631765 - RNA, 23 nt, Artificial Sequence
  Synthetic
cgcagaagagugaccagcuggau

SEQ ID NO: 631766 - RNA, 24 nt, Artificial Sequence
  Synthetic
acgcagaagagugaccagcuggau

SEQ ID NO: 631767 - RNA, 18 nt, Artificial Sequence
  Synthetic
uagaagccuuagcuggau

SEQ ID NO: 631768 - RNA, 19 nt, Artificial Sequence
  Synthetic
auagaagccuuagcuggau

SEQ ID NO: 631769 - RNA, 20 nt, Artificial Sequence
  Synthetic
uauagaagccuuagcuggau

SEQ ID NO: 631770 - RNA, 21 nt, Artificial Sequence
  Synthetic
guauagaagccuuagcuggau

SEQ ID NO: 631771 - RNA, 22 nt, Artificial Sequence
  Synthetic
aguauagaagccuuagcuggau

SEQ ID NO: 631772 - RNA, 23 nt, Artificial Sequence
  Synthetic
aaguauagaagccuuagcuggau

SEQ ID NO: 631773 - RNA, 24 nt, Artificial Sequence
  Synthetic
caaguauagaagccuuagcuggau

SEQ ID NO: 631774 - RNA, 18 nt, Artificial Sequence
  Synthetic
gcuccaguuuagcuggau

SEQ ID NO: 631775 - RNA, 19 nt, Artificial Sequence
  Synthetic
agcuccaguuuagcuggau

SEQ ID NO: 631776 - RNA, 20 nt, Artificial Sequence
  Synthetic
aagcuccaguuuagcuggau

SEQ ID NO: 631777 - RNA, 21 nt, Artificial Sequence
  Synthetic
caagcuccaguuuagcuggau

SEQ ID NO: 631778 - RNA, 22 nt, Artificial Sequence
  Synthetic
ccaagcuccaguuuagcuggau

SEQ ID NO: 631779 - RNA, 23 nt, Artificial Sequence
  Synthetic
cccaagcuccaguuuagcuggau

SEQ ID NO: 631780 - RNA, 24 nt, Artificial Sequence
  Synthetic
ucccaagcuccaguuuagcuggau

SEQ ID NO: 631781 - RNA, 18 nt, Artificial Sequence
  Synthetic
gccaauggcuggcuggau

SEQ ID NO: 631782 - RNA, 19 nt, Artificial Sequence
  Synthetic
ggccaauggcuggcuggau

SEQ ID NO: 631783 - RNA, 20 nt, Artificial Sequence
  Synthetic
uggccaauggcuggcuggau

SEQ ID NO: 631784 - RNA, 21 nt, Artificial Sequence
  Synthetic
cuggccaauggcuggcuggau

SEQ ID NO: 631785 - RNA, 22 nt, Artificial Sequence
  Synthetic
ccuggccaauggcuggcuggau

SEQ ID NO: 631786 - RNA, 23 nt, Artificial Sequence
  Synthetic
cccuggccaauggcuggcuggau

SEQ ID NO: 631787 - RNA, 24 nt, Artificial Sequence
  Synthetic
ccccuggccaauggcuggcuggau

SEQ ID NO: 631788 - RNA, 18 nt, Artificial Sequence
  Synthetic
aacuuaguuuggcuggau

SEQ ID NO: 631789 - RNA, 19 nt, Artificial Sequence
  Synthetic
aaacuuaguuuggcuggau

SEQ ID NO: 631790 - RNA, 20 nt, Artificial Sequence
  Synthetic
gaaacuuaguuuggcuggau

SEQ ID NO: 631791 - RNA, 21 nt, Artificial Sequence
  Synthetic
ugaaacuuaguuuggcuggau

SEQ ID NO: 631792 - RNA, 22 nt, Artificial Sequence
  Synthetic
augaaacuuaguuuggcuggau

SEQ ID NO: 631793 - RNA, 23 nt, Artificial Sequence
  Synthetic
uaugaaacuuaguuuggcuggau

SEQ ID NO: 631794 - RNA, 24 nt, Artificial Sequence
  Synthetic
uuaugaaacuuaguuuggcuggau

SEQ ID NO: 631795 - RNA, 21 nt, Artificial Sequence
  Synthetic
ugaagcuuaguuuggcuggau

SEQ ID NO: 631796 - RNA, 22 nt, Artificial Sequence
  Synthetic
augaagcuuaguuuggcuggau

SEQ ID NO: 631797 - RNA, 23 nt, Artificial Sequence
  Synthetic
uaugaagcuuaguuuggcuggau

SEQ ID NO: 631798 - RNA, 24 nt, Artificial Sequence
  Synthetic
uuaugaagcuuaguuuggcuggau

SEQ ID NO: 631799 - RNA, 18 nt, Artificial Sequence
  Synthetic
caauuucaaccucuggau

SEQ ID NO: 631800 - RNA, 19 nt, Artificial Sequence
  Synthetic
acaauuucaaccucuggau

SEQ ID NO: 631801 - RNA, 20 nt, Artificial Sequence
  Synthetic
uacaauuucaaccucuggau

SEQ ID NO: 631802 - RNA, 21 nt, Artificial Sequence
  Synthetic
guacaauuucaaccucuggau

SEQ ID NO: 631803 - RNA, 22 nt, Artificial Sequence
  Synthetic
aguacaauuucaaccucuggau

SEQ ID NO: 631804 - RNA, 23 nt, Artificial Sequence
  Synthetic
aaguacaauuucaaccucuggau

SEQ ID NO: 631805 - RNA, 24 nt, Artificial Sequence
  Synthetic
gaaguacaauuucaaccucuggau

SEQ ID NO: 631806 - RNA, 18 nt, Artificial Sequence
  Synthetic
cauaagaacucucuggau

SEQ ID NO: 631807 - RNA, 19 nt, Artificial Sequence
  Synthetic
acauaagaacucucuggau

SEQ ID NO: 631808 - RNA, 20 nt, Artificial Sequence
  Synthetic
gacauaagaacucucuggau

SEQ ID NO: 631809 - RNA, 21 nt, Artificial Sequence
  Synthetic
agacauaagaacucucuggau

SEQ ID NO: 631810 - RNA, 22 nt, Artificial Sequence
  Synthetic
uagacauaagaacucucuggau

SEQ ID NO: 631811 - RNA, 23 nt, Artificial Sequence
  Synthetic
guagacauaagaacucucuggau

SEQ ID NO: 631812 - RNA, 24 nt, Artificial Sequence
  Synthetic
aguagacauaagaacucucuggau

SEQ ID NO: 631813 - RNA, 18 nt, Artificial Sequence
  Synthetic
uucuuagugaucguggau

SEQ ID NO: 631814 - RNA, 19 nt, Artificial Sequence
  Synthetic
uuucuuagugaucguggau

SEQ ID NO: 631815 - RNA, 20 nt, Artificial Sequence
  Synthetic
guuucuuagugaucguggau

SEQ ID NO: 631816 - RNA, 21 nt, Artificial Sequence
  Synthetic
gguuucuuagugaucguggau

SEQ ID NO: 631817 - RNA, 22 nt, Artificial Sequence
  Synthetic
ggguuucuuagugaucguggau

SEQ ID NO: 631818 - RNA, 23 nt, Artificial Sequence
  Synthetic
uggguuucuuagugaucguggau

SEQ ID NO: 631819 - RNA, 24 nt, Artificial Sequence
  Synthetic
uuggguuucuuagugaucguggau

SEQ ID NO: 631820 - RNA, 18 nt, Artificial Sequence
  Synthetic
uggaaugcagugguggau

SEQ ID NO: 631821 - RNA, 19 nt, Artificial Sequence
  Synthetic
cuggaaugcagugguggau

SEQ ID NO: 631822 - RNA, 20 nt, Artificial Sequence
  Synthetic
gcuggaaugcagugguggau

SEQ ID NO: 631823 - RNA, 21 nt, Artificial Sequence
  Synthetic
ggcuggaaugcagugguggau

SEQ ID NO: 631824 - RNA, 22 nt, Artificial Sequence
  Synthetic
aggcuggaaugcagugguggau

SEQ ID NO: 631825 - RNA, 23 nt, Artificial Sequence
  Synthetic
caggcuggaaugcagugguggau

SEQ ID NO: 631826 - RNA, 24 nt, Artificial Sequence
  Synthetic
ccaggcuggaaugcagugguggau

SEQ ID NO: 631827 - RNA, 18 nt, Artificial Sequence
  Synthetic
guagccaggcguguggau

SEQ ID NO: 631828 - RNA, 19 nt, Artificial Sequence
  Synthetic
aguagccaggcguguggau

SEQ ID NO: 631829 - RNA, 20 nt, Artificial Sequence
  Synthetic
caguagccaggcguguggau

SEQ ID NO: 631830 - RNA, 21 nt, Artificial Sequence
  Synthetic
acaguagccaggcguguggau

SEQ ID NO: 631831 - RNA, 22 nt, Artificial Sequence
  Synthetic
aacaguagccaggcguguggau

SEQ ID NO: 631832 - RNA, 23 nt, Artificial Sequence
  Synthetic
aaacaguagccaggcguguggau

SEQ ID NO: 631833 - RNA, 24 nt, Artificial Sequence
  Synthetic
uaaacaguagccaggcguguggau

SEQ ID NO: 631834 - RNA, 18 nt, Artificial Sequence
  Synthetic
uaccacucugguguggau

SEQ ID NO: 631835 - RNA, 19 nt, Artificial Sequence
  Synthetic
auaccacucugguguggau

SEQ ID NO: 631836 - RNA, 20 nt, Artificial Sequence
  Synthetic
cauaccacucugguguggau

SEQ ID NO: 631837 - RNA, 21 nt, Artificial Sequence
  Synthetic
ucauaccacucugguguggau

SEQ ID NO: 631838 - RNA, 22 nt, Artificial Sequence
  Synthetic
aucauaccacucugguguggau

SEQ ID NO: 631839 - RNA, 23 nt, Artificial Sequence
  Synthetic
caucauaccacucugguguggau

SEQ ID NO: 631840 - RNA, 24 nt, Artificial Sequence
  Synthetic
ucaucauaccacucugguguggau

SEQ ID NO: 631841 - RNA, 18 nt, Artificial Sequence
  Synthetic
aaugcaaggauuguggau

SEQ ID NO: 631842 - RNA, 19 nt, Artificial Sequence
  Synthetic
aaaugcaaggauuguggau

SEQ ID NO: 631843 - RNA, 20 nt, Artificial Sequence
  Synthetic
aaaaugcaaggauuguggau

SEQ ID NO: 631844 - RNA, 21 nt, Artificial Sequence
  Synthetic
aaaaaugcaaggauuguggau

SEQ ID NO: 631845 - RNA, 22 nt, Artificial Sequence
  Synthetic
uaaaaaugcaaggauuguggau

SEQ ID NO: 631846 - RNA, 23 nt, Artificial Sequence
  Synthetic
uuaaaaaugcaaggauuguggau

SEQ ID NO: 631847 - RNA, 24 nt, Artificial Sequence
  Synthetic
auuaaaaaugcaaggauuguggau

SEQ ID NO: 631848 - RNA, 18 nt, Artificial Sequence
  Synthetic
gcccagcagcuuguggau

SEQ ID NO: 631849 - RNA, 19 nt, Artificial Sequence
  Synthetic
ggcccagcagcuuguggau

SEQ ID NO: 631850 - RNA, 20 nt, Artificial Sequence
  Synthetic
aggcccagcagcuuguggau

SEQ ID NO: 631851 - RNA, 21 nt, Artificial Sequence
  Synthetic
caggcccagcagcuuguggau

SEQ ID NO: 631852 - RNA, 22 nt, Artificial Sequence
  Synthetic
ucaggcccagcagcuuguggau

SEQ ID NO: 631853 - RNA, 23 nt, Artificial Sequence
  Synthetic
cucaggcccagcagcuuguggau

SEQ ID NO: 631854 - RNA, 24 nt, Artificial Sequence
  Synthetic
ucucaggcccagcagcuuguggau

SEQ ID NO: 631855 - RNA, 18 nt, Artificial Sequence
  Synthetic
cuugaggugguuguggau

SEQ ID NO: 631856 - RNA, 19 nt, Artificial Sequence
  Synthetic
acuugaggugguuguggau

SEQ ID NO: 631857 - RNA, 20 nt, Artificial Sequence
  Synthetic
cacuugaggugguuguggau

SEQ ID NO: 631858 - RNA, 21 nt, Artificial Sequence
  Synthetic
acacuugaggugguuguggau

SEQ ID NO: 631859 - RNA, 22 nt, Artificial Sequence
  Synthetic
aacacuugaggugguuguggau

SEQ ID NO: 631860 - RNA, 23 nt, Artificial Sequence
  Synthetic
caacacuugaggugguuguggau

SEQ ID NO: 631861 - RNA, 24 nt, Artificial Sequence
  Synthetic
acaacacuugaggugguuguggau

SEQ ID NO: 631862 - RNA, 18 nt, Artificial Sequence
  Synthetic
ugaaagaccuaauuggau

SEQ ID NO: 631863 - RNA, 19 nt, Artificial Sequence
  Synthetic
uugaaagaccuaauuggau

SEQ ID NO: 631864 - RNA, 20 nt, Artificial Sequence
  Synthetic
auugaaagaccuaauuggau

SEQ ID NO: 631865 - RNA, 21 nt, Artificial Sequence
  Synthetic
cauugaaagaccuaauuggau

SEQ ID NO: 631866 - RNA, 22 nt, Artificial Sequence
  Synthetic
ucauugaaagaccuaauuggau

SEQ ID NO: 631867 - RNA, 23 nt, Artificial Sequence
  Synthetic
gucauugaaagaccuaauuggau

SEQ ID NO: 631868 - RNA, 24 nt, Artificial Sequence
  Synthetic
ugucauugaaagaccuaauuggau

SEQ ID NO: 631869 - RNA, 18 nt, Artificial Sequence
  Synthetic
gaugauguaacauuggau

SEQ ID NO: 631870 - RNA, 19 nt, Artificial Sequence
  Synthetic
ugaugauguaacauuggau

SEQ ID NO: 631871 - RNA, 20 nt, Artificial Sequence
  Synthetic
gugaugauguaacauuggau

SEQ ID NO: 631872 - RNA, 21 nt, Artificial Sequence
  Synthetic
agugaugauguaacauuggau

SEQ ID NO: 631873 - RNA, 22 nt, Artificial Sequence
  Synthetic
gagugaugauguaacauuggau

SEQ ID NO: 631874 - RNA, 23 nt, Artificial Sequence
  Synthetic
agagugaugauguaacauuggau

SEQ ID NO: 631875 - RNA, 24 nt, Artificial Sequence
  Synthetic
uagagugaugauguaacauuggau

SEQ ID NO: 631876 - RNA, 18 nt, Artificial Sequence
  Synthetic
ugaggauaacacuuggau

SEQ ID NO: 631877 - RNA, 19 nt, Artificial Sequence
  Synthetic
augaggauaacacuuggau

SEQ ID NO: 631878 - RNA, 20 nt, Artificial Sequence
  Synthetic
gaugaggauaacacuuggau

SEQ ID NO: 631879 - RNA, 21 nt, Artificial Sequence
  Synthetic
agaugaggauaacacuuggau

SEQ ID NO: 631880 - RNA, 22 nt, Artificial Sequence
  Synthetic
cagaugaggauaacacuuggau

SEQ ID NO: 631881 - RNA, 23 nt, Artificial Sequence
  Synthetic
gcagaugaggauaacacuuggau

SEQ ID NO: 631882 - RNA, 24 nt, Artificial Sequence
  Synthetic
agcagaugaggauaacacuuggau

SEQ ID NO: 631883 - RNA, 18 nt, Artificial Sequence
  Synthetic
ccugguuaguacuuggau

SEQ ID NO: 631884 - RNA, 19 nt, Artificial Sequence
  Synthetic
accugguuaguacuuggau

SEQ ID NO: 631885 - RNA, 20 nt, Artificial Sequence
  Synthetic
gaccugguuaguacuuggau

SEQ ID NO: 631886 - RNA, 21 nt, Artificial Sequence
  Synthetic
cgaccugguuaguacuuggau

SEQ ID NO: 631887 - RNA, 22 nt, Artificial Sequence
  Synthetic
ucgaccugguuaguacuuggau

SEQ ID NO: 631888 - RNA, 23 nt, Artificial Sequence
  Synthetic
uucgaccugguuaguacuuggau

SEQ ID NO: 631889 - RNA, 24 nt, Artificial Sequence
  Synthetic
guucgaccugguuaguacuuggau

SEQ ID NO: 631890 - RNA, 18 nt, Artificial Sequence
  Synthetic
gaagauguuggcuuggau

SEQ ID NO: 631891 - RNA, 19 nt, Artificial Sequence
  Synthetic
ugaagauguuggcuuggau

SEQ ID NO: 631892 - RNA, 20 nt, Artificial Sequence
  Synthetic
uugaagauguuggcuuggau

SEQ ID NO: 631893 - RNA, 21 nt, Artificial Sequence
  Synthetic
uuugaagauguuggcuuggau

SEQ ID NO: 631894 - RNA, 22 nt, Artificial Sequence
  Synthetic
uuuugaagauguuggcuuggau

SEQ ID NO: 631895 - RNA, 23 nt, Artificial Sequence
  Synthetic
cuuuugaagauguuggcuuggau

SEQ ID NO: 631896 - RNA, 24 nt, Artificial Sequence
  Synthetic
ccuuuugaagauguuggcuuggau

SEQ ID NO: 631897 - RNA, 18 nt, Artificial Sequence
  Synthetic
gaaaucugcaaguuggau

SEQ ID NO: 631898 - RNA, 19 nt, Artificial Sequence
  Synthetic
ggaaaucugcaaguuggau

SEQ ID NO: 631899 - RNA, 20 nt, Artificial Sequence
  Synthetic
uggaaaucugcaaguuggau

SEQ ID NO: 631900 - RNA, 21 nt, Artificial Sequence
  Synthetic
auggaaaucugcaaguuggau

SEQ ID NO: 631901 - RNA, 22 nt, Artificial Sequence
  Synthetic
aauggaaaucugcaaguuggau

SEQ ID NO: 631902 - RNA, 23 nt, Artificial Sequence
  Synthetic
aaauggaaaucugcaaguuggau

SEQ ID NO: 631903 - RNA, 24 nt, Artificial Sequence
  Synthetic
uaaauggaaaucugcaaguuggau

SEQ ID NO: 631904 - RNA, 18 nt, Artificial Sequence
  Synthetic
ucuaaucuccauuuggau

SEQ ID NO: 631905 - RNA, 19 nt, Artificial Sequence
  Synthetic
aucuaaucuccauuuggau

SEQ ID NO: 631906 - RNA, 20 nt, Artificial Sequence
  Synthetic
gaucuaaucuccauuuggau

SEQ ID NO: 631907 - RNA, 21 nt, Artificial Sequence
  Synthetic
agaucuaaucuccauuuggau

SEQ ID NO: 631908 - RNA, 22 nt, Artificial Sequence
  Synthetic
aagaucuaaucuccauuuggau

SEQ ID NO: 631909 - RNA, 23 nt, Artificial Sequence
  Synthetic
caagaucuaaucuccauuuggau

SEQ ID NO: 631910 - RNA, 24 nt, Artificial Sequence
  Synthetic
ucaagaucuaaucuccauuuggau

SEQ ID NO: 631911 - RNA, 18 nt, Artificial Sequence
  Synthetic
auugcugugccuuuggau

SEQ ID NO: 631912 - RNA, 19 nt, Artificial Sequence
  Synthetic
gauugcugugccuuuggau

SEQ ID NO: 631913 - RNA, 20 nt, Artificial Sequence
  Synthetic
ggauugcugugccuuuggau

SEQ ID NO: 631914 - RNA, 21 nt, Artificial Sequence
  Synthetic
cggauugcugugccuuuggau

SEQ ID NO: 631915 - RNA, 22 nt, Artificial Sequence
  Synthetic
acggauugcugugccuuuggau

SEQ ID NO: 631916 - RNA, 23 nt, Artificial Sequence
  Synthetic
cacggauugcugugccuuuggau

SEQ ID NO: 631917 - RNA, 24 nt, Artificial Sequence
  Synthetic
ccacggauugcugugccuuuggau

SEQ ID NO: 631918 - RNA, 18 nt, Artificial Sequence
  Synthetic
aacaaagcaauuuuggau

SEQ ID NO: 631919 - RNA, 19 nt, Artificial Sequence
  Synthetic
uaacaaagcaauuuuggau

SEQ ID NO: 631920 - RNA, 20 nt, Artificial Sequence
  Synthetic
cuaacaaagcaauuuuggau

SEQ ID NO: 631921 - RNA, 21 nt, Artificial Sequence
  Synthetic
ccuaacaaagcaauuuuggau

SEQ ID NO: 631922 - RNA, 22 nt, Artificial Sequence
  Synthetic
accuaacaaagcaauuuuggau

SEQ ID NO: 631923 - RNA, 23 nt, Artificial Sequence
  Synthetic
aaccuaacaaagcaauuuuggau

SEQ ID NO: 631924 - RNA, 24 nt, Artificial Sequence
  Synthetic
gaaccuaacaaagcaauuuuggau

SEQ ID NO: 631925 - RNA, 18 nt, Artificial Sequence
  Synthetic
ugauauucaauuuuggau

SEQ ID NO: 631926 - RNA, 19 nt, Artificial Sequence
  Synthetic
cugauauucaauuuuggau

SEQ ID NO: 631927 - RNA, 20 nt, Artificial Sequence
  Synthetic
acugauauucaauuuuggau

SEQ ID NO: 631928 - RNA, 21 nt, Artificial Sequence
  Synthetic
aacugauauucaauuuuggau

SEQ ID NO: 631929 - RNA, 22 nt, Artificial Sequence
  Synthetic
gaacugauauucaauuuuggau

SEQ ID NO: 631930 - RNA, 23 nt, Artificial Sequence
  Synthetic
ggaacugauauucaauuuuggau

SEQ ID NO: 631931 - RNA, 24 nt, Artificial Sequence
  Synthetic
uggaacugauauucaauuuuggau

SEQ ID NO: 631932 - RNA, 18 nt, Artificial Sequence
  Synthetic
acaacuucaauuuuggau

SEQ ID NO: 631933 - RNA, 19 nt, Artificial Sequence
  Synthetic
aacaacuucaauuuuggau

SEQ ID NO: 631934 - RNA, 20 nt, Artificial Sequence
  Synthetic
aaacaacuucaauuuuggau

SEQ ID NO: 631935 - RNA, 21 nt, Artificial Sequence
  Synthetic
uaaacaacuucaauuuuggau

SEQ ID NO: 631936 - RNA, 22 nt, Artificial Sequence
  Synthetic
auaaacaacuucaauuuuggau

SEQ ID NO: 631937 - RNA, 23 nt, Artificial Sequence
  Synthetic
cauaaacaacuucaauuuuggau

SEQ ID NO: 631938 - RNA, 24 nt, Artificial Sequence
  Synthetic
ucauaaacaacuucaauuuuggau

SEQ ID NO: 631939 - RNA, 18 nt, Artificial Sequence
  Synthetic
aacgauaagauuuuggau

SEQ ID NO: 631940 - RNA, 19 nt, Artificial Sequence
  Synthetic
caacgauaagauuuuggau

SEQ ID NO: 631941 - RNA, 20 nt, Artificial Sequence
  Synthetic
ucaacgauaagauuuuggau

SEQ ID NO: 631942 - RNA, 21 nt, Artificial Sequence
  Synthetic
gucaacgauaagauuuuggau

SEQ ID NO: 631943 - RNA, 22 nt, Artificial Sequence
  Synthetic
agucaacgauaagauuuuggau

SEQ ID NO: 631944 - RNA, 23 nt, Artificial Sequence
  Synthetic
aagucaacgauaagauuuuggau

SEQ ID NO: 631945 - RNA, 24 nt, Artificial Sequence
  Synthetic
aaagucaacgauaagauuuuggau

SEQ ID NO: 631946 - RNA, 18 nt, Artificial Sequence
  Synthetic
gucccaaguguuuuggau

SEQ ID NO: 631947 - RNA, 19 nt, Artificial Sequence
  Synthetic
ggucccaaguguuuuggau

SEQ ID NO: 631948 - RNA, 20 nt, Artificial Sequence
  Synthetic
uggucccaaguguuuuggau

SEQ ID NO: 631949 - RNA, 21 nt, Artificial Sequence
  Synthetic
guggucccaaguguuuuggau

SEQ ID NO: 631950 - RNA, 22 nt, Artificial Sequence
  Synthetic
uguggucccaaguguuuuggau

SEQ ID NO: 631951 - RNA, 23 nt, Artificial Sequence
  Synthetic
uuguggucccaaguguuuuggau

SEQ ID NO: 631952 - RNA, 24 nt, Artificial Sequence
  Synthetic
cuuguggucccaaguguuuuggau

SEQ ID NO: 631953 - RNA, 18 nt, Artificial Sequence
  Synthetic
gauuucagguuuuuggau

SEQ ID NO: 631954 - RNA, 19 nt, Artificial Sequence
  Synthetic
ggauuucagguuuuuggau

SEQ ID NO: 631955 - RNA, 20 nt, Artificial Sequence
  Synthetic
uggauuucagguuuuuggau

SEQ ID NO: 631956 - RNA, 21 nt, Artificial Sequence
  Synthetic
uuggauuucagguuuuuggau

SEQ ID NO: 631957 - RNA, 22 nt, Artificial Sequence
  Synthetic
uuuggauuucagguuuuuggau

SEQ ID NO: 631958 - RNA, 23 nt, Artificial Sequence
  Synthetic
auuuggauuucagguuuuuggau

SEQ ID NO: 631959 - RNA, 24 nt, Artificial Sequence
  Synthetic
cauuuggauuucagguuuuuggau

SEQ ID NO: 631960 - RNA, 18 nt, Artificial Sequence
  Synthetic
auuaaaaaaaaaaaugau

SEQ ID NO: 631961 - RNA, 19 nt, Artificial Sequence
  Synthetic
gauuaaaaaaaaaaaugau

SEQ ID NO: 631962 - RNA, 20 nt, Artificial Sequence
  Synthetic
agauuaaaaaaaaaaaugau

SEQ ID NO: 631963 - RNA, 21 nt, Artificial Sequence
  Synthetic
cagauuaaaaaaaaaaaugau

SEQ ID NO: 631964 - RNA, 22 nt, Artificial Sequence
  Synthetic
ucagauuaaaaaaaaaaaugau

SEQ ID NO: 631965 - RNA, 23 nt, Artificial Sequence
  Synthetic
uucagauuaaaaaaaaaaaugau

SEQ ID NO: 631966 - RNA, 24 nt, Artificial Sequence
  Synthetic
cuucagauuaaaaaaaaaaaugau

SEQ ID NO: 631967 - RNA, 18 nt, Artificial Sequence
  Synthetic
cuuccucagaaaaaugau

SEQ ID NO: 631968 - RNA, 19 nt, Artificial Sequence
  Synthetic
gcuuccucagaaaaaugau

SEQ ID NO: 631969 - RNA, 20 nt, Artificial Sequence
  Synthetic
agcuuccucagaaaaaugau

SEQ ID NO: 631970 - RNA, 21 nt, Artificial Sequence
  Synthetic
uagcuuccucagaaaaaugau

SEQ ID NO: 631971 - RNA, 22 nt, Artificial Sequence
  Synthetic
guagcuuccucagaaaaaugau

SEQ ID NO: 631972 - RNA, 23 nt, Artificial Sequence
  Synthetic
uguagcuuccucagaaaaaugau

SEQ ID NO: 631973 - RNA, 24 nt, Artificial Sequence
  Synthetic
uuguagcuuccucagaaaaaugau

SEQ ID NO: 631974 - RNA, 18 nt, Artificial Sequence
  Synthetic
aaauuguuugaaaaugau

SEQ ID NO: 631975 - RNA, 19 nt, Artificial Sequence
  Synthetic
gaaauuguuugaaaaugau

SEQ ID NO: 631976 - RNA, 20 nt, Artificial Sequence
  Synthetic
agaaauuguuugaaaaugau

SEQ ID NO: 631977 - RNA, 21 nt, Artificial Sequence
  Synthetic
cagaaauuguuugaaaaugau

SEQ ID NO: 631978 - RNA, 22 nt, Artificial Sequence
  Synthetic
gcagaaauuguuugaaaaugau

SEQ ID NO: 631979 - RNA, 23 nt, Artificial Sequence
  Synthetic
agcagaaauuguuugaaaaugau

SEQ ID NO: 631980 - RNA, 24 nt, Artificial Sequence
  Synthetic
aagcagaaauuguuugaaaaugau

SEQ ID NO: 631981 - RNA, 18 nt, Artificial Sequence
  Synthetic
uacuaguuauaaaaugau

SEQ ID NO: 631982 - RNA, 19 nt, Artificial Sequence
  Synthetic
auacuaguuauaaaaugau

SEQ ID NO: 631983 - RNA, 20 nt, Artificial Sequence
  Synthetic
gauacuaguuauaaaaugau

SEQ ID NO: 631984 - RNA, 21 nt, Artificial Sequence
  Synthetic
agauacuaguuauaaaaugau

SEQ ID NO: 631985 - RNA, 22 nt, Artificial Sequence
  Synthetic
uagauacuaguuauaaaaugau

SEQ ID NO: 631986 - RNA, 23 nt, Artificial Sequence
  Synthetic
auagauacuaguuauaaaaugau

SEQ ID NO: 631987 - RNA, 24 nt, Artificial Sequence
  Synthetic
aauagauacuaguuauaaaaugau

SEQ ID NO: 631988 - RNA, 18 nt, Artificial Sequence
  Synthetic
gccauacaaagaaaugau

SEQ ID NO: 631989 - RNA, 19 nt, Artificial Sequence
  Synthetic
ugccauacaaagaaaugau

SEQ ID NO: 631990 - RNA, 20 nt, Artificial Sequence
  Synthetic
augccauacaaagaaaugau

SEQ ID NO: 631991 - RNA, 21 nt, Artificial Sequence
  Synthetic
uaugccauacaaagaaaugau

SEQ ID NO: 631992 - RNA, 22 nt, Artificial Sequence
  Synthetic
guaugccauacaaagaaaugau

SEQ ID NO: 631993 - RNA, 23 nt, Artificial Sequence
  Synthetic
uguaugccauacaaagaaaugau

SEQ ID NO: 631994 - RNA, 24 nt, Artificial Sequence
  Synthetic
auguaugccauacaaagaaaugau

SEQ ID NO: 631995 - RNA, 18 nt, Artificial Sequence
  Synthetic
aagugggagcuaaaugau

SEQ ID NO: 631996 - RNA, 19 nt, Artificial Sequence
  Synthetic
uaagugggagcuaaaugau

SEQ ID NO: 631997 - RNA, 20 nt, Artificial Sequence
  Synthetic
auaagugggagcuaaaugau

SEQ ID NO: 631998 - RNA, 21 nt, Artificial Sequence
  Synthetic
uauaagugggagcuaaaugau

SEQ ID NO: 631999 - RNA, 22 nt, Artificial Sequence
  Synthetic
uuauaagugggagcuaaaugau

SEQ ID NO: 632000 - RNA, 23 nt, Artificial Sequence
  Synthetic
uuuauaagugggagcuaaaugau

SEQ ID NO: 632001 - RNA, 24 nt, Artificial Sequence
  Synthetic
auuuauaagugggagcuaaaugau

SEQ ID NO: 632002 - RNA, 18 nt, Artificial Sequence
  Synthetic
uagugggagcuaaaugau

SEQ ID NO: 632003 - RNA, 19 nt, Artificial Sequence
  Synthetic
uuagugggagcuaaaugau

SEQ ID NO: 632004 - RNA, 20 nt, Artificial Sequence
  Synthetic
auuagugggagcuaaaugau

SEQ ID NO: 632005 - RNA, 21 nt, Artificial Sequence
  Synthetic
uauuagugggagcuaaaugau

SEQ ID NO: 632006 - RNA, 22 nt, Artificial Sequence
  Synthetic
uuauuagugggagcuaaaugau

SEQ ID NO: 632007 - RNA, 23 nt, Artificial Sequence
  Synthetic
cuuauuagugggagcuaaaugau

SEQ ID NO: 632008 - RNA, 24 nt, Artificial Sequence
  Synthetic
acuuauuagugggagcuaaaugau

SEQ ID NO: 632009 - RNA, 18 nt, Artificial Sequence
  Synthetic
caagaaucucuaaaugau

SEQ ID NO: 632010 - RNA, 19 nt, Artificial Sequence
  Synthetic
ucaagaaucucuaaaugau

SEQ ID NO: 632011 - RNA, 20 nt, Artificial Sequence
  Synthetic
uucaagaaucucuaaaugau

SEQ ID NO: 632012 - RNA, 21 nt, Artificial Sequence
  Synthetic
uuucaagaaucucuaaaugau

SEQ ID NO: 632013 - RNA, 22 nt, Artificial Sequence
  Synthetic
auuucaagaaucucuaaaugau

SEQ ID NO: 632014 - RNA, 23 nt, Artificial Sequence
  Synthetic
uauuucaagaaucucuaaaugau

SEQ ID NO: 632015 - RNA, 24 nt, Artificial Sequence
  Synthetic
auauuucaagaaucucuaaaugau

SEQ ID NO: 632016 - RNA, 18 nt, Artificial Sequence
  Synthetic
aauguuauaguaaaugau

SEQ ID NO: 632017 - RNA, 19 nt, Artificial Sequence
  Synthetic
gaauguuauaguaaaugau

SEQ ID NO: 632018 - RNA, 20 nt, Artificial Sequence
  Synthetic
ugaauguuauaguaaaugau

SEQ ID NO: 632019 - RNA, 21 nt, Artificial Sequence
  Synthetic
augaauguuauaguaaaugau

SEQ ID NO: 632020 - RNA, 22 nt, Artificial Sequence
  Synthetic
caugaauguuauaguaaaugau

SEQ ID NO: 632021 - RNA, 23 nt, Artificial Sequence
  Synthetic
ucaugaauguuauaguaaaugau

SEQ ID NO: 632022 - RNA, 24 nt, Artificial Sequence
  Synthetic
uucaugaauguuauaguaaaugau

SEQ ID NO: 632023 - RNA, 18 nt, Artificial Sequence
  Synthetic
uaguauucauuaaaugau

SEQ ID NO: 632024 - RNA, 19 nt, Artificial Sequence
  Synthetic
auaguauucauuaaaugau

SEQ ID NO: 632025 - RNA, 20 nt, Artificial Sequence
  Synthetic
cauaguauucauuaaaugau

SEQ ID NO: 632026 - RNA, 21 nt, Artificial Sequence
  Synthetic
ucauaguauucauuaaaugau

SEQ ID NO: 632027 - RNA, 22 nt, Artificial Sequence
  Synthetic
cucauaguauucauuaaaugau

SEQ ID NO: 632028 - RNA, 23 nt, Artificial Sequence
  Synthetic
acucauaguauucauuaaaugau

SEQ ID NO: 632029 - RNA, 24 nt, Artificial Sequence
  Synthetic
gacucauaguauucauuaaaugau

SEQ ID NO: 632030 - RNA, 18 nt, Artificial Sequence
  Synthetic
aauaguauauacaaugau

SEQ ID NO: 632031 - RNA, 19 nt, Artificial Sequence
  Synthetic
uaauaguauauacaaugau

SEQ ID NO: 632032 - RNA, 20 nt, Artificial Sequence
  Synthetic
uuaauaguauauacaaugau

SEQ ID NO: 632033 - RNA, 21 nt, Artificial Sequence
  Synthetic
guuaauaguauauacaaugau

SEQ ID NO: 632034 - RNA, 22 nt, Artificial Sequence
  Synthetic
aguuaauaguauauacaaugau

SEQ ID NO: 632035 - RNA, 23 nt, Artificial Sequence
  Synthetic
uaguuaauaguauauacaaugau

SEQ ID NO: 632036 - RNA, 24 nt, Artificial Sequence
  Synthetic
auaguuaauaguauauacaaugau

SEQ ID NO: 632037 - RNA, 18 nt, Artificial Sequence
  Synthetic
cugagugacuacaaugau

SEQ ID NO: 632038 - RNA, 19 nt, Artificial Sequence
  Synthetic
ccugagugacuacaaugau

SEQ ID NO: 632039 - RNA, 20 nt, Artificial Sequence
  Synthetic
uccugagugacuacaaugau

SEQ ID NO: 632040 - RNA, 21 nt, Artificial Sequence
  Synthetic
uuccugagugacuacaaugau

SEQ ID NO: 632041 - RNA, 22 nt, Artificial Sequence
  Synthetic
auuccugagugacuacaaugau

SEQ ID NO: 632042 - RNA, 23 nt, Artificial Sequence
  Synthetic
gauuccugagugacuacaaugau

SEQ ID NO: 632043 - RNA, 24 nt, Artificial Sequence
  Synthetic
agauuccugagugacuacaaugau

SEQ ID NO: 632044 - RNA, 18 nt, Artificial Sequence
  Synthetic
uccaaaugcuacaaugau

SEQ ID NO: 632045 - RNA, 19 nt, Artificial Sequence
  Synthetic
uuccaaaugcuacaaugau

SEQ ID NO: 632046 - RNA, 20 nt, Artificial Sequence
  Synthetic
uuuccaaaugcuacaaugau

SEQ ID NO: 632047 - RNA, 21 nt, Artificial Sequence
  Synthetic
uuuuccaaaugcuacaaugau

SEQ ID NO: 632048 - RNA, 22 nt, Artificial Sequence
  Synthetic
auuuuccaaaugcuacaaugau

SEQ ID NO: 632049 - RNA, 23 nt, Artificial Sequence
  Synthetic
uauuuuccaaaugcuacaaugau

SEQ ID NO: 632050 - RNA, 24 nt, Artificial Sequence
  Synthetic
uuauuuuccaaaugcuacaaugau

SEQ ID NO: 632051 - RNA, 18 nt, Artificial Sequence
  Synthetic
uccagaccagagaaugau

SEQ ID NO: 632052 - RNA, 19 nt, Artificial Sequence
  Synthetic
guccagaccagagaaugau

SEQ ID NO: 632053 - RNA, 20 nt, Artificial Sequence
  Synthetic
aguccagaccagagaaugau

SEQ ID NO: 632054 - RNA, 21 nt, Artificial Sequence
  Synthetic
aaguccagaccagagaaugau

SEQ ID NO: 632055 - RNA, 22 nt, Artificial Sequence
  Synthetic
aaaguccagaccagagaaugau

SEQ ID NO: 632056 - RNA, 23 nt, Artificial Sequence
  Synthetic
uaaaguccagaccagagaaugau

SEQ ID NO: 632057 - RNA, 24 nt, Artificial Sequence
  Synthetic
cuaaaguccagaccagagaaugau

SEQ ID NO: 632058 - RNA, 18 nt, Artificial Sequence
  Synthetic
uuuuagcauaggaaugau

SEQ ID NO: 632059 - RNA, 19 nt, Artificial Sequence
  Synthetic
uuuuuagcauaggaaugau

SEQ ID NO: 632060 - RNA, 20 nt, Artificial Sequence
  Synthetic
cuuuuuagcauaggaaugau

SEQ ID NO: 632061 - RNA, 21 nt, Artificial Sequence
  Synthetic
ucuuuuuagcauaggaaugau

SEQ ID NO: 632062 - RNA, 22 nt, Artificial Sequence
  Synthetic
uucuuuuuagcauaggaaugau

SEQ ID NO: 632063 - RNA, 23 nt, Artificial Sequence
  Synthetic
guucuuuuuagcauaggaaugau

SEQ ID NO: 632064 - RNA, 24 nt, Artificial Sequence
  Synthetic
aguucuuuuuagcauaggaaugau

SEQ ID NO: 632065 - RNA, 18 nt, Artificial Sequence
  Synthetic
uucauauuugugaaugau

SEQ ID NO: 632066 - RNA, 19 nt, Artificial Sequence
  Synthetic
uuucauauuugugaaugau

SEQ ID NO: 632067 - RNA, 20 nt, Artificial Sequence
  Synthetic
uuuucauauuugugaaugau

SEQ ID NO: 632068 - RNA, 21 nt, Artificial Sequence
  Synthetic
auuuucauauuugugaaugau

SEQ ID NO: 632069 - RNA, 22 nt, Artificial Sequence
  Synthetic
gauuuucauauuugugaaugau

SEQ ID NO: 632070 - RNA, 23 nt, Artificial Sequence
  Synthetic
agauuuucauauuugugaaugau

SEQ ID NO: 632071 - RNA, 24 nt, Artificial Sequence
  Synthetic
uagauuuucauauuugugaaugau

SEQ ID NO: 632072 - RNA, 18 nt, Artificial Sequence
  Synthetic
aguuacuuaaauaaugau

SEQ ID NO: 632073 - RNA, 19 nt, Artificial Sequence
  Synthetic
aaguuacuuaaauaaugau

SEQ ID NO: 632074 - RNA, 20 nt, Artificial Sequence
  Synthetic
aaaguuacuuaaauaaugau

SEQ ID NO: 632075 - RNA, 21 nt, Artificial Sequence
  Synthetic
aaaaguuacuuaaauaaugau

SEQ ID NO: 632076 - RNA, 22 nt, Artificial Sequence
  Synthetic
gaaaaguuacuuaaauaaugau

SEQ ID NO: 632077 - RNA, 23 nt, Artificial Sequence
  Synthetic
agaaaaguuacuuaaauaaugau

SEQ ID NO: 632078 - RNA, 24 nt, Artificial Sequence
  Synthetic
aagaaaaguuacuuaaauaaugau

SEQ ID NO: 632079 - RNA, 18 nt, Artificial Sequence
  Synthetic
gucauuguucauaaugau

SEQ ID NO: 632080 - RNA, 19 nt, Artificial Sequence
  Synthetic
ggucauuguucauaaugau

SEQ ID NO: 632081 - RNA, 20 nt, Artificial Sequence
  Synthetic
aggucauuguucauaaugau

SEQ ID NO: 632082 - RNA, 21 nt, Artificial Sequence
  Synthetic
caggucauuguucauaaugau

SEQ ID NO: 632083 - RNA, 22 nt, Artificial Sequence
  Synthetic
ucaggucauuguucauaaugau

SEQ ID NO: 632084 - RNA, 23 nt, Artificial Sequence
  Synthetic
aucaggucauuguucauaaugau

SEQ ID NO: 632085 - RNA, 24 nt, Artificial Sequence
  Synthetic
uaucaggucauuguucauaaugau

SEQ ID NO: 632086 - RNA, 18 nt, Artificial Sequence
  Synthetic
gaauuaaauccuaaugau

SEQ ID NO: 632087 - RNA, 19 nt, Artificial Sequence
  Synthetic
ugaauuaaauccuaaugau

SEQ ID NO: 632088 - RNA, 20 nt, Artificial Sequence
  Synthetic
augaauuaaauccuaaugau

SEQ ID NO: 632089 - RNA, 21 nt, Artificial Sequence
  Synthetic
caugaauuaaauccuaaugau

SEQ ID NO: 632090 - RNA, 22 nt, Artificial Sequence
  Synthetic
ucaugaauuaaauccuaaugau

SEQ ID NO: 632091 - RNA, 23 nt, Artificial Sequence
  Synthetic
aucaugaauuaaauccuaaugau

SEQ ID NO: 632092 - RNA, 24 nt, Artificial Sequence
  Synthetic
aaucaugaauuaaauccuaaugau

SEQ ID NO: 632093 - RNA, 18 nt, Artificial Sequence
  Synthetic
gaguugaucauuaaugau

SEQ ID NO: 632094 - RNA, 19 nt, Artificial Sequence
  Synthetic
ugaguugaucauuaaugau

SEQ ID NO: 632095 - RNA, 20 nt, Artificial Sequence
  Synthetic
augaguugaucauuaaugau

SEQ ID NO: 632096 - RNA, 21 nt, Artificial Sequence
  Synthetic
uaugaguugaucauuaaugau

SEQ ID NO: 632097 - RNA, 22 nt, Artificial Sequence
  Synthetic
cuaugaguugaucauuaaugau

SEQ ID NO: 632098 - RNA, 23 nt, Artificial Sequence
  Synthetic
gcuaugaguugaucauuaaugau

SEQ ID NO: 632099 - RNA, 24 nt, Artificial Sequence
  Synthetic
ggcuaugaguugaucauuaaugau

SEQ ID NO: 632100 - RNA, 18 nt, Artificial Sequence
  Synthetic
uauauuauaguuaaugau

SEQ ID NO: 632101 - RNA, 19 nt, Artificial Sequence
  Synthetic
cuauauuauaguuaaugau

SEQ ID NO: 632102 - RNA, 20 nt, Artificial Sequence
  Synthetic
gcuauauuauaguuaaugau

SEQ ID NO: 632103 - RNA, 21 nt, Artificial Sequence
  Synthetic
ggcuauauuauaguuaaugau

SEQ ID NO: 632104 - RNA, 22 nt, Artificial Sequence
  Synthetic
gggcuauauuauaguuaaugau

SEQ ID NO: 632105 - RNA, 23 nt, Artificial Sequence
  Synthetic
ugggcuauauuauaguuaaugau

SEQ ID NO: 632106 - RNA, 24 nt, Artificial Sequence
  Synthetic
augggcuauauuauaguuaaugau

SEQ ID NO: 632107 - RNA, 18 nt, Artificial Sequence
  Synthetic
uuacaauagguuaaugau

SEQ ID NO: 632108 - RNA, 19 nt, Artificial Sequence
  Synthetic
uuuacaauagguuaaugau

SEQ ID NO: 632109 - RNA, 20 nt, Artificial Sequence
  Synthetic
guuuacaauagguuaaugau

SEQ ID NO: 632110 - RNA, 21 nt, Artificial Sequence
  Synthetic
uguuuacaauagguuaaugau

SEQ ID NO: 632111 - RNA, 22 nt, Artificial Sequence
  Synthetic
uuguuuacaauagguuaaugau

SEQ ID NO: 632112 - RNA, 23 nt, Artificial Sequence
  Synthetic
auuguuuacaauagguuaaugau

SEQ ID NO: 632113 - RNA, 24 nt, Artificial Sequence
  Synthetic
aauuguuuacaauagguuaaugau

SEQ ID NO: 632114 - RNA, 18 nt, Artificial Sequence
  Synthetic
auuuagaagcaacaugau

SEQ ID NO: 632115 - RNA, 19 nt, Artificial Sequence
  Synthetic
uauuuagaagcaacaugau

SEQ ID NO: 632116 - RNA, 20 nt, Artificial Sequence
  Synthetic
auauuuagaagcaacaugau

SEQ ID NO: 632117 - RNA, 21 nt, Artificial Sequence
  Synthetic
cauauuuagaagcaacaugau

SEQ ID NO: 632118 - RNA, 22 nt, Artificial Sequence
  Synthetic
acauauuuagaagcaacaugau

SEQ ID NO: 632119 - RNA, 23 nt, Artificial Sequence
  Synthetic
uacauauuuagaagcaacaugau

SEQ ID NO: 632120 - RNA, 24 nt, Artificial Sequence
  Synthetic
auacauauuuagaagcaacaugau

SEQ ID NO: 632121 - RNA, 18 nt, Artificial Sequence
  Synthetic
cagggcuggcaacaugau

SEQ ID NO: 632122 - RNA, 19 nt, Artificial Sequence
  Synthetic
gcagggcuggcaacaugau

SEQ ID NO: 632123 - RNA, 20 nt, Artificial Sequence
  Synthetic
agcagggcuggcaacaugau

SEQ ID NO: 632124 - RNA, 21 nt, Artificial Sequence
  Synthetic
aagcagggcuggcaacaugau

SEQ ID NO: 632125 - RNA, 22 nt, Artificial Sequence
  Synthetic
aaagcagggcuggcaacaugau

SEQ ID NO: 632126 - RNA, 23 nt, Artificial Sequence
  Synthetic
uaaagcagggcuggcaacaugau

SEQ ID NO: 632127 - RNA, 24 nt, Artificial Sequence
  Synthetic
uuaaagcagggcuggcaacaugau

SEQ ID NO: 632128 - RNA, 18 nt, Artificial Sequence
  Synthetic
uaaaaauaggaacaugau

SEQ ID NO: 632129 - RNA, 19 nt, Artificial Sequence
  Synthetic
auaaaaauaggaacaugau

SEQ ID NO: 632130 - RNA, 20 nt, Artificial Sequence
  Synthetic
uauaaaaauaggaacaugau

SEQ ID NO: 632131 - RNA, 21 nt, Artificial Sequence
  Synthetic
auauaaaaauaggaacaugau

SEQ ID NO: 632132 - RNA, 22 nt, Artificial Sequence
  Synthetic
uauauaaaaauaggaacaugau

SEQ ID NO: 632133 - RNA, 23 nt, Artificial Sequence
  Synthetic
auauauaaaaauaggaacaugau

SEQ ID NO: 632134 - RNA, 24 nt, Artificial Sequence
  Synthetic
gauauauaaaaauaggaacaugau

SEQ ID NO: 632135 - RNA, 18 nt, Artificial Sequence
  Synthetic
uuucagaggcuacaugau

SEQ ID NO: 632136 - RNA, 19 nt, Artificial Sequence
  Synthetic
uuuucagaggcuacaugau

SEQ ID NO: 632137 - RNA, 20 nt, Artificial Sequence
  Synthetic
uuuuucagaggcuacaugau

SEQ ID NO: 632138 - RNA, 21 nt, Artificial Sequence
  Synthetic
guuuuucagaggcuacaugau

SEQ ID NO: 632139 - RNA, 22 nt, Artificial Sequence
  Synthetic
aguuuuucagaggcuacaugau

SEQ ID NO: 632140 - RNA, 23 nt, Artificial Sequence
  Synthetic
gaguuuuucagaggcuacaugau

SEQ ID NO: 632141 - RNA, 24 nt, Artificial Sequence
  Synthetic
ugaguuuuucagaggcuacaugau

SEQ ID NO: 632142 - RNA, 18 nt, Artificial Sequence
  Synthetic
aaaugacggaaccaugau

SEQ ID NO: 632143 - RNA, 19 nt, Artificial Sequence
  Synthetic
gaaaugacggaaccaugau

SEQ ID NO: 632144 - RNA, 20 nt, Artificial Sequence
  Synthetic
agaaaugacggaaccaugau

SEQ ID NO: 632145 - RNA, 21 nt, Artificial Sequence
  Synthetic
aagaaaugacggaaccaugau

SEQ ID NO: 632146 - RNA, 22 nt, Artificial Sequence
  Synthetic
uaagaaaugacggaaccaugau

SEQ ID NO: 632147 - RNA, 23 nt, Artificial Sequence
  Synthetic
cuaagaaaugacggaaccaugau

SEQ ID NO: 632148 - RNA, 24 nt, Artificial Sequence
  Synthetic
gcuaagaaaugacggaaccaugau

SEQ ID NO: 632149 - RNA, 18 nt, Artificial Sequence
  Synthetic
uuuuugcagagccaugau

SEQ ID NO: 632150 - RNA, 19 nt, Artificial Sequence
  Synthetic
guuuuugcagagccaugau

SEQ ID NO: 632151 - RNA, 20 nt, Artificial Sequence
  Synthetic
uguuuuugcagagccaugau

SEQ ID NO: 632152 - RNA, 21 nt, Artificial Sequence
  Synthetic
uuguuuuugcagagccaugau

SEQ ID NO: 632153 - RNA, 22 nt, Artificial Sequence
  Synthetic
uuuguuuuugcagagccaugau

SEQ ID NO: 632154 - RNA, 23 nt, Artificial Sequence
  Synthetic
auuuguuuuugcagagccaugau

SEQ ID NO: 632155 - RNA, 24 nt, Artificial Sequence
  Synthetic
uauuuguuuuugcagagccaugau

SEQ ID NO: 632156 - RNA, 18 nt, Artificial Sequence
  Synthetic
auaaacaaaaggcaugau

SEQ ID NO: 632157 - RNA, 19 nt, Artificial Sequence
  Synthetic
aauaaacaaaaggcaugau

SEQ ID NO: 632158 - RNA, 20 nt, Artificial Sequence
  Synthetic
aaauaaacaaaaggcaugau

SEQ ID NO: 632159 - RNA, 21 nt, Artificial Sequence
  Synthetic
gaaauaaacaaaaggcaugau

SEQ ID NO: 632160 - RNA, 22 nt, Artificial Sequence
  Synthetic
agaaauaaacaaaaggcaugau

SEQ ID NO: 632161 - RNA, 23 nt, Artificial Sequence
  Synthetic
aagaaauaaacaaaaggcaugau

SEQ ID NO: 632162 - RNA, 24 nt, Artificial Sequence
  Synthetic
aaagaaauaaacaaaaggcaugau

SEQ ID NO: 632163 - RNA, 18 nt, Artificial Sequence
  Synthetic
agaaaaaaaacagaugau

SEQ ID NO: 632164 - RNA, 19 nt, Artificial Sequence
  Synthetic
aagaaaaaaaacagaugau

SEQ ID NO: 632165 - RNA, 20 nt, Artificial Sequence
  Synthetic
aaagaaaaaaaacagaugau

SEQ ID NO: 632166 - RNA, 21 nt, Artificial Sequence
  Synthetic
aaaagaaaaaaaacagaugau

SEQ ID NO: 632167 - RNA, 22 nt, Artificial Sequence
  Synthetic
caaaagaaaaaaaacagaugau

SEQ ID NO: 632168 - RNA, 23 nt, Artificial Sequence
  Synthetic
gcaaaagaaaaaaaacagaugau

SEQ ID NO: 632169 - RNA, 24 nt, Artificial Sequence
  Synthetic
agcaaaagaaaaaaaacagaugau

SEQ ID NO: 632170 - RNA, 18 nt, Artificial Sequence
  Synthetic
aaauaaucuagagaugau

SEQ ID NO: 632171 - RNA, 19 nt, Artificial Sequence
  Synthetic
uaaauaaucuagagaugau

SEQ ID NO: 632172 - RNA, 20 nt, Artificial Sequence
  Synthetic
auaaauaaucuagagaugau

SEQ ID NO: 632173 - RNA, 21 nt, Artificial Sequence
  Synthetic
uauaaauaaucuagagaugau

SEQ ID NO: 632174 - RNA, 22 nt, Artificial Sequence
  Synthetic
cuauaaauaaucuagagaugau

SEQ ID NO: 632175 - RNA, 23 nt, Artificial Sequence
  Synthetic
acuauaaauaaucuagagaugau

SEQ ID NO: 632176 - RNA, 24 nt, Artificial Sequence
  Synthetic
uacuauaaauaaucuagagaugau

SEQ ID NO: 632177 - RNA, 18 nt, Artificial Sequence
  Synthetic
aucauagaaugagaugau

SEQ ID NO: 632178 - RNA, 19 nt, Artificial Sequence
  Synthetic
gaucauagaaugagaugau

SEQ ID NO: 632179 - RNA, 20 nt, Artificial Sequence
  Synthetic
agaucauagaaugagaugau

SEQ ID NO: 632180 - RNA, 21 nt, Artificial Sequence
  Synthetic
aagaucauagaaugagaugau

SEQ ID NO: 632181 - RNA, 22 nt, Artificial Sequence
  Synthetic
gaagaucauagaaugagaugau

SEQ ID NO: 632182 - RNA, 23 nt, Artificial Sequence
  Synthetic
ugaagaucauagaaugagaugau

SEQ ID NO: 632183 - RNA, 24 nt, Artificial Sequence
  Synthetic
gugaagaucauagaaugagaugau

SEQ ID NO: 632184 - RNA, 18 nt, Artificial Sequence
  Synthetic
gagacuguuuuagaugau

SEQ ID NO: 632185 - RNA, 19 nt, Artificial Sequence
  Synthetic
agagacuguuuuagaugau

SEQ ID NO: 632186 - RNA, 20 nt, Artificial Sequence
  Synthetic
cagagacuguuuuagaugau

SEQ ID NO: 632187 - RNA, 21 nt, Artificial Sequence
  Synthetic
ccagagacuguuuuagaugau

SEQ ID NO: 632188 - RNA, 22 nt, Artificial Sequence
  Synthetic
accagagacuguuuuagaugau

SEQ ID NO: 632189 - RNA, 23 nt, Artificial Sequence
  Synthetic
gaccagagacuguuuuagaugau

SEQ ID NO: 632190 - RNA, 24 nt, Artificial Sequence
  Synthetic
ggaccagagacuguuuuagaugau

SEQ ID NO: 632191 - RNA, 18 nt, Artificial Sequence
  Synthetic
aaauacugauaggaugau

SEQ ID NO: 632192 - RNA, 19 nt, Artificial Sequence
  Synthetic
aaaauacugauaggaugau

SEQ ID NO: 632193 - RNA, 20 nt, Artificial Sequence
  Synthetic
caaaauacugauaggaugau

SEQ ID NO: 632194 - RNA, 21 nt, Artificial Sequence
  Synthetic
ucaaaauacugauaggaugau

SEQ ID NO: 632195 - RNA, 22 nt, Artificial Sequence
  Synthetic
cucaaaauacugauaggaugau

SEQ ID NO: 632196 - RNA, 23 nt, Artificial Sequence
  Synthetic
ucucaaaauacugauaggaugau

SEQ ID NO: 632197 - RNA, 24 nt, Artificial Sequence
  Synthetic
uucucaaaauacugauaggaugau

SEQ ID NO: 632198 - RNA, 18 nt, Artificial Sequence
  Synthetic
aauaacacugcugaugau

SEQ ID NO: 632199 - RNA, 19 nt, Artificial Sequence
  Synthetic
uaauaacacugcugaugau

SEQ ID NO: 632200 - RNA, 20 nt, Artificial Sequence
  Synthetic
uuaauaacacugcugaugau

SEQ ID NO: 632201 - RNA, 21 nt, Artificial Sequence
  Synthetic
auuaauaacacugcugaugau

SEQ ID NO: 632202 - RNA, 22 nt, Artificial Sequence
  Synthetic
cauuaauaacacugcugaugau

SEQ ID NO: 632203 - RNA, 23 nt, Artificial Sequence
  Synthetic
gcauuaauaacacugcugaugau

SEQ ID NO: 632204 - RNA, 24 nt, Artificial Sequence
  Synthetic
agcauuaauaacacugcugaugau

SEQ ID NO: 632205 - RNA, 18 nt, Artificial Sequence
  Synthetic
uaaucuaucauugaugau

SEQ ID NO: 632206 - RNA, 19 nt, Artificial Sequence
  Synthetic
cuaaucuaucauugaugau

SEQ ID NO: 632207 - RNA, 20 nt, Artificial Sequence
  Synthetic
ucuaaucuaucauugaugau

SEQ ID NO: 632208 - RNA, 21 nt, Artificial Sequence
  Synthetic
aucuaaucuaucauugaugau

SEQ ID NO: 632209 - RNA, 22 nt, Artificial Sequence
  Synthetic
uaucuaaucuaucauugaugau

SEQ ID NO: 632210 - RNA, 23 nt, Artificial Sequence
  Synthetic
cuaucuaaucuaucauugaugau

SEQ ID NO: 632211 - RNA, 24 nt, Artificial Sequence
  Synthetic
ucuaucuaaucuaucauugaugau

SEQ ID NO: 632212 - RNA, 18 nt, Artificial Sequence
  Synthetic
guguguucucuugaugau

SEQ ID NO: 632213 - RNA, 19 nt, Artificial Sequence
  Synthetic
uguguguucucuugaugau

SEQ ID NO: 632214 - RNA, 20 nt, Artificial Sequence
  Synthetic
cuguguguucucuugaugau

SEQ ID NO: 632215 - RNA, 21 nt, Artificial Sequence
  Synthetic
acuguguguucucuugaugau

SEQ ID NO: 632216 - RNA, 22 nt, Artificial Sequence
  Synthetic
cacuguguguucucuugaugau

SEQ ID NO: 632217 - RNA, 23 nt, Artificial Sequence
  Synthetic
gcacuguguguucucuugaugau

SEQ ID NO: 632218 - RNA, 24 nt, Artificial Sequence
  Synthetic
ggcacuguguguucucuugaugau

SEQ ID NO: 632219 - RNA, 18 nt, Artificial Sequence
  Synthetic
gaugaugauuuugaugau

SEQ ID NO: 632220 - RNA, 19 nt, Artificial Sequence
  Synthetic
ugaugaugauuuugaugau

SEQ ID NO: 632221 - RNA, 20 nt, Artificial Sequence
  Synthetic
augaugaugauuuugaugau

SEQ ID NO: 632222 - RNA, 21 nt, Artificial Sequence
  Synthetic
gaugaugaugauuuugaugau

SEQ ID NO: 632223 - RNA, 22 nt, Artificial Sequence
  Synthetic
ugaugaugaugauuuugaugau

SEQ ID NO: 632224 - RNA, 23 nt, Artificial Sequence
  Synthetic
augaugaugaugauuuugaugau

SEQ ID NO: 632225 - RNA, 24 nt, Artificial Sequence
  Synthetic
gaugaugaugaugauuuugaugau

SEQ ID NO: 632226 - RNA, 18 nt, Artificial Sequence
  Synthetic
auaccagcugaauaugau

SEQ ID NO: 632227 - RNA, 19 nt, Artificial Sequence
  Synthetic
aauaccagcugaauaugau

SEQ ID NO: 632228 - RNA, 20 nt, Artificial Sequence
  Synthetic
caauaccagcugaauaugau

SEQ ID NO: 632229 - RNA, 21 nt, Artificial Sequence
  Synthetic
acaauaccagcugaauaugau

SEQ ID NO: 632230 - RNA, 22 nt, Artificial Sequence
  Synthetic
aacaauaccagcugaauaugau

SEQ ID NO: 632231 - RNA, 23 nt, Artificial Sequence
  Synthetic
aaacaauaccagcugaauaugau

SEQ ID NO: 632232 - RNA, 24 nt, Artificial Sequence
  Synthetic
aaaacaauaccagcugaauaugau

SEQ ID NO: 632233 - RNA, 18 nt, Artificial Sequence
  Synthetic
ucauggagaggauaugau

SEQ ID NO: 632234 - RNA, 19 nt, Artificial Sequence
  Synthetic
uucauggagaggauaugau

SEQ ID NO: 632235 - RNA, 20 nt, Artificial Sequence
  Synthetic
auucauggagaggauaugau

SEQ ID NO: 632236 - RNA, 21 nt, Artificial Sequence
  Synthetic
uauucauggagaggauaugau

SEQ ID NO: 632237 - RNA, 22 nt, Artificial Sequence
  Synthetic
cuauucauggagaggauaugau

SEQ ID NO: 632238 - RNA, 23 nt, Artificial Sequence
  Synthetic
ccuauucauggagaggauaugau

SEQ ID NO: 632239 - RNA, 24 nt, Artificial Sequence
  Synthetic
cccuauucauggagaggauaugau

SEQ ID NO: 632240 - RNA, 18 nt, Artificial Sequence
  Synthetic
uagaaaugacuauaugau

SEQ ID NO: 632241 - RNA, 19 nt, Artificial Sequence
  Synthetic
uuagaaaugacuauaugau

SEQ ID NO: 632242 - RNA, 20 nt, Artificial Sequence
  Synthetic
uuuagaaaugacuauaugau

SEQ ID NO: 632243 - RNA, 21 nt, Artificial Sequence
  Synthetic
auuuagaaaugacuauaugau

SEQ ID NO: 632244 - RNA, 22 nt, Artificial Sequence
  Synthetic
gauuuagaaaugacuauaugau

SEQ ID NO: 632245 - RNA, 23 nt, Artificial Sequence
  Synthetic
agauuuagaaaugacuauaugau

SEQ ID NO: 632246 - RNA, 24 nt, Artificial Sequence
  Synthetic
gagauuuagaaaugacuauaugau

SEQ ID NO: 632247 - RNA, 18 nt, Artificial Sequence
  Synthetic
ucaguuuuccuauaugau

SEQ ID NO: 632248 - RNA, 19 nt, Artificial Sequence
  Synthetic
uucaguuuuccuauaugau

SEQ ID NO: 632249 - RNA, 20 nt, Artificial Sequence
  Synthetic
auucaguuuuccuauaugau

SEQ ID NO: 632250 - RNA, 21 nt, Artificial Sequence
  Synthetic
cauucaguuuuccuauaugau

SEQ ID NO: 632251 - RNA, 22 nt, Artificial Sequence
  Synthetic
ucauucaguuuuccuauaugau

SEQ ID NO: 632252 - RNA, 23 nt, Artificial Sequence
  Synthetic
uucauucaguuuuccuauaugau

SEQ ID NO: 632253 - RNA, 24 nt, Artificial Sequence
  Synthetic
auucauucaguuuuccuauaugau

SEQ ID NO: 632254 - RNA, 18 nt, Artificial Sequence
  Synthetic
acaacucugcuauaugau

SEQ ID NO: 632255 - RNA, 19 nt, Artificial Sequence
  Synthetic
gacaacucugcuauaugau

SEQ ID NO: 632256 - RNA, 20 nt, Artificial Sequence
  Synthetic
cgacaacucugcuauaugau

SEQ ID NO: 632257 - RNA, 21 nt, Artificial Sequence
  Synthetic
acgacaacucugcuauaugau

SEQ ID NO: 632258 - RNA, 22 nt, Artificial Sequence
  Synthetic
uacgacaacucugcuauaugau

SEQ ID NO: 632259 - RNA, 23 nt, Artificial Sequence
  Synthetic
cuacgacaacucugcuauaugau

SEQ ID NO: 632260 - RNA, 24 nt, Artificial Sequence
  Synthetic
ucuacgacaacucugcuauaugau

SEQ ID NO: 632261 - RNA, 18 nt, Artificial Sequence
  Synthetic
ucacaauuauuauaugau

SEQ ID NO: 632262 - RNA, 19 nt, Artificial Sequence
  Synthetic
cucacaauuauuauaugau

SEQ ID NO: 632263 - RNA, 20 nt, Artificial Sequence
  Synthetic
ccucacaauuauuauaugau

SEQ ID NO: 632264 - RNA, 21 nt, Artificial Sequence
  Synthetic
accucacaauuauuauaugau

SEQ ID NO: 632265 - RNA, 22 nt, Artificial Sequence
  Synthetic
caccucacaauuauuauaugau

SEQ ID NO: 632266 - RNA, 23 nt, Artificial Sequence
  Synthetic
gcaccucacaauuauuauaugau

SEQ ID NO: 632267 - RNA, 24 nt, Artificial Sequence
  Synthetic
agcaccucacaauuauuauaugau

SEQ ID NO: 632268 - RNA, 18 nt, Artificial Sequence
  Synthetic
gacuuuggguuauaugau

SEQ ID NO: 632269 - RNA, 19 nt, Artificial Sequence
  Synthetic
ugacuuuggguuauaugau

SEQ ID NO: 632270 - RNA, 20 nt, Artificial Sequence
  Synthetic
augacuuuggguuauaugau

SEQ ID NO: 632271 - RNA, 21 nt, Artificial Sequence
  Synthetic
caugacuuuggguuauaugau

SEQ ID NO: 632272 - RNA, 22 nt, Artificial Sequence
  Synthetic
gcaugacuuuggguuauaugau

SEQ ID NO: 632273 - RNA, 23 nt, Artificial Sequence
  Synthetic
agcaugacuuuggguuauaugau

SEQ ID NO: 632274 - RNA, 24 nt, Artificial Sequence
  Synthetic
uagcaugacuuuggguuauaugau

SEQ ID NO: 632275 - RNA, 18 nt, Artificial Sequence
  Synthetic
uccaaucuaggguaugau

SEQ ID NO: 632276 - RNA, 19 nt, Artificial Sequence
  Synthetic
auccaaucuaggguaugau

SEQ ID NO: 632277 - RNA, 20 nt, Artificial Sequence
  Synthetic
gauccaaucuaggguaugau

SEQ ID NO: 632278 - RNA, 21 nt, Artificial Sequence
  Synthetic
agauccaaucuaggguaugau

SEQ ID NO: 632279 - RNA, 22 nt, Artificial Sequence
  Synthetic
gagauccaaucuaggguaugau

SEQ ID NO: 632280 - RNA, 23 nt, Artificial Sequence
  Synthetic
cgagauccaaucuaggguaugau

SEQ ID NO: 632281 - RNA, 24 nt, Artificial Sequence
  Synthetic
ucgagauccaaucuaggguaugau

SEQ ID NO: 632282 - RNA, 18 nt, Artificial Sequence
  Synthetic
cuuugguggggguaugau

SEQ ID NO: 632283 - RNA, 19 nt, Artificial Sequence
  Synthetic
acuuugguggggguaugau

SEQ ID NO: 632284 - RNA, 20 nt, Artificial Sequence
  Synthetic
aacuuugguggggguaugau

SEQ ID NO: 632285 - RNA, 21 nt, Artificial Sequence
  Synthetic
uaacuuugguggggguaugau

SEQ ID NO: 632286 - RNA, 22 nt, Artificial Sequence
  Synthetic
uuaacuuugguggggguaugau

SEQ ID NO: 632287 - RNA, 23 nt, Artificial Sequence
  Synthetic
auuaacuuugguggggguaugau

SEQ ID NO: 632288 - RNA, 24 nt, Artificial Sequence
  Synthetic
cauuaacuuugguggggguaugau

SEQ ID NO: 632289 - RNA, 18 nt, Artificial Sequence
  Synthetic
gacaccagccauuaugau

SEQ ID NO: 632290 - RNA, 19 nt, Artificial Sequence
  Synthetic
agacaccagccauuaugau

SEQ ID NO: 632291 - RNA, 20 nt, Artificial Sequence
  Synthetic
uagacaccagccauuaugau

SEQ ID NO: 632292 - RNA, 21 nt, Artificial Sequence
  Synthetic
uuagacaccagccauuaugau

SEQ ID NO: 632293 - RNA, 22 nt, Artificial Sequence
  Synthetic
guuagacaccagccauuaugau

SEQ ID NO: 632294 - RNA, 23 nt, Artificial Sequence
  Synthetic
uguuagacaccagccauuaugau

SEQ ID NO: 632295 - RNA, 24 nt, Artificial Sequence
  Synthetic
cuguuagacaccagccauuaugau

SEQ ID NO: 632296 - RNA, 18 nt, Artificial Sequence
  Synthetic
uguuaagauccuuaugau

SEQ ID NO: 632297 - RNA, 19 nt, Artificial Sequence
  Synthetic
guguuaagauccuuaugau

SEQ ID NO: 632298 - RNA, 20 nt, Artificial Sequence
  Synthetic
gguguuaagauccuuaugau

SEQ ID NO: 632299 - RNA, 21 nt, Artificial Sequence
  Synthetic
agguguuaagauccuuaugau

SEQ ID NO: 632300 - RNA, 22 nt, Artificial Sequence
  Synthetic
cagguguuaagauccuuaugau

SEQ ID NO: 632301 - RNA, 23 nt, Artificial Sequence
  Synthetic
ccagguguuaagauccuuaugau

SEQ ID NO: 632302 - RNA, 24 nt, Artificial Sequence
  Synthetic
accagguguuaagauccuuaugau

SEQ ID NO: 632303 - RNA, 18 nt, Artificial Sequence
  Synthetic
uuuuuaaaaaguuaugau

SEQ ID NO: 632304 - RNA, 19 nt, Artificial Sequence
  Synthetic
uuuuuuaaaaaguuaugau

SEQ ID NO: 632305 - RNA, 20 nt, Artificial Sequence
  Synthetic
auuuuuuaaaaaguuaugau

SEQ ID NO: 632306 - RNA, 21 nt, Artificial Sequence
  Synthetic
aauuuuuuaaaaaguuaugau

SEQ ID NO: 632307 - RNA, 22 nt, Artificial Sequence
  Synthetic
aaauuuuuuaaaaaguuaugau

SEQ ID NO: 632308 - RNA, 23 nt, Artificial Sequence
  Synthetic
caaauuuuuuaaaaaguuaugau

SEQ ID NO: 632309 - RNA, 24 nt, Artificial Sequence
  Synthetic
ccaaauuuuuuaaaaaguuaugau

SEQ ID NO: 632310 - RNA, 18 nt, Artificial Sequence
  Synthetic
cuugguaagaguuaugau

SEQ ID NO: 632311 - RNA, 19 nt, Artificial Sequence
  Synthetic
ccuugguaagaguuaugau

SEQ ID NO: 632312 - RNA, 20 nt, Artificial Sequence
  Synthetic
accuugguaagaguuaugau

SEQ ID NO: 632313 - RNA, 21 nt, Artificial Sequence
  Synthetic
gaccuugguaagaguuaugau

SEQ ID NO: 632314 - RNA, 22 nt, Artificial Sequence
  Synthetic
ggaccuugguaagaguuaugau

SEQ ID NO: 632315 - RNA, 23 nt, Artificial Sequence
  Synthetic
aggaccuugguaagaguuaugau

SEQ ID NO: 632316 - RNA, 24 nt, Artificial Sequence
  Synthetic
uaggaccuugguaagaguuaugau

SEQ ID NO: 632317 - RNA, 18 nt, Artificial Sequence
  Synthetic
auuuauuagcuuuaugau

SEQ ID NO: 632318 - RNA, 19 nt, Artificial Sequence
  Synthetic
cauuuauuagcuuuaugau

SEQ ID NO: 632319 - RNA, 20 nt, Artificial Sequence
  Synthetic
ucauuuauuagcuuuaugau

SEQ ID NO: 632320 - RNA, 21 nt, Artificial Sequence
  Synthetic
uucauuuauuagcuuuaugau

SEQ ID NO: 632321 - RNA, 22 nt, Artificial Sequence
  Synthetic
cuucauuuauuagcuuuaugau

SEQ ID NO: 632322 - RNA, 23 nt, Artificial Sequence
  Synthetic
ucuucauuuauuagcuuuaugau

SEQ ID NO: 632323 - RNA, 24 nt, Artificial Sequence
  Synthetic
uucuucauuuauuagcuuuaugau

SEQ ID NO: 632324 - RNA, 18 nt, Artificial Sequence
  Synthetic
gagacauacguuuaugau

SEQ ID NO: 632325 - RNA, 19 nt, Artificial Sequence
  Synthetic
agagacauacguuuaugau

SEQ ID NO: 632326 - RNA, 20 nt, Artificial Sequence
  Synthetic
aagagacauacguuuaugau

SEQ ID NO: 632327 - RNA, 21 nt, Artificial Sequence
  Synthetic
gaagagacauacguuuaugau

SEQ ID NO: 632328 - RNA, 22 nt, Artificial Sequence
  Synthetic
ugaagagacauacguuuaugau

SEQ ID NO: 632329 - RNA, 23 nt, Artificial Sequence
  Synthetic
augaagagacauacguuuaugau

SEQ ID NO: 632330 - RNA, 24 nt, Artificial Sequence
  Synthetic
aaugaagagacauacguuuaugau

SEQ ID NO: 632331 - RNA, 18 nt, Artificial Sequence
  Synthetic
gccucuauuguuuaugau

SEQ ID NO: 632332 - RNA, 19 nt, Artificial Sequence
  Synthetic
ggccucuauuguuuaugau

SEQ ID NO: 632333 - RNA, 20 nt, Artificial Sequence
  Synthetic
uggccucuauuguuuaugau

SEQ ID NO: 632334 - RNA, 21 nt, Artificial Sequence
  Synthetic
cuggccucuauuguuuaugau

SEQ ID NO: 632335 - RNA, 22 nt, Artificial Sequence
  Synthetic
ucuggccucuauuguuuaugau

SEQ ID NO: 632336 - RNA, 23 nt, Artificial Sequence
  Synthetic
cucuggccucuauuguuuaugau

SEQ ID NO: 632337 - RNA, 24 nt, Artificial Sequence
  Synthetic
ccucuggccucuauuguuuaugau

SEQ ID NO: 632338 - RNA, 18 nt, Artificial Sequence
  Synthetic
aaaaguacauuuuaugau

SEQ ID NO: 632339 - RNA, 19 nt, Artificial Sequence
  Synthetic
uaaaaguacauuuuaugau

SEQ ID NO: 632340 - RNA, 20 nt, Artificial Sequence
  Synthetic
auaaaaguacauuuuaugau

SEQ ID NO: 632341 - RNA, 21 nt, Artificial Sequence
  Synthetic
aauaaaaguacauuuuaugau

SEQ ID NO: 632342 - RNA, 22 nt, Artificial Sequence
  Synthetic
uaauaaaaguacauuuuaugau

SEQ ID NO: 632343 - RNA, 23 nt, Artificial Sequence
  Synthetic
cuaauaaaaguacauuuuaugau

SEQ ID NO: 632344 - RNA, 24 nt, Artificial Sequence
  Synthetic
ccuaauaaaaguacauuuuaugau

SEQ ID NO: 632345 - RNA, 18 nt, Artificial Sequence
  Synthetic
gcaacaauagaaacugau

SEQ ID NO: 632346 - RNA, 19 nt, Artificial Sequence
  Synthetic
ugcaacaauagaaacugau

SEQ ID NO: 632347 - RNA, 20 nt, Artificial Sequence
  Synthetic
augcaacaauagaaacugau

SEQ ID NO: 632348 - RNA, 21 nt, Artificial Sequence
  Synthetic
uaugcaacaauagaaacugau

SEQ ID NO: 632349 - RNA, 22 nt, Artificial Sequence
  Synthetic
cuaugcaacaauagaaacugau

SEQ ID NO: 632350 - RNA, 23 nt, Artificial Sequence
  Synthetic
ucuaugcaacaauagaaacugau

SEQ ID NO: 632351 - RNA, 24 nt, Artificial Sequence
  Synthetic
uucuaugcaacaauagaaacugau

SEQ ID NO: 632352 - RNA, 18 nt, Artificial Sequence
  Synthetic
agaucugauucaacugau

SEQ ID NO: 632353 - RNA, 19 nt, Artificial Sequence
  Synthetic
gagaucugauucaacugau

SEQ ID NO: 632354 - RNA, 20 nt, Artificial Sequence
  Synthetic
agagaucugauucaacugau

SEQ ID NO: 632355 - RNA, 21 nt, Artificial Sequence
  Synthetic
cagagaucugauucaacugau

SEQ ID NO: 632356 - RNA, 22 nt, Artificial Sequence
  Synthetic
ccagagaucugauucaacugau

SEQ ID NO: 632357 - RNA, 23 nt, Artificial Sequence
  Synthetic
accagagaucugauucaacugau

SEQ ID NO: 632358 - RNA, 24 nt, Artificial Sequence
  Synthetic
caccagagaucugauucaacugau

SEQ ID NO: 632359 - RNA, 18 nt, Artificial Sequence
  Synthetic
aucgccuuucuaacugau

SEQ ID NO: 632360 - RNA, 19 nt, Artificial Sequence
  Synthetic
gaucgccuuucuaacugau

SEQ ID NO: 632361 - RNA, 20 nt, Artificial Sequence
  Synthetic
ugaucgccuuucuaacugau

SEQ ID NO: 632362 - RNA, 21 nt, Artificial Sequence
  Synthetic
augaucgccuuucuaacugau

SEQ ID NO: 632363 - RNA, 22 nt, Artificial Sequence
  Synthetic
aaugaucgccuuucuaacugau

SEQ ID NO: 632364 - RNA, 23 nt, Artificial Sequence
  Synthetic
uaaugaucgccuuucuaacugau

SEQ ID NO: 632365 - RNA, 24 nt, Artificial Sequence
  Synthetic
uuaaugaucgccuuucuaacugau

SEQ ID NO: 632366 - RNA, 18 nt, Artificial Sequence
  Synthetic
uaaugaaagcucacugau

SEQ ID NO: 632367 - RNA, 19 nt, Artificial Sequence
  Synthetic
auaaugaaagcucacugau

SEQ ID NO: 632368 - RNA, 20 nt, Artificial Sequence
  Synthetic
cauaaugaaagcucacugau

SEQ ID NO: 632369 - RNA, 21 nt, Artificial Sequence
  Synthetic
acauaaugaaagcucacugau

SEQ ID NO: 632370 - RNA, 22 nt, Artificial Sequence
  Synthetic
cacauaaugaaagcucacugau

SEQ ID NO: 632371 - RNA, 23 nt, Artificial Sequence
  Synthetic
ccacauaaugaaagcucacugau

SEQ ID NO: 632372 - RNA, 24 nt, Artificial Sequence
  Synthetic
accacauaaugaaagcucacugau

SEQ ID NO: 632373 - RNA, 18 nt, Artificial Sequence
  Synthetic
agacgaagguucacugau

SEQ ID NO: 632374 - RNA, 19 nt, Artificial Sequence
  Synthetic
aagacgaagguucacugau

SEQ ID NO: 632375 - RNA, 20 nt, Artificial Sequence
  Synthetic
aaagacgaagguucacugau

SEQ ID NO: 632376 - RNA, 21 nt, Artificial Sequence
  Synthetic
gaaagacgaagguucacugau

SEQ ID NO: 632377 - RNA, 22 nt, Artificial Sequence
  Synthetic
agaaagacgaagguucacugau

SEQ ID NO: 632378 - RNA, 23 nt, Artificial Sequence
  Synthetic
cagaaagacgaagguucacugau

SEQ ID NO: 632379 - RNA, 24 nt, Artificial Sequence
  Synthetic
ccagaaagacgaagguucacugau

SEQ ID NO: 632380 - RNA, 18 nt, Artificial Sequence
  Synthetic
augguguaaaagacugau

SEQ ID NO: 632381 - RNA, 19 nt, Artificial Sequence
  Synthetic
aaugguguaaaagacugau

SEQ ID NO: 632382 - RNA, 20 nt, Artificial Sequence
  Synthetic
caaugguguaaaagacugau

SEQ ID NO: 632383 - RNA, 21 nt, Artificial Sequence
  Synthetic
acaaugguguaaaagacugau

SEQ ID NO: 632384 - RNA, 22 nt, Artificial Sequence
  Synthetic
uacaaugguguaaaagacugau

SEQ ID NO: 632385 - RNA, 23 nt, Artificial Sequence
  Synthetic
cuacaaugguguaaaagacugau

SEQ ID NO: 632386 - RNA, 24 nt, Artificial Sequence
  Synthetic
acuacaaugguguaaaagacugau

SEQ ID NO: 632387 - RNA, 18 nt, Artificial Sequence
  Synthetic
uucaccucagggacugau

SEQ ID NO: 632388 - RNA, 19 nt, Artificial Sequence
  Synthetic
guucaccucagggacugau

SEQ ID NO: 632389 - RNA, 20 nt, Artificial Sequence
  Synthetic
aguucaccucagggacugau

SEQ ID NO: 632390 - RNA, 21 nt, Artificial Sequence
  Synthetic
caguucaccucagggacugau

SEQ ID NO: 632391 - RNA, 22 nt, Artificial Sequence
  Synthetic
ccaguucaccucagggacugau

SEQ ID NO: 632392 - RNA, 23 nt, Artificial Sequence
  Synthetic
cccaguucaccucagggacugau

SEQ ID NO: 632393 - RNA, 24 nt, Artificial Sequence
  Synthetic
ucccaguucaccucagggacugau

SEQ ID NO: 632394 - RNA, 18 nt, Artificial Sequence
  Synthetic
gcagcaaaauggacugau

SEQ ID NO: 632395 - RNA, 19 nt, Artificial Sequence
  Synthetic
ugcagcaaaauggacugau

SEQ ID NO: 632396 - RNA, 20 nt, Artificial Sequence
  Synthetic
gugcagcaaaauggacugau

SEQ ID NO: 632397 - RNA, 21 nt, Artificial Sequence
  Synthetic
ugugcagcaaaauggacugau

SEQ ID NO: 632398 - RNA, 22 nt, Artificial Sequence
  Synthetic
uugugcagcaaaauggacugau

SEQ ID NO: 632399 - RNA, 23 nt, Artificial Sequence
  Synthetic
auugugcagcaaaauggacugau

SEQ ID NO: 632400 - RNA, 24 nt, Artificial Sequence
  Synthetic
uauugugcagcaaaauggacugau

SEQ ID NO: 632401 - RNA, 18 nt, Artificial Sequence
  Synthetic
agauagugaaugacugau

SEQ ID NO: 632402 - RNA, 19 nt, Artificial Sequence
  Synthetic
aagauagugaaugacugau

SEQ ID NO: 632403 - RNA, 20 nt, Artificial Sequence
  Synthetic
aaagauagugaaugacugau

SEQ ID NO: 632404 - RNA, 21 nt, Artificial Sequence
  Synthetic
caaagauagugaaugacugau

SEQ ID NO: 632405 - RNA, 22 nt, Artificial Sequence
  Synthetic
acaaagauagugaaugacugau

SEQ ID NO: 632406 - RNA, 23 nt, Artificial Sequence
  Synthetic
cacaaagauagugaaugacugau

SEQ ID NO: 632407 - RNA, 24 nt, Artificial Sequence
  Synthetic
acacaaagauagugaaugacugau

SEQ ID NO: 632408 - RNA, 18 nt, Artificial Sequence
  Synthetic
ucuagugggcugacugau

SEQ ID NO: 632409 - RNA, 19 nt, Artificial Sequence
  Synthetic
uucuagugggcugacugau

SEQ ID NO: 632410 - RNA, 20 nt, Artificial Sequence
  Synthetic
cuucuagugggcugacugau

SEQ ID NO: 632411 - RNA, 21 nt, Artificial Sequence
  Synthetic
ccuucuagugggcugacugau

SEQ ID NO: 632412 - RNA, 22 nt, Artificial Sequence
  Synthetic
gccuucuagugggcugacugau

SEQ ID NO: 632413 - RNA, 23 nt, Artificial Sequence
  Synthetic
ugccuucuagugggcugacugau

SEQ ID NO: 632414 - RNA, 24 nt, Artificial Sequence
  Synthetic
augccuucuagugggcugacugau

SEQ ID NO: 632415 - RNA, 18 nt, Artificial Sequence
  Synthetic
ucauauuagcauacugau

SEQ ID NO: 632416 - RNA, 19 nt, Artificial Sequence
  Synthetic
uucauauuagcauacugau

SEQ ID NO: 632417 - RNA, 20 nt, Artificial Sequence
  Synthetic
uuucauauuagcauacugau

SEQ ID NO: 632418 - RNA, 21 nt, Artificial Sequence
  Synthetic
uuuucauauuagcauacugau

SEQ ID NO: 632419 - RNA, 22 nt, Artificial Sequence
  Synthetic
guuuucauauuagcauacugau

SEQ ID NO: 632420 - RNA, 23 nt, Artificial Sequence
  Synthetic
gguuuucauauuagcauacugau

SEQ ID NO: 632421 - RNA, 24 nt, Artificial Sequence
  Synthetic
agguuuucauauuagcauacugau

SEQ ID NO: 632422 - RNA, 18 nt, Artificial Sequence
  Synthetic
auguucaaagauacugau

SEQ ID NO: 632423 - RNA, 19 nt, Artificial Sequence
  Synthetic
uauguucaaagauacugau

SEQ ID NO: 632424 - RNA, 20 nt, Artificial Sequence
  Synthetic
auauguucaaagauacugau

SEQ ID NO: 632425 - RNA, 21 nt, Artificial Sequence
  Synthetic
aauauguucaaagauacugau

SEQ ID NO: 632426 - RNA, 22 nt, Artificial Sequence
  Synthetic
aaauauguucaaagauacugau

SEQ ID NO: 632427 - RNA, 23 nt, Artificial Sequence
  Synthetic
aaaauauguucaaagauacugau

SEQ ID NO: 632428 - RNA, 24 nt, Artificial Sequence
  Synthetic
aaaaauauguucaaagauacugau

SEQ ID NO: 632429 - RNA, 18 nt, Artificial Sequence
  Synthetic
ucucuuaaagauacugau

SEQ ID NO: 632430 - RNA, 19 nt, Artificial Sequence
  Synthetic
uucucuuaaagauacugau

SEQ ID NO: 632431 - RNA, 20 nt, Artificial Sequence
  Synthetic
cuucucuuaaagauacugau

SEQ ID NO: 632432 - RNA, 21 nt, Artificial Sequence
  Synthetic
ccuucucuuaaagauacugau

SEQ ID NO: 632433 - RNA, 22 nt, Artificial Sequence
  Synthetic
accuucucuuaaagauacugau

SEQ ID NO: 632434 - RNA, 23 nt, Artificial Sequence
  Synthetic
uaccuucucuuaaagauacugau

SEQ ID NO: 632435 - RNA, 24 nt, Artificial Sequence
  Synthetic
auaccuucucuuaaagauacugau

SEQ ID NO: 632436 - RNA, 18 nt, Artificial Sequence
  Synthetic
gacuccagggcuacugau

SEQ ID NO: 632437 - RNA, 19 nt, Artificial Sequence
  Synthetic
agacuccagggcuacugau

SEQ ID NO: 632438 - RNA, 20 nt, Artificial Sequence
  Synthetic
aagacuccagggcuacugau

SEQ ID NO: 632439 - RNA, 21 nt, Artificial Sequence
  Synthetic
aaagacuccagggcuacugau

SEQ ID NO: 632440 - RNA, 22 nt, Artificial Sequence
  Synthetic
caaagacuccagggcuacugau

SEQ ID NO: 632441 - RNA, 23 nt, Artificial Sequence
  Synthetic
ccaaagacuccagggcuacugau

SEQ ID NO: 632442 - RNA, 24 nt, Artificial Sequence
  Synthetic
uccaaagacuccagggcuacugau

SEQ ID NO: 632443 - RNA, 18 nt, Artificial Sequence
  Synthetic
uaaaaacauucaccugau

SEQ ID NO: 632444 - RNA, 19 nt, Artificial Sequence
  Synthetic
cuaaaaacauucaccugau

SEQ ID NO: 632445 - RNA, 20 nt, Artificial Sequence
  Synthetic
gcuaaaaacauucaccugau

SEQ ID NO: 632446 - RNA, 21 nt, Artificial Sequence
  Synthetic
agcuaaaaacauucaccugau

SEQ ID NO: 632447 - RNA, 22 nt, Artificial Sequence
  Synthetic
gagcuaaaaacauucaccugau

SEQ ID NO: 632448 - RNA, 23 nt, Artificial Sequence
  Synthetic
ggagcuaaaaacauucaccugau

SEQ ID NO: 632449 - RNA, 24 nt, Artificial Sequence
  Synthetic
aggagcuaaaaacauucaccugau

SEQ ID NO: 632450 - RNA, 18 nt, Artificial Sequence
  Synthetic
gcauucuuuuacccugau

SEQ ID NO: 632451 - RNA, 19 nt, Artificial Sequence
  Synthetic
ugcauucuuuuacccugau

SEQ ID NO: 632452 - RNA, 20 nt, Artificial Sequence
  Synthetic
cugcauucuuuuacccugau

SEQ ID NO: 632453 - RNA, 21 nt, Artificial Sequence
  Synthetic
ccugcauucuuuuacccugau

SEQ ID NO: 632454 - RNA, 22 nt, Artificial Sequence
  Synthetic
cccugcauucuuuuacccugau

SEQ ID NO: 632455 - RNA, 23 nt, Artificial Sequence
  Synthetic
gcccugcauucuuuuacccugau

SEQ ID NO: 632456 - RNA, 24 nt, Artificial Sequence
  Synthetic
agcccugcauucuuuuacccugau

SEQ ID NO: 632457 - RNA, 18 nt, Artificial Sequence
  Synthetic
auaauaaaaugcccugau

SEQ ID NO: 632458 - RNA, 19 nt, Artificial Sequence
  Synthetic
uauaauaaaaugcccugau

SEQ ID NO: 632459 - RNA, 20 nt, Artificial Sequence
  Synthetic
auauaauaaaaugcccugau

SEQ ID NO: 632460 - RNA, 21 nt, Artificial Sequence
  Synthetic
aauauaauaaaaugcccugau

SEQ ID NO: 632461 - RNA, 22 nt, Artificial Sequence
  Synthetic
aaauauaauaaaaugcccugau

SEQ ID NO: 632462 - RNA, 23 nt, Artificial Sequence
  Synthetic
uaaauauaauaaaaugcccugau

SEQ ID NO: 632463 - RNA, 24 nt, Artificial Sequence
  Synthetic
uuaaauauaauaaaaugcccugau

SEQ ID NO: 632464 - RNA, 18 nt, Artificial Sequence
  Synthetic
aucacuuuacucccugau

SEQ ID NO: 632465 - RNA, 19 nt, Artificial Sequence
  Synthetic
gaucacuuuacucccugau

SEQ ID NO: 632466 - RNA, 20 nt, Artificial Sequence
  Synthetic
ggaucacuuuacucccugau

SEQ ID NO: 632467 - RNA, 21 nt, Artificial Sequence
  Synthetic
cggaucacuuuacucccugau

SEQ ID NO: 632468 - RNA, 22 nt, Artificial Sequence
  Synthetic
ucggaucacuuuacucccugau

SEQ ID NO: 632469 - RNA, 23 nt, Artificial Sequence
  Synthetic
aucggaucacuuuacucccugau

SEQ ID NO: 632470 - RNA, 24 nt, Artificial Sequence
  Synthetic
uaucggaucacuuuacucccugau

SEQ ID NO: 632471 - RNA, 18 nt, Artificial Sequence
  Synthetic
uuuuaaaagcugccugau

SEQ ID NO: 632472 - RNA, 19 nt, Artificial Sequence
  Synthetic
auuuuaaaagcugccugau

SEQ ID NO: 632473 - RNA, 20 nt, Artificial Sequence
  Synthetic
cauuuuaaaagcugccugau

SEQ ID NO: 632474 - RNA, 21 nt, Artificial Sequence
  Synthetic
gcauuuuaaaagcugccugau

SEQ ID NO: 632475 - RNA, 22 nt, Artificial Sequence
  Synthetic
ggcauuuuaaaagcugccugau

SEQ ID NO: 632476 - RNA, 23 nt, Artificial Sequence
  Synthetic
aggcauuuuaaaagcugccugau

SEQ ID NO: 632477 - RNA, 24 nt, Artificial Sequence
  Synthetic
uaggcauuuuaaaagcugccugau

SEQ ID NO: 632478 - RNA, 18 nt, Artificial Sequence
  Synthetic
ugaaucaaauauccugau

SEQ ID NO: 632479 - RNA, 19 nt, Artificial Sequence
  Synthetic
uugaaucaaauauccugau

SEQ ID NO: 632480 - RNA, 20 nt, Artificial Sequence
  Synthetic
uuugaaucaaauauccugau

SEQ ID NO: 632481 - RNA, 21 nt, Artificial Sequence
  Synthetic
auuugaaucaaauauccugau

SEQ ID NO: 632482 - RNA, 22 nt, Artificial Sequence
  Synthetic
cauuugaaucaaauauccugau

SEQ ID NO: 632483 - RNA, 23 nt, Artificial Sequence
  Synthetic
acauuugaaucaaauauccugau

SEQ ID NO: 632484 - RNA, 24 nt, Artificial Sequence
  Synthetic
gacauuugaaucaaauauccugau

SEQ ID NO: 632485 - RNA, 18 nt, Artificial Sequence
  Synthetic
ugcagcucaccuccugau

SEQ ID NO: 632486 - RNA, 19 nt, Artificial Sequence
  Synthetic
cugcagcucaccuccugau

SEQ ID NO: 632487 - RNA, 20 nt, Artificial Sequence
  Synthetic
ccugcagcucaccuccugau

SEQ ID NO: 632488 - RNA, 21 nt, Artificial Sequence
  Synthetic
cccugcagcucaccuccugau

SEQ ID NO: 632489 - RNA, 22 nt, Artificial Sequence
  Synthetic
gcccugcagcucaccuccugau

SEQ ID NO: 632490 - RNA, 23 nt, Artificial Sequence
  Synthetic
ggcccugcagcucaccuccugau

SEQ ID NO: 632491 - RNA, 24 nt, Artificial Sequence
  Synthetic
cggcccugcagcucaccuccugau

SEQ ID NO: 632492 - RNA, 18 nt, Artificial Sequence
  Synthetic
uauguuagccaggcugau

SEQ ID NO: 632493 - RNA, 19 nt, Artificial Sequence
  Synthetic
auauguuagccaggcugau

SEQ ID NO: 632494 - RNA, 20 nt, Artificial Sequence
  Synthetic
uauauguuagccaggcugau

SEQ ID NO: 632495 - RNA, 21 nt, Artificial Sequence
  Synthetic
auauauguuagccaggcugau

SEQ ID NO: 632496 - RNA, 22 nt, Artificial Sequence
  Synthetic
uauauauguuagccaggcugau

SEQ ID NO: 632497 - RNA, 23 nt, Artificial Sequence
  Synthetic
uuauauauguuagccaggcugau

SEQ ID NO: 632498 - RNA, 24 nt, Artificial Sequence
  Synthetic
guuauauauguuagccaggcugau

SEQ ID NO: 632499 - RNA, 18 nt, Artificial Sequence
  Synthetic
gcuacuugggaggcugau

SEQ ID NO: 632500 - RNA, 19 nt, Artificial Sequence
  Synthetic
ggcuacuugggaggcugau

SEQ ID NO: 632501 - RNA, 20 nt, Artificial Sequence
  Synthetic
uggcuacuugggaggcugau

SEQ ID NO: 632502 - RNA, 21 nt, Artificial Sequence
  Synthetic
cuggcuacuugggaggcugau

SEQ ID NO: 632503 - RNA, 22 nt, Artificial Sequence
  Synthetic
ccuggcuacuugggaggcugau

SEQ ID NO: 632504 - RNA, 23 nt, Artificial Sequence
  Synthetic
accuggcuacuugggaggcugau

SEQ ID NO: 632505 - RNA, 24 nt, Artificial Sequence
  Synthetic
gaccuggcuacuugggaggcugau

SEQ ID NO: 632506 - RNA, 18 nt, Artificial Sequence
  Synthetic
acuugaaauguggcugau

SEQ ID NO: 632507 - RNA, 19 nt, Artificial Sequence
  Synthetic
cacuugaaauguggcugau

SEQ ID NO: 632508 - RNA, 20 nt, Artificial Sequence
  Synthetic
gcacuugaaauguggcugau

SEQ ID NO: 632509 - RNA, 21 nt, Artificial Sequence
  Synthetic
agcacuugaaauguggcugau

SEQ ID NO: 632510 - RNA, 22 nt, Artificial Sequence
  Synthetic
gagcacuugaaauguggcugau

SEQ ID NO: 632511 - RNA, 23 nt, Artificial Sequence
  Synthetic
ugagcacuugaaauguggcugau

SEQ ID NO: 632512 - RNA, 24 nt, Artificial Sequence
  Synthetic
cugagcacuugaaauguggcugau

SEQ ID NO: 632513 - RNA, 18 nt, Artificial Sequence
  Synthetic
cauccccgugaugcugau

SEQ ID NO: 632514 - RNA, 19 nt, Artificial Sequence
  Synthetic
ccauccccgugaugcugau

SEQ ID NO: 632515 - RNA, 20 nt, Artificial Sequence
  Synthetic
accauccccgugaugcugau

SEQ ID NO: 632516 - RNA, 21 nt, Artificial Sequence
  Synthetic
aaccauccccgugaugcugau

SEQ ID NO: 632517 - RNA, 22 nt, Artificial Sequence
  Synthetic
uaaccauccccgugaugcugau

SEQ ID NO: 632518 - RNA, 23 nt, Artificial Sequence
  Synthetic
cuaaccauccccgugaugcugau

SEQ ID NO: 632519 - RNA, 24 nt, Artificial Sequence
  Synthetic
ucuaaccauccccgugaugcugau

SEQ ID NO: 632520 - RNA, 18 nt, Artificial Sequence
  Synthetic
ccauugucaaaaucugau

SEQ ID NO: 632521 - RNA, 19 nt, Artificial Sequence
  Synthetic
accauugucaaaaucugau

SEQ ID NO: 632522 - RNA, 20 nt, Artificial Sequence
  Synthetic
aaccauugucaaaaucugau

SEQ ID NO: 632523 - RNA, 21 nt, Artificial Sequence
  Synthetic
caaccauugucaaaaucugau

SEQ ID NO: 632524 - RNA, 22 nt, Artificial Sequence
  Synthetic
gcaaccauugucaaaaucugau

SEQ ID NO: 632525 - RNA, 23 nt, Artificial Sequence
  Synthetic
agcaaccauugucaaaaucugau

SEQ ID NO: 632526 - RNA, 24 nt, Artificial Sequence
  Synthetic
uagcaaccauugucaaaaucugau

SEQ ID NO: 632527 - RNA, 18 nt, Artificial Sequence
  Synthetic
aaaaaggcucaaucugau

SEQ ID NO: 632528 - RNA, 19 nt, Artificial Sequence
  Synthetic
gaaaaaggcucaaucugau

SEQ ID NO: 632529 - RNA, 20 nt, Artificial Sequence
  Synthetic
agaaaaaggcucaaucugau

SEQ ID NO: 632530 - RNA, 21 nt, Artificial Sequence
  Synthetic
uagaaaaaggcucaaucugau

SEQ ID NO: 632531 - RNA, 22 nt, Artificial Sequence
  Synthetic
uuagaaaaaggcucaaucugau

SEQ ID NO: 632532 - RNA, 23 nt, Artificial Sequence
  Synthetic
uuuagaaaaaggcucaaucugau

SEQ ID NO: 632533 - RNA, 24 nt, Artificial Sequence
  Synthetic
uuuuagaaaaaggcucaaucugau

SEQ ID NO: 632534 - RNA, 18 nt, Artificial Sequence
  Synthetic
auacaaauggaaucugau

SEQ ID NO: 632535 - RNA, 19 nt, Artificial Sequence
  Synthetic
aauacaaauggaaucugau

SEQ ID NO: 632536 - RNA, 20 nt, Artificial Sequence
  Synthetic
aaauacaaauggaaucugau

SEQ ID NO: 632537 - RNA, 21 nt, Artificial Sequence
  Synthetic
caaauacaaauggaaucugau

SEQ ID NO: 632538 - RNA, 22 nt, Artificial Sequence
  Synthetic
ccaaauacaaauggaaucugau

SEQ ID NO: 632539 - RNA, 23 nt, Artificial Sequence
  Synthetic
cccaaauacaaauggaaucugau

SEQ ID NO: 632540 - RNA, 24 nt, Artificial Sequence
  Synthetic
ccccaaauacaaauggaaucugau

SEQ ID NO: 632541 - RNA, 18 nt, Artificial Sequence
  Synthetic
cuauauuugacaucugau

SEQ ID NO: 632542 - RNA, 19 nt, Artificial Sequence
  Synthetic
ucuauauuugacaucugau

SEQ ID NO: 632543 - RNA, 20 nt, Artificial Sequence
  Synthetic
uucuauauuugacaucugau

SEQ ID NO: 632544 - RNA, 21 nt, Artificial Sequence
  Synthetic
cuucuauauuugacaucugau

SEQ ID NO: 632545 - RNA, 22 nt, Artificial Sequence
  Synthetic
ucuucuauauuugacaucugau

SEQ ID NO: 632546 - RNA, 23 nt, Artificial Sequence
  Synthetic
uucuucuauauuugacaucugau

SEQ ID NO: 632547 - RNA, 24 nt, Artificial Sequence
  Synthetic
guucuucuauauuugacaucugau

SEQ ID NO: 632548 - RNA, 18 nt, Artificial Sequence
  Synthetic
gucugaaccaccucugau

SEQ ID NO: 632549 - RNA, 19 nt, Artificial Sequence
  Synthetic
agucugaaccaccucugau

SEQ ID NO: 632550 - RNA, 20 nt, Artificial Sequence
  Synthetic
uagucugaaccaccucugau

SEQ ID NO: 632551 - RNA, 21 nt, Artificial Sequence
  Synthetic
cuagucugaaccaccucugau

SEQ ID NO: 632552 - RNA, 22 nt, Artificial Sequence
  Synthetic
ccuagucugaaccaccucugau

SEQ ID NO: 632553 - RNA, 23 nt, Artificial Sequence
  Synthetic
cccuagucugaaccaccucugau

SEQ ID NO: 632554 - RNA, 24 nt, Artificial Sequence
  Synthetic
acccuagucugaaccaccucugau

SEQ ID NO: 632555 - RNA, 18 nt, Artificial Sequence
  Synthetic
caaaggcaaagcucugau

SEQ ID NO: 632556 - RNA, 19 nt, Artificial Sequence
  Synthetic
ucaaaggcaaagcucugau

SEQ ID NO: 632557 - RNA, 20 nt, Artificial Sequence
  Synthetic
uucaaaggcaaagcucugau

SEQ ID NO: 632558 - RNA, 21 nt, Artificial Sequence
  Synthetic
uuucaaaggcaaagcucugau

SEQ ID NO: 632559 - RNA, 22 nt, Artificial Sequence
  Synthetic
cuuucaaaggcaaagcucugau

SEQ ID NO: 632560 - RNA, 23 nt, Artificial Sequence
  Synthetic
gcuuucaaaggcaaagcucugau

SEQ ID NO: 632561 - RNA, 24 nt, Artificial Sequence
  Synthetic
ugcuuucaaaggcaaagcucugau

SEQ ID NO: 632562 - RNA, 18 nt, Artificial Sequence
  Synthetic
auacuuuaccaaagugau

SEQ ID NO: 632563 - RNA, 19 nt, Artificial Sequence
  Synthetic
gauacuuuaccaaagugau

SEQ ID NO: 632564 - RNA, 20 nt, Artificial Sequence
  Synthetic
ugauacuuuaccaaagugau

SEQ ID NO: 632565 - RNA, 21 nt, Artificial Sequence
  Synthetic
cugauacuuuaccaaagugau

SEQ ID NO: 632566 - RNA, 22 nt, Artificial Sequence
  Synthetic
acugauacuuuaccaaagugau

SEQ ID NO: 632567 - RNA, 23 nt, Artificial Sequence
  Synthetic
cacugauacuuuaccaaagugau

SEQ ID NO: 632568 - RNA, 24 nt, Artificial Sequence
  Synthetic
ucacugauacuuuaccaaagugau

SEQ ID NO: 632569 - RNA, 24 nt, Artificial Sequence
  Synthetic
cugauugguguaccugaaagugau

SEQ ID NO: 632570 - RNA, 18 nt, Artificial Sequence
  Synthetic
gugaguaacagaagugau

SEQ ID NO: 632571 - RNA, 19 nt, Artificial Sequence
  Synthetic
ugugaguaacagaagugau

SEQ ID NO: 632572 - RNA, 20 nt, Artificial Sequence
  Synthetic
gugugaguaacagaagugau

SEQ ID NO: 632573 - RNA, 21 nt, Artificial Sequence
  Synthetic
agugugaguaacagaagugau

SEQ ID NO: 632574 - RNA, 22 nt, Artificial Sequence
  Synthetic
aagugugaguaacagaagugau

SEQ ID NO: 632575 - RNA, 23 nt, Artificial Sequence
  Synthetic
aaagugugaguaacagaagugau

SEQ ID NO: 632576 - RNA, 24 nt, Artificial Sequence
  Synthetic
caaagugugaguaacagaagugau

SEQ ID NO: 632577 - RNA, 18 nt, Artificial Sequence
  Synthetic
auauaacuuuuaagugau

SEQ ID NO: 632578 - RNA, 19 nt, Artificial Sequence
  Synthetic
aauauaacuuuuaagugau

SEQ ID NO: 632579 - RNA, 20 nt, Artificial Sequence
  Synthetic
aaauauaacuuuuaagugau

SEQ ID NO: 632580 - RNA, 21 nt, Artificial Sequence
  Synthetic
aaaauauaacuuuuaagugau

SEQ ID NO: 632581 - RNA, 22 nt, Artificial Sequence
  Synthetic
aaaaauauaacuuuuaagugau

SEQ ID NO: 632582 - RNA, 23 nt, Artificial Sequence
  Synthetic
aaaaaauauaacuuuuaagugau

SEQ ID NO: 632583 - RNA, 24 nt, Artificial Sequence
  Synthetic
aaaaaaauauaacuuuuaagugau

SEQ ID NO: 632584 - RNA, 18 nt, Artificial Sequence
  Synthetic
aauagggugaacagugau

SEQ ID NO: 632585 - RNA, 19 nt, Artificial Sequence
  Synthetic
caauagggugaacagugau

SEQ ID NO: 632586 - RNA, 20 nt, Artificial Sequence
  Synthetic
acaauagggugaacagugau

SEQ ID NO: 632587 - RNA, 21 nt, Artificial Sequence
  Synthetic
uacaauagggugaacagugau

SEQ ID NO: 632588 - RNA, 22 nt, Artificial Sequence
  Synthetic
auacaauagggugaacagugau

SEQ ID NO: 632589 - RNA, 23 nt, Artificial Sequence
  Synthetic
uauacaauagggugaacagugau

SEQ ID NO: 632590 - RNA, 24 nt, Artificial Sequence
  Synthetic
uuauacaauagggugaacagugau

SEQ ID NO: 632591 - RNA, 18 nt, Artificial Sequence
  Synthetic
gcuugacuucacagugau

SEQ ID NO: 632592 - RNA, 19 nt, Artificial Sequence
  Synthetic
ugcuugacuucacagugau

SEQ ID NO: 632593 - RNA, 20 nt, Artificial Sequence
  Synthetic
augcuugacuucacagugau

SEQ ID NO: 632594 - RNA, 21 nt, Artificial Sequence
  Synthetic
uaugcuugacuucacagugau

SEQ ID NO: 632595 - RNA, 22 nt, Artificial Sequence
  Synthetic
guaugcuugacuucacagugau

SEQ ID NO: 632596 - RNA, 23 nt, Artificial Sequence
  Synthetic
gguaugcuugacuucacagugau

SEQ ID NO: 632597 - RNA, 24 nt, Artificial Sequence
  Synthetic
agguaugcuugacuucacagugau

SEQ ID NO: 632598 - RNA, 18 nt, Artificial Sequence
  Synthetic
uugugaaacagcagugau

SEQ ID NO: 632599 - RNA, 19 nt, Artificial Sequence
  Synthetic
uuugugaaacagcagugau

SEQ ID NO: 632600 - RNA, 20 nt, Artificial Sequence
  Synthetic
cuuugugaaacagcagugau

SEQ ID NO: 632601 - RNA, 21 nt, Artificial Sequence
  Synthetic
ucuuugugaaacagcagugau

SEQ ID NO: 632602 - RNA, 22 nt, Artificial Sequence
  Synthetic
cucuuugugaaacagcagugau

SEQ ID NO: 632603 - RNA, 23 nt, Artificial Sequence
  Synthetic
ucucuuugugaaacagcagugau

SEQ ID NO: 632604 - RNA, 24 nt, Artificial Sequence
  Synthetic
uucucuuugugaaacagcagugau

SEQ ID NO: 632605 - RNA, 18 nt, Artificial Sequence
  Synthetic
uuaugacaaggcagugau

SEQ ID NO: 632606 - RNA, 19 nt, Artificial Sequence
  Synthetic
auuaugacaaggcagugau

SEQ ID NO: 632607 - RNA, 20 nt, Artificial Sequence
  Synthetic
uauuaugacaaggcagugau

SEQ ID NO: 632608 - RNA, 21 nt, Artificial Sequence
  Synthetic
guauuaugacaaggcagugau

SEQ ID NO: 632609 - RNA, 22 nt, Artificial Sequence
  Synthetic
aguauuaugacaaggcagugau

SEQ ID NO: 632610 - RNA, 23 nt, Artificial Sequence
  Synthetic
aaguauuaugacaaggcagugau

SEQ ID NO: 632611 - RNA, 24 nt, Artificial Sequence
  Synthetic
uaaguauuaugacaaggcagugau

SEQ ID NO: 632612 - RNA, 18 nt, Artificial Sequence
  Synthetic
aggauuauuaucagugau

SEQ ID NO: 632613 - RNA, 19 nt, Artificial Sequence
  Synthetic
aaggauuauuaucagugau

SEQ ID NO: 632614 - RNA, 20 nt, Artificial Sequence
  Synthetic
caaggauuauuaucagugau

SEQ ID NO: 632615 - RNA, 21 nt, Artificial Sequence
  Synthetic
ucaaggauuauuaucagugau

SEQ ID NO: 632616 - RNA, 22 nt, Artificial Sequence
  Synthetic
uucaaggauuauuaucagugau

SEQ ID NO: 632617 - RNA, 23 nt, Artificial Sequence
  Synthetic
cuucaaggauuauuaucagugau

SEQ ID NO: 632618 - RNA, 24 nt, Artificial Sequence
  Synthetic
acuucaaggauuauuaucagugau

SEQ ID NO: 632619 - RNA, 18 nt, Artificial Sequence
  Synthetic
ccuccuccuuucagugau

SEQ ID NO: 632620 - RNA, 19 nt, Artificial Sequence
  Synthetic
uccuccuccuuucagugau

SEQ ID NO: 632621 - RNA, 20 nt, Artificial Sequence
  Synthetic
uuccuccuccuuucagugau

SEQ ID NO: 632622 - RNA, 21 nt, Artificial Sequence
  Synthetic
cuuccuccuccuuucagugau

SEQ ID NO: 632623 - RNA, 22 nt, Artificial Sequence
  Synthetic
ccuuccuccuccuuucagugau

SEQ ID NO: 632624 - RNA, 23 nt, Artificial Sequence
  Synthetic
uccuuccuccuccuuucagugau

SEQ ID NO: 632625 - RNA, 24 nt, Artificial Sequence
  Synthetic
uuccuuccuccuccuuucagugau

SEQ ID NO: 632626 - RNA, 18 nt, Artificial Sequence
  Synthetic
auuagggaagggagugau

SEQ ID NO: 632627 - RNA, 19 nt, Artificial Sequence
  Synthetic
gauuagggaagggagugau

SEQ ID NO: 632628 - RNA, 20 nt, Artificial Sequence
  Synthetic
agauuagggaagggagugau

SEQ ID NO: 632629 - RNA, 21 nt, Artificial Sequence
  Synthetic
gagauuagggaagggagugau

SEQ ID NO: 632630 - RNA, 22 nt, Artificial Sequence
  Synthetic
cgagauuagggaagggagugau

SEQ ID NO: 632631 - RNA, 23 nt, Artificial Sequence
  Synthetic
acgagauuagggaagggagugau

SEQ ID NO: 632632 - RNA, 24 nt, Artificial Sequence
  Synthetic
cacgagauuagggaagggagugau

SEQ ID NO: 632633 - RNA, 18 nt, Artificial Sequence
  Synthetic
aggcagaaauggagugau

SEQ ID NO: 632634 - RNA, 19 nt, Artificial Sequence
  Synthetic
caggcagaaauggagugau

SEQ ID NO: 632635 - RNA, 20 nt, Artificial Sequence
  Synthetic
ucaggcagaaauggagugau

SEQ ID NO: 632636 - RNA, 21 nt, Artificial Sequence
  Synthetic
cucaggcagaaauggagugau

SEQ ID NO: 632637 - RNA, 22 nt, Artificial Sequence
  Synthetic
gcucaggcagaaauggagugau

SEQ ID NO: 632638 - RNA, 23 nt, Artificial Sequence
  Synthetic
agcucaggcagaaauggagugau

SEQ ID NO: 632639 - RNA, 24 nt, Artificial Sequence
  Synthetic
gagcucaggcagaaauggagugau

SEQ ID NO: 632640 - RNA, 18 nt, Artificial Sequence
  Synthetic
uucuauuagaugagugau

SEQ ID NO: 632641 - RNA, 19 nt, Artificial Sequence
  Synthetic
uuucuauuagaugagugau

SEQ ID NO: 632642 - RNA, 20 nt, Artificial Sequence
  Synthetic
auuucuauuagaugagugau

SEQ ID NO: 632643 - RNA, 21 nt, Artificial Sequence
  Synthetic
aauuucuauuagaugagugau

SEQ ID NO: 632644 - RNA, 22 nt, Artificial Sequence
  Synthetic
uaauuucuauuagaugagugau

SEQ ID NO: 632645 - RNA, 23 nt, Artificial Sequence
  Synthetic
cuaauuucuauuagaugagugau

SEQ ID NO: 632646 - RNA, 24 nt, Artificial Sequence
  Synthetic
acuaauuucuauuagaugagugau

SEQ ID NO: 632647 - RNA, 18 nt, Artificial Sequence
  Synthetic
ucucuaaugaugagugau

SEQ ID NO: 632648 - RNA, 19 nt, Artificial Sequence
  Synthetic
uucucuaaugaugagugau

SEQ ID NO: 632649 - RNA, 20 nt, Artificial Sequence
  Synthetic
uuucucuaaugaugagugau

SEQ ID NO: 632650 - RNA, 21 nt, Artificial Sequence
  Synthetic
auuucucuaaugaugagugau

SEQ ID NO: 632651 - RNA, 22 nt, Artificial Sequence
  Synthetic
cauuucucuaaugaugagugau

SEQ ID NO: 632652 - RNA, 23 nt, Artificial Sequence
  Synthetic
gcauuucucuaaugaugagugau

SEQ ID NO: 632653 - RNA, 24 nt, Artificial Sequence
  Synthetic
ugcauuucucuaaugaugagugau

SEQ ID NO: 632654 - RNA, 18 nt, Artificial Sequence
  Synthetic
aggguccaaaauagugau

SEQ ID NO: 632655 - RNA, 19 nt, Artificial Sequence
  Synthetic
aaggguccaaaauagugau

SEQ ID NO: 632656 - RNA, 20 nt, Artificial Sequence
  Synthetic
caaggguccaaaauagugau

SEQ ID NO: 632657 - RNA, 21 nt, Artificial Sequence
  Synthetic
ccaaggguccaaaauagugau

SEQ ID NO: 632658 - RNA, 22 nt, Artificial Sequence
  Synthetic
cccaaggguccaaaauagugau

SEQ ID NO: 632659 - RNA, 23 nt, Artificial Sequence
  Synthetic
acccaaggguccaaaauagugau

SEQ ID NO: 632660 - RNA, 24 nt, Artificial Sequence
  Synthetic
gacccaaggguccaaaauagugau

SEQ ID NO: 632661 - RNA, 18 nt, Artificial Sequence
  Synthetic
ggaggccggcauagugau

SEQ ID NO: 632662 - RNA, 19 nt, Artificial Sequence
  Synthetic
uggaggccggcauagugau

SEQ ID NO: 632663 - RNA, 20 nt, Artificial Sequence
  Synthetic
cuggaggccggcauagugau

SEQ ID NO: 632664 - RNA, 21 nt, Artificial Sequence
  Synthetic
ccuggaggccggcauagugau

SEQ ID NO: 632665 - RNA, 22 nt, Artificial Sequence
  Synthetic
gccuggaggccggcauagugau

SEQ ID NO: 632666 - RNA, 23 nt, Artificial Sequence
  Synthetic
agccuggaggccggcauagugau

SEQ ID NO: 632667 - RNA, 24 nt, Artificial Sequence
  Synthetic
gagccuggaggccggcauagugau

SEQ ID NO: 632668 - RNA, 18 nt, Artificial Sequence
  Synthetic
caaaaugcugauagugau

SEQ ID NO: 632669 - RNA, 19 nt, Artificial Sequence
  Synthetic
ccaaaaugcugauagugau

SEQ ID NO: 632670 - RNA, 20 nt, Artificial Sequence
  Synthetic
accaaaaugcugauagugau

SEQ ID NO: 632671 - RNA, 21 nt, Artificial Sequence
  Synthetic
gaccaaaaugcugauagugau

SEQ ID NO: 632672 - RNA, 22 nt, Artificial Sequence
  Synthetic
ugaccaaaaugcugauagugau

SEQ ID NO: 632673 - RNA, 23 nt, Artificial Sequence
  Synthetic
uugaccaaaaugcugauagugau

SEQ ID NO: 632674 - RNA, 24 nt, Artificial Sequence
  Synthetic
uuugaccaaaaugcugauagugau

SEQ ID NO: 632675 - RNA, 18 nt, Artificial Sequence
  Synthetic
ccaaaugcugauagugau

SEQ ID NO: 632676 - RNA, 19 nt, Artificial Sequence
  Synthetic
cccaaaugcugauagugau

SEQ ID NO: 632677 - RNA, 20 nt, Artificial Sequence
  Synthetic
acccaaaugcugauagugau

SEQ ID NO: 632678 - RNA, 21 nt, Artificial Sequence
  Synthetic
gacccaaaugcugauagugau

SEQ ID NO: 632679 - RNA, 22 nt, Artificial Sequence
  Synthetic
ugacccaaaugcugauagugau

SEQ ID NO: 632680 - RNA, 23 nt, Artificial Sequence
  Synthetic
uugacccaaaugcugauagugau

SEQ ID NO: 632681 - RNA, 24 nt, Artificial Sequence
  Synthetic
uuugacccaaaugcugauagugau

SEQ ID NO: 632682 - RNA, 18 nt, Artificial Sequence
  Synthetic
uaaaauaguagacgugau

SEQ ID NO: 632683 - RNA, 19 nt, Artificial Sequence
  Synthetic
guaaaauaguagacgugau

SEQ ID NO: 632684 - RNA, 20 nt, Artificial Sequence
  Synthetic
uguaaaauaguagacgugau

SEQ ID NO: 632685 - RNA, 21 nt, Artificial Sequence
  Synthetic
auguaaaauaguagacgugau

SEQ ID NO: 632686 - RNA, 22 nt, Artificial Sequence
  Synthetic
aauguaaaauaguagacgugau

SEQ ID NO: 632687 - RNA, 23 nt, Artificial Sequence
  Synthetic
caauguaaaauaguagacgugau

SEQ ID NO: 632688 - RNA, 24 nt, Artificial Sequence
  Synthetic
acaauguaaaauaguagacgugau

SEQ ID NO: 632689 - RNA, 18 nt, Artificial Sequence
  Synthetic
ugaccuugaagaggugau

SEQ ID NO: 632690 - RNA, 19 nt, Artificial Sequence
  Synthetic
gugaccuugaagaggugau

SEQ ID NO: 632691 - RNA, 20 nt, Artificial Sequence
  Synthetic
ugugaccuugaagaggugau

SEQ ID NO: 632692 - RNA, 21 nt, Artificial Sequence
  Synthetic
augugaccuugaagaggugau

SEQ ID NO: 632693 - RNA, 22 nt, Artificial Sequence
  Synthetic
aaugugaccuugaagaggugau

SEQ ID NO: 632694 - RNA, 23 nt, Artificial Sequence
  Synthetic
aaaugugaccuugaagaggugau

SEQ ID NO: 632695 - RNA, 24 nt, Artificial Sequence
  Synthetic
uaaaugugaccuugaagaggugau

SEQ ID NO: 632696 - RNA, 18 nt, Artificial Sequence
  Synthetic
uuguuuuucagaggugau

SEQ ID NO: 632697 - RNA, 19 nt, Artificial Sequence
  Synthetic
guuguuuuucagaggugau

SEQ ID NO: 632698 - RNA, 20 nt, Artificial Sequence
  Synthetic
gguuguuuuucagaggugau

SEQ ID NO: 632699 - RNA, 21 nt, Artificial Sequence
  Synthetic
ugguuguuuuucagaggugau

SEQ ID NO: 632700 - RNA, 22 nt, Artificial Sequence
  Synthetic
uugguuguuuuucagaggugau

SEQ ID NO: 632701 - RNA, 23 nt, Artificial Sequence
  Synthetic
uuugguuguuuuucagaggugau

SEQ ID NO: 632702 - RNA, 24 nt, Artificial Sequence
  Synthetic
uuuugguuguuuuucagaggugau

SEQ ID NO: 632703 - RNA, 18 nt, Artificial Sequence
  Synthetic
accuuuucacagggugau

SEQ ID NO: 632704 - RNA, 19 nt, Artificial Sequence
  Synthetic
caccuuuucacagggugau

SEQ ID NO: 632705 - RNA, 20 nt, Artificial Sequence
  Synthetic
gcaccuuuucacagggugau

SEQ ID NO: 632706 - RNA, 21 nt, Artificial Sequence
  Synthetic
ggcaccuuuucacagggugau

SEQ ID NO: 632707 - RNA, 22 nt, Artificial Sequence
  Synthetic
aggcaccuuuucacagggugau

SEQ ID NO: 632708 - RNA, 23 nt, Artificial Sequence
  Synthetic
aaggcaccuuuucacagggugau

SEQ ID NO: 632709 - RNA, 24 nt, Artificial Sequence
  Synthetic
gaaggcaccuuuucacagggugau

SEQ ID NO: 632710 - RNA, 18 nt, Artificial Sequence
  Synthetic
cugagguaggagggugau

SEQ ID NO: 632711 - RNA, 19 nt, Artificial Sequence
  Synthetic
gcugagguaggagggugau

SEQ ID NO: 632712 - RNA, 20 nt, Artificial Sequence
  Synthetic
agcugagguaggagggugau

SEQ ID NO: 632713 - RNA, 21 nt, Artificial Sequence
  Synthetic
aagcugagguaggagggugau

SEQ ID NO: 632714 - RNA, 22 nt, Artificial Sequence
  Synthetic
gaagcugagguaggagggugau

SEQ ID NO: 632715 - RNA, 23 nt, Artificial Sequence
  Synthetic
ggaagcugagguaggagggugau

SEQ ID NO: 632716 - RNA, 24 nt, Artificial Sequence
  Synthetic
aggaagcugagguaggagggugau

SEQ ID NO: 632717 - RNA, 18 nt, Artificial Sequence
  Synthetic
ucccaucuggggggugau

SEQ ID NO: 632718 - RNA, 19 nt, Artificial Sequence
  Synthetic
gucccaucuggggggugau

SEQ ID NO: 632719 - RNA, 20 nt, Artificial Sequence
  Synthetic
ggucccaucuggggggugau

SEQ ID NO: 632720 - RNA, 21 nt, Artificial Sequence
  Synthetic
uggucccaucuggggggugau

SEQ ID NO: 632721 - RNA, 22 nt, Artificial Sequence
  Synthetic
auggucccaucuggggggugau

SEQ ID NO: 632722 - RNA, 23 nt, Artificial Sequence
  Synthetic
gauggucccaucuggggggugau

SEQ ID NO: 632723 - RNA, 24 nt, Artificial Sequence
  Synthetic
agauggucccaucuggggggugau

SEQ ID NO: 632724 - RNA, 18 nt, Artificial Sequence
  Synthetic
uccuggggguggggugau

SEQ ID NO: 632725 - RNA, 19 nt, Artificial Sequence
  Synthetic
auccuggggguggggugau

SEQ ID NO: 632726 - RNA, 20 nt, Artificial Sequence
  Synthetic
gauccuggggguggggugau

SEQ ID NO: 632727 - RNA, 21 nt, Artificial Sequence
  Synthetic
agauccuggggguggggugau

SEQ ID NO: 632728 - RNA, 22 nt, Artificial Sequence
  Synthetic
uagauccuggggguggggugau

SEQ ID NO: 632729 - RNA, 23 nt, Artificial Sequence
  Synthetic
uuagauccuggggguggggugau

SEQ ID NO: 632730 - RNA, 24 nt, Artificial Sequence
  Synthetic
auuagauccuggggguggggugau

SEQ ID NO: 632731 - RNA, 18 nt, Artificial Sequence
  Synthetic
aaggcagcaauuggugau

SEQ ID NO: 632732 - RNA, 19 nt, Artificial Sequence
  Synthetic
aaaggcagcaauuggugau

SEQ ID NO: 632733 - RNA, 20 nt, Artificial Sequence
  Synthetic
uaaaggcagcaauuggugau

SEQ ID NO: 632734 - RNA, 21 nt, Artificial Sequence
  Synthetic
auaaaggcagcaauuggugau

SEQ ID NO: 632735 - RNA, 22 nt, Artificial Sequence
  Synthetic
uauaaaggcagcaauuggugau

SEQ ID NO: 632736 - RNA, 23 nt, Artificial Sequence
  Synthetic
guauaaaggcagcaauuggugau

SEQ ID NO: 632737 - RNA, 24 nt, Artificial Sequence
  Synthetic
aguauaaaggcagcaauuggugau

SEQ ID NO: 632738 - RNA, 18 nt, Artificial Sequence
  Synthetic
guaaaucaucuuggugau

SEQ ID NO: 632739 - RNA, 19 nt, Artificial Sequence
  Synthetic
aguaaaucaucuuggugau

SEQ ID NO: 632740 - RNA, 20 nt, Artificial Sequence
  Synthetic
aaguaaaucaucuuggugau

SEQ ID NO: 632741 - RNA, 21 nt, Artificial Sequence
  Synthetic
uaaguaaaucaucuuggugau

SEQ ID NO: 632742 - RNA, 22 nt, Artificial Sequence
  Synthetic
cuaaguaaaucaucuuggugau

SEQ ID NO: 632743 - RNA, 23 nt, Artificial Sequence
  Synthetic
acuaaguaaaucaucuuggugau

SEQ ID NO: 632744 - RNA, 24 nt, Artificial Sequence
  Synthetic
gacuaaguaaaucaucuuggugau

SEQ ID NO: 632745 - RNA, 18 nt, Artificial Sequence
  Synthetic
ugaaaggaaaaaugugau

SEQ ID NO: 632746 - RNA, 19 nt, Artificial Sequence
  Synthetic
gugaaaggaaaaaugugau

SEQ ID NO: 632747 - RNA, 20 nt, Artificial Sequence
  Synthetic
agugaaaggaaaaaugugau

SEQ ID NO: 632748 - RNA, 21 nt, Artificial Sequence
  Synthetic
gagugaaaggaaaaaugugau

SEQ ID NO: 632749 - RNA, 22 nt, Artificial Sequence
  Synthetic
agagugaaaggaaaaaugugau

SEQ ID NO: 632750 - RNA, 23 nt, Artificial Sequence
  Synthetic
aagagugaaaggaaaaaugugau

SEQ ID NO: 632751 - RNA, 24 nt, Artificial Sequence
  Synthetic
caagagugaaaggaaaaaugugau

SEQ ID NO: 632752 - RNA, 18 nt, Artificial Sequence
  Synthetic
aauuggucuagaugugau

SEQ ID NO: 632753 - RNA, 19 nt, Artificial Sequence
  Synthetic
caauuggucuagaugugau

SEQ ID NO: 632754 - RNA, 20 nt, Artificial Sequence
  Synthetic
ucaauuggucuagaugugau

SEQ ID NO: 632755 - RNA, 21 nt, Artificial Sequence
  Synthetic
uucaauuggucuagaugugau

SEQ ID NO: 632756 - RNA, 22 nt, Artificial Sequence
  Synthetic
auucaauuggucuagaugugau

SEQ ID NO: 632757 - RNA, 23 nt, Artificial Sequence
  Synthetic
gauucaauuggucuagaugugau

SEQ ID NO: 632758 - RNA, 24 nt, Artificial Sequence
  Synthetic
ugauucaauuggucuagaugugau

SEQ ID NO: 632759 - RNA, 18 nt, Artificial Sequence
  Synthetic
aauugccuuaucugugau

SEQ ID NO: 632760 - RNA, 19 nt, Artificial Sequence
  Synthetic
uaauugccuuaucugugau

SEQ ID NO: 632761 - RNA, 20 nt, Artificial Sequence
  Synthetic
auaauugccuuaucugugau

SEQ ID NO: 632762 - RNA, 21 nt, Artificial Sequence
  Synthetic
aauaauugccuuaucugugau

SEQ ID NO: 632763 - RNA, 22 nt, Artificial Sequence
  Synthetic
gaauaauugccuuaucugugau

SEQ ID NO: 632764 - RNA, 23 nt, Artificial Sequence
  Synthetic
agaauaauugccuuaucugugau

SEQ ID NO: 632765 - RNA, 24 nt, Artificial Sequence
  Synthetic
uagaauaauugccuuaucugugau

SEQ ID NO: 632766 - RNA, 18 nt, Artificial Sequence
  Synthetic
ggccucugggcuugugau

SEQ ID NO: 632767 - RNA, 19 nt, Artificial Sequence
  Synthetic
aggccucugggcuugugau

SEQ ID NO: 632768 - RNA, 20 nt, Artificial Sequence
  Synthetic
uaggccucugggcuugugau

SEQ ID NO: 632769 - RNA, 21 nt, Artificial Sequence
  Synthetic
uuaggccucugggcuugugau

SEQ ID NO: 632770 - RNA, 22 nt, Artificial Sequence
  Synthetic
uuuaggccucugggcuugugau

SEQ ID NO: 632771 - RNA, 23 nt, Artificial Sequence
  Synthetic
uuuuaggccucugggcuugugau

SEQ ID NO: 632772 - RNA, 24 nt, Artificial Sequence
  Synthetic
cuuuuaggccucugggcuugugau

SEQ ID NO: 632773 - RNA, 18 nt, Artificial Sequence
  Synthetic
uaaucgucaucuugugau

SEQ ID NO: 632774 - RNA, 19 nt, Artificial Sequence
  Synthetic
uuaaucgucaucuugugau

SEQ ID NO: 632775 - RNA, 20 nt, Artificial Sequence
  Synthetic
auuaaucgucaucuugugau

SEQ ID NO: 632776 - RNA, 21 nt, Artificial Sequence
  Synthetic
uauuaaucgucaucuugugau

SEQ ID NO: 632777 - RNA, 22 nt, Artificial Sequence
  Synthetic
cuauuaaucgucaucuugugau

SEQ ID NO: 632778 - RNA, 23 nt, Artificial Sequence
  Synthetic
ucuauuaaucgucaucuugugau

SEQ ID NO: 632779 - RNA, 24 nt, Artificial Sequence
  Synthetic
aucuauuaaucgucaucuugugau

SEQ ID NO: 632780 - RNA, 18 nt, Artificial Sequence
  Synthetic
auauuguucucuugugau

SEQ ID NO: 632781 - RNA, 19 nt, Artificial Sequence
  Synthetic
cauauuguucucuugugau

SEQ ID NO: 632782 - RNA, 20 nt, Artificial Sequence
  Synthetic
ucauauuguucucuugugau

SEQ ID NO: 632783 - RNA, 21 nt, Artificial Sequence
  Synthetic
aucauauuguucucuugugau

SEQ ID NO: 632784 - RNA, 22 nt, Artificial Sequence
  Synthetic
aaucauauuguucucuugugau

SEQ ID NO: 632785 - RNA, 23 nt, Artificial Sequence
  Synthetic
aaaucauauuguucucuugugau

SEQ ID NO: 632786 - RNA, 24 nt, Artificial Sequence
  Synthetic
aaaaucauauuguucucuugugau

SEQ ID NO: 632787 - RNA, 18 nt, Artificial Sequence
  Synthetic
uaauccacuucuugugau

SEQ ID NO: 632788 - RNA, 19 nt, Artificial Sequence
  Synthetic
guaauccacuucuugugau

SEQ ID NO: 632789 - RNA, 20 nt, Artificial Sequence
  Synthetic
aguaauccacuucuugugau

SEQ ID NO: 632790 - RNA, 21 nt, Artificial Sequence
  Synthetic
gaguaauccacuucuugugau

SEQ ID NO: 632791 - RNA, 22 nt, Artificial Sequence
  Synthetic
agaguaauccacuucuugugau

SEQ ID NO: 632792 - RNA, 23 nt, Artificial Sequence
  Synthetic
aagaguaauccacuucuugugau

SEQ ID NO: 632793 - RNA, 24 nt, Artificial Sequence
  Synthetic
aaagaguaauccacuucuugugau

SEQ ID NO: 632794 - RNA, 18 nt, Artificial Sequence
  Synthetic
aaauaccauaaaauugau

SEQ ID NO: 632795 - RNA, 19 nt, Artificial Sequence
  Synthetic
aaaauaccauaaaauugau

SEQ ID NO: 632796 - RNA, 20 nt, Artificial Sequence
  Synthetic
gaaaauaccauaaaauugau

SEQ ID NO: 632797 - RNA, 21 nt, Artificial Sequence
  Synthetic
ggaaaauaccauaaaauugau

SEQ ID NO: 632798 - RNA, 22 nt, Artificial Sequence
  Synthetic
uggaaaauaccauaaaauugau

SEQ ID NO: 632799 - RNA, 23 nt, Artificial Sequence
  Synthetic
auggaaaauaccauaaaauugau

SEQ ID NO: 632800 - RNA, 24 nt, Artificial Sequence
  Synthetic
uauggaaaauaccauaaaauugau

SEQ ID NO: 632801 - RNA, 18 nt, Artificial Sequence
  Synthetic
aauuaugaccacauugau

SEQ ID NO: 632802 - RNA, 19 nt, Artificial Sequence
  Synthetic
uaauuaugaccacauugau

SEQ ID NO: 632803 - RNA, 20 nt, Artificial Sequence
  Synthetic
auaauuaugaccacauugau

SEQ ID NO: 632804 - RNA, 21 nt, Artificial Sequence
  Synthetic
cauaauuaugaccacauugau

SEQ ID NO: 632805 - RNA, 22 nt, Artificial Sequence
  Synthetic
ucauaauuaugaccacauugau

SEQ ID NO: 632806 - RNA, 23 nt, Artificial Sequence
  Synthetic
uucauaauuaugaccacauugau

SEQ ID NO: 632807 - RNA, 24 nt, Artificial Sequence
  Synthetic
uuucauaauuaugaccacauugau

SEQ ID NO: 632808 - RNA, 18 nt, Artificial Sequence
  Synthetic
gagguguuagacauugau

SEQ ID NO: 632809 - RNA, 19 nt, Artificial Sequence
  Synthetic
ggagguguuagacauugau

SEQ ID NO: 632810 - RNA, 20 nt, Artificial Sequence
  Synthetic
aggagguguuagacauugau

SEQ ID NO: 632811 - RNA, 21 nt, Artificial Sequence
  Synthetic
uaggagguguuagacauugau

SEQ ID NO: 632812 - RNA, 22 nt, Artificial Sequence
  Synthetic
guaggagguguuagacauugau

SEQ ID NO: 632813 - RNA, 23 nt, Artificial Sequence
  Synthetic
gguaggagguguuagacauugau

SEQ ID NO: 632814 - RNA, 24 nt, Artificial Sequence
  Synthetic
ggguaggagguguuagacauugau

SEQ ID NO: 632815 - RNA, 18 nt, Artificial Sequence
  Synthetic
gauuuuauggccauugau

SEQ ID NO: 632816 - RNA, 19 nt, Artificial Sequence
  Synthetic
ugauuuuauggccauugau

SEQ ID NO: 632817 - RNA, 20 nt, Artificial Sequence
  Synthetic
cugauuuuauggccauugau

SEQ ID NO: 632818 - RNA, 21 nt, Artificial Sequence
  Synthetic
ucugauuuuauggccauugau

SEQ ID NO: 632819 - RNA, 22 nt, Artificial Sequence
  Synthetic
aucugauuuuauggccauugau

SEQ ID NO: 632820 - RNA, 23 nt, Artificial Sequence
  Synthetic
aaucugauuuuauggccauugau

SEQ ID NO: 632821 - RNA, 24 nt, Artificial Sequence
  Synthetic
aaaucugauuuuauggccauugau

SEQ ID NO: 632822 - RNA, 18 nt, Artificial Sequence
  Synthetic
agggaagggagcauugau

SEQ ID NO: 632823 - RNA, 19 nt, Artificial Sequence
  Synthetic
aagggaagggagcauugau

SEQ ID NO: 632824 - RNA, 20 nt, Artificial Sequence
  Synthetic
aaagggaagggagcauugau

SEQ ID NO: 632825 - RNA, 21 nt, Artificial Sequence
  Synthetic
gaaagggaagggagcauugau

SEQ ID NO: 632826 - RNA, 22 nt, Artificial Sequence
  Synthetic
ugaaagggaagggagcauugau

SEQ ID NO: 632827 - RNA, 23 nt, Artificial Sequence
  Synthetic
gugaaagggaagggagcauugau

SEQ ID NO: 632828 - RNA, 24 nt, Artificial Sequence
  Synthetic
ggugaaagggaagggagcauugau

SEQ ID NO: 632829 - RNA, 18 nt, Artificial Sequence
  Synthetic
aaagagcaaaagauugau

SEQ ID NO: 632830 - RNA, 19 nt, Artificial Sequence
  Synthetic
aaaagagcaaaagauugau

SEQ ID NO: 632831 - RNA, 20 nt, Artificial Sequence
  Synthetic
caaaagagcaaaagauugau

SEQ ID NO: 632832 - RNA, 21 nt, Artificial Sequence
  Synthetic
acaaaagagcaaaagauugau

SEQ ID NO: 632833 - RNA, 22 nt, Artificial Sequence
  Synthetic
cacaaaagagcaaaagauugau

SEQ ID NO: 632834 - RNA, 23 nt, Artificial Sequence
  Synthetic
gcacaaaagagcaaaagauugau

SEQ ID NO: 632835 - RNA, 24 nt, Artificial Sequence
  Synthetic
agcacaaaagagcaaaagauugau

SEQ ID NO: 632836 - RNA, 18 nt, Artificial Sequence
  Synthetic
uuaaaccuuuagauugau

SEQ ID NO: 632837 - RNA, 19 nt, Artificial Sequence
  Synthetic
auuaaaccuuuagauugau

SEQ ID NO: 632838 - RNA, 20 nt, Artificial Sequence
  Synthetic
aauuaaaccuuuagauugau

SEQ ID NO: 632839 - RNA, 21 nt, Artificial Sequence
  Synthetic
aaauuaaaccuuuagauugau

SEQ ID NO: 632840 - RNA, 22 nt, Artificial Sequence
  Synthetic
uaaauuaaaccuuuagauugau

SEQ ID NO: 632841 - RNA, 23 nt, Artificial Sequence
  Synthetic
cuaaauuaaaccuuuagauugau

SEQ ID NO: 632842 - RNA, 24 nt, Artificial Sequence
  Synthetic
acuaaauuaaaccuuuagauugau

SEQ ID NO: 632843 - RNA, 18 nt, Artificial Sequence
  Synthetic
gcaaaugaauauauugau

SEQ ID NO: 632844 - RNA, 19 nt, Artificial Sequence
  Synthetic
agcaaaugaauauauugau

SEQ ID NO: 632845 - RNA, 20 nt, Artificial Sequence
  Synthetic
cagcaaaugaauauauugau

SEQ ID NO: 632846 - RNA, 21 nt, Artificial Sequence
  Synthetic
ucagcaaaugaauauauugau

SEQ ID NO: 632847 - RNA, 22 nt, Artificial Sequence
  Synthetic
uucagcaaaugaauauauugau

SEQ ID NO: 632848 - RNA, 23 nt, Artificial Sequence
  Synthetic
auucagcaaaugaauauauugau

SEQ ID NO: 632849 - RNA, 24 nt, Artificial Sequence
  Synthetic
uauucagcaaaugaauauauugau

SEQ ID NO: 632850 - RNA, 18 nt, Artificial Sequence
  Synthetic
augaauauagguauugau

SEQ ID NO: 632851 - RNA, 19 nt, Artificial Sequence
  Synthetic
uaugaauauagguauugau

SEQ ID NO: 632852 - RNA, 20 nt, Artificial Sequence
  Synthetic
guaugaauauagguauugau

SEQ ID NO: 632853 - RNA, 21 nt, Artificial Sequence
  Synthetic
aguaugaauauagguauugau

SEQ ID NO: 632854 - RNA, 22 nt, Artificial Sequence
  Synthetic
gaguaugaauauagguauugau

SEQ ID NO: 632855 - RNA, 23 nt, Artificial Sequence
  Synthetic
ugaguaugaauauagguauugau

SEQ ID NO: 632856 - RNA, 24 nt, Artificial Sequence
  Synthetic
uugaguaugaauauagguauugau

SEQ ID NO: 632857 - RNA, 18 nt, Artificial Sequence
  Synthetic
gucuuaguuuguauugau

SEQ ID NO: 632858 - RNA, 19 nt, Artificial Sequence
  Synthetic
agucuuaguuuguauugau

SEQ ID NO: 632859 - RNA, 20 nt, Artificial Sequence
  Synthetic
aagucuuaguuuguauugau

SEQ ID NO: 632860 - RNA, 21 nt, Artificial Sequence
  Synthetic
uaagucuuaguuuguauugau

SEQ ID NO: 632861 - RNA, 22 nt, Artificial Sequence
  Synthetic
auaagucuuaguuuguauugau

SEQ ID NO: 632862 - RNA, 23 nt, Artificial Sequence
  Synthetic
aauaagucuuaguuuguauugau

SEQ ID NO: 632863 - RNA, 24 nt, Artificial Sequence
  Synthetic
aaauaagucuuaguuuguauugau

SEQ ID NO: 632864 - RNA, 18 nt, Artificial Sequence
  Synthetic
gugcagcaggaacuugau

SEQ ID NO: 632865 - RNA, 19 nt, Artificial Sequence
  Synthetic
ggugcagcaggaacuugau

SEQ ID NO: 632866 - RNA, 20 nt, Artificial Sequence
  Synthetic
gggugcagcaggaacuugau

SEQ ID NO: 632867 - RNA, 21 nt, Artificial Sequence
  Synthetic
ugggugcagcaggaacuugau

SEQ ID NO: 632868 - RNA, 22 nt, Artificial Sequence
  Synthetic
cugggugcagcaggaacuugau

SEQ ID NO: 632869 - RNA, 23 nt, Artificial Sequence
  Synthetic
ucugggugcagcaggaacuugau

SEQ ID NO: 632870 - RNA, 24 nt, Artificial Sequence
  Synthetic
uucugggugcagcaggaacuugau

SEQ ID NO: 632871 - RNA, 18 nt, Artificial Sequence
  Synthetic
aacauagauuaacuugau

SEQ ID NO: 632872 - RNA, 19 nt, Artificial Sequence
  Synthetic
gaacauagauuaacuugau

SEQ ID NO: 632873 - RNA, 20 nt, Artificial Sequence
  Synthetic
ugaacauagauuaacuugau

SEQ ID NO: 632874 - RNA, 21 nt, Artificial Sequence
  Synthetic
uugaacauagauuaacuugau

SEQ ID NO: 632875 - RNA, 22 nt, Artificial Sequence
  Synthetic
guugaacauagauuaacuugau

SEQ ID NO: 632876 - RNA, 23 nt, Artificial Sequence
  Synthetic
aguugaacauagauuaacuugau

SEQ ID NO: 632877 - RNA, 24 nt, Artificial Sequence
  Synthetic
gaguugaacauagauuaacuugau

SEQ ID NO: 632878 - RNA, 18 nt, Artificial Sequence
  Synthetic
ggacuggcaggacuugau

SEQ ID NO: 632879 - RNA, 19 nt, Artificial Sequence
  Synthetic
aggacuggcaggacuugau

SEQ ID NO: 632880 - RNA, 20 nt, Artificial Sequence
  Synthetic
aaggacuggcaggacuugau

SEQ ID NO: 632881 - RNA, 21 nt, Artificial Sequence
  Synthetic
aaaggacuggcaggacuugau

SEQ ID NO: 632882 - RNA, 22 nt, Artificial Sequence
  Synthetic
uaaaggacuggcaggacuugau

SEQ ID NO: 632883 - RNA, 23 nt, Artificial Sequence
  Synthetic
auaaaggacuggcaggacuugau

SEQ ID NO: 632884 - RNA, 24 nt, Artificial Sequence
  Synthetic
gauaaaggacuggcaggacuugau

SEQ ID NO: 632885 - RNA, 18 nt, Artificial Sequence
  Synthetic
ucugggagucuacuugau

SEQ ID NO: 632886 - RNA, 19 nt, Artificial Sequence
  Synthetic
cucugggagucuacuugau

SEQ ID NO: 632887 - RNA, 20 nt, Artificial Sequence
  Synthetic
acucugggagucuacuugau

SEQ ID NO: 632888 - RNA, 21 nt, Artificial Sequence
  Synthetic
cacucugggagucuacuugau

SEQ ID NO: 632889 - RNA, 22 nt, Artificial Sequence
  Synthetic
acacucugggagucuacuugau

SEQ ID NO: 632890 - RNA, 23 nt, Artificial Sequence
  Synthetic
gacacucugggagucuacuugau

SEQ ID NO: 632891 - RNA, 24 nt, Artificial Sequence
  Synthetic
agacacucugggagucuacuugau

SEQ ID NO: 632892 - RNA, 18 nt, Artificial Sequence
  Synthetic
cuuuuccaaaagcuugau

SEQ ID NO: 632893 - RNA, 19 nt, Artificial Sequence
  Synthetic
acuuuuccaaaagcuugau

SEQ ID NO: 632894 - RNA, 20 nt, Artificial Sequence
  Synthetic
gacuuuuccaaaagcuugau

SEQ ID NO: 632895 - RNA, 21 nt, Artificial Sequence
  Synthetic
ugacuuuuccaaaagcuugau

SEQ ID NO: 632896 - RNA, 22 nt, Artificial Sequence
  Synthetic
uugacuuuuccaaaagcuugau

SEQ ID NO: 632897 - RNA, 23 nt, Artificial Sequence
  Synthetic
uuugacuuuuccaaaagcuugau

SEQ ID NO: 632898 - RNA, 24 nt, Artificial Sequence
  Synthetic
auuugacuuuuccaaaagcuugau

SEQ ID NO: 632899 - RNA, 18 nt, Artificial Sequence
  Synthetic
aauuuaaauuagcuugau

SEQ ID NO: 632900 - RNA, 19 nt, Artificial Sequence
  Synthetic
uaauuuaaauuagcuugau

SEQ ID NO: 632901 - RNA, 20 nt, Artificial Sequence
  Synthetic
cuaauuuaaauuagcuugau

SEQ ID NO: 632902 - RNA, 21 nt, Artificial Sequence
  Synthetic
ucuaauuuaaauuagcuugau

SEQ ID NO: 632903 - RNA, 22 nt, Artificial Sequence
  Synthetic
aucuaauuuaaauuagcuugau

SEQ ID NO: 632904 - RNA, 23 nt, Artificial Sequence
  Synthetic
uaucuaauuuaaauuagcuugau

SEQ ID NO: 632905 - RNA, 24 nt, Artificial Sequence
  Synthetic
uuaucuaauuuaaauuagcuugau

SEQ ID NO: 632906 - RNA, 18 nt, Artificial Sequence
  Synthetic
uguuuugacuugcuugau

SEQ ID NO: 632907 - RNA, 19 nt, Artificial Sequence
  Synthetic
uuguuuugacuugcuugau

SEQ ID NO: 632908 - RNA, 20 nt, Artificial Sequence
  Synthetic
guuguuuugacuugcuugau

SEQ ID NO: 632909 - RNA, 21 nt, Artificial Sequence
  Synthetic
uguuguuuugacuugcuugau

SEQ ID NO: 632910 - RNA, 22 nt, Artificial Sequence
  Synthetic
guguuguuuugacuugcuugau

SEQ ID NO: 632911 - RNA, 23 nt, Artificial Sequence
  Synthetic
cguguuguuuugacuugcuugau

SEQ ID NO: 632912 - RNA, 24 nt, Artificial Sequence
  Synthetic
acguguuguuuugacuugcuugau

SEQ ID NO: 632913 - RNA, 18 nt, Artificial Sequence
  Synthetic
cuggcuuauccucuugau

SEQ ID NO: 632914 - RNA, 19 nt, Artificial Sequence
  Synthetic
acuggcuuauccucuugau

SEQ ID NO: 632915 - RNA, 20 nt, Artificial Sequence
  Synthetic
aacuggcuuauccucuugau

SEQ ID NO: 632916 - RNA, 21 nt, Artificial Sequence
  Synthetic
aaacuggcuuauccucuugau

SEQ ID NO: 632917 - RNA, 22 nt, Artificial Sequence
  Synthetic
uaaacuggcuuauccucuugau

SEQ ID NO: 632918 - RNA, 23 nt, Artificial Sequence
  Synthetic
auaaacuggcuuauccucuugau

SEQ ID NO: 632919 - RNA, 24 nt, Artificial Sequence
  Synthetic
aauaaacuggcuuauccucuugau

SEQ ID NO: 632920 - RNA, 18 nt, Artificial Sequence
  Synthetic
gguuugagaacaguugau

SEQ ID NO: 632921 - RNA, 19 nt, Artificial Sequence
  Synthetic
ugguuugagaacaguugau

SEQ ID NO: 632922 - RNA, 20 nt, Artificial Sequence
  Synthetic
augguuugagaacaguugau

SEQ ID NO: 632923 - RNA, 21 nt, Artificial Sequence
  Synthetic
uaugguuugagaacaguugau

SEQ ID NO: 632924 - RNA, 22 nt, Artificial Sequence
  Synthetic
auaugguuugagaacaguugau

SEQ ID NO: 632925 - RNA, 23 nt, Artificial Sequence
  Synthetic
aauaugguuugagaacaguugau

SEQ ID NO: 632926 - RNA, 24 nt, Artificial Sequence
  Synthetic
caauaugguuugagaacaguugau

SEQ ID NO: 632927 - RNA, 18 nt, Artificial Sequence
  Synthetic
gaaucaggauuaguugau

SEQ ID NO: 632928 - RNA, 19 nt, Artificial Sequence
  Synthetic
agaaucaggauuaguugau

SEQ ID NO: 632929 - RNA, 20 nt, Artificial Sequence
  Synthetic
gagaaucaggauuaguugau

SEQ ID NO: 632930 - RNA, 21 nt, Artificial Sequence
  Synthetic
ugagaaucaggauuaguugau

SEQ ID NO: 632931 - RNA, 22 nt, Artificial Sequence
  Synthetic
gugagaaucaggauuaguugau

SEQ ID NO: 632932 - RNA, 23 nt, Artificial Sequence
  Synthetic
cgugagaaucaggauuaguugau

SEQ ID NO: 632933 - RNA, 24 nt, Artificial Sequence
  Synthetic
acgugagaaucaggauuaguugau

SEQ ID NO: 632934 - RNA, 18 nt, Artificial Sequence
  Synthetic
cacugguuaaucguugau

SEQ ID NO: 632935 - RNA, 19 nt, Artificial Sequence
  Synthetic
gcacugguuaaucguugau

SEQ ID NO: 632936 - RNA, 20 nt, Artificial Sequence
  Synthetic
agcacugguuaaucguugau

SEQ ID NO: 632937 - RNA, 21 nt, Artificial Sequence
  Synthetic
aagcacugguuaaucguugau

SEQ ID NO: 632938 - RNA, 22 nt, Artificial Sequence
  Synthetic
gaagcacugguuaaucguugau

SEQ ID NO: 632939 - RNA, 23 nt, Artificial Sequence
  Synthetic
ugaagcacugguuaaucguugau

SEQ ID NO: 632940 - RNA, 24 nt, Artificial Sequence
  Synthetic
cugaagcacugguuaaucguugau

SEQ ID NO: 632941 - RNA, 18 nt, Artificial Sequence
  Synthetic
cugcacguauugguugau

SEQ ID NO: 632942 - RNA, 19 nt, Artificial Sequence
  Synthetic
gcugcacguauugguugau

SEQ ID NO: 632943 - RNA, 20 nt, Artificial Sequence
  Synthetic
ggcugcacguauugguugau

SEQ ID NO: 632944 - RNA, 21 nt, Artificial Sequence
  Synthetic
gggcugcacguauugguugau

SEQ ID NO: 632945 - RNA, 22 nt, Artificial Sequence
  Synthetic
cgggcugcacguauugguugau

SEQ ID NO: 632946 - RNA, 23 nt, Artificial Sequence
  Synthetic
acgggcugcacguauugguugau

SEQ ID NO: 632947 - RNA, 24 nt, Artificial Sequence
  Synthetic
gacgggcugcacguauugguugau

SEQ ID NO: 632948 - RNA, 18 nt, Artificial Sequence
  Synthetic
aggucuccuuugguugau

SEQ ID NO: 632949 - RNA, 19 nt, Artificial Sequence
  Synthetic
caggucuccuuugguugau

SEQ ID NO: 632950 - RNA, 20 nt, Artificial Sequence
  Synthetic
acaggucuccuuugguugau

SEQ ID NO: 632951 - RNA, 21 nt, Artificial Sequence
  Synthetic
cacaggucuccuuugguugau

SEQ ID NO: 632952 - RNA, 22 nt, Artificial Sequence
  Synthetic
ucacaggucuccuuugguugau

SEQ ID NO: 632953 - RNA, 23 nt, Artificial Sequence
  Synthetic
uucacaggucuccuuugguugau

SEQ ID NO: 632954 - RNA, 24 nt, Artificial Sequence
  Synthetic
auucacaggucuccuuugguugau

SEQ ID NO: 632955 - RNA, 18 nt, Artificial Sequence
  Synthetic
aguguugaaaauguugau

SEQ ID NO: 632956 - RNA, 19 nt, Artificial Sequence
  Synthetic
gaguguugaaaauguugau

SEQ ID NO: 632957 - RNA, 20 nt, Artificial Sequence
  Synthetic
agaguguugaaaauguugau

SEQ ID NO: 632958 - RNA, 21 nt, Artificial Sequence
  Synthetic
cagaguguugaaaauguugau

SEQ ID NO: 632959 - RNA, 22 nt, Artificial Sequence
  Synthetic
acagaguguugaaaauguugau

SEQ ID NO: 632960 - RNA, 23 nt, Artificial Sequence
  Synthetic
aacagaguguugaaaauguugau

SEQ ID NO: 632961 - RNA, 24 nt, Artificial Sequence
  Synthetic
aaacagaguguugaaaauguugau

SEQ ID NO: 632962 - RNA, 18 nt, Artificial Sequence
  Synthetic
ucaaaaggaaauguugau

SEQ ID NO: 632963 - RNA, 19 nt, Artificial Sequence
  Synthetic
uucaaaaggaaauguugau

SEQ ID NO: 632964 - RNA, 20 nt, Artificial Sequence
  Synthetic
cuucaaaaggaaauguugau

SEQ ID NO: 632965 - RNA, 21 nt, Artificial Sequence
  Synthetic
acuucaaaaggaaauguugau

SEQ ID NO: 632966 - RNA, 22 nt, Artificial Sequence
  Synthetic
aacuucaaaaggaaauguugau

SEQ ID NO: 632967 - RNA, 23 nt, Artificial Sequence
  Synthetic
aaacuucaaaaggaaauguugau

SEQ ID NO: 632968 - RNA, 24 nt, Artificial Sequence
  Synthetic
caaacuucaaaaggaaauguugau

SEQ ID NO: 632969 - RNA, 18 nt, Artificial Sequence
  Synthetic
aauguauauucuguugau

SEQ ID NO: 632970 - RNA, 19 nt, Artificial Sequence
  Synthetic
uaauguauauucuguugau

SEQ ID NO: 632971 - RNA, 20 nt, Artificial Sequence
  Synthetic
auaauguauauucuguugau

SEQ ID NO: 632972 - RNA, 21 nt, Artificial Sequence
  Synthetic
aauaauguauauucuguugau

SEQ ID NO: 632973 - RNA, 22 nt, Artificial Sequence
  Synthetic
gaauaauguauauucuguugau

SEQ ID NO: 632974 - RNA, 23 nt, Artificial Sequence
  Synthetic
agaauaauguauauucuguugau

SEQ ID NO: 632975 - RNA, 24 nt, Artificial Sequence
  Synthetic
gagaauaauguauauucuguugau

SEQ ID NO: 632976 - RNA, 18 nt, Artificial Sequence
  Synthetic
ggacuagugaaauuugau

SEQ ID NO: 632977 - RNA, 19 nt, Artificial Sequence
  Synthetic
uggacuagugaaauuugau

SEQ ID NO: 632978 - RNA, 20 nt, Artificial Sequence
  Synthetic
cuggacuagugaaauuugau

SEQ ID NO: 632979 - RNA, 21 nt, Artificial Sequence
  Synthetic
gcuggacuagugaaauuugau

SEQ ID NO: 632980 - RNA, 22 nt, Artificial Sequence
  Synthetic
ggcuggacuagugaaauuugau

SEQ ID NO: 632981 - RNA, 23 nt, Artificial Sequence
  Synthetic
cggcuggacuagugaaauuugau

SEQ ID NO: 632982 - RNA, 24 nt, Artificial Sequence
  Synthetic
gcggcuggacuagugaaauuugau

SEQ ID NO: 632983 - RNA, 18 nt, Artificial Sequence
  Synthetic
cucaucagaacauuugau

SEQ ID NO: 632984 - RNA, 19 nt, Artificial Sequence
  Synthetic
ccucaucagaacauuugau

SEQ ID NO: 632985 - RNA, 20 nt, Artificial Sequence
  Synthetic
uccucaucagaacauuugau

SEQ ID NO: 632986 - RNA, 21 nt, Artificial Sequence
  Synthetic
auccucaucagaacauuugau

SEQ ID NO: 632987 - RNA, 22 nt, Artificial Sequence
  Synthetic
uauccucaucagaacauuugau

SEQ ID NO: 632988 - RNA, 23 nt, Artificial Sequence
  Synthetic
cuauccucaucagaacauuugau

SEQ ID NO: 632989 - RNA, 24 nt, Artificial Sequence
  Synthetic
acuauccucaucagaacauuugau

SEQ ID NO: 632990 - RNA, 18 nt, Artificial Sequence
  Synthetic
ucuaguuuuccauuugau

SEQ ID NO: 632991 - RNA, 19 nt, Artificial Sequence
  Synthetic
uucuaguuuuccauuugau

SEQ ID NO: 632992 - RNA, 20 nt, Artificial Sequence
  Synthetic
auucuaguuuuccauuugau

SEQ ID NO: 632993 - RNA, 21 nt, Artificial Sequence
  Synthetic
gauucuaguuuuccauuugau

SEQ ID NO: 632994 - RNA, 22 nt, Artificial Sequence
  Synthetic
ugauucuaguuuuccauuugau

SEQ ID NO: 632995 - RNA, 23 nt, Artificial Sequence
  Synthetic
uugauucuaguuuuccauuugau

SEQ ID NO: 632996 - RNA, 24 nt, Artificial Sequence
  Synthetic
uuugauucuaguuuuccauuugau

SEQ ID NO: 632997 - RNA, 18 nt, Artificial Sequence
  Synthetic
agaaugugaauauuugau

SEQ ID NO: 632998 - RNA, 19 nt, Artificial Sequence
  Synthetic
uagaaugugaauauuugau

SEQ ID NO: 632999 - RNA, 20 nt, Artificial Sequence
  Synthetic
auagaaugugaauauuugau

SEQ ID NO: 633000 - RNA, 21 nt, Artificial Sequence
  Synthetic
gauagaaugugaauauuugau

SEQ ID NO: 633001 - RNA, 22 nt, Artificial Sequence
  Synthetic
ugauagaaugugaauauuugau

SEQ ID NO: 633002 - RNA, 23 nt, Artificial Sequence
  Synthetic
augauagaaugugaauauuugau

SEQ ID NO: 633003 - RNA, 24 nt, Artificial Sequence
  Synthetic
gaugauagaaugugaauauuugau

SEQ ID NO: 633004 - RNA, 18 nt, Artificial Sequence
  Synthetic
aagcuaaauugcuuugau

SEQ ID NO: 633005 - RNA, 19 nt, Artificial Sequence
  Synthetic
uaagcuaaauugcuuugau

SEQ ID NO: 633006 - RNA, 20 nt, Artificial Sequence
  Synthetic
auaagcuaaauugcuuugau

SEQ ID NO: 633007 - RNA, 21 nt, Artificial Sequence
  Synthetic
aauaagcuaaauugcuuugau

SEQ ID NO: 633008 - RNA, 22 nt, Artificial Sequence
  Synthetic
aaauaagcuaaauugcuuugau

SEQ ID NO: 633009 - RNA, 23 nt, Artificial Sequence
  Synthetic
gaaauaagcuaaauugcuuugau

SEQ ID NO: 633010 - RNA, 24 nt, Artificial Sequence
  Synthetic
ggaaauaagcuaaauugcuuugau

SEQ ID NO: 633011 - RNA, 18 nt, Artificial Sequence
  Synthetic
cuuuauguacuguuugau

SEQ ID NO: 633012 - RNA, 19 nt, Artificial Sequence
  Synthetic
acuuuauguacuguuugau

SEQ ID NO: 633013 - RNA, 20 nt, Artificial Sequence
  Synthetic
aacuuuauguacuguuugau

SEQ ID NO: 633014 - RNA, 21 nt, Artificial Sequence
  Synthetic
aaacuuuauguacuguuugau

SEQ ID NO: 633015 - RNA, 22 nt, Artificial Sequence
  Synthetic
gaaacuuuauguacuguuugau

SEQ ID NO: 633016 - RNA, 23 nt, Artificial Sequence
  Synthetic
ggaaacuuuauguacuguuugau

SEQ ID NO: 633017 - RNA, 24 nt, Artificial Sequence
  Synthetic
uggaaacuuuauguacuguuugau

SEQ ID NO: 633018 - RNA, 18 nt, Artificial Sequence
  Synthetic
ggaucuuguuauuuugau

SEQ ID NO: 633019 - RNA, 19 nt, Artificial Sequence
  Synthetic
uggaucuuguuauuuugau

SEQ ID NO: 633020 - RNA, 20 nt, Artificial Sequence
  Synthetic
cuggaucuuguuauuuugau

SEQ ID NO: 633021 - RNA, 21 nt, Artificial Sequence
  Synthetic
acuggaucuuguuauuuugau

SEQ ID NO: 633022 - RNA, 22 nt, Artificial Sequence
  Synthetic
gacuggaucuuguuauuuugau

SEQ ID NO: 633023 - RNA, 23 nt, Artificial Sequence
  Synthetic
agacuggaucuuguuauuuugau

SEQ ID NO: 633024 - RNA, 24 nt, Artificial Sequence
  Synthetic
aagacuggaucuuguuauuuugau

SEQ ID NO: 633025 - RNA, 18 nt, Artificial Sequence
  Synthetic
uucaugaaugcuuuugau

SEQ ID NO: 633026 - RNA, 19 nt, Artificial Sequence
  Synthetic
cuucaugaaugcuuuugau

SEQ ID NO: 633027 - RNA, 20 nt, Artificial Sequence
  Synthetic
gcuucaugaaugcuuuugau

SEQ ID NO: 633028 - RNA, 21 nt, Artificial Sequence
  Synthetic
ugcuucaugaaugcuuuugau

SEQ ID NO: 633029 - RNA, 22 nt, Artificial Sequence
  Synthetic
gugcuucaugaaugcuuuugau

SEQ ID NO: 633030 - RNA, 23 nt, Artificial Sequence
  Synthetic
ggugcuucaugaaugcuuuugau

SEQ ID NO: 633031 - RNA, 24 nt, Artificial Sequence
  Synthetic
aggugcuucaugaaugcuuuugau

SEQ ID NO: 633032 - RNA, 18 nt, Artificial Sequence
  Synthetic
aauauuaagucuuuugau

SEQ ID NO: 633033 - RNA, 19 nt, Artificial Sequence
  Synthetic
uaauauuaagucuuuugau

SEQ ID NO: 633034 - RNA, 20 nt, Artificial Sequence
  Synthetic
auaauauuaagucuuuugau

SEQ ID NO: 633035 - RNA, 21 nt, Artificial Sequence
  Synthetic
aauaauauuaagucuuuugau

SEQ ID NO: 633036 - RNA, 22 nt, Artificial Sequence
  Synthetic
uaauaauauuaagucuuuugau

SEQ ID NO: 633037 - RNA, 23 nt, Artificial Sequence
  Synthetic
uuaauaauauuaagucuuuugau

SEQ ID NO: 633038 - RNA, 24 nt, Artificial Sequence
  Synthetic
cuuaauaauauuaagucuuuugau

SEQ ID NO: 633039 - RNA, 18 nt, Artificial Sequence
  Synthetic
uguauuuucauuuuugau

SEQ ID NO: 633040 - RNA, 19 nt, Artificial Sequence
  Synthetic
auguauuuucauuuuugau

SEQ ID NO: 633041 - RNA, 20 nt, Artificial Sequence
  Synthetic
gauguauuuucauuuuugau

SEQ ID NO: 633042 - RNA, 21 nt, Artificial Sequence
  Synthetic
agauguauuuucauuuuugau

SEQ ID NO: 633043 - RNA, 22 nt, Artificial Sequence
  Synthetic
aagauguauuuucauuuuugau

SEQ ID NO: 633044 - RNA, 23 nt, Artificial Sequence
  Synthetic
uaagauguauuuucauuuuugau

SEQ ID NO: 633045 - RNA, 24 nt, Artificial Sequence
  Synthetic
uuaagauguauuuucauuuuugau

SEQ ID NO: 633046 - RNA, 18 nt, Artificial Sequence
  Synthetic
aaacgaggacuuuuugau

SEQ ID NO: 633047 - RNA, 19 nt, Artificial Sequence
  Synthetic
uaaacgaggacuuuuugau

SEQ ID NO: 633048 - RNA, 20 nt, Artificial Sequence
  Synthetic
auaaacgaggacuuuuugau

SEQ ID NO: 633049 - RNA, 21 nt, Artificial Sequence
  Synthetic
gauaaacgaggacuuuuugau

SEQ ID NO: 633050 - RNA, 22 nt, Artificial Sequence
  Synthetic
agauaaacgaggacuuuuugau

SEQ ID NO: 633051 - RNA, 23 nt, Artificial Sequence
  Synthetic
uagauaaacgaggacuuuuugau

SEQ ID NO: 633052 - RNA, 24 nt, Artificial Sequence
  Synthetic
uuagauaaacgaggacuuuuugau

SEQ ID NO: 633053 - RNA, 18 nt, Artificial Sequence
  Synthetic
uaaucauuucuuuuugau

SEQ ID NO: 633054 - RNA, 19 nt, Artificial Sequence
  Synthetic
uuaaucauuucuuuuugau

SEQ ID NO: 633055 - RNA, 20 nt, Artificial Sequence
  Synthetic
uuuaaucauuucuuuuugau

SEQ ID NO: 633056 - RNA, 21 nt, Artificial Sequence
  Synthetic
uuuuaaucauuucuuuuugau

SEQ ID NO: 633057 - RNA, 22 nt, Artificial Sequence
  Synthetic
auuuuaaucauuucuuuuugau

SEQ ID NO: 633058 - RNA, 23 nt, Artificial Sequence
  Synthetic
cauuuuaaucauuucuuuuugau

SEQ ID NO: 633059 - RNA, 24 nt, Artificial Sequence
  Synthetic
ucauuuuaaucauuucuuuuugau

SEQ ID NO: 633060 - RNA, 18 nt, Artificial Sequence
  Synthetic
aauagcaugaaaaaauau

SEQ ID NO: 633061 - RNA, 19 nt, Artificial Sequence
  Synthetic
uaauagcaugaaaaaauau

SEQ ID NO: 633062 - RNA, 20 nt, Artificial Sequence
  Synthetic
auaauagcaugaaaaaauau

SEQ ID NO: 633063 - RNA, 21 nt, Artificial Sequence
  Synthetic
uauaauagcaugaaaaaauau

SEQ ID NO: 633064 - RNA, 22 nt, Artificial Sequence
  Synthetic
uuauaauagcaugaaaaaauau

SEQ ID NO: 633065 - RNA, 23 nt, Artificial Sequence
  Synthetic
cuuauaauagcaugaaaaaauau

SEQ ID NO: 633066 - RNA, 24 nt, Artificial Sequence
  Synthetic
acuuauaauagcaugaaaaaauau

SEQ ID NO: 633067 - RNA, 18 nt, Artificial Sequence
  Synthetic
aagaaucuagaaaaauau

SEQ ID NO: 633068 - RNA, 19 nt, Artificial Sequence
  Synthetic
gaagaaucuagaaaaauau

SEQ ID NO: 633069 - RNA, 20 nt, Artificial Sequence
  Synthetic
agaagaaucuagaaaaauau

SEQ ID NO: 633070 - RNA, 21 nt, Artificial Sequence
  Synthetic
gagaagaaucuagaaaaauau

SEQ ID NO: 633071 - RNA, 22 nt, Artificial Sequence
  Synthetic
ggagaagaaucuagaaaaauau

SEQ ID NO: 633072 - RNA, 23 nt, Artificial Sequence
  Synthetic
aggagaagaaucuagaaaaauau

SEQ ID NO: 633073 - RNA, 24 nt, Artificial Sequence
  Synthetic
uaggagaagaaucuagaaaaauau

SEQ ID NO: 633074 - RNA, 18 nt, Artificial Sequence
  Synthetic
guuuucaaguaaaaauau

SEQ ID NO: 633075 - RNA, 19 nt, Artificial Sequence
  Synthetic
uguuuucaaguaaaaauau

SEQ ID NO: 633076 - RNA, 20 nt, Artificial Sequence
  Synthetic
auguuuucaaguaaaaauau

SEQ ID NO: 633077 - RNA, 21 nt, Artificial Sequence
  Synthetic
uauguuuucaaguaaaaauau

SEQ ID NO: 633078 - RNA, 22 nt, Artificial Sequence
  Synthetic
guauguuuucaaguaaaaauau

SEQ ID NO: 633079 - RNA, 23 nt, Artificial Sequence
  Synthetic
uguauguuuucaaguaaaaauau

SEQ ID NO: 633080 - RNA, 24 nt, Artificial Sequence
  Synthetic
auguauguuuucaaguaaaaauau

SEQ ID NO: 633081 - RNA, 18 nt, Artificial Sequence
  Synthetic
uuauaagguuaaaaauau

SEQ ID NO: 633082 - RNA, 19 nt, Artificial Sequence
  Synthetic
cuuauaagguuaaaaauau

SEQ ID NO: 633083 - RNA, 20 nt, Artificial Sequence
  Synthetic
ucuuauaagguuaaaaauau

SEQ ID NO: 633084 - RNA, 21 nt, Artificial Sequence
  Synthetic
aucuuauaagguuaaaaauau

SEQ ID NO: 633085 - RNA, 22 nt, Artificial Sequence
  Synthetic
gaucuuauaagguuaaaaauau

SEQ ID NO: 633086 - RNA, 23 nt, Artificial Sequence
  Synthetic
ugaucuuauaagguuaaaaauau

SEQ ID NO: 633087 - RNA, 24 nt, Artificial Sequence
  Synthetic
cugaucuuauaagguuaaaaauau

SEQ ID NO: 633088 - RNA, 18 nt, Artificial Sequence
  Synthetic
uuuuuuacugcaaaauau

SEQ ID NO: 633089 - RNA, 19 nt, Artificial Sequence
  Synthetic
cuuuuuuacugcaaaauau

SEQ ID NO: 633090 - RNA, 20 nt, Artificial Sequence
  Synthetic
acuuuuuuacugcaaaauau

SEQ ID NO: 633091 - RNA, 21 nt, Artificial Sequence
  Synthetic
uacuuuuuuacugcaaaauau

SEQ ID NO: 633092 - RNA, 22 nt, Artificial Sequence
  Synthetic
cuacuuuuuuacugcaaaauau

SEQ ID NO: 633093 - RNA, 23 nt, Artificial Sequence
  Synthetic
acuacuuuuuuacugcaaaauau

SEQ ID NO: 633094 - RNA, 24 nt, Artificial Sequence
  Synthetic
cacuacuuuuuuacugcaaaauau

SEQ ID NO: 633095 - RNA, 18 nt, Artificial Sequence
  Synthetic
aauauugaaagaaaauau

SEQ ID NO: 633096 - RNA, 19 nt, Artificial Sequence
  Synthetic
uaauauugaaagaaaauau

SEQ ID NO: 633097 - RNA, 20 nt, Artificial Sequence
  Synthetic
uuaauauugaaagaaaauau

SEQ ID NO: 633098 - RNA, 21 nt, Artificial Sequence
  Synthetic
cuuaauauugaaagaaaauau

SEQ ID NO: 633099 - RNA, 22 nt, Artificial Sequence
  Synthetic
ucuuaauauugaaagaaaauau

SEQ ID NO: 633100 - RNA, 23 nt, Artificial Sequence
  Synthetic
aucuuaauauugaaagaaaauau

SEQ ID NO: 633101 - RNA, 24 nt, Artificial Sequence
  Synthetic
uaucuuaauauugaaagaaaauau

SEQ ID NO: 633102 - RNA, 18 nt, Artificial Sequence
  Synthetic
auuuaaccaagaaaauau

SEQ ID NO: 633103 - RNA, 19 nt, Artificial Sequence
  Synthetic
uauuuaaccaagaaaauau

SEQ ID NO: 633104 - RNA, 20 nt, Artificial Sequence
  Synthetic
cuauuuaaccaagaaaauau

SEQ ID NO: 633105 - RNA, 21 nt, Artificial Sequence
  Synthetic
ucuauuuaaccaagaaaauau

SEQ ID NO: 633106 - RNA, 22 nt, Artificial Sequence
  Synthetic
uucuauuuaaccaagaaaauau

SEQ ID NO: 633107 - RNA, 23 nt, Artificial Sequence
  Synthetic
auucuauuuaaccaagaaaauau

SEQ ID NO: 633108 - RNA, 24 nt, Artificial Sequence
  Synthetic
gauucuauuuaaccaagaaaauau

SEQ ID NO: 633109 - RNA, 18 nt, Artificial Sequence
  Synthetic
accagugggagaaaauau

SEQ ID NO: 633110 - RNA, 19 nt, Artificial Sequence
  Synthetic
gaccagugggagaaaauau

SEQ ID NO: 633111 - RNA, 20 nt, Artificial Sequence
  Synthetic
ugaccagugggagaaaauau

SEQ ID NO: 633112 - RNA, 21 nt, Artificial Sequence
  Synthetic
augaccagugggagaaaauau

SEQ ID NO: 633113 - RNA, 22 nt, Artificial Sequence
  Synthetic
aaugaccagugggagaaaauau

SEQ ID NO: 633114 - RNA, 23 nt, Artificial Sequence
  Synthetic
aaaugaccagugggagaaaauau

SEQ ID NO: 633115 - RNA, 24 nt, Artificial Sequence
  Synthetic
aaaaugaccagugggagaaaauau

SEQ ID NO: 633116 - RNA, 18 nt, Artificial Sequence
  Synthetic
uaaaaguaaugaaaauau

SEQ ID NO: 633117 - RNA, 19 nt, Artificial Sequence
  Synthetic
auaaaaguaaugaaaauau

SEQ ID NO: 633118 - RNA, 20 nt, Artificial Sequence
  Synthetic
uauaaaaguaaugaaaauau

SEQ ID NO: 633119 - RNA, 21 nt, Artificial Sequence
  Synthetic
cuauaaaaguaaugaaaauau

SEQ ID NO: 633120 - RNA, 22 nt, Artificial Sequence
  Synthetic
acuauaaaaguaaugaaaauau

SEQ ID NO: 633121 - RNA, 23 nt, Artificial Sequence
  Synthetic
aacuauaaaaguaaugaaaauau

SEQ ID NO: 633122 - RNA, 24 nt, Artificial Sequence
  Synthetic
gaacuauaaaaguaaugaaaauau

SEQ ID NO: 633123 - RNA, 18 nt, Artificial Sequence
  Synthetic
aaucgaagacuaaaauau

SEQ ID NO: 633124 - RNA, 19 nt, Artificial Sequence
  Synthetic
gaaucgaagacuaaaauau

SEQ ID NO: 633125 - RNA, 20 nt, Artificial Sequence
  Synthetic
agaaucgaagacuaaaauau

SEQ ID NO: 633126 - RNA, 21 nt, Artificial Sequence
  Synthetic
aagaaucgaagacuaaaauau

SEQ ID NO: 633127 - RNA, 22 nt, Artificial Sequence
  Synthetic
gaagaaucgaagacuaaaauau

SEQ ID NO: 633128 - RNA, 23 nt, Artificial Sequence
  Synthetic
ugaagaaucgaagacuaaaauau

SEQ ID NO: 633129 - RNA, 24 nt, Artificial Sequence
  Synthetic
cugaagaaucgaagacuaaaauau

SEQ ID NO: 633130 - RNA, 18 nt, Artificial Sequence
  Synthetic
augcuuugguuaaaauau

SEQ ID NO: 633131 - RNA, 19 nt, Artificial Sequence
  Synthetic
caugcuuugguuaaaauau

SEQ ID NO: 633132 - RNA, 20 nt, Artificial Sequence
  Synthetic
acaugcuuugguuaaaauau

SEQ ID NO: 633133 - RNA, 21 nt, Artificial Sequence
  Synthetic
uacaugcuuugguuaaaauau

SEQ ID NO: 633134 - RNA, 22 nt, Artificial Sequence
  Synthetic
auacaugcuuugguuaaaauau

SEQ ID NO: 633135 - RNA, 23 nt, Artificial Sequence
  Synthetic
gauacaugcuuugguuaaaauau

SEQ ID NO: 633136 - RNA, 24 nt, Artificial Sequence
  Synthetic
agauacaugcuuugguuaaaauau

SEQ ID NO: 633137 - RNA, 18 nt, Artificial Sequence
  Synthetic
uauuuuaucaacaaauau

SEQ ID NO: 633138 - RNA, 19 nt, Artificial Sequence
  Synthetic
guauuuuaucaacaaauau

SEQ ID NO: 633139 - RNA, 20 nt, Artificial Sequence
  Synthetic
uguauuuuaucaacaaauau

SEQ ID NO: 633140 - RNA, 21 nt, Artificial Sequence
  Synthetic
cuguauuuuaucaacaaauau

SEQ ID NO: 633141 - RNA, 22 nt, Artificial Sequence
  Synthetic
acuguauuuuaucaacaaauau

SEQ ID NO: 633142 - RNA, 23 nt, Artificial Sequence
  Synthetic
uacuguauuuuaucaacaaauau

SEQ ID NO: 633143 - RNA, 24 nt, Artificial Sequence
  Synthetic
uuacuguauuuuaucaacaaauau

SEQ ID NO: 633144 - RNA, 18 nt, Artificial Sequence
  Synthetic
uaauguuugaccaaauau

SEQ ID NO: 633145 - RNA, 19 nt, Artificial Sequence
  Synthetic
auaauguuugaccaaauau

SEQ ID NO: 633146 - RNA, 20 nt, Artificial Sequence
  Synthetic
aauaauguuugaccaaauau

SEQ ID NO: 633147 - RNA, 21 nt, Artificial Sequence
  Synthetic
gaauaauguuugaccaaauau

SEQ ID NO: 633148 - RNA, 22 nt, Artificial Sequence
  Synthetic
agaauaauguuugaccaaauau

SEQ ID NO: 633149 - RNA, 23 nt, Artificial Sequence
  Synthetic
cagaauaauguuugaccaaauau

SEQ ID NO: 633150 - RNA, 24 nt, Artificial Sequence
  Synthetic
ccagaauaauguuugaccaaauau

SEQ ID NO: 633151 - RNA, 18 nt, Artificial Sequence
  Synthetic
aauacgaauuccaaauau

SEQ ID NO: 633152 - RNA, 19 nt, Artificial Sequence
  Synthetic
gaauacgaauuccaaauau

SEQ ID NO: 633153 - RNA, 20 nt, Artificial Sequence
  Synthetic
agaauacgaauuccaaauau

SEQ ID NO: 633154 - RNA, 21 nt, Artificial Sequence
  Synthetic
gagaauacgaauuccaaauau

SEQ ID NO: 633155 - RNA, 22 nt, Artificial Sequence
  Synthetic
ugagaauacgaauuccaaauau

SEQ ID NO: 633156 - RNA, 23 nt, Artificial Sequence
  Synthetic
gugagaauacgaauuccaaauau

SEQ ID NO: 633157 - RNA, 24 nt, Artificial Sequence
  Synthetic
ggugagaauacgaauuccaaauau

SEQ ID NO: 633158 - RNA, 18 nt, Artificial Sequence
  Synthetic
uucaucuacagcaaauau

SEQ ID NO: 633159 - RNA, 19 nt, Artificial Sequence
  Synthetic
uuucaucuacagcaaauau

SEQ ID NO: 633160 - RNA, 20 nt, Artificial Sequence
  Synthetic
cuuucaucuacagcaaauau

SEQ ID NO: 633161 - RNA, 21 nt, Artificial Sequence
  Synthetic
acuuucaucuacagcaaauau

SEQ ID NO: 633162 - RNA, 22 nt, Artificial Sequence
  Synthetic
cacuuucaucuacagcaaauau

SEQ ID NO: 633163 - RNA, 23 nt, Artificial Sequence
  Synthetic
acacuuucaucuacagcaaauau

SEQ ID NO: 633164 - RNA, 24 nt, Artificial Sequence
  Synthetic
uacacuuucaucuacagcaaauau

SEQ ID NO: 633165 - RNA, 18 nt, Artificial Sequence
  Synthetic
agaacugagggcaaauau

SEQ ID NO: 633166 - RNA, 19 nt, Artificial Sequence
  Synthetic
gagaacugagggcaaauau

SEQ ID NO: 633167 - RNA, 20 nt, Artificial Sequence
  Synthetic
agagaacugagggcaaauau

SEQ ID NO: 633168 - RNA, 21 nt, Artificial Sequence
  Synthetic
cagagaacugagggcaaauau

SEQ ID NO: 633169 - RNA, 22 nt, Artificial Sequence
  Synthetic
acagagaacugagggcaaauau

SEQ ID NO: 633170 - RNA, 23 nt, Artificial Sequence
  Synthetic
gacagagaacugagggcaaauau

SEQ ID NO: 633171 - RNA, 24 nt, Artificial Sequence
  Synthetic
ggacagagaacugagggcaaauau

SEQ ID NO: 633172 - RNA, 18 nt, Artificial Sequence
  Synthetic
ugauuuacaugcaaauau

SEQ ID NO: 633173 - RNA, 19 nt, Artificial Sequence
  Synthetic
gugauuuacaugcaaauau

SEQ ID NO: 633174 - RNA, 20 nt, Artificial Sequence
  Synthetic
agugauuuacaugcaaauau

SEQ ID NO: 633175 - RNA, 21 nt, Artificial Sequence
  Synthetic
aagugauuuacaugcaaauau

SEQ ID NO: 633176 - RNA, 22 nt, Artificial Sequence
  Synthetic
aaagugauuuacaugcaaauau

SEQ ID NO: 633177 - RNA, 23 nt, Artificial Sequence
  Synthetic
aaaagugauuuacaugcaaauau

SEQ ID NO: 633178 - RNA, 24 nt, Artificial Sequence
  Synthetic
uaaaagugauuuacaugcaaauau

SEQ ID NO: 633179 - RNA, 18 nt, Artificial Sequence
  Synthetic
uuugaucauugcaaauau

SEQ ID NO: 633180 - RNA, 19 nt, Artificial Sequence
  Synthetic
uuuugaucauugcaaauau

SEQ ID NO: 633181 - RNA, 20 nt, Artificial Sequence
  Synthetic
auuuugaucauugcaaauau

SEQ ID NO: 633182 - RNA, 21 nt, Artificial Sequence
  Synthetic
cauuuugaucauugcaaauau

SEQ ID NO: 633183 - RNA, 22 nt, Artificial Sequence
  Synthetic
acauuuugaucauugcaaauau

SEQ ID NO: 633184 - RNA, 23 nt, Artificial Sequence
  Synthetic
cacauuuugaucauugcaaauau

SEQ ID NO: 633185 - RNA, 24 nt, Artificial Sequence
  Synthetic
ccacauuuugaucauugcaaauau

SEQ ID NO: 633186 - RNA, 18 nt, Artificial Sequence
  Synthetic
uaggaguauugcaaauau

SEQ ID NO: 633187 - RNA, 19 nt, Artificial Sequence
  Synthetic
auaggaguauugcaaauau

SEQ ID NO: 633188 - RNA, 20 nt, Artificial Sequence
  Synthetic
uauaggaguauugcaaauau

SEQ ID NO: 633189 - RNA, 21 nt, Artificial Sequence
  Synthetic
guauaggaguauugcaaauau

SEQ ID NO: 633190 - RNA, 22 nt, Artificial Sequence
  Synthetic
aguauaggaguauugcaaauau

SEQ ID NO: 633191 - RNA, 23 nt, Artificial Sequence
  Synthetic
caguauaggaguauugcaaauau

SEQ ID NO: 633192 - RNA, 24 nt, Artificial Sequence
  Synthetic
ucaguauaggaguauugcaaauau

SEQ ID NO: 633193 - RNA, 18 nt, Artificial Sequence
  Synthetic
aaucaaccagucaaauau

SEQ ID NO: 633194 - RNA, 19 nt, Artificial Sequence
  Synthetic
aaaucaaccagucaaauau

SEQ ID NO: 633195 - RNA, 20 nt, Artificial Sequence
  Synthetic
aaaaucaaccagucaaauau

SEQ ID NO: 633196 - RNA, 21 nt, Artificial Sequence
  Synthetic
aaaaaucaaccagucaaauau

SEQ ID NO: 633197 - RNA, 22 nt, Artificial Sequence
  Synthetic
caaaaaucaaccagucaaauau

SEQ ID NO: 633198 - RNA, 23 nt, Artificial Sequence
  Synthetic
acaaaaaucaaccagucaaauau

SEQ ID NO: 633199 - RNA, 24 nt, Artificial Sequence
  Synthetic
gacaaaaaucaaccagucaaauau

SEQ ID NO: 633200 - RNA, 18 nt, Artificial Sequence
  Synthetic
ugagacauguucaaauau

SEQ ID NO: 633201 - RNA, 19 nt, Artificial Sequence
  Synthetic
uugagacauguucaaauau

SEQ ID NO: 633202 - RNA, 20 nt, Artificial Sequence
  Synthetic
uuugagacauguucaaauau

SEQ ID NO: 633203 - RNA, 21 nt, Artificial Sequence
  Synthetic
cuuugagacauguucaaauau

SEQ ID NO: 633204 - RNA, 22 nt, Artificial Sequence
  Synthetic
ucuuugagacauguucaaauau

SEQ ID NO: 633205 - RNA, 23 nt, Artificial Sequence
  Synthetic
aucuuugagacauguucaaauau

SEQ ID NO: 633206 - RNA, 24 nt, Artificial Sequence
  Synthetic
caucuuugagacauguucaaauau

SEQ ID NO: 633207 - RNA, 18 nt, Artificial Sequence
  Synthetic
gacaaaagcaagaaauau

SEQ ID NO: 633208 - RNA, 19 nt, Artificial Sequence
  Synthetic
agacaaaagcaagaaauau

SEQ ID NO: 633209 - RNA, 20 nt, Artificial Sequence
  Synthetic
uagacaaaagcaagaaauau

SEQ ID NO: 633210 - RNA, 21 nt, Artificial Sequence
  Synthetic
cuagacaaaagcaagaaauau

SEQ ID NO: 633211 - RNA, 22 nt, Artificial Sequence
  Synthetic
ccuagacaaaagcaagaaauau

SEQ ID NO: 633212 - RNA, 23 nt, Artificial Sequence
  Synthetic
uccuagacaaaagcaagaaauau

SEQ ID NO: 633213 - RNA, 24 nt, Artificial Sequence
  Synthetic
uuccuagacaaaagcaagaaauau

SEQ ID NO: 633214 - RNA, 18 nt, Artificial Sequence
  Synthetic
uauaaaauuaagaaauau

SEQ ID NO: 633215 - RNA, 19 nt, Artificial Sequence
  Synthetic
auauaaaauuaagaaauau

SEQ ID NO: 633216 - RNA, 20 nt, Artificial Sequence
  Synthetic
cauauaaaauuaagaaauau

SEQ ID NO: 633217 - RNA, 21 nt, Artificial Sequence
  Synthetic
ucauauaaaauuaagaaauau

SEQ ID NO: 633218 - RNA, 22 nt, Artificial Sequence
  Synthetic
aucauauaaaauuaagaaauau

SEQ ID NO: 633219 - RNA, 23 nt, Artificial Sequence
  Synthetic
aaucauauaaaauuaagaaauau

SEQ ID NO: 633220 - RNA, 24 nt, Artificial Sequence
  Synthetic
aaaucauauaaaauuaagaaauau

SEQ ID NO: 633221 - RNA, 18 nt, Artificial Sequence
  Synthetic
uuuaauauucagaaauau

SEQ ID NO: 633222 - RNA, 19 nt, Artificial Sequence
  Synthetic
auuuaauauucagaaauau

SEQ ID NO: 633223 - RNA, 20 nt, Artificial Sequence
  Synthetic
aauuuaauauucagaaauau

SEQ ID NO: 633224 - RNA, 21 nt, Artificial Sequence
  Synthetic
uaauuuaauauucagaaauau

SEQ ID NO: 633225 - RNA, 22 nt, Artificial Sequence
  Synthetic
cuaauuuaauauucagaaauau

SEQ ID NO: 633226 - RNA, 23 nt, Artificial Sequence
  Synthetic
gcuaauuuaauauucagaaauau

SEQ ID NO: 633227 - RNA, 24 nt, Artificial Sequence
  Synthetic
agcuaauuuaauauucagaaauau

SEQ ID NO: 633228 - RNA, 18 nt, Artificial Sequence
  Synthetic
cgacuaccagagaaauau

SEQ ID NO: 633229 - RNA, 19 nt, Artificial Sequence
  Synthetic
gcgacuaccagagaaauau

SEQ ID NO: 633230 - RNA, 20 nt, Artificial Sequence
  Synthetic
agcgacuaccagagaaauau

SEQ ID NO: 633231 - RNA, 21 nt, Artificial Sequence
  Synthetic
uagcgacuaccagagaaauau

SEQ ID NO: 633232 - RNA, 22 nt, Artificial Sequence
  Synthetic
cuagcgacuaccagagaaauau

SEQ ID NO: 633233 - RNA, 23 nt, Artificial Sequence
  Synthetic
gcuagcgacuaccagagaaauau

SEQ ID NO: 633234 - RNA, 24 nt, Artificial Sequence
  Synthetic
agcuagcgacuaccagagaaauau

SEQ ID NO: 633235 - RNA, 18 nt, Artificial Sequence
  Synthetic
cgaaaugaaaggaaauau

SEQ ID NO: 633236 - RNA, 19 nt, Artificial Sequence
  Synthetic
gcgaaaugaaaggaaauau

SEQ ID NO: 633237 - RNA, 20 nt, Artificial Sequence
  Synthetic
agcgaaaugaaaggaaauau

SEQ ID NO: 633238 - RNA, 21 nt, Artificial Sequence
  Synthetic
uagcgaaaugaaaggaaauau

SEQ ID NO: 633239 - RNA, 22 nt, Artificial Sequence
  Synthetic
auagcgaaaugaaaggaaauau

SEQ ID NO: 633240 - RNA, 23 nt, Artificial Sequence
  Synthetic
uauagcgaaaugaaaggaaauau

SEQ ID NO: 633241 - RNA, 24 nt, Artificial Sequence
  Synthetic
guauagcgaaaugaaaggaaauau

SEQ ID NO: 633242 - RNA, 18 nt, Artificial Sequence
  Synthetic
ggaacucagaggaaauau

SEQ ID NO: 633243 - RNA, 19 nt, Artificial Sequence
  Synthetic
uggaacucagaggaaauau

SEQ ID NO: 633244 - RNA, 20 nt, Artificial Sequence
  Synthetic
cuggaacucagaggaaauau

SEQ ID NO: 633245 - RNA, 21 nt, Artificial Sequence
  Synthetic
ucuggaacucagaggaaauau

SEQ ID NO: 633246 - RNA, 22 nt, Artificial Sequence
  Synthetic
gucuggaacucagaggaaauau

SEQ ID NO: 633247 - RNA, 23 nt, Artificial Sequence
  Synthetic
ggucuggaacucagaggaaauau

SEQ ID NO: 633248 - RNA, 24 nt, Artificial Sequence
  Synthetic
uggucuggaacucagaggaaauau

SEQ ID NO: 633249 - RNA, 18 nt, Artificial Sequence
  Synthetic
ugaaguuuuaggaaauau

SEQ ID NO: 633250 - RNA, 19 nt, Artificial Sequence
  Synthetic
gugaaguuuuaggaaauau

SEQ ID NO: 633251 - RNA, 20 nt, Artificial Sequence
  Synthetic
agugaaguuuuaggaaauau

SEQ ID NO: 633252 - RNA, 21 nt, Artificial Sequence
  Synthetic
cagugaaguuuuaggaaauau

SEQ ID NO: 633253 - RNA, 22 nt, Artificial Sequence
  Synthetic
ucagugaaguuuuaggaaauau

SEQ ID NO: 633254 - RNA, 23 nt, Artificial Sequence
  Synthetic
uucagugaaguuuuaggaaauau

SEQ ID NO: 633255 - RNA, 24 nt, Artificial Sequence
  Synthetic
auucagugaaguuuuaggaaauau

SEQ ID NO: 633256 - RNA, 18 nt, Artificial Sequence
  Synthetic
gcacguaguaugaaauau

SEQ ID NO: 633257 - RNA, 19 nt, Artificial Sequence
  Synthetic
ugcacguaguaugaaauau

SEQ ID NO: 633258 - RNA, 20 nt, Artificial Sequence
  Synthetic
augcacguaguaugaaauau

SEQ ID NO: 633259 - RNA, 21 nt, Artificial Sequence
  Synthetic
aaugcacguaguaugaaauau

SEQ ID NO: 633260 - RNA, 22 nt, Artificial Sequence
  Synthetic
aaaugcacguaguaugaaauau

SEQ ID NO: 633261 - RNA, 23 nt, Artificial Sequence
  Synthetic
aaaaugcacguaguaugaaauau

SEQ ID NO: 633262 - RNA, 24 nt, Artificial Sequence
  Synthetic
uaaaaugcacguaguaugaaauau

SEQ ID NO: 633263 - RNA, 18 nt, Artificial Sequence
  Synthetic
aaauaaaaauugaaauau

SEQ ID NO: 633264 - RNA, 19 nt, Artificial Sequence
  Synthetic
aaaauaaaaauugaaauau

SEQ ID NO: 633265 - RNA, 20 nt, Artificial Sequence
  Synthetic
uaaaauaaaaauugaaauau

SEQ ID NO: 633266 - RNA, 21 nt, Artificial Sequence
  Synthetic
auaaaauaaaaauugaaauau

SEQ ID NO: 633267 - RNA, 22 nt, Artificial Sequence
  Synthetic
aauaaaauaaaaauugaaauau

SEQ ID NO: 633268 - RNA, 23 nt, Artificial Sequence
  Synthetic
aaauaaaauaaaaauugaaauau

SEQ ID NO: 633269 - RNA, 24 nt, Artificial Sequence
  Synthetic
aaaauaaaauaaaaauugaaauau

SEQ ID NO: 633270 - RNA, 18 nt, Artificial Sequence
  Synthetic
gagauuauuuugaaauau

SEQ ID NO: 633271 - RNA, 19 nt, Artificial Sequence
  Synthetic
ugagauuauuuugaaauau

SEQ ID NO: 633272 - RNA, 20 nt, Artificial Sequence
  Synthetic
uugagauuauuuugaaauau

SEQ ID NO: 633273 - RNA, 21 nt, Artificial Sequence
  Synthetic
uuugagauuauuuugaaauau

SEQ ID NO: 633274 - RNA, 22 nt, Artificial Sequence
  Synthetic
guuugagauuauuuugaaauau

SEQ ID NO: 633275 - RNA, 23 nt, Artificial Sequence
  Synthetic
aguuugagauuauuuugaaauau

SEQ ID NO: 633276 - RNA, 24 nt, Artificial Sequence
  Synthetic
aaguuugagauuauuuugaaauau

SEQ ID NO: 633277 - RNA, 18 nt, Artificial Sequence
  Synthetic
uuuauuuuuuugaaauau

SEQ ID NO: 633278 - RNA, 19 nt, Artificial Sequence
  Synthetic
uuuuauuuuuuugaaauau

SEQ ID NO: 633279 - RNA, 20 nt, Artificial Sequence
  Synthetic
guuuuauuuuuuugaaauau

SEQ ID NO: 633280 - RNA, 21 nt, Artificial Sequence
  Synthetic
gguuuuauuuuuuugaaauau

SEQ ID NO: 633281 - RNA, 22 nt, Artificial Sequence
  Synthetic
ugguuuuauuuuuuugaaauau

SEQ ID NO: 633282 - RNA, 23 nt, Artificial Sequence
  Synthetic
augguuuuauuuuuuugaaauau

SEQ ID NO: 633283 - RNA, 24 nt, Artificial Sequence
  Synthetic
aaugguuuuauuuuuuugaaauau

SEQ ID NO: 633284 - RNA, 18 nt, Artificial Sequence
  Synthetic
acgguuaaugcuaaauau

SEQ ID NO: 633285 - RNA, 19 nt, Artificial Sequence
  Synthetic
cacgguuaaugcuaaauau

SEQ ID NO: 633286 - RNA, 20 nt, Artificial Sequence
  Synthetic
acacgguuaaugcuaaauau

SEQ ID NO: 633287 - RNA, 21 nt, Artificial Sequence
  Synthetic
uacacgguuaaugcuaaauau

SEQ ID NO: 633288 - RNA, 22 nt, Artificial Sequence
  Synthetic
auacacgguuaaugcuaaauau

SEQ ID NO: 633289 - RNA, 23 nt, Artificial Sequence
  Synthetic
gauacacgguuaaugcuaaauau

SEQ ID NO: 633290 - RNA, 24 nt, Artificial Sequence
  Synthetic
ugauacacgguuaaugcuaaauau

SEQ ID NO: 633291 - RNA, 18 nt, Artificial Sequence
  Synthetic
acuucaauaucuaaauau

SEQ ID NO: 633292 - RNA, 19 nt, Artificial Sequence
  Synthetic
uacuucaauaucuaaauau

SEQ ID NO: 633293 - RNA, 20 nt, Artificial Sequence
  Synthetic
guacuucaauaucuaaauau

SEQ ID NO: 633294 - RNA, 21 nt, Artificial Sequence
  Synthetic
gguacuucaauaucuaaauau

SEQ ID NO: 633295 - RNA, 22 nt, Artificial Sequence
  Synthetic
ggguacuucaauaucuaaauau

SEQ ID NO: 633296 - RNA, 23 nt, Artificial Sequence
  Synthetic
aggguacuucaauaucuaaauau

SEQ ID NO: 633297 - RNA, 24 nt, Artificial Sequence
  Synthetic
aaggguacuucaauaucuaaauau

SEQ ID NO: 633298 - RNA, 18 nt, Artificial Sequence
  Synthetic
cuucaguuaaguaaauau

SEQ ID NO: 633299 - RNA, 19 nt, Artificial Sequence
  Synthetic
gcuucaguuaaguaaauau

SEQ ID NO: 633300 - RNA, 20 nt, Artificial Sequence
  Synthetic
ggcuucaguuaaguaaauau

SEQ ID NO: 633301 - RNA, 21 nt, Artificial Sequence
  Synthetic
gggcuucaguuaaguaaauau

SEQ ID NO: 633302 - RNA, 22 nt, Artificial Sequence
  Synthetic
agggcuucaguuaaguaaauau

SEQ ID NO: 633303 - RNA, 23 nt, Artificial Sequence
  Synthetic
cagggcuucaguuaaguaaauau

SEQ ID NO: 633304 - RNA, 24 nt, Artificial Sequence
  Synthetic
ucagggcuucaguuaaguaaauau

SEQ ID NO: 633305 - RNA, 18 nt, Artificial Sequence
  Synthetic
gcagauugcaguaaauau

SEQ ID NO: 633306 - RNA, 19 nt, Artificial Sequence
  Synthetic
ugcagauugcaguaaauau

SEQ ID NO: 633307 - RNA, 20 nt, Artificial Sequence
  Synthetic
uugcagauugcaguaaauau

SEQ ID NO: 633308 - RNA, 21 nt, Artificial Sequence
  Synthetic
uuugcagauugcaguaaauau

SEQ ID NO: 633309 - RNA, 22 nt, Artificial Sequence
  Synthetic
auuugcagauugcaguaaauau

SEQ ID NO: 633310 - RNA, 23 nt, Artificial Sequence
  Synthetic
cauuugcagauugcaguaaauau

SEQ ID NO: 633311 - RNA, 24 nt, Artificial Sequence
  Synthetic
acauuugcagauugcaguaaauau

SEQ ID NO: 633312 - RNA, 18 nt, Artificial Sequence
  Synthetic
auauauggacguaaauau

SEQ ID NO: 633313 - RNA, 19 nt, Artificial Sequence
  Synthetic
cauauauggacguaaauau

SEQ ID NO: 633314 - RNA, 20 nt, Artificial Sequence
  Synthetic
gcauauauggacguaaauau

SEQ ID NO: 633315 - RNA, 21 nt, Artificial Sequence
  Synthetic
agcauauauggacguaaauau

SEQ ID NO: 633316 - RNA, 22 nt, Artificial Sequence
  Synthetic
gagcauauauggacguaaauau

SEQ ID NO: 633317 - RNA, 23 nt, Artificial Sequence
  Synthetic
agagcauauauggacguaaauau

SEQ ID NO: 633318 - RNA, 24 nt, Artificial Sequence
  Synthetic
uagagcauauauggacguaaauau

SEQ ID NO: 633319 - RNA, 18 nt, Artificial Sequence
  Synthetic
gaaaauugggguaaauau

SEQ ID NO: 633320 - RNA, 19 nt, Artificial Sequence
  Synthetic
ggaaaauugggguaaauau

SEQ ID NO: 633321 - RNA, 20 nt, Artificial Sequence
  Synthetic
cggaaaauugggguaaauau

SEQ ID NO: 633322 - RNA, 21 nt, Artificial Sequence
  Synthetic
acggaaaauugggguaaauau

SEQ ID NO: 633323 - RNA, 22 nt, Artificial Sequence
  Synthetic
aacggaaaauugggguaaauau

SEQ ID NO: 633324 - RNA, 23 nt, Artificial Sequence
  Synthetic
caacggaaaauugggguaaauau

SEQ ID NO: 633325 - RNA, 24 nt, Artificial Sequence
  Synthetic
ccaacggaaaauugggguaaauau

SEQ ID NO: 633326 - RNA, 18 nt, Artificial Sequence
  Synthetic
ggcuggagauguaaauau

SEQ ID NO: 633327 - RNA, 19 nt, Artificial Sequence
  Synthetic
gggcuggagauguaaauau

SEQ ID NO: 633328 - RNA, 20 nt, Artificial Sequence
  Synthetic
agggcuggagauguaaauau

SEQ ID NO: 633329 - RNA, 21 nt, Artificial Sequence
  Synthetic
cagggcuggagauguaaauau

SEQ ID NO: 633330 - RNA, 22 nt, Artificial Sequence
  Synthetic
ucagggcuggagauguaaauau

SEQ ID NO: 633331 - RNA, 23 nt, Artificial Sequence
  Synthetic
uucagggcuggagauguaaauau

SEQ ID NO: 633332 - RNA, 24 nt, Artificial Sequence
  Synthetic
uuucagggcuggagauguaaauau

SEQ ID NO: 633333 - RNA, 18 nt, Artificial Sequence
  Synthetic
cauccucagauuaaauau

SEQ ID NO: 633334 - RNA, 19 nt, Artificial Sequence
  Synthetic
acauccucagauuaaauau

SEQ ID NO: 633335 - RNA, 20 nt, Artificial Sequence
  Synthetic
uacauccucagauuaaauau

SEQ ID NO: 633336 - RNA, 21 nt, Artificial Sequence
  Synthetic
guacauccucagauuaaauau

SEQ ID NO: 633337 - RNA, 22 nt, Artificial Sequence
  Synthetic
aguacauccucagauuaaauau

SEQ ID NO: 633338 - RNA, 23 nt, Artificial Sequence
  Synthetic
uaguacauccucagauuaaauau

SEQ ID NO: 633339 - RNA, 24 nt, Artificial Sequence
  Synthetic
cuaguacauccucagauuaaauau

SEQ ID NO: 633340 - RNA, 18 nt, Artificial Sequence
  Synthetic
cauuuucaccuuaaauau

SEQ ID NO: 633341 - RNA, 19 nt, Artificial Sequence
  Synthetic
gcauuuucaccuuaaauau

SEQ ID NO: 633342 - RNA, 20 nt, Artificial Sequence
  Synthetic
ugcauuuucaccuuaaauau

SEQ ID NO: 633343 - RNA, 21 nt, Artificial Sequence
  Synthetic
augcauuuucaccuuaaauau

SEQ ID NO: 633344 - RNA, 22 nt, Artificial Sequence
  Synthetic
caugcauuuucaccuuaaauau

SEQ ID NO: 633345 - RNA, 23 nt, Artificial Sequence
  Synthetic
acaugcauuuucaccuuaaauau

SEQ ID NO: 633346 - RNA, 24 nt, Artificial Sequence
  Synthetic
aacaugcauuuucaccuuaaauau

SEQ ID NO: 633347 - RNA, 18 nt, Artificial Sequence
  Synthetic
gcaucacccacacaauau

SEQ ID NO: 633348 - RNA, 19 nt, Artificial Sequence
  Synthetic
agcaucacccacacaauau

SEQ ID NO: 633349 - RNA, 20 nt, Artificial Sequence
  Synthetic
cagcaucacccacacaauau

SEQ ID NO: 633350 - RNA, 21 nt, Artificial Sequence
  Synthetic
acagcaucacccacacaauau

SEQ ID NO: 633351 - RNA, 22 nt, Artificial Sequence
  Synthetic
aacagcaucacccacacaauau

SEQ ID NO: 633352 - RNA, 23 nt, Artificial Sequence
  Synthetic
caacagcaucacccacacaauau

SEQ ID NO: 633353 - RNA, 24 nt, Artificial Sequence
  Synthetic
ccaacagcaucacccacacaauau

SEQ ID NO: 633354 - RNA, 18 nt, Artificial Sequence
  Synthetic
cucugaaagccacaauau

SEQ ID NO: 633355 - RNA, 19 nt, Artificial Sequence
  Synthetic
ccucugaaagccacaauau

SEQ ID NO: 633356 - RNA, 20 nt, Artificial Sequence
  Synthetic
cccucugaaagccacaauau

SEQ ID NO: 633357 - RNA, 21 nt, Artificial Sequence
  Synthetic
acccucugaaagccacaauau

SEQ ID NO: 633358 - RNA, 22 nt, Artificial Sequence
  Synthetic
uacccucugaaagccacaauau

SEQ ID NO: 633359 - RNA, 23 nt, Artificial Sequence
  Synthetic
uuacccucugaaagccacaauau

SEQ ID NO: 633360 - RNA, 24 nt, Artificial Sequence
  Synthetic
auuacccucugaaagccacaauau

SEQ ID NO: 633361 - RNA, 18 nt, Artificial Sequence
  Synthetic
uuugcaucauaccaauau

SEQ ID NO: 633362 - RNA, 19 nt, Artificial Sequence
  Synthetic
auuugcaucauaccaauau

SEQ ID NO: 633363 - RNA, 20 nt, Artificial Sequence
  Synthetic
aauuugcaucauaccaauau

SEQ ID NO: 633364 - RNA, 21 nt, Artificial Sequence
  Synthetic
aaauuugcaucauaccaauau

SEQ ID NO: 633365 - RNA, 22 nt, Artificial Sequence
  Synthetic
uaaauuugcaucauaccaauau

SEQ ID NO: 633366 - RNA, 23 nt, Artificial Sequence
  Synthetic
guaaauuugcaucauaccaauau

SEQ ID NO: 633367 - RNA, 24 nt, Artificial Sequence
  Synthetic
aguaaauuugcaucauaccaauau

SEQ ID NO: 633368 - RNA, 18 nt, Artificial Sequence
  Synthetic
uaaguacuuacccaauau

SEQ ID NO: 633369 - RNA, 19 nt, Artificial Sequence
  Synthetic
auaaguacuuacccaauau

SEQ ID NO: 633370 - RNA, 20 nt, Artificial Sequence
  Synthetic
aauaaguacuuacccaauau

SEQ ID NO: 633371 - RNA, 21 nt, Artificial Sequence
  Synthetic
caauaaguacuuacccaauau

SEQ ID NO: 633372 - RNA, 22 nt, Artificial Sequence
  Synthetic
ucaauaaguacuuacccaauau

SEQ ID NO: 633373 - RNA, 23 nt, Artificial Sequence
  Synthetic
aucaauaaguacuuacccaauau

SEQ ID NO: 633374 - RNA, 24 nt, Artificial Sequence
  Synthetic
uaucaauaaguacuuacccaauau

SEQ ID NO: 633375 - RNA, 18 nt, Artificial Sequence
  Synthetic
cauuagggaggccaauau

SEQ ID NO: 633376 - RNA, 19 nt, Artificial Sequence
  Synthetic
ccauuagggaggccaauau

SEQ ID NO: 633377 - RNA, 20 nt, Artificial Sequence
  Synthetic
cccauuagggaggccaauau

SEQ ID NO: 633378 - RNA, 21 nt, Artificial Sequence
  Synthetic
ucccauuagggaggccaauau

SEQ ID NO: 633379 - RNA, 22 nt, Artificial Sequence
  Synthetic
uucccauuagggaggccaauau

SEQ ID NO: 633380 - RNA, 23 nt, Artificial Sequence
  Synthetic
uuucccauuagggaggccaauau

SEQ ID NO: 633381 - RNA, 24 nt, Artificial Sequence
  Synthetic
cuuucccauuagggaggccaauau

SEQ ID NO: 633382 - RNA, 18 nt, Artificial Sequence
  Synthetic
uauagacuugcgcaauau

SEQ ID NO: 633383 - RNA, 19 nt, Artificial Sequence
  Synthetic
cuauagacuugcgcaauau

SEQ ID NO: 633384 - RNA, 20 nt, Artificial Sequence
  Synthetic
gcuauagacuugcgcaauau

SEQ ID NO: 633385 - RNA, 21 nt, Artificial Sequence
  Synthetic
ugcuauagacuugcgcaauau

SEQ ID NO: 633386 - RNA, 22 nt, Artificial Sequence
  Synthetic
gugcuauagacuugcgcaauau

SEQ ID NO: 633387 - RNA, 23 nt, Artificial Sequence
  Synthetic
agugcuauagacuugcgcaauau

SEQ ID NO: 633388 - RNA, 24 nt, Artificial Sequence
  Synthetic
cagugcuauagacuugcgcaauau

SEQ ID NO: 633389 - RNA, 18 nt, Artificial Sequence
  Synthetic
gcguuucaucugcaauau

SEQ ID NO: 633390 - RNA, 19 nt, Artificial Sequence
  Synthetic
ugcguuucaucugcaauau

SEQ ID NO: 633391 - RNA, 20 nt, Artificial Sequence
  Synthetic
uugcguuucaucugcaauau

SEQ ID NO: 633392 - RNA, 21 nt, Artificial Sequence
  Synthetic
uuugcguuucaucugcaauau

SEQ ID NO: 633393 - RNA, 22 nt, Artificial Sequence
  Synthetic
auuugcguuucaucugcaauau

SEQ ID NO: 633394 - RNA, 23 nt, Artificial Sequence
  Synthetic
aauuugcguuucaucugcaauau

SEQ ID NO: 633395 - RNA, 24 nt, Artificial Sequence
  Synthetic
caauuugcguuucaucugcaauau

SEQ ID NO: 633396 - RNA, 18 nt, Artificial Sequence
  Synthetic
uguucugguuugcaauau

SEQ ID NO: 633397 - RNA, 19 nt, Artificial Sequence
  Synthetic
cuguucugguuugcaauau

SEQ ID NO: 633398 - RNA, 20 nt, Artificial Sequence
  Synthetic
acuguucugguuugcaauau

SEQ ID NO: 633399 - RNA, 21 nt, Artificial Sequence
  Synthetic
gacuguucugguuugcaauau

SEQ ID NO: 633400 - RNA, 22 nt, Artificial Sequence
  Synthetic
agacuguucugguuugcaauau

SEQ ID NO: 633401 - RNA, 23 nt, Artificial Sequence
  Synthetic
cagacuguucugguuugcaauau

SEQ ID NO: 633402 - RNA, 24 nt, Artificial Sequence
  Synthetic
gcagacuguucugguuugcaauau

SEQ ID NO: 633403 - RNA, 18 nt, Artificial Sequence
  Synthetic
aaauuugauccucaauau

SEQ ID NO: 633404 - RNA, 19 nt, Artificial Sequence
  Synthetic
gaaauuugauccucaauau

SEQ ID NO: 633405 - RNA, 20 nt, Artificial Sequence
  Synthetic
ugaaauuugauccucaauau

SEQ ID NO: 633406 - RNA, 21 nt, Artificial Sequence
  Synthetic
uugaaauuugauccucaauau

SEQ ID NO: 633407 - RNA, 22 nt, Artificial Sequence
  Synthetic
guugaaauuugauccucaauau

SEQ ID NO: 633408 - RNA, 23 nt, Artificial Sequence
  Synthetic
uguugaaauuugauccucaauau

SEQ ID NO: 633409 - RNA, 24 nt, Artificial Sequence
  Synthetic
auguugaaauuugauccucaauau

SEQ ID NO: 633410 - RNA, 18 nt, Artificial Sequence
  Synthetic
aaauccaucagucaauau

SEQ ID NO: 633411 - RNA, 19 nt, Artificial Sequence
  Synthetic
uaaauccaucagucaauau

SEQ ID NO: 633412 - RNA, 20 nt, Artificial Sequence
  Synthetic
auaaauccaucagucaauau

SEQ ID NO: 633413 - RNA, 21 nt, Artificial Sequence
  Synthetic
uauaaauccaucagucaauau

SEQ ID NO: 633414 - RNA, 22 nt, Artificial Sequence
  Synthetic
uuauaaauccaucagucaauau

SEQ ID NO: 633415 - RNA, 23 nt, Artificial Sequence
  Synthetic
auuauaaauccaucagucaauau

SEQ ID NO: 633416 - RNA, 24 nt, Artificial Sequence
  Synthetic
aauuauaaauccaucagucaauau

SEQ ID NO: 633417 - RNA, 18 nt, Artificial Sequence
  Synthetic
aauucacccugucaauau

SEQ ID NO: 633418 - RNA, 19 nt, Artificial Sequence
  Synthetic
aaauucacccugucaauau

SEQ ID NO: 633419 - RNA, 20 nt, Artificial Sequence
  Synthetic
caaauucacccugucaauau

SEQ ID NO: 633420 - RNA, 21 nt, Artificial Sequence
  Synthetic
acaaauucacccugucaauau

SEQ ID NO: 633421 - RNA, 22 nt, Artificial Sequence
  Synthetic
cacaaauucacccugucaauau

SEQ ID NO: 633422 - RNA, 23 nt, Artificial Sequence
  Synthetic
acacaaauucacccugucaauau

SEQ ID NO: 633423 - RNA, 24 nt, Artificial Sequence
  Synthetic
cacacaaauucacccugucaauau

SEQ ID NO: 633424 - RNA, 18 nt, Artificial Sequence
  Synthetic
aacuuaaauauucaauau

SEQ ID NO: 633425 - RNA, 19 nt, Artificial Sequence
  Synthetic
caacuuaaauauucaauau

SEQ ID NO: 633426 - RNA, 20 nt, Artificial Sequence
  Synthetic
acaacuuaaauauucaauau

SEQ ID NO: 633427 - RNA, 21 nt, Artificial Sequence
  Synthetic
aacaacuuaaauauucaauau

SEQ ID NO: 633428 - RNA, 22 nt, Artificial Sequence
  Synthetic
aaacaacuuaaauauucaauau

SEQ ID NO: 633429 - RNA, 23 nt, Artificial Sequence
  Synthetic
gaaacaacuuaaauauucaauau

SEQ ID NO: 633430 - RNA, 24 nt, Artificial Sequence
  Synthetic
agaaacaacuuaaauauucaauau

SEQ ID NO: 633431 - RNA, 18 nt, Artificial Sequence
  Synthetic
uacacauggaaagaauau

SEQ ID NO: 633432 - RNA, 19 nt, Artificial Sequence
  Synthetic
cuacacauggaaagaauau

SEQ ID NO: 633433 - RNA, 20 nt, Artificial Sequence
  Synthetic
acuacacauggaaagaauau

SEQ ID NO: 633434 - RNA, 21 nt, Artificial Sequence
  Synthetic
uacuacacauggaaagaauau

SEQ ID NO: 633435 - RNA, 22 nt, Artificial Sequence
  Synthetic
auacuacacauggaaagaauau

SEQ ID NO: 633436 - RNA, 23 nt, Artificial Sequence
  Synthetic
aauacuacacauggaaagaauau

SEQ ID NO: 633437 - RNA, 24 nt, Artificial Sequence
  Synthetic
uaauacuacacauggaaagaauau

SEQ ID NO: 633438 - RNA, 18 nt, Artificial Sequence
  Synthetic
ugauuggauaaagaauau

SEQ ID NO: 633439 - RNA, 19 nt, Artificial Sequence
  Synthetic
augauuggauaaagaauau

SEQ ID NO: 633440 - RNA, 20 nt, Artificial Sequence
  Synthetic
gaugauuggauaaagaauau

SEQ ID NO: 633441 - RNA, 21 nt, Artificial Sequence
  Synthetic
agaugauuggauaaagaauau

SEQ ID NO: 633442 - RNA, 22 nt, Artificial Sequence
  Synthetic
cagaugauuggauaaagaauau

SEQ ID NO: 633443 - RNA, 23 nt, Artificial Sequence
  Synthetic
acagaugauuggauaaagaauau

SEQ ID NO: 633444 - RNA, 24 nt, Artificial Sequence
  Synthetic
aacagaugauuggauaaagaauau

SEQ ID NO: 633445 - RNA, 18 nt, Artificial Sequence
  Synthetic
aauuaagguaaagaauau

SEQ ID NO: 633446 - RNA, 19 nt, Artificial Sequence
  Synthetic
gaauuaagguaaagaauau

SEQ ID NO: 633447 - RNA, 20 nt, Artificial Sequence
  Synthetic
ggaauuaagguaaagaauau

SEQ ID NO: 633448 - RNA, 21 nt, Artificial Sequence
  Synthetic
gggaauuaagguaaagaauau

SEQ ID NO: 633449 - RNA, 22 nt, Artificial Sequence
  Synthetic
ugggaauuaagguaaagaauau

SEQ ID NO: 633450 - RNA, 23 nt, Artificial Sequence
  Synthetic
uugggaauuaagguaaagaauau

SEQ ID NO: 633451 - RNA, 24 nt, Artificial Sequence
  Synthetic
cuugggaauuaagguaaagaauau

SEQ ID NO: 633452 - RNA, 18 nt, Artificial Sequence
  Synthetic
cuaaaaauuaaagaauau

SEQ ID NO: 633453 - RNA, 19 nt, Artificial Sequence
  Synthetic
ccuaaaaauuaaagaauau

SEQ ID NO: 633454 - RNA, 20 nt, Artificial Sequence
  Synthetic
uccuaaaaauuaaagaauau

SEQ ID NO: 633455 - RNA, 21 nt, Artificial Sequence
  Synthetic
auccuaaaaauuaaagaauau

SEQ ID NO: 633456 - RNA, 22 nt, Artificial Sequence
  Synthetic
uauccuaaaaauuaaagaauau

SEQ ID NO: 633457 - RNA, 23 nt, Artificial Sequence
  Synthetic
uuauccuaaaaauuaaagaauau

SEQ ID NO: 633458 - RNA, 24 nt, Artificial Sequence
  Synthetic
auuauccuaaaaauuaaagaauau

SEQ ID NO: 633459 - RNA, 18 nt, Artificial Sequence
  Synthetic
uaccaaaucacagaauau

SEQ ID NO: 633460 - RNA, 19 nt, Artificial Sequence
  Synthetic
uuaccaaaucacagaauau

SEQ ID NO: 633461 - RNA, 20 nt, Artificial Sequence
  Synthetic
auuaccaaaucacagaauau

SEQ ID NO: 633462 - RNA, 21 nt, Artificial Sequence
  Synthetic
aauuaccaaaucacagaauau

SEQ ID NO: 633463 - RNA, 22 nt, Artificial Sequence
  Synthetic
aaauuaccaaaucacagaauau

SEQ ID NO: 633464 - RNA, 23 nt, Artificial Sequence
  Synthetic
gaaauuaccaaaucacagaauau

SEQ ID NO: 633465 - RNA, 24 nt, Artificial Sequence
  Synthetic
ggaaauuaccaaaucacagaauau

SEQ ID NO: 633466 - RNA, 18 nt, Artificial Sequence
  Synthetic
aaagcaguaccagaauau

SEQ ID NO: 633467 - RNA, 19 nt, Artificial Sequence
  Synthetic
caaagcaguaccagaauau

SEQ ID NO: 633468 - RNA, 20 nt, Artificial Sequence
  Synthetic
ucaaagcaguaccagaauau

SEQ ID NO: 633469 - RNA, 21 nt, Artificial Sequence
  Synthetic
aucaaagcaguaccagaauau

SEQ ID NO: 633470 - RNA, 22 nt, Artificial Sequence
  Synthetic
aaucaaagcaguaccagaauau

SEQ ID NO: 633471 - RNA, 23 nt, Artificial Sequence
  Synthetic
aaaucaaagcaguaccagaauau

SEQ ID NO: 633472 - RNA, 24 nt, Artificial Sequence
  Synthetic
aaaaucaaagcaguaccagaauau

SEQ ID NO: 633473 - RNA, 18 nt, Artificial Sequence
  Synthetic
auuagagaaggagaauau

SEQ ID NO: 633474 - RNA, 19 nt, Artificial Sequence
  Synthetic
aauuagagaaggagaauau

SEQ ID NO: 633475 - RNA, 20 nt, Artificial Sequence
  Synthetic
caauuagagaaggagaauau

SEQ ID NO: 633476 - RNA, 21 nt, Artificial Sequence
  Synthetic
acaauuagagaaggagaauau

SEQ ID NO: 633477 - RNA, 22 nt, Artificial Sequence
  Synthetic
aacaauuagagaaggagaauau

SEQ ID NO: 633478 - RNA, 23 nt, Artificial Sequence
  Synthetic
aaacaauuagagaaggagaauau

SEQ ID NO: 633479 - RNA, 24 nt, Artificial Sequence
  Synthetic
caaacaauuagagaaggagaauau

SEQ ID NO: 633480 - RNA, 18 nt, Artificial Sequence
  Synthetic
ugugauaaaauagaauau

SEQ ID NO: 633481 - RNA, 19 nt, Artificial Sequence
  Synthetic
augugauaaaauagaauau

SEQ ID NO: 633482 - RNA, 20 nt, Artificial Sequence
  Synthetic
aaugugauaaaauagaauau

SEQ ID NO: 633483 - RNA, 21 nt, Artificial Sequence
  Synthetic
aaaugugauaaaauagaauau

SEQ ID NO: 633484 - RNA, 22 nt, Artificial Sequence
  Synthetic
uaaaugugauaaaauagaauau

SEQ ID NO: 633485 - RNA, 23 nt, Artificial Sequence
  Synthetic
auaaaugugauaaaauagaauau

SEQ ID NO: 633486 - RNA, 24 nt, Artificial Sequence
  Synthetic
uauaaaugugauaaaauagaauau

SEQ ID NO: 633487 - RNA, 18 nt, Artificial Sequence
  Synthetic
gauugacaaauagaauau

SEQ ID NO: 633488 - RNA, 19 nt, Artificial Sequence
  Synthetic
ugauugacaaauagaauau

SEQ ID NO: 633489 - RNA, 20 nt, Artificial Sequence
  Synthetic
cugauugacaaauagaauau

SEQ ID NO: 633490 - RNA, 21 nt, Artificial Sequence
  Synthetic
acugauugacaaauagaauau

SEQ ID NO: 633491 - RNA, 22 nt, Artificial Sequence
  Synthetic
cacugauugacaaauagaauau

SEQ ID NO: 633492 - RNA, 23 nt, Artificial Sequence
  Synthetic
ucacugauugacaaauagaauau

SEQ ID NO: 633493 - RNA, 24 nt, Artificial Sequence
  Synthetic
gucacugauugacaaauagaauau

SEQ ID NO: 633494 - RNA, 18 nt, Artificial Sequence
  Synthetic
cacaaaccauuagaauau

SEQ ID NO: 633495 - RNA, 19 nt, Artificial Sequence
  Synthetic
acacaaaccauuagaauau

SEQ ID NO: 633496 - RNA, 20 nt, Artificial Sequence
  Synthetic
uacacaaaccauuagaauau

SEQ ID NO: 633497 - RNA, 21 nt, Artificial Sequence
  Synthetic
uuacacaaaccauuagaauau

SEQ ID NO: 633498 - RNA, 22 nt, Artificial Sequence
  Synthetic
auuacacaaaccauuagaauau

SEQ ID NO: 633499 - RNA, 23 nt, Artificial Sequence
  Synthetic
cauuacacaaaccauuagaauau

SEQ ID NO: 633500 - RNA, 24 nt, Artificial Sequence
  Synthetic
ucauuacacaaaccauuagaauau

SEQ ID NO: 633501 - RNA, 18 nt, Artificial Sequence
  Synthetic
aaugagcaauucgaauau

SEQ ID NO: 633502 - RNA, 19 nt, Artificial Sequence
  Synthetic
aaaugagcaauucgaauau

SEQ ID NO: 633503 - RNA, 20 nt, Artificial Sequence
  Synthetic
aaaaugagcaauucgaauau

SEQ ID NO: 633504 - RNA, 21 nt, Artificial Sequence
  Synthetic
aaaaaugagcaauucgaauau

SEQ ID NO: 633505 - RNA, 22 nt, Artificial Sequence
  Synthetic
gaaaaaugagcaauucgaauau

SEQ ID NO: 633506 - RNA, 23 nt, Artificial Sequence
  Synthetic
agaaaaaugagcaauucgaauau

SEQ ID NO: 633507 - RNA, 24 nt, Artificial Sequence
  Synthetic
aagaaaaaugagcaauucgaauau

SEQ ID NO: 633508 - RNA, 18 nt, Artificial Sequence
  Synthetic
guaaccuuggaggaauau

SEQ ID NO: 633509 - RNA, 19 nt, Artificial Sequence
  Synthetic
aguaaccuuggaggaauau

SEQ ID NO: 633510 - RNA, 20 nt, Artificial Sequence
  Synthetic
uaguaaccuuggaggaauau

SEQ ID NO: 633511 - RNA, 21 nt, Artificial Sequence
  Synthetic
cuaguaaccuuggaggaauau

SEQ ID NO: 633512 - RNA, 22 nt, Artificial Sequence
  Synthetic
acuaguaaccuuggaggaauau

SEQ ID NO: 633513 - RNA, 23 nt, Artificial Sequence
  Synthetic
aacuaguaaccuuggaggaauau

SEQ ID NO: 633514 - RNA, 24 nt, Artificial Sequence
  Synthetic
uaacuaguaaccuuggaggaauau

SEQ ID NO: 633515 - RNA, 18 nt, Artificial Sequence
  Synthetic
auaaaugaguaggaauau

SEQ ID NO: 633516 - RNA, 19 nt, Artificial Sequence
  Synthetic
gauaaaugaguaggaauau

SEQ ID NO: 633517 - RNA, 20 nt, Artificial Sequence
  Synthetic
ugauaaaugaguaggaauau

SEQ ID NO: 633518 - RNA, 21 nt, Artificial Sequence
  Synthetic
uugauaaaugaguaggaauau

SEQ ID NO: 633519 - RNA, 22 nt, Artificial Sequence
  Synthetic
cuugauaaaugaguaggaauau

SEQ ID NO: 633520 - RNA, 23 nt, Artificial Sequence
  Synthetic
ccuugauaaaugaguaggaauau

SEQ ID NO: 633521 - RNA, 24 nt, Artificial Sequence
  Synthetic
cccuugauaaaugaguaggaauau

SEQ ID NO: 633522 - RNA, 18 nt, Artificial Sequence
  Synthetic
ugugcacggagggaauau

SEQ ID NO: 633523 - RNA, 19 nt, Artificial Sequence
  Synthetic
cugugcacggagggaauau

SEQ ID NO: 633524 - RNA, 20 nt, Artificial Sequence
  Synthetic
ccugugcacggagggaauau

SEQ ID NO: 633525 - RNA, 21 nt, Artificial Sequence
  Synthetic
gccugugcacggagggaauau

SEQ ID NO: 633526 - RNA, 22 nt, Artificial Sequence
  Synthetic
ugccugugcacggagggaauau

SEQ ID NO: 633527 - RNA, 23 nt, Artificial Sequence
  Synthetic
gugccugugcacggagggaauau

SEQ ID NO: 633528 - RNA, 24 nt, Artificial Sequence
  Synthetic
agugccugugcacggagggaauau

SEQ ID NO: 633529 - RNA, 18 nt, Artificial Sequence
  Synthetic
auuuuccuaggggaauau

SEQ ID NO: 633530 - RNA, 19 nt, Artificial Sequence
  Synthetic
aauuuuccuaggggaauau

SEQ ID NO: 633531 - RNA, 20 nt, Artificial Sequence
  Synthetic
gaauuuuccuaggggaauau

SEQ ID NO: 633532 - RNA, 21 nt, Artificial Sequence
  Synthetic
ugaauuuuccuaggggaauau

SEQ ID NO: 633533 - RNA, 22 nt, Artificial Sequence
  Synthetic
augaauuuuccuaggggaauau

SEQ ID NO: 633534 - RNA, 23 nt, Artificial Sequence
  Synthetic
uaugaauuuuccuaggggaauau

SEQ ID NO: 633535 - RNA, 24 nt, Artificial Sequence
  Synthetic
cuaugaauuuuccuaggggaauau

SEQ ID NO: 633536 - RNA, 18 nt, Artificial Sequence
  Synthetic
uacucaaaaguggaauau

SEQ ID NO: 633537 - RNA, 19 nt, Artificial Sequence
  Synthetic
auacucaaaaguggaauau

SEQ ID NO: 633538 - RNA, 20 nt, Artificial Sequence
  Synthetic
cauacucaaaaguggaauau

SEQ ID NO: 633539 - RNA, 21 nt, Artificial Sequence
  Synthetic
ccauacucaaaaguggaauau

SEQ ID NO: 633540 - RNA, 22 nt, Artificial Sequence
  Synthetic
accauacucaaaaguggaauau

SEQ ID NO: 633541 - RNA, 23 nt, Artificial Sequence
  Synthetic
aaccauacucaaaaguggaauau

SEQ ID NO: 633542 - RNA, 24 nt, Artificial Sequence
  Synthetic
aaaccauacucaaaaguggaauau

SEQ ID NO: 633543 - RNA, 18 nt, Artificial Sequence
  Synthetic
aaugagcaaaaugaauau

SEQ ID NO: 633544 - RNA, 19 nt, Artificial Sequence
  Synthetic
uaaugagcaaaaugaauau

SEQ ID NO: 633545 - RNA, 20 nt, Artificial Sequence
  Synthetic
cuaaugagcaaaaugaauau

SEQ ID NO: 633546 - RNA, 21 nt, Artificial Sequence
  Synthetic
gcuaaugagcaaaaugaauau

SEQ ID NO: 633547 - RNA, 22 nt, Artificial Sequence
  Synthetic
ugcuaaugagcaaaaugaauau

SEQ ID NO: 633548 - RNA, 23 nt, Artificial Sequence
  Synthetic
uugcuaaugagcaaaaugaauau

SEQ ID NO: 633549 - RNA, 24 nt, Artificial Sequence
  Synthetic
cuugcuaaugagcaaaaugaauau

SEQ ID NO: 633550 - RNA, 18 nt, Artificial Sequence
  Synthetic
aggaguaaacgugaauau

SEQ ID NO: 633551 - RNA, 19 nt, Artificial Sequence
  Synthetic
aaggaguaaacgugaauau

SEQ ID NO: 633552 - RNA, 20 nt, Artificial Sequence
  Synthetic
uaaggaguaaacgugaauau

SEQ ID NO: 633553 - RNA, 21 nt, Artificial Sequence
  Synthetic
guaaggaguaaacgugaauau

SEQ ID NO: 633554 - RNA, 22 nt, Artificial Sequence
  Synthetic
aguaaggaguaaacgugaauau

SEQ ID NO: 633555 - RNA, 23 nt, Artificial Sequence
  Synthetic
aaguaaggaguaaacgugaauau

SEQ ID NO: 633556 - RNA, 24 nt, Artificial Sequence
  Synthetic
aaaguaaggaguaaacgugaauau

SEQ ID NO: 633557 - RNA, 18 nt, Artificial Sequence
  Synthetic
aaaacaggcauugaauau

SEQ ID NO: 633558 - RNA, 19 nt, Artificial Sequence
  Synthetic
uaaaacaggcauugaauau

SEQ ID NO: 633559 - RNA, 20 nt, Artificial Sequence
  Synthetic
uuaaaacaggcauugaauau

SEQ ID NO: 633560 - RNA, 21 nt, Artificial Sequence
  Synthetic
auuaaaacaggcauugaauau

SEQ ID NO: 633561 - RNA, 22 nt, Artificial Sequence
  Synthetic
uauuaaaacaggcauugaauau

SEQ ID NO: 633562 - RNA, 23 nt, Artificial Sequence
  Synthetic
auauuaaaacaggcauugaauau

SEQ ID NO: 633563 - RNA, 24 nt, Artificial Sequence
  Synthetic
uauauuaaaacaggcauugaauau

SEQ ID NO: 633564 - RNA, 18 nt, Artificial Sequence
  Synthetic
uauuuucuuuuugaauau

SEQ ID NO: 633565 - RNA, 19 nt, Artificial Sequence
  Synthetic
auauuuucuuuuugaauau

SEQ ID NO: 633566 - RNA, 20 nt, Artificial Sequence
  Synthetic
aauauuuucuuuuugaauau

SEQ ID NO: 633567 - RNA, 21 nt, Artificial Sequence
  Synthetic
gaauauuuucuuuuugaauau

SEQ ID NO: 633568 - RNA, 22 nt, Artificial Sequence
  Synthetic
agaauauuuucuuuuugaauau

SEQ ID NO: 633569 - RNA, 23 nt, Artificial Sequence
  Synthetic
gagaauauuuucuuuuugaauau

SEQ ID NO: 633570 - RNA, 24 nt, Artificial Sequence
  Synthetic
ggagaauauuuucuuuuugaauau

SEQ ID NO: 633571 - RNA, 18 nt, Artificial Sequence
  Synthetic
ccacuuagaaaauaauau

SEQ ID NO: 633572 - RNA, 19 nt, Artificial Sequence
  Synthetic
gccacuuagaaaauaauau

SEQ ID NO: 633573 - RNA, 20 nt, Artificial Sequence
  Synthetic
ugccacuuagaaaauaauau

SEQ ID NO: 633574 - RNA, 21 nt, Artificial Sequence
  Synthetic
cugccacuuagaaaauaauau

SEQ ID NO: 633575 - RNA, 22 nt, Artificial Sequence
  Synthetic
acugccacuuagaaaauaauau

SEQ ID NO: 633576 - RNA, 23 nt, Artificial Sequence
  Synthetic
cacugccacuuagaaaauaauau

SEQ ID NO: 633577 - RNA, 24 nt, Artificial Sequence
  Synthetic
ccacugccacuuagaaaauaauau

SEQ ID NO: 633578 - RNA, 18 nt, Artificial Sequence
  Synthetic
gugcuacagaaauaauau

SEQ ID NO: 633579 - RNA, 19 nt, Artificial Sequence
  Synthetic
ggugcuacagaaauaauau

SEQ ID NO: 633580 - RNA, 20 nt, Artificial Sequence
  Synthetic
uggugcuacagaaauaauau

SEQ ID NO: 633581 - RNA, 21 nt, Artificial Sequence
  Synthetic
uuggugcuacagaaauaauau

SEQ ID NO: 633582 - RNA, 22 nt, Artificial Sequence
  Synthetic
auuggugcuacagaaauaauau

SEQ ID NO: 633583 - RNA, 23 nt, Artificial Sequence
  Synthetic
aauuggugcuacagaaauaauau

SEQ ID NO: 633584 - RNA, 24 nt, Artificial Sequence
  Synthetic
aaauuggugcuacagaaauaauau

SEQ ID NO: 633585 - RNA, 18 nt, Artificial Sequence
  Synthetic
uagaaaaugaaauaauau

SEQ ID NO: 633586 - RNA, 19 nt, Artificial Sequence
  Synthetic
uuagaaaaugaaauaauau

SEQ ID NO: 633587 - RNA, 20 nt, Artificial Sequence
  Synthetic
cuuagaaaaugaaauaauau

SEQ ID NO: 633588 - RNA, 21 nt, Artificial Sequence
  Synthetic
ccuuagaaaaugaaauaauau

SEQ ID NO: 633589 - RNA, 22 nt, Artificial Sequence
  Synthetic
accuuagaaaaugaaauaauau

SEQ ID NO: 633590 - RNA, 23 nt, Artificial Sequence
  Synthetic
aaccuuagaaaaugaaauaauau

SEQ ID NO: 633591 - RNA, 24 nt, Artificial Sequence
  Synthetic
gaaccuuagaaaaugaaauaauau

SEQ ID NO: 633592 - RNA, 18 nt, Artificial Sequence
  Synthetic
uguugugaaacauaauau

SEQ ID NO: 633593 - RNA, 19 nt, Artificial Sequence
  Synthetic
uuguugugaaacauaauau

SEQ ID NO: 633594 - RNA, 20 nt, Artificial Sequence
  Synthetic
uuuguugugaaacauaauau

SEQ ID NO: 633595 - RNA, 21 nt, Artificial Sequence
  Synthetic
uuuuguugugaaacauaauau

SEQ ID NO: 633596 - RNA, 22 nt, Artificial Sequence
  Synthetic
uuuuuguugugaaacauaauau

SEQ ID NO: 633597 - RNA, 23 nt, Artificial Sequence
  Synthetic
cuuuuuguugugaaacauaauau

SEQ ID NO: 633598 - RNA, 24 nt, Artificial Sequence
  Synthetic
gcuuuuuguugugaaacauaauau

SEQ ID NO: 633599 - RNA, 18 nt, Artificial Sequence
  Synthetic
uuuaaaaucucauaauau

SEQ ID NO: 633600 - RNA, 19 nt, Artificial Sequence
  Synthetic
uuuuaaaaucucauaauau

SEQ ID NO: 633601 - RNA, 20 nt, Artificial Sequence
  Synthetic
uuuuuaaaaucucauaauau

SEQ ID NO: 633602 - RNA, 21 nt, Artificial Sequence
  Synthetic
uuuuuuaaaaucucauaauau

SEQ ID NO: 633603 - RNA, 22 nt, Artificial Sequence
  Synthetic
auuuuuuaaaaucucauaauau

SEQ ID NO: 633604 - RNA, 23 nt, Artificial Sequence
  Synthetic
uauuuuuuaaaaucucauaauau

SEQ ID NO: 633605 - RNA, 24 nt, Artificial Sequence
  Synthetic
cuauuuuuuaaaaucucauaauau

SEQ ID NO: 633606 - RNA, 18 nt, Artificial Sequence
  Synthetic
gucagauuugacuaauau

SEQ ID NO: 633607 - RNA, 19 nt, Artificial Sequence
  Synthetic
ggucagauuugacuaauau

SEQ ID NO: 633608 - RNA, 20 nt, Artificial Sequence
  Synthetic
gggucagauuugacuaauau

SEQ ID NO: 633609 - RNA, 21 nt, Artificial Sequence
  Synthetic
ugggucagauuugacuaauau

SEQ ID NO: 633610 - RNA, 22 nt, Artificial Sequence
  Synthetic
augggucagauuugacuaauau

SEQ ID NO: 633611 - RNA, 23 nt, Artificial Sequence
  Synthetic
aaugggucagauuugacuaauau

SEQ ID NO: 633612 - RNA, 24 nt, Artificial Sequence
  Synthetic
uaaugggucagauuugacuaauau

SEQ ID NO: 633613 - RNA, 18 nt, Artificial Sequence
  Synthetic
cagauaaagcucuaauau

SEQ ID NO: 633614 - RNA, 19 nt, Artificial Sequence
  Synthetic
ucagauaaagcucuaauau

SEQ ID NO: 633615 - RNA, 20 nt, Artificial Sequence
  Synthetic
cucagauaaagcucuaauau

SEQ ID NO: 633616 - RNA, 21 nt, Artificial Sequence
  Synthetic
ccucagauaaagcucuaauau

SEQ ID NO: 633617 - RNA, 22 nt, Artificial Sequence
  Synthetic
uccucagauaaagcucuaauau

SEQ ID NO: 633618 - RNA, 23 nt, Artificial Sequence
  Synthetic
cuccucagauaaagcucuaauau

SEQ ID NO: 633619 - RNA, 24 nt, Artificial Sequence
  Synthetic
acuccucagauaaagcucuaauau

SEQ ID NO: 633620 - RNA, 18 nt, Artificial Sequence
  Synthetic
uuuauaaauauguaauau

SEQ ID NO: 633621 - RNA, 19 nt, Artificial Sequence
  Synthetic
uuuuauaaauauguaauau

SEQ ID NO: 633622 - RNA, 20 nt, Artificial Sequence
  Synthetic
uuuuuauaaauauguaauau

SEQ ID NO: 633623 - RNA, 21 nt, Artificial Sequence
  Synthetic
uuuuuuauaaauauguaauau

SEQ ID NO: 633624 - RNA, 22 nt, Artificial Sequence
  Synthetic
uuuuuuuauaaauauguaauau

SEQ ID NO: 633625 - RNA, 23 nt, Artificial Sequence
  Synthetic
auuuuuuuauaaauauguaauau

SEQ ID NO: 633626 - RNA, 24 nt, Artificial Sequence
  Synthetic
gauuuuuuuauaaauauguaauau

SEQ ID NO: 633627 - RNA, 18 nt, Artificial Sequence
  Synthetic
acauuuuaaaauuaauau

SEQ ID NO: 633628 - RNA, 19 nt, Artificial Sequence
  Synthetic
uacauuuuaaaauuaauau

SEQ ID NO: 633629 - RNA, 20 nt, Artificial Sequence
  Synthetic
uuacauuuuaaaauuaauau

SEQ ID NO: 633630 - RNA, 21 nt, Artificial Sequence
  Synthetic
uuuacauuuuaaaauuaauau

SEQ ID NO: 633631 - RNA, 22 nt, Artificial Sequence
  Synthetic
auuuacauuuuaaaauuaauau

SEQ ID NO: 633632 - RNA, 23 nt, Artificial Sequence
  Synthetic
aauuuacauuuuaaaauuaauau

SEQ ID NO: 633633 - RNA, 24 nt, Artificial Sequence
  Synthetic
caauuuacauuuuaaaauuaauau

SEQ ID NO: 633634 - RNA, 18 nt, Artificial Sequence
  Synthetic
acaguuaaugauuaauau

SEQ ID NO: 633635 - RNA, 19 nt, Artificial Sequence
  Synthetic
uacaguuaaugauuaauau

SEQ ID NO: 633636 - RNA, 20 nt, Artificial Sequence
  Synthetic
cuacaguuaaugauuaauau

SEQ ID NO: 633637 - RNA, 21 nt, Artificial Sequence
  Synthetic
acuacaguuaaugauuaauau

SEQ ID NO: 633638 - RNA, 22 nt, Artificial Sequence
  Synthetic
aacuacaguuaaugauuaauau

SEQ ID NO: 633639 - RNA, 23 nt, Artificial Sequence
  Synthetic
aaacuacaguuaaugauuaauau

SEQ ID NO: 633640 - RNA, 24 nt, Artificial Sequence
  Synthetic
uaaacuacaguuaaugauuaauau

SEQ ID NO: 633641 - RNA, 18 nt, Artificial Sequence
  Synthetic
aaaucuaaacuuuaauau

SEQ ID NO: 633642 - RNA, 19 nt, Artificial Sequence
  Synthetic
caaaucuaaacuuuaauau

SEQ ID NO: 633643 - RNA, 20 nt, Artificial Sequence
  Synthetic
ccaaaucuaaacuuuaauau

SEQ ID NO: 633644 - RNA, 21 nt, Artificial Sequence
  Synthetic
gccaaaucuaaacuuuaauau

SEQ ID NO: 633645 - RNA, 22 nt, Artificial Sequence
  Synthetic
ugccaaaucuaaacuuuaauau

SEQ ID NO: 633646 - RNA, 23 nt, Artificial Sequence
  Synthetic
uugccaaaucuaaacuuuaauau

SEQ ID NO: 633647 - RNA, 24 nt, Artificial Sequence
  Synthetic
cuugccaaaucuaaacuuuaauau

SEQ ID NO: 633648 - RNA, 18 nt, Artificial Sequence
  Synthetic
cguguguuuguuuaauau

SEQ ID NO: 633649 - RNA, 19 nt, Artificial Sequence
  Synthetic
gcguguguuuguuuaauau

SEQ ID NO: 633650 - RNA, 20 nt, Artificial Sequence
  Synthetic
ugcguguguuuguuuaauau

SEQ ID NO: 633651 - RNA, 21 nt, Artificial Sequence
  Synthetic
cugcguguguuuguuuaauau

SEQ ID NO: 633652 - RNA, 22 nt, Artificial Sequence
  Synthetic
ucugcguguguuuguuuaauau

SEQ ID NO: 633653 - RNA, 23 nt, Artificial Sequence
  Synthetic
uucugcguguguuuguuuaauau

SEQ ID NO: 633654 - RNA, 24 nt, Artificial Sequence
  Synthetic
cuucugcguguguuuguuuaauau

SEQ ID NO: 633655 - RNA, 18 nt, Artificial Sequence
  Synthetic
uccaaacauuuuuaauau

SEQ ID NO: 633656 - RNA, 19 nt, Artificial Sequence
  Synthetic
guccaaacauuuuuaauau

SEQ ID NO: 633657 - RNA, 20 nt, Artificial Sequence
  Synthetic
uguccaaacauuuuuaauau

SEQ ID NO: 633658 - RNA, 21 nt, Artificial Sequence
  Synthetic
auguccaaacauuuuuaauau

SEQ ID NO: 633659 - RNA, 22 nt, Artificial Sequence
  Synthetic
uauguccaaacauuuuuaauau

SEQ ID NO: 633660 - RNA, 23 nt, Artificial Sequence
  Synthetic
auauguccaaacauuuuuaauau

SEQ ID NO: 633661 - RNA, 24 nt, Artificial Sequence
  Synthetic
uauauguccaaacauuuuuaauau

SEQ ID NO: 633662 - RNA, 18 nt, Artificial Sequence
  Synthetic
guuccugguuuuuaauau

SEQ ID NO: 633663 - RNA, 19 nt, Artificial Sequence
  Synthetic
aguuccugguuuuuaauau

SEQ ID NO: 633664 - RNA, 20 nt, Artificial Sequence
  Synthetic
uaguuccugguuuuuaauau

SEQ ID NO: 633665 - RNA, 21 nt, Artificial Sequence
  Synthetic
uuaguuccugguuuuuaauau

SEQ ID NO: 633666 - RNA, 22 nt, Artificial Sequence
  Synthetic
uuuaguuccugguuuuuaauau

SEQ ID NO: 633667 - RNA, 23 nt, Artificial Sequence
  Synthetic
auuuaguuccugguuuuuaauau

SEQ ID NO: 633668 - RNA, 24 nt, Artificial Sequence
  Synthetic
aauuuaguuccugguuuuuaauau

SEQ ID NO: 633669 - RNA, 18 nt, Artificial Sequence
  Synthetic
agaauuauuuuuuaauau

SEQ ID NO: 633670 - RNA, 19 nt, Artificial Sequence
  Synthetic
aagaauuauuuuuuaauau

SEQ ID NO: 633671 - RNA, 20 nt, Artificial Sequence
  Synthetic
uaagaauuauuuuuuaauau

SEQ ID NO: 633672 - RNA, 21 nt, Artificial Sequence
  Synthetic
uuaagaauuauuuuuuaauau

SEQ ID NO: 633673 - RNA, 22 nt, Artificial Sequence
  Synthetic
uuuaagaauuauuuuuuaauau

SEQ ID NO: 633674 - RNA, 23 nt, Artificial Sequence
  Synthetic
cuuuaagaauuauuuuuuaauau

SEQ ID NO: 633675 - RNA, 24 nt, Artificial Sequence
  Synthetic
ucuuuaagaauuauuuuuuaauau

SEQ ID NO: 633676 - RNA, 18 nt, Artificial Sequence
  Synthetic
uuccuuuuuuuuuaauau

SEQ ID NO: 633677 - RNA, 19 nt, Artificial Sequence
  Synthetic
uuuccuuuuuuuuuaauau

SEQ ID NO: 633678 - RNA, 20 nt, Artificial Sequence
  Synthetic
auuuccuuuuuuuuuaauau

SEQ ID NO: 633679 - RNA, 21 nt, Artificial Sequence
  Synthetic
aauuuccuuuuuuuuuaauau

SEQ ID NO: 633680 - RNA, 22 nt, Artificial Sequence
  Synthetic
aaauuuccuuuuuuuuuaauau

SEQ ID NO: 633681 - RNA, 23 nt, Artificial Sequence
  Synthetic
caaauuuccuuuuuuuuuaauau

SEQ ID NO: 633682 - RNA, 24 nt, Artificial Sequence
  Synthetic
ucaaauuuccuuuuuuuuuaauau

SEQ ID NO: 633683 - RNA, 18 nt, Artificial Sequence
  Synthetic
uaacauuucaaaacauau

SEQ ID NO: 633684 - RNA, 19 nt, Artificial Sequence
  Synthetic
uuaacauuucaaaacauau

SEQ ID NO: 633685 - RNA, 20 nt, Artificial Sequence
  Synthetic
auuaacauuucaaaacauau

SEQ ID NO: 633686 - RNA, 21 nt, Artificial Sequence
  Synthetic
gauuaacauuucaaaacauau

SEQ ID NO: 633687 - RNA, 22 nt, Artificial Sequence
  Synthetic
agauuaacauuucaaaacauau

SEQ ID NO: 633688 - RNA, 23 nt, Artificial Sequence
  Synthetic
cagauuaacauuucaaaacauau

SEQ ID NO: 633689 - RNA, 24 nt, Artificial Sequence
  Synthetic
ccagauuaacauuucaaaacauau

SEQ ID NO: 633690 - RNA, 18 nt, Artificial Sequence
  Synthetic
uuuacuauggaaacauau

SEQ ID NO: 633691 - RNA, 19 nt, Artificial Sequence
  Synthetic
auuuacuauggaaacauau

SEQ ID NO: 633692 - RNA, 20 nt, Artificial Sequence
  Synthetic
uauuuacuauggaaacauau

SEQ ID NO: 633693 - RNA, 21 nt, Artificial Sequence
  Synthetic
auauuuacuauggaaacauau

SEQ ID NO: 633694 - RNA, 22 nt, Artificial Sequence
  Synthetic
cauauuuacuauggaaacauau

SEQ ID NO: 633695 - RNA, 23 nt, Artificial Sequence
  Synthetic
gcauauuuacuauggaaacauau

SEQ ID NO: 633696 - RNA, 24 nt, Artificial Sequence
  Synthetic
ggcauauuuacuauggaaacauau

SEQ ID NO: 633697 - RNA, 18 nt, Artificial Sequence
  Synthetic
ccaauuuuaauaacauau

SEQ ID NO: 633698 - RNA, 19 nt, Artificial Sequence
  Synthetic
cccaauuuuaauaacauau

SEQ ID NO: 633699 - RNA, 20 nt, Artificial Sequence
  Synthetic
acccaauuuuaauaacauau

SEQ ID NO: 633700 - RNA, 21 nt, Artificial Sequence
  Synthetic
cacccaauuuuaauaacauau

SEQ ID NO: 633701 - RNA, 22 nt, Artificial Sequence
  Synthetic
acacccaauuuuaauaacauau

SEQ ID NO: 633702 - RNA, 23 nt, Artificial Sequence
  Synthetic
cacacccaauuuuaauaacauau

SEQ ID NO: 633703 - RNA, 24 nt, Artificial Sequence
  Synthetic
ccacacccaauuuuaauaacauau

SEQ ID NO: 633704 - RNA, 18 nt, Artificial Sequence
  Synthetic
aaugcaaggauaacauau

SEQ ID NO: 633705 - RNA, 19 nt, Artificial Sequence
  Synthetic
gaaugcaaggauaacauau

SEQ ID NO: 633706 - RNA, 20 nt, Artificial Sequence
  Synthetic
ugaaugcaaggauaacauau

SEQ ID NO: 633707 - RNA, 21 nt, Artificial Sequence
  Synthetic
cugaaugcaaggauaacauau

SEQ ID NO: 633708 - RNA, 22 nt, Artificial Sequence
  Synthetic
acugaaugcaaggauaacauau

SEQ ID NO: 633709 - RNA, 23 nt, Artificial Sequence
  Synthetic
gacugaaugcaaggauaacauau

SEQ ID NO: 633710 - RNA, 24 nt, Artificial Sequence
  Synthetic
ugacugaaugcaaggauaacauau

SEQ ID NO: 633711 - RNA, 18 nt, Artificial Sequence
  Synthetic
augauacagguaacauau

SEQ ID NO: 633712 - RNA, 19 nt, Artificial Sequence
  Synthetic
aaugauacagguaacauau

SEQ ID NO: 633713 - RNA, 20 nt, Artificial Sequence
  Synthetic
aaaugauacagguaacauau

SEQ ID NO: 633714 - RNA, 21 nt, Artificial Sequence
  Synthetic
uaaaugauacagguaacauau

SEQ ID NO: 633715 - RNA, 22 nt, Artificial Sequence
  Synthetic
uuaaaugauacagguaacauau

SEQ ID NO: 633716 - RNA, 23 nt, Artificial Sequence
  Synthetic
auuaaaugauacagguaacauau

SEQ ID NO: 633717 - RNA, 24 nt, Artificial Sequence
  Synthetic
uauuaaaugauacagguaacauau

SEQ ID NO: 633718 - RNA, 18 nt, Artificial Sequence
  Synthetic
agcaccauaaacacauau

SEQ ID NO: 633719 - RNA, 19 nt, Artificial Sequence
  Synthetic
gagcaccauaaacacauau

SEQ ID NO: 633720 - RNA, 20 nt, Artificial Sequence
  Synthetic
ggagcaccauaaacacauau

SEQ ID NO: 633721 - RNA, 21 nt, Artificial Sequence
  Synthetic
gggagcaccauaaacacauau

SEQ ID NO: 633722 - RNA, 22 nt, Artificial Sequence
  Synthetic
ugggagcaccauaaacacauau

SEQ ID NO: 633723 - RNA, 23 nt, Artificial Sequence
  Synthetic
gugggagcaccauaaacacauau

SEQ ID NO: 633724 - RNA, 24 nt, Artificial Sequence
  Synthetic
ggugggagcaccauaaacacauau

SEQ ID NO: 633725 - RNA, 18 nt, Artificial Sequence
  Synthetic
auaaguauacacacauau

SEQ ID NO: 633726 - RNA, 19 nt, Artificial Sequence
  Synthetic
uauaaguauacacacauau

SEQ ID NO: 633727 - RNA, 20 nt, Artificial Sequence
  Synthetic
auauaaguauacacacauau

SEQ ID NO: 633728 - RNA, 21 nt, Artificial Sequence
  Synthetic
uauauaaguauacacacauau

SEQ ID NO: 633729 - RNA, 22 nt, Artificial Sequence
  Synthetic
guauauaaguauacacacauau

SEQ ID NO: 633730 - RNA, 23 nt, Artificial Sequence
  Synthetic
uguauauaaguauacacacauau

SEQ ID NO: 633731 - RNA, 24 nt, Artificial Sequence
  Synthetic
auguauauaaguauacacacauau

SEQ ID NO: 633732 - RNA, 18 nt, Artificial Sequence
  Synthetic
ucuguuaauaccacauau

SEQ ID NO: 633733 - RNA, 19 nt, Artificial Sequence
  Synthetic
aucuguuaauaccacauau

SEQ ID NO: 633734 - RNA, 20 nt, Artificial Sequence
  Synthetic
gaucuguuaauaccacauau

SEQ ID NO: 633735 - RNA, 21 nt, Artificial Sequence
  Synthetic
ugaucuguuaauaccacauau

SEQ ID NO: 633736 - RNA, 22 nt, Artificial Sequence
  Synthetic
augaucuguuaauaccacauau

SEQ ID NO: 633737 - RNA, 23 nt, Artificial Sequence
  Synthetic
gaugaucuguuaauaccacauau

SEQ ID NO: 633738 - RNA, 24 nt, Artificial Sequence
  Synthetic
agaugaucuguuaauaccacauau

SEQ ID NO: 633739 - RNA, 18 nt, Artificial Sequence
  Synthetic
auaagaggaagcacauau

SEQ ID NO: 633740 - RNA, 19 nt, Artificial Sequence
  Synthetic
cauaagaggaagcacauau

SEQ ID NO: 633741 - RNA, 20 nt, Artificial Sequence
  Synthetic
acauaagaggaagcacauau

SEQ ID NO: 633742 - RNA, 21 nt, Artificial Sequence
  Synthetic
gacauaagaggaagcacauau

SEQ ID NO: 633743 - RNA, 22 nt, Artificial Sequence
  Synthetic
agacauaagaggaagcacauau

SEQ ID NO: 633744 - RNA, 23 nt, Artificial Sequence
  Synthetic
uagacauaagaggaagcacauau

SEQ ID NO: 633745 - RNA, 24 nt, Artificial Sequence
  Synthetic
uuagacauaagaggaagcacauau

SEQ ID NO: 633746 - RNA, 18 nt, Artificial Sequence
  Synthetic
cuguuaacaaagacauau

SEQ ID NO: 633747 - RNA, 19 nt, Artificial Sequence
  Synthetic
acuguuaacaaagacauau

SEQ ID NO: 633748 - RNA, 20 nt, Artificial Sequence
  Synthetic
cacuguuaacaaagacauau

SEQ ID NO: 633749 - RNA, 21 nt, Artificial Sequence
  Synthetic
acacuguuaacaaagacauau

SEQ ID NO: 633750 - RNA, 22 nt, Artificial Sequence
  Synthetic
cacacuguuaacaaagacauau

SEQ ID NO: 633751 - RNA, 23 nt, Artificial Sequence
  Synthetic
ucacacuguuaacaaagacauau

SEQ ID NO: 633752 - RNA, 24 nt, Artificial Sequence
  Synthetic
cucacacuguuaacaaagacauau

SEQ ID NO: 633753 - RNA, 18 nt, Artificial Sequence
  Synthetic
ugacauacaaagacauau

SEQ ID NO: 633754 - RNA, 19 nt, Artificial Sequence
  Synthetic
uugacauacaaagacauau

SEQ ID NO: 633755 - RNA, 20 nt, Artificial Sequence
  Synthetic
uuugacauacaaagacauau

SEQ ID NO: 633756 - RNA, 21 nt, Artificial Sequence
  Synthetic
guuugacauacaaagacauau

SEQ ID NO: 633757 - RNA, 22 nt, Artificial Sequence
  Synthetic
uguuugacauacaaagacauau

SEQ ID NO: 633758 - RNA, 23 nt, Artificial Sequence
  Synthetic
auguuugacauacaaagacauau

SEQ ID NO: 633759 - RNA, 24 nt, Artificial Sequence
  Synthetic
aauguuugacauacaaagacauau

SEQ ID NO: 633760 - RNA, 18 nt, Artificial Sequence
  Synthetic
auaauugcuuugacauau

SEQ ID NO: 633761 - RNA, 19 nt, Artificial Sequence
  Synthetic
aauaauugcuuugacauau

SEQ ID NO: 633762 - RNA, 20 nt, Artificial Sequence
  Synthetic
aaauaauugcuuugacauau

SEQ ID NO: 633763 - RNA, 21 nt, Artificial Sequence
  Synthetic
aaaauaauugcuuugacauau

SEQ ID NO: 633764 - RNA, 22 nt, Artificial Sequence
  Synthetic
aaaaauaauugcuuugacauau

SEQ ID NO: 633765 - RNA, 23 nt, Artificial Sequence
  Synthetic
uaaaaauaauugcuuugacauau

SEQ ID NO: 633766 - RNA, 24 nt, Artificial Sequence
  Synthetic
cuaaaaauaauugcuuugacauau

SEQ ID NO: 633767 - RNA, 18 nt, Artificial Sequence
  Synthetic
gaaaacagaaauacauau

SEQ ID NO: 633768 - RNA, 19 nt, Artificial Sequence
  Synthetic
agaaaacagaaauacauau

SEQ ID NO: 633769 - RNA, 20 nt, Artificial Sequence
  Synthetic
uagaaaacagaaauacauau

SEQ ID NO: 633770 - RNA, 21 nt, Artificial Sequence
  Synthetic
guagaaaacagaaauacauau

SEQ ID NO: 633771 - RNA, 22 nt, Artificial Sequence
  Synthetic
uguagaaaacagaaauacauau

SEQ ID NO: 633772 - RNA, 23 nt, Artificial Sequence
  Synthetic
auguagaaaacagaaauacauau

SEQ ID NO: 633773 - RNA, 24 nt, Artificial Sequence
  Synthetic
aauguagaaaacagaaauacauau

SEQ ID NO: 633774 - RNA, 18 nt, Artificial Sequence
  Synthetic
cgaacaggccauacauau

SEQ ID NO: 633775 - RNA, 19 nt, Artificial Sequence
  Synthetic
ccgaacaggccauacauau

SEQ ID NO: 633776 - RNA, 20 nt, Artificial Sequence
  Synthetic
gccgaacaggccauacauau

SEQ ID NO: 633777 - RNA, 21 nt, Artificial Sequence
  Synthetic
ugccgaacaggccauacauau

SEQ ID NO: 633778 - RNA, 22 nt, Artificial Sequence
  Synthetic
uugccgaacaggccauacauau

SEQ ID NO: 633779 - RNA, 23 nt, Artificial Sequence
  Synthetic
cuugccgaacaggccauacauau

SEQ ID NO: 633780 - RNA, 24 nt, Artificial Sequence
  Synthetic
gcuugccgaacaggccauacauau

SEQ ID NO: 633781 - RNA, 18 nt, Artificial Sequence
  Synthetic
uauucucggccuacauau

SEQ ID NO: 633782 - RNA, 19 nt, Artificial Sequence
  Synthetic
uuauucucggccuacauau

SEQ ID NO: 633783 - RNA, 20 nt, Artificial Sequence
  Synthetic
uuuauucucggccuacauau

SEQ ID NO: 633784 - RNA, 21 nt, Artificial Sequence
  Synthetic
uuuuauucucggccuacauau

SEQ ID NO: 633785 - RNA, 22 nt, Artificial Sequence
  Synthetic
auuuuauucucggccuacauau

SEQ ID NO: 633786 - RNA, 23 nt, Artificial Sequence
  Synthetic
aauuuuauucucggccuacauau

SEQ ID NO: 633787 - RNA, 24 nt, Artificial Sequence
  Synthetic
uaauuuuauucucggccuacauau

SEQ ID NO: 633788 - RNA, 18 nt, Artificial Sequence
  Synthetic
accuuuggacguacauau

SEQ ID NO: 633789 - RNA, 19 nt, Artificial Sequence
  Synthetic
uaccuuuggacguacauau

SEQ ID NO: 633790 - RNA, 20 nt, Artificial Sequence
  Synthetic
uuaccuuuggacguacauau

SEQ ID NO: 633791 - RNA, 21 nt, Artificial Sequence
  Synthetic
guuaccuuuggacguacauau

SEQ ID NO: 633792 - RNA, 22 nt, Artificial Sequence
  Synthetic
gguuaccuuuggacguacauau

SEQ ID NO: 633793 - RNA, 23 nt, Artificial Sequence
  Synthetic
ugguuaccuuuggacguacauau

SEQ ID NO: 633794 - RNA, 24 nt, Artificial Sequence
  Synthetic
augguuaccuuuggacguacauau

SEQ ID NO: 633795 - RNA, 18 nt, Artificial Sequence
  Synthetic
agauacgcauguacauau

SEQ ID NO: 633796 - RNA, 19 nt, Artificial Sequence
  Synthetic
gagauacgcauguacauau

SEQ ID NO: 633797 - RNA, 20 nt, Artificial Sequence
  Synthetic
cgagauacgcauguacauau

SEQ ID NO: 633798 - RNA, 21 nt, Artificial Sequence
  Synthetic
acgagauacgcauguacauau

SEQ ID NO: 633799 - RNA, 22 nt, Artificial Sequence
  Synthetic
aacgagauacgcauguacauau

SEQ ID NO: 633800 - RNA, 23 nt, Artificial Sequence
  Synthetic
aaacgagauacgcauguacauau

SEQ ID NO: 633801 - RNA, 24 nt, Artificial Sequence
  Synthetic
aaaacgagauacgcauguacauau

SEQ ID NO: 633802 - RNA, 18 nt, Artificial Sequence
  Synthetic
ccuccauaaauuacauau

SEQ ID NO: 633803 - RNA, 19 nt, Artificial Sequence
  Synthetic
gccuccauaaauuacauau

SEQ ID NO: 633804 - RNA, 20 nt, Artificial Sequence
  Synthetic
agccuccauaaauuacauau

SEQ ID NO: 633805 - RNA, 21 nt, Artificial Sequence
  Synthetic
cagccuccauaaauuacauau

SEQ ID NO: 633806 - RNA, 22 nt, Artificial Sequence
  Synthetic
acagccuccauaaauuacauau

SEQ ID NO: 633807 - RNA, 23 nt, Artificial Sequence
  Synthetic
cacagccuccauaaauuacauau

SEQ ID NO: 633808 - RNA, 24 nt, Artificial Sequence
  Synthetic
acacagccuccauaaauuacauau

SEQ ID NO: 633809 - RNA, 18 nt, Artificial Sequence
  Synthetic
guaacaucaguuacauau

SEQ ID NO: 633810 - RNA, 19 nt, Artificial Sequence
  Synthetic
uguaacaucaguuacauau

SEQ ID NO: 633811 - RNA, 20 nt, Artificial Sequence
  Synthetic
auguaacaucaguuacauau

SEQ ID NO: 633812 - RNA, 21 nt, Artificial Sequence
  Synthetic
cauguaacaucaguuacauau

SEQ ID NO: 633813 - RNA, 22 nt, Artificial Sequence
  Synthetic
acauguaacaucaguuacauau

SEQ ID NO: 633814 - RNA, 23 nt, Artificial Sequence
  Synthetic
cacauguaacaucaguuacauau

SEQ ID NO: 633815 - RNA, 24 nt, Artificial Sequence
  Synthetic
ucacauguaacaucaguuacauau

SEQ ID NO: 633816 - RNA, 18 nt, Artificial Sequence
  Synthetic
acuccauagaaaccauau

SEQ ID NO: 633817 - RNA, 19 nt, Artificial Sequence
  Synthetic
uacuccauagaaaccauau

SEQ ID NO: 633818 - RNA, 20 nt, Artificial Sequence
  Synthetic
uuacuccauagaaaccauau

SEQ ID NO: 633819 - RNA, 21 nt, Artificial Sequence
  Synthetic
auuacuccauagaaaccauau

SEQ ID NO: 633820 - RNA, 22 nt, Artificial Sequence
  Synthetic
aauuacuccauagaaaccauau

SEQ ID NO: 633821 - RNA, 23 nt, Artificial Sequence
  Synthetic
caauuacuccauagaaaccauau

SEQ ID NO: 633822 - RNA, 24 nt, Artificial Sequence
  Synthetic
ucaauuacuccauagaaaccauau

SEQ ID NO: 633823 - RNA, 18 nt, Artificial Sequence
  Synthetic
aaaaauaaaacaccauau

SEQ ID NO: 633824 - RNA, 19 nt, Artificial Sequence
  Synthetic
aaaaaauaaaacaccauau

SEQ ID NO: 633825 - RNA, 20 nt, Artificial Sequence
  Synthetic
uaaaaaauaaaacaccauau

SEQ ID NO: 633826 - RNA, 21 nt, Artificial Sequence
  Synthetic
auaaaaaauaaaacaccauau

SEQ ID NO: 633827 - RNA, 22 nt, Artificial Sequence
  Synthetic
uauaaaaaauaaaacaccauau

SEQ ID NO: 633828 - RNA, 23 nt, Artificial Sequence
  Synthetic
auauaaaaaauaaaacaccauau

SEQ ID NO: 633829 - RNA, 24 nt, Artificial Sequence
  Synthetic
uauauaaaaaauaaaacaccauau

SEQ ID NO: 633830 - RNA, 18 nt, Artificial Sequence
  Synthetic
gcuguagaaauaccauau

SEQ ID NO: 633831 - RNA, 19 nt, Artificial Sequence
  Synthetic
ugcuguagaaauaccauau

SEQ ID NO: 633832 - RNA, 20 nt, Artificial Sequence
  Synthetic
augcuguagaaauaccauau

SEQ ID NO: 633833 - RNA, 21 nt, Artificial Sequence
  Synthetic
aaugcuguagaaauaccauau

SEQ ID NO: 633834 - RNA, 22 nt, Artificial Sequence
  Synthetic
uaaugcuguagaaauaccauau

SEQ ID NO: 633835 - RNA, 23 nt, Artificial Sequence
  Synthetic
auaaugcuguagaaauaccauau

SEQ ID NO: 633836 - RNA, 24 nt, Artificial Sequence
  Synthetic
cauaaugcuguagaaauaccauau

SEQ ID NO: 633837 - RNA, 18 nt, Artificial Sequence
  Synthetic
cuuaacauuauaccauau

SEQ ID NO: 633838 - RNA, 19 nt, Artificial Sequence
  Synthetic
ccuuaacauuauaccauau

SEQ ID NO: 633839 - RNA, 20 nt, Artificial Sequence
  Synthetic
uccuuaacauuauaccauau

SEQ ID NO: 633840 - RNA, 21 nt, Artificial Sequence
  Synthetic
uuccuuaacauuauaccauau

SEQ ID NO: 633841 - RNA, 22 nt, Artificial Sequence
  Synthetic
auuccuuaacauuauaccauau

SEQ ID NO: 633842 - RNA, 23 nt, Artificial Sequence
  Synthetic
cauuccuuaacauuauaccauau

SEQ ID NO: 633843 - RNA, 24 nt, Artificial Sequence
  Synthetic
ucauuccuuaacauuauaccauau

SEQ ID NO: 633844 - RNA, 18 nt, Artificial Sequence
  Synthetic
ucuauguuaucuccauau

SEQ ID NO: 633845 - RNA, 19 nt, Artificial Sequence
  Synthetic
cucuauguuaucuccauau

SEQ ID NO: 633846 - RNA, 20 nt, Artificial Sequence
  Synthetic
acucuauguuaucuccauau

SEQ ID NO: 633847 - RNA, 21 nt, Artificial Sequence
  Synthetic
aacucuauguuaucuccauau

SEQ ID NO: 633848 - RNA, 22 nt, Artificial Sequence
  Synthetic
aaacucuauguuaucuccauau

SEQ ID NO: 633849 - RNA, 23 nt, Artificial Sequence
  Synthetic
aaaacucuauguuaucuccauau

SEQ ID NO: 633850 - RNA, 24 nt, Artificial Sequence
  Synthetic
aaaaacucuauguuaucuccauau

SEQ ID NO: 633851 - RNA, 18 nt, Artificial Sequence
  Synthetic
uaacuagacaguccauau

SEQ ID NO: 633852 - RNA, 19 nt, Artificial Sequence
  Synthetic
cuaacuagacaguccauau

SEQ ID NO: 633853 - RNA, 20 nt, Artificial Sequence
  Synthetic
acuaacuagacaguccauau

SEQ ID NO: 633854 - RNA, 21 nt, Artificial Sequence
  Synthetic
cacuaacuagacaguccauau

SEQ ID NO: 633855 - RNA, 22 nt, Artificial Sequence
  Synthetic
ucacuaacuagacaguccauau

SEQ ID NO: 633856 - RNA, 23 nt, Artificial Sequence
  Synthetic
aucacuaacuagacaguccauau

SEQ ID NO: 633857 - RNA, 24 nt, Artificial Sequence
  Synthetic
caucacuaacuagacaguccauau

SEQ ID NO: 633858 - RNA, 18 nt, Artificial Sequence
  Synthetic
caagaauccaguccauau

SEQ ID NO: 633859 - RNA, 19 nt, Artificial Sequence
  Synthetic
acaagaauccaguccauau

SEQ ID NO: 633860 - RNA, 20 nt, Artificial Sequence
  Synthetic
gacaagaauccaguccauau

SEQ ID NO: 633861 - RNA, 21 nt, Artificial Sequence
  Synthetic
ggacaagaauccaguccauau

SEQ ID NO: 633862 - RNA, 22 nt, Artificial Sequence
  Synthetic
aggacaagaauccaguccauau

SEQ ID NO: 633863 - RNA, 23 nt, Artificial Sequence
  Synthetic
aaggacaagaauccaguccauau

SEQ ID NO: 633864 - RNA, 24 nt, Artificial Sequence
  Synthetic
gaaggacaagaauccaguccauau

SEQ ID NO: 633865 - RNA, 18 nt, Artificial Sequence
  Synthetic
aaggcacuacuuccauau

SEQ ID NO: 633866 - RNA, 19 nt, Artificial Sequence
  Synthetic
uaaggcacuacuuccauau

SEQ ID NO: 633867 - RNA, 20 nt, Artificial Sequence
  Synthetic
guaaggcacuacuuccauau

SEQ ID NO: 633868 - RNA, 21 nt, Artificial Sequence
  Synthetic
uguaaggcacuacuuccauau

SEQ ID NO: 633869 - RNA, 22 nt, Artificial Sequence
  Synthetic
auguaaggcacuacuuccauau

SEQ ID NO: 633870 - RNA, 23 nt, Artificial Sequence
  Synthetic
aauguaaggcacuacuuccauau

SEQ ID NO: 633871 - RNA, 24 nt, Artificial Sequence
  Synthetic
aaauguaaggcacuacuuccauau

SEQ ID NO: 633872 - RNA, 18 nt, Artificial Sequence
  Synthetic
gcuaaacauagagcauau

SEQ ID NO: 633873 - RNA, 19 nt, Artificial Sequence
  Synthetic
agcuaaacauagagcauau

SEQ ID NO: 633874 - RNA, 20 nt, Artificial Sequence
  Synthetic
gagcuaaacauagagcauau

SEQ ID NO: 633875 - RNA, 21 nt, Artificial Sequence
  Synthetic
ggagcuaaacauagagcauau

SEQ ID NO: 633876 - RNA, 22 nt, Artificial Sequence
  Synthetic
gggagcuaaacauagagcauau

SEQ ID NO: 633877 - RNA, 23 nt, Artificial Sequence
  Synthetic
ugggagcuaaacauagagcauau

SEQ ID NO: 633878 - RNA, 24 nt, Artificial Sequence
  Synthetic
gugggagcuaaacauagagcauau

SEQ ID NO: 633879 - RNA, 18 nt, Artificial Sequence
  Synthetic
gaaagaaaaauagcauau

SEQ ID NO: 633880 - RNA, 19 nt, Artificial Sequence
  Synthetic
agaaagaaaaauagcauau

SEQ ID NO: 633881 - RNA, 20 nt, Artificial Sequence
  Synthetic
uagaaagaaaaauagcauau

SEQ ID NO: 633882 - RNA, 21 nt, Artificial Sequence
  Synthetic
auagaaagaaaaauagcauau

SEQ ID NO: 633883 - RNA, 22 nt, Artificial Sequence
  Synthetic
aauagaaagaaaaauagcauau

SEQ ID NO: 633884 - RNA, 23 nt, Artificial Sequence
  Synthetic
aaauagaaagaaaaauagcauau

SEQ ID NO: 633885 - RNA, 24 nt, Artificial Sequence
  Synthetic
aaaauagaaagaaaaauagcauau

SEQ ID NO: 633886 - RNA, 18 nt, Artificial Sequence
  Synthetic
aaauuccaguuagcauau

SEQ ID NO: 633887 - RNA, 19 nt, Artificial Sequence
  Synthetic
aaaauuccaguuagcauau

SEQ ID NO: 633888 - RNA, 20 nt, Artificial Sequence
  Synthetic
aaaaauuccaguuagcauau

SEQ ID NO: 633889 - RNA, 21 nt, Artificial Sequence
  Synthetic
uaaaaauuccaguuagcauau

SEQ ID NO: 633890 - RNA, 22 nt, Artificial Sequence
  Synthetic
uuaaaaauuccaguuagcauau

SEQ ID NO: 633891 - RNA, 23 nt, Artificial Sequence
  Synthetic
cuuaaaaauuccaguuagcauau

SEQ ID NO: 633892 - RNA, 24 nt, Artificial Sequence
  Synthetic
gcuuaaaaauuccaguuagcauau

SEQ ID NO: 633893 - RNA, 18 nt, Artificial Sequence
  Synthetic
auauuugcuaaggcauau

SEQ ID NO: 633894 - RNA, 19 nt, Artificial Sequence
  Synthetic
uauauuugcuaaggcauau

SEQ ID NO: 633895 - RNA, 20 nt, Artificial Sequence
  Synthetic
uuauauuugcuaaggcauau

SEQ ID NO: 633896 - RNA, 21 nt, Artificial Sequence
  Synthetic
uuuauauuugcuaaggcauau

SEQ ID NO: 633897 - RNA, 22 nt, Artificial Sequence
  Synthetic
guuuauauuugcuaaggcauau

SEQ ID NO: 633898 - RNA, 23 nt, Artificial Sequence
  Synthetic
aguuuauauuugcuaaggcauau

SEQ ID NO: 633899 - RNA, 24 nt, Artificial Sequence
  Synthetic
caguuuauauuugcuaaggcauau

SEQ ID NO: 633900 - RNA, 18 nt, Artificial Sequence
  Synthetic
uagaggcuccaggcauau

SEQ ID NO: 633901 - RNA, 19 nt, Artificial Sequence
  Synthetic
uuagaggcuccaggcauau

SEQ ID NO: 633902 - RNA, 20 nt, Artificial Sequence
  Synthetic
uuuagaggcuccaggcauau

SEQ ID NO: 633903 - RNA, 21 nt, Artificial Sequence
  Synthetic
auuuagaggcuccaggcauau

SEQ ID NO: 633904 - RNA, 22 nt, Artificial Sequence
  Synthetic
cauuuagaggcuccaggcauau

SEQ ID NO: 633905 - RNA, 23 nt, Artificial Sequence
  Synthetic
ccauuuagaggcuccaggcauau

SEQ ID NO: 633906 - RNA, 24 nt, Artificial Sequence
  Synthetic
accauuuagaggcuccaggcauau

SEQ ID NO: 633907 - RNA, 18 nt, Artificial Sequence
  Synthetic
gaguuggcauuggcauau

SEQ ID NO: 633908 - RNA, 19 nt, Artificial Sequence
  Synthetic
agaguuggcauuggcauau

SEQ ID NO: 633909 - RNA, 20 nt, Artificial Sequence
  Synthetic
aagaguuggcauuggcauau

SEQ ID NO: 633910 - RNA, 21 nt, Artificial Sequence
  Synthetic
gaagaguuggcauuggcauau

SEQ ID NO: 633911 - RNA, 22 nt, Artificial Sequence
  Synthetic
ggaagaguuggcauuggcauau

SEQ ID NO: 633912 - RNA, 23 nt, Artificial Sequence
  Synthetic
gggaagaguuggcauuggcauau

SEQ ID NO: 633913 - RNA, 24 nt, Artificial Sequence
  Synthetic
cgggaagaguuggcauuggcauau

SEQ ID NO: 633914 - RNA, 18 nt, Artificial Sequence
  Synthetic
agguucaugaaugcauau

SEQ ID NO: 633915 - RNA, 19 nt, Artificial Sequence
  Synthetic
aagguucaugaaugcauau

SEQ ID NO: 633916 - RNA, 20 nt, Artificial Sequence
  Synthetic
gaagguucaugaaugcauau

SEQ ID NO: 633917 - RNA, 21 nt, Artificial Sequence
  Synthetic
agaagguucaugaaugcauau

SEQ ID NO: 633918 - RNA, 22 nt, Artificial Sequence
  Synthetic
cagaagguucaugaaugcauau

SEQ ID NO: 633919 - RNA, 23 nt, Artificial Sequence
  Synthetic
gcagaagguucaugaaugcauau

SEQ ID NO: 633920 - RNA, 24 nt, Artificial Sequence
  Synthetic
agcagaagguucaugaaugcauau

SEQ ID NO: 633921 - RNA, 18 nt, Artificial Sequence
  Synthetic
gugugagcagcugcauau

SEQ ID NO: 633922 - RNA, 19 nt, Artificial Sequence
  Synthetic
ggugugagcagcugcauau

SEQ ID NO: 633923 - RNA, 20 nt, Artificial Sequence
  Synthetic
gggugugagcagcugcauau

SEQ ID NO: 633924 - RNA, 21 nt, Artificial Sequence
  Synthetic
ggggugugagcagcugcauau

SEQ ID NO: 633925 - RNA, 22 nt, Artificial Sequence
  Synthetic
aggggugugagcagcugcauau

SEQ ID NO: 633926 - RNA, 23 nt, Artificial Sequence
  Synthetic
gaggggugugagcagcugcauau

SEQ ID NO: 633927 - RNA, 24 nt, Artificial Sequence
  Synthetic
ggaggggugugagcagcugcauau

SEQ ID NO: 633928 - RNA, 18 nt, Artificial Sequence
  Synthetic
uuuguuguaugugcauau

SEQ ID NO: 633929 - RNA, 19 nt, Artificial Sequence
  Synthetic
auuuguuguaugugcauau

SEQ ID NO: 633930 - RNA, 20 nt, Artificial Sequence
  Synthetic
uauuuguuguaugugcauau

SEQ ID NO: 633931 - RNA, 21 nt, Artificial Sequence
  Synthetic
guauuuguuguaugugcauau

SEQ ID NO: 633932 - RNA, 22 nt, Artificial Sequence
  Synthetic
aguauuuguuguaugugcauau

SEQ ID NO: 633933 - RNA, 23 nt, Artificial Sequence
  Synthetic
caguauuuguuguaugugcauau

SEQ ID NO: 633934 - RNA, 24 nt, Artificial Sequence
  Synthetic
ucaguauuuguuguaugugcauau

SEQ ID NO: 633935 - RNA, 18 nt, Artificial Sequence
  Synthetic
aaggguacauacucauau

SEQ ID NO: 633936 - RNA, 19 nt, Artificial Sequence
  Synthetic
caaggguacauacucauau

SEQ ID NO: 633937 - RNA, 20 nt, Artificial Sequence
  Synthetic
gcaaggguacauacucauau

SEQ ID NO: 633938 - RNA, 21 nt, Artificial Sequence
  Synthetic
agcaaggguacauacucauau

SEQ ID NO: 633939 - RNA, 22 nt, Artificial Sequence
  Synthetic
cagcaaggguacauacucauau

SEQ ID NO: 633940 - RNA, 23 nt, Artificial Sequence
  Synthetic
ccagcaaggguacauacucauau

SEQ ID NO: 633941 - RNA, 24 nt, Artificial Sequence
  Synthetic
accagcaaggguacauacucauau

SEQ ID NO: 633942 - RNA, 18 nt, Artificial Sequence
  Synthetic
uugacuggaaugucauau

SEQ ID NO: 633943 - RNA, 19 nt, Artificial Sequence
  Synthetic
uuugacuggaaugucauau

SEQ ID NO: 633944 - RNA, 20 nt, Artificial Sequence
  Synthetic
cuuugacuggaaugucauau

SEQ ID NO: 633945 - RNA, 21 nt, Artificial Sequence
  Synthetic
gcuuugacuggaaugucauau

SEQ ID NO: 633946 - RNA, 22 nt, Artificial Sequence
  Synthetic
ggcuuugacuggaaugucauau

SEQ ID NO: 633947 - RNA, 23 nt, Artificial Sequence
  Synthetic
aggcuuugacuggaaugucauau

SEQ ID NO: 633948 - RNA, 24 nt, Artificial Sequence
  Synthetic
aaggcuuugacuggaaugucauau

SEQ ID NO: 633949 - RNA, 18 nt, Artificial Sequence
  Synthetic
uccaguguauauucauau

SEQ ID NO: 633950 - RNA, 19 nt, Artificial Sequence
  Synthetic
uuccaguguauauucauau

SEQ ID NO: 633951 - RNA, 20 nt, Artificial Sequence
  Synthetic
uuuccaguguauauucauau

SEQ ID NO: 633952 - RNA, 21 nt, Artificial Sequence
  Synthetic
guuuccaguguauauucauau

SEQ ID NO: 633953 - RNA, 22 nt, Artificial Sequence
  Synthetic
uguuuccaguguauauucauau

SEQ ID NO: 633954 - RNA, 23 nt, Artificial Sequence
  Synthetic
uuguuuccaguguauauucauau

SEQ ID NO: 633955 - RNA, 24 nt, Artificial Sequence
  Synthetic
uuuguuuccaguguauauucauau

SEQ ID NO: 633956 - RNA, 18 nt, Artificial Sequence
  Synthetic
cggaggucuacuucauau

SEQ ID NO: 633957 - RNA, 19 nt, Artificial Sequence
  Synthetic
ccggaggucuacuucauau

SEQ ID NO: 633958 - RNA, 20 nt, Artificial Sequence
  Synthetic
accggaggucuacuucauau

SEQ ID NO: 633959 - RNA, 21 nt, Artificial Sequence
  Synthetic
aaccggaggucuacuucauau

SEQ ID NO: 633960 - RNA, 22 nt, Artificial Sequence
  Synthetic
gaaccggaggucuacuucauau

SEQ ID NO: 633961 - RNA, 23 nt, Artificial Sequence
  Synthetic
ugaaccggaggucuacuucauau

SEQ ID NO: 633962 - RNA, 24 nt, Artificial Sequence
  Synthetic
gugaaccggaggucuacuucauau

SEQ ID NO: 633963 - RNA, 18 nt, Artificial Sequence
  Synthetic
aaauuuuacaguucauau

SEQ ID NO: 633964 - RNA, 19 nt, Artificial Sequence
  Synthetic
uaaauuuuacaguucauau

SEQ ID NO: 633965 - RNA, 20 nt, Artificial Sequence
  Synthetic
uuaaauuuuacaguucauau

SEQ ID NO: 633966 - RNA, 21 nt, Artificial Sequence
  Synthetic
uuuaaauuuuacaguucauau

SEQ ID NO: 633967 - RNA, 22 nt, Artificial Sequence
  Synthetic
uuuuaaauuuuacaguucauau

SEQ ID NO: 633968 - RNA, 23 nt, Artificial Sequence
  Synthetic
cuuuuaaauuuuacaguucauau

SEQ ID NO: 633969 - RNA, 24 nt, Artificial Sequence
  Synthetic
ucuuuuaaauuuuacaguucauau

SEQ ID NO: 633970 - RNA, 18 nt, Artificial Sequence
  Synthetic
ucauuuugcaguucauau

SEQ ID NO: 633971 - RNA, 19 nt, Artificial Sequence
  Synthetic
gucauuuugcaguucauau

SEQ ID NO: 633972 - RNA, 20 nt, Artificial Sequence
  Synthetic
ugucauuuugcaguucauau

SEQ ID NO: 633973 - RNA, 21 nt, Artificial Sequence
  Synthetic
cugucauuuugcaguucauau

SEQ ID NO: 633974 - RNA, 22 nt, Artificial Sequence
  Synthetic
gcugucauuuugcaguucauau

SEQ ID NO: 633975 - RNA, 23 nt, Artificial Sequence
  Synthetic
ugcugucauuuugcaguucauau

SEQ ID NO: 633976 - RNA, 24 nt, Artificial Sequence
  Synthetic
augcugucauuuugcaguucauau

SEQ ID NO: 633977 - RNA, 18 nt, Artificial Sequence
  Synthetic
ucuuguaaacuuucauau

SEQ ID NO: 633978 - RNA, 19 nt, Artificial Sequence
  Synthetic
uucuuguaaacuuucauau

SEQ ID NO: 633979 - RNA, 20 nt, Artificial Sequence
  Synthetic
auucuuguaaacuuucauau

SEQ ID NO: 633980 - RNA, 21 nt, Artificial Sequence
  Synthetic
aauucuuguaaacuuucauau

SEQ ID NO: 633981 - RNA, 22 nt, Artificial Sequence
  Synthetic
caauucuuguaaacuuucauau

SEQ ID NO: 633982 - RNA, 23 nt, Artificial Sequence
  Synthetic
gcaauucuuguaaacuuucauau

SEQ ID NO: 633983 - RNA, 24 nt, Artificial Sequence
  Synthetic
ggcaauucuuguaaacuuucauau

SEQ ID NO: 633984 - RNA, 18 nt, Artificial Sequence
  Synthetic
ugggagugaguuucauau

SEQ ID NO: 633985 - RNA, 19 nt, Artificial Sequence
  Synthetic
gugggagugaguuucauau

SEQ ID NO: 633986 - RNA, 20 nt, Artificial Sequence
  Synthetic
ugugggagugaguuucauau

SEQ ID NO: 633987 - RNA, 21 nt, Artificial Sequence
  Synthetic
uugugggagugaguuucauau

SEQ ID NO: 633988 - RNA, 22 nt, Artificial Sequence
  Synthetic
auugugggagugaguuucauau

SEQ ID NO: 633989 - RNA, 23 nt, Artificial Sequence
  Synthetic
uauugugggagugaguuucauau

SEQ ID NO: 633990 - RNA, 24 nt, Artificial Sequence
  Synthetic
uuauugugggagugaguuucauau

SEQ ID NO: 633991 - RNA, 18 nt, Artificial Sequence
  Synthetic
cuagaaacaaaaagauau

SEQ ID NO: 633992 - RNA, 19 nt, Artificial Sequence
  Synthetic
ucuagaaacaaaaagauau

SEQ ID NO: 633993 - RNA, 20 nt, Artificial Sequence
  Synthetic
uucuagaaacaaaaagauau

SEQ ID NO: 633994 - RNA, 21 nt, Artificial Sequence
  Synthetic
uuucuagaaacaaaaagauau

SEQ ID NO: 633995 - RNA, 22 nt, Artificial Sequence
  Synthetic
uuuucuagaaacaaaaagauau

SEQ ID NO: 633996 - RNA, 23 nt, Artificial Sequence
  Synthetic
auuuucuagaaacaaaaagauau

SEQ ID NO: 633997 - RNA, 24 nt, Artificial Sequence
  Synthetic
cauuuucuagaaacaaaaagauau

SEQ ID NO: 633998 - RNA, 18 nt, Artificial Sequence
  Synthetic
ccauaaauuaaaagauau

SEQ ID NO: 633999 - RNA, 19 nt, Artificial Sequence
  Synthetic
uccauaaauuaaaagauau

SEQ ID NO: 634000 - RNA, 20 nt, Artificial Sequence
  Synthetic
auccauaaauuaaaagauau

SEQ ID NO: 634001 - RNA, 21 nt, Artificial Sequence
  Synthetic
aauccauaaauuaaaagauau

SEQ ID NO: 634002 - RNA, 22 nt, Artificial Sequence
  Synthetic
aaauccauaaauuaaaagauau

SEQ ID NO: 634003 - RNA, 23 nt, Artificial Sequence
  Synthetic
aaaauccauaaauuaaaagauau

SEQ ID NO: 634004 - RNA, 24 nt, Artificial Sequence
  Synthetic
uaaaauccauaaauuaaaagauau

SEQ ID NO: 634005 - RNA, 18 nt, Artificial Sequence
  Synthetic
cugacuauuagaagauau

SEQ ID NO: 634006 - RNA, 19 nt, Artificial Sequence
  Synthetic
acugacuauuagaagauau

SEQ ID NO: 634007 - RNA, 20 nt, Artificial Sequence
  Synthetic
aacugacuauuagaagauau

SEQ ID NO: 634008 - RNA, 21 nt, Artificial Sequence
  Synthetic
aaacugacuauuagaagauau

SEQ ID NO: 634009 - RNA, 22 nt, Artificial Sequence
  Synthetic
gaaacugacuauuagaagauau

SEQ ID NO: 634010 - RNA, 23 nt, Artificial Sequence
  Synthetic
ugaaacugacuauuagaagauau

SEQ ID NO: 634011 - RNA, 24 nt, Artificial Sequence
  Synthetic
gugaaacugacuauuagaagauau

SEQ ID NO: 634012 - RNA, 18 nt, Artificial Sequence
  Synthetic
caaugcagaaacagauau

SEQ ID NO: 634013 - RNA, 19 nt, Artificial Sequence
  Synthetic
ucaaugcagaaacagauau

SEQ ID NO: 634014 - RNA, 20 nt, Artificial Sequence
  Synthetic
uucaaugcagaaacagauau

SEQ ID NO: 634015 - RNA, 21 nt, Artificial Sequence
  Synthetic
auucaaugcagaaacagauau

SEQ ID NO: 634016 - RNA, 22 nt, Artificial Sequence
  Synthetic
cauucaaugcagaaacagauau

SEQ ID NO: 634017 - RNA, 23 nt, Artificial Sequence
  Synthetic
acauucaaugcagaaacagauau

SEQ ID NO: 634018 - RNA, 24 nt, Artificial Sequence
  Synthetic
cacauucaaugcagaaacagauau

SEQ ID NO: 634019 - RNA, 18 nt, Artificial Sequence
  Synthetic
uacuaagcagacagauau

SEQ ID NO: 634020 - RNA, 19 nt, Artificial Sequence
  Synthetic
cuacuaagcagacagauau

SEQ ID NO: 634021 - RNA, 20 nt, Artificial Sequence
  Synthetic
acuacuaagcagacagauau

SEQ ID NO: 634022 - RNA, 21 nt, Artificial Sequence
  Synthetic
gacuacuaagcagacagauau

SEQ ID NO: 634023 - RNA, 22 nt, Artificial Sequence
  Synthetic
agacuacuaagcagacagauau

SEQ ID NO: 634024 - RNA, 23 nt, Artificial Sequence
  Synthetic
uagacuacuaagcagacagauau

SEQ ID NO: 634025 - RNA, 24 nt, Artificial Sequence
  Synthetic
auagacuacuaagcagacagauau

SEQ ID NO: 634026 - RNA, 18 nt, Artificial Sequence
  Synthetic
guaacaaugaccagauau

SEQ ID NO: 634027 - RNA, 19 nt, Artificial Sequence
  Synthetic
aguaacaaugaccagauau

SEQ ID NO: 634028 - RNA, 20 nt, Artificial Sequence
  Synthetic
aaguaacaaugaccagauau

SEQ ID NO: 634029 - RNA, 21 nt, Artificial Sequence
  Synthetic
caaguaacaaugaccagauau

SEQ ID NO: 634030 - RNA, 22 nt, Artificial Sequence
  Synthetic
acaaguaacaaugaccagauau

SEQ ID NO: 634031 - RNA, 23 nt, Artificial Sequence
  Synthetic
uacaaguaacaaugaccagauau

SEQ ID NO: 634032 - RNA, 24 nt, Artificial Sequence
  Synthetic
uuacaaguaacaaugaccagauau

SEQ ID NO: 634033 - RNA, 18 nt, Artificial Sequence
  Synthetic
auaaucauacgcagauau

SEQ ID NO: 634034 - RNA, 19 nt, Artificial Sequence
  Synthetic
aauaaucauacgcagauau

SEQ ID NO: 634035 - RNA, 20 nt, Artificial Sequence
  Synthetic
aaauaaucauacgcagauau

SEQ ID NO: 634036 - RNA, 21 nt, Artificial Sequence
  Synthetic
aaaauaaucauacgcagauau

SEQ ID NO: 634037 - RNA, 22 nt, Artificial Sequence
  Synthetic
aaaaauaaucauacgcagauau

SEQ ID NO: 634038 - RNA, 23 nt, Artificial Sequence
  Synthetic
gaaaaauaaucauacgcagauau

SEQ ID NO: 634039 - RNA, 24 nt, Artificial Sequence
  Synthetic
ugaaaaauaaucauacgcagauau

SEQ ID NO: 634040 - RNA, 18 nt, Artificial Sequence
  Synthetic
agaacccuaugcagauau

SEQ ID NO: 634041 - RNA, 19 nt, Artificial Sequence
  Synthetic
aagaacccuaugcagauau

SEQ ID NO: 634042 - RNA, 20 nt, Artificial Sequence
  Synthetic
gaagaacccuaugcagauau

SEQ ID NO: 634043 - RNA, 21 nt, Artificial Sequence
  Synthetic
agaagaacccuaugcagauau

SEQ ID NO: 634044 - RNA, 22 nt, Artificial Sequence
  Synthetic
cagaagaacccuaugcagauau

SEQ ID NO: 634045 - RNA, 23 nt, Artificial Sequence
  Synthetic
gcagaagaacccuaugcagauau

SEQ ID NO: 634046 - RNA, 24 nt, Artificial Sequence
  Synthetic
agcagaagaacccuaugcagauau

SEQ ID NO: 634047 - RNA, 18 nt, Artificial Sequence
  Synthetic
cagccagcugucagauau

SEQ ID NO: 634048 - RNA, 19 nt, Artificial Sequence
  Synthetic
acagccagcugucagauau

SEQ ID NO: 634049 - RNA, 20 nt, Artificial Sequence
  Synthetic
aacagccagcugucagauau

SEQ ID NO: 634050 - RNA, 21 nt, Artificial Sequence
  Synthetic
caacagccagcugucagauau

SEQ ID NO: 634051 - RNA, 22 nt, Artificial Sequence
  Synthetic
ccaacagccagcugucagauau

SEQ ID NO: 634052 - RNA, 23 nt, Artificial Sequence
  Synthetic
accaacagccagcugucagauau

SEQ ID NO: 634053 - RNA, 24 nt, Artificial Sequence
  Synthetic
aaccaacagccagcugucagauau

SEQ ID NO: 634054 - RNA, 18 nt, Artificial Sequence
  Synthetic
gcuuuggacuagagauau

SEQ ID NO: 634055 - RNA, 19 nt, Artificial Sequence
  Synthetic
ggcuuuggacuagagauau

SEQ ID NO: 634056 - RNA, 20 nt, Artificial Sequence
  Synthetic
uggcuuuggacuagagauau

SEQ ID NO: 634057 - RNA, 21 nt, Artificial Sequence
  Synthetic
auggcuuuggacuagagauau

SEQ ID NO: 634058 - RNA, 22 nt, Artificial Sequence
  Synthetic
gauggcuuuggacuagagauau

SEQ ID NO: 634059 - RNA, 23 nt, Artificial Sequence
  Synthetic
ugauggcuuuggacuagagauau

SEQ ID NO: 634060 - RNA, 24 nt, Artificial Sequence
  Synthetic
gugauggcuuuggacuagagauau

SEQ ID NO: 634061 - RNA, 18 nt, Artificial Sequence
  Synthetic
ggaacaaaguugagauau

SEQ ID NO: 634062 - RNA, 19 nt, Artificial Sequence
  Synthetic
gggaacaaaguugagauau

SEQ ID NO: 634063 - RNA, 20 nt, Artificial Sequence
  Synthetic
agggaacaaaguugagauau

SEQ ID NO: 634064 - RNA, 21 nt, Artificial Sequence
  Synthetic
cagggaacaaaguugagauau

SEQ ID NO: 634065 - RNA, 22 nt, Artificial Sequence
  Synthetic
gcagggaacaaaguugagauau

SEQ ID NO: 634066 - RNA, 23 nt, Artificial Sequence
  Synthetic
agcagggaacaaaguugagauau

SEQ ID NO: 634067 - RNA, 24 nt, Artificial Sequence
  Synthetic
cagcagggaacaaaguugagauau

SEQ ID NO: 634068 - RNA, 18 nt, Artificial Sequence
  Synthetic
uuggaggugaauagauau

SEQ ID NO: 634069 - RNA, 19 nt, Artificial Sequence
  Synthetic
guuggaggugaauagauau

SEQ ID NO: 634070 - RNA, 20 nt, Artificial Sequence
  Synthetic
uguuggaggugaauagauau

SEQ ID NO: 634071 - RNA, 21 nt, Artificial Sequence
  Synthetic
guguuggaggugaauagauau

SEQ ID NO: 634072 - RNA, 22 nt, Artificial Sequence
  Synthetic
gguguuggaggugaauagauau

SEQ ID NO: 634073 - RNA, 23 nt, Artificial Sequence
  Synthetic
agguguuggaggugaauagauau

SEQ ID NO: 634074 - RNA, 24 nt, Artificial Sequence
  Synthetic
aagguguuggaggugaauagauau

SEQ ID NO: 634075 - RNA, 18 nt, Artificial Sequence
  Synthetic
aaggccaucucuagauau

SEQ ID NO: 634076 - RNA, 19 nt, Artificial Sequence
  Synthetic
aaaggccaucucuagauau

SEQ ID NO: 634077 - RNA, 20 nt, Artificial Sequence
  Synthetic
aaaaggccaucucuagauau

SEQ ID NO: 634078 - RNA, 21 nt, Artificial Sequence
  Synthetic
uaaaaggccaucucuagauau

SEQ ID NO: 634079 - RNA, 22 nt, Artificial Sequence
  Synthetic
uuaaaaggccaucucuagauau

SEQ ID NO: 634080 - RNA, 23 nt, Artificial Sequence
  Synthetic
uuuaaaaggccaucucuagauau

SEQ ID NO: 634081 - RNA, 24 nt, Artificial Sequence
  Synthetic
uuuuaaaaggccaucucuagauau

SEQ ID NO: 634082 - RNA, 18 nt, Artificial Sequence
  Synthetic
uuugaaaagucuagauau

SEQ ID NO: 634083 - RNA, 19 nt, Artificial Sequence
  Synthetic
guuugaaaagucuagauau

SEQ ID NO: 634084 - RNA, 20 nt, Artificial Sequence
  Synthetic
uguuugaaaagucuagauau

SEQ ID NO: 634085 - RNA, 21 nt, Artificial Sequence
  Synthetic
cuguuugaaaagucuagauau

SEQ ID NO: 634086 - RNA, 22 nt, Artificial Sequence
  Synthetic
ccuguuugaaaagucuagauau

SEQ ID NO: 634087 - RNA, 23 nt, Artificial Sequence
  Synthetic
uccuguuugaaaagucuagauau

SEQ ID NO: 634088 - RNA, 24 nt, Artificial Sequence
  Synthetic
uuccuguuugaaaagucuagauau

SEQ ID NO: 634089 - RNA, 18 nt, Artificial Sequence
  Synthetic
auaauggcaaguagauau

SEQ ID NO: 634090 - RNA, 19 nt, Artificial Sequence
  Synthetic
cauaauggcaaguagauau

SEQ ID NO: 634091 - RNA, 20 nt, Artificial Sequence
  Synthetic
ccauaauggcaaguagauau

SEQ ID NO: 634092 - RNA, 21 nt, Artificial Sequence
  Synthetic
cccauaauggcaaguagauau

SEQ ID NO: 634093 - RNA, 22 nt, Artificial Sequence
  Synthetic
ucccauaauggcaaguagauau

SEQ ID NO: 634094 - RNA, 23 nt, Artificial Sequence
  Synthetic
cucccauaauggcaaguagauau

SEQ ID NO: 634095 - RNA, 24 nt, Artificial Sequence
  Synthetic
ccucccauaauggcaaguagauau

SEQ ID NO: 634096 - RNA, 18 nt, Artificial Sequence
  Synthetic
gguaaggaauguagauau

SEQ ID NO: 634097 - RNA, 19 nt, Artificial Sequence
  Synthetic
ugguaaggaauguagauau

SEQ ID NO: 634098 - RNA, 20 nt, Artificial Sequence
  Synthetic
augguaaggaauguagauau

SEQ ID NO: 634099 - RNA, 21 nt, Artificial Sequence
  Synthetic
aaugguaaggaauguagauau

SEQ ID NO: 634100 - RNA, 22 nt, Artificial Sequence
  Synthetic
uaaugguaaggaauguagauau

SEQ ID NO: 634101 - RNA, 23 nt, Artificial Sequence
  Synthetic
guaaugguaaggaauguagauau

SEQ ID NO: 634102 - RNA, 24 nt, Artificial Sequence
  Synthetic
gguaaugguaaggaauguagauau

SEQ ID NO: 634103 - RNA, 18 nt, Artificial Sequence
  Synthetic
gcuguccuauuuagauau

SEQ ID NO: 634104 - RNA, 19 nt, Artificial Sequence
  Synthetic
agcuguccuauuuagauau

SEQ ID NO: 634105 - RNA, 20 nt, Artificial Sequence
  Synthetic
gagcuguccuauuuagauau

SEQ ID NO: 634106 - RNA, 21 nt, Artificial Sequence
  Synthetic
ugagcuguccuauuuagauau

SEQ ID NO: 634107 - RNA, 22 nt, Artificial Sequence
  Synthetic
uugagcuguccuauuuagauau

SEQ ID NO: 634108 - RNA, 23 nt, Artificial Sequence
  Synthetic
cuugagcuguccuauuuagauau

SEQ ID NO: 634109 - RNA, 24 nt, Artificial Sequence
  Synthetic
acuugagcuguccuauuuagauau

SEQ ID NO: 634110 - RNA, 18 nt, Artificial Sequence
  Synthetic
gcguaggcaaagcgauau

SEQ ID NO: 634111 - RNA, 19 nt, Artificial Sequence
  Synthetic
agcguaggcaaagcgauau

SEQ ID NO: 634112 - RNA, 20 nt, Artificial Sequence
  Synthetic
gagcguaggcaaagcgauau

SEQ ID NO: 634113 - RNA, 21 nt, Artificial Sequence
  Synthetic
agagcguaggcaaagcgauau

SEQ ID NO: 634114 - RNA, 22 nt, Artificial Sequence
  Synthetic
uagagcguaggcaaagcgauau

SEQ ID NO: 634115 - RNA, 23 nt, Artificial Sequence
  Synthetic
guagagcguaggcaaagcgauau

SEQ ID NO: 634116 - RNA, 24 nt, Artificial Sequence
  Synthetic
aguagagcguaggcaaagcgauau

SEQ ID NO: 634117 - RNA, 18 nt, Artificial Sequence
  Synthetic
aucagaccaaaucgauau

SEQ ID NO: 634118 - RNA, 19 nt, Artificial Sequence
  Synthetic
uaucagaccaaaucgauau

SEQ ID NO: 634119 - RNA, 20 nt, Artificial Sequence
  Synthetic
auaucagaccaaaucgauau

SEQ ID NO: 634120 - RNA, 21 nt, Artificial Sequence
  Synthetic
uauaucagaccaaaucgauau

SEQ ID NO: 634121 - RNA, 22 nt, Artificial Sequence
  Synthetic
uuauaucagaccaaaucgauau

SEQ ID NO: 634122 - RNA, 23 nt, Artificial Sequence
  Synthetic
cuuauaucagaccaaaucgauau

SEQ ID NO: 634123 - RNA, 24 nt, Artificial Sequence
  Synthetic
acuuauaucagaccaaaucgauau

SEQ ID NO: 634124 - RNA, 18 nt, Artificial Sequence
  Synthetic
uuacauuuaaaaggauau

SEQ ID NO: 634125 - RNA, 19 nt, Artificial Sequence
  Synthetic
uuuacauuuaaaaggauau

SEQ ID NO: 634126 - RNA, 20 nt, Artificial Sequence
  Synthetic
auuuacauuuaaaaggauau

SEQ ID NO: 634127 - RNA, 21 nt, Artificial Sequence
  Synthetic
cauuuacauuuaaaaggauau

SEQ ID NO: 634128 - RNA, 22 nt, Artificial Sequence
  Synthetic
ucauuuacauuuaaaaggauau

SEQ ID NO: 634129 - RNA, 23 nt, Artificial Sequence
  Synthetic
cucauuuacauuuaaaaggauau

SEQ ID NO: 634130 - RNA, 24 nt, Artificial Sequence
  Synthetic
ucucauuuacauuuaaaaggauau

SEQ ID NO: 634131 - RNA, 18 nt, Artificial Sequence
  Synthetic
accaacagccaaggauau

SEQ ID NO: 634132 - RNA, 19 nt, Artificial Sequence
  Synthetic
gaccaacagccaaggauau

SEQ ID NO: 634133 - RNA, 20 nt, Artificial Sequence
  Synthetic
ggaccaacagccaaggauau

SEQ ID NO: 634134 - RNA, 21 nt, Artificial Sequence
  Synthetic
uggaccaacagccaaggauau

SEQ ID NO: 634135 - RNA, 22 nt, Artificial Sequence
  Synthetic
uuggaccaacagccaaggauau

SEQ ID NO: 634136 - RNA, 23 nt, Artificial Sequence
  Synthetic
cuuggaccaacagccaaggauau

SEQ ID NO: 634137 - RNA, 24 nt, Artificial Sequence
  Synthetic
gcuuggaccaacagccaaggauau

SEQ ID NO: 634138 - RNA, 18 nt, Artificial Sequence
  Synthetic
uuauacagggaaggauau

SEQ ID NO: 634139 - RNA, 19 nt, Artificial Sequence
  Synthetic
uuuauacagggaaggauau

SEQ ID NO: 634140 - RNA, 20 nt, Artificial Sequence
  Synthetic
uuuuauacagggaaggauau

SEQ ID NO: 634141 - RNA, 21 nt, Artificial Sequence
  Synthetic
uuuuuauacagggaaggauau

SEQ ID NO: 634142 - RNA, 22 nt, Artificial Sequence
  Synthetic
auuuuuauacagggaaggauau

SEQ ID NO: 634143 - RNA, 23 nt, Artificial Sequence
  Synthetic
uauuuuuauacagggaaggauau

SEQ ID NO: 634144 - RNA, 24 nt, Artificial Sequence
  Synthetic
uuauuuuuauacagggaaggauau

SEQ ID NO: 634145 - RNA, 18 nt, Artificial Sequence
  Synthetic
cagcauuugacaggauau

SEQ ID NO: 634146 - RNA, 19 nt, Artificial Sequence
  Synthetic
ccagcauuugacaggauau

SEQ ID NO: 634147 - RNA, 20 nt, Artificial Sequence
  Synthetic
gccagcauuugacaggauau

SEQ ID NO: 634148 - RNA, 21 nt, Artificial Sequence
  Synthetic
agccagcauuugacaggauau

SEQ ID NO: 634149 - RNA, 22 nt, Artificial Sequence
  Synthetic
cagccagcauuugacaggauau

SEQ ID NO: 634150 - RNA, 23 nt, Artificial Sequence
  Synthetic
gcagccagcauuugacaggauau

SEQ ID NO: 634151 - RNA, 24 nt, Artificial Sequence
  Synthetic
ggcagccagcauuugacaggauau

SEQ ID NO: 634152 - RNA, 18 nt, Artificial Sequence
  Synthetic
cuagauuucagaggauau

SEQ ID NO: 634153 - RNA, 19 nt, Artificial Sequence
  Synthetic
ccuagauuucagaggauau

SEQ ID NO: 634154 - RNA, 20 nt, Artificial Sequence
  Synthetic
accuagauuucagaggauau

SEQ ID NO: 634155 - RNA, 21 nt, Artificial Sequence
  Synthetic
uaccuagauuucagaggauau

SEQ ID NO: 634156 - RNA, 22 nt, Artificial Sequence
  Synthetic
cuaccuagauuucagaggauau

SEQ ID NO: 634157 - RNA, 23 nt, Artificial Sequence
  Synthetic
ucuaccuagauuucagaggauau

SEQ ID NO: 634158 - RNA, 24 nt, Artificial Sequence
  Synthetic
uucuaccuagauuucagaggauau

SEQ ID NO: 634159 - RNA, 18 nt, Artificial Sequence
  Synthetic
uauucugaauuaggauau

SEQ ID NO: 634160 - RNA, 19 nt, Artificial Sequence
  Synthetic
uuauucugaauuaggauau

SEQ ID NO: 634161 - RNA, 20 nt, Artificial Sequence
  Synthetic
uuuauucugaauuaggauau

SEQ ID NO: 634162 - RNA, 21 nt, Artificial Sequence
  Synthetic
guuuauucugaauuaggauau

SEQ ID NO: 634163 - RNA, 22 nt, Artificial Sequence
  Synthetic
aguuuauucugaauuaggauau

SEQ ID NO: 634164 - RNA, 23 nt, Artificial Sequence
  Synthetic
aaguuuauucugaauuaggauau

SEQ ID NO: 634165 - RNA, 24 nt, Artificial Sequence
  Synthetic
uaaguuuauucugaauuaggauau

SEQ ID NO: 634166 - RNA, 18 nt, Artificial Sequence
  Synthetic
guuggcuagaggggauau

SEQ ID NO: 634167 - RNA, 19 nt, Artificial Sequence
  Synthetic
uguuggcuagaggggauau

SEQ ID NO: 634168 - RNA, 20 nt, Artificial Sequence
  Synthetic
uuguuggcuagaggggauau

SEQ ID NO: 634169 - RNA, 21 nt, Artificial Sequence
  Synthetic
uuuguuggcuagaggggauau

SEQ ID NO: 634170 - RNA, 22 nt, Artificial Sequence
  Synthetic
auuuguuggcuagaggggauau

SEQ ID NO: 634171 - RNA, 23 nt, Artificial Sequence
  Synthetic
cauuuguuggcuagaggggauau

SEQ ID NO: 634172 - RNA, 24 nt, Artificial Sequence
  Synthetic
ucauuuguuggcuagaggggauau

SEQ ID NO: 634173 - RNA, 18 nt, Artificial Sequence
  Synthetic
uaaaugugagggggauau

SEQ ID NO: 634174 - RNA, 19 nt, Artificial Sequence
  Synthetic
auaaaugugagggggauau

SEQ ID NO: 634175 - RNA, 20 nt, Artificial Sequence
  Synthetic
uauaaaugugagggggauau

SEQ ID NO: 634176 - RNA, 21 nt, Artificial Sequence
  Synthetic
uuauaaaugugagggggauau

SEQ ID NO: 634177 - RNA, 22 nt, Artificial Sequence
  Synthetic
uuuauaaaugugagggggauau

SEQ ID NO: 634178 - RNA, 23 nt, Artificial Sequence
  Synthetic
uuuuauaaaugugagggggauau

SEQ ID NO: 634179 - RNA, 24 nt, Artificial Sequence
  Synthetic
uuuuuauaaaugugagggggauau

SEQ ID NO: 634180 - RNA, 18 nt, Artificial Sequence
  Synthetic
aacaauagcaugggauau

SEQ ID NO: 634181 - RNA, 19 nt, Artificial Sequence
  Synthetic
aaacaauagcaugggauau

SEQ ID NO: 634182 - RNA, 20 nt, Artificial Sequence
  Synthetic
gaaacaauagcaugggauau

SEQ ID NO: 634183 - RNA, 21 nt, Artificial Sequence
  Synthetic
ggaaacaauagcaugggauau

SEQ ID NO: 634184 - RNA, 22 nt, Artificial Sequence
  Synthetic
aggaaacaauagcaugggauau

SEQ ID NO: 634185 - RNA, 23 nt, Artificial Sequence
  Synthetic
aaggaaacaauagcaugggauau

SEQ ID NO: 634186 - RNA, 24 nt, Artificial Sequence
  Synthetic
aaaggaaacaauagcaugggauau

SEQ ID NO: 634187 - RNA, 18 nt, Artificial Sequence
  Synthetic
cuaacccccaauggauau

SEQ ID NO: 634188 - RNA, 19 nt, Artificial Sequence
  Synthetic
gcuaacccccaauggauau

SEQ ID NO: 634189 - RNA, 20 nt, Artificial Sequence
  Synthetic
ugcuaacccccaauggauau

SEQ ID NO: 634190 - RNA, 21 nt, Artificial Sequence
  Synthetic
gugcuaacccccaauggauau

SEQ ID NO: 634191 - RNA, 22 nt, Artificial Sequence
  Synthetic
agugcuaacccccaauggauau

SEQ ID NO: 634192 - RNA, 23 nt, Artificial Sequence
  Synthetic
aagugcuaacccccaauggauau

SEQ ID NO: 634193 - RNA, 24 nt, Artificial Sequence
  Synthetic
gaagugcuaacccccaauggauau

SEQ ID NO: 634194 - RNA, 18 nt, Artificial Sequence
  Synthetic
cauacaaagaaaugauau

SEQ ID NO: 634195 - RNA, 19 nt, Artificial Sequence
  Synthetic
ccauacaaagaaaugauau

SEQ ID NO: 634196 - RNA, 20 nt, Artificial Sequence
  Synthetic
gccauacaaagaaaugauau

SEQ ID NO: 634197 - RNA, 21 nt, Artificial Sequence
  Synthetic
ugccauacaaagaaaugauau

SEQ ID NO: 634198 - RNA, 22 nt, Artificial Sequence
  Synthetic
augccauacaaagaaaugauau

SEQ ID NO: 634199 - RNA, 23 nt, Artificial Sequence
  Synthetic
uaugccauacaaagaaaugauau

SEQ ID NO: 634200 - RNA, 24 nt, Artificial Sequence
  Synthetic
guaugccauacaaagaaaugauau

SEQ ID NO: 634201 - RNA, 18 nt, Artificial Sequence
  Synthetic
aaagcauaacaaugauau

SEQ ID NO: 634202 - RNA, 19 nt, Artificial Sequence
  Synthetic
aaaagcauaacaaugauau

SEQ ID NO: 634203 - RNA, 20 nt, Artificial Sequence
  Synthetic
aaaaagcauaacaaugauau

SEQ ID NO: 634204 - RNA, 21 nt, Artificial Sequence
  Synthetic
caaaaagcauaacaaugauau

SEQ ID NO: 634205 - RNA, 22 nt, Artificial Sequence
  Synthetic
acaaaaagcauaacaaugauau

SEQ ID NO: 634206 - RNA, 23 nt, Artificial Sequence
  Synthetic
aacaaaaagcauaacaaugauau

SEQ ID NO: 634207 - RNA, 24 nt, Artificial Sequence
  Synthetic
aaacaaaaagcauaacaaugauau

SEQ ID NO: 634208 - RNA, 18 nt, Artificial Sequence
  Synthetic
aaacaaaaggcaugauau

SEQ ID NO: 634209 - RNA, 19 nt, Artificial Sequence
  Synthetic
uaaacaaaaggcaugauau

SEQ ID NO: 634210 - RNA, 20 nt, Artificial Sequence
  Synthetic
auaaacaaaaggcaugauau

SEQ ID NO: 634211 - RNA, 21 nt, Artificial Sequence
  Synthetic
aauaaacaaaaggcaugauau

SEQ ID NO: 634212 - RNA, 22 nt, Artificial Sequence
  Synthetic
aaauaaacaaaaggcaugauau

SEQ ID NO: 634213 - RNA, 23 nt, Artificial Sequence
  Synthetic
gaaauaaacaaaaggcaugauau

SEQ ID NO: 634214 - RNA, 24 nt, Artificial Sequence
  Synthetic
agaaauaaacaaaaggcaugauau

SEQ ID NO: 634215 - RNA, 18 nt, Artificial Sequence
  Synthetic
auaucauauauaugauau

SEQ ID NO: 634216 - RNA, 19 nt, Artificial Sequence
  Synthetic
uauaucauauauaugauau

SEQ ID NO: 634217 - RNA, 20 nt, Artificial Sequence
  Synthetic
auauaucauauauaugauau

SEQ ID NO: 634218 - RNA, 21 nt, Artificial Sequence
  Synthetic
cauauaucauauauaugauau

SEQ ID NO: 634219 - RNA, 22 nt, Artificial Sequence
  Synthetic
acauauaucauauauaugauau

SEQ ID NO: 634220 - RNA, 23 nt, Artificial Sequence
  Synthetic
uacauauaucauauauaugauau

SEQ ID NO: 634221 - RNA, 24 nt, Artificial Sequence
  Synthetic
auacauauaucauauauaugauau

SEQ ID NO: 634222 - RNA, 18 nt, Artificial Sequence
  Synthetic
aauucuuuauucugauau

SEQ ID NO: 634223 - RNA, 19 nt, Artificial Sequence
  Synthetic
caauucuuuauucugauau

SEQ ID NO: 634224 - RNA, 20 nt, Artificial Sequence
  Synthetic
acaauucuuuauucugauau

SEQ ID NO: 634225 - RNA, 21 nt, Artificial Sequence
  Synthetic
aacaauucuuuauucugauau

SEQ ID NO: 634226 - RNA, 22 nt, Artificial Sequence
  Synthetic
aaacaauucuuuauucugauau

SEQ ID NO: 634227 - RNA, 23 nt, Artificial Sequence
  Synthetic
gaaacaauucuuuauucugauau

SEQ ID NO: 634228 - RNA, 24 nt, Artificial Sequence
  Synthetic
agaaacaauucuuuauucugauau

SEQ ID NO: 634229 - RNA, 18 nt, Artificial Sequence
  Synthetic
auacgagaguucugauau

SEQ ID NO: 634230 - RNA, 19 nt, Artificial Sequence
  Synthetic
gauacgagaguucugauau

SEQ ID NO: 634231 - RNA, 20 nt, Artificial Sequence
  Synthetic
agauacgagaguucugauau

SEQ ID NO: 634232 - RNA, 21 nt, Artificial Sequence
  Synthetic
aagauacgagaguucugauau

SEQ ID NO: 634233 - RNA, 22 nt, Artificial Sequence
  Synthetic
aaagauacgagaguucugauau

SEQ ID NO: 634234 - RNA, 23 nt, Artificial Sequence
  Synthetic
uaaagauacgagaguucugauau

SEQ ID NO: 634235 - RNA, 24 nt, Artificial Sequence
  Synthetic
uuaaagauacgagaguucugauau

SEQ ID NO: 634236 - RNA, 18 nt, Artificial Sequence
  Synthetic
gguccaaaauagugauau

SEQ ID NO: 634237 - RNA, 19 nt, Artificial Sequence
  Synthetic
ggguccaaaauagugauau

SEQ ID NO: 634238 - RNA, 20 nt, Artificial Sequence
  Synthetic
aggguccaaaauagugauau

SEQ ID NO: 634239 - RNA, 21 nt, Artificial Sequence
  Synthetic
aaggguccaaaauagugauau

SEQ ID NO: 634240 - RNA, 22 nt, Artificial Sequence
  Synthetic
caaggguccaaaauagugauau

SEQ ID NO: 634241 - RNA, 23 nt, Artificial Sequence
  Synthetic
ccaaggguccaaaauagugauau

SEQ ID NO: 634242 - RNA, 24 nt, Artificial Sequence
  Synthetic
cccaaggguccaaaauagugauau

SEQ ID NO: 634243 - RNA, 18 nt, Artificial Sequence
  Synthetic
ugucucaggacgugauau

SEQ ID NO: 634244 - RNA, 19 nt, Artificial Sequence
  Synthetic
cugucucaggacgugauau

SEQ ID NO: 634245 - RNA, 20 nt, Artificial Sequence
  Synthetic
acugucucaggacgugauau

SEQ ID NO: 634246 - RNA, 21 nt, Artificial Sequence
  Synthetic
cacugucucaggacgugauau

SEQ ID NO: 634247 - RNA, 22 nt, Artificial Sequence
  Synthetic
acacugucucaggacgugauau

SEQ ID NO: 634248 - RNA, 23 nt, Artificial Sequence
  Synthetic
aacacugucucaggacgugauau

SEQ ID NO: 634249 - RNA, 24 nt, Artificial Sequence
  Synthetic
aaacacugucucaggacgugauau

SEQ ID NO: 634250 - RNA, 18 nt, Artificial Sequence
  Synthetic
gagguaggagggugauau

SEQ ID NO: 634251 - RNA, 19 nt, Artificial Sequence
  Synthetic
ugagguaggagggugauau

SEQ ID NO: 634252 - RNA, 20 nt, Artificial Sequence
  Synthetic
cugagguaggagggugauau

SEQ ID NO: 634253 - RNA, 21 nt, Artificial Sequence
  Synthetic
gcugagguaggagggugauau

SEQ ID NO: 634254 - RNA, 22 nt, Artificial Sequence
  Synthetic
agcugagguaggagggugauau

SEQ ID NO: 634255 - RNA, 23 nt, Artificial Sequence
  Synthetic
aagcugagguaggagggugauau

SEQ ID NO: 634256 - RNA, 24 nt, Artificial Sequence
  Synthetic
gaagcugagguaggagggugauau

SEQ ID NO: 634257 - RNA, 18 nt, Artificial Sequence
  Synthetic
auguaaagguugugauau

SEQ ID NO: 634258 - RNA, 19 nt, Artificial Sequence
  Synthetic
aauguaaagguugugauau

SEQ ID NO: 634259 - RNA, 20 nt, Artificial Sequence
  Synthetic
caauguaaagguugugauau

SEQ ID NO: 634260 - RNA, 21 nt, Artificial Sequence
  Synthetic
acaauguaaagguugugauau

SEQ ID NO: 634261 - RNA, 22 nt, Artificial Sequence
  Synthetic
gacaauguaaagguugugauau

SEQ ID NO: 634262 - RNA, 23 nt, Artificial Sequence
  Synthetic
ugacaauguaaagguugugauau

SEQ ID NO: 634263 - RNA, 24 nt, Artificial Sequence
  Synthetic
cugacaauguaaagguugugauau

SEQ ID NO: 634264 - RNA, 18 nt, Artificial Sequence
  Synthetic
cauagauuaacuugauau

SEQ ID NO: 634265 - RNA, 19 nt, Artificial Sequence
  Synthetic
acauagauuaacuugauau

SEQ ID NO: 634266 - RNA, 20 nt, Artificial Sequence
  Synthetic
aacauagauuaacuugauau

SEQ ID NO: 634267 - RNA, 21 nt, Artificial Sequence
  Synthetic
gaacauagauuaacuugauau

SEQ ID NO: 634268 - RNA, 22 nt, Artificial Sequence
  Synthetic
ugaacauagauuaacuugauau

SEQ ID NO: 634269 - RNA, 23 nt, Artificial Sequence
  Synthetic
uugaacauagauuaacuugauau

SEQ ID NO: 634270 - RNA, 24 nt, Artificial Sequence
  Synthetic
guugaacauagauuaacuugauau

SEQ ID NO: 634271 - RNA, 18 nt, Artificial Sequence
  Synthetic
gaguuauuagcuugauau

SEQ ID NO: 634272 - RNA, 19 nt, Artificial Sequence
  Synthetic
ugaguuauuagcuugauau

SEQ ID NO: 634273 - RNA, 20 nt, Artificial Sequence
  Synthetic
gugaguuauuagcuugauau

SEQ ID NO: 634274 - RNA, 21 nt, Artificial Sequence
  Synthetic
ugugaguuauuagcuugauau

SEQ ID NO: 634275 - RNA, 22 nt, Artificial Sequence
  Synthetic
gugugaguuauuagcuugauau

SEQ ID NO: 634276 - RNA, 23 nt, Artificial Sequence
  Synthetic
ugugugaguuauuagcuugauau

SEQ ID NO: 634277 - RNA, 24 nt, Artificial Sequence
  Synthetic
uugugugaguuauuagcuugauau

SEQ ID NO: 634278 - RNA, 18 nt, Artificial Sequence
  Synthetic
aauuuuaaauuuugauau

SEQ ID NO: 634279 - RNA, 19 nt, Artificial Sequence
  Synthetic
aaauuuuaaauuuugauau

SEQ ID NO: 634280 - RNA, 20 nt, Artificial Sequence
  Synthetic
caaauuuuaaauuuugauau

SEQ ID NO: 634281 - RNA, 21 nt, Artificial Sequence
  Synthetic
acaaauuuuaaauuuugauau

SEQ ID NO: 634282 - RNA, 22 nt, Artificial Sequence
  Synthetic
gacaaauuuuaaauuuugauau

SEQ ID NO: 634283 - RNA, 23 nt, Artificial Sequence
  Synthetic
ggacaaauuuuaaauuuugauau

SEQ ID NO: 634284 - RNA, 24 nt, Artificial Sequence
  Synthetic
aggacaaauuuuaaauuuugauau

SEQ ID NO: 634285 - RNA, 18 nt, Artificial Sequence
  Synthetic
uaggcaauauuuugauau

SEQ ID NO: 634286 - RNA, 19 nt, Artificial Sequence
  Synthetic
uuaggcaauauuuugauau

SEQ ID NO: 634287 - RNA, 20 nt, Artificial Sequence
  Synthetic
auuaggcaauauuuugauau

SEQ ID NO: 634288 - RNA, 21 nt, Artificial Sequence
  Synthetic
uauuaggcaauauuuugauau

SEQ ID NO: 634289 - RNA, 22 nt, Artificial Sequence
  Synthetic
uuauuaggcaauauuuugauau

SEQ ID NO: 634290 - RNA, 23 nt, Artificial Sequence
  Synthetic
auuauuaggcaauauuuugauau

SEQ ID NO: 634291 - RNA, 24 nt, Artificial Sequence
  Synthetic
cauuauuaggcaauauuuugauau

SEQ ID NO: 634292 - RNA, 18 nt, Artificial Sequence
  Synthetic
uaaauuauuaaaauauau

SEQ ID NO: 634293 - RNA, 19 nt, Artificial Sequence
  Synthetic
uuaaauuauuaaaauauau

SEQ ID NO: 634294 - RNA, 20 nt, Artificial Sequence
  Synthetic
auuaaauuauuaaaauauau

SEQ ID NO: 634295 - RNA, 21 nt, Artificial Sequence
  Synthetic
aauuaaauuauuaaaauauau

SEQ ID NO: 634296 - RNA, 22 nt, Artificial Sequence
  Synthetic
aaauuaaauuauuaaaauauau

SEQ ID NO: 634297 - RNA, 23 nt, Artificial Sequence
  Synthetic
aaaauuaaauuauuaaaauauau

SEQ ID NO: 634298 - RNA, 24 nt, Artificial Sequence
  Synthetic
aaaaauuaaauuauuaaaauauau

SEQ ID NO: 634299 - RNA, 18 nt, Artificial Sequence
  Synthetic
ucaguuuuuaaaauauau

SEQ ID NO: 634300 - RNA, 19 nt, Artificial Sequence
  Synthetic
gucaguuuuuaaaauauau

SEQ ID NO: 634301 - RNA, 20 nt, Artificial Sequence
  Synthetic
agucaguuuuuaaaauauau

SEQ ID NO: 634302 - RNA, 21 nt, Artificial Sequence
  Synthetic
aagucaguuuuuaaaauauau

SEQ ID NO: 634303 - RNA, 22 nt, Artificial Sequence
  Synthetic
gaagucaguuuuuaaaauauau

SEQ ID NO: 634304 - RNA, 23 nt, Artificial Sequence
  Synthetic
ggaagucaguuuuuaaaauauau

SEQ ID NO: 634305 - RNA, 24 nt, Artificial Sequence
  Synthetic
aggaagucaguuuuuaaaauauau

SEQ ID NO: 634306 - RNA, 18 nt, Artificial Sequence
  Synthetic
guaagauuucaaauauau

SEQ ID NO: 634307 - RNA, 19 nt, Artificial Sequence
  Synthetic
uguaagauuucaaauauau

SEQ ID NO: 634308 - RNA, 20 nt, Artificial Sequence
  Synthetic
auguaagauuucaaauauau

SEQ ID NO: 634309 - RNA, 21 nt, Artificial Sequence
  Synthetic
uauguaagauuucaaauauau

SEQ ID NO: 634310 - RNA, 22 nt, Artificial Sequence
  Synthetic
uuauguaagauuucaaauauau

SEQ ID NO: 634311 - RNA, 23 nt, Artificial Sequence
  Synthetic
auuauguaagauuucaaauauau

SEQ ID NO: 634312 - RNA, 24 nt, Artificial Sequence
  Synthetic
cauuauguaagauuucaaauauau

SEQ ID NO: 634313 - RNA, 18 nt, Artificial Sequence
  Synthetic
aaccaacaggaaauauau

SEQ ID NO: 634314 - RNA, 19 nt, Artificial Sequence
  Synthetic
aaaccaacaggaaauauau

SEQ ID NO: 634315 - RNA, 20 nt, Artificial Sequence
  Synthetic
uaaaccaacaggaaauauau

SEQ ID NO: 634316 - RNA, 21 nt, Artificial Sequence
  Synthetic
cuaaaccaacaggaaauauau

SEQ ID NO: 634317 - RNA, 22 nt, Artificial Sequence
  Synthetic
ucuaaaccaacaggaaauauau

SEQ ID NO: 634318 - RNA, 23 nt, Artificial Sequence
  Synthetic
uucuaaaccaacaggaaauauau

SEQ ID NO: 634319 - RNA, 24 nt, Artificial Sequence
  Synthetic
uuucuaaaccaacaggaaauauau

SEQ ID NO: 634320 - RNA, 18 nt, Artificial Sequence
  Synthetic
augauauaugaaauauau

SEQ ID NO: 634321 - RNA, 19 nt, Artificial Sequence
  Synthetic
uaugauauaugaaauauau

SEQ ID NO: 634322 - RNA, 20 nt, Artificial Sequence
  Synthetic
auaugauauaugaaauauau

SEQ ID NO: 634323 - RNA, 21 nt, Artificial Sequence
  Synthetic
uauaugauauaugaaauauau

SEQ ID NO: 634324 - RNA, 22 nt, Artificial Sequence
  Synthetic
auauaugauauaugaaauauau

SEQ ID NO: 634325 - RNA, 23 nt, Artificial Sequence
  Synthetic
uauauaugauauaugaaauauau

SEQ ID NO: 634326 - RNA, 24 nt, Artificial Sequence
  Synthetic
auauauaugauauaugaaauauau

SEQ ID NO: 634327 - RNA, 18 nt, Artificial Sequence
  Synthetic
caaguugcuacaauauau

SEQ ID NO: 634328 - RNA, 19 nt, Artificial Sequence
  Synthetic
gcaaguugcuacaauauau

SEQ ID NO: 634329 - RNA, 20 nt, Artificial Sequence
  Synthetic
agcaaguugcuacaauauau

SEQ ID NO: 634330 - RNA, 21 nt, Artificial Sequence
  Synthetic
aagcaaguugcuacaauauau

SEQ ID NO: 634331 - RNA, 22 nt, Artificial Sequence
  Synthetic
uaagcaaguugcuacaauauau

SEQ ID NO: 634332 - RNA, 23 nt, Artificial Sequence
  Synthetic
auaagcaaguugcuacaauauau

SEQ ID NO: 634333 - RNA, 24 nt, Artificial Sequence
  Synthetic
cauaagcaaguugcuacaauauau

SEQ ID NO: 634334 - RNA, 18 nt, Artificial Sequence
  Synthetic
uuaauaaccagaauauau

SEQ ID NO: 634335 - RNA, 19 nt, Artificial Sequence
  Synthetic
auuaauaaccagaauauau

SEQ ID NO: 634336 - RNA, 20 nt, Artificial Sequence
  Synthetic
gauuaauaaccagaauauau

SEQ ID NO: 634337 - RNA, 21 nt, Artificial Sequence
  Synthetic
ggauuaauaaccagaauauau

SEQ ID NO: 634338 - RNA, 22 nt, Artificial Sequence
  Synthetic
gggauuaauaaccagaauauau

SEQ ID NO: 634339 - RNA, 23 nt, Artificial Sequence
  Synthetic
agggauuaauaaccagaauauau

SEQ ID NO: 634340 - RNA, 24 nt, Artificial Sequence
  Synthetic
aagggauuaauaaccagaauauau

SEQ ID NO: 634341 - RNA, 18 nt, Artificial Sequence
  Synthetic
cugaagaaaggaauauau

SEQ ID NO: 634342 - RNA, 19 nt, Artificial Sequence
  Synthetic
ccugaagaaaggaauauau

SEQ ID NO: 634343 - RNA, 20 nt, Artificial Sequence
  Synthetic
accugaagaaaggaauauau

SEQ ID NO: 634344 - RNA, 21 nt, Artificial Sequence
  Synthetic
aaccugaagaaaggaauauau

SEQ ID NO: 634345 - RNA, 22 nt, Artificial Sequence
  Synthetic
aaaccugaagaaaggaauauau

SEQ ID NO: 634346 - RNA, 23 nt, Artificial Sequence
  Synthetic
aaaaccugaagaaaggaauauau

SEQ ID NO: 634347 - RNA, 24 nt, Artificial Sequence
  Synthetic
caaaaccugaagaaaggaauauau

SEQ ID NO: 634348 - RNA, 18 nt, Artificial Sequence
  Synthetic
ccuuuuuuuuuaauauau

SEQ ID NO: 634349 - RNA, 19 nt, Artificial Sequence
  Synthetic
uccuuuuuuuuuaauauau

SEQ ID NO: 634350 - RNA, 20 nt, Artificial Sequence
  Synthetic
uuccuuuuuuuuuaauauau

SEQ ID NO: 634351 - RNA, 21 nt, Artificial Sequence
  Synthetic
uuuccuuuuuuuuuaauauau

SEQ ID NO: 634352 - RNA, 22 nt, Artificial Sequence
  Synthetic
auuuccuuuuuuuuuaauauau

SEQ ID NO: 634353 - RNA, 23 nt, Artificial Sequence
  Synthetic
aauuuccuuuuuuuuuaauauau

SEQ ID NO: 634354 - RNA, 24 nt, Artificial Sequence
  Synthetic
aaauuuccuuuuuuuuuaauauau

SEQ ID NO: 634355 - RNA, 18 nt, Artificial Sequence
  Synthetic
gauuaaucgcacauauau

SEQ ID NO: 634356 - RNA, 19 nt, Artificial Sequence
  Synthetic
ggauuaaucgcacauauau

SEQ ID NO: 634357 - RNA, 20 nt, Artificial Sequence
  Synthetic
cggauuaaucgcacauauau

SEQ ID NO: 634358 - RNA, 21 nt, Artificial Sequence
  Synthetic
ccggauuaaucgcacauauau

SEQ ID NO: 634359 - RNA, 22 nt, Artificial Sequence
  Synthetic
uccggauuaaucgcacauauau

SEQ ID NO: 634360 - RNA, 23 nt, Artificial Sequence
  Synthetic
cuccggauuaaucgcacauauau

SEQ ID NO: 634361 - RNA, 24 nt, Artificial Sequence
  Synthetic
acuccggauuaaucgcacauauau

SEQ ID NO: 634362 - RNA, 18 nt, Artificial Sequence
  Synthetic
aaauauauauacauauau

SEQ ID NO: 634363 - RNA, 19 nt, Artificial Sequence
  Synthetic
gaaauauauauacauauau

SEQ ID NO: 634364 - RNA, 20 nt, Artificial Sequence
  Synthetic
ugaaauauauauacauauau

SEQ ID NO: 634365 - RNA, 21 nt, Artificial Sequence
  Synthetic
gugaaauauauauacauauau

SEQ ID NO: 634366 - RNA, 22 nt, Artificial Sequence
  Synthetic
ugugaaauauauauacauauau

SEQ ID NO: 634367 - RNA, 23 nt, Artificial Sequence
  Synthetic
augugaaauauauauacauauau

SEQ ID NO: 634368 - RNA, 24 nt, Artificial Sequence
  Synthetic
uaugugaaauauauauacauauau

SEQ ID NO: 634369 - RNA, 18 nt, Artificial Sequence
  Synthetic
acuaauuuaugcauauau

SEQ ID NO: 634370 - RNA, 19 nt, Artificial Sequence
  Synthetic
cacuaauuuaugcauauau

SEQ ID NO: 634371 - RNA, 20 nt, Artificial Sequence
  Synthetic
acacuaauuuaugcauauau

SEQ ID NO: 634372 - RNA, 21 nt, Artificial Sequence
  Synthetic
gacacuaauuuaugcauauau

SEQ ID NO: 634373 - RNA, 22 nt, Artificial Sequence
  Synthetic
ugacacuaauuuaugcauauau

SEQ ID NO: 634374 - RNA, 23 nt, Artificial Sequence
  Synthetic
augacacuaauuuaugcauauau

SEQ ID NO: 634375 - RNA, 24 nt, Artificial Sequence
  Synthetic
gaugacacuaauuuaugcauauau

SEQ ID NO: 634376 - RNA, 18 nt, Artificial Sequence
  Synthetic
cuuacauaacucauauau

SEQ ID NO: 634377 - RNA, 19 nt, Artificial Sequence
  Synthetic
ccuuacauaacucauauau

SEQ ID NO: 634378 - RNA, 20 nt, Artificial Sequence
  Synthetic
uccuuacauaacucauauau

SEQ ID NO: 634379 - RNA, 21 nt, Artificial Sequence
  Synthetic
uuccuuacauaacucauauau

SEQ ID NO: 634380 - RNA, 22 nt, Artificial Sequence
  Synthetic
uuuccuuacauaacucauauau

SEQ ID NO: 634381 - RNA, 23 nt, Artificial Sequence
  Synthetic
uuuuccuuacauaacucauauau

SEQ ID NO: 634382 - RNA, 24 nt, Artificial Sequence
  Synthetic
guuuuccuuacauaacucauauau

SEQ ID NO: 634383 - RNA, 18 nt, Artificial Sequence
  Synthetic
gauauuaaagagauauau

SEQ ID NO: 634384 - RNA, 19 nt, Artificial Sequence
  Synthetic
agauauuaaagagauauau

SEQ ID NO: 634385 - RNA, 20 nt, Artificial Sequence
  Synthetic
uagauauuaaagagauauau

SEQ ID NO: 634386 - RNA, 21 nt, Artificial Sequence
  Synthetic
uuagauauuaaagagauauau

SEQ ID NO: 634387 - RNA, 22 nt, Artificial Sequence
  Synthetic
cuuagauauuaaagagauauau

SEQ ID NO: 634388 - RNA, 23 nt, Artificial Sequence
  Synthetic
acuuagauauuaaagagauauau

SEQ ID NO: 634389 - RNA, 24 nt, Artificial Sequence
  Synthetic
uacuuagauauuaaagagauauau

SEQ ID NO: 634390 - RNA, 18 nt, Artificial Sequence
  Synthetic
cauuuugugaggauauau

SEQ ID NO: 634391 - RNA, 19 nt, Artificial Sequence
  Synthetic
ucauuuugugaggauauau

SEQ ID NO: 634392 - RNA, 20 nt, Artificial Sequence
  Synthetic
aucauuuugugaggauauau

SEQ ID NO: 634393 - RNA, 21 nt, Artificial Sequence
  Synthetic
aaucauuuugugaggauauau

SEQ ID NO: 634394 - RNA, 22 nt, Artificial Sequence
  Synthetic
aaaucauuuugugaggauauau

SEQ ID NO: 634395 - RNA, 23 nt, Artificial Sequence
  Synthetic
uaaaucauuuugugaggauauau

SEQ ID NO: 634396 - RNA, 24 nt, Artificial Sequence
  Synthetic
cuaaaucauuuugugaggauauau

SEQ ID NO: 634397 - RNA, 18 nt, Artificial Sequence
  Synthetic
agguaauuauggauauau

SEQ ID NO: 634398 - RNA, 19 nt, Artificial Sequence
  Synthetic
aagguaauuauggauauau

SEQ ID NO: 634399 - RNA, 20 nt, Artificial Sequence
  Synthetic
uaagguaauuauggauauau

SEQ ID NO: 634400 - RNA, 21 nt, Artificial Sequence
  Synthetic
uuaagguaauuauggauauau

SEQ ID NO: 634401 - RNA, 22 nt, Artificial Sequence
  Synthetic
uuuaagguaauuauggauauau

SEQ ID NO: 634402 - RNA, 23 nt, Artificial Sequence
  Synthetic
auuuaagguaauuauggauauau

SEQ ID NO: 634403 - RNA, 24 nt, Artificial Sequence
  Synthetic
cauuuaagguaauuauggauauau

SEQ ID NO: 634404 - RNA, 18 nt, Artificial Sequence
  Synthetic
auuacuuaacugauauau

SEQ ID NO: 634405 - RNA, 19 nt, Artificial Sequence
  Synthetic
uauuacuuaacugauauau

SEQ ID NO: 634406 - RNA, 20 nt, Artificial Sequence
  Synthetic
uuauuacuuaacugauauau

SEQ ID NO: 634407 - RNA, 21 nt, Artificial Sequence
  Synthetic
guuauuacuuaacugauauau

SEQ ID NO: 634408 - RNA, 22 nt, Artificial Sequence
  Synthetic
aguuauuacuuaacugauauau

SEQ ID NO: 634409 - RNA, 23 nt, Artificial Sequence
  Synthetic
gaguuauuacuuaacugauauau

SEQ ID NO: 634410 - RNA, 24 nt, Artificial Sequence
  Synthetic
ggaguuauuacuuaacugauauau

SEQ ID NO: 634411 - RNA, 18 nt, Artificial Sequence
  Synthetic
cagaauguccugauauau

SEQ ID NO: 634412 - RNA, 19 nt, Artificial Sequence
  Synthetic
ccagaauguccugauauau

SEQ ID NO: 634413 - RNA, 20 nt, Artificial Sequence
  Synthetic
uccagaauguccugauauau

SEQ ID NO: 634414 - RNA, 21 nt, Artificial Sequence
  Synthetic
cuccagaauguccugauauau

SEQ ID NO: 634415 - RNA, 22 nt, Artificial Sequence
  Synthetic
acuccagaauguccugauauau

SEQ ID NO: 634416 - RNA, 23 nt, Artificial Sequence
  Synthetic
aacuccagaauguccugauauau

SEQ ID NO: 634417 - RNA, 24 nt, Artificial Sequence
  Synthetic
gaacuccagaauguccugauauau

SEQ ID NO: 634418 - RNA, 18 nt, Artificial Sequence
  Synthetic
guuaccagagugauauau

SEQ ID NO: 634419 - RNA, 19 nt, Artificial Sequence
  Synthetic
aguuaccagagugauauau

SEQ ID NO: 634420 - RNA, 20 nt, Artificial Sequence
  Synthetic
uaguuaccagagugauauau

SEQ ID NO: 634421 - RNA, 21 nt, Artificial Sequence
  Synthetic
uuaguuaccagagugauauau

SEQ ID NO: 634422 - RNA, 22 nt, Artificial Sequence
  Synthetic
cuuaguuaccagagugauauau

SEQ ID NO: 634423 - RNA, 23 nt, Artificial Sequence
  Synthetic
ccuuaguuaccagagugauauau

SEQ ID NO: 634424 - RNA, 24 nt, Artificial Sequence
  Synthetic
cccuuaguuaccagagugauauau

SEQ ID NO: 634425 - RNA, 18 nt, Artificial Sequence
  Synthetic
gagguuucauauauauau

SEQ ID NO: 634426 - RNA, 19 nt, Artificial Sequence
  Synthetic
ggagguuucauauauauau

SEQ ID NO: 634427 - RNA, 20 nt, Artificial Sequence
  Synthetic
aggagguuucauauauauau

SEQ ID NO: 634428 - RNA, 21 nt, Artificial Sequence
  Synthetic
gaggagguuucauauauauau

SEQ ID NO: 634429 - RNA, 22 nt, Artificial Sequence
  Synthetic
agaggagguuucauauauauau

SEQ ID NO: 634430 - RNA, 23 nt, Artificial Sequence
  Synthetic
cagaggagguuucauauauauau

SEQ ID NO: 634431 - RNA, 24 nt, Artificial Sequence
  Synthetic
acagaggagguuucauauauauau

SEQ ID NO: 634432 - RNA, 18 nt, Artificial Sequence
  Synthetic
uuuuauauauauauauau

SEQ ID NO: 634433 - RNA, 19 nt, Artificial Sequence
  Synthetic
guuuuauauauauauauau

SEQ ID NO: 634434 - RNA, 20 nt, Artificial Sequence
  Synthetic
aguuuuauauauauauauau

SEQ ID NO: 634435 - RNA, 21 nt, Artificial Sequence
  Synthetic
gaguuuuauauauauauauau

SEQ ID NO: 634436 - RNA, 22 nt, Artificial Sequence
  Synthetic
ugaguuuuauauauauauauau

SEQ ID NO: 634437 - RNA, 23 nt, Artificial Sequence
  Synthetic
cugaguuuuauauauauauauau

SEQ ID NO: 634438 - RNA, 24 nt, Artificial Sequence
  Synthetic
acugaguuuuauauauauauauau

SEQ ID NO: 634439 - RNA, 18 nt, Artificial Sequence
  Synthetic
gugugcguauauauauau

SEQ ID NO: 634440 - RNA, 19 nt, Artificial Sequence
  Synthetic
ugugugcguauauauauau

SEQ ID NO: 634441 - RNA, 20 nt, Artificial Sequence
  Synthetic
augugugcguauauauauau

SEQ ID NO: 634442 - RNA, 21 nt, Artificial Sequence
  Synthetic
uaugugugcguauauauauau

SEQ ID NO: 634443 - RNA, 22 nt, Artificial Sequence
  Synthetic
auaugugugcguauauauauau

SEQ ID NO: 634444 - RNA, 23 nt, Artificial Sequence
  Synthetic
uauaugugugcguauauauauau

SEQ ID NO: 634445 - RNA, 24 nt, Artificial Sequence
  Synthetic
auauaugugugcguauauauauau

SEQ ID NO: 634446 - RNA, 18 nt, Artificial Sequence
  Synthetic
ggaugacuuuauauauau

SEQ ID NO: 634447 - RNA, 19 nt, Artificial Sequence
  Synthetic
uggaugacuuuauauauau

SEQ ID NO: 634448 - RNA, 20 nt, Artificial Sequence
  Synthetic
auggaugacuuuauauauau

SEQ ID NO: 634449 - RNA, 21 nt, Artificial Sequence
  Synthetic
cauggaugacuuuauauauau

SEQ ID NO: 634450 - RNA, 22 nt, Artificial Sequence
  Synthetic
ccauggaugacuuuauauauau

SEQ ID NO: 634451 - RNA, 23 nt, Artificial Sequence
  Synthetic
accauggaugacuuuauauauau

SEQ ID NO: 634452 - RNA, 24 nt, Artificial Sequence
  Synthetic
uaccauggaugacuuuauauauau

SEQ ID NO: 634453 - RNA, 18 nt, Artificial Sequence
  Synthetic
gugugaugcccuauauau

SEQ ID NO: 634454 - RNA, 19 nt, Artificial Sequence
  Synthetic
ugugugaugcccuauauau

SEQ ID NO: 634455 - RNA, 20 nt, Artificial Sequence
  Synthetic
gugugugaugcccuauauau

SEQ ID NO: 634456 - RNA, 21 nt, Artificial Sequence
  Synthetic
ugugugugaugcccuauauau

SEQ ID NO: 634457 - RNA, 22 nt, Artificial Sequence
  Synthetic
gugugugugaugcccuauauau

SEQ ID NO: 634458 - RNA, 23 nt, Artificial Sequence
  Synthetic
ugugugugugaugcccuauauau

SEQ ID NO: 634459 - RNA, 24 nt, Artificial Sequence
  Synthetic
gugugugugugaugcccuauauau

SEQ ID NO: 634460 - RNA, 18 nt, Artificial Sequence
  Synthetic
ugguuuucaaguauauau

SEQ ID NO: 634461 - RNA, 19 nt, Artificial Sequence
  Synthetic
augguuuucaaguauauau

SEQ ID NO: 634462 - RNA, 20 nt, Artificial Sequence
  Synthetic
gaugguuuucaaguauauau

SEQ ID NO: 634463 - RNA, 21 nt, Artificial Sequence
  Synthetic
ugaugguuuucaaguauauau

SEQ ID NO: 634464 - RNA, 22 nt, Artificial Sequence
  Synthetic
cugaugguuuucaaguauauau

SEQ ID NO: 634465 - RNA, 23 nt, Artificial Sequence
  Synthetic
ucugaugguuuucaaguauauau

SEQ ID NO: 634466 - RNA, 24 nt, Artificial Sequence
  Synthetic
aucugaugguuuucaaguauauau

SEQ ID NO: 634467 - RNA, 18 nt, Artificial Sequence
  Synthetic
uuuggcaaauuacuauau

SEQ ID NO: 634468 - RNA, 19 nt, Artificial Sequence
  Synthetic
auuuggcaaauuacuauau

SEQ ID NO: 634469 - RNA, 20 nt, Artificial Sequence
  Synthetic
cauuuggcaaauuacuauau

SEQ ID NO: 634470 - RNA, 21 nt, Artificial Sequence
  Synthetic
ucauuuggcaaauuacuauau

SEQ ID NO: 634471 - RNA, 22 nt, Artificial Sequence
  Synthetic
gucauuuggcaaauuacuauau

SEQ ID NO: 634472 - RNA, 23 nt, Artificial Sequence
  Synthetic
cgucauuuggcaaauuacuauau

SEQ ID NO: 634473 - RNA, 24 nt, Artificial Sequence
  Synthetic
gcgucauuuggcaaauuacuauau

SEQ ID NO: 634474 - RNA, 18 nt, Artificial Sequence
  Synthetic
gugugugaugcccuauau

SEQ ID NO: 634475 - RNA, 19 nt, Artificial Sequence
  Synthetic
ugugugugaugcccuauau

SEQ ID NO: 634476 - RNA, 20 nt, Artificial Sequence
  Synthetic
gugugugugaugcccuauau

SEQ ID NO: 634477 - RNA, 21 nt, Artificial Sequence
  Synthetic
ugugugugugaugcccuauau

SEQ ID NO: 634478 - RNA, 22 nt, Artificial Sequence
  Synthetic
gugugugugugaugcccuauau

SEQ ID NO: 634479 - RNA, 23 nt, Artificial Sequence
  Synthetic
ugugugugugugaugcccuauau

SEQ ID NO: 634480 - RNA, 24 nt, Artificial Sequence
  Synthetic
gugugugugugugaugcccuauau

SEQ ID NO: 634481 - RNA, 18 nt, Artificial Sequence
  Synthetic
uaaaauuaauugcuauau

SEQ ID NO: 634482 - RNA, 19 nt, Artificial Sequence
  Synthetic
auaaaauuaauugcuauau

SEQ ID NO: 634483 - RNA, 20 nt, Artificial Sequence
  Synthetic
aauaaaauuaauugcuauau

SEQ ID NO: 634484 - RNA, 21 nt, Artificial Sequence
  Synthetic
aaauaaaauuaauugcuauau

SEQ ID NO: 634485 - RNA, 22 nt, Artificial Sequence
  Synthetic
uaaauaaaauuaauugcuauau

SEQ ID NO: 634486 - RNA, 23 nt, Artificial Sequence
  Synthetic
uuaaauaaaauuaauugcuauau

SEQ ID NO: 634487 - RNA, 24 nt, Artificial Sequence
  Synthetic
uuuaaauaaaauuaauugcuauau

SEQ ID NO: 634488 - RNA, 18 nt, Artificial Sequence
  Synthetic
aaaauguauuaucuauau

SEQ ID NO: 634489 - RNA, 19 nt, Artificial Sequence
  Synthetic
gaaaauguauuaucuauau

SEQ ID NO: 634490 - RNA, 20 nt, Artificial Sequence
  Synthetic
ggaaaauguauuaucuauau

SEQ ID NO: 634491 - RNA, 21 nt, Artificial Sequence
  Synthetic
gggaaaauguauuaucuauau

SEQ ID NO: 634492 - RNA, 22 nt, Artificial Sequence
  Synthetic
ugggaaaauguauuaucuauau

SEQ ID NO: 634493 - RNA, 23 nt, Artificial Sequence
  Synthetic
uugggaaaauguauuaucuauau

SEQ ID NO: 634494 - RNA, 24 nt, Artificial Sequence
  Synthetic
guugggaaaauguauuaucuauau

SEQ ID NO: 634495 - RNA, 18 nt, Artificial Sequence
  Synthetic
ugaaacucauaaguauau

SEQ ID NO: 634496 - RNA, 19 nt, Artificial Sequence
  Synthetic
gugaaacucauaaguauau

SEQ ID NO: 634497 - RNA, 20 nt, Artificial Sequence
  Synthetic
ugugaaacucauaaguauau

SEQ ID NO: 634498 - RNA, 21 nt, Artificial Sequence
  Synthetic
augugaaacucauaaguauau

SEQ ID NO: 634499 - RNA, 22 nt, Artificial Sequence
  Synthetic
gaugugaaacucauaaguauau

SEQ ID NO: 634500 - RNA, 23 nt, Artificial Sequence
  Synthetic
ggaugugaaacucauaaguauau

SEQ ID NO: 634501 - RNA, 24 nt, Artificial Sequence
  Synthetic
aggaugugaaacucauaaguauau

SEQ ID NO: 634502 - RNA, 18 nt, Artificial Sequence
  Synthetic
ucuaaauugagaguauau

SEQ ID NO: 634503 - RNA, 19 nt, Artificial Sequence
  Synthetic
gucuaaauugagaguauau

SEQ ID NO: 634504 - RNA, 20 nt, Artificial Sequence
  Synthetic
ugucuaaauugagaguauau

SEQ ID NO: 634505 - RNA, 21 nt, Artificial Sequence
  Synthetic
augucuaaauugagaguauau

SEQ ID NO: 634506 - RNA, 22 nt, Artificial Sequence
  Synthetic
uaugucuaaauugagaguauau

SEQ ID NO: 634507 - RNA, 23 nt, Artificial Sequence
  Synthetic
uuaugucuaaauugagaguauau

SEQ ID NO: 634508 - RNA, 24 nt, Artificial Sequence
  Synthetic
uuuaugucuaaauugagaguauau

SEQ ID NO: 634509 - RNA, 18 nt, Artificial Sequence
  Synthetic
ucagaaaauaggguauau

SEQ ID NO: 634510 - RNA, 19 nt, Artificial Sequence
  Synthetic
uucagaaaauaggguauau

SEQ ID NO: 634511 - RNA, 20 nt, Artificial Sequence
  Synthetic
guucagaaaauaggguauau

SEQ ID NO: 634512 - RNA, 21 nt, Artificial Sequence
  Synthetic
uguucagaaaauaggguauau

SEQ ID NO: 634513 - RNA, 22 nt, Artificial Sequence
  Synthetic
auguucagaaaauaggguauau

SEQ ID NO: 634514 - RNA, 23 nt, Artificial Sequence
  Synthetic
aauguucagaaaauaggguauau

SEQ ID NO: 634515 - RNA, 24 nt, Artificial Sequence
  Synthetic
aaauguucagaaaauaggguauau

SEQ ID NO: 634516 - RNA, 18 nt, Artificial Sequence
  Synthetic
uagauuaaucauguauau

SEQ ID NO: 634517 - RNA, 19 nt, Artificial Sequence
  Synthetic
auagauuaaucauguauau

SEQ ID NO: 634518 - RNA, 20 nt, Artificial Sequence
  Synthetic
aauagauuaaucauguauau

SEQ ID NO: 634519 - RNA, 21 nt, Artificial Sequence
  Synthetic
aaauagauuaaucauguauau

SEQ ID NO: 634520 - RNA, 22 nt, Artificial Sequence
  Synthetic
aaaauagauuaaucauguauau

SEQ ID NO: 634521 - RNA, 23 nt, Artificial Sequence
  Synthetic
uaaaauagauuaaucauguauau

SEQ ID NO: 634522 - RNA, 24 nt, Artificial Sequence
  Synthetic
cuaaaauagauuaaucauguauau

SEQ ID NO: 634523 - RNA, 18 nt, Artificial Sequence
  Synthetic
uaacaguuguauguauau

SEQ ID NO: 634524 - RNA, 19 nt, Artificial Sequence
  Synthetic
auaacaguuguauguauau

SEQ ID NO: 634525 - RNA, 20 nt, Artificial Sequence
  Synthetic
uauaacaguuguauguauau

SEQ ID NO: 634526 - RNA, 21 nt, Artificial Sequence
  Synthetic
auauaacaguuguauguauau

SEQ ID NO: 634527 - RNA, 22 nt, Artificial Sequence
  Synthetic
uauauaacaguuguauguauau

SEQ ID NO: 634528 - RNA, 23 nt, Artificial Sequence
  Synthetic
auauauaacaguuguauguauau

SEQ ID NO: 634529 - RNA, 24 nt, Artificial Sequence
  Synthetic
gauauauaacaguuguauguauau

SEQ ID NO: 634530 - RNA, 18 nt, Artificial Sequence
  Synthetic
acagcccucgguguauau

SEQ ID NO: 634531 - RNA, 19 nt, Artificial Sequence
  Synthetic
uacagcccucgguguauau

SEQ ID NO: 634532 - RNA, 20 nt, Artificial Sequence
  Synthetic
guacagcccucgguguauau

SEQ ID NO: 634533 - RNA, 21 nt, Artificial Sequence
  Synthetic
aguacagcccucgguguauau

SEQ ID NO: 634534 - RNA, 22 nt, Artificial Sequence
  Synthetic
gaguacagcccucgguguauau

SEQ ID NO: 634535 - RNA, 23 nt, Artificial Sequence
  Synthetic
ggaguacagcccucgguguauau

SEQ ID NO: 634536 - RNA, 24 nt, Artificial Sequence
  Synthetic
aggaguacagcccucgguguauau

SEQ ID NO: 634537 - RNA, 18 nt, Artificial Sequence
  Synthetic
uuguuuuauuguguauau

SEQ ID NO: 634538 - RNA, 19 nt, Artificial Sequence
  Synthetic
uuuguuuuauuguguauau

SEQ ID NO: 634539 - RNA, 20 nt, Artificial Sequence
  Synthetic
auuuguuuuauuguguauau

SEQ ID NO: 634540 - RNA, 21 nt, Artificial Sequence
  Synthetic
cauuuguuuuauuguguauau

SEQ ID NO: 634541 - RNA, 22 nt, Artificial Sequence
  Synthetic
acauuuguuuuauuguguauau

SEQ ID NO: 634542 - RNA, 23 nt, Artificial Sequence
  Synthetic
aacauuuguuuuauuguguauau

SEQ ID NO: 634543 - RNA, 24 nt, Artificial Sequence
  Synthetic
caacauuuguuuuauuguguauau

SEQ ID NO: 634544 - RNA, 18 nt, Artificial Sequence
  Synthetic
cuuaaucauauuguauau

SEQ ID NO: 634545 - RNA, 19 nt, Artificial Sequence
  Synthetic
ccuuaaucauauuguauau

SEQ ID NO: 634546 - RNA, 20 nt, Artificial Sequence
  Synthetic
uccuuaaucauauuguauau

SEQ ID NO: 634547 - RNA, 21 nt, Artificial Sequence
  Synthetic
auccuuaaucauauuguauau

SEQ ID NO: 634548 - RNA, 22 nt, Artificial Sequence
  Synthetic
uauccuuaaucauauuguauau

SEQ ID NO: 634549 - RNA, 23 nt, Artificial Sequence
  Synthetic
auauccuuaaucauauuguauau

SEQ ID NO: 634550 - RNA, 24 nt, Artificial Sequence
  Synthetic
uauauccuuaaucauauuguauau

SEQ ID NO: 634551 - RNA, 18 nt, Artificial Sequence
  Synthetic
ugguucaagguuguauau

SEQ ID NO: 634552 - RNA, 19 nt, Artificial Sequence
  Synthetic
gugguucaagguuguauau

SEQ ID NO: 634553 - RNA, 20 nt, Artificial Sequence
  Synthetic
ugugguucaagguuguauau

SEQ ID NO: 634554 - RNA, 21 nt, Artificial Sequence
  Synthetic
cugugguucaagguuguauau

SEQ ID NO: 634555 - RNA, 22 nt, Artificial Sequence
  Synthetic
acugugguucaagguuguauau

SEQ ID NO: 634556 - RNA, 23 nt, Artificial Sequence
  Synthetic
cacugugguucaagguuguauau

SEQ ID NO: 634557 - RNA, 24 nt, Artificial Sequence
  Synthetic
ucacugugguucaagguuguauau

SEQ ID NO: 634558 - RNA, 18 nt, Artificial Sequence
  Synthetic
uguguuacuuuuguauau

SEQ ID NO: 634559 - RNA, 19 nt, Artificial Sequence
  Synthetic
auguguuacuuuuguauau

SEQ ID NO: 634560 - RNA, 20 nt, Artificial Sequence
  Synthetic
cauguguuacuuuuguauau

SEQ ID NO: 634561 - RNA, 21 nt, Artificial Sequence
  Synthetic
gcauguguuacuuuuguauau

SEQ ID NO: 634562 - RNA, 22 nt, Artificial Sequence
  Synthetic
agcauguguuacuuuuguauau

SEQ ID NO: 634563 - RNA, 23 nt, Artificial Sequence
  Synthetic
gagcauguguuacuuuuguauau

SEQ ID NO: 634564 - RNA, 24 nt, Artificial Sequence
  Synthetic
ugagcauguguuacuuuuguauau

SEQ ID NO: 634565 - RNA, 18 nt, Artificial Sequence
  Synthetic
uauuuagagaaauuauau

SEQ ID NO: 634566 - RNA, 19 nt, Artificial Sequence
  Synthetic
auauuuagagaaauuauau

SEQ ID NO: 634567 - RNA, 20 nt, Artificial Sequence
  Synthetic
gauauuuagagaaauuauau

SEQ ID NO: 634568 - RNA, 21 nt, Artificial Sequence
  Synthetic
ugauauuuagagaaauuauau

SEQ ID NO: 634569 - RNA, 22 nt, Artificial Sequence
  Synthetic
gugauauuuagagaaauuauau

SEQ ID NO: 634570 - RNA, 23 nt, Artificial Sequence
  Synthetic
agugauauuuagagaaauuauau

SEQ ID NO: 634571 - RNA, 24 nt, Artificial Sequence
  Synthetic
cagugauauuuagagaaauuauau

SEQ ID NO: 634572 - RNA, 18 nt, Artificial Sequence
  Synthetic
aacauuaugucauuauau

SEQ ID NO: 634573 - RNA, 19 nt, Artificial Sequence
  Synthetic
caacauuaugucauuauau

SEQ ID NO: 634574 - RNA, 20 nt, Artificial Sequence
  Synthetic
acaacauuaugucauuauau

SEQ ID NO: 634575 - RNA, 21 nt, Artificial Sequence
  Synthetic
aacaacauuaugucauuauau

SEQ ID NO: 634576 - RNA, 22 nt, Artificial Sequence
  Synthetic
uaacaacauuaugucauuauau

SEQ ID NO: 634577 - RNA, 23 nt, Artificial Sequence
  Synthetic
cuaacaacauuaugucauuauau

SEQ ID NO: 634578 - RNA, 24 nt, Artificial Sequence
  Synthetic
ucuaacaacauuaugucauuauau

SEQ ID NO: 634579 - RNA, 18 nt, Artificial Sequence
  Synthetic
guugcucacaacuuauau

SEQ ID NO: 634580 - RNA, 19 nt, Artificial Sequence
  Synthetic
aguugcucacaacuuauau

SEQ ID NO: 634581 - RNA, 20 nt, Artificial Sequence
  Synthetic
aaguugcucacaacuuauau

SEQ ID NO: 634582 - RNA, 21 nt, Artificial Sequence
  Synthetic
uaaguugcucacaacuuauau

SEQ ID NO: 634583 - RNA, 22 nt, Artificial Sequence
  Synthetic
uuaaguugcucacaacuuauau

SEQ ID NO: 634584 - RNA, 23 nt, Artificial Sequence
  Synthetic
cuuaaguugcucacaacuuauau

SEQ ID NO: 634585 - RNA, 24 nt, Artificial Sequence
  Synthetic
ccuuaaguugcucacaacuuauau

SEQ ID NO: 634586 - RNA, 18 nt, Artificial Sequence
  Synthetic
guaugauuucacuuauau

SEQ ID NO: 634587 - RNA, 19 nt, Artificial Sequence
  Synthetic
uguaugauuucacuuauau

SEQ ID NO: 634588 - RNA, 20 nt, Artificial Sequence
  Synthetic
cuguaugauuucacuuauau

SEQ ID NO: 634589 - RNA, 21 nt, Artificial Sequence
  Synthetic
acuguaugauuucacuuauau

SEQ ID NO: 634590 - RNA, 22 nt, Artificial Sequence
  Synthetic
uacuguaugauuucacuuauau

SEQ ID NO: 634591 - RNA, 23 nt, Artificial Sequence
  Synthetic
auacuguaugauuucacuuauau

SEQ ID NO: 634592 - RNA, 24 nt, Artificial Sequence
  Synthetic
aauacuguaugauuucacuuauau

SEQ ID NO: 634593 - RNA, 18 nt, Artificial Sequence
  Synthetic
guauaaauaaccuuauau

SEQ ID NO: 634594 - RNA, 19 nt, Artificial Sequence
  Synthetic
gguauaaauaaccuuauau

SEQ ID NO: 634595 - RNA, 20 nt, Artificial Sequence
  Synthetic
agguauaaauaaccuuauau

SEQ ID NO: 634596 - RNA, 21 nt, Artificial Sequence
  Synthetic
aagguauaaauaaccuuauau

SEQ ID NO: 634597 - RNA, 22 nt, Artificial Sequence
  Synthetic
aaagguauaaauaaccuuauau

SEQ ID NO: 634598 - RNA, 23 nt, Artificial Sequence
  Synthetic
aaaagguauaaauaaccuuauau

SEQ ID NO: 634599 - RNA, 24 nt, Artificial Sequence
  Synthetic
aaaaagguauaaauaaccuuauau

SEQ ID NO: 634600 - RNA, 18 nt, Artificial Sequence
  Synthetic
ucauggcuguccuuauau

SEQ ID NO: 634601 - RNA, 19 nt, Artificial Sequence
  Synthetic
aucauggcuguccuuauau

SEQ ID NO: 634602 - RNA, 20 nt, Artificial Sequence
  Synthetic
aaucauggcuguccuuauau

SEQ ID NO: 634603 - RNA, 21 nt, Artificial Sequence
  Synthetic
aaaucauggcuguccuuauau

SEQ ID NO: 634604 - RNA, 22 nt, Artificial Sequence
  Synthetic
aaaaucauggcuguccuuauau

SEQ ID NO: 634605 - RNA, 23 nt, Artificial Sequence
  Synthetic
uaaaaucauggcuguccuuauau

SEQ ID NO: 634606 - RNA, 24 nt, Artificial Sequence
  Synthetic
guaaaaucauggcuguccuuauau

SEQ ID NO: 634607 - RNA, 18 nt, Artificial Sequence
  Synthetic
auaguaucauucuuauau

SEQ ID NO: 634608 - RNA, 19 nt, Artificial Sequence
  Synthetic
aauaguaucauucuuauau

SEQ ID NO: 634609 - RNA, 20 nt, Artificial Sequence
  Synthetic
uaauaguaucauucuuauau

SEQ ID NO: 634610 - RNA, 21 nt, Artificial Sequence
  Synthetic
auaauaguaucauucuuauau

SEQ ID NO: 634611 - RNA, 22 nt, Artificial Sequence
  Synthetic
uauaauaguaucauucuuauau

SEQ ID NO: 634612 - RNA, 23 nt, Artificial Sequence
  Synthetic
uuauaauaguaucauucuuauau

SEQ ID NO: 634613 - RNA, 24 nt, Artificial Sequence
  Synthetic
uuuauaauaguaucauucuuauau

SEQ ID NO: 634614 - RNA, 18 nt, Artificial Sequence
  Synthetic
uuuauuuccaauuuauau

SEQ ID NO: 634615 - RNA, 19 nt, Artificial Sequence
  Synthetic
auuuauuuccaauuuauau

SEQ ID NO: 634616 - RNA, 20 nt, Artificial Sequence
  Synthetic
aauuuauuuccaauuuauau

SEQ ID NO: 634617 - RNA, 21 nt, Artificial Sequence
  Synthetic
caauuuauuuccaauuuauau

SEQ ID NO: 634618 - RNA, 22 nt, Artificial Sequence
  Synthetic
ccaauuuauuuccaauuuauau

SEQ ID NO: 634619 - RNA, 23 nt, Artificial Sequence
  Synthetic
uccaauuuauuuccaauuuauau

SEQ ID NO: 634620 - RNA, 24 nt, Artificial Sequence
  Synthetic
auccaauuuauuuccaauuuauau

SEQ ID NO: 634621 - RNA, 18 nt, Artificial Sequence
  Synthetic
gaaccacgagauuuauau

SEQ ID NO: 634622 - RNA, 19 nt, Artificial Sequence
  Synthetic
agaaccacgagauuuauau

SEQ ID NO: 634623 - RNA, 20 nt, Artificial Sequence
  Synthetic
aagaaccacgagauuuauau

SEQ ID NO: 634624 - RNA, 21 nt, Artificial Sequence
  Synthetic
aaagaaccacgagauuuauau

SEQ ID NO: 634625 - RNA, 22 nt, Artificial Sequence
  Synthetic
aaaagaaccacgagauuuauau

SEQ ID NO: 634626 - RNA, 23 nt, Artificial Sequence
  Synthetic
uaaaagaaccacgagauuuauau

SEQ ID NO: 634627 - RNA, 24 nt, Artificial Sequence
  Synthetic
auaaaagaaccacgagauuuauau

SEQ ID NO: 634628 - RNA, 18 nt, Artificial Sequence
  Synthetic
cuaucacuugauuuauau

SEQ ID NO: 634629 - RNA, 19 nt, Artificial Sequence
  Synthetic
ucuaucacuugauuuauau

SEQ ID NO: 634630 - RNA, 20 nt, Artificial Sequence
  Synthetic
aucuaucacuugauuuauau

SEQ ID NO: 634631 - RNA, 21 nt, Artificial Sequence
  Synthetic
uaucuaucacuugauuuauau

SEQ ID NO: 634632 - RNA, 22 nt, Artificial Sequence
  Synthetic
auaucuaucacuugauuuauau

SEQ ID NO: 634633 - RNA, 23 nt, Artificial Sequence
  Synthetic
uauaucuaucacuugauuuauau

SEQ ID NO: 634634 - RNA, 24 nt, Artificial Sequence
  Synthetic
uuauaucuaucacuugauuuauau

SEQ ID NO: 634635 - RNA, 18 nt, Artificial Sequence
  Synthetic
aaauuuccauguuuauau

SEQ ID NO: 634636 - RNA, 19 nt, Artificial Sequence
  Synthetic
aaaauuuccauguuuauau

SEQ ID NO: 634637 - RNA, 20 nt, Artificial Sequence
  Synthetic
gaaaauuuccauguuuauau

SEQ ID NO: 634638 - RNA, 21 nt, Artificial Sequence
  Synthetic
ugaaaauuuccauguuuauau

SEQ ID NO: 634639 - RNA, 22 nt, Artificial Sequence
  Synthetic
augaaaauuuccauguuuauau

SEQ ID NO: 634640 - RNA, 23 nt, Artificial Sequence
  Synthetic
aaugaaaauuuccauguuuauau

SEQ ID NO: 634641 - RNA, 24 nt, Artificial Sequence
  Synthetic
aaaugaaaauuuccauguuuauau

SEQ ID NO: 634642 - RNA, 18 nt, Artificial Sequence
  Synthetic
caauuauguauuuuauau

SEQ ID NO: 634643 - RNA, 19 nt, Artificial Sequence
  Synthetic
ucaauuauguauuuuauau

SEQ ID NO: 634644 - RNA, 20 nt, Artificial Sequence
  Synthetic
uucaauuauguauuuuauau

SEQ ID NO: 634645 - RNA, 21 nt, Artificial Sequence
  Synthetic
uuucaauuauguauuuuauau

SEQ ID NO: 634646 - RNA, 22 nt, Artificial Sequence
  Synthetic
auuucaauuauguauuuuauau

SEQ ID NO: 634647 - RNA, 23 nt, Artificial Sequence
  Synthetic
aauuucaauuauguauuuuauau

SEQ ID NO: 634648 - RNA, 24 nt, Artificial Sequence
  Synthetic
uaauuucaauuauguauuuuauau

SEQ ID NO: 634649 - RNA, 18 nt, Artificial Sequence
  Synthetic
uuugcuucacuuuuauau

SEQ ID NO: 634650 - RNA, 19 nt, Artificial Sequence
  Synthetic
guuugcuucacuuuuauau

SEQ ID NO: 634651 - RNA, 20 nt, Artificial Sequence
  Synthetic
uguuugcuucacuuuuauau

SEQ ID NO: 634652 - RNA, 21 nt, Artificial Sequence
  Synthetic
uuguuugcuucacuuuuauau

SEQ ID NO: 634653 - RNA, 22 nt, Artificial Sequence
  Synthetic
uuuguuugcuucacuuuuauau

SEQ ID NO: 634654 - RNA, 23 nt, Artificial Sequence
  Synthetic
uuuuguuugcuucacuuuuauau

SEQ ID NO: 634655 - RNA, 24 nt, Artificial Sequence
  Synthetic
uuuuuguuugcuucacuuuuauau

SEQ ID NO: 634656 - RNA, 18 nt, Artificial Sequence
  Synthetic
ugacuucuaguuuuauau

SEQ ID NO: 634657 - RNA, 19 nt, Artificial Sequence
  Synthetic
cugacuucuaguuuuauau

SEQ ID NO: 634658 - RNA, 20 nt, Artificial Sequence
  Synthetic
ccugacuucuaguuuuauau

SEQ ID NO: 634659 - RNA, 21 nt, Artificial Sequence
  Synthetic
uccugacuucuaguuuuauau

SEQ ID NO: 634660 - RNA, 22 nt, Artificial Sequence
  Synthetic
uuccugacuucuaguuuuauau

SEQ ID NO: 634661 - RNA, 23 nt, Artificial Sequence
  Synthetic
uuuccugacuucuaguuuuauau

SEQ ID NO: 634662 - RNA, 24 nt, Artificial Sequence
  Synthetic
guuuccugacuucuaguuuuauau

SEQ ID NO: 634663 - RNA, 18 nt, Artificial Sequence
  Synthetic
uucuuuuuuguuuuauau

SEQ ID NO: 634664 - RNA, 19 nt, Artificial Sequence
  Synthetic
auucuuuuuuguuuuauau

SEQ ID NO: 634665 - RNA, 20 nt, Artificial Sequence
  Synthetic
uauucuuuuuuguuuuauau

SEQ ID NO: 634666 - RNA, 21 nt, Artificial Sequence
  Synthetic
cuauucuuuuuuguuuuauau

SEQ ID NO: 634667 - RNA, 22 nt, Artificial Sequence
  Synthetic
ccuauucuuuuuuguuuuauau

SEQ ID NO: 634668 - RNA, 23 nt, Artificial Sequence
  Synthetic
gccuauucuuuuuuguuuuauau

SEQ ID NO: 634669 - RNA, 24 nt, Artificial Sequence
  Synthetic
ggccuauucuuuuuuguuuuauau

SEQ ID NO: 634670 - RNA, 18 nt, Artificial Sequence
  Synthetic
acaaaaaaaaaaaacuau

SEQ ID NO: 634671 - RNA, 19 nt, Artificial Sequence
  Synthetic
uacaaaaaaaaaaaacuau

SEQ ID NO: 634672 - RNA, 20 nt, Artificial Sequence
  Synthetic
uuacaaaaaaaaaaaacuau

SEQ ID NO: 634673 - RNA, 21 nt, Artificial Sequence
  Synthetic
auuacaaaaaaaaaaaacuau

SEQ ID NO: 634674 - RNA, 22 nt, Artificial Sequence
  Synthetic
cauuacaaaaaaaaaaaacuau

SEQ ID NO: 634675 - RNA, 23 nt, Artificial Sequence
  Synthetic
acauuacaaaaaaaaaaaacuau

SEQ ID NO: 634676 - RNA, 24 nt, Artificial Sequence
  Synthetic
aacauuacaaaaaaaaaaaacuau

SEQ ID NO: 634677 - RNA, 18 nt, Artificial Sequence
  Synthetic
augaaaaaauaaaacuau

SEQ ID NO: 634678 - RNA, 19 nt, Artificial Sequence
  Synthetic
aaugaaaaaauaaaacuau

SEQ ID NO: 634679 - RNA, 20 nt, Artificial Sequence
  Synthetic
aaaugaaaaaauaaaacuau

SEQ ID NO: 634680 - RNA, 21 nt, Artificial Sequence
  Synthetic
uaaaugaaaaaauaaaacuau

SEQ ID NO: 634681 - RNA, 22 nt, Artificial Sequence
  Synthetic
uuaaaugaaaaaauaaaacuau

SEQ ID NO: 634682 - RNA, 23 nt, Artificial Sequence
  Synthetic
uuuaaaugaaaaaauaaaacuau

SEQ ID NO: 634683 - RNA, 24 nt, Artificial Sequence
  Synthetic
uuuuaaaugaaaaaauaaaacuau

SEQ ID NO: 634684 - RNA, 18 nt, Artificial Sequence
  Synthetic
gcaggccauuaaaacuau

SEQ ID NO: 634685 - RNA, 19 nt, Artificial Sequence
  Synthetic
agcaggccauuaaaacuau

SEQ ID NO: 634686 - RNA, 20 nt, Artificial Sequence
  Synthetic
gagcaggccauuaaaacuau

SEQ ID NO: 634687 - RNA, 21 nt, Artificial Sequence
  Synthetic
ugagcaggccauuaaaacuau

SEQ ID NO: 634688 - RNA, 22 nt, Artificial Sequence
  Synthetic
augagcaggccauuaaaacuau

SEQ ID NO: 634689 - RNA, 23 nt, Artificial Sequence
  Synthetic
caugagcaggccauuaaaacuau

SEQ ID NO: 634690 - RNA, 24 nt, Artificial Sequence
  Synthetic
ccaugagcaggccauuaaaacuau

SEQ ID NO: 634691 - RNA, 18 nt, Artificial Sequence
  Synthetic
ugucugcucccaaacuau

SEQ ID NO: 634692 - RNA, 19 nt, Artificial Sequence
  Synthetic
uugucugcucccaaacuau

SEQ ID NO: 634693 - RNA, 20 nt, Artificial Sequence
  Synthetic
uuugucugcucccaaacuau

SEQ ID NO: 634694 - RNA, 21 nt, Artificial Sequence
  Synthetic
uuuugucugcucccaaacuau

SEQ ID NO: 634695 - RNA, 22 nt, Artificial Sequence
  Synthetic
uuuuugucugcucccaaacuau

SEQ ID NO: 634696 - RNA, 23 nt, Artificial Sequence
  Synthetic
guuuuugucugcucccaaacuau

SEQ ID NO: 634697 - RNA, 24 nt, Artificial Sequence
  Synthetic
aguuuuugucugcucccaaacuau

SEQ ID NO: 634698 - RNA, 18 nt, Artificial Sequence
  Synthetic
acugcccaaagaaacuau

SEQ ID NO: 634699 - RNA, 19 nt, Artificial Sequence
  Synthetic
cacugcccaaagaaacuau

SEQ ID NO: 634700 - RNA, 20 nt, Artificial Sequence
  Synthetic
ucacugcccaaagaaacuau

SEQ ID NO: 634701 - RNA, 21 nt, Artificial Sequence
  Synthetic
aucacugcccaaagaaacuau

SEQ ID NO: 634702 - RNA, 22 nt, Artificial Sequence
  Synthetic
aaucacugcccaaagaaacuau

SEQ ID NO: 634703 - RNA, 23 nt, Artificial Sequence
  Synthetic
gaaucacugcccaaagaaacuau

SEQ ID NO: 634704 - RNA, 24 nt, Artificial Sequence
  Synthetic
agaaucacugcccaaagaaacuau

SEQ ID NO: 634705 - RNA, 18 nt, Artificial Sequence
  Synthetic
aguguugccugaaacuau

SEQ ID NO: 634706 - RNA, 19 nt, Artificial Sequence
  Synthetic
aaguguugccugaaacuau

SEQ ID NO: 634707 - RNA, 20 nt, Artificial Sequence
  Synthetic
caaguguugccugaaacuau

SEQ ID NO: 634708 - RNA, 21 nt, Artificial Sequence
  Synthetic
acaaguguugccugaaacuau

SEQ ID NO: 634709 - RNA, 22 nt, Artificial Sequence
  Synthetic
gacaaguguugccugaaacuau

SEQ ID NO: 634710 - RNA, 23 nt, Artificial Sequence
  Synthetic
cgacaaguguugccugaaacuau

SEQ ID NO: 634711 - RNA, 24 nt, Artificial Sequence
  Synthetic
acgacaaguguugccugaaacuau

SEQ ID NO: 634712 - RNA, 18 nt, Artificial Sequence
  Synthetic
gcaugacggauaaacuau

SEQ ID NO: 634713 - RNA, 19 nt, Artificial Sequence
  Synthetic
ugcaugacggauaaacuau

SEQ ID NO: 634714 - RNA, 20 nt, Artificial Sequence
  Synthetic
augcaugacggauaaacuau

SEQ ID NO: 634715 - RNA, 21 nt, Artificial Sequence
  Synthetic
gaugcaugacggauaaacuau

SEQ ID NO: 634716 - RNA, 22 nt, Artificial Sequence
  Synthetic
agaugcaugacggauaaacuau

SEQ ID NO: 634717 - RNA, 23 nt, Artificial Sequence
  Synthetic
uagaugcaugacggauaaacuau

SEQ ID NO: 634718 - RNA, 24 nt, Artificial Sequence
  Synthetic
uuagaugcaugacggauaaacuau

SEQ ID NO: 634719 - RNA, 18 nt, Artificial Sequence
  Synthetic
uuagaacuauuaaacuau

SEQ ID NO: 634720 - RNA, 19 nt, Artificial Sequence
  Synthetic
guuagaacuauuaaacuau

SEQ ID NO: 634721 - RNA, 20 nt, Artificial Sequence
  Synthetic
uguuagaacuauuaaacuau

SEQ ID NO: 634722 - RNA, 21 nt, Artificial Sequence
  Synthetic
cuguuagaacuauuaaacuau

SEQ ID NO: 634723 - RNA, 22 nt, Artificial Sequence
  Synthetic
acuguuagaacuauuaaacuau

SEQ ID NO: 634724 - RNA, 23 nt, Artificial Sequence
  Synthetic
aacuguuagaacuauuaaacuau

SEQ ID NO: 634725 - RNA, 24 nt, Artificial Sequence
  Synthetic
aaacuguuagaacuauuaaacuau

SEQ ID NO: 634726 - RNA, 18 nt, Artificial Sequence
  Synthetic
uagaaaaauuuaaacuau

SEQ ID NO: 634727 - RNA, 19 nt, Artificial Sequence
  Synthetic
guagaaaaauuuaaacuau

SEQ ID NO: 634728 - RNA, 20 nt, Artificial Sequence
  Synthetic
aguagaaaaauuuaaacuau

SEQ ID NO: 634729 - RNA, 21 nt, Artificial Sequence
  Synthetic
uaguagaaaaauuuaaacuau

SEQ ID NO: 634730 - RNA, 22 nt, Artificial Sequence
  Synthetic
uuaguagaaaaauuuaaacuau

SEQ ID NO: 634731 - RNA, 23 nt, Artificial Sequence
  Synthetic
uuuaguagaaaaauuuaaacuau

SEQ ID NO: 634732 - RNA, 24 nt, Artificial Sequence
  Synthetic
uuuuaguagaaaaauuuaaacuau

SEQ ID NO: 634733 - RNA, 18 nt, Artificial Sequence
  Synthetic
ccucaugacaccaacuau

SEQ ID NO: 634734 - RNA, 19 nt, Artificial Sequence
  Synthetic
accucaugacaccaacuau

SEQ ID NO: 634735 - RNA, 20 nt, Artificial Sequence
  Synthetic
uaccucaugacaccaacuau

SEQ ID NO: 634736 - RNA, 21 nt, Artificial Sequence
  Synthetic
auaccucaugacaccaacuau

SEQ ID NO: 634737 - RNA, 22 nt, Artificial Sequence
  Synthetic
aauaccucaugacaccaacuau

SEQ ID NO: 634738 - RNA, 23 nt, Artificial Sequence
  Synthetic
aaauaccucaugacaccaacuau

SEQ ID NO: 634739 - RNA, 24 nt, Artificial Sequence
  Synthetic
uaaauaccucaugacaccaacuau

SEQ ID NO: 634740 - RNA, 18 nt, Artificial Sequence
  Synthetic
acgaacauuuccaacuau

SEQ ID NO: 634741 - RNA, 19 nt, Artificial Sequence
  Synthetic
cacgaacauuuccaacuau

SEQ ID NO: 634742 - RNA, 20 nt, Artificial Sequence
  Synthetic
ucacgaacauuuccaacuau

SEQ ID NO: 634743 - RNA, 21 nt, Artificial Sequence
  Synthetic
uucacgaacauuuccaacuau

SEQ ID NO: 634744 - RNA, 22 nt, Artificial Sequence
  Synthetic
auucacgaacauuuccaacuau

SEQ ID NO: 634745 - RNA, 23 nt, Artificial Sequence
  Synthetic
aauucacgaacauuuccaacuau

SEQ ID NO: 634746 - RNA, 24 nt, Artificial Sequence
  Synthetic
aaauucacgaacauuuccaacuau

SEQ ID NO: 634747 - RNA, 18 nt, Artificial Sequence
  Synthetic
aagacuuacuagaacuau

SEQ ID NO: 634748 - RNA, 19 nt, Artificial Sequence
  Synthetic
aaagacuuacuagaacuau

SEQ ID NO: 634749 - RNA, 20 nt, Artificial Sequence
  Synthetic
aaaagacuuacuagaacuau

SEQ ID NO: 634750 - RNA, 21 nt, Artificial Sequence
  Synthetic
gaaaagacuuacuagaacuau

SEQ ID NO: 634751 - RNA, 22 nt, Artificial Sequence
  Synthetic
agaaaagacuuacuagaacuau

SEQ ID NO: 634752 - RNA, 23 nt, Artificial Sequence
  Synthetic
uagaaaagacuuacuagaacuau

SEQ ID NO: 634753 - RNA, 24 nt, Artificial Sequence
  Synthetic
guagaaaagacuuacuagaacuau

SEQ ID NO: 634754 - RNA, 18 nt, Artificial Sequence
  Synthetic
cuaagcaaucugaacuau

SEQ ID NO: 634755 - RNA, 19 nt, Artificial Sequence
  Synthetic
acuaagcaaucugaacuau

SEQ ID NO: 634756 - RNA, 20 nt, Artificial Sequence
  Synthetic
gacuaagcaaucugaacuau

SEQ ID NO: 634757 - RNA, 21 nt, Artificial Sequence
  Synthetic
agacuaagcaaucugaacuau

SEQ ID NO: 634758 - RNA, 22 nt, Artificial Sequence
  Synthetic
cagacuaagcaaucugaacuau

SEQ ID NO: 634759 - RNA, 23 nt, Artificial Sequence
  Synthetic
ucagacuaagcaaucugaacuau

SEQ ID NO: 634760 - RNA, 24 nt, Artificial Sequence
  Synthetic
gucagacuaagcaaucugaacuau

SEQ ID NO: 634761 - RNA, 18 nt, Artificial Sequence
  Synthetic
ggacugaaugguaacuau

SEQ ID NO: 634762 - RNA, 19 nt, Artificial Sequence
  Synthetic
aggacugaaugguaacuau

SEQ ID NO: 634763 - RNA, 20 nt, Artificial Sequence
  Synthetic
caggacugaaugguaacuau

SEQ ID NO: 634764 - RNA, 21 nt, Artificial Sequence
  Synthetic
gcaggacugaaugguaacuau

SEQ ID NO: 634765 - RNA, 22 nt, Artificial Sequence
  Synthetic
ggcaggacugaaugguaacuau

SEQ ID NO: 634766 - RNA, 23 nt, Artificial Sequence
  Synthetic
gggcaggacugaaugguaacuau

SEQ ID NO: 634767 - RNA, 24 nt, Artificial Sequence
  Synthetic
agggcaggacugaaugguaacuau

SEQ ID NO: 634768 - RNA, 18 nt, Artificial Sequence
  Synthetic
auagugaaauguaacuau

SEQ ID NO: 634769 - RNA, 19 nt, Artificial Sequence
  Synthetic
aauagugaaauguaacuau

SEQ ID NO: 634770 - RNA, 20 nt, Artificial Sequence
  Synthetic
gaauagugaaauguaacuau

SEQ ID NO: 634771 - RNA, 21 nt, Artificial Sequence
  Synthetic
ugaauagugaaauguaacuau

SEQ ID NO: 634772 - RNA, 22 nt, Artificial Sequence
  Synthetic
augaauagugaaauguaacuau

SEQ ID NO: 634773 - RNA, 23 nt, Artificial Sequence
  Synthetic
caugaauagugaaauguaacuau

SEQ ID NO: 634774 - RNA, 24 nt, Artificial Sequence
  Synthetic
acaugaauagugaaauguaacuau

SEQ ID NO: 634775 - RNA, 18 nt, Artificial Sequence
  Synthetic
aaugaauccaaacacuau

SEQ ID NO: 634776 - RNA, 19 nt, Artificial Sequence
  Synthetic
uaaugaauccaaacacuau

SEQ ID NO: 634777 - RNA, 20 nt, Artificial Sequence
  Synthetic
guaaugaauccaaacacuau

SEQ ID NO: 634778 - RNA, 21 nt, Artificial Sequence
  Synthetic
aguaaugaauccaaacacuau

SEQ ID NO: 634779 - RNA, 22 nt, Artificial Sequence
  Synthetic
caguaaugaauccaaacacuau

SEQ ID NO: 634780 - RNA, 23 nt, Artificial Sequence
  Synthetic
acaguaaugaauccaaacacuau

SEQ ID NO: 634781 - RNA, 24 nt, Artificial Sequence
  Synthetic
gacaguaaugaauccaaacacuau

SEQ ID NO: 634782 - RNA, 18 nt, Artificial Sequence
  Synthetic
gcaguuugcacacacuau

SEQ ID NO: 634783 - RNA, 19 nt, Artificial Sequence
  Synthetic
ggcaguuugcacacacuau

SEQ ID NO: 634784 - RNA, 20 nt, Artificial Sequence
  Synthetic
gggcaguuugcacacacuau

SEQ ID NO: 634785 - RNA, 21 nt, Artificial Sequence
  Synthetic
agggcaguuugcacacacuau

SEQ ID NO: 634786 - RNA, 22 nt, Artificial Sequence
  Synthetic
cagggcaguuugcacacacuau

SEQ ID NO: 634787 - RNA, 23 nt, Artificial Sequence
  Synthetic
ucagggcaguuugcacacacuau

SEQ ID NO: 634788 - RNA, 24 nt, Artificial Sequence
  Synthetic
aucagggcaguuugcacacacuau

SEQ ID NO: 634789 - RNA, 18 nt, Artificial Sequence
  Synthetic
uaaaauaaccuccacuau

SEQ ID NO: 634790 - RNA, 19 nt, Artificial Sequence
  Synthetic
uuaaaauaaccuccacuau

SEQ ID NO: 634791 - RNA, 20 nt, Artificial Sequence
  Synthetic
uuuaaaauaaccuccacuau

SEQ ID NO: 634792 - RNA, 21 nt, Artificial Sequence
  Synthetic
uuuuaaaauaaccuccacuau

SEQ ID NO: 634793 - RNA, 22 nt, Artificial Sequence
  Synthetic
auuuuaaaauaaccuccacuau

SEQ ID NO: 634794 - RNA, 23 nt, Artificial Sequence
  Synthetic
aauuuuaaaauaaccuccacuau

SEQ ID NO: 634795 - RNA, 24 nt, Artificial Sequence
  Synthetic
aaauuuuaaaauaaccuccacuau

SEQ ID NO: 634796 - RNA, 18 nt, Artificial Sequence
  Synthetic
cuguaaucccagcacuau

SEQ ID NO: 634797 - RNA, 19 nt, Artificial Sequence
  Synthetic
ccuguaaucccagcacuau

SEQ ID NO: 634798 - RNA, 20 nt, Artificial Sequence
  Synthetic
gccuguaaucccagcacuau

SEQ ID NO: 634799 - RNA, 21 nt, Artificial Sequence
  Synthetic
cgccuguaaucccagcacuau

SEQ ID NO: 634800 - RNA, 22 nt, Artificial Sequence
  Synthetic
acgccuguaaucccagcacuau

SEQ ID NO: 634801 - RNA, 23 nt, Artificial Sequence
  Synthetic
cacgccuguaaucccagcacuau

SEQ ID NO: 634802 - RNA, 24 nt, Artificial Sequence
  Synthetic
ucacgccuguaaucccagcacuau

SEQ ID NO: 634803 - RNA, 18 nt, Artificial Sequence
  Synthetic
uucagauccucgcacuau

SEQ ID NO: 634804 - RNA, 19 nt, Artificial Sequence
  Synthetic
uuucagauccucgcacuau

SEQ ID NO: 634805 - RNA, 20 nt, Artificial Sequence
  Synthetic
uuuucagauccucgcacuau

SEQ ID NO: 634806 - RNA, 21 nt, Artificial Sequence
  Synthetic
cuuuucagauccucgcacuau

SEQ ID NO: 634807 - RNA, 22 nt, Artificial Sequence
  Synthetic
acuuuucagauccucgcacuau

SEQ ID NO: 634808 - RNA, 23 nt, Artificial Sequence
  Synthetic
cacuuuucagauccucgcacuau

SEQ ID NO: 634809 - RNA, 24 nt, Artificial Sequence
  Synthetic
ccacuuuucagauccucgcacuau

SEQ ID NO: 634810 - RNA, 18 nt, Artificial Sequence
  Synthetic
aauguucaacaucacuau

SEQ ID NO: 634811 - RNA, 19 nt, Artificial Sequence
  Synthetic
aaauguucaacaucacuau

SEQ ID NO: 634812 - RNA, 20 nt, Artificial Sequence
  Synthetic
aaaauguucaacaucacuau

SEQ ID NO: 634813 - RNA, 21 nt, Artificial Sequence
  Synthetic
aaaaauguucaacaucacuau

SEQ ID NO: 634814 - RNA, 22 nt, Artificial Sequence
  Synthetic
aaaaaauguucaacaucacuau

SEQ ID NO: 634815 - RNA, 23 nt, Artificial Sequence
  Synthetic
gaaaaaauguucaacaucacuau

SEQ ID NO: 634816 - RNA, 24 nt, Artificial Sequence
  Synthetic
ugaaaaaauguucaacaucacuau

SEQ ID NO: 634817 - RNA, 18 nt, Artificial Sequence
  Synthetic
uccaauauggaucacuau

SEQ ID NO: 634818 - RNA, 19 nt, Artificial Sequence
  Synthetic
uuccaauauggaucacuau

SEQ ID NO: 634819 - RNA, 20 nt, Artificial Sequence
  Synthetic
uuuccaauauggaucacuau

SEQ ID NO: 634820 - RNA, 21 nt, Artificial Sequence
  Synthetic
auuuccaauauggaucacuau

SEQ ID NO: 634821 - RNA, 22 nt, Artificial Sequence
  Synthetic
uauuuccaauauggaucacuau

SEQ ID NO: 634822 - RNA, 23 nt, Artificial Sequence
  Synthetic
uuauuuccaauauggaucacuau

SEQ ID NO: 634823 - RNA, 24 nt, Artificial Sequence
  Synthetic
uuuauuuccaauauggaucacuau

SEQ ID NO: 634824 - RNA, 18 nt, Artificial Sequence
  Synthetic
ugagaacucacucacuau

SEQ ID NO: 634825 - RNA, 19 nt, Artificial Sequence
  Synthetic
gugagaacucacucacuau

SEQ ID NO: 634826 - RNA, 20 nt, Artificial Sequence
  Synthetic
ugugagaacucacucacuau

SEQ ID NO: 634827 - RNA, 21 nt, Artificial Sequence
  Synthetic
uugugagaacucacucacuau

SEQ ID NO: 634828 - RNA, 22 nt, Artificial Sequence
  Synthetic
cuugugagaacucacucacuau

SEQ ID NO: 634829 - RNA, 23 nt, Artificial Sequence
  Synthetic
ucuugugagaacucacucacuau

SEQ ID NO: 634830 - RNA, 24 nt, Artificial Sequence
  Synthetic
aucuugugagaacucacucacuau

SEQ ID NO: 634831 - RNA, 18 nt, Artificial Sequence
  Synthetic
gagaacaaaagucacuau

SEQ ID NO: 634832 - RNA, 19 nt, Artificial Sequence
  Synthetic
ggagaacaaaagucacuau

SEQ ID NO: 634833 - RNA, 20 nt, Artificial Sequence
  Synthetic
uggagaacaaaagucacuau

SEQ ID NO: 634834 - RNA, 21 nt, Artificial Sequence
  Synthetic
uuggagaacaaaagucacuau

SEQ ID NO: 634835 - RNA, 22 nt, Artificial Sequence
  Synthetic
auuggagaacaaaagucacuau

SEQ ID NO: 634836 - RNA, 23 nt, Artificial Sequence
  Synthetic
uauuggagaacaaaagucacuau

SEQ ID NO: 634837 - RNA, 24 nt, Artificial Sequence
  Synthetic
uuauuggagaacaaaagucacuau

SEQ ID NO: 634838 - RNA, 18 nt, Artificial Sequence
  Synthetic
gaucucaugauucacuau

SEQ ID NO: 634839 - RNA, 19 nt, Artificial Sequence
  Synthetic
ugaucucaugauucacuau

SEQ ID NO: 634840 - RNA, 20 nt, Artificial Sequence
  Synthetic
cugaucucaugauucacuau

SEQ ID NO: 634841 - RNA, 21 nt, Artificial Sequence
  Synthetic
ucugaucucaugauucacuau

SEQ ID NO: 634842 - RNA, 22 nt, Artificial Sequence
  Synthetic
aucugaucucaugauucacuau

SEQ ID NO: 634843 - RNA, 23 nt, Artificial Sequence
  Synthetic
caucugaucucaugauucacuau

SEQ ID NO: 634844 - RNA, 24 nt, Artificial Sequence
  Synthetic
ccaucugaucucaugauucacuau

SEQ ID NO: 634845 - RNA, 18 nt, Artificial Sequence
  Synthetic
guaucugucuuucacuau

SEQ ID NO: 634846 - RNA, 19 nt, Artificial Sequence
  Synthetic
cguaucugucuuucacuau

SEQ ID NO: 634847 - RNA, 20 nt, Artificial Sequence
  Synthetic
ucguaucugucuuucacuau

SEQ ID NO: 634848 - RNA, 21 nt, Artificial Sequence
  Synthetic
aucguaucugucuuucacuau

SEQ ID NO: 634849 - RNA, 22 nt, Artificial Sequence
  Synthetic
uaucguaucugucuuucacuau

SEQ ID NO: 634850 - RNA, 23 nt, Artificial Sequence
  Synthetic
uuaucguaucugucuuucacuau

SEQ ID NO: 634851 - RNA, 24 nt, Artificial Sequence
  Synthetic
cuuaucguaucugucuuucacuau

SEQ ID NO: 634852 - RNA, 18 nt, Artificial Sequence
  Synthetic
aacaggaaaaaagacuau

SEQ ID NO: 634853 - RNA, 19 nt, Artificial Sequence
  Synthetic
uaacaggaaaaaagacuau

SEQ ID NO: 634854 - RNA, 20 nt, Artificial Sequence
  Synthetic
auaacaggaaaaaagacuau

SEQ ID NO: 634855 - RNA, 21 nt, Artificial Sequence
  Synthetic
uauaacaggaaaaaagacuau

SEQ ID NO: 634856 - RNA, 22 nt, Artificial Sequence
  Synthetic
auauaacaggaaaaaagacuau

SEQ ID NO: 634857 - RNA, 23 nt, Artificial Sequence
  Synthetic
uauauaacaggaaaaaagacuau

SEQ ID NO: 634858 - RNA, 24 nt, Artificial Sequence
  Synthetic
uuauauaacaggaaaaaagacuau

SEQ ID NO: 634859 - RNA, 18 nt, Artificial Sequence
  Synthetic
uugauguggccagacuau

SEQ ID NO: 634860 - RNA, 19 nt, Artificial Sequence
  Synthetic
uuugauguggccagacuau

SEQ ID NO: 634861 - RNA, 20 nt, Artificial Sequence
  Synthetic
auuugauguggccagacuau

SEQ ID NO: 634862 - RNA, 21 nt, Artificial Sequence
  Synthetic
aauuugauguggccagacuau

SEQ ID NO: 634863 - RNA, 22 nt, Artificial Sequence
  Synthetic
uaauuugauguggccagacuau

SEQ ID NO: 634864 - RNA, 23 nt, Artificial Sequence
  Synthetic
guaauuugauguggccagacuau

SEQ ID NO: 634865 - RNA, 24 nt, Artificial Sequence
  Synthetic
gguaauuugauguggccagacuau

SEQ ID NO: 634866 - RNA, 18 nt, Artificial Sequence
  Synthetic
aaaugugacagagacuau

SEQ ID NO: 634867 - RNA, 19 nt, Artificial Sequence
  Synthetic
uaaaugugacagagacuau

SEQ ID NO: 634868 - RNA, 20 nt, Artificial Sequence
  Synthetic
guaaaugugacagagacuau

SEQ ID NO: 634869 - RNA, 21 nt, Artificial Sequence
  Synthetic
aguaaaugugacagagacuau

SEQ ID NO: 634870 - RNA, 22 nt, Artificial Sequence
  Synthetic
aaguaaaugugacagagacuau

SEQ ID NO: 634871 - RNA, 23 nt, Artificial Sequence
  Synthetic
caaguaaaugugacagagacuau

SEQ ID NO: 634872 - RNA, 24 nt, Artificial Sequence
  Synthetic
ucaaguaaaugugacagagacuau

SEQ ID NO: 634873 - RNA, 18 nt, Artificial Sequence
  Synthetic
caagaaauaugggacuau

SEQ ID NO: 634874 - RNA, 19 nt, Artificial Sequence
  Synthetic
ccaagaaauaugggacuau

SEQ ID NO: 634875 - RNA, 20 nt, Artificial Sequence
  Synthetic
uccaagaaauaugggacuau

SEQ ID NO: 634876 - RNA, 21 nt, Artificial Sequence
  Synthetic
cuccaagaaauaugggacuau

SEQ ID NO: 634877 - RNA, 22 nt, Artificial Sequence
  Synthetic
ccuccaagaaauaugggacuau

SEQ ID NO: 634878 - RNA, 23 nt, Artificial Sequence
  Synthetic
gccuccaagaaauaugggacuau

SEQ ID NO: 634879 - RNA, 24 nt, Artificial Sequence
  Synthetic
agccuccaagaaauaugggacuau

SEQ ID NO: 634880 - RNA, 18 nt, Artificial Sequence
  Synthetic
aacagauaucaugacuau

SEQ ID NO: 634881 - RNA, 19 nt, Artificial Sequence
  Synthetic
uaacagauaucaugacuau

SEQ ID NO: 634882 - RNA, 20 nt, Artificial Sequence
  Synthetic
uuaacagauaucaugacuau

SEQ ID NO: 634883 - RNA, 21 nt, Artificial Sequence
  Synthetic
auuaacagauaucaugacuau

SEQ ID NO: 634884 - RNA, 22 nt, Artificial Sequence
  Synthetic
aauuaacagauaucaugacuau

SEQ ID NO: 634885 - RNA, 23 nt, Artificial Sequence
  Synthetic
gaauuaacagauaucaugacuau

SEQ ID NO: 634886 - RNA, 24 nt, Artificial Sequence
  Synthetic
ugaauuaacagauaucaugacuau

SEQ ID NO: 634887 - RNA, 18 nt, Artificial Sequence
  Synthetic
aagugugaaacugacuau

SEQ ID NO: 634888 - RNA, 19 nt, Artificial Sequence
  Synthetic
uaagugugaaacugacuau

SEQ ID NO: 634889 - RNA, 20 nt, Artificial Sequence
  Synthetic
cuaagugugaaacugacuau

SEQ ID NO: 634890 - RNA, 21 nt, Artificial Sequence
  Synthetic
gcuaagugugaaacugacuau

SEQ ID NO: 634891 - RNA, 22 nt, Artificial Sequence
  Synthetic
agcuaagugugaaacugacuau

SEQ ID NO: 634892 - RNA, 23 nt, Artificial Sequence
  Synthetic
aagcuaagugugaaacugacuau

SEQ ID NO: 634893 - RNA, 24 nt, Artificial Sequence
  Synthetic
aaagcuaagugugaaacugacuau

SEQ ID NO: 634894 - RNA, 18 nt, Artificial Sequence
  Synthetic
ggagaaaacacugacuau

SEQ ID NO: 634895 - RNA, 19 nt, Artificial Sequence
  Synthetic
uggagaaaacacugacuau

SEQ ID NO: 634896 - RNA, 20 nt, Artificial Sequence
  Synthetic
uuggagaaaacacugacuau

SEQ ID NO: 634897 - RNA, 21 nt, Artificial Sequence
  Synthetic
cuuggagaaaacacugacuau

SEQ ID NO: 634898 - RNA, 22 nt, Artificial Sequence
  Synthetic
gcuuggagaaaacacugacuau

SEQ ID NO: 634899 - RNA, 23 nt, Artificial Sequence
  Synthetic
ugcuuggagaaaacacugacuau

SEQ ID NO: 634900 - RNA, 24 nt, Artificial Sequence
  Synthetic
augcuuggagaaaacacugacuau

SEQ ID NO: 634901 - RNA, 18 nt, Artificial Sequence
  Synthetic
ggagcuacucuugacuau

SEQ ID NO: 634902 - RNA, 19 nt, Artificial Sequence
  Synthetic
aggagcuacucuugacuau

SEQ ID NO: 634903 - RNA, 20 nt, Artificial Sequence
  Synthetic
aaggagcuacucuugacuau

SEQ ID NO: 634904 - RNA, 21 nt, Artificial Sequence
  Synthetic
uaaggagcuacucuugacuau

SEQ ID NO: 634905 - RNA, 22 nt, Artificial Sequence
  Synthetic
uuaaggagcuacucuugacuau

SEQ ID NO: 634906 - RNA, 23 nt, Artificial Sequence
  Synthetic
uuuaaggagcuacucuugacuau

SEQ ID NO: 634907 - RNA, 24 nt, Artificial Sequence
  Synthetic
uuuuaaggagcuacucuugacuau

SEQ ID NO: 634908 - RNA, 18 nt, Artificial Sequence
  Synthetic
uccuaaaauaaauacuau

SEQ ID NO: 634909 - RNA, 19 nt, Artificial Sequence
  Synthetic
cuccuaaaauaaauacuau

SEQ ID NO: 634910 - RNA, 20 nt, Artificial Sequence
  Synthetic
acuccuaaaauaaauacuau

SEQ ID NO: 634911 - RNA, 21 nt, Artificial Sequence
  Synthetic
gacuccuaaaauaaauacuau

SEQ ID NO: 634912 - RNA, 22 nt, Artificial Sequence
  Synthetic
agacuccuaaaauaaauacuau

SEQ ID NO: 634913 - RNA, 23 nt, Artificial Sequence
  Synthetic
uagacuccuaaaauaaauacuau

SEQ ID NO: 634914 - RNA, 24 nt, Artificial Sequence
  Synthetic
cuagacuccuaaaauaaauacuau

SEQ ID NO: 634915 - RNA, 18 nt, Artificial Sequence
  Synthetic
uauaucauuaaauacuau

SEQ ID NO: 634916 - RNA, 19 nt, Artificial Sequence
  Synthetic
cuauaucauuaaauacuau

SEQ ID NO: 634917 - RNA, 20 nt, Artificial Sequence
  Synthetic
ccuauaucauuaaauacuau

SEQ ID NO: 634918 - RNA, 21 nt, Artificial Sequence
  Synthetic
cccuauaucauuaaauacuau

SEQ ID NO: 634919 - RNA, 22 nt, Artificial Sequence
  Synthetic
ucccuauaucauuaaauacuau

SEQ ID NO: 634920 - RNA, 23 nt, Artificial Sequence
  Synthetic
uucccuauaucauuaaauacuau

SEQ ID NO: 634921 - RNA, 24 nt, Artificial Sequence
  Synthetic
auucccuauaucauuaaauacuau

SEQ ID NO: 634922 - RNA, 18 nt, Artificial Sequence
  Synthetic
guauugcaaauauacuau

SEQ ID NO: 634923 - RNA, 19 nt, Artificial Sequence
  Synthetic
aguauugcaaauauacuau

SEQ ID NO: 634924 - RNA, 20 nt, Artificial Sequence
  Synthetic
uaguauugcaaauauacuau

SEQ ID NO: 634925 - RNA, 21 nt, Artificial Sequence
  Synthetic
uuaguauugcaaauauacuau

SEQ ID NO: 634926 - RNA, 22 nt, Artificial Sequence
  Synthetic
uuuaguauugcaaauauacuau

SEQ ID NO: 634927 - RNA, 23 nt, Artificial Sequence
  Synthetic
uuuuaguauugcaaauauacuau

SEQ ID NO: 634928 - RNA, 24 nt, Artificial Sequence
  Synthetic
guuuuaguauugcaaauauacuau

SEQ ID NO: 634929 - RNA, 18 nt, Artificial Sequence
  Synthetic
uugaagagcauauacuau

SEQ ID NO: 634930 - RNA, 19 nt, Artificial Sequence
  Synthetic
cuugaagagcauauacuau

SEQ ID NO: 634931 - RNA, 20 nt, Artificial Sequence
  Synthetic
acuugaagagcauauacuau

SEQ ID NO: 634932 - RNA, 21 nt, Artificial Sequence
  Synthetic
uacuugaagagcauauacuau

SEQ ID NO: 634933 - RNA, 22 nt, Artificial Sequence
  Synthetic
uuacuugaagagcauauacuau

SEQ ID NO: 634934 - RNA, 23 nt, Artificial Sequence
  Synthetic
cuuacuugaagagcauauacuau

SEQ ID NO: 634935 - RNA, 24 nt, Artificial Sequence
  Synthetic
acuuacuugaagagcauauacuau

SEQ ID NO: 634936 - RNA, 18 nt, Artificial Sequence
  Synthetic
ccuaucccuuacuacuau

SEQ ID NO: 634937 - RNA, 19 nt, Artificial Sequence
  Synthetic
uccuaucccuuacuacuau

SEQ ID NO: 634938 - RNA, 20 nt, Artificial Sequence
  Synthetic
uuccuaucccuuacuacuau

SEQ ID NO: 634939 - RNA, 21 nt, Artificial Sequence
  Synthetic
uuuccuaucccuuacuacuau

SEQ ID NO: 634940 - RNA, 22 nt, Artificial Sequence
  Synthetic
uuuuccuaucccuuacuacuau

SEQ ID NO: 634941 - RNA, 23 nt, Artificial Sequence
  Synthetic
auuuuccuaucccuuacuacuau

SEQ ID NO: 634942 - RNA, 24 nt, Artificial Sequence
  Synthetic
uauuuuccuaucccuuacuacuau

SEQ ID NO: 634943 - RNA, 18 nt, Artificial Sequence
  Synthetic
cuuacagcuagcuacuau

SEQ ID NO: 634944 - RNA, 19 nt, Artificial Sequence
  Synthetic
ucuuacagcuagcuacuau

SEQ ID NO: 634945 - RNA, 20 nt, Artificial Sequence
  Synthetic
aucuuacagcuagcuacuau

SEQ ID NO: 634946 - RNA, 21 nt, Artificial Sequence
  Synthetic
aaucuuacagcuagcuacuau

SEQ ID NO: 634947 - RNA, 22 nt, Artificial Sequence
  Synthetic
gaaucuuacagcuagcuacuau

SEQ ID NO: 634948 - RNA, 23 nt, Artificial Sequence
  Synthetic
ggaaucuuacagcuagcuacuau

SEQ ID NO: 634949 - RNA, 24 nt, Artificial Sequence
  Synthetic
uggaaucuuacagcuagcuacuau

SEQ ID NO: 634950 - RNA, 18 nt, Artificial Sequence
  Synthetic
aauacgaaaagguacuau

SEQ ID NO: 634951 - RNA, 19 nt, Artificial Sequence
  Synthetic
caauacgaaaagguacuau

SEQ ID NO: 634952 - RNA, 20 nt, Artificial Sequence
  Synthetic
acaauacgaaaagguacuau

SEQ ID NO: 634953 - RNA, 21 nt, Artificial Sequence
  Synthetic
uacaauacgaaaagguacuau

SEQ ID NO: 634954 - RNA, 22 nt, Artificial Sequence
  Synthetic
auacaauacgaaaagguacuau

SEQ ID NO: 634955 - RNA, 23 nt, Artificial Sequence
  Synthetic
gauacaauacgaaaagguacuau

SEQ ID NO: 634956 - RNA, 24 nt, Artificial Sequence
  Synthetic
ugauacaauacgaaaagguacuau

SEQ ID NO: 634957 - RNA, 18 nt, Artificial Sequence
  Synthetic
uauccuuuaugguacuau

SEQ ID NO: 634958 - RNA, 19 nt, Artificial Sequence
  Synthetic
auauccuuuaugguacuau

SEQ ID NO: 634959 - RNA, 20 nt, Artificial Sequence
  Synthetic
aauauccuuuaugguacuau

SEQ ID NO: 634960 - RNA, 21 nt, Artificial Sequence
  Synthetic
gaauauccuuuaugguacuau

SEQ ID NO: 634961 - RNA, 22 nt, Artificial Sequence
  Synthetic
agaauauccuuuaugguacuau

SEQ ID NO: 634962 - RNA, 23 nt, Artificial Sequence
  Synthetic
aagaauauccuuuaugguacuau

SEQ ID NO: 634963 - RNA, 24 nt, Artificial Sequence
  Synthetic
gaagaauauccuuuaugguacuau

SEQ ID NO: 634964 - RNA, 18 nt, Artificial Sequence
  Synthetic
ucccucccuugguacuau

SEQ ID NO: 634965 - RNA, 19 nt, Artificial Sequence
  Synthetic
cucccucccuugguacuau

SEQ ID NO: 634966 - RNA, 20 nt, Artificial Sequence
  Synthetic
acucccucccuugguacuau

SEQ ID NO: 634967 - RNA, 21 nt, Artificial Sequence
  Synthetic
aacucccucccuugguacuau

SEQ ID NO: 634968 - RNA, 22 nt, Artificial Sequence
  Synthetic
aaacucccucccuugguacuau

SEQ ID NO: 634969 - RNA, 23 nt, Artificial Sequence
  Synthetic
uaaacucccucccuugguacuau

SEQ ID NO: 634970 - RNA, 24 nt, Artificial Sequence
  Synthetic
uuaaacucccucccuugguacuau

SEQ ID NO: 634971 - RNA, 18 nt, Artificial Sequence
  Synthetic
cuaacuucccauuacuau

SEQ ID NO: 634972 - RNA, 19 nt, Artificial Sequence
  Synthetic
ccuaacuucccauuacuau

SEQ ID NO: 634973 - RNA, 20 nt, Artificial Sequence
  Synthetic
uccuaacuucccauuacuau

SEQ ID NO: 634974 - RNA, 21 nt, Artificial Sequence
  Synthetic
uuccuaacuucccauuacuau

SEQ ID NO: 634975 - RNA, 22 nt, Artificial Sequence
  Synthetic
uuuccuaacuucccauuacuau

SEQ ID NO: 634976 - RNA, 23 nt, Artificial Sequence
  Synthetic
cuuuccuaacuucccauuacuau

SEQ ID NO: 634977 - RNA, 24 nt, Artificial Sequence
  Synthetic
ccuuuccuaacuucccauuacuau

SEQ ID NO: 634978 - RNA, 18 nt, Artificial Sequence
  Synthetic
auaucgguuucuuacuau

SEQ ID NO: 634979 - RNA, 19 nt, Artificial Sequence
  Synthetic
cauaucgguuucuuacuau

SEQ ID NO: 634980 - RNA, 20 nt, Artificial Sequence
  Synthetic
ucauaucgguuucuuacuau

SEQ ID NO: 634981 - RNA, 21 nt, Artificial Sequence
  Synthetic
aucauaucgguuucuuacuau

SEQ ID NO: 634982 - RNA, 22 nt, Artificial Sequence
  Synthetic
aaucauaucgguuucuuacuau

SEQ ID NO: 634983 - RNA, 23 nt, Artificial Sequence
  Synthetic
aaaucauaucgguuucuuacuau

SEQ ID NO: 634984 - RNA, 24 nt, Artificial Sequence
  Synthetic
aaaaucauaucgguuucuuacuau

SEQ ID NO: 634985 - RNA, 18 nt, Artificial Sequence
  Synthetic
auuaagaaggcaaccuau

SEQ ID NO: 634986 - RNA, 19 nt, Artificial Sequence
  Synthetic
cauuaagaaggcaaccuau

SEQ ID NO: 634987 - RNA, 20 nt, Artificial Sequence
  Synthetic
ccauuaagaaggcaaccuau

SEQ ID NO: 634988 - RNA, 21 nt, Artificial Sequence
  Synthetic
cccauuaagaaggcaaccuau

SEQ ID NO: 634989 - RNA, 22 nt, Artificial Sequence
  Synthetic
acccauuaagaaggcaaccuau

SEQ ID NO: 634990 - RNA, 23 nt, Artificial Sequence
  Synthetic
aacccauuaagaaggcaaccuau

SEQ ID NO: 634991 - RNA, 24 nt, Artificial Sequence
  Synthetic
aaacccauuaagaaggcaaccuau

SEQ ID NO: 634992 - RNA, 18 nt, Artificial Sequence
  Synthetic
gcauaaagaugaaccuau

SEQ ID NO: 634993 - RNA, 19 nt, Artificial Sequence
  Synthetic
agcauaaagaugaaccuau

SEQ ID NO: 634994 - RNA, 20 nt, Artificial Sequence
  Synthetic
uagcauaaagaugaaccuau

SEQ ID NO: 634995 - RNA, 21 nt, Artificial Sequence
  Synthetic
guagcauaaagaugaaccuau

SEQ ID NO: 634996 - RNA, 22 nt, Artificial Sequence
  Synthetic
gguagcauaaagaugaaccuau

SEQ ID NO: 634997 - RNA, 23 nt, Artificial Sequence
  Synthetic
agguagcauaaagaugaaccuau

SEQ ID NO: 634998 - RNA, 24 nt, Artificial Sequence
  Synthetic
aagguagcauaaagaugaaccuau

SEQ ID NO: 634999 - RNA, 18 nt, Artificial Sequence
  Synthetic
gacuucauuucuaccuau

SEQ ID NO: 635000 - RNA, 19 nt, Artificial Sequence
  Synthetic
agacuucauuucuaccuau

SEQ ID NO: 635001 - RNA, 20 nt, Artificial Sequence
  Synthetic
cagacuucauuucuaccuau

SEQ ID NO: 635002 - RNA, 21 nt, Artificial Sequence
  Synthetic
ucagacuucauuucuaccuau

SEQ ID NO: 635003 - RNA, 22 nt, Artificial Sequence
  Synthetic
uucagacuucauuucuaccuau

SEQ ID NO: 635004 - RNA, 23 nt, Artificial Sequence
  Synthetic
auucagacuucauuucuaccuau

SEQ ID NO: 635005 - RNA, 24 nt, Artificial Sequence
  Synthetic
aauucagacuucauuucuaccuau

SEQ ID NO: 635006 - RNA, 18 nt, Artificial Sequence
  Synthetic
cuuuagaguaaacccuau

SEQ ID NO: 635007 - RNA, 19 nt, Artificial Sequence
  Synthetic
gcuuuagaguaaacccuau

SEQ ID NO: 635008 - RNA, 20 nt, Artificial Sequence
  Synthetic
ugcuuuagaguaaacccuau

SEQ ID NO: 635009 - RNA, 21 nt, Artificial Sequence
  Synthetic
uugcuuuagaguaaacccuau

SEQ ID NO: 635010 - RNA, 22 nt, Artificial Sequence
  Synthetic
guugcuuuagaguaaacccuau

SEQ ID NO: 635011 - RNA, 23 nt, Artificial Sequence
  Synthetic
uguugcuuuagaguaaacccuau

SEQ ID NO: 635012 - RNA, 24 nt, Artificial Sequence
  Synthetic
cuguugcuuuagaguaaacccuau

SEQ ID NO: 635013 - RNA, 18 nt, Artificial Sequence
  Synthetic
cucagaaugugacccuau

SEQ ID NO: 635014 - RNA, 19 nt, Artificial Sequence
  Synthetic
ccucagaaugugacccuau

SEQ ID NO: 635015 - RNA, 20 nt, Artificial Sequence
  Synthetic
accucagaaugugacccuau

SEQ ID NO: 635016 - RNA, 21 nt, Artificial Sequence
  Synthetic
uaccucagaaugugacccuau

SEQ ID NO: 635017 - RNA, 22 nt, Artificial Sequence
  Synthetic
guaccucagaaugugacccuau

SEQ ID NO: 635018 - RNA, 23 nt, Artificial Sequence
  Synthetic
gguaccucagaaugugacccuau

SEQ ID NO: 635019 - RNA, 24 nt, Artificial Sequence
  Synthetic
ugguaccucagaaugugacccuau

SEQ ID NO: 635020 - RNA, 18 nt, Artificial Sequence
  Synthetic
aggucauuucuacccuau

SEQ ID NO: 635021 - RNA, 19 nt, Artificial Sequence
  Synthetic
aaggucauuucuacccuau

SEQ ID NO: 635022 - RNA, 20 nt, Artificial Sequence
  Synthetic
aaaggucauuucuacccuau

SEQ ID NO: 635023 - RNA, 21 nt, Artificial Sequence
  Synthetic
caaaggucauuucuacccuau

SEQ ID NO: 635024 - RNA, 22 nt, Artificial Sequence
  Synthetic
ucaaaggucauuucuacccuau

SEQ ID NO: 635025 - RNA, 23 nt, Artificial Sequence
  Synthetic
cucaaaggucauuucuacccuau

SEQ ID NO: 635026 - RNA, 24 nt, Artificial Sequence
  Synthetic
gcucaaaggucauuucuacccuau

SEQ ID NO: 635027 - RNA, 18 nt, Artificial Sequence
  Synthetic
uuuccugcuagucccuau

SEQ ID NO: 635028 - RNA, 19 nt, Artificial Sequence
  Synthetic
uuuuccugcuagucccuau

SEQ ID NO: 635029 - RNA, 20 nt, Artificial Sequence
  Synthetic
uuuuuccugcuagucccuau

SEQ ID NO: 635030 - RNA, 21 nt, Artificial Sequence
  Synthetic
uuuuuuccugcuagucccuau

SEQ ID NO: 635031 - RNA, 22 nt, Artificial Sequence
  Synthetic
auuuuuuccugcuagucccuau

SEQ ID NO: 635032 - RNA, 23 nt, Artificial Sequence
  Synthetic
aauuuuuuccugcuagucccuau

SEQ ID NO: 635033 - RNA, 24 nt, Artificial Sequence
  Synthetic
uaauuuuuuccugcuagucccuau

SEQ ID NO: 635034 - RNA, 18 nt, Artificial Sequence
  Synthetic
acaaauucaggucccuau

SEQ ID NO: 635035 - RNA, 19 nt, Artificial Sequence
  Synthetic
cacaaauucaggucccuau

SEQ ID NO: 635036 - RNA, 20 nt, Artificial Sequence
  Synthetic
ucacaaauucaggucccuau

SEQ ID NO: 635037 - RNA, 21 nt, Artificial Sequence
  Synthetic
gucacaaauucaggucccuau

SEQ ID NO: 635038 - RNA, 22 nt, Artificial Sequence
  Synthetic
ggucacaaauucaggucccuau

SEQ ID NO: 635039 - RNA, 23 nt, Artificial Sequence
  Synthetic
gggucacaaauucaggucccuau

SEQ ID NO: 635040 - RNA, 24 nt, Artificial Sequence
  Synthetic
agggucacaaauucaggucccuau

SEQ ID NO: 635041 - RNA, 18 nt, Artificial Sequence
  Synthetic
agaggagccugucccuau

SEQ ID NO: 635042 - RNA, 19 nt, Artificial Sequence
  Synthetic
cagaggagccugucccuau

SEQ ID NO: 635043 - RNA, 20 nt, Artificial Sequence
  Synthetic
acagaggagccugucccuau

SEQ ID NO: 635044 - RNA, 21 nt, Artificial Sequence
  Synthetic
gacagaggagccugucccuau

SEQ ID NO: 635045 - RNA, 22 nt, Artificial Sequence
  Synthetic
agacagaggagccugucccuau

SEQ ID NO: 635046 - RNA, 23 nt, Artificial Sequence
  Synthetic
aagacagaggagccugucccuau

SEQ ID NO: 635047 - RNA, 24 nt, Artificial Sequence
  Synthetic
gaagacagaggagccugucccuau

SEQ ID NO: 635048 - RNA, 18 nt, Artificial Sequence
  Synthetic
uagaauauauuucccuau

SEQ ID NO: 635049 - RNA, 19 nt, Artificial Sequence
  Synthetic
auagaauauauuucccuau

SEQ ID NO: 635050 - RNA, 20 nt, Artificial Sequence
  Synthetic
aauagaauauauuucccuau

SEQ ID NO: 635051 - RNA, 21 nt, Artificial Sequence
  Synthetic
caauagaauauauuucccuau

SEQ ID NO: 635052 - RNA, 22 nt, Artificial Sequence
  Synthetic
acaauagaauauauuucccuau

SEQ ID NO: 635053 - RNA, 23 nt, Artificial Sequence
  Synthetic
uacaauagaauauauuucccuau

SEQ ID NO: 635054 - RNA, 24 nt, Artificial Sequence
  Synthetic
uuacaauagaauauauuucccuau

SEQ ID NO: 635055 - RNA, 18 nt, Artificial Sequence
  Synthetic
cugaaguauuuucccuau

SEQ ID NO: 635056 - RNA, 19 nt, Artificial Sequence
  Synthetic
acugaaguauuuucccuau

SEQ ID NO: 635057 - RNA, 20 nt, Artificial Sequence
  Synthetic
gacugaaguauuuucccuau

SEQ ID NO: 635058 - RNA, 21 nt, Artificial Sequence
  Synthetic
ugacugaaguauuuucccuau

SEQ ID NO: 635059 - RNA, 22 nt, Artificial Sequence
  Synthetic
uugacugaaguauuuucccuau

SEQ ID NO: 635060 - RNA, 23 nt, Artificial Sequence
  Synthetic
uuugacugaaguauuuucccuau

SEQ ID NO: 635061 - RNA, 24 nt, Artificial Sequence
  Synthetic
auuugacugaaguauuuucccuau

SEQ ID NO: 635062 - RNA, 18 nt, Artificial Sequence
  Synthetic
cuaucaaaacaagccuau

SEQ ID NO: 635063 - RNA, 19 nt, Artificial Sequence
  Synthetic
ucuaucaaaacaagccuau

SEQ ID NO: 635064 - RNA, 20 nt, Artificial Sequence
  Synthetic
aucuaucaaaacaagccuau

SEQ ID NO: 635065 - RNA, 21 nt, Artificial Sequence
  Synthetic
uaucuaucaaaacaagccuau

SEQ ID NO: 635066 - RNA, 22 nt, Artificial Sequence
  Synthetic
auaucuaucaaaacaagccuau

SEQ ID NO: 635067 - RNA, 23 nt, Artificial Sequence
  Synthetic
aauaucuaucaaaacaagccuau

SEQ ID NO: 635068 - RNA, 24 nt, Artificial Sequence
  Synthetic
aaauaucuaucaaaacaagccuau

SEQ ID NO: 635069 - RNA, 18 nt, Artificial Sequence
  Synthetic
caucggaaggaagccuau

SEQ ID NO: 635070 - RNA, 19 nt, Artificial Sequence
  Synthetic
acaucggaaggaagccuau

SEQ ID NO: 635071 - RNA, 20 nt, Artificial Sequence
  Synthetic
cacaucggaaggaagccuau

SEQ ID NO: 635072 - RNA, 21 nt, Artificial Sequence
  Synthetic
acacaucggaaggaagccuau

SEQ ID NO: 635073 - RNA, 22 nt, Artificial Sequence
  Synthetic
uacacaucggaaggaagccuau

SEQ ID NO: 635074 - RNA, 23 nt, Artificial Sequence
  Synthetic
cuacacaucggaaggaagccuau

SEQ ID NO: 635075 - RNA, 24 nt, Artificial Sequence
  Synthetic
ccuacacaucggaaggaagccuau

SEQ ID NO: 635076 - RNA, 18 nt, Artificial Sequence
  Synthetic
uguaggcagacagccuau

SEQ ID NO: 635077 - RNA, 19 nt, Artificial Sequence
  Synthetic
uuguaggcagacagccuau

SEQ ID NO: 635078 - RNA, 20 nt, Artificial Sequence
  Synthetic
cuuguaggcagacagccuau

SEQ ID NO: 635079 - RNA, 21 nt, Artificial Sequence
  Synthetic
ucuuguaggcagacagccuau

SEQ ID NO: 635080 - RNA, 22 nt, Artificial Sequence
  Synthetic
aucuuguaggcagacagccuau

SEQ ID NO: 635081 - RNA, 23 nt, Artificial Sequence
  Synthetic
gaucuuguaggcagacagccuau

SEQ ID NO: 635082 - RNA, 24 nt, Artificial Sequence
  Synthetic
ggaucuuguaggcagacagccuau

SEQ ID NO: 635083 - RNA, 18 nt, Artificial Sequence
  Synthetic
agcccagaauaugccuau

SEQ ID NO: 635084 - RNA, 19 nt, Artificial Sequence
  Synthetic
cagcccagaauaugccuau

SEQ ID NO: 635085 - RNA, 20 nt, Artificial Sequence
  Synthetic
ccagcccagaauaugccuau

SEQ ID NO: 635086 - RNA, 21 nt, Artificial Sequence
  Synthetic
cccagcccagaauaugccuau

SEQ ID NO: 635087 - RNA, 22 nt, Artificial Sequence
  Synthetic
acccagcccagaauaugccuau

SEQ ID NO: 635088 - RNA, 23 nt, Artificial Sequence
  Synthetic
cacccagcccagaauaugccuau

SEQ ID NO: 635089 - RNA, 24 nt, Artificial Sequence
  Synthetic
gcacccagcccagaauaugccuau

SEQ ID NO: 635090 - RNA, 18 nt, Artificial Sequence
  Synthetic
agcuuuaccagugccuau

SEQ ID NO: 635091 - RNA, 19 nt, Artificial Sequence
  Synthetic
aagcuuuaccagugccuau

SEQ ID NO: 635092 - RNA, 20 nt, Artificial Sequence
  Synthetic
aaagcuuuaccagugccuau

SEQ ID NO: 635093 - RNA, 21 nt, Artificial Sequence
  Synthetic
aaaagcuuuaccagugccuau

SEQ ID NO: 635094 - RNA, 22 nt, Artificial Sequence
  Synthetic
caaaagcuuuaccagugccuau

SEQ ID NO: 635095 - RNA, 23 nt, Artificial Sequence
  Synthetic
acaaaagcuuuaccagugccuau

SEQ ID NO: 635096 - RNA, 24 nt, Artificial Sequence
  Synthetic
cacaaaagcuuuaccagugccuau

SEQ ID NO: 635097 - RNA, 18 nt, Artificial Sequence
  Synthetic
agaagaauaggugccuau

SEQ ID NO: 635098 - RNA, 19 nt, Artificial Sequence
  Synthetic
cagaagaauaggugccuau

SEQ ID NO: 635099 - RNA, 20 nt, Artificial Sequence
  Synthetic
ucagaagaauaggugccuau

SEQ ID NO: 635100 - RNA, 21 nt, Artificial Sequence
  Synthetic
aucagaagaauaggugccuau

SEQ ID NO: 635101 - RNA, 22 nt, Artificial Sequence
  Synthetic
aaucagaagaauaggugccuau

SEQ ID NO: 635102 - RNA, 23 nt, Artificial Sequence
  Synthetic
aaaucagaagaauaggugccuau

SEQ ID NO: 635103 - RNA, 24 nt, Artificial Sequence
  Synthetic
uaaaucagaagaauaggugccuau

SEQ ID NO: 635104 - RNA, 18 nt, Artificial Sequence
  Synthetic
gcacaggugugugccuau

SEQ ID NO: 635105 - RNA, 19 nt, Artificial Sequence
  Synthetic
ggcacaggugugugccuau

SEQ ID NO: 635106 - RNA, 20 nt, Artificial Sequence
  Synthetic
aggcacaggugugugccuau

SEQ ID NO: 635107 - RNA, 21 nt, Artificial Sequence
  Synthetic
caggcacaggugugugccuau

SEQ ID NO: 635108 - RNA, 22 nt, Artificial Sequence
  Synthetic
acaggcacaggugugugccuau

SEQ ID NO: 635109 - RNA, 23 nt, Artificial Sequence
  Synthetic
uacaggcacaggugugugccuau

SEQ ID NO: 635110 - RNA, 24 nt, Artificial Sequence
  Synthetic
uuacaggcacaggugugugccuau

SEQ ID NO: 635111 - RNA, 18 nt, Artificial Sequence
  Synthetic
gagcauaagaaauccuau

SEQ ID NO: 635112 - RNA, 19 nt, Artificial Sequence
  Synthetic
ugagcauaagaaauccuau

SEQ ID NO: 635113 - RNA, 20 nt, Artificial Sequence
  Synthetic
uugagcauaagaaauccuau

SEQ ID NO: 635114 - RNA, 21 nt, Artificial Sequence
  Synthetic
cuugagcauaagaaauccuau

SEQ ID NO: 635115 - RNA, 22 nt, Artificial Sequence
  Synthetic
ccuugagcauaagaaauccuau

SEQ ID NO: 635116 - RNA, 23 nt, Artificial Sequence
  Synthetic
uccuugagcauaagaaauccuau

SEQ ID NO: 635117 - RNA, 24 nt, Artificial Sequence
  Synthetic
auccuugagcauaagaaauccuau

SEQ ID NO: 635118 - RNA, 18 nt, Artificial Sequence
  Synthetic
aaauuauaagaauccuau

SEQ ID NO: 635119 - RNA, 19 nt, Artificial Sequence
  Synthetic
caaauuauaagaauccuau

SEQ ID NO: 635120 - RNA, 20 nt, Artificial Sequence
  Synthetic
ucaaauuauaagaauccuau

SEQ ID NO: 635121 - RNA, 21 nt, Artificial Sequence
  Synthetic
cucaaauuauaagaauccuau

SEQ ID NO: 635122 - RNA, 22 nt, Artificial Sequence
  Synthetic
ucucaaauuauaagaauccuau

SEQ ID NO: 635123 - RNA, 23 nt, Artificial Sequence
  Synthetic
aucucaaauuauaagaauccuau

SEQ ID NO: 635124 - RNA, 24 nt, Artificial Sequence
  Synthetic
gaucucaaauuauaagaauccuau

SEQ ID NO: 635125 - RNA, 18 nt, Artificial Sequence
  Synthetic
aaguuauaguuauccuau

SEQ ID NO: 635126 - RNA, 19 nt, Artificial Sequence
  Synthetic
uaaguuauaguuauccuau

SEQ ID NO: 635127 - RNA, 20 nt, Artificial Sequence
  Synthetic
cuaaguuauaguuauccuau

SEQ ID NO: 635128 - RNA, 21 nt, Artificial Sequence
  Synthetic
acuaaguuauaguuauccuau

SEQ ID NO: 635129 - RNA, 22 nt, Artificial Sequence
  Synthetic
uacuaaguuauaguuauccuau

SEQ ID NO: 635130 - RNA, 23 nt, Artificial Sequence
  Synthetic
cuacuaaguuauaguuauccuau

SEQ ID NO: 635131 - RNA, 24 nt, Artificial Sequence
  Synthetic
ccuacuaaguuauaguuauccuau

SEQ ID NO: 635132 - RNA, 18 nt, Artificial Sequence
  Synthetic
gggucugauuacuccuau

SEQ ID NO: 635133 - RNA, 19 nt, Artificial Sequence
  Synthetic
agggucugauuacuccuau

SEQ ID NO: 635134 - RNA, 20 nt, Artificial Sequence
  Synthetic
aagggucugauuacuccuau

SEQ ID NO: 635135 - RNA, 21 nt, Artificial Sequence
  Synthetic
uaagggucugauuacuccuau

SEQ ID NO: 635136 - RNA, 22 nt, Artificial Sequence
  Synthetic
auaagggucugauuacuccuau

SEQ ID NO: 635137 - RNA, 23 nt, Artificial Sequence
  Synthetic
aauaagggucugauuacuccuau

SEQ ID NO: 635138 - RNA, 24 nt, Artificial Sequence
  Synthetic
uaauaagggucugauuacuccuau

SEQ ID NO: 635139 - RNA, 18 nt, Artificial Sequence
  Synthetic
cuguacuuuccuuccuau

SEQ ID NO: 635140 - RNA, 19 nt, Artificial Sequence
  Synthetic
gcuguacuuuccuuccuau

SEQ ID NO: 635141 - RNA, 20 nt, Artificial Sequence
  Synthetic
agcuguacuuuccuuccuau

SEQ ID NO: 635142 - RNA, 21 nt, Artificial Sequence
  Synthetic
aagcuguacuuuccuuccuau

SEQ ID NO: 635143 - RNA, 22 nt, Artificial Sequence
  Synthetic
gaagcuguacuuuccuuccuau

SEQ ID NO: 635144 - RNA, 23 nt, Artificial Sequence
  Synthetic
agaagcuguacuuuccuuccuau

SEQ ID NO: 635145 - RNA, 24 nt, Artificial Sequence
  Synthetic
uagaagcuguacuuuccuuccuau

SEQ ID NO: 635146 - RNA, 18 nt, Artificial Sequence
  Synthetic
gaggagaugauaagcuau

SEQ ID NO: 635147 - RNA, 19 nt, Artificial Sequence
  Synthetic
agaggagaugauaagcuau

SEQ ID NO: 635148 - RNA, 20 nt, Artificial Sequence
  Synthetic
cagaggagaugauaagcuau

SEQ ID NO: 635149 - RNA, 21 nt, Artificial Sequence
  Synthetic
ccagaggagaugauaagcuau

SEQ ID NO: 635150 - RNA, 22 nt, Artificial Sequence
  Synthetic
accagaggagaugauaagcuau

SEQ ID NO: 635151 - RNA, 23 nt, Artificial Sequence
  Synthetic
caccagaggagaugauaagcuau

SEQ ID NO: 635152 - RNA, 24 nt, Artificial Sequence
  Synthetic
ccaccagaggagaugauaagcuau

SEQ ID NO: 635153 - RNA, 18 nt, Artificial Sequence
  Synthetic
gccuguagucccagcuau

SEQ ID NO: 635154 - RNA, 19 nt, Artificial Sequence
  Synthetic
cgccuguagucccagcuau

SEQ ID NO: 635155 - RNA, 20 nt, Artificial Sequence
  Synthetic
gcgccuguagucccagcuau

SEQ ID NO: 635156 - RNA, 21 nt, Artificial Sequence
  Synthetic
ggcgccuguagucccagcuau

SEQ ID NO: 635157 - RNA, 22 nt, Artificial Sequence
  Synthetic
gggcgccuguagucccagcuau

SEQ ID NO: 635158 - RNA, 23 nt, Artificial Sequence
  Synthetic
ugggcgccuguagucccagcuau

SEQ ID NO: 635159 - RNA, 24 nt, Artificial Sequence
  Synthetic
gugggcgccuguagucccagcuau

SEQ ID NO: 635160 - RNA, 18 nt, Artificial Sequence
  Synthetic
augcuuuguuccagcuau

SEQ ID NO: 635161 - RNA, 19 nt, Artificial Sequence
  Synthetic
aaugcuuuguuccagcuau

SEQ ID NO: 635162 - RNA, 20 nt, Artificial Sequence
  Synthetic
uaaugcuuuguuccagcuau

SEQ ID NO: 635163 - RNA, 21 nt, Artificial Sequence
  Synthetic
guaaugcuuuguuccagcuau

SEQ ID NO: 635164 - RNA, 22 nt, Artificial Sequence
  Synthetic
uguaaugcuuuguuccagcuau

SEQ ID NO: 635165 - RNA, 23 nt, Artificial Sequence
  Synthetic
cuguaaugcuuuguuccagcuau

SEQ ID NO: 635166 - RNA, 24 nt, Artificial Sequence
  Synthetic
ucuguaaugcuuuguuccagcuau

SEQ ID NO: 635167 - RNA, 18 nt, Artificial Sequence
  Synthetic
ggcagaagugucagcuau

SEQ ID NO: 635168 - RNA, 19 nt, Artificial Sequence
  Synthetic
aggcagaagugucagcuau

SEQ ID NO: 635169 - RNA, 20 nt, Artificial Sequence
  Synthetic
uaggcagaagugucagcuau

SEQ ID NO: 635170 - RNA, 21 nt, Artificial Sequence
  Synthetic
guaggcagaagugucagcuau

SEQ ID NO: 635171 - RNA, 22 nt, Artificial Sequence
  Synthetic
aguaggcagaagugucagcuau

SEQ ID NO: 635172 - RNA, 23 nt, Artificial Sequence
  Synthetic
gaguaggcagaagugucagcuau

SEQ ID NO: 635173 - RNA, 24 nt, Artificial Sequence
  Synthetic
ugaguaggcagaagugucagcuau

SEQ ID NO: 635174 - RNA, 18 nt, Artificial Sequence
  Synthetic
acugccuagcggagcuau

SEQ ID NO: 635175 - RNA, 19 nt, Artificial Sequence
  Synthetic
cacugccuagcggagcuau

SEQ ID NO: 635176 - RNA, 20 nt, Artificial Sequence
  Synthetic
gcacugccuagcggagcuau

SEQ ID NO: 635177 - RNA, 21 nt, Artificial Sequence
  Synthetic
ggcacugccuagcggagcuau

SEQ ID NO: 635178 - RNA, 22 nt, Artificial Sequence
  Synthetic
gggcacugccuagcggagcuau

SEQ ID NO: 635179 - RNA, 23 nt, Artificial Sequence
  Synthetic
ggggcacugccuagcggagcuau

SEQ ID NO: 635180 - RNA, 24 nt, Artificial Sequence
  Synthetic
uggggcacugccuagcggagcuau

SEQ ID NO: 635181 - RNA, 18 nt, Artificial Sequence
  Synthetic
ggcgauugauauagcuau

SEQ ID NO: 635182 - RNA, 19 nt, Artificial Sequence
  Synthetic
gggcgauugauauagcuau

SEQ ID NO: 635183 - RNA, 20 nt, Artificial Sequence
  Synthetic
ggggcgauugauauagcuau

SEQ ID NO: 635184 - RNA, 21 nt, Artificial Sequence
  Synthetic
gggggcgauugauauagcuau

SEQ ID NO: 635185 - RNA, 22 nt, Artificial Sequence
  Synthetic
agggggcgauugauauagcuau

SEQ ID NO: 635186 - RNA, 23 nt, Artificial Sequence
  Synthetic
uagggggcgauugauauagcuau

SEQ ID NO: 635187 - RNA, 24 nt, Artificial Sequence
  Synthetic
uuagggggcgauugauauagcuau

SEQ ID NO: 635188 - RNA, 18 nt, Artificial Sequence
  Synthetic
agguuaacagguagcuau

SEQ ID NO: 635189 - RNA, 19 nt, Artificial Sequence
  Synthetic
aagguuaacagguagcuau

SEQ ID NO: 635190 - RNA, 20 nt, Artificial Sequence
  Synthetic
aaagguuaacagguagcuau

SEQ ID NO: 635191 - RNA, 21 nt, Artificial Sequence
  Synthetic
gaaagguuaacagguagcuau

SEQ ID NO: 635192 - RNA, 22 nt, Artificial Sequence
  Synthetic
cgaaagguuaacagguagcuau

SEQ ID NO: 635193 - RNA, 23 nt, Artificial Sequence
  Synthetic
acgaaagguuaacagguagcuau

SEQ ID NO: 635194 - RNA, 24 nt, Artificial Sequence
  Synthetic
cacgaaagguuaacagguagcuau

SEQ ID NO: 635195 - RNA, 18 nt, Artificial Sequence
  Synthetic
acaccugacauuagcuau

SEQ ID NO: 635196 - RNA, 19 nt, Artificial Sequence
  Synthetic
aacaccugacauuagcuau

SEQ ID NO: 635197 - RNA, 20 nt, Artificial Sequence
  Synthetic
aaacaccugacauuagcuau

SEQ ID NO: 635198 - RNA, 21 nt, Artificial Sequence
  Synthetic
caaacaccugacauuagcuau

SEQ ID NO: 635199 - RNA, 22 nt, Artificial Sequence
  Synthetic
ucaaacaccugacauuagcuau

SEQ ID NO: 635200 - RNA, 23 nt, Artificial Sequence
  Synthetic
aucaaacaccugacauuagcuau

SEQ ID NO: 635201 - RNA, 24 nt, Artificial Sequence
  Synthetic
aaucaaacaccugacauuagcuau

SEQ ID NO: 635202 - RNA, 18 nt, Artificial Sequence
  Synthetic
gaaugcaaaggacgcuau

SEQ ID NO: 635203 - RNA, 19 nt, Artificial Sequence
  Synthetic
ggaaugcaaaggacgcuau

SEQ ID NO: 635204 - RNA, 20 nt, Artificial Sequence
  Synthetic
aggaaugcaaaggacgcuau

SEQ ID NO: 635205 - RNA, 21 nt, Artificial Sequence
  Synthetic
gaggaaugcaaaggacgcuau

SEQ ID NO: 635206 - RNA, 22 nt, Artificial Sequence
  Synthetic
agaggaaugcaaaggacgcuau

SEQ ID NO: 635207 - RNA, 23 nt, Artificial Sequence
  Synthetic
uagaggaaugcaaaggacgcuau

SEQ ID NO: 635208 - RNA, 24 nt, Artificial Sequence
  Synthetic
auagaggaaugcaaaggacgcuau

SEQ ID NO: 635209 - RNA, 18 nt, Artificial Sequence
  Synthetic
ugucaaaggagaggcuau

SEQ ID NO: 635210 - RNA, 19 nt, Artificial Sequence
  Synthetic
gugucaaaggagaggcuau

SEQ ID NO: 635211 - RNA, 20 nt, Artificial Sequence
  Synthetic
ggugucaaaggagaggcuau

SEQ ID NO: 635212 - RNA, 21 nt, Artificial Sequence
  Synthetic
aggugucaaaggagaggcuau

SEQ ID NO: 635213 - RNA, 22 nt, Artificial Sequence
  Synthetic
caggugucaaaggagaggcuau

SEQ ID NO: 635214 - RNA, 23 nt, Artificial Sequence
  Synthetic
ccaggugucaaaggagaggcuau

SEQ ID NO: 635215 - RNA, 24 nt, Artificial Sequence
  Synthetic
cccaggugucaaaggagaggcuau

SEQ ID NO: 635216 - RNA, 18 nt, Artificial Sequence
  Synthetic
gaaaaaaacugaggcuau

SEQ ID NO: 635217 - RNA, 19 nt, Artificial Sequence
  Synthetic
agaaaaaaacugaggcuau

SEQ ID NO: 635218 - RNA, 20 nt, Artificial Sequence
  Synthetic
cagaaaaaaacugaggcuau

SEQ ID NO: 635219 - RNA, 21 nt, Artificial Sequence
  Synthetic
gcagaaaaaaacugaggcuau

SEQ ID NO: 635220 - RNA, 22 nt, Artificial Sequence
  Synthetic
ugcagaaaaaaacugaggcuau

SEQ ID NO: 635221 - RNA, 23 nt, Artificial Sequence
  Synthetic
uugcagaaaaaaacugaggcuau

SEQ ID NO: 635222 - RNA, 24 nt, Artificial Sequence
  Synthetic
cuugcagaaaaaaacugaggcuau

SEQ ID NO: 635223 - RNA, 18 nt, Artificial Sequence
  Synthetic
cagagauuuauaggcuau

SEQ ID NO: 635224 - RNA, 19 nt, Artificial Sequence
  Synthetic
ucagagauuuauaggcuau

SEQ ID NO: 635225 - RNA, 20 nt, Artificial Sequence
  Synthetic
aucagagauuuauaggcuau

SEQ ID NO: 635226 - RNA, 21 nt, Artificial Sequence
  Synthetic
caucagagauuuauaggcuau

SEQ ID NO: 635227 - RNA, 22 nt, Artificial Sequence
  Synthetic
gcaucagagauuuauaggcuau

SEQ ID NO: 635228 - RNA, 23 nt, Artificial Sequence
  Synthetic
ggcaucagagauuuauaggcuau

SEQ ID NO: 635229 - RNA, 24 nt, Artificial Sequence
  Synthetic
aggcaucagagauuuauaggcuau

SEQ ID NO: 635230 - RNA, 18 nt, Artificial Sequence
  Synthetic
gaaaaacuucuaggcuau

SEQ ID NO: 635231 - RNA, 19 nt, Artificial Sequence
  Synthetic
ggaaaaacuucuaggcuau

SEQ ID NO: 635232 - RNA, 20 nt, Artificial Sequence
  Synthetic
aggaaaaacuucuaggcuau

SEQ ID NO: 635233 - RNA, 21 nt, Artificial Sequence
  Synthetic
aaggaaaaacuucuaggcuau

SEQ ID NO: 635234 - RNA, 22 nt, Artificial Sequence
  Synthetic
caaggaaaaacuucuaggcuau

SEQ ID NO: 635235 - RNA, 23 nt, Artificial Sequence
  Synthetic
gcaaggaaaaacuucuaggcuau

SEQ ID NO: 635236 - RNA, 24 nt, Artificial Sequence
  Synthetic
agcaaggaaaaacuucuaggcuau

SEQ ID NO: 635237 - RNA, 18 nt, Artificial Sequence
  Synthetic
uaggauugacuuggcuau

SEQ ID NO: 635238 - RNA, 19 nt, Artificial Sequence
  Synthetic
uuaggauugacuuggcuau

SEQ ID NO: 635239 - RNA, 20 nt, Artificial Sequence
  Synthetic
cuuaggauugacuuggcuau

SEQ ID NO: 635240 - RNA, 21 nt, Artificial Sequence
  Synthetic
gcuuaggauugacuuggcuau

SEQ ID NO: 635241 - RNA, 22 nt, Artificial Sequence
  Synthetic
ugcuuaggauugacuuggcuau

SEQ ID NO: 635242 - RNA, 23 nt, Artificial Sequence
  Synthetic
uugcuuaggauugacuuggcuau

SEQ ID NO: 635243 - RNA, 24 nt, Artificial Sequence
  Synthetic
uuugcuuaggauugacuuggcuau

SEQ ID NO: 635244 - RNA, 18 nt, Artificial Sequence
  Synthetic
ggaaagucaugaugcuau

SEQ ID NO: 635245 - RNA, 19 nt, Artificial Sequence
  Synthetic
uggaaagucaugaugcuau

SEQ ID NO: 635246 - RNA, 20 nt, Artificial Sequence
  Synthetic
auggaaagucaugaugcuau

SEQ ID NO: 635247 - RNA, 21 nt, Artificial Sequence
  Synthetic
uauggaaagucaugaugcuau

SEQ ID NO: 635248 - RNA, 22 nt, Artificial Sequence
  Synthetic
guauggaaagucaugaugcuau

SEQ ID NO: 635249 - RNA, 23 nt, Artificial Sequence
  Synthetic
gguauggaaagucaugaugcuau

SEQ ID NO: 635250 - RNA, 24 nt, Artificial Sequence
  Synthetic
ggguauggaaagucaugaugcuau

SEQ ID NO: 635251 - RNA, 18 nt, Artificial Sequence
  Synthetic
ccaaagaaaaacugcuau

SEQ ID NO: 635252 - RNA, 19 nt, Artificial Sequence
  Synthetic
gccaaagaaaaacugcuau

SEQ ID NO: 635253 - RNA, 20 nt, Artificial Sequence
  Synthetic
agccaaagaaaaacugcuau

SEQ ID NO: 635254 - RNA, 21 nt, Artificial Sequence
  Synthetic
aagccaaagaaaaacugcuau

SEQ ID NO: 635255 - RNA, 22 nt, Artificial Sequence
  Synthetic
aaagccaaagaaaaacugcuau

SEQ ID NO: 635256 - RNA, 23 nt, Artificial Sequence
  Synthetic
aaaagccaaagaaaaacugcuau

SEQ ID NO: 635257 - RNA, 24 nt, Artificial Sequence
  Synthetic
uaaaagccaaagaaaaacugcuau

SEQ ID NO: 635258 - RNA, 18 nt, Artificial Sequence
  Synthetic
cugcaggcuuacugcuau

SEQ ID NO: 635259 - RNA, 19 nt, Artificial Sequence
  Synthetic
gcugcaggcuuacugcuau

SEQ ID NO: 635260 - RNA, 20 nt, Artificial Sequence
  Synthetic
ugcugcaggcuuacugcuau

SEQ ID NO: 635261 - RNA, 21 nt, Artificial Sequence
  Synthetic
augcugcaggcuuacugcuau

SEQ ID NO: 635262 - RNA, 22 nt, Artificial Sequence
  Synthetic
aaugcugcaggcuuacugcuau

SEQ ID NO: 635263 - RNA, 23 nt, Artificial Sequence
  Synthetic
uaaugcugcaggcuuacugcuau

SEQ ID NO: 635264 - RNA, 24 nt, Artificial Sequence
  Synthetic
uuaaugcugcaggcuuacugcuau

SEQ ID NO: 635265 - RNA, 18 nt, Artificial Sequence
  Synthetic
ugcuaaugaagcugcuau

SEQ ID NO: 635266 - RNA, 19 nt, Artificial Sequence
  Synthetic
cugcuaaugaagcugcuau

SEQ ID NO: 635267 - RNA, 20 nt, Artificial Sequence
  Synthetic
gcugcuaaugaagcugcuau

SEQ ID NO: 635268 - RNA, 21 nt, Artificial Sequence
  Synthetic
agcugcuaaugaagcugcuau

SEQ ID NO: 635269 - RNA, 22 nt, Artificial Sequence
  Synthetic
aagcugcuaaugaagcugcuau

SEQ ID NO: 635270 - RNA, 23 nt, Artificial Sequence
  Synthetic
uaagcugcuaaugaagcugcuau

SEQ ID NO: 635271 - RNA, 24 nt, Artificial Sequence
  Synthetic
uuaagcugcuaaugaagcugcuau

SEQ ID NO: 635272 - RNA, 18 nt, Artificial Sequence
  Synthetic
aggcgacuuuucugcuau

SEQ ID NO: 635273 - RNA, 19 nt, Artificial Sequence
  Synthetic
gaggcgacuuuucugcuau

SEQ ID NO: 635274 - RNA, 20 nt, Artificial Sequence
  Synthetic
agaggcgacuuuucugcuau

SEQ ID NO: 635275 - RNA, 21 nt, Artificial Sequence
  Synthetic
aagaggcgacuuuucugcuau

SEQ ID NO: 635276 - RNA, 22 nt, Artificial Sequence
  Synthetic
gaagaggcgacuuuucugcuau

SEQ ID NO: 635277 - RNA, 23 nt, Artificial Sequence
  Synthetic
ggaagaggcgacuuuucugcuau

SEQ ID NO: 635278 - RNA, 24 nt, Artificial Sequence
  Synthetic
aggaagaggcgacuuuucugcuau

SEQ ID NO: 635279 - RNA, 18 nt, Artificial Sequence
  Synthetic
uaaaaaaugaagugcuau

SEQ ID NO: 635280 - RNA, 19 nt, Artificial Sequence
  Synthetic
uuaaaaaaugaagugcuau

SEQ ID NO: 635281 - RNA, 20 nt, Artificial Sequence
  Synthetic
uuuaaaaaaugaagugcuau

SEQ ID NO: 635282 - RNA, 21 nt, Artificial Sequence
  Synthetic
guuuaaaaaaugaagugcuau

SEQ ID NO: 635283 - RNA, 22 nt, Artificial Sequence
  Synthetic
aguuuaaaaaaugaagugcuau

SEQ ID NO: 635284 - RNA, 23 nt, Artificial Sequence
  Synthetic
aaguuuaaaaaaugaagugcuau

SEQ ID NO: 635285 - RNA, 24 nt, Artificial Sequence
  Synthetic
uaaguuuaaaaaaugaagugcuau

SEQ ID NO: 635286 - RNA, 18 nt, Artificial Sequence
  Synthetic
augaaaaauaagugcuau

SEQ ID NO: 635287 - RNA, 19 nt, Artificial Sequence
  Synthetic
caugaaaaauaagugcuau

SEQ ID NO: 635288 - RNA, 20 nt, Artificial Sequence
  Synthetic
gcaugaaaaauaagugcuau

SEQ ID NO: 635289 - RNA, 21 nt, Artificial Sequence
  Synthetic
ugcaugaaaaauaagugcuau

SEQ ID NO: 635290 - RNA, 22 nt, Artificial Sequence
  Synthetic
cugcaugaaaaauaagugcuau

SEQ ID NO: 635291 - RNA, 23 nt, Artificial Sequence
  Synthetic
gcugcaugaaaaauaagugcuau

SEQ ID NO: 635292 - RNA, 24 nt, Artificial Sequence
  Synthetic
ugcugcaugaaaaauaagugcuau

SEQ ID NO: 635293 - RNA, 18 nt, Artificial Sequence
  Synthetic
ucuccuugucagugcuau

SEQ ID NO: 635294 - RNA, 19 nt, Artificial Sequence
  Synthetic
uucuccuugucagugcuau

SEQ ID NO: 635295 - RNA, 20 nt, Artificial Sequence
  Synthetic
uuucuccuugucagugcuau

SEQ ID NO: 635296 - RNA, 21 nt, Artificial Sequence
  Synthetic
guuucuccuugucagugcuau

SEQ ID NO: 635297 - RNA, 22 nt, Artificial Sequence
  Synthetic
uguuucuccuugucagugcuau

SEQ ID NO: 635298 - RNA, 23 nt, Artificial Sequence
  Synthetic
uuguuucuccuugucagugcuau

SEQ ID NO: 635299 - RNA, 24 nt, Artificial Sequence
  Synthetic
uuuguuucuccuugucagugcuau

SEQ ID NO: 635300 - RNA, 18 nt, Artificial Sequence
  Synthetic
aaaagacacuauugcuau

SEQ ID NO: 635301 - RNA, 19 nt, Artificial Sequence
  Synthetic
aaaaagacacuauugcuau

SEQ ID NO: 635302 - RNA, 20 nt, Artificial Sequence
  Synthetic
gaaaaagacacuauugcuau

SEQ ID NO: 635303 - RNA, 21 nt, Artificial Sequence
  Synthetic
ugaaaaagacacuauugcuau

SEQ ID NO: 635304 - RNA, 22 nt, Artificial Sequence
  Synthetic
augaaaaagacacuauugcuau

SEQ ID NO: 635305 - RNA, 23 nt, Artificial Sequence
  Synthetic
gaugaaaaagacacuauugcuau

SEQ ID NO: 635306 - RNA, 24 nt, Artificial Sequence
  Synthetic
agaugaaaaagacacuauugcuau

SEQ ID NO: 635307 - RNA, 18 nt, Artificial Sequence
  Synthetic
aaaaaacccuauugcuau

SEQ ID NO: 635308 - RNA, 19 nt, Artificial Sequence
  Synthetic
aaaaaaacccuauugcuau

SEQ ID NO: 635309 - RNA, 20 nt, Artificial Sequence
  Synthetic
uaaaaaaacccuauugcuau

SEQ ID NO: 635310 - RNA, 21 nt, Artificial Sequence
  Synthetic
uuaaaaaaacccuauugcuau

SEQ ID NO: 635311 - RNA, 22 nt, Artificial Sequence
  Synthetic
guuaaaaaaacccuauugcuau

SEQ ID NO: 635312 - RNA, 23 nt, Artificial Sequence
  Synthetic
cguuaaaaaaacccuauugcuau

SEQ ID NO: 635313 - RNA, 24 nt, Artificial Sequence
  Synthetic
ccguuaaaaaaacccuauugcuau

SEQ ID NO: 635314 - RNA, 18 nt, Artificial Sequence
  Synthetic
aagcaucuauguugcuau

SEQ ID NO: 635315 - RNA, 19 nt, Artificial Sequence
  Synthetic
uaagcaucuauguugcuau

SEQ ID NO: 635316 - RNA, 20 nt, Artificial Sequence
  Synthetic
guaagcaucuauguugcuau

SEQ ID NO: 635317 - RNA, 21 nt, Artificial Sequence
  Synthetic
aguaagcaucuauguugcuau

SEQ ID NO: 635318 - RNA, 22 nt, Artificial Sequence
  Synthetic
aaguaagcaucuauguugcuau

SEQ ID NO: 635319 - RNA, 23 nt, Artificial Sequence
  Synthetic
gaaguaagcaucuauguugcuau

SEQ ID NO: 635320 - RNA, 24 nt, Artificial Sequence
  Synthetic
agaaguaagcaucuauguugcuau

SEQ ID NO: 635321 - RNA, 18 nt, Artificial Sequence
  Synthetic
gccagugaagaaaucuau

SEQ ID NO: 635322 - RNA, 19 nt, Artificial Sequence
  Synthetic
cgccagugaagaaaucuau

SEQ ID NO: 635323 - RNA, 20 nt, Artificial Sequence
  Synthetic
gcgccagugaagaaaucuau

SEQ ID NO: 635324 - RNA, 21 nt, Artificial Sequence
  Synthetic
agcgccagugaagaaaucuau

SEQ ID NO: 635325 - RNA, 22 nt, Artificial Sequence
  Synthetic
aagcgccagugaagaaaucuau

SEQ ID NO: 635326 - RNA, 23 nt, Artificial Sequence
  Synthetic
aaagcgccagugaagaaaucuau

SEQ ID NO: 635327 - RNA, 24 nt, Artificial Sequence
  Synthetic
aaaagcgccagugaagaaaucuau

SEQ ID NO: 635328 - RNA, 18 nt, Artificial Sequence
  Synthetic
ucucuacacucaaucuau

SEQ ID NO: 635329 - RNA, 19 nt, Artificial Sequence
  Synthetic
cucucuacacucaaucuau

SEQ ID NO: 635330 - RNA, 20 nt, Artificial Sequence
  Synthetic
ucucucuacacucaaucuau

SEQ ID NO: 635331 - RNA, 21 nt, Artificial Sequence
  Synthetic
cucucucuacacucaaucuau

SEQ ID NO: 635332 - RNA, 22 nt, Artificial Sequence
  Synthetic
ucucucucuacacucaaucuau

SEQ ID NO: 635333 - RNA, 23 nt, Artificial Sequence
  Synthetic
cucucucucuacacucaaucuau

SEQ ID NO: 635334 - RNA, 24 nt, Artificial Sequence
  Synthetic
gcucucucucuacacucaaucuau

SEQ ID NO: 635335 - RNA, 18 nt, Artificial Sequence
  Synthetic
aggaagcuuucaaucuau

SEQ ID NO: 635336 - RNA, 19 nt, Artificial Sequence
  Synthetic
caggaagcuuucaaucuau

SEQ ID NO: 635337 - RNA, 20 nt, Artificial Sequence
  Synthetic
ucaggaagcuuucaaucuau

SEQ ID NO: 635338 - RNA, 21 nt, Artificial Sequence
  Synthetic
cucaggaagcuuucaaucuau

SEQ ID NO: 635339 - RNA, 22 nt, Artificial Sequence
  Synthetic
ccucaggaagcuuucaaucuau

SEQ ID NO: 635340 - RNA, 23 nt, Artificial Sequence
  Synthetic
uccucaggaagcuuucaaucuau

SEQ ID NO: 635341 - RNA, 24 nt, Artificial Sequence
  Synthetic
guccucaggaagcuuucaaucuau

SEQ ID NO: 635342 - RNA, 18 nt, Artificial Sequence
  Synthetic
cuauuauccagaaucuau

SEQ ID NO: 635343 - RNA, 19 nt, Artificial Sequence
  Synthetic
gcuauuauccagaaucuau

SEQ ID NO: 635344 - RNA, 20 nt, Artificial Sequence
  Synthetic
ggcuauuauccagaaucuau

SEQ ID NO: 635345 - RNA, 21 nt, Artificial Sequence
  Synthetic
gggcuauuauccagaaucuau

SEQ ID NO: 635346 - RNA, 22 nt, Artificial Sequence
  Synthetic
agggcuauuauccagaaucuau

SEQ ID NO: 635347 - RNA, 23 nt, Artificial Sequence
  Synthetic
aagggcuauuauccagaaucuau

SEQ ID NO: 635348 - RNA, 24 nt, Artificial Sequence
  Synthetic
aaagggcuauuauccagaaucuau

SEQ ID NO: 635349 - RNA, 18 nt, Artificial Sequence
  Synthetic
cuaauauucagaaucuau

SEQ ID NO: 635350 - RNA, 19 nt, Artificial Sequence
  Synthetic
ucuaauauucagaaucuau

SEQ ID NO: 635351 - RNA, 20 nt, Artificial Sequence
  Synthetic
gucuaauauucagaaucuau

SEQ ID NO: 635352 - RNA, 21 nt, Artificial Sequence
  Synthetic
ggucuaauauucagaaucuau

SEQ ID NO: 635353 - RNA, 22 nt, Artificial Sequence
  Synthetic
aggucuaauauucagaaucuau

SEQ ID NO: 635354 - RNA, 23 nt, Artificial Sequence
  Synthetic
aaggucuaauauucagaaucuau

SEQ ID NO: 635355 - RNA, 24 nt, Artificial Sequence
  Synthetic
aaaggucuaauauucagaaucuau

SEQ ID NO: 635356 - RNA, 18 nt, Artificial Sequence
  Synthetic
aaggaggaaggaaucuau

SEQ ID NO: 635357 - RNA, 19 nt, Artificial Sequence
  Synthetic
gaaggaggaaggaaucuau

SEQ ID NO: 635358 - RNA, 20 nt, Artificial Sequence
  Synthetic
ggaaggaggaaggaaucuau

SEQ ID NO: 635359 - RNA, 21 nt, Artificial Sequence
  Synthetic
aggaaggaggaaggaaucuau

SEQ ID NO: 635360 - RNA, 22 nt, Artificial Sequence
  Synthetic
aaggaaggaggaaggaaucuau

SEQ ID NO: 635361 - RNA, 23 nt, Artificial Sequence
  Synthetic
gaaggaaggaggaaggaaucuau

SEQ ID NO: 635362 - RNA, 24 nt, Artificial Sequence
  Synthetic
ggaaggaaggaggaaggaaucuau

SEQ ID NO: 635363 - RNA, 18 nt, Artificial Sequence
  Synthetic
cuaauacccggaaucuau

SEQ ID NO: 635364 - RNA, 19 nt, Artificial Sequence
  Synthetic
gcuaauacccggaaucuau

SEQ ID NO: 635365 - RNA, 20 nt, Artificial Sequence
  Synthetic
ggcuaauacccggaaucuau

SEQ ID NO: 635366 - RNA, 21 nt, Artificial Sequence
  Synthetic
gggcuaauacccggaaucuau

SEQ ID NO: 635367 - RNA, 22 nt, Artificial Sequence
  Synthetic
agggcuaauacccggaaucuau

SEQ ID NO: 635368 - RNA, 23 nt, Artificial Sequence
  Synthetic
aagggcuaauacccggaaucuau

SEQ ID NO: 635369 - RNA, 24 nt, Artificial Sequence
  Synthetic
aaagggcuaauacccggaaucuau

SEQ ID NO: 635370 - RNA, 18 nt, Artificial Sequence
  Synthetic
ccuuccagcugaaucuau

SEQ ID NO: 635371 - RNA, 19 nt, Artificial Sequence
  Synthetic
accuuccagcugaaucuau

SEQ ID NO: 635372 - RNA, 20 nt, Artificial Sequence
  Synthetic
uaccuuccagcugaaucuau

SEQ ID NO: 635373 - RNA, 21 nt, Artificial Sequence
  Synthetic
uuaccuuccagcugaaucuau

SEQ ID NO: 635374 - RNA, 22 nt, Artificial Sequence
  Synthetic
auuaccuuccagcugaaucuau

SEQ ID NO: 635375 - RNA, 23 nt, Artificial Sequence
  Synthetic
cauuaccuuccagcugaaucuau

SEQ ID NO: 635376 - RNA, 24 nt, Artificial Sequence
  Synthetic
ucauuaccuuccagcugaaucuau

SEQ ID NO: 635377 - RNA, 18 nt, Artificial Sequence
  Synthetic
ugcaaugaugucaucuau

SEQ ID NO: 635378 - RNA, 19 nt, Artificial Sequence
  Synthetic
augcaaugaugucaucuau

SEQ ID NO: 635379 - RNA, 20 nt, Artificial Sequence
  Synthetic
aaugcaaugaugucaucuau

SEQ ID NO: 635380 - RNA, 21 nt, Artificial Sequence
  Synthetic
caaugcaaugaugucaucuau

SEQ ID NO: 635381 - RNA, 22 nt, Artificial Sequence
  Synthetic
ccaaugcaaugaugucaucuau

SEQ ID NO: 635382 - RNA, 23 nt, Artificial Sequence
  Synthetic
accaaugcaaugaugucaucuau

SEQ ID NO: 635383 - RNA, 24 nt, Artificial Sequence
  Synthetic
caccaaugcaaugaugucaucuau

SEQ ID NO: 635384 - RNA, 18 nt, Artificial Sequence
  Synthetic
agcuuaauuuucaucuau

SEQ ID NO: 635385 - RNA, 19 nt, Artificial Sequence
  Synthetic
uagcuuaauuuucaucuau

SEQ ID NO: 635386 - RNA, 20 nt, Artificial Sequence
  Synthetic
auagcuuaauuuucaucuau

SEQ ID NO: 635387 - RNA, 21 nt, Artificial Sequence
  Synthetic
cauagcuuaauuuucaucuau

SEQ ID NO: 635388 - RNA, 22 nt, Artificial Sequence
  Synthetic
acauagcuuaauuuucaucuau

SEQ ID NO: 635389 - RNA, 23 nt, Artificial Sequence
  Synthetic
aacauagcuuaauuuucaucuau

SEQ ID NO: 635390 - RNA, 24 nt, Artificial Sequence
  Synthetic
aaacauagcuuaauuuucaucuau

SEQ ID NO: 635391 - RNA, 18 nt, Artificial Sequence
  Synthetic
uuccacuuacagaucuau

SEQ ID NO: 635392 - RNA, 19 nt, Artificial Sequence
  Synthetic
auuccacuuacagaucuau

SEQ ID NO: 635393 - RNA, 20 nt, Artificial Sequence
  Synthetic
uauuccacuuacagaucuau

SEQ ID NO: 635394 - RNA, 21 nt, Artificial Sequence
  Synthetic
auauuccacuuacagaucuau

SEQ ID NO: 635395 - RNA, 22 nt, Artificial Sequence
  Synthetic
uauauuccacuuacagaucuau

SEQ ID NO: 635396 - RNA, 23 nt, Artificial Sequence
  Synthetic
auauauuccacuuacagaucuau

SEQ ID NO: 635397 - RNA, 24 nt, Artificial Sequence
  Synthetic
uauauauuccacuuacagaucuau

SEQ ID NO: 635398 - RNA, 18 nt, Artificial Sequence
  Synthetic
uacacagagaggaucuau

SEQ ID NO: 635399 - RNA, 19 nt, Artificial Sequence
  Synthetic
uuacacagagaggaucuau

SEQ ID NO: 635400 - RNA, 20 nt, Artificial Sequence
  Synthetic
cuuacacagagaggaucuau

SEQ ID NO: 635401 - RNA, 21 nt, Artificial Sequence
  Synthetic
ucuuacacagagaggaucuau

SEQ ID NO: 635402 - RNA, 22 nt, Artificial Sequence
  Synthetic
gucuuacacagagaggaucuau

SEQ ID NO: 635403 - RNA, 23 nt, Artificial Sequence
  Synthetic
ugucuuacacagagaggaucuau

SEQ ID NO: 635404 - RNA, 24 nt, Artificial Sequence
  Synthetic
uugucuuacacagagaggaucuau

SEQ ID NO: 635405 - RNA, 18 nt, Artificial Sequence
  Synthetic
aggacaggguggaucuau

SEQ ID NO: 635406 - RNA, 19 nt, Artificial Sequence
  Synthetic
aaggacaggguggaucuau

SEQ ID NO: 635407 - RNA, 20 nt, Artificial Sequence
  Synthetic
uaaggacaggguggaucuau

SEQ ID NO: 635408 - RNA, 21 nt, Artificial Sequence
  Synthetic
auaaggacaggguggaucuau

SEQ ID NO: 635409 - RNA, 22 nt, Artificial Sequence
  Synthetic
gauaaggacaggguggaucuau

SEQ ID NO: 635410 - RNA, 23 nt, Artificial Sequence
  Synthetic
ggauaaggacaggguggaucuau

SEQ ID NO: 635411 - RNA, 24 nt, Artificial Sequence
  Synthetic
uggauaaggacaggguggaucuau

SEQ ID NO: 635412 - RNA, 18 nt, Artificial Sequence
  Synthetic
uuggccuauaauaucuau

SEQ ID NO: 635413 - RNA, 19 nt, Artificial Sequence
  Synthetic
cuuggccuauaauaucuau

SEQ ID NO: 635414 - RNA, 20 nt, Artificial Sequence
  Synthetic
ucuuggccuauaauaucuau

SEQ ID NO: 635415 - RNA, 21 nt, Artificial Sequence
  Synthetic
uucuuggccuauaauaucuau

SEQ ID NO: 635416 - RNA, 22 nt, Artificial Sequence
  Synthetic
cuucuuggccuauaauaucuau

SEQ ID NO: 635417 - RNA, 23 nt, Artificial Sequence
  Synthetic
ucuucuuggccuauaauaucuau

SEQ ID NO: 635418 - RNA, 24 nt, Artificial Sequence
  Synthetic
cucuucuuggccuauaauaucuau

SEQ ID NO: 635419 - RNA, 18 nt, Artificial Sequence
  Synthetic
ugcugguauuauaucuau

SEQ ID NO: 635420 - RNA, 19 nt, Artificial Sequence
  Synthetic
augcugguauuauaucuau

SEQ ID NO: 635421 - RNA, 20 nt, Artificial Sequence
  Synthetic
aaugcugguauuauaucuau

SEQ ID NO: 635422 - RNA, 21 nt, Artificial Sequence
  Synthetic
uaaugcugguauuauaucuau

SEQ ID NO: 635423 - RNA, 22 nt, Artificial Sequence
  Synthetic
cuaaugcugguauuauaucuau

SEQ ID NO: 635424 - RNA, 23 nt, Artificial Sequence
  Synthetic
ucuaaugcugguauuauaucuau

SEQ ID NO: 635425 - RNA, 24 nt, Artificial Sequence
  Synthetic
uucuaaugcugguauuauaucuau

SEQ ID NO: 635426 - RNA, 18 nt, Artificial Sequence
  Synthetic
auauuuauauguaucuau

SEQ ID NO: 635427 - RNA, 19 nt, Artificial Sequence
  Synthetic
uauauuuauauguaucuau

SEQ ID NO: 635428 - RNA, 20 nt, Artificial Sequence
  Synthetic
guauauuuauauguaucuau

SEQ ID NO: 635429 - RNA, 21 nt, Artificial Sequence
  Synthetic
uguauauuuauauguaucuau

SEQ ID NO: 635430 - RNA, 22 nt, Artificial Sequence
  Synthetic
guguauauuuauauguaucuau

SEQ ID NO: 635431 - RNA, 23 nt, Artificial Sequence
  Synthetic
uguguauauuuauauguaucuau

SEQ ID NO: 635432 - RNA, 24 nt, Artificial Sequence
  Synthetic
auguguauauuuauauguaucuau

SEQ ID NO: 635433 - RNA, 18 nt, Artificial Sequence
  Synthetic
caacuuuccuguaucuau

SEQ ID NO: 635434 - RNA, 19 nt, Artificial Sequence
  Synthetic
gcaacuuuccuguaucuau

SEQ ID NO: 635435 - RNA, 20 nt, Artificial Sequence
  Synthetic
ggcaacuuuccuguaucuau

SEQ ID NO: 635436 - RNA, 21 nt, Artificial Sequence
  Synthetic
aggcaacuuuccuguaucuau

SEQ ID NO: 635437 - RNA, 22 nt, Artificial Sequence
  Synthetic
caggcaacuuuccuguaucuau

SEQ ID NO: 635438 - RNA, 23 nt, Artificial Sequence
  Synthetic
acaggcaacuuuccuguaucuau

SEQ ID NO: 635439 - RNA, 24 nt, Artificial Sequence
  Synthetic
cacaggcaacuuuccuguaucuau

SEQ ID NO: 635440 - RNA, 18 nt, Artificial Sequence
  Synthetic
cuguuaauucuuaucuau

SEQ ID NO: 635441 - RNA, 19 nt, Artificial Sequence
  Synthetic
gcuguuaauucuuaucuau

SEQ ID NO: 635442 - RNA, 20 nt, Artificial Sequence
  Synthetic
ggcuguuaauucuuaucuau

SEQ ID NO: 635443 - RNA, 21 nt, Artificial Sequence
  Synthetic
uggcuguuaauucuuaucuau

SEQ ID NO: 635444 - RNA, 22 nt, Artificial Sequence
  Synthetic
cuggcuguuaauucuuaucuau

SEQ ID NO: 635445 - RNA, 23 nt, Artificial Sequence
  Synthetic
gcuggcuguuaauucuuaucuau

SEQ ID NO: 635446 - RNA, 24 nt, Artificial Sequence
  Synthetic
agcuggcuguuaauucuuaucuau

SEQ ID NO: 635447 - RNA, 18 nt, Artificial Sequence
  Synthetic
cuggggaccguuaucuau

SEQ ID NO: 635448 - RNA, 19 nt, Artificial Sequence
  Synthetic
gcuggggaccguuaucuau

SEQ ID NO: 635449 - RNA, 20 nt, Artificial Sequence
  Synthetic
ugcuggggaccguuaucuau

SEQ ID NO: 635450 - RNA, 21 nt, Artificial Sequence
  Synthetic
cugcuggggaccguuaucuau

SEQ ID NO: 635451 - RNA, 22 nt, Artificial Sequence
  Synthetic
acugcuggggaccguuaucuau

SEQ ID NO: 635452 - RNA, 23 nt, Artificial Sequence
  Synthetic
uacugcuggggaccguuaucuau

SEQ ID NO: 635453 - RNA, 24 nt, Artificial Sequence
  Synthetic
uuacugcuggggaccguuaucuau

SEQ ID NO: 635454 - RNA, 18 nt, Artificial Sequence
  Synthetic
gaguuaaaacaacucuau

SEQ ID NO: 635455 - RNA, 19 nt, Artificial Sequence
  Synthetic
ggaguuaaaacaacucuau

SEQ ID NO: 635456 - RNA, 20 nt, Artificial Sequence
  Synthetic
aggaguuaaaacaacucuau

SEQ ID NO: 635457 - RNA, 21 nt, Artificial Sequence
  Synthetic
aaggaguuaaaacaacucuau

SEQ ID NO: 635458 - RNA, 22 nt, Artificial Sequence
  Synthetic
uaaggaguuaaaacaacucuau

SEQ ID NO: 635459 - RNA, 23 nt, Artificial Sequence
  Synthetic
auaaggaguuaaaacaacucuau

SEQ ID NO: 635460 - RNA, 24 nt, Artificial Sequence
  Synthetic
uauaaggaguuaaaacaacucuau

SEQ ID NO: 635461 - RNA, 18 nt, Artificial Sequence
  Synthetic
ccuuuuugggaacucuau

SEQ ID NO: 635462 - RNA, 19 nt, Artificial Sequence
  Synthetic
uccuuuuugggaacucuau

SEQ ID NO: 635463 - RNA, 20 nt, Artificial Sequence
  Synthetic
uuccuuuuugggaacucuau

SEQ ID NO: 635464 - RNA, 21 nt, Artificial Sequence
  Synthetic
uuuccuuuuugggaacucuau

SEQ ID NO: 635465 - RNA, 22 nt, Artificial Sequence
  Synthetic
auuuccuuuuugggaacucuau

SEQ ID NO: 635466 - RNA, 23 nt, Artificial Sequence
  Synthetic
uauuuccuuuuugggaacucuau

SEQ ID NO: 635467 - RNA, 24 nt, Artificial Sequence
  Synthetic
uuauuuccuuuuugggaacucuau

SEQ ID NO: 635468 - RNA, 18 nt, Artificial Sequence
  Synthetic
cugguuccuucacucuau

SEQ ID NO: 635469 - RNA, 19 nt, Artificial Sequence
  Synthetic
ccugguuccuucacucuau

SEQ ID NO: 635470 - RNA, 20 nt, Artificial Sequence
  Synthetic
cccugguuccuucacucuau

SEQ ID NO: 635471 - RNA, 21 nt, Artificial Sequence
  Synthetic
ucccugguuccuucacucuau

SEQ ID NO: 635472 - RNA, 22 nt, Artificial Sequence
  Synthetic
aucccugguuccuucacucuau

SEQ ID NO: 635473 - RNA, 23 nt, Artificial Sequence
  Synthetic
aaucccugguuccuucacucuau

SEQ ID NO: 635474 - RNA, 24 nt, Artificial Sequence
  Synthetic
gaaucccugguuccuucacucuau

SEQ ID NO: 635475 - RNA, 18 nt, Artificial Sequence
  Synthetic
uuguguuuauuacucuau

SEQ ID NO: 635476 - RNA, 19 nt, Artificial Sequence
  Synthetic
guuguguuuauuacucuau

SEQ ID NO: 635477 - RNA, 20 nt, Artificial Sequence
  Synthetic
aguuguguuuauuacucuau

SEQ ID NO: 635478 - RNA, 21 nt, Artificial Sequence
  Synthetic
gaguuguguuuauuacucuau

SEQ ID NO: 635479 - RNA, 22 nt, Artificial Sequence
  Synthetic
ggaguuguguuuauuacucuau

SEQ ID NO: 635480 - RNA, 23 nt, Artificial Sequence
  Synthetic
aggaguuguguuuauuacucuau

SEQ ID NO: 635481 - RNA, 24 nt, Artificial Sequence
  Synthetic
caggaguuguguuuauuacucuau

SEQ ID NO: 635482 - RNA, 18 nt, Artificial Sequence
  Synthetic
gaugaaaauguccucuau

SEQ ID NO: 635483 - RNA, 19 nt, Artificial Sequence
  Synthetic
agaugaaaauguccucuau

SEQ ID NO: 635484 - RNA, 20 nt, Artificial Sequence
  Synthetic
aagaugaaaauguccucuau

SEQ ID NO: 635485 - RNA, 21 nt, Artificial Sequence
  Synthetic
gaagaugaaaauguccucuau

SEQ ID NO: 635486 - RNA, 22 nt, Artificial Sequence
  Synthetic
agaagaugaaaauguccucuau

SEQ ID NO: 635487 - RNA, 23 nt, Artificial Sequence
  Synthetic
aagaagaugaaaauguccucuau

SEQ ID NO: 635488 - RNA, 24 nt, Artificial Sequence
  Synthetic
aaagaagaugaaaauguccucuau

SEQ ID NO: 635489 - RNA, 18 nt, Artificial Sequence
  Synthetic
cuggaagucuugcucuau

SEQ ID NO: 635490 - RNA, 19 nt, Artificial Sequence
  Synthetic
ucuggaagucuugcucuau

SEQ ID NO: 635491 - RNA, 20 nt, Artificial Sequence
  Synthetic
uucuggaagucuugcucuau

SEQ ID NO: 635492 - RNA, 21 nt, Artificial Sequence
  Synthetic
auucuggaagucuugcucuau

SEQ ID NO: 635493 - RNA, 22 nt, Artificial Sequence
  Synthetic
aauucuggaagucuugcucuau

SEQ ID NO: 635494 - RNA, 23 nt, Artificial Sequence
  Synthetic
uaauucuggaagucuugcucuau

SEQ ID NO: 635495 - RNA, 24 nt, Artificial Sequence
  Synthetic
auaauucuggaagucuugcucuau

SEQ ID NO: 635496 - RNA, 18 nt, Artificial Sequence
  Synthetic
gaaaaccuaucucucuau

SEQ ID NO: 635497 - RNA, 19 nt, Artificial Sequence
  Synthetic
ugaaaaccuaucucucuau

SEQ ID NO: 635498 - RNA, 20 nt, Artificial Sequence
  Synthetic
cugaaaaccuaucucucuau

SEQ ID NO: 635499 - RNA, 21 nt, Artificial Sequence
  Synthetic
ucugaaaaccuaucucucuau

SEQ ID NO: 635500 - RNA, 22 nt, Artificial Sequence
  Synthetic
gucugaaaaccuaucucucuau

SEQ ID NO: 635501 - RNA, 23 nt, Artificial Sequence
  Synthetic
ugucugaaaaccuaucucucuau

SEQ ID NO: 635502 - RNA, 24 nt, Artificial Sequence
  Synthetic
gugucugaaaaccuaucucucuau

SEQ ID NO: 635503 - RNA, 18 nt, Artificial Sequence
  Synthetic
ucaaauuggcgucucuau

SEQ ID NO: 635504 - RNA, 19 nt, Artificial Sequence
  Synthetic
uucaaauuggcgucucuau

SEQ ID NO: 635505 - RNA, 20 nt, Artificial Sequence
  Synthetic
uuucaaauuggcgucucuau

SEQ ID NO: 635506 - RNA, 21 nt, Artificial Sequence
  Synthetic
auuucaaauuggcgucucuau

SEQ ID NO: 635507 - RNA, 22 nt, Artificial Sequence
  Synthetic
aauuucaaauuggcgucucuau

SEQ ID NO: 635508 - RNA, 23 nt, Artificial Sequence
  Synthetic
gaauuucaaauuggcgucucuau

SEQ ID NO: 635509 - RNA, 24 nt, Artificial Sequence
  Synthetic
ugaauuucaaauuggcgucucuau

SEQ ID NO: 635510 - RNA, 18 nt, Artificial Sequence
  Synthetic
gugagacucugucucuau

SEQ ID NO: 635511 - RNA, 19 nt, Artificial Sequence
  Synthetic
agugagacucugucucuau

SEQ ID NO: 635512 - RNA, 20 nt, Artificial Sequence
  Synthetic
cagugagacucugucucuau

SEQ ID NO: 635513 - RNA, 21 nt, Artificial Sequence
  Synthetic
acagugagacucugucucuau

SEQ ID NO: 635514 - RNA, 22 nt, Artificial Sequence
  Synthetic
cacagugagacucugucucuau

SEQ ID NO: 635515 - RNA, 23 nt, Artificial Sequence
  Synthetic
acacagugagacucugucucuau

SEQ ID NO: 635516 - RNA, 24 nt, Artificial Sequence
  Synthetic
aacacagugagacucugucucuau

SEQ ID NO: 635517 - RNA, 18 nt, Artificial Sequence
  Synthetic
caucuauucugucucuau

SEQ ID NO: 635518 - RNA, 19 nt, Artificial Sequence
  Synthetic
ucaucuauucugucucuau

SEQ ID NO: 635519 - RNA, 20 nt, Artificial Sequence
  Synthetic
cucaucuauucugucucuau

SEQ ID NO: 635520 - RNA, 21 nt, Artificial Sequence
  Synthetic
ucucaucuauucugucucuau

SEQ ID NO: 635521 - RNA, 22 nt, Artificial Sequence
  Synthetic
gucucaucuauucugucucuau

SEQ ID NO: 635522 - RNA, 23 nt, Artificial Sequence
  Synthetic
agucucaucuauucugucucuau

SEQ ID NO: 635523 - RNA, 24 nt, Artificial Sequence
  Synthetic
cagucucaucuauucugucucuau

SEQ ID NO: 635524 - RNA, 18 nt, Artificial Sequence
  Synthetic
uuucauuccuuucucuau

SEQ ID NO: 635525 - RNA, 19 nt, Artificial Sequence
  Synthetic
uuuucauuccuuucucuau

SEQ ID NO: 635526 - RNA, 20 nt, Artificial Sequence
  Synthetic
uuuuucauuccuuucucuau

SEQ ID NO: 635527 - RNA, 21 nt, Artificial Sequence
  Synthetic
uuuuuucauuccuuucucuau

SEQ ID NO: 635528 - RNA, 22 nt, Artificial Sequence
  Synthetic
uuuuuuucauuccuuucucuau

SEQ ID NO: 635529 - RNA, 23 nt, Artificial Sequence
  Synthetic
cuuuuuuucauuccuuucucuau

SEQ ID NO: 635530 - RNA, 24 nt, Artificial Sequence
  Synthetic
acuuuuuuucauuccuuucucuau

SEQ ID NO: 635531 - RNA, 18 nt, Artificial Sequence
  Synthetic
ggauauauuuuucucuau

SEQ ID NO: 635532 - RNA, 19 nt, Artificial Sequence
  Synthetic
uggauauauuuuucucuau

SEQ ID NO: 635533 - RNA, 20 nt, Artificial Sequence
  Synthetic
auggauauauuuuucucuau

SEQ ID NO: 635534 - RNA, 21 nt, Artificial Sequence
  Synthetic
aauggauauauuuuucucuau

SEQ ID NO: 635535 - RNA, 22 nt, Artificial Sequence
  Synthetic
uaauggauauauuuuucucuau

SEQ ID NO: 635536 - RNA, 23 nt, Artificial Sequence
  Synthetic
cuaauggauauauuuuucucuau

SEQ ID NO: 635537 - RNA, 24 nt, Artificial Sequence
  Synthetic
acuaauggauauauuuuucucuau

SEQ ID NO: 635538 - RNA, 18 nt, Artificial Sequence
  Synthetic
caggauaucauagucuau

SEQ ID NO: 635539 - RNA, 19 nt, Artificial Sequence
  Synthetic
gcaggauaucauagucuau

SEQ ID NO: 635540 - RNA, 20 nt, Artificial Sequence
  Synthetic
agcaggauaucauagucuau

SEQ ID NO: 635541 - RNA, 21 nt, Artificial Sequence
  Synthetic
aagcaggauaucauagucuau

SEQ ID NO: 635542 - RNA, 22 nt, Artificial Sequence
  Synthetic
gaagcaggauaucauagucuau

SEQ ID NO: 635543 - RNA, 23 nt, Artificial Sequence
  Synthetic
agaagcaggauaucauagucuau

SEQ ID NO: 635544 - RNA, 24 nt, Artificial Sequence
  Synthetic
gagaagcaggauaucauagucuau

SEQ ID NO: 635545 - RNA, 18 nt, Artificial Sequence
  Synthetic
aagaauauguuagucuau

SEQ ID NO: 635546 - RNA, 19 nt, Artificial Sequence
  Synthetic
aaagaauauguuagucuau

SEQ ID NO: 635547 - RNA, 20 nt, Artificial Sequence
  Synthetic
gaaagaauauguuagucuau

SEQ ID NO: 635548 - RNA, 21 nt, Artificial Sequence
  Synthetic
agaaagaauauguuagucuau

SEQ ID NO: 635549 - RNA, 22 nt, Artificial Sequence
  Synthetic
cagaaagaauauguuagucuau

SEQ ID NO: 635550 - RNA, 23 nt, Artificial Sequence
  Synthetic
gcagaaagaauauguuagucuau

SEQ ID NO: 635551 - RNA, 24 nt, Artificial Sequence
  Synthetic
agcagaaagaauauguuagucuau

SEQ ID NO: 635552 - RNA, 18 nt, Artificial Sequence
  Synthetic
guguucucauaugucuau

SEQ ID NO: 635553 - RNA, 19 nt, Artificial Sequence
  Synthetic
gguguucucauaugucuau

SEQ ID NO: 635554 - RNA, 20 nt, Artificial Sequence
  Synthetic
agguguucucauaugucuau

SEQ ID NO: 635555 - RNA, 21 nt, Artificial Sequence
  Synthetic
uagguguucucauaugucuau

SEQ ID NO: 635556 - RNA, 22 nt, Artificial Sequence
  Synthetic
cuagguguucucauaugucuau

SEQ ID NO: 635557 - RNA, 23 nt, Artificial Sequence
  Synthetic
ucuagguguucucauaugucuau

SEQ ID NO: 635558 - RNA, 24 nt, Artificial Sequence
  Synthetic
uucuagguguucucauaugucuau

SEQ ID NO: 635559 - RNA, 18 nt, Artificial Sequence
  Synthetic
ucacauuaacaauucuau

SEQ ID NO: 635560 - RNA, 19 nt, Artificial Sequence
  Synthetic
cucacauuaacaauucuau

SEQ ID NO: 635561 - RNA, 20 nt, Artificial Sequence
  Synthetic
gcucacauuaacaauucuau

SEQ ID NO: 635562 - RNA, 21 nt, Artificial Sequence
  Synthetic
ggcucacauuaacaauucuau

SEQ ID NO: 635563 - RNA, 22 nt, Artificial Sequence
  Synthetic
gggcucacauuaacaauucuau

SEQ ID NO: 635564 - RNA, 23 nt, Artificial Sequence
  Synthetic
ugggcucacauuaacaauucuau

SEQ ID NO: 635565 - RNA, 24 nt, Artificial Sequence
  Synthetic
uugggcucacauuaacaauucuau

SEQ ID NO: 635566 - RNA, 18 nt, Artificial Sequence
  Synthetic
uucauccccuaauucuau

SEQ ID NO: 635567 - RNA, 19 nt, Artificial Sequence
  Synthetic
auucauccccuaauucuau

SEQ ID NO: 635568 - RNA, 20 nt, Artificial Sequence
  Synthetic
cauucauccccuaauucuau

SEQ ID NO: 635569 - RNA, 21 nt, Artificial Sequence
  Synthetic
ucauucauccccuaauucuau

SEQ ID NO: 635570 - RNA, 22 nt, Artificial Sequence
  Synthetic
cucauucauccccuaauucuau

SEQ ID NO: 635571 - RNA, 23 nt, Artificial Sequence
  Synthetic
gcucauucauccccuaauucuau

SEQ ID NO: 635572 - RNA, 24 nt, Artificial Sequence
  Synthetic
ugcucauucauccccuaauucuau

SEQ ID NO: 635573 - RNA, 18 nt, Artificial Sequence
  Synthetic
aucucccuuuaauucuau

SEQ ID NO: 635574 - RNA, 19 nt, Artificial Sequence
  Synthetic
aaucucccuuuaauucuau

SEQ ID NO: 635575 - RNA, 20 nt, Artificial Sequence
  Synthetic
gaaucucccuuuaauucuau

SEQ ID NO: 635576 - RNA, 21 nt, Artificial Sequence
  Synthetic
cgaaucucccuuuaauucuau

SEQ ID NO: 635577 - RNA, 22 nt, Artificial Sequence
  Synthetic
ccgaaucucccuuuaauucuau

SEQ ID NO: 635578 - RNA, 23 nt, Artificial Sequence
  Synthetic
cccgaaucucccuuuaauucuau

SEQ ID NO: 635579 - RNA, 24 nt, Artificial Sequence
  Synthetic
gcccgaaucucccuuuaauucuau

SEQ ID NO: 635580 - RNA, 18 nt, Artificial Sequence
  Synthetic
guaacauguacauucuau

SEQ ID NO: 635581 - RNA, 19 nt, Artificial Sequence
  Synthetic
aguaacauguacauucuau

SEQ ID NO: 635582 - RNA, 20 nt, Artificial Sequence
  Synthetic
aaguaacauguacauucuau

SEQ ID NO: 635583 - RNA, 21 nt, Artificial Sequence
  Synthetic
aaaguaacauguacauucuau

SEQ ID NO: 635584 - RNA, 22 nt, Artificial Sequence
  Synthetic
uaaaguaacauguacauucuau

SEQ ID NO: 635585 - RNA, 23 nt, Artificial Sequence
  Synthetic
auaaaguaacauguacauucuau

SEQ ID NO: 635586 - RNA, 24 nt, Artificial Sequence
  Synthetic
aauaaaguaacauguacauucuau

SEQ ID NO: 635587 - RNA, 18 nt, Artificial Sequence
  Synthetic
auccaggucucauucuau

SEQ ID NO: 635588 - RNA, 19 nt, Artificial Sequence
  Synthetic
uauccaggucucauucuau

SEQ ID NO: 635589 - RNA, 20 nt, Artificial Sequence
  Synthetic
auauccaggucucauucuau

SEQ ID NO: 635590 - RNA, 21 nt, Artificial Sequence
  Synthetic
aauauccaggucucauucuau

SEQ ID NO: 635591 - RNA, 22 nt, Artificial Sequence
  Synthetic
aaauauccaggucucauucuau

SEQ ID NO: 635592 - RNA, 23 nt, Artificial Sequence
  Synthetic
uaaauauccaggucucauucuau

SEQ ID NO: 635593 - RNA, 24 nt, Artificial Sequence
  Synthetic
auaaauauccaggucucauucuau

SEQ ID NO: 635594 - RNA, 18 nt, Artificial Sequence
  Synthetic
ucuauucagagauucuau

SEQ ID NO: 635595 - RNA, 19 nt, Artificial Sequence
  Synthetic
uucuauucagagauucuau

SEQ ID NO: 635596 - RNA, 20 nt, Artificial Sequence
  Synthetic
cuucuauucagagauucuau

SEQ ID NO: 635597 - RNA, 21 nt, Artificial Sequence
  Synthetic
ccuucuauucagagauucuau

SEQ ID NO: 635598 - RNA, 22 nt, Artificial Sequence
  Synthetic
gccuucuauucagagauucuau

SEQ ID NO: 635599 - RNA, 23 nt, Artificial Sequence
  Synthetic
agccuucuauucagagauucuau

SEQ ID NO: 635600 - RNA, 24 nt, Artificial Sequence
  Synthetic
aagccuucuauucagagauucuau

SEQ ID NO: 635601 - RNA, 18 nt, Artificial Sequence
  Synthetic
ggaagggacauauucuau

SEQ ID NO: 635602 - RNA, 19 nt, Artificial Sequence
  Synthetic
aggaagggacauauucuau

SEQ ID NO: 635603 - RNA, 20 nt, Artificial Sequence
  Synthetic
aaggaagggacauauucuau

SEQ ID NO: 635604 - RNA, 21 nt, Artificial Sequence
  Synthetic
aaaggaagggacauauucuau

SEQ ID NO: 635605 - RNA, 22 nt, Artificial Sequence
  Synthetic
uaaaggaagggacauauucuau

SEQ ID NO: 635606 - RNA, 23 nt, Artificial Sequence
  Synthetic
uuaaaggaagggacauauucuau

SEQ ID NO: 635607 - RNA, 24 nt, Artificial Sequence
  Synthetic
uuuaaaggaagggacauauucuau

SEQ ID NO: 635608 - RNA, 18 nt, Artificial Sequence
  Synthetic
ucuucguguuuauucuau

SEQ ID NO: 635609 - RNA, 19 nt, Artificial Sequence
  Synthetic
cucuucguguuuauucuau

SEQ ID NO: 635610 - RNA, 20 nt, Artificial Sequence
  Synthetic
ucucuucguguuuauucuau

SEQ ID NO: 635611 - RNA, 21 nt, Artificial Sequence
  Synthetic
aucucuucguguuuauucuau

SEQ ID NO: 635612 - RNA, 22 nt, Artificial Sequence
  Synthetic
gaucucuucguguuuauucuau

SEQ ID NO: 635613 - RNA, 23 nt, Artificial Sequence
  Synthetic
ugaucucuucguguuuauucuau

SEQ ID NO: 635614 - RNA, 24 nt, Artificial Sequence
  Synthetic
uugaucucuucguguuuauucuau

SEQ ID NO: 635615 - RNA, 18 nt, Artificial Sequence
  Synthetic
cccuuucuaaacuucuau

SEQ ID NO: 635616 - RNA, 19 nt, Artificial Sequence
  Synthetic
ccccuuucuaaacuucuau

SEQ ID NO: 635617 - RNA, 20 nt, Artificial Sequence
  Synthetic
cccccuuucuaaacuucuau

SEQ ID NO: 635618 - RNA, 21 nt, Artificial Sequence
  Synthetic
acccccuuucuaaacuucuau

SEQ ID NO: 635619 - RNA, 22 nt, Artificial Sequence
  Synthetic
aacccccuuucuaaacuucuau

SEQ ID NO: 635620 - RNA, 23 nt, Artificial Sequence
  Synthetic
uaacccccuuucuaaacuucuau

SEQ ID NO: 635621 - RNA, 24 nt, Artificial Sequence
  Synthetic
uuaacccccuuucuaaacuucuau

SEQ ID NO: 635622 - RNA, 18 nt, Artificial Sequence
  Synthetic
gucucuuccaucuucuau

SEQ ID NO: 635623 - RNA, 19 nt, Artificial Sequence
  Synthetic
agucucuuccaucuucuau

SEQ ID NO: 635624 - RNA, 20 nt, Artificial Sequence
  Synthetic
cagucucuuccaucuucuau

SEQ ID NO: 635625 - RNA, 21 nt, Artificial Sequence
  Synthetic
ccagucucuuccaucuucuau

SEQ ID NO: 635626 - RNA, 22 nt, Artificial Sequence
  Synthetic
uccagucucuuccaucuucuau

SEQ ID NO: 635627 - RNA, 23 nt, Artificial Sequence
  Synthetic
uuccagucucuuccaucuucuau

SEQ ID NO: 635628 - RNA, 24 nt, Artificial Sequence
  Synthetic
guuccagucucuuccaucuucuau

SEQ ID NO: 635629 - RNA, 18 nt, Artificial Sequence
  Synthetic
uggauagggaucuucuau

SEQ ID NO: 635630 - RNA, 19 nt, Artificial Sequence
  Synthetic
uuggauagggaucuucuau

SEQ ID NO: 635631 - RNA, 20 nt, Artificial Sequence
  Synthetic
uuuggauagggaucuucuau

SEQ ID NO: 635632 - RNA, 21 nt, Artificial Sequence
  Synthetic
guuuggauagggaucuucuau

SEQ ID NO: 635633 - RNA, 22 nt, Artificial Sequence
  Synthetic
gguuuggauagggaucuucuau

SEQ ID NO: 635634 - RNA, 23 nt, Artificial Sequence
  Synthetic
ugguuuggauagggaucuucuau

SEQ ID NO: 635635 - RNA, 24 nt, Artificial Sequence
  Synthetic
augguuuggauagggaucuucuau

SEQ ID NO: 635636 - RNA, 18 nt, Artificial Sequence
  Synthetic
aaaaauaauaucuucuau

SEQ ID NO: 635637 - RNA, 19 nt, Artificial Sequence
  Synthetic
caaaaauaauaucuucuau

SEQ ID NO: 635638 - RNA, 20 nt, Artificial Sequence
  Synthetic
ucaaaaauaauaucuucuau

SEQ ID NO: 635639 - RNA, 21 nt, Artificial Sequence
  Synthetic
uucaaaaauaauaucuucuau

SEQ ID NO: 635640 - RNA, 22 nt, Artificial Sequence
  Synthetic
uuucaaaaauaauaucuucuau

SEQ ID NO: 635641 - RNA, 23 nt, Artificial Sequence
  Synthetic
uuuucaaaaauaauaucuucuau

SEQ ID NO: 635642 - RNA, 24 nt, Artificial Sequence
  Synthetic
cuuuucaaaaauaauaucuucuau

SEQ ID NO: 635643 - RNA, 18 nt, Artificial Sequence
  Synthetic
gaugaagcagucuucuau

SEQ ID NO: 635644 - RNA, 19 nt, Artificial Sequence
  Synthetic
agaugaagcagucuucuau

SEQ ID NO: 635645 - RNA, 20 nt, Artificial Sequence
  Synthetic
uagaugaagcagucuucuau

SEQ ID NO: 635646 - RNA, 21 nt, Artificial Sequence
  Synthetic
guagaugaagcagucuucuau

SEQ ID NO: 635647 - RNA, 22 nt, Artificial Sequence
  Synthetic
uguagaugaagcagucuucuau

SEQ ID NO: 635648 - RNA, 23 nt, Artificial Sequence
  Synthetic
guguagaugaagcagucuucuau

SEQ ID NO: 635649 - RNA, 24 nt, Artificial Sequence
  Synthetic
aguguagaugaagcagucuucuau

SEQ ID NO: 635650 - RNA, 18 nt, Artificial Sequence
  Synthetic
aaauuuuacuucuucuau

SEQ ID NO: 635651 - RNA, 19 nt, Artificial Sequence
  Synthetic
gaaauuuuacuucuucuau

SEQ ID NO: 635652 - RNA, 20 nt, Artificial Sequence
  Synthetic
ggaaauuuuacuucuucuau

SEQ ID NO: 635653 - RNA, 21 nt, Artificial Sequence
  Synthetic
aggaaauuuuacuucuucuau

SEQ ID NO: 635654 - RNA, 22 nt, Artificial Sequence
  Synthetic
aaggaaauuuuacuucuucuau

SEQ ID NO: 635655 - RNA, 23 nt, Artificial Sequence
  Synthetic
caaggaaauuuuacuucuucuau

SEQ ID NO: 635656 - RNA, 24 nt, Artificial Sequence
  Synthetic
ucaaggaaauuuuacuucuucuau

SEQ ID NO: 635657 - RNA, 18 nt, Artificial Sequence
  Synthetic
ucaucacgggaguucuau

SEQ ID NO: 635658 - RNA, 19 nt, Artificial Sequence
  Synthetic
aucaucacgggaguucuau

SEQ ID NO: 635659 - RNA, 20 nt, Artificial Sequence
  Synthetic
caucaucacgggaguucuau

SEQ ID NO: 635660 - RNA, 21 nt, Artificial Sequence
  Synthetic
ucaucaucacgggaguucuau

SEQ ID NO: 635661 - RNA, 22 nt, Artificial Sequence
  Synthetic
uucaucaucacgggaguucuau

SEQ ID NO: 635662 - RNA, 23 nt, Artificial Sequence
  Synthetic
uuucaucaucacgggaguucuau

SEQ ID NO: 635663 - RNA, 24 nt, Artificial Sequence
  Synthetic
uuuucaucaucacgggaguucuau

SEQ ID NO: 635664 - RNA, 18 nt, Artificial Sequence
  Synthetic
gcuuuguucacguucuau

SEQ ID NO: 635665 - RNA, 19 nt, Artificial Sequence
  Synthetic
ggcuuuguucacguucuau

SEQ ID NO: 635666 - RNA, 20 nt, Artificial Sequence
  Synthetic
aggcuuuguucacguucuau

SEQ ID NO: 635667 - RNA, 21 nt, Artificial Sequence
  Synthetic
aaggcuuuguucacguucuau

SEQ ID NO: 635668 - RNA, 22 nt, Artificial Sequence
  Synthetic
aaaggcuuuguucacguucuau

SEQ ID NO: 635669 - RNA, 23 nt, Artificial Sequence
  Synthetic
aaaaggcuuuguucacguucuau

SEQ ID NO: 635670 - RNA, 24 nt, Artificial Sequence
  Synthetic
aaaaaggcuuuguucacguucuau

SEQ ID NO: 635671 - RNA, 18 nt, Artificial Sequence
  Synthetic
ugagaagacauguucuau

SEQ ID NO: 635672 - RNA, 19 nt, Artificial Sequence
  Synthetic
augagaagacauguucuau

SEQ ID NO: 635673 - RNA, 20 nt, Artificial Sequence
  Synthetic
aaugagaagacauguucuau

SEQ ID NO: 635674 - RNA, 21 nt, Artificial Sequence
  Synthetic
caaugagaagacauguucuau

SEQ ID NO: 635675 - RNA, 22 nt, Artificial Sequence
  Synthetic
ccaaugagaagacauguucuau

SEQ ID NO: 635676 - RNA, 23 nt, Artificial Sequence
  Synthetic
uccaaugagaagacauguucuau

SEQ ID NO: 635677 - RNA, 24 nt, Artificial Sequence
  Synthetic
cuccaaugagaagacauguucuau

SEQ ID NO: 635678 - RNA, 18 nt, Artificial Sequence
  Synthetic
guaaaccuuauguucuau

SEQ ID NO: 635679 - RNA, 19 nt, Artificial Sequence
  Synthetic
uguaaaccuuauguucuau

SEQ ID NO: 635680 - RNA, 20 nt, Artificial Sequence
  Synthetic
auguaaaccuuauguucuau

SEQ ID NO: 635681 - RNA, 21 nt, Artificial Sequence
  Synthetic
aauguaaaccuuauguucuau

SEQ ID NO: 635682 - RNA, 22 nt, Artificial Sequence
  Synthetic
aaauguaaaccuuauguucuau

SEQ ID NO: 635683 - RNA, 23 nt, Artificial Sequence
  Synthetic
uaaauguaaaccuuauguucuau

SEQ ID NO: 635684 - RNA, 24 nt, Artificial Sequence
  Synthetic
guaaauguaaaccuuauguucuau

SEQ ID NO: 635685 - RNA, 18 nt, Artificial Sequence
  Synthetic
uauuaagaauuguucuau

SEQ ID NO: 635686 - RNA, 19 nt, Artificial Sequence
  Synthetic
uuauuaagaauuguucuau

SEQ ID NO: 635687 - RNA, 20 nt, Artificial Sequence
  Synthetic
auuauuaagaauuguucuau

SEQ ID NO: 635688 - RNA, 21 nt, Artificial Sequence
  Synthetic
uauuauuaagaauuguucuau

SEQ ID NO: 635689 - RNA, 22 nt, Artificial Sequence
  Synthetic
auauuauuaagaauuguucuau

SEQ ID NO: 635690 - RNA, 23 nt, Artificial Sequence
  Synthetic
uauauuauuaagaauuguucuau

SEQ ID NO: 635691 - RNA, 24 nt, Artificial Sequence
  Synthetic
guauauuauuaagaauuguucuau

SEQ ID NO: 635692 - RNA, 18 nt, Artificial Sequence
  Synthetic
caguuacgucauuucuau

SEQ ID NO: 635693 - RNA, 19 nt, Artificial Sequence
  Synthetic
ucaguuacgucauuucuau

SEQ ID NO: 635694 - RNA, 20 nt, Artificial Sequence
  Synthetic
uucaguuacgucauuucuau

SEQ ID NO: 635695 - RNA, 21 nt, Artificial Sequence
  Synthetic
cuucaguuacgucauuucuau

SEQ ID NO: 635696 - RNA, 22 nt, Artificial Sequence
  Synthetic
acuucaguuacgucauuucuau

SEQ ID NO: 635697 - RNA, 23 nt, Artificial Sequence
  Synthetic
uacuucaguuacgucauuucuau

SEQ ID NO: 635698 - RNA, 24 nt, Artificial Sequence
  Synthetic
cuacuucaguuacgucauuucuau

SEQ ID NO: 635699 - RNA, 18 nt, Artificial Sequence
  Synthetic
uucgauugucauuucuau

SEQ ID NO: 635700 - RNA, 19 nt, Artificial Sequence
  Synthetic
uuucgauugucauuucuau

SEQ ID NO: 635701 - RNA, 20 nt, Artificial Sequence
  Synthetic
uuuucgauugucauuucuau

SEQ ID NO: 635702 - RNA, 21 nt, Artificial Sequence
  Synthetic
guuuucgauugucauuucuau

SEQ ID NO: 635703 - RNA, 22 nt, Artificial Sequence
  Synthetic
uguuuucgauugucauuucuau

SEQ ID NO: 635704 - RNA, 23 nt, Artificial Sequence
  Synthetic
auguuuucgauugucauuucuau

SEQ ID NO: 635705 - RNA, 24 nt, Artificial Sequence
  Synthetic
uauguuuucgauugucauuucuau

SEQ ID NO: 635706 - RNA, 18 nt, Artificial Sequence
  Synthetic
aacauagcccuuuucuau

SEQ ID NO: 635707 - RNA, 19 nt, Artificial Sequence
  Synthetic
aaacauagcccuuuucuau

SEQ ID NO: 635708 - RNA, 20 nt, Artificial Sequence
  Synthetic
aaaacauagcccuuuucuau

SEQ ID NO: 635709 - RNA, 21 nt, Artificial Sequence
  Synthetic
uaaaacauagcccuuuucuau

SEQ ID NO: 635710 - RNA, 22 nt, Artificial Sequence
  Synthetic
auaaaacauagcccuuuucuau

SEQ ID NO: 635711 - RNA, 23 nt, Artificial Sequence
  Synthetic
aauaaaacauagcccuuuucuau

SEQ ID NO: 635712 - RNA, 24 nt, Artificial Sequence
  Synthetic
aaauaaaacauagcccuuuucuau

SEQ ID NO: 635713 - RNA, 18 nt, Artificial Sequence
  Synthetic
auaccaacaguuuucuau

SEQ ID NO: 635714 - RNA, 19 nt, Artificial Sequence
  Synthetic
aauaccaacaguuuucuau

SEQ ID NO: 635715 - RNA, 20 nt, Artificial Sequence
  Synthetic
aaauaccaacaguuuucuau

SEQ ID NO: 635716 - RNA, 21 nt, Artificial Sequence
  Synthetic
caaauaccaacaguuuucuau

SEQ ID NO: 635717 - RNA, 22 nt, Artificial Sequence
  Synthetic
ucaaauaccaacaguuuucuau

SEQ ID NO: 635718 - RNA, 23 nt, Artificial Sequence
  Synthetic
cucaaauaccaacaguuuucuau

SEQ ID NO: 635719 - RNA, 24 nt, Artificial Sequence
  Synthetic
ccucaaauaccaacaguuuucuau

SEQ ID NO: 635720 - RNA, 18 nt, Artificial Sequence
  Synthetic
uguuuugauuuuuucuau

SEQ ID NO: 635721 - RNA, 19 nt, Artificial Sequence
  Synthetic
uuguuuugauuuuuucuau

SEQ ID NO: 635722 - RNA, 20 nt, Artificial Sequence
  Synthetic
uuuguuuugauuuuuucuau

SEQ ID NO: 635723 - RNA, 21 nt, Artificial Sequence
  Synthetic
uuuuguuuugauuuuuucuau

SEQ ID NO: 635724 - RNA, 22 nt, Artificial Sequence
  Synthetic
guuuuguuuugauuuuuucuau

SEQ ID NO: 635725 - RNA, 23 nt, Artificial Sequence
  Synthetic
aguuuuguuuugauuuuuucuau

SEQ ID NO: 635726 - RNA, 24 nt, Artificial Sequence
  Synthetic
caguuuuguuuugauuuuuucuau

SEQ ID NO: 635727 - RNA, 18 nt, Artificial Sequence
  Synthetic
uacugaugaaaaaaguau

SEQ ID NO: 635728 - RNA, 19 nt, Artificial Sequence
  Synthetic
guacugaugaaaaaaguau

SEQ ID NO: 635729 - RNA, 20 nt, Artificial Sequence
  Synthetic
uguacugaugaaaaaaguau

SEQ ID NO: 635730 - RNA, 21 nt, Artificial Sequence
  Synthetic
uuguacugaugaaaaaaguau

SEQ ID NO: 635731 - RNA, 22 nt, Artificial Sequence
  Synthetic
auuguacugaugaaaaaaguau

SEQ ID NO: 635732 - RNA, 23 nt, Artificial Sequence
  Synthetic
aauuguacugaugaaaaaaguau

SEQ ID NO: 635733 - RNA, 24 nt, Artificial Sequence
  Synthetic
caauuguacugaugaaaaaaguau

SEQ ID NO: 635734 - RNA, 18 nt, Artificial Sequence
  Synthetic
aauauaucagaaaaguau

SEQ ID NO: 635735 - RNA, 19 nt, Artificial Sequence
  Synthetic
aaauauaucagaaaaguau

SEQ ID NO: 635736 - RNA, 20 nt, Artificial Sequence
  Synthetic
aaaauauaucagaaaaguau

SEQ ID NO: 635737 - RNA, 21 nt, Artificial Sequence
  Synthetic
uaaaauauaucagaaaaguau

SEQ ID NO: 635738 - RNA, 22 nt, Artificial Sequence
  Synthetic
uuaaaauauaucagaaaaguau

SEQ ID NO: 635739 - RNA, 23 nt, Artificial Sequence
  Synthetic
auuaaaauauaucagaaaaguau

SEQ ID NO: 635740 - RNA, 24 nt, Artificial Sequence
  Synthetic
uauuaaaauauaucagaaaaguau

SEQ ID NO: 635741 - RNA, 18 nt, Artificial Sequence
  Synthetic
uuguugcguuaaaaguau

SEQ ID NO: 635742 - RNA, 19 nt, Artificial Sequence
  Synthetic
uuuguugcguuaaaaguau

SEQ ID NO: 635743 - RNA, 20 nt, Artificial Sequence
  Synthetic
auuuguugcguuaaaaguau

SEQ ID NO: 635744 - RNA, 21 nt, Artificial Sequence
  Synthetic
cauuuguugcguuaaaaguau

SEQ ID NO: 635745 - RNA, 22 nt, Artificial Sequence
  Synthetic
acauuuguugcguuaaaaguau

SEQ ID NO: 635746 - RNA, 23 nt, Artificial Sequence
  Synthetic
aacauuuguugcguuaaaaguau

SEQ ID NO: 635747 - RNA, 24 nt, Artificial Sequence
  Synthetic
aaacauuuguugcguuaaaaguau

SEQ ID NO: 635748 - RNA, 18 nt, Artificial Sequence
  Synthetic
auaccugggacaaaguau

SEQ ID NO: 635749 - RNA, 19 nt, Artificial Sequence
  Synthetic
aauaccugggacaaaguau

SEQ ID NO: 635750 - RNA, 20 nt, Artificial Sequence
  Synthetic
aaauaccugggacaaaguau

SEQ ID NO: 635751 - RNA, 21 nt, Artificial Sequence
  Synthetic
gaaauaccugggacaaaguau

SEQ ID NO: 635752 - RNA, 22 nt, Artificial Sequence
  Synthetic
ugaaauaccugggacaaaguau

SEQ ID NO: 635753 - RNA, 23 nt, Artificial Sequence
  Synthetic
augaaauaccugggacaaaguau

SEQ ID NO: 635754 - RNA, 24 nt, Artificial Sequence
  Synthetic
caugaaauaccugggacaaaguau

SEQ ID NO: 635755 - RNA, 18 nt, Artificial Sequence
  Synthetic
gaaaaauaaagaaaguau

SEQ ID NO: 635756 - RNA, 19 nt, Artificial Sequence
  Synthetic
ugaaaaauaaagaaaguau

SEQ ID NO: 635757 - RNA, 20 nt, Artificial Sequence
  Synthetic
augaaaaauaaagaaaguau

SEQ ID NO: 635758 - RNA, 21 nt, Artificial Sequence
  Synthetic
gaugaaaaauaaagaaaguau

SEQ ID NO: 635759 - RNA, 22 nt, Artificial Sequence
  Synthetic
agaugaaaaauaaagaaaguau

SEQ ID NO: 635760 - RNA, 23 nt, Artificial Sequence
  Synthetic
gagaugaaaaauaaagaaaguau

SEQ ID NO: 635761 - RNA, 24 nt, Artificial Sequence
  Synthetic
agagaugaaaaauaaagaaaguau

SEQ ID NO: 635762 - RNA, 18 nt, Artificial Sequence
  Synthetic
gagaaaacaggaaaguau

SEQ ID NO: 635763 - RNA, 19 nt, Artificial Sequence
  Synthetic
agagaaaacaggaaaguau

SEQ ID NO: 635764 - RNA, 20 nt, Artificial Sequence
  Synthetic
cagagaaaacaggaaaguau

SEQ ID NO: 635765 - RNA, 21 nt, Artificial Sequence
  Synthetic
ucagagaaaacaggaaaguau

SEQ ID NO: 635766 - RNA, 22 nt, Artificial Sequence
  Synthetic
cucagagaaaacaggaaaguau

SEQ ID NO: 635767 - RNA, 23 nt, Artificial Sequence
  Synthetic
ccucagagaaaacaggaaaguau

SEQ ID NO: 635768 - RNA, 24 nt, Artificial Sequence
  Synthetic
cccucagagaaaacaggaaaguau

SEQ ID NO: 635769 - RNA, 18 nt, Artificial Sequence
  Synthetic
aagaagacaggaaaguau

SEQ ID NO: 635770 - RNA, 19 nt, Artificial Sequence
  Synthetic
gaagaagacaggaaaguau

SEQ ID NO: 635771 - RNA, 20 nt, Artificial Sequence
  Synthetic
agaagaagacaggaaaguau

SEQ ID NO: 635772 - RNA, 21 nt, Artificial Sequence
  Synthetic
cagaagaagacaggaaaguau

SEQ ID NO: 635773 - RNA, 22 nt, Artificial Sequence
  Synthetic
ucagaagaagacaggaaaguau

SEQ ID NO: 635774 - RNA, 23 nt, Artificial Sequence
  Synthetic
cucagaagaagacaggaaaguau

SEQ ID NO: 635775 - RNA, 24 nt, Artificial Sequence
  Synthetic
acucagaagaagacaggaaaguau

SEQ ID NO: 635776 - RNA, 18 nt, Artificial Sequence
  Synthetic
aaauagagaauaaaguau

SEQ ID NO: 635777 - RNA, 19 nt, Artificial Sequence
  Synthetic
caaauagagaauaaaguau

SEQ ID NO: 635778 - RNA, 20 nt, Artificial Sequence
  Synthetic
acaaauagagaauaaaguau

SEQ ID NO: 635779 - RNA, 21 nt, Artificial Sequence
  Synthetic
uacaaauagagaauaaaguau

SEQ ID NO: 635780 - RNA, 22 nt, Artificial Sequence
  Synthetic
uuacaaauagagaauaaaguau

SEQ ID NO: 635781 - RNA, 23 nt, Artificial Sequence
  Synthetic
uuuacaaauagagaauaaaguau

SEQ ID NO: 635782 - RNA, 24 nt, Artificial Sequence
  Synthetic
uuuuacaaauagagaauaaaguau

SEQ ID NO: 635783 - RNA, 18 nt, Artificial Sequence
  Synthetic
ucagcugaacuaaaguau

SEQ ID NO: 635784 - RNA, 19 nt, Artificial Sequence
  Synthetic
cucagcugaacuaaaguau

SEQ ID NO: 635785 - RNA, 20 nt, Artificial Sequence
  Synthetic
ucucagcugaacuaaaguau

SEQ ID NO: 635786 - RNA, 21 nt, Artificial Sequence
  Synthetic
uucucagcugaacuaaaguau

SEQ ID NO: 635787 - RNA, 22 nt, Artificial Sequence
  Synthetic
auucucagcugaacuaaaguau

SEQ ID NO: 635788 - RNA, 23 nt, Artificial Sequence
  Synthetic
aauucucagcugaacuaaaguau

SEQ ID NO: 635789 - RNA, 24 nt, Artificial Sequence
  Synthetic
aaauucucagcugaacuaaaguau

SEQ ID NO: 635790 - RNA, 18 nt, Artificial Sequence
  Synthetic
auuuuaagaguaaaguau

SEQ ID NO: 635791 - RNA, 19 nt, Artificial Sequence
  Synthetic
aauuuuaagaguaaaguau

SEQ ID NO: 635792 - RNA, 20 nt, Artificial Sequence
  Synthetic
aaauuuuaagaguaaaguau

SEQ ID NO: 635793 - RNA, 21 nt, Artificial Sequence
  Synthetic
gaaauuuuaagaguaaaguau

SEQ ID NO: 635794 - RNA, 22 nt, Artificial Sequence
  Synthetic
ugaaauuuuaagaguaaaguau

SEQ ID NO: 635795 - RNA, 23 nt, Artificial Sequence
  Synthetic
augaaauuuuaagaguaaaguau

SEQ ID NO: 635796 - RNA, 24 nt, Artificial Sequence
  Synthetic
aaugaaauuuuaagaguaaaguau

SEQ ID NO: 635797 - RNA, 18 nt, Artificial Sequence
  Synthetic
uacaugaugaacaaguau

SEQ ID NO: 635798 - RNA, 19 nt, Artificial Sequence
  Synthetic
guacaugaugaacaaguau

SEQ ID NO: 635799 - RNA, 20 nt, Artificial Sequence
  Synthetic
aguacaugaugaacaaguau

SEQ ID NO: 635800 - RNA, 21 nt, Artificial Sequence
  Synthetic
uaguacaugaugaacaaguau

SEQ ID NO: 635801 - RNA, 22 nt, Artificial Sequence
  Synthetic
cuaguacaugaugaacaaguau

SEQ ID NO: 635802 - RNA, 23 nt, Artificial Sequence
  Synthetic
ccuaguacaugaugaacaaguau

SEQ ID NO: 635803 - RNA, 24 nt, Artificial Sequence
  Synthetic
uccuaguacaugaugaacaaguau

SEQ ID NO: 635804 - RNA, 18 nt, Artificial Sequence
  Synthetic
accaauguugacaaguau

SEQ ID NO: 635805 - RNA, 19 nt, Artificial Sequence
  Synthetic
aaccaauguugacaaguau

SEQ ID NO: 635806 - RNA, 20 nt, Artificial Sequence
  Synthetic
uaaccaauguugacaaguau

SEQ ID NO: 635807 - RNA, 21 nt, Artificial Sequence
  Synthetic
auaaccaauguugacaaguau

SEQ ID NO: 635808 - RNA, 22 nt, Artificial Sequence
  Synthetic
aauaaccaauguugacaaguau

SEQ ID NO: 635809 - RNA, 23 nt, Artificial Sequence
  Synthetic
caauaaccaauguugacaaguau

SEQ ID NO: 635810 - RNA, 24 nt, Artificial Sequence
  Synthetic
gcaauaaccaauguugacaaguau

SEQ ID NO: 635811 - RNA, 18 nt, Artificial Sequence
  Synthetic
gacagguaaagcaaguau

SEQ ID NO: 635812 - RNA, 19 nt, Artificial Sequence
  Synthetic
agacagguaaagcaaguau

SEQ ID NO: 635813 - RNA, 20 nt, Artificial Sequence
  Synthetic
cagacagguaaagcaaguau

SEQ ID NO: 635814 - RNA, 21 nt, Artificial Sequence
  Synthetic
ccagacagguaaagcaaguau

SEQ ID NO: 635815 - RNA, 22 nt, Artificial Sequence
  Synthetic
uccagacagguaaagcaaguau

SEQ ID NO: 635816 - RNA, 23 nt, Artificial Sequence
  Synthetic
uuccagacagguaaagcaaguau

SEQ ID NO: 635817 - RNA, 24 nt, Artificial Sequence
  Synthetic
auuccagacagguaaagcaaguau

SEQ ID NO: 635818 - RNA, 18 nt, Artificial Sequence
  Synthetic
cacaaaaaugagaaguau

SEQ ID NO: 635819 - RNA, 19 nt, Artificial Sequence
  Synthetic
ccacaaaaaugagaaguau

SEQ ID NO: 635820 - RNA, 20 nt, Artificial Sequence
  Synthetic
accacaaaaaugagaaguau

SEQ ID NO: 635821 - RNA, 21 nt, Artificial Sequence
  Synthetic
caccacaaaaaugagaaguau

SEQ ID NO: 635822 - RNA, 22 nt, Artificial Sequence
  Synthetic
ucaccacaaaaaugagaaguau

SEQ ID NO: 635823 - RNA, 23 nt, Artificial Sequence
  Synthetic
cucaccacaaaaaugagaaguau

SEQ ID NO: 635824 - RNA, 24 nt, Artificial Sequence
  Synthetic
ucucaccacaaaaaugagaaguau

SEQ ID NO: 635825 - RNA, 18 nt, Artificial Sequence
  Synthetic
ugcggcagauggaaguau

SEQ ID NO: 635826 - RNA, 19 nt, Artificial Sequence
  Synthetic
uugcggcagauggaaguau

SEQ ID NO: 635827 - RNA, 20 nt, Artificial Sequence
  Synthetic
uuugcggcagauggaaguau

SEQ ID NO: 635828 - RNA, 21 nt, Artificial Sequence
  Synthetic
cuuugcggcagauggaaguau

SEQ ID NO: 635829 - RNA, 22 nt, Artificial Sequence
  Synthetic
ucuuugcggcagauggaaguau

SEQ ID NO: 635830 - RNA, 23 nt, Artificial Sequence
  Synthetic
gucuuugcggcagauggaaguau

SEQ ID NO: 635831 - RNA, 24 nt, Artificial Sequence
  Synthetic
ggucuuugcggcagauggaaguau

SEQ ID NO: 635832 - RNA, 18 nt, Artificial Sequence
  Synthetic
auggcaauuuugaaguau

SEQ ID NO: 635833 - RNA, 19 nt, Artificial Sequence
  Synthetic
uauggcaauuuugaaguau

SEQ ID NO: 635834 - RNA, 20 nt, Artificial Sequence
  Synthetic
auauggcaauuuugaaguau

SEQ ID NO: 635835 - RNA, 21 nt, Artificial Sequence
  Synthetic
cauauggcaauuuugaaguau

SEQ ID NO: 635836 - RNA, 22 nt, Artificial Sequence
  Synthetic
gcauauggcaauuuugaaguau

SEQ ID NO: 635837 - RNA, 23 nt, Artificial Sequence
  Synthetic
agcauauggcaauuuugaaguau

SEQ ID NO: 635838 - RNA, 24 nt, Artificial Sequence
  Synthetic
aagcauauggcaauuuugaaguau

SEQ ID NO: 635839 - RNA, 18 nt, Artificial Sequence
  Synthetic
auuugcauacauaaguau

SEQ ID NO: 635840 - RNA, 19 nt, Artificial Sequence
  Synthetic
aauuugcauacauaaguau

SEQ ID NO: 635841 - RNA, 20 nt, Artificial Sequence
  Synthetic
gaauuugcauacauaaguau

SEQ ID NO: 635842 - RNA, 21 nt, Artificial Sequence
  Synthetic
cgaauuugcauacauaaguau

SEQ ID NO: 635843 - RNA, 22 nt, Artificial Sequence
  Synthetic
ccgaauuugcauacauaaguau

SEQ ID NO: 635844 - RNA, 23 nt, Artificial Sequence
  Synthetic
uccgaauuugcauacauaaguau

SEQ ID NO: 635845 - RNA, 24 nt, Artificial Sequence
  Synthetic
cuccgaauuugcauacauaaguau

SEQ ID NO: 635846 - RNA, 18 nt, Artificial Sequence
  Synthetic
ugcaauucaacuaaguau

SEQ ID NO: 635847 - RNA, 19 nt, Artificial Sequence
  Synthetic
gugcaauucaacuaaguau

SEQ ID NO: 635848 - RNA, 20 nt, Artificial Sequence
  Synthetic
ggugcaauucaacuaaguau

SEQ ID NO: 635849 - RNA, 21 nt, Artificial Sequence
  Synthetic
gggugcaauucaacuaaguau

SEQ ID NO: 635850 - RNA, 22 nt, Artificial Sequence
  Synthetic
ugggugcaauucaacuaaguau

SEQ ID NO: 635851 - RNA, 23 nt, Artificial Sequence
  Synthetic
cugggugcaauucaacuaaguau

SEQ ID NO: 635852 - RNA, 24 nt, Artificial Sequence
  Synthetic
gcugggugcaauucaacuaaguau

SEQ ID NO: 635853 - RNA, 18 nt, Artificial Sequence
  Synthetic
uaaaaggaagguaaguau

SEQ ID NO: 635854 - RNA, 19 nt, Artificial Sequence
  Synthetic
cuaaaaggaagguaaguau

SEQ ID NO: 635855 - RNA, 20 nt, Artificial Sequence
  Synthetic
ccuaaaaggaagguaaguau

SEQ ID NO: 635856 - RNA, 21 nt, Artificial Sequence
  Synthetic
cccuaaaaggaagguaaguau

SEQ ID NO: 635857 - RNA, 22 nt, Artificial Sequence
  Synthetic
gcccuaaaaggaagguaaguau

SEQ ID NO: 635858 - RNA, 23 nt, Artificial Sequence
  Synthetic
ugcccuaaaaggaagguaaguau

SEQ ID NO: 635859 - RNA, 24 nt, Artificial Sequence
  Synthetic
uugcccuaaaaggaagguaaguau

SEQ ID NO: 635860 - RNA, 18 nt, Artificial Sequence
  Synthetic
gagcauagcguuaaguau

SEQ ID NO: 635861 - RNA, 19 nt, Artificial Sequence
  Synthetic
agagcauagcguuaaguau

SEQ ID NO: 635862 - RNA, 20 nt, Artificial Sequence
  Synthetic
aagagcauagcguuaaguau

SEQ ID NO: 635863 - RNA, 21 nt, Artificial Sequence
  Synthetic
aaagagcauagcguuaaguau

SEQ ID NO: 635864 - RNA, 22 nt, Artificial Sequence
  Synthetic
gaaagagcauagcguuaaguau

SEQ ID NO: 635865 - RNA, 23 nt, Artificial Sequence
  Synthetic
agaaagagcauagcguuaaguau

SEQ ID NO: 635866 - RNA, 24 nt, Artificial Sequence
  Synthetic
aagaaagagcauagcguuaaguau

SEQ ID NO: 635867 - RNA, 18 nt, Artificial Sequence
  Synthetic
uuuuaugauguuaaguau

SEQ ID NO: 635868 - RNA, 19 nt, Artificial Sequence
  Synthetic
uuuuuaugauguuaaguau

SEQ ID NO: 635869 - RNA, 20 nt, Artificial Sequence
  Synthetic
cuuuuuaugauguuaaguau

SEQ ID NO: 635870 - RNA, 21 nt, Artificial Sequence
  Synthetic
acuuuuuaugauguuaaguau

SEQ ID NO: 635871 - RNA, 22 nt, Artificial Sequence
  Synthetic
uacuuuuuaugauguuaaguau

SEQ ID NO: 635872 - RNA, 23 nt, Artificial Sequence
  Synthetic
cuacuuuuuaugauguuaaguau

SEQ ID NO: 635873 - RNA, 24 nt, Artificial Sequence
  Synthetic
ccuacuuuuuaugauguuaaguau

SEQ ID NO: 635874 - RNA, 18 nt, Artificial Sequence
  Synthetic
auauuaaaacaacaguau

SEQ ID NO: 635875 - RNA, 19 nt, Artificial Sequence
  Synthetic
cauauuaaaacaacaguau

SEQ ID NO: 635876 - RNA, 20 nt, Artificial Sequence
  Synthetic
acauauuaaaacaacaguau

SEQ ID NO: 635877 - RNA, 21 nt, Artificial Sequence
  Synthetic
aacauauuaaaacaacaguau

SEQ ID NO: 635878 - RNA, 22 nt, Artificial Sequence
  Synthetic
caacauauuaaaacaacaguau

SEQ ID NO: 635879 - RNA, 23 nt, Artificial Sequence
  Synthetic
acaacauauuaaaacaacaguau

SEQ ID NO: 635880 - RNA, 24 nt, Artificial Sequence
  Synthetic
cacaacauauuaaaacaacaguau

SEQ ID NO: 635881 - RNA, 18 nt, Artificial Sequence
  Synthetic
acuugggcacaacaguau

SEQ ID NO: 635882 - RNA, 19 nt, Artificial Sequence
  Synthetic
aacuugggcacaacaguau

SEQ ID NO: 635883 - RNA, 20 nt, Artificial Sequence
  Synthetic
aaacuugggcacaacaguau

SEQ ID NO: 635884 - RNA, 21 nt, Artificial Sequence
  Synthetic
gaaacuugggcacaacaguau

SEQ ID NO: 635885 - RNA, 22 nt, Artificial Sequence
  Synthetic
agaaacuugggcacaacaguau

SEQ ID NO: 635886 - RNA, 23 nt, Artificial Sequence
  Synthetic
uagaaacuugggcacaacaguau

SEQ ID NO: 635887 - RNA, 24 nt, Artificial Sequence
  Synthetic
uuagaaacuugggcacaacaguau

SEQ ID NO: 635888 - RNA, 18 nt, Artificial Sequence
  Synthetic
uuaucaggagaacaguau

SEQ ID NO: 635889 - RNA, 19 nt, Artificial Sequence
  Synthetic
auuaucaggagaacaguau

SEQ ID NO: 635890 - RNA, 20 nt, Artificial Sequence
  Synthetic
gauuaucaggagaacaguau

SEQ ID NO: 635891 - RNA, 21 nt, Artificial Sequence
  Synthetic
ugauuaucaggagaacaguau

SEQ ID NO: 635892 - RNA, 22 nt, Artificial Sequence
  Synthetic
cugauuaucaggagaacaguau

SEQ ID NO: 635893 - RNA, 23 nt, Artificial Sequence
  Synthetic
acugauuaucaggagaacaguau

SEQ ID NO: 635894 - RNA, 24 nt, Artificial Sequence
  Synthetic
uacugauuaucaggagaacaguau

SEQ ID NO: 635895 - RNA, 18 nt, Artificial Sequence
  Synthetic
guaccaugagaacaguau

SEQ ID NO: 635896 - RNA, 19 nt, Artificial Sequence
  Synthetic
aguaccaugagaacaguau

SEQ ID NO: 635897 - RNA, 20 nt, Artificial Sequence
  Synthetic
caguaccaugagaacaguau

SEQ ID NO: 635898 - RNA, 21 nt, Artificial Sequence
  Synthetic
ucaguaccaugagaacaguau

SEQ ID NO: 635899 - RNA, 22 nt, Artificial Sequence
  Synthetic
uucaguaccaugagaacaguau

SEQ ID NO: 635900 - RNA, 23 nt, Artificial Sequence
  Synthetic
auucaguaccaugagaacaguau

SEQ ID NO: 635901 - RNA, 24 nt, Artificial Sequence
  Synthetic
uauucaguaccaugagaacaguau

SEQ ID NO: 635902 - RNA, 18 nt, Artificial Sequence
  Synthetic
gguaagaaugaacaguau

SEQ ID NO: 635903 - RNA, 19 nt, Artificial Sequence
  Synthetic
ugguaagaaugaacaguau

SEQ ID NO: 635904 - RNA, 20 nt, Artificial Sequence
  Synthetic
uugguaagaaugaacaguau

SEQ ID NO: 635905 - RNA, 21 nt, Artificial Sequence
  Synthetic
auugguaagaaugaacaguau

SEQ ID NO: 635906 - RNA, 22 nt, Artificial Sequence
  Synthetic
cauugguaagaaugaacaguau

SEQ ID NO: 635907 - RNA, 23 nt, Artificial Sequence
  Synthetic
ucauugguaagaaugaacaguau

SEQ ID NO: 635908 - RNA, 24 nt, Artificial Sequence
  Synthetic
uucauugguaagaaugaacaguau

SEQ ID NO: 635909 - RNA, 18 nt, Artificial Sequence
  Synthetic
uuaaaguugcuacaguau

SEQ ID NO: 635910 - RNA, 19 nt, Artificial Sequence
  Synthetic
cuuaaaguugcuacaguau

SEQ ID NO: 635911 - RNA, 20 nt, Artificial Sequence
  Synthetic
ccuuaaaguugcuacaguau

SEQ ID NO: 635912 - RNA, 21 nt, Artificial Sequence
  Synthetic
accuuaaaguugcuacaguau

SEQ ID NO: 635913 - RNA, 22 nt, Artificial Sequence
  Synthetic
gaccuuaaaguugcuacaguau

SEQ ID NO: 635914 - RNA, 23 nt, Artificial Sequence
  Synthetic
ugaccuuaaaguugcuacaguau

SEQ ID NO: 635915 - RNA, 24 nt, Artificial Sequence
  Synthetic
gugaccuuaaaguugcuacaguau

SEQ ID NO: 635916 - RNA, 18 nt, Artificial Sequence
  Synthetic
cuuaugauggaccaguau

SEQ ID NO: 635917 - RNA, 19 nt, Artificial Sequence
  Synthetic
acuuaugauggaccaguau

SEQ ID NO: 635918 - RNA, 20 nt, Artificial Sequence
  Synthetic
uacuuaugauggaccaguau

SEQ ID NO: 635919 - RNA, 21 nt, Artificial Sequence
  Synthetic
auacuuaugauggaccaguau

SEQ ID NO: 635920 - RNA, 22 nt, Artificial Sequence
  Synthetic
aauacuuaugauggaccaguau

SEQ ID NO: 635921 - RNA, 23 nt, Artificial Sequence
  Synthetic
aaauacuuaugauggaccaguau

SEQ ID NO: 635922 - RNA, 24 nt, Artificial Sequence
  Synthetic
aaaauacuuaugauggaccaguau

SEQ ID NO: 635923 - RNA, 18 nt, Artificial Sequence
  Synthetic
uuucucacugcccaguau

SEQ ID NO: 635924 - RNA, 19 nt, Artificial Sequence
  Synthetic
uuuucucacugcccaguau

SEQ ID NO: 635925 - RNA, 20 nt, Artificial Sequence
  Synthetic
uuuuucucacugcccaguau

SEQ ID NO: 635926 - RNA, 21 nt, Artificial Sequence
  Synthetic
uuuuuucucacugcccaguau

SEQ ID NO: 635927 - RNA, 22 nt, Artificial Sequence
  Synthetic
auuuuuucucacugcccaguau

SEQ ID NO: 635928 - RNA, 23 nt, Artificial Sequence
  Synthetic
aauuuuuucucacugcccaguau

SEQ ID NO: 635929 - RNA, 24 nt, Artificial Sequence
  Synthetic
uaauuuuuucucacugcccaguau

SEQ ID NO: 635930 - RNA, 18 nt, Artificial Sequence
  Synthetic
auguuuaaaaugcaguau

SEQ ID NO: 635931 - RNA, 19 nt, Artificial Sequence
  Synthetic
aauguuuaaaaugcaguau

SEQ ID NO: 635932 - RNA, 20 nt, Artificial Sequence
  Synthetic
aaauguuuaaaaugcaguau

SEQ ID NO: 635933 - RNA, 21 nt, Artificial Sequence
  Synthetic
caaauguuuaaaaugcaguau

SEQ ID NO: 635934 - RNA, 22 nt, Artificial Sequence
  Synthetic
ccaaauguuuaaaaugcaguau

SEQ ID NO: 635935 - RNA, 23 nt, Artificial Sequence
  Synthetic
accaaauguuuaaaaugcaguau

SEQ ID NO: 635936 - RNA, 24 nt, Artificial Sequence
  Synthetic
caccaaauguuuaaaaugcaguau

SEQ ID NO: 635937 - RNA, 18 nt, Artificial Sequence
  Synthetic
gaacauacugaucaguau

SEQ ID NO: 635938 - RNA, 19 nt, Artificial Sequence
  Synthetic
ugaacauacugaucaguau

SEQ ID NO: 635939 - RNA, 20 nt, Artificial Sequence
  Synthetic
gugaacauacugaucaguau

SEQ ID NO: 635940 - RNA, 21 nt, Artificial Sequence
  Synthetic
agugaacauacugaucaguau

SEQ ID NO: 635941 - RNA, 22 nt, Artificial Sequence
  Synthetic
uagugaacauacugaucaguau

SEQ ID NO: 635942 - RNA, 23 nt, Artificial Sequence
  Synthetic
guagugaacauacugaucaguau

SEQ ID NO: 635943 - RNA, 24 nt, Artificial Sequence
  Synthetic
aguagugaacauacugaucaguau

SEQ ID NO: 635944 - RNA, 18 nt, Artificial Sequence
  Synthetic
uaccacguuccucaguau

SEQ ID NO: 635945 - RNA, 19 nt, Artificial Sequence
  Synthetic
guaccacguuccucaguau

SEQ ID NO: 635946 - RNA, 20 nt, Artificial Sequence
  Synthetic
gguaccacguuccucaguau

SEQ ID NO: 635947 - RNA, 21 nt, Artificial Sequence
  Synthetic
agguaccacguuccucaguau

SEQ ID NO: 635948 - RNA, 22 nt, Artificial Sequence
  Synthetic
uagguaccacguuccucaguau

SEQ ID NO: 635949 - RNA, 23 nt, Artificial Sequence
  Synthetic
uuagguaccacguuccucaguau

SEQ ID NO: 635950 - RNA, 24 nt, Artificial Sequence
  Synthetic
cuuagguaccacguuccucaguau

SEQ ID NO: 635951 - RNA, 18 nt, Artificial Sequence
  Synthetic
aucagagacaaagaguau

SEQ ID NO: 635952 - RNA, 19 nt, Artificial Sequence
  Synthetic
caucagagacaaagaguau

SEQ ID NO: 635953 - RNA, 20 nt, Artificial Sequence
  Synthetic
ucaucagagacaaagaguau

SEQ ID NO: 635954 - RNA, 21 nt, Artificial Sequence
  Synthetic
aucaucagagacaaagaguau

SEQ ID NO: 635955 - RNA, 22 nt, Artificial Sequence
  Synthetic
uaucaucagagacaaagaguau

SEQ ID NO: 635956 - RNA, 23 nt, Artificial Sequence
  Synthetic
uuaucaucagagacaaagaguau

SEQ ID NO: 635957 - RNA, 24 nt, Artificial Sequence
  Synthetic
auuaucaucagagacaaagaguau

SEQ ID NO: 635958 - RNA, 18 nt, Artificial Sequence
  Synthetic
uucuuggacacagaguau

SEQ ID NO: 635959 - RNA, 19 nt, Artificial Sequence
  Synthetic
guucuuggacacagaguau

SEQ ID NO: 635960 - RNA, 20 nt, Artificial Sequence
  Synthetic
uguucuuggacacagaguau

SEQ ID NO: 635961 - RNA, 21 nt, Artificial Sequence
  Synthetic
guguucuuggacacagaguau

SEQ ID NO: 635962 - RNA, 22 nt, Artificial Sequence
  Synthetic
aguguucuuggacacagaguau

SEQ ID NO: 635963 - RNA, 23 nt, Artificial Sequence
  Synthetic
caguguucuuggacacagaguau

SEQ ID NO: 635964 - RNA, 24 nt, Artificial Sequence
  Synthetic
acaguguucuuggacacagaguau

SEQ ID NO: 635965 - RNA, 18 nt, Artificial Sequence
  Synthetic
uguccuggccgagaguau

SEQ ID NO: 635966 - RNA, 19 nt, Artificial Sequence
  Synthetic
cuguccuggccgagaguau

SEQ ID NO: 635967 - RNA, 20 nt, Artificial Sequence
  Synthetic
ucuguccuggccgagaguau

SEQ ID NO: 635968 - RNA, 21 nt, Artificial Sequence
  Synthetic
gucuguccuggccgagaguau

SEQ ID NO: 635969 - RNA, 22 nt, Artificial Sequence
  Synthetic
ugucuguccuggccgagaguau

SEQ ID NO: 635970 - RNA, 23 nt, Artificial Sequence
  Synthetic
augucuguccuggccgagaguau

SEQ ID NO: 635971 - RNA, 24 nt, Artificial Sequence
  Synthetic
gaugucuguccuggccgagaguau

SEQ ID NO: 635972 - RNA, 18 nt, Artificial Sequence
  Synthetic
cugcccauuugagaguau

SEQ ID NO: 635973 - RNA, 19 nt, Artificial Sequence
  Synthetic
acugcccauuugagaguau

SEQ ID NO: 635974 - RNA, 20 nt, Artificial Sequence
  Synthetic
uacugcccauuugagaguau

SEQ ID NO: 635975 - RNA, 21 nt, Artificial Sequence
  Synthetic
cuacugcccauuugagaguau

SEQ ID NO: 635976 - RNA, 22 nt, Artificial Sequence
  Synthetic
gcuacugcccauuugagaguau

SEQ ID NO: 635977 - RNA, 23 nt, Artificial Sequence
  Synthetic
ugcuacugcccauuugagaguau

SEQ ID NO: 635978 - RNA, 24 nt, Artificial Sequence
  Synthetic
uugcuacugcccauuugagaguau

SEQ ID NO: 635979 - RNA, 18 nt, Artificial Sequence
  Synthetic
gaauugguccuagaguau

SEQ ID NO: 635980 - RNA, 19 nt, Artificial Sequence
  Synthetic
agaauugguccuagaguau

SEQ ID NO: 635981 - RNA, 20 nt, Artificial Sequence
  Synthetic
uagaauugguccuagaguau

SEQ ID NO: 635982 - RNA, 21 nt, Artificial Sequence
  Synthetic
guagaauugguccuagaguau

SEQ ID NO: 635983 - RNA, 22 nt, Artificial Sequence
  Synthetic
gguagaauugguccuagaguau

SEQ ID NO: 635984 - RNA, 23 nt, Artificial Sequence
  Synthetic
ugguagaauugguccuagaguau

SEQ ID NO: 635985 - RNA, 24 nt, Artificial Sequence
  Synthetic
augguagaauugguccuagaguau

SEQ ID NO: 635986 - RNA, 18 nt, Artificial Sequence
  Synthetic
auaucucagugggaguau

SEQ ID NO: 635987 - RNA, 19 nt, Artificial Sequence
  Synthetic
uauaucucagugggaguau

SEQ ID NO: 635988 - RNA, 20 nt, Artificial Sequence
  Synthetic
auauaucucagugggaguau

SEQ ID NO: 635989 - RNA, 21 nt, Artificial Sequence
  Synthetic
cauauaucucagugggaguau

SEQ ID NO: 635990 - RNA, 22 nt, Artificial Sequence
  Synthetic
gcauauaucucagugggaguau

SEQ ID NO: 635991 - RNA, 23 nt, Artificial Sequence
  Synthetic
ugcauauaucucagugggaguau

SEQ ID NO: 635992 - RNA, 24 nt, Artificial Sequence
  Synthetic
uugcauauaucucagugggaguau

SEQ ID NO: 635993 - RNA, 18 nt, Artificial Sequence
  Synthetic
gcacauguccuggaguau

SEQ ID NO: 635994 - RNA, 19 nt, Artificial Sequence
  Synthetic
ugcacauguccuggaguau

SEQ ID NO: 635995 - RNA, 20 nt, Artificial Sequence
  Synthetic
uugcacauguccuggaguau

SEQ ID NO: 635996 - RNA, 21 nt, Artificial Sequence
  Synthetic
cuugcacauguccuggaguau

SEQ ID NO: 635997 - RNA, 22 nt, Artificial Sequence
  Synthetic
ucuugcacauguccuggaguau

SEQ ID NO: 635998 - RNA, 23 nt, Artificial Sequence
  Synthetic
aucuugcacauguccuggaguau

SEQ ID NO: 635999 - RNA, 24 nt, Artificial Sequence
  Synthetic
caucuugcacauguccuggaguau

SEQ ID NO: 636000 - RNA, 18 nt, Artificial Sequence
  Synthetic
aaucaaagcuuggaguau

SEQ ID NO: 636001 - RNA, 19 nt, Artificial Sequence
  Synthetic
uaaucaaagcuuggaguau

SEQ ID NO: 636002 - RNA, 20 nt, Artificial Sequence
  Synthetic
uuaaucaaagcuuggaguau

SEQ ID NO: 636003 - RNA, 21 nt, Artificial Sequence
  Synthetic
uuuaaucaaagcuuggaguau

SEQ ID NO: 636004 - RNA, 22 nt, Artificial Sequence
  Synthetic
uuuuaaucaaagcuuggaguau

SEQ ID NO: 636005 - RNA, 23 nt, Artificial Sequence
  Synthetic
guuuuaaucaaagcuuggaguau

SEQ ID NO: 636006 - RNA, 24 nt, Artificial Sequence
  Synthetic
aguuuuaaucaaagcuuggaguau

SEQ ID NO: 636007 - RNA, 18 nt, Artificial Sequence
  Synthetic
acucuagaugaugaguau

SEQ ID NO: 636008 - RNA, 19 nt, Artificial Sequence
  Synthetic
cacucuagaugaugaguau

SEQ ID NO: 636009 - RNA, 20 nt, Artificial Sequence
  Synthetic
ccacucuagaugaugaguau

SEQ ID NO: 636010 - RNA, 21 nt, Artificial Sequence
  Synthetic
cccacucuagaugaugaguau

SEQ ID NO: 636011 - RNA, 22 nt, Artificial Sequence
  Synthetic
ucccacucuagaugaugaguau

SEQ ID NO: 636012 - RNA, 23 nt, Artificial Sequence
  Synthetic
cucccacucuagaugaugaguau

SEQ ID NO: 636013 - RNA, 24 nt, Artificial Sequence
  Synthetic
acucccacucuagaugaugaguau

SEQ ID NO: 636014 - RNA, 18 nt, Artificial Sequence
  Synthetic
ccucagccuccugaguau

SEQ ID NO: 636015 - RNA, 19 nt, Artificial Sequence
  Synthetic
gccucagccuccugaguau

SEQ ID NO: 636016 - RNA, 20 nt, Artificial Sequence
  Synthetic
ugccucagccuccugaguau

SEQ ID NO: 636017 - RNA, 21 nt, Artificial Sequence
  Synthetic
cugccucagccuccugaguau

SEQ ID NO: 636018 - RNA, 22 nt, Artificial Sequence
  Synthetic
ccugccucagccuccugaguau

SEQ ID NO: 636019 - RNA, 23 nt, Artificial Sequence
  Synthetic
cccugccucagccuccugaguau

SEQ ID NO: 636020 - RNA, 24 nt, Artificial Sequence
  Synthetic
ccccugccucagccuccugaguau

SEQ ID NO: 636021 - RNA, 18 nt, Artificial Sequence
  Synthetic
ccucggccuccugaguau

SEQ ID NO: 636022 - RNA, 19 nt, Artificial Sequence
  Synthetic
gccucggccuccugaguau

SEQ ID NO: 636023 - RNA, 20 nt, Artificial Sequence
  Synthetic
agccucggccuccugaguau

SEQ ID NO: 636024 - RNA, 21 nt, Artificial Sequence
  Synthetic
cagccucggccuccugaguau

SEQ ID NO: 636025 - RNA, 22 nt, Artificial Sequence
  Synthetic
ucagccucggccuccugaguau

SEQ ID NO: 636026 - RNA, 23 nt, Artificial Sequence
  Synthetic
uucagccucggccuccugaguau

SEQ ID NO: 636027 - RNA, 24 nt, Artificial Sequence
  Synthetic
cuucagccucggccuccugaguau

SEQ ID NO: 636028 - RNA, 18 nt, Artificial Sequence
  Synthetic
auuuucuucagugaguau

SEQ ID NO: 636029 - RNA, 19 nt, Artificial Sequence
  Synthetic
uauuuucuucagugaguau

SEQ ID NO: 636030 - RNA, 20 nt, Artificial Sequence
  Synthetic
auauuuucuucagugaguau

SEQ ID NO: 636031 - RNA, 21 nt, Artificial Sequence
  Synthetic
cauauuuucuucagugaguau

SEQ ID NO: 636032 - RNA, 22 nt, Artificial Sequence
  Synthetic
acauauuuucuucagugaguau

SEQ ID NO: 636033 - RNA, 23 nt, Artificial Sequence
  Synthetic
uacauauuuucuucagugaguau

SEQ ID NO: 636034 - RNA, 24 nt, Artificial Sequence
  Synthetic
guacauauuuucuucagugaguau

SEQ ID NO: 636035 - RNA, 18 nt, Artificial Sequence
  Synthetic
ccacagucuaaauaguau

SEQ ID NO: 636036 - RNA, 19 nt, Artificial Sequence
  Synthetic
gccacagucuaaauaguau

SEQ ID NO: 636037 - RNA, 20 nt, Artificial Sequence
  Synthetic
ggccacagucuaaauaguau

SEQ ID NO: 636038 - RNA, 21 nt, Artificial Sequence
  Synthetic
uggccacagucuaaauaguau

SEQ ID NO: 636039 - RNA, 22 nt, Artificial Sequence
  Synthetic
cuggccacagucuaaauaguau

SEQ ID NO: 636040 - RNA, 23 nt, Artificial Sequence
  Synthetic
gcuggccacagucuaaauaguau

SEQ ID NO: 636041 - RNA, 24 nt, Artificial Sequence
  Synthetic
ugcuggccacagucuaaauaguau

SEQ ID NO: 636042 - RNA, 18 nt, Artificial Sequence
  Synthetic
uguaaauuagaauaguau

SEQ ID NO: 636043 - RNA, 19 nt, Artificial Sequence
  Synthetic
guguaaauuagaauaguau

SEQ ID NO: 636044 - RNA, 20 nt, Artificial Sequence
  Synthetic
aguguaaauuagaauaguau

SEQ ID NO: 636045 - RNA, 21 nt, Artificial Sequence
  Synthetic
aaguguaaauuagaauaguau

SEQ ID NO: 636046 - RNA, 22 nt, Artificial Sequence
  Synthetic
caaguguaaauuagaauaguau

SEQ ID NO: 636047 - RNA, 23 nt, Artificial Sequence
  Synthetic
ucaaguguaaauuagaauaguau

SEQ ID NO: 636048 - RNA, 24 nt, Artificial Sequence
  Synthetic
aucaaguguaaauuagaauaguau

SEQ ID NO: 636049 - RNA, 18 nt, Artificial Sequence
  Synthetic
uccuauucaacauaguau

SEQ ID NO: 636050 - RNA, 19 nt, Artificial Sequence
  Synthetic
cuccuauucaacauaguau

SEQ ID NO: 636051 - RNA, 20 nt, Artificial Sequence
  Synthetic
acuccuauucaacauaguau

SEQ ID NO: 636052 - RNA, 21 nt, Artificial Sequence
  Synthetic
cacuccuauucaacauaguau

SEQ ID NO: 636053 - RNA, 22 nt, Artificial Sequence
  Synthetic
ccacuccuauucaacauaguau

SEQ ID NO: 636054 - RNA, 23 nt, Artificial Sequence
  Synthetic
accacuccuauucaacauaguau

SEQ ID NO: 636055 - RNA, 24 nt, Artificial Sequence
  Synthetic
caccacuccuauucaacauaguau

SEQ ID NO: 636056 - RNA, 18 nt, Artificial Sequence
  Synthetic
ccaauagauucauaguau

SEQ ID NO: 636057 - RNA, 19 nt, Artificial Sequence
  Synthetic
uccaauagauucauaguau

SEQ ID NO: 636058 - RNA, 20 nt, Artificial Sequence
  Synthetic
auccaauagauucauaguau

SEQ ID NO: 636059 - RNA, 21 nt, Artificial Sequence
  Synthetic
gauccaauagauucauaguau

SEQ ID NO: 636060 - RNA, 22 nt, Artificial Sequence
  Synthetic
ugauccaauagauucauaguau

SEQ ID NO: 636061 - RNA, 23 nt, Artificial Sequence
  Synthetic
gugauccaauagauucauaguau

SEQ ID NO: 636062 - RNA, 24 nt, Artificial Sequence
  Synthetic
ugugauccaauagauucauaguau

SEQ ID NO: 636063 - RNA, 18 nt, Artificial Sequence
  Synthetic
uaacuaauaagauaguau

SEQ ID NO: 636064 - RNA, 19 nt, Artificial Sequence
  Synthetic
auaacuaauaagauaguau

SEQ ID NO: 636065 - RNA, 20 nt, Artificial Sequence
  Synthetic
uauaacuaauaagauaguau

SEQ ID NO: 636066 - RNA, 21 nt, Artificial Sequence
  Synthetic
auauaacuaauaagauaguau

SEQ ID NO: 636067 - RNA, 22 nt, Artificial Sequence
  Synthetic
aauauaacuaauaagauaguau

SEQ ID NO: 636068 - RNA, 23 nt, Artificial Sequence
  Synthetic
aaauauaacuaauaagauaguau

SEQ ID NO: 636069 - RNA, 24 nt, Artificial Sequence
  Synthetic
aaaauauaacuaauaagauaguau

SEQ ID NO: 636070 - RNA, 18 nt, Artificial Sequence
  Synthetic
cuuuaccuccucuaguau

SEQ ID NO: 636071 - RNA, 19 nt, Artificial Sequence
  Synthetic
ucuuuaccuccucuaguau

SEQ ID NO: 636072 - RNA, 20 nt, Artificial Sequence
  Synthetic
cucuuuaccuccucuaguau

SEQ ID NO: 636073 - RNA, 21 nt, Artificial Sequence
  Synthetic
gcucuuuaccuccucuaguau

SEQ ID NO: 636074 - RNA, 22 nt, Artificial Sequence
  Synthetic
agcucuuuaccuccucuaguau

SEQ ID NO: 636075 - RNA, 23 nt, Artificial Sequence
  Synthetic
uagcucuuuaccuccucuaguau

SEQ ID NO: 636076 - RNA, 24 nt, Artificial Sequence
  Synthetic
auagcucuuuaccuccucuaguau

SEQ ID NO: 636077 - RNA, 18 nt, Artificial Sequence
  Synthetic
caaugagaaauguaguau

SEQ ID NO: 636078 - RNA, 19 nt, Artificial Sequence
  Synthetic
acaaugagaaauguaguau

SEQ ID NO: 636079 - RNA, 20 nt, Artificial Sequence
  Synthetic
cacaaugagaaauguaguau

SEQ ID NO: 636080 - RNA, 21 nt, Artificial Sequence
  Synthetic
acacaaugagaaauguaguau

SEQ ID NO: 636081 - RNA, 22 nt, Artificial Sequence
  Synthetic
uacacaaugagaaauguaguau

SEQ ID NO: 636082 - RNA, 23 nt, Artificial Sequence
  Synthetic
uuacacaaugagaaauguaguau

SEQ ID NO: 636083 - RNA, 24 nt, Artificial Sequence
  Synthetic
cuuacacaaugagaaauguaguau

SEQ ID NO: 636084 - RNA, 18 nt, Artificial Sequence
  Synthetic
uauuuuuuguuguaguau

SEQ ID NO: 636085 - RNA, 19 nt, Artificial Sequence
  Synthetic
guauuuuuuguuguaguau

SEQ ID NO: 636086 - RNA, 20 nt, Artificial Sequence
  Synthetic
aguauuuuuuguuguaguau

SEQ ID NO: 636087 - RNA, 21 nt, Artificial Sequence
  Synthetic
caguauuuuuuguuguaguau

SEQ ID NO: 636088 - RNA, 22 nt, Artificial Sequence
  Synthetic
ucaguauuuuuuguuguaguau

SEQ ID NO: 636089 - RNA, 23 nt, Artificial Sequence
  Synthetic
uucaguauuuuuuguuguaguau

SEQ ID NO: 636090 - RNA, 24 nt, Artificial Sequence
  Synthetic
uuucaguauuuuuuguuguaguau

SEQ ID NO: 636091 - RNA, 18 nt, Artificial Sequence
  Synthetic
aacuuuuaaaauuaguau

SEQ ID NO: 636092 - RNA, 19 nt, Artificial Sequence
  Synthetic
gaacuuuuaaaauuaguau

SEQ ID NO: 636093 - RNA, 20 nt, Artificial Sequence
  Synthetic
ugaacuuuuaaaauuaguau

SEQ ID NO: 636094 - RNA, 21 nt, Artificial Sequence
  Synthetic
augaacuuuuaaaauuaguau

SEQ ID NO: 636095 - RNA, 22 nt, Artificial Sequence
  Synthetic
aaugaacuuuuaaaauuaguau

SEQ ID NO: 636096 - RNA, 23 nt, Artificial Sequence
  Synthetic
aaaugaacuuuuaaaauuaguau

SEQ ID NO: 636097 - RNA, 24 nt, Artificial Sequence
  Synthetic
uaaaugaacuuuuaaaauuaguau

SEQ ID NO: 636098 - RNA, 18 nt, Artificial Sequence
  Synthetic
caacucuaccauuaguau

SEQ ID NO: 636099 - RNA, 19 nt, Artificial Sequence
  Synthetic
acaacucuaccauuaguau

SEQ ID NO: 636100 - RNA, 20 nt, Artificial Sequence
  Synthetic
aacaacucuaccauuaguau

SEQ ID NO: 636101 - RNA, 21 nt, Artificial Sequence
  Synthetic
aaacaacucuaccauuaguau

SEQ ID NO: 636102 - RNA, 22 nt, Artificial Sequence
  Synthetic
caaacaacucuaccauuaguau

SEQ ID NO: 636103 - RNA, 23 nt, Artificial Sequence
  Synthetic
ucaaacaacucuaccauuaguau

SEQ ID NO: 636104 - RNA, 24 nt, Artificial Sequence
  Synthetic
cucaaacaacucuaccauuaguau

SEQ ID NO: 636105 - RNA, 18 nt, Artificial Sequence
  Synthetic
uaagagugacuuuaguau

SEQ ID NO: 636106 - RNA, 19 nt, Artificial Sequence
  Synthetic
guaagagugacuuuaguau

SEQ ID NO: 636107 - RNA, 20 nt, Artificial Sequence
  Synthetic
uguaagagugacuuuaguau

SEQ ID NO: 636108 - RNA, 21 nt, Artificial Sequence
  Synthetic
uuguaagagugacuuuaguau

SEQ ID NO: 636109 - RNA, 22 nt, Artificial Sequence
  Synthetic
auuguaagagugacuuuaguau

SEQ ID NO: 636110 - RNA, 23 nt, Artificial Sequence
  Synthetic
cauuguaagagugacuuuaguau

SEQ ID NO: 636111 - RNA, 24 nt, Artificial Sequence
  Synthetic
ucauuguaagagugacuuuaguau

SEQ ID NO: 636112 - RNA, 18 nt, Artificial Sequence
  Synthetic
aaguauauauuuuaguau

SEQ ID NO: 636113 - RNA, 19 nt, Artificial Sequence
  Synthetic
caaguauauauuuuaguau

SEQ ID NO: 636114 - RNA, 20 nt, Artificial Sequence
  Synthetic
acaaguauauauuuuaguau

SEQ ID NO: 636115 - RNA, 21 nt, Artificial Sequence
  Synthetic
cacaaguauauauuuuaguau

SEQ ID NO: 636116 - RNA, 22 nt, Artificial Sequence
  Synthetic
ccacaaguauauauuuuaguau

SEQ ID NO: 636117 - RNA, 23 nt, Artificial Sequence
  Synthetic
gccacaaguauauauuuuaguau

SEQ ID NO: 636118 - RNA, 24 nt, Artificial Sequence
  Synthetic
agccacaaguauauauuuuaguau

SEQ ID NO: 636119 - RNA, 18 nt, Artificial Sequence
  Synthetic
agagggauuuuuuaguau

SEQ ID NO: 636120 - RNA, 19 nt, Artificial Sequence
  Synthetic
uagagggauuuuuuaguau

SEQ ID NO: 636121 - RNA, 20 nt, Artificial Sequence
  Synthetic
cuagagggauuuuuuaguau

SEQ ID NO: 636122 - RNA, 21 nt, Artificial Sequence
  Synthetic
ccuagagggauuuuuuaguau

SEQ ID NO: 636123 - RNA, 22 nt, Artificial Sequence
  Synthetic
accuagagggauuuuuuaguau

SEQ ID NO: 636124 - RNA, 23 nt, Artificial Sequence
  Synthetic
aaccuagagggauuuuuuaguau

SEQ ID NO: 636125 - RNA, 24 nt, Artificial Sequence
  Synthetic
gaaccuagagggauuuuuuaguau

SEQ ID NO: 636126 - RNA, 18 nt, Artificial Sequence
  Synthetic
uaauuuaacacaacguau

SEQ ID NO: 636127 - RNA, 19 nt, Artificial Sequence
  Synthetic
uuaauuuaacacaacguau

SEQ ID NO: 636128 - RNA, 20 nt, Artificial Sequence
  Synthetic
auuaauuuaacacaacguau

SEQ ID NO: 636129 - RNA, 21 nt, Artificial Sequence
  Synthetic
uauuaauuuaacacaacguau

SEQ ID NO: 636130 - RNA, 22 nt, Artificial Sequence
  Synthetic
guauuaauuuaacacaacguau

SEQ ID NO: 636131 - RNA, 23 nt, Artificial Sequence
  Synthetic
aguauuaauuuaacacaacguau

SEQ ID NO: 636132 - RNA, 24 nt, Artificial Sequence
  Synthetic
uaguauuaauuuaacacaacguau

SEQ ID NO: 636133 - RNA, 18 nt, Artificial Sequence
  Synthetic
cuaaacacagcuacguau

SEQ ID NO: 636134 - RNA, 19 nt, Artificial Sequence
  Synthetic
ucuaaacacagcuacguau

SEQ ID NO: 636135 - RNA, 20 nt, Artificial Sequence
  Synthetic
uucuaaacacagcuacguau

SEQ ID NO: 636136 - RNA, 21 nt, Artificial Sequence
  Synthetic
uuucuaaacacagcuacguau

SEQ ID NO: 636137 - RNA, 22 nt, Artificial Sequence
  Synthetic
cuuucuaaacacagcuacguau

SEQ ID NO: 636138 - RNA, 23 nt, Artificial Sequence
  Synthetic
acuuucuaaacacagcuacguau

SEQ ID NO: 636139 - RNA, 24 nt, Artificial Sequence
  Synthetic
cacuuucuaaacacagcuacguau

SEQ ID NO: 636140 - RNA, 18 nt, Artificial Sequence
  Synthetic
uuauguguaguuacguau

SEQ ID NO: 636141 - RNA, 19 nt, Artificial Sequence
  Synthetic
uuuauguguaguuacguau

SEQ ID NO: 636142 - RNA, 20 nt, Artificial Sequence
  Synthetic
guuuauguguaguuacguau

SEQ ID NO: 636143 - RNA, 21 nt, Artificial Sequence
  Synthetic
cguuuauguguaguuacguau

SEQ ID NO: 636144 - RNA, 22 nt, Artificial Sequence
  Synthetic
ucguuuauguguaguuacguau

SEQ ID NO: 636145 - RNA, 23 nt, Artificial Sequence
  Synthetic
uucguuuauguguaguuacguau

SEQ ID NO: 636146 - RNA, 24 nt, Artificial Sequence
  Synthetic
auucguuuauguguaguuacguau

SEQ ID NO: 636147 - RNA, 18 nt, Artificial Sequence
  Synthetic
acauaauaaaaaccguau

SEQ ID NO: 636148 - RNA, 19 nt, Artificial Sequence
  Synthetic
aacauaauaaaaaccguau

SEQ ID NO: 636149 - RNA, 20 nt, Artificial Sequence
  Synthetic
caacauaauaaaaaccguau

SEQ ID NO: 636150 - RNA, 21 nt, Artificial Sequence
  Synthetic
gcaacauaauaaaaaccguau

SEQ ID NO: 636151 - RNA, 22 nt, Artificial Sequence
  Synthetic
cgcaacauaauaaaaaccguau

SEQ ID NO: 636152 - RNA, 23 nt, Artificial Sequence
  Synthetic
ccgcaacauaauaaaaaccguau

SEQ ID NO: 636153 - RNA, 24 nt, Artificial Sequence
  Synthetic
accgcaacauaauaaaaaccguau

SEQ ID NO: 636154 - RNA, 18 nt, Artificial Sequence
  Synthetic
gaaaaggcauaaccguau

SEQ ID NO: 636155 - RNA, 19 nt, Artificial Sequence
  Synthetic
ggaaaaggcauaaccguau

SEQ ID NO: 636156 - RNA, 20 nt, Artificial Sequence
  Synthetic
uggaaaaggcauaaccguau

SEQ ID NO: 636157 - RNA, 21 nt, Artificial Sequence
  Synthetic
cuggaaaaggcauaaccguau

SEQ ID NO: 636158 - RNA, 22 nt, Artificial Sequence
  Synthetic
acuggaaaaggcauaaccguau

SEQ ID NO: 636159 - RNA, 23 nt, Artificial Sequence
  Synthetic
gacuggaaaaggcauaaccguau

SEQ ID NO: 636160 - RNA, 24 nt, Artificial Sequence
  Synthetic
agacuggaaaaggcauaaccguau

SEQ ID NO: 636161 - RNA, 18 nt, Artificial Sequence
  Synthetic
uucuggggacaaagguau

SEQ ID NO: 636162 - RNA, 19 nt, Artificial Sequence
  Synthetic
uuucuggggacaaagguau

SEQ ID NO: 636163 - RNA, 20 nt, Artificial Sequence
  Synthetic
auuucuggggacaaagguau

SEQ ID NO: 636164 - RNA, 21 nt, Artificial Sequence
  Synthetic
aauuucuggggacaaagguau

SEQ ID NO: 636165 - RNA, 22 nt, Artificial Sequence
  Synthetic
gaauuucuggggacaaagguau

SEQ ID NO: 636166 - RNA, 23 nt, Artificial Sequence
  Synthetic
agaauuucuggggacaaagguau

SEQ ID NO: 636167 - RNA, 24 nt, Artificial Sequence
  Synthetic
cagaauuucuggggacaaagguau

SEQ ID NO: 636168 - RNA, 18 nt, Artificial Sequence
  Synthetic
uuauguucucuaagguau

SEQ ID NO: 636169 - RNA, 19 nt, Artificial Sequence
  Synthetic
auuauguucucuaagguau

SEQ ID NO: 636170 - RNA, 20 nt, Artificial Sequence
  Synthetic
uauuauguucucuaagguau

SEQ ID NO: 636171 - RNA, 21 nt, Artificial Sequence
  Synthetic
guauuauguucucuaagguau

SEQ ID NO: 636172 - RNA, 22 nt, Artificial Sequence
  Synthetic
uguauuauguucucuaagguau

SEQ ID NO: 636173 - RNA, 23 nt, Artificial Sequence
  Synthetic
guguauuauguucucuaagguau

SEQ ID NO: 636174 - RNA, 24 nt, Artificial Sequence
  Synthetic
uguguauuauguucucuaagguau

SEQ ID NO: 636175 - RNA, 18 nt, Artificial Sequence
  Synthetic
aauuuuuagcacagguau

SEQ ID NO: 636176 - RNA, 19 nt, Artificial Sequence
  Synthetic
uaauuuuuagcacagguau

SEQ ID NO: 636177 - RNA, 20 nt, Artificial Sequence
  Synthetic
auaauuuuuagcacagguau

SEQ ID NO: 636178 - RNA, 21 nt, Artificial Sequence
  Synthetic
aauaauuuuuagcacagguau

SEQ ID NO: 636179 - RNA, 22 nt, Artificial Sequence
  Synthetic
aaauaauuuuuagcacagguau

SEQ ID NO: 636180 - RNA, 23 nt, Artificial Sequence
  Synthetic
uaaauaauuuuuagcacagguau

SEQ ID NO: 636181 - RNA, 24 nt, Artificial Sequence
  Synthetic
guaaauaauuuuuagcacagguau

SEQ ID NO: 636182 - RNA, 18 nt, Artificial Sequence
  Synthetic
gaucaugaggucagguau

SEQ ID NO: 636183 - RNA, 19 nt, Artificial Sequence
  Synthetic
ggaucaugaggucagguau

SEQ ID NO: 636184 - RNA, 20 nt, Artificial Sequence
  Synthetic
uggaucaugaggucagguau

SEQ ID NO: 636185 - RNA, 21 nt, Artificial Sequence
  Synthetic
guggaucaugaggucagguau

SEQ ID NO: 636186 - RNA, 22 nt, Artificial Sequence
  Synthetic
gguggaucaugaggucagguau

SEQ ID NO: 636187 - RNA, 23 nt, Artificial Sequence
  Synthetic
agguggaucaugaggucagguau

SEQ ID NO: 636188 - RNA, 24 nt, Artificial Sequence
  Synthetic
cagguggaucaugaggucagguau

SEQ ID NO: 636189 - RNA, 18 nt, Artificial Sequence
  Synthetic
agaccucaguagagguau

SEQ ID NO: 636190 - RNA, 19 nt, Artificial Sequence
  Synthetic
uagaccucaguagagguau

SEQ ID NO: 636191 - RNA, 20 nt, Artificial Sequence
  Synthetic
uuagaccucaguagagguau

SEQ ID NO: 636192 - RNA, 21 nt, Artificial Sequence
  Synthetic
uuuagaccucaguagagguau

SEQ ID NO: 636193 - RNA, 22 nt, Artificial Sequence
  Synthetic
cuuuagaccucaguagagguau

SEQ ID NO: 636194 - RNA, 23 nt, Artificial Sequence
  Synthetic
ucuuuagaccucaguagagguau

SEQ ID NO: 636195 - RNA, 24 nt, Artificial Sequence
  Synthetic
uucuuuagaccucaguagagguau

SEQ ID NO: 636196 - RNA, 18 nt, Artificial Sequence
  Synthetic
ucugcaaggaugagguau

SEQ ID NO: 636197 - RNA, 19 nt, Artificial Sequence
  Synthetic
uucugcaaggaugagguau

SEQ ID NO: 636198 - RNA, 20 nt, Artificial Sequence
  Synthetic
auucugcaaggaugagguau

SEQ ID NO: 636199 - RNA, 21 nt, Artificial Sequence
  Synthetic
uauucugcaaggaugagguau

SEQ ID NO: 636200 - RNA, 22 nt, Artificial Sequence
  Synthetic
guauucugcaaggaugagguau

SEQ ID NO: 636201 - RNA, 23 nt, Artificial Sequence
  Synthetic
uguauucugcaaggaugagguau

SEQ ID NO: 636202 - RNA, 24 nt, Artificial Sequence
  Synthetic
uuguauucugcaaggaugagguau

SEQ ID NO: 636203 - RNA, 18 nt, Artificial Sequence
  Synthetic
agacgugaugugagguau

SEQ ID NO: 636204 - RNA, 19 nt, Artificial Sequence
  Synthetic
uagacgugaugugagguau

SEQ ID NO: 636205 - RNA, 20 nt, Artificial Sequence
  Synthetic
guagacgugaugugagguau

SEQ ID NO: 636206 - RNA, 21 nt, Artificial Sequence
  Synthetic
aguagacgugaugugagguau

SEQ ID NO: 636207 - RNA, 22 nt, Artificial Sequence
  Synthetic
uaguagacgugaugugagguau

SEQ ID NO: 636208 - RNA, 23 nt, Artificial Sequence
  Synthetic
auaguagacgugaugugagguau

SEQ ID NO: 636209 - RNA, 24 nt, Artificial Sequence
  Synthetic
aauaguagacgugaugugagguau

SEQ ID NO: 636210 - RNA, 18 nt, Artificial Sequence
  Synthetic
guccuccuaaguagguau

SEQ ID NO: 636211 - RNA, 19 nt, Artificial Sequence
  Synthetic
gguccuccuaaguagguau

SEQ ID NO: 636212 - RNA, 20 nt, Artificial Sequence
  Synthetic
ggguccuccuaaguagguau

SEQ ID NO: 636213 - RNA, 21 nt, Artificial Sequence
  Synthetic
aggguccuccuaaguagguau

SEQ ID NO: 636214 - RNA, 22 nt, Artificial Sequence
  Synthetic
gaggguccuccuaaguagguau

SEQ ID NO: 636215 - RNA, 23 nt, Artificial Sequence
  Synthetic
ugaggguccuccuaaguagguau

SEQ ID NO: 636216 - RNA, 24 nt, Artificial Sequence
  Synthetic
cugaggguccuccuaaguagguau

SEQ ID NO: 636217 - RNA, 18 nt, Artificial Sequence
  Synthetic
gagggagacgguagguau

SEQ ID NO: 636218 - RNA, 19 nt, Artificial Sequence
  Synthetic
ggagggagacgguagguau

SEQ ID NO: 636219 - RNA, 20 nt, Artificial Sequence
  Synthetic
aggagggagacgguagguau

SEQ ID NO: 636220 - RNA, 21 nt, Artificial Sequence
  Synthetic
aaggagggagacgguagguau

SEQ ID NO: 636221 - RNA, 22 nt, Artificial Sequence
  Synthetic
aaaggagggagacgguagguau

SEQ ID NO: 636222 - RNA, 23 nt, Artificial Sequence
  Synthetic
aaaaggagggagacgguagguau

SEQ ID NO: 636223 - RNA, 24 nt, Artificial Sequence
  Synthetic
aaaaaggagggagacgguagguau

SEQ ID NO: 636224 - RNA, 18 nt, Artificial Sequence
  Synthetic
uuauuaugugguagguau

SEQ ID NO: 636225 - RNA, 19 nt, Artificial Sequence
  Synthetic
uuuauuaugugguagguau

SEQ ID NO: 636226 - RNA, 20 nt, Artificial Sequence
  Synthetic
auuuauuaugugguagguau

SEQ ID NO: 636227 - RNA, 21 nt, Artificial Sequence
  Synthetic
uauuuauuaugugguagguau

SEQ ID NO: 636228 - RNA, 22 nt, Artificial Sequence
  Synthetic
auauuuauuaugugguagguau

SEQ ID NO: 636229 - RNA, 23 nt, Artificial Sequence
  Synthetic
aauauuuauuaugugguagguau

SEQ ID NO: 636230 - RNA, 24 nt, Artificial Sequence
  Synthetic
aaauauuuauuaugugguagguau

SEQ ID NO: 636231 - RNA, 18 nt, Artificial Sequence
  Synthetic
uuaagcaguuuuagguau

SEQ ID NO: 636232 - RNA, 19 nt, Artificial Sequence
  Synthetic
uuuaagcaguuuuagguau

SEQ ID NO: 636233 - RNA, 20 nt, Artificial Sequence
  Synthetic
cuuuaagcaguuuuagguau

SEQ ID NO: 636234 - RNA, 21 nt, Artificial Sequence
  Synthetic
gcuuuaagcaguuuuagguau

SEQ ID NO: 636235 - RNA, 22 nt, Artificial Sequence
  Synthetic
agcuuuaagcaguuuuagguau

SEQ ID NO: 636236 - RNA, 23 nt, Artificial Sequence
  Synthetic
uagcuuuaagcaguuuuagguau

SEQ ID NO: 636237 - RNA, 24 nt, Artificial Sequence
  Synthetic
auagcuuuaagcaguuuuagguau

SEQ ID NO: 636238 - RNA, 18 nt, Artificial Sequence
  Synthetic
aauaguauuucacgguau

SEQ ID NO: 636239 - RNA, 19 nt, Artificial Sequence
  Synthetic
gaauaguauuucacgguau

SEQ ID NO: 636240 - RNA, 20 nt, Artificial Sequence
  Synthetic
ugaauaguauuucacgguau

SEQ ID NO: 636241 - RNA, 21 nt, Artificial Sequence
  Synthetic
cugaauaguauuucacgguau

SEQ ID NO: 636242 - RNA, 22 nt, Artificial Sequence
  Synthetic
gcugaauaguauuucacgguau

SEQ ID NO: 636243 - RNA, 23 nt, Artificial Sequence
  Synthetic
ggcugaauaguauuucacgguau

SEQ ID NO: 636244 - RNA, 24 nt, Artificial Sequence
  Synthetic
uggcugaauaguauuucacgguau

SEQ ID NO: 636245 - RNA, 18 nt, Artificial Sequence
  Synthetic
cuagcugugugacgguau

SEQ ID NO: 636246 - RNA, 19 nt, Artificial Sequence
  Synthetic
acuagcugugugacgguau

SEQ ID NO: 636247 - RNA, 20 nt, Artificial Sequence
  Synthetic
uacuagcugugugacgguau

SEQ ID NO: 636248 - RNA, 21 nt, Artificial Sequence
  Synthetic
uuacuagcugugugacgguau

SEQ ID NO: 636249 - RNA, 22 nt, Artificial Sequence
  Synthetic
uuuacuagcugugugacgguau

SEQ ID NO: 636250 - RNA, 23 nt, Artificial Sequence
  Synthetic
cuuuacuagcugugugacgguau

SEQ ID NO: 636251 - RNA, 24 nt, Artificial Sequence
  Synthetic
gcuuuacuagcugugugacgguau

SEQ ID NO: 636252 - RNA, 18 nt, Artificial Sequence
  Synthetic
uaagaagaaauccgguau

SEQ ID NO: 636253 - RNA, 19 nt, Artificial Sequence
  Synthetic
cuaagaagaaauccgguau

SEQ ID NO: 636254 - RNA, 20 nt, Artificial Sequence
  Synthetic
ccuaagaagaaauccgguau

SEQ ID NO: 636255 - RNA, 21 nt, Artificial Sequence
  Synthetic
uccuaagaagaaauccgguau

SEQ ID NO: 636256 - RNA, 22 nt, Artificial Sequence
  Synthetic
cuccuaagaagaaauccgguau

SEQ ID NO: 636257 - RNA, 23 nt, Artificial Sequence
  Synthetic
gcuccuaagaagaaauccgguau

SEQ ID NO: 636258 - RNA, 24 nt, Artificial Sequence
  Synthetic
agcuccuaagaagaaauccgguau

SEQ ID NO: 636259 - RNA, 18 nt, Artificial Sequence
  Synthetic
uagcaaauugaaggguau

SEQ ID NO: 636260 - RNA, 19 nt, Artificial Sequence
  Synthetic
uuagcaaauugaaggguau

SEQ ID NO: 636261 - RNA, 20 nt, Artificial Sequence
  Synthetic
auuagcaaauugaaggguau

SEQ ID NO: 636262 - RNA, 21 nt, Artificial Sequence
  Synthetic
uauuagcaaauugaaggguau

SEQ ID NO: 636263 - RNA, 22 nt, Artificial Sequence
  Synthetic
cuauuagcaaauugaaggguau

SEQ ID NO: 636264 - RNA, 23 nt, Artificial Sequence
  Synthetic
ucuauuagcaaauugaaggguau

SEQ ID NO: 636265 - RNA, 24 nt, Artificial Sequence
  Synthetic
gucuauuagcaaauugaaggguau

SEQ ID NO: 636266 - RNA, 18 nt, Artificial Sequence
  Synthetic
acaagauaagcaggguau

SEQ ID NO: 636267 - RNA, 19 nt, Artificial Sequence
  Synthetic
cacaagauaagcaggguau

SEQ ID NO: 636268 - RNA, 20 nt, Artificial Sequence
  Synthetic
ucacaagauaagcaggguau

SEQ ID NO: 636269 - RNA, 21 nt, Artificial Sequence
  Synthetic
aucacaagauaagcaggguau

SEQ ID NO: 636270 - RNA, 22 nt, Artificial Sequence
  Synthetic
aaucacaagauaagcaggguau

SEQ ID NO: 636271 - RNA, 23 nt, Artificial Sequence
  Synthetic
aaaucacaagauaagcaggguau

SEQ ID NO: 636272 - RNA, 24 nt, Artificial Sequence
  Synthetic
caaaucacaagauaagcaggguau

SEQ ID NO: 636273 - RNA, 18 nt, Artificial Sequence
  Synthetic
aaagcagcagcaggguau

SEQ ID NO: 636274 - RNA, 19 nt, Artificial Sequence
  Synthetic
uaaagcagcagcaggguau

SEQ ID NO: 636275 - RNA, 20 nt, Artificial Sequence
  Synthetic
guaaagcagcagcaggguau

SEQ ID NO: 636276 - RNA, 21 nt, Artificial Sequence
  Synthetic
gguaaagcagcagcaggguau

SEQ ID NO: 636277 - RNA, 22 nt, Artificial Sequence
  Synthetic
ugguaaagcagcagcaggguau

SEQ ID NO: 636278 - RNA, 23 nt, Artificial Sequence
  Synthetic
uugguaaagcagcagcaggguau

SEQ ID NO: 636279 - RNA, 24 nt, Artificial Sequence
  Synthetic
guugguaaagcagcagcaggguau

SEQ ID NO: 636280 - RNA, 18 nt, Artificial Sequence
  Synthetic
cugagugggcacggguau

SEQ ID NO: 636281 - RNA, 19 nt, Artificial Sequence
  Synthetic
acugagugggcacggguau

SEQ ID NO: 636282 - RNA, 20 nt, Artificial Sequence
  Synthetic
cacugagugggcacggguau

SEQ ID NO: 636283 - RNA, 21 nt, Artificial Sequence
  Synthetic
acacugagugggcacggguau

SEQ ID NO: 636284 - RNA, 22 nt, Artificial Sequence
  Synthetic
cacacugagugggcacggguau

SEQ ID NO: 636285 - RNA, 23 nt, Artificial Sequence
  Synthetic
acacacugagugggcacggguau

SEQ ID NO: 636286 - RNA, 24 nt, Artificial Sequence
  Synthetic
aacacacugagugggcacggguau

SEQ ID NO: 636287 - RNA, 18 nt, Artificial Sequence
  Synthetic
uugaaugugcagggguau

SEQ ID NO: 636288 - RNA, 19 nt, Artificial Sequence
  Synthetic
uuugaaugugcagggguau

SEQ ID NO: 636289 - RNA, 20 nt, Artificial Sequence
  Synthetic
auuugaaugugcagggguau

SEQ ID NO: 636290 - RNA, 21 nt, Artificial Sequence
  Synthetic
uauuugaaugugcagggguau

SEQ ID NO: 636291 - RNA, 22 nt, Artificial Sequence
  Synthetic
cuauuugaaugugcagggguau

SEQ ID NO: 636292 - RNA, 23 nt, Artificial Sequence
  Synthetic
ucuauuugaaugugcagggguau

SEQ ID NO: 636293 - RNA, 24 nt, Artificial Sequence
  Synthetic
cucuauuugaaugugcagggguau

SEQ ID NO: 636294 - RNA, 18 nt, Artificial Sequence
  Synthetic
uuuaauacuaugggguau

SEQ ID NO: 636295 - RNA, 19 nt, Artificial Sequence
  Synthetic
auuuaauacuaugggguau

SEQ ID NO: 636296 - RNA, 20 nt, Artificial Sequence
  Synthetic
uauuuaauacuaugggguau

SEQ ID NO: 636297 - RNA, 21 nt, Artificial Sequence
  Synthetic
cuauuuaauacuaugggguau

SEQ ID NO: 636298 - RNA, 22 nt, Artificial Sequence
  Synthetic
acuauuuaauacuaugggguau

SEQ ID NO: 636299 - RNA, 23 nt, Artificial Sequence
  Synthetic
uacuauuuaauacuaugggguau

SEQ ID NO: 636300 - RNA, 24 nt, Artificial Sequence
  Synthetic
uuacuauuuaauacuaugggguau

SEQ ID NO: 636301 - RNA, 18 nt, Artificial Sequence
  Synthetic
aguuaugaacauggguau

SEQ ID NO: 636302 - RNA, 19 nt, Artificial Sequence
  Synthetic
aaguuaugaacauggguau

SEQ ID NO: 636303 - RNA, 20 nt, Artificial Sequence
  Synthetic
gaaguuaugaacauggguau

SEQ ID NO: 636304 - RNA, 21 nt, Artificial Sequence
  Synthetic
agaaguuaugaacauggguau

SEQ ID NO: 636305 - RNA, 22 nt, Artificial Sequence
  Synthetic
cagaaguuaugaacauggguau

SEQ ID NO: 636306 - RNA, 23 nt, Artificial Sequence
  Synthetic
acagaaguuaugaacauggguau

SEQ ID NO: 636307 - RNA, 24 nt, Artificial Sequence
  Synthetic
uacagaaguuaugaacauggguau

SEQ ID NO: 636308 - RNA, 18 nt, Artificial Sequence
  Synthetic
cucuucaauaaaugguau

SEQ ID NO: 636309 - RNA, 19 nt, Artificial Sequence
  Synthetic
ucucuucaauaaaugguau

SEQ ID NO: 636310 - RNA, 20 nt, Artificial Sequence
  Synthetic
gucucuucaauaaaugguau

SEQ ID NO: 636311 - RNA, 21 nt, Artificial Sequence
  Synthetic
agucucuucaauaaaugguau

SEQ ID NO: 636312 - RNA, 22 nt, Artificial Sequence
  Synthetic
cagucucuucaauaaaugguau

SEQ ID NO: 636313 - RNA, 23 nt, Artificial Sequence
  Synthetic
acagucucuucaauaaaugguau

SEQ ID NO: 636314 - RNA, 24 nt, Artificial Sequence
  Synthetic
gacagucucuucaauaaaugguau

SEQ ID NO: 636315 - RNA, 18 nt, Artificial Sequence
  Synthetic
caccuaaggcaaugguau

SEQ ID NO: 636316 - RNA, 19 nt, Artificial Sequence
  Synthetic
acaccuaaggcaaugguau

SEQ ID NO: 636317 - RNA, 20 nt, Artificial Sequence
  Synthetic
aacaccuaaggcaaugguau

SEQ ID NO: 636318 - RNA, 21 nt, Artificial Sequence
  Synthetic
aaacaccuaaggcaaugguau

SEQ ID NO: 636319 - RNA, 22 nt, Artificial Sequence
  Synthetic
aaaacaccuaaggcaaugguau

SEQ ID NO: 636320 - RNA, 23 nt, Artificial Sequence
  Synthetic
caaaacaccuaaggcaaugguau

SEQ ID NO: 636321 - RNA, 24 nt, Artificial Sequence
  Synthetic
ucaaaacaccuaaggcaaugguau

SEQ ID NO: 636322 - RNA, 18 nt, Artificial Sequence
  Synthetic
ggauaguaaagaugguau

SEQ ID NO: 636323 - RNA, 19 nt, Artificial Sequence
  Synthetic
aggauaguaaagaugguau

SEQ ID NO: 636324 - RNA, 20 nt, Artificial Sequence
  Synthetic
caggauaguaaagaugguau

SEQ ID NO: 636325 - RNA, 21 nt, Artificial Sequence
  Synthetic
acaggauaguaaagaugguau

SEQ ID NO: 636326 - RNA, 22 nt, Artificial Sequence
  Synthetic
uacaggauaguaaagaugguau

SEQ ID NO: 636327 - RNA, 23 nt, Artificial Sequence
  Synthetic
uuacaggauaguaaagaugguau

SEQ ID NO: 636328 - RNA, 24 nt, Artificial Sequence
  Synthetic
cuuacaggauaguaaagaugguau

SEQ ID NO: 636329 - RNA, 18 nt, Artificial Sequence
  Synthetic
cccagaccaggaugguau

SEQ ID NO: 636330 - RNA, 19 nt, Artificial Sequence
  Synthetic
ucccagaccaggaugguau

SEQ ID NO: 636331 - RNA, 20 nt, Artificial Sequence
  Synthetic
uucccagaccaggaugguau

SEQ ID NO: 636332 - RNA, 21 nt, Artificial Sequence
  Synthetic
auucccagaccaggaugguau

SEQ ID NO: 636333 - RNA, 22 nt, Artificial Sequence
  Synthetic
aauucccagaccaggaugguau

SEQ ID NO: 636334 - RNA, 23 nt, Artificial Sequence
  Synthetic
aaauucccagaccaggaugguau

SEQ ID NO: 636335 - RNA, 24 nt, Artificial Sequence
  Synthetic
uaaauucccagaccaggaugguau

SEQ ID NO: 636336 - RNA, 18 nt, Artificial Sequence
  Synthetic
aaaauuaaucuaugguau

SEQ ID NO: 636337 - RNA, 19 nt, Artificial Sequence
  Synthetic
caaaauuaaucuaugguau

SEQ ID NO: 636338 - RNA, 20 nt, Artificial Sequence
  Synthetic
gcaaaauuaaucuaugguau

SEQ ID NO: 636339 - RNA, 21 nt, Artificial Sequence
  Synthetic
ggcaaaauuaaucuaugguau

SEQ ID NO: 636340 - RNA, 22 nt, Artificial Sequence
  Synthetic
uggcaaaauuaaucuaugguau

SEQ ID NO: 636341 - RNA, 23 nt, Artificial Sequence
  Synthetic
cuggcaaaauuaaucuaugguau

SEQ ID NO: 636342 - RNA, 24 nt, Artificial Sequence
  Synthetic
acuggcaaaauuaaucuaugguau

SEQ ID NO: 636343 - RNA, 18 nt, Artificial Sequence
  Synthetic
ucauguuuuaccugguau

SEQ ID NO: 636344 - RNA, 19 nt, Artificial Sequence
  Synthetic
aucauguuuuaccugguau

SEQ ID NO: 636345 - RNA, 20 nt, Artificial Sequence
  Synthetic
aaucauguuuuaccugguau

SEQ ID NO: 636346 - RNA, 21 nt, Artificial Sequence
  Synthetic
gaaucauguuuuaccugguau

SEQ ID NO: 636347 - RNA, 22 nt, Artificial Sequence
  Synthetic
ugaaucauguuuuaccugguau

SEQ ID NO: 636348 - RNA, 23 nt, Artificial Sequence
  Synthetic
uugaaucauguuuuaccugguau

SEQ ID NO: 636349 - RNA, 24 nt, Artificial Sequence
  Synthetic
cuugaaucauguuuuaccugguau

SEQ ID NO: 636350 - RNA, 18 nt, Artificial Sequence
  Synthetic
cuuguaacuugcugguau

SEQ ID NO: 636351 - RNA, 19 nt, Artificial Sequence
  Synthetic
gcuuguaacuugcugguau

SEQ ID NO: 636352 - RNA, 20 nt, Artificial Sequence
  Synthetic
ggcuuguaacuugcugguau

SEQ ID NO: 636353 - RNA, 21 nt, Artificial Sequence
  Synthetic
aggcuuguaacuugcugguau

SEQ ID NO: 636354 - RNA, 22 nt, Artificial Sequence
  Synthetic
caggcuuguaacuugcugguau

SEQ ID NO: 636355 - RNA, 23 nt, Artificial Sequence
  Synthetic
ccaggcuuguaacuugcugguau

SEQ ID NO: 636356 - RNA, 24 nt, Artificial Sequence
  Synthetic
uccaggcuuguaacuugcugguau

SEQ ID NO: 636357 - RNA, 18 nt, Artificial Sequence
  Synthetic
uacauuguugucugguau

SEQ ID NO: 636358 - RNA, 19 nt, Artificial Sequence
  Synthetic
cuacauuguugucugguau

SEQ ID NO: 636359 - RNA, 20 nt, Artificial Sequence
  Synthetic
acuacauuguugucugguau

SEQ ID NO: 636360 - RNA, 21 nt, Artificial Sequence
  Synthetic
aacuacauuguugucugguau

SEQ ID NO: 636361 - RNA, 22 nt, Artificial Sequence
  Synthetic
caacuacauuguugucugguau

SEQ ID NO: 636362 - RNA, 23 nt, Artificial Sequence
  Synthetic
acaacuacauuguugucugguau

SEQ ID NO: 636363 - RNA, 24 nt, Artificial Sequence
  Synthetic
gacaacuacauuguugucugguau

SEQ ID NO: 636364 - RNA, 18 nt, Artificial Sequence
  Synthetic
ucuauaaaccagugguau

SEQ ID NO: 636365 - RNA, 19 nt, Artificial Sequence
  Synthetic
cucuauaaaccagugguau

SEQ ID NO: 636366 - RNA, 20 nt, Artificial Sequence
  Synthetic
ucucuauaaaccagugguau

SEQ ID NO: 636367 - RNA, 21 nt, Artificial Sequence
  Synthetic
aucucuauaaaccagugguau

SEQ ID NO: 636368 - RNA, 22 nt, Artificial Sequence
  Synthetic
aaucucuauaaaccagugguau

SEQ ID NO: 636369 - RNA, 23 nt, Artificial Sequence
  Synthetic
uaaucucuauaaaccagugguau

SEQ ID NO: 636370 - RNA, 24 nt, Artificial Sequence
  Synthetic
auaaucucuauaaaccagugguau

SEQ ID NO: 636371 - RNA, 18 nt, Artificial Sequence
  Synthetic
aauauggcagcuugguau

SEQ ID NO: 636372 - RNA, 19 nt, Artificial Sequence
  Synthetic
caauauggcagcuugguau

SEQ ID NO: 636373 - RNA, 20 nt, Artificial Sequence
  Synthetic
acaauauggcagcuugguau

SEQ ID NO: 636374 - RNA, 21 nt, Artificial Sequence
  Synthetic
cacaauauggcagcuugguau

SEQ ID NO: 636375 - RNA, 22 nt, Artificial Sequence
  Synthetic
ccacaauauggcagcuugguau

SEQ ID NO: 636376 - RNA, 23 nt, Artificial Sequence
  Synthetic
uccacaauauggcagcuugguau

SEQ ID NO: 636377 - RNA, 24 nt, Artificial Sequence
  Synthetic
auccacaauauggcagcuugguau

SEQ ID NO: 636378 - RNA, 18 nt, Artificial Sequence
  Synthetic
accugcccccaaauguau

SEQ ID NO: 636379 - RNA, 19 nt, Artificial Sequence
  Synthetic
aaccugcccccaaauguau

SEQ ID NO: 636380 - RNA, 20 nt, Artificial Sequence
  Synthetic
aaaccugcccccaaauguau

SEQ ID NO: 636381 - RNA, 21 nt, Artificial Sequence
  Synthetic
uaaaccugcccccaaauguau

SEQ ID NO: 636382 - RNA, 22 nt, Artificial Sequence
  Synthetic
uuaaaccugcccccaaauguau

SEQ ID NO: 636383 - RNA, 23 nt, Artificial Sequence
  Synthetic
cuuaaaccugcccccaaauguau

SEQ ID NO: 636384 - RNA, 24 nt, Artificial Sequence
  Synthetic
ccuuaaaccugcccccaaauguau

SEQ ID NO: 636385 - RNA, 18 nt, Artificial Sequence
  Synthetic
ccagcauaaacaauguau

SEQ ID NO: 636386 - RNA, 19 nt, Artificial Sequence
  Synthetic
uccagcauaaacaauguau

SEQ ID NO: 636387 - RNA, 20 nt, Artificial Sequence
  Synthetic
cuccagcauaaacaauguau

SEQ ID NO: 636388 - RNA, 21 nt, Artificial Sequence
  Synthetic
acuccagcauaaacaauguau

SEQ ID NO: 636389 - RNA, 22 nt, Artificial Sequence
  Synthetic
cacuccagcauaaacaauguau

SEQ ID NO: 636390 - RNA, 23 nt, Artificial Sequence
  Synthetic
ucacuccagcauaaacaauguau

SEQ ID NO: 636391 - RNA, 24 nt, Artificial Sequence
  Synthetic
uucacuccagcauaaacaauguau

SEQ ID NO: 636392 - RNA, 18 nt, Artificial Sequence
  Synthetic
ucuaauauuucaauguau

SEQ ID NO: 636393 - RNA, 19 nt, Artificial Sequence
  Synthetic
aucuaauauuucaauguau

SEQ ID NO: 636394 - RNA, 20 nt, Artificial Sequence
  Synthetic
uaucuaauauuucaauguau

SEQ ID NO: 636395 - RNA, 21 nt, Artificial Sequence
  Synthetic
uuaucuaauauuucaauguau

SEQ ID NO: 636396 - RNA, 22 nt, Artificial Sequence
  Synthetic
auuaucuaauauuucaauguau

SEQ ID NO: 636397 - RNA, 23 nt, Artificial Sequence
  Synthetic
aauuaucuaauauuucaauguau

SEQ ID NO: 636398 - RNA, 24 nt, Artificial Sequence
  Synthetic
gaauuaucuaauauuucaauguau

SEQ ID NO: 636399 - RNA, 18 nt, Artificial Sequence
  Synthetic
gagcaugucugaauguau

SEQ ID NO: 636400 - RNA, 19 nt, Artificial Sequence
  Synthetic
agagcaugucugaauguau

SEQ ID NO: 636401 - RNA, 20 nt, Artificial Sequence
  Synthetic
cagagcaugucugaauguau

SEQ ID NO: 636402 - RNA, 21 nt, Artificial Sequence
  Synthetic
gcagagcaugucugaauguau

SEQ ID NO: 636403 - RNA, 22 nt, Artificial Sequence
  Synthetic
ugcagagcaugucugaauguau

SEQ ID NO: 636404 - RNA, 23 nt, Artificial Sequence
  Synthetic
gugcagagcaugucugaauguau

SEQ ID NO: 636405 - RNA, 24 nt, Artificial Sequence
  Synthetic
agugcagagcaugucugaauguau

SEQ ID NO: 636406 - RNA, 18 nt, Artificial Sequence
  Synthetic
ucaaaugagcuaauguau

SEQ ID NO: 636407 - RNA, 19 nt, Artificial Sequence
  Synthetic
cucaaaugagcuaauguau

SEQ ID NO: 636408 - RNA, 20 nt, Artificial Sequence
  Synthetic
acucaaaugagcuaauguau

SEQ ID NO: 636409 - RNA, 21 nt, Artificial Sequence
  Synthetic
gacucaaaugagcuaauguau

SEQ ID NO: 636410 - RNA, 22 nt, Artificial Sequence
  Synthetic
ugacucaaaugagcuaauguau

SEQ ID NO: 636411 - RNA, 23 nt, Artificial Sequence
  Synthetic
gugacucaaaugagcuaauguau

SEQ ID NO: 636412 - RNA, 24 nt, Artificial Sequence
  Synthetic
ugugacucaaaugagcuaauguau

SEQ ID NO: 636413 - RNA, 18 nt, Artificial Sequence
  Synthetic
ugguagauaguaauguau

SEQ ID NO: 636414 - RNA, 19 nt, Artificial Sequence
  Synthetic
gugguagauaguaauguau

SEQ ID NO: 636415 - RNA, 20 nt, Artificial Sequence
  Synthetic
agugguagauaguaauguau

SEQ ID NO: 636416 - RNA, 21 nt, Artificial Sequence
  Synthetic
aagugguagauaguaauguau

SEQ ID NO: 636417 - RNA, 22 nt, Artificial Sequence
  Synthetic
aaagugguagauaguaauguau

SEQ ID NO: 636418 - RNA, 23 nt, Artificial Sequence
  Synthetic
gaaagugguagauaguaauguau

SEQ ID NO: 636419 - RNA, 24 nt, Artificial Sequence
  Synthetic
ugaaagugguagauaguaauguau

SEQ ID NO: 636420 - RNA, 18 nt, Artificial Sequence
  Synthetic
acucuuuuguuaauguau

SEQ ID NO: 636421 - RNA, 19 nt, Artificial Sequence
  Synthetic
uacucuuuuguuaauguau

SEQ ID NO: 636422 - RNA, 20 nt, Artificial Sequence
  Synthetic
uuacucuuuuguuaauguau

SEQ ID NO: 636423 - RNA, 21 nt, Artificial Sequence
  Synthetic
guuacucuuuuguuaauguau

SEQ ID NO: 636424 - RNA, 22 nt, Artificial Sequence
  Synthetic
aguuacucuuuuguuaauguau

SEQ ID NO: 636425 - RNA, 23 nt, Artificial Sequence
  Synthetic
aaguuacucuuuuguuaauguau

SEQ ID NO: 636426 - RNA, 24 nt, Artificial Sequence
  Synthetic
aaaguuacucuuuuguuaauguau

SEQ ID NO: 636427 - RNA, 18 nt, Artificial Sequence
  Synthetic
aaguucaauuuaauguau

SEQ ID NO: 636428 - RNA, 19 nt, Artificial Sequence
  Synthetic
caaguucaauuuaauguau

SEQ ID NO: 636429 - RNA, 20 nt, Artificial Sequence
  Synthetic
acaaguucaauuuaauguau

SEQ ID NO: 636430 - RNA, 21 nt, Artificial Sequence
  Synthetic
uacaaguucaauuuaauguau

SEQ ID NO: 636431 - RNA, 22 nt, Artificial Sequence
  Synthetic
uuacaaguucaauuuaauguau

SEQ ID NO: 636432 - RNA, 23 nt, Artificial Sequence
  Synthetic
uuuacaaguucaauuuaauguau

SEQ ID NO: 636433 - RNA, 24 nt, Artificial Sequence
  Synthetic
auuuacaaguucaauuuaauguau

SEQ ID NO: 636434 - RNA, 18 nt, Artificial Sequence
  Synthetic
ucuaaauacaacauguau

SEQ ID NO: 636435 - RNA, 19 nt, Artificial Sequence
  Synthetic
uucuaaauacaacauguau

SEQ ID NO: 636436 - RNA, 20 nt, Artificial Sequence
  Synthetic
auucuaaauacaacauguau

SEQ ID NO: 636437 - RNA, 21 nt, Artificial Sequence
  Synthetic
aauucuaaauacaacauguau

SEQ ID NO: 636438 - RNA, 22 nt, Artificial Sequence
  Synthetic
gaauucuaaauacaacauguau

SEQ ID NO: 636439 - RNA, 23 nt, Artificial Sequence
  Synthetic
ggaauucuaaauacaacauguau

SEQ ID NO: 636440 - RNA, 24 nt, Artificial Sequence
  Synthetic
gggaauucuaaauacaacauguau

SEQ ID NO: 636441 - RNA, 18 nt, Artificial Sequence
  Synthetic
ucaauucuccccauguau

SEQ ID NO: 636442 - RNA, 19 nt, Artificial Sequence
  Synthetic
uucaauucuccccauguau

SEQ ID NO: 636443 - RNA, 20 nt, Artificial Sequence
  Synthetic
cuucaauucuccccauguau

SEQ ID NO: 636444 - RNA, 21 nt, Artificial Sequence
  Synthetic
gcuucaauucuccccauguau

SEQ ID NO: 636445 - RNA, 22 nt, Artificial Sequence
  Synthetic
ugcuucaauucuccccauguau

SEQ ID NO: 636446 - RNA, 23 nt, Artificial Sequence
  Synthetic
cugcuucaauucuccccauguau

SEQ ID NO: 636447 - RNA, 24 nt, Artificial Sequence
  Synthetic
acugcuucaauucuccccauguau

SEQ ID NO: 636448 - RNA, 18 nt, Artificial Sequence
  Synthetic
cacuggacaugcauguau

SEQ ID NO: 636449 - RNA, 19 nt, Artificial Sequence
  Synthetic
ccacuggacaugcauguau

SEQ ID NO: 636450 - RNA, 20 nt, Artificial Sequence
  Synthetic
cccacuggacaugcauguau

SEQ ID NO: 636451 - RNA, 21 nt, Artificial Sequence
  Synthetic
ucccacuggacaugcauguau

SEQ ID NO: 636452 - RNA, 22 nt, Artificial Sequence
  Synthetic
aucccacuggacaugcauguau

SEQ ID NO: 636453 - RNA, 23 nt, Artificial Sequence
  Synthetic
uaucccacuggacaugcauguau

SEQ ID NO: 636454 - RNA, 24 nt, Artificial Sequence
  Synthetic
auaucccacuggacaugcauguau

SEQ ID NO: 636455 - RNA, 18 nt, Artificial Sequence
  Synthetic
gacaugauaaucauguau

SEQ ID NO: 636456 - RNA, 19 nt, Artificial Sequence
  Synthetic
agacaugauaaucauguau

SEQ ID NO: 636457 - RNA, 20 nt, Artificial Sequence
  Synthetic
aagacaugauaaucauguau

SEQ ID NO: 636458 - RNA, 21 nt, Artificial Sequence
  Synthetic
aaagacaugauaaucauguau

SEQ ID NO: 636459 - RNA, 22 nt, Artificial Sequence
  Synthetic
aaaagacaugauaaucauguau

SEQ ID NO: 636460 - RNA, 23 nt, Artificial Sequence
  Synthetic
caaaagacaugauaaucauguau

SEQ ID NO: 636461 - RNA, 24 nt, Artificial Sequence
  Synthetic
ucaaaagacaugauaaucauguau

SEQ ID NO: 636462 - RNA, 18 nt, Artificial Sequence
  Synthetic
cauuuuugcuucauguau

SEQ ID NO: 636463 - RNA, 19 nt, Artificial Sequence
  Synthetic
ucauuuuugcuucauguau

SEQ ID NO: 636464 - RNA, 20 nt, Artificial Sequence
  Synthetic
uucauuuuugcuucauguau

SEQ ID NO: 636465 - RNA, 21 nt, Artificial Sequence
  Synthetic
auucauuuuugcuucauguau

SEQ ID NO: 636466 - RNA, 22 nt, Artificial Sequence
  Synthetic
uauucauuuuugcuucauguau

SEQ ID NO: 636467 - RNA, 23 nt, Artificial Sequence
  Synthetic
cuauucauuuuugcuucauguau

SEQ ID NO: 636468 - RNA, 24 nt, Artificial Sequence
  Synthetic
ucuauucauuuuugcuucauguau

SEQ ID NO: 636469 - RNA, 18 nt, Artificial Sequence
  Synthetic
augguugaugagauguau

SEQ ID NO: 636470 - RNA, 19 nt, Artificial Sequence
  Synthetic
caugguugaugagauguau

SEQ ID NO: 636471 - RNA, 20 nt, Artificial Sequence
  Synthetic
acaugguugaugagauguau

SEQ ID NO: 636472 - RNA, 21 nt, Artificial Sequence
  Synthetic
gacaugguugaugagauguau

SEQ ID NO: 636473 - RNA, 22 nt, Artificial Sequence
  Synthetic
agacaugguugaugagauguau

SEQ ID NO: 636474 - RNA, 23 nt, Artificial Sequence
  Synthetic
aagacaugguugaugagauguau

SEQ ID NO: 636475 - RNA, 24 nt, Artificial Sequence
  Synthetic
uaagacaugguugaugagauguau

SEQ ID NO: 636476 - RNA, 18 nt, Artificial Sequence
  Synthetic
cuagauagaaauauguau

SEQ ID NO: 636477 - RNA, 19 nt, Artificial Sequence
  Synthetic
acuagauagaaauauguau

SEQ ID NO: 636478 - RNA, 20 nt, Artificial Sequence
  Synthetic
aacuagauagaaauauguau

SEQ ID NO: 636479 - RNA, 21 nt, Artificial Sequence
  Synthetic
uaacuagauagaaauauguau

SEQ ID NO: 636480 - RNA, 22 nt, Artificial Sequence
  Synthetic
uuaacuagauagaaauauguau

SEQ ID NO: 636481 - RNA, 23 nt, Artificial Sequence
  Synthetic
uuuaacuagauagaaauauguau

SEQ ID NO: 636482 - RNA, 24 nt, Artificial Sequence
  Synthetic
auuuaacuagauagaaauauguau

SEQ ID NO: 636483 - RNA, 18 nt, Artificial Sequence
  Synthetic
aaaaugcauaauauguau

SEQ ID NO: 636484 - RNA, 19 nt, Artificial Sequence
  Synthetic
aaaaaugcauaauauguau

SEQ ID NO: 636485 - RNA, 20 nt, Artificial Sequence
  Synthetic
aaaaaaugcauaauauguau

SEQ ID NO: 636486 - RNA, 21 nt, Artificial Sequence
  Synthetic
uaaaaaaugcauaauauguau

SEQ ID NO: 636487 - RNA, 22 nt, Artificial Sequence
  Synthetic
uuaaaaaaugcauaauauguau

SEQ ID NO: 636488 - RNA, 23 nt, Artificial Sequence
  Synthetic
uuuaaaaaaugcauaauauguau

SEQ ID NO: 636489 - RNA, 24 nt, Artificial Sequence
  Synthetic
guuuaaaaaaugcauaauauguau

SEQ ID NO: 636490 - RNA, 18 nt, Artificial Sequence
  Synthetic
uuagaagaauauauguau

SEQ ID NO: 636491 - RNA, 19 nt, Artificial Sequence
  Synthetic
uuuagaagaauauauguau

SEQ ID NO: 636492 - RNA, 20 nt, Artificial Sequence
  Synthetic
auuuagaagaauauauguau

SEQ ID NO: 636493 - RNA, 21 nt, Artificial Sequence
  Synthetic
aauuuagaagaauauauguau

SEQ ID NO: 636494 - RNA, 22 nt, Artificial Sequence
  Synthetic
caauuuagaagaauauauguau

SEQ ID NO: 636495 - RNA, 23 nt, Artificial Sequence
  Synthetic
acaauuuagaagaauauauguau

SEQ ID NO: 636496 - RNA, 24 nt, Artificial Sequence
  Synthetic
uacaauuuagaagaauauauguau

SEQ ID NO: 636497 - RNA, 18 nt, Artificial Sequence
  Synthetic
ggacucauauauauguau

SEQ ID NO: 636498 - RNA, 19 nt, Artificial Sequence
  Synthetic
uggacucauauauauguau

SEQ ID NO: 636499 - RNA, 20 nt, Artificial Sequence
  Synthetic
guggacucauauauauguau

SEQ ID NO: 636500 - RNA, 21 nt, Artificial Sequence
  Synthetic
uguggacucauauauauguau

SEQ ID NO: 636501 - RNA, 22 nt, Artificial Sequence
  Synthetic
auguggacucauauauauguau

SEQ ID NO: 636502 - RNA, 23 nt, Artificial Sequence
  Synthetic
aauguggacucauauauauguau

SEQ ID NO: 636503 - RNA, 24 nt, Artificial Sequence
  Synthetic
gaauguggacucauauauauguau

SEQ ID NO: 636504 - RNA, 18 nt, Artificial Sequence
  Synthetic
caaaagguaccuauguau

SEQ ID NO: 636505 - RNA, 19 nt, Artificial Sequence
  Synthetic
acaaaagguaccuauguau

SEQ ID NO: 636506 - RNA, 20 nt, Artificial Sequence
  Synthetic
uacaaaagguaccuauguau

SEQ ID NO: 636507 - RNA, 21 nt, Artificial Sequence
  Synthetic
uuacaaaagguaccuauguau

SEQ ID NO: 636508 - RNA, 22 nt, Artificial Sequence
  Synthetic
cuuacaaaagguaccuauguau

SEQ ID NO: 636509 - RNA, 23 nt, Artificial Sequence
  Synthetic
acuuacaaaagguaccuauguau

SEQ ID NO: 636510 - RNA, 24 nt, Artificial Sequence
  Synthetic
uacuuacaaaagguaccuauguau

SEQ ID NO: 636511 - RNA, 18 nt, Artificial Sequence
  Synthetic
uaaauacagaguauguau

SEQ ID NO: 636512 - RNA, 19 nt, Artificial Sequence
  Synthetic
auaaauacagaguauguau

SEQ ID NO: 636513 - RNA, 20 nt, Artificial Sequence
  Synthetic
uauaaauacagaguauguau

SEQ ID NO: 636514 - RNA, 21 nt, Artificial Sequence
  Synthetic
auauaaauacagaguauguau

SEQ ID NO: 636515 - RNA, 22 nt, Artificial Sequence
  Synthetic
gauauaaauacagaguauguau

SEQ ID NO: 636516 - RNA, 23 nt, Artificial Sequence
  Synthetic
ugauauaaauacagaguauguau

SEQ ID NO: 636517 - RNA, 24 nt, Artificial Sequence
  Synthetic
cugauauaaauacagaguauguau

SEQ ID NO: 636518 - RNA, 18 nt, Artificial Sequence
  Synthetic
gccaacauggguauguau

SEQ ID NO: 636519 - RNA, 19 nt, Artificial Sequence
  Synthetic
ggccaacauggguauguau

SEQ ID NO: 636520 - RNA, 20 nt, Artificial Sequence
  Synthetic
aggccaacauggguauguau

SEQ ID NO: 636521 - RNA, 21 nt, Artificial Sequence
  Synthetic
gaggccaacauggguauguau

SEQ ID NO: 636522 - RNA, 22 nt, Artificial Sequence
  Synthetic
ugaggccaacauggguauguau

SEQ ID NO: 636523 - RNA, 23 nt, Artificial Sequence
  Synthetic
uugaggccaacauggguauguau

SEQ ID NO: 636524 - RNA, 24 nt, Artificial Sequence
  Synthetic
auugaggccaacauggguauguau

SEQ ID NO: 636525 - RNA, 18 nt, Artificial Sequence
  Synthetic
ggcuucagauguauguau

SEQ ID NO: 636526 - RNA, 19 nt, Artificial Sequence
  Synthetic
uggcuucagauguauguau

SEQ ID NO: 636527 - RNA, 20 nt, Artificial Sequence
  Synthetic
uuggcuucagauguauguau

SEQ ID NO: 636528 - RNA, 21 nt, Artificial Sequence
  Synthetic
auuggcuucagauguauguau

SEQ ID NO: 636529 - RNA, 22 nt, Artificial Sequence
  Synthetic
gauuggcuucagauguauguau

SEQ ID NO: 636530 - RNA, 23 nt, Artificial Sequence
  Synthetic
agauuggcuucagauguauguau

SEQ ID NO: 636531 - RNA, 24 nt, Artificial Sequence
  Synthetic
cagauuggcuucagauguauguau

SEQ ID NO: 636532 - RNA, 18 nt, Artificial Sequence
  Synthetic
uauaacaguuguauguau

SEQ ID NO: 636533 - RNA, 19 nt, Artificial Sequence
  Synthetic
auauaacaguuguauguau

SEQ ID NO: 636534 - RNA, 20 nt, Artificial Sequence
  Synthetic
uauauaacaguuguauguau

SEQ ID NO: 636535 - RNA, 21 nt, Artificial Sequence
  Synthetic
auauauaacaguuguauguau

SEQ ID NO: 636536 - RNA, 22 nt, Artificial Sequence
  Synthetic
gauauauaacaguuguauguau

SEQ ID NO: 636537 - RNA, 23 nt, Artificial Sequence
  Synthetic
ugauauauaacaguuguauguau

SEQ ID NO: 636538 - RNA, 24 nt, Artificial Sequence
  Synthetic
gugauauauaacaguuguauguau

SEQ ID NO: 636539 - RNA, 18 nt, Artificial Sequence
  Synthetic
ggcucuaugccacuguau

SEQ ID NO: 636540 - RNA, 19 nt, Artificial Sequence
  Synthetic
gggcucuaugccacuguau

SEQ ID NO: 636541 - RNA, 20 nt, Artificial Sequence
  Synthetic
ugggcucuaugccacuguau

SEQ ID NO: 636542 - RNA, 21 nt, Artificial Sequence
  Synthetic
cugggcucuaugccacuguau

SEQ ID NO: 636543 - RNA, 22 nt, Artificial Sequence
  Synthetic
acugggcucuaugccacuguau

SEQ ID NO: 636544 - RNA, 23 nt, Artificial Sequence
  Synthetic
aacugggcucuaugccacuguau

SEQ ID NO: 636545 - RNA, 24 nt, Artificial Sequence
  Synthetic
aaacugggcucuaugccacuguau

SEQ ID NO: 636546 - RNA, 18 nt, Artificial Sequence
  Synthetic
aguaacacaucacuguau

SEQ ID NO: 636547 - RNA, 19 nt, Artificial Sequence
  Synthetic
aaguaacacaucacuguau

SEQ ID NO: 636548 - RNA, 20 nt, Artificial Sequence
  Synthetic
aaaguaacacaucacuguau

SEQ ID NO: 636549 - RNA, 21 nt, Artificial Sequence
  Synthetic
aaaaguaacacaucacuguau

SEQ ID NO: 636550 - RNA, 22 nt, Artificial Sequence
  Synthetic
aaaaaguaacacaucacuguau

SEQ ID NO: 636551 - RNA, 23 nt, Artificial Sequence
  Synthetic
caaaaaguaacacaucacuguau

SEQ ID NO: 636552 - RNA, 24 nt, Artificial Sequence
  Synthetic
ucaaaaaguaacacaucacuguau

SEQ ID NO: 636553 - RNA, 18 nt, Artificial Sequence
  Synthetic
ggauugcaucuacuguau

SEQ ID NO: 636554 - RNA, 19 nt, Artificial Sequence
  Synthetic
uggauugcaucuacuguau

SEQ ID NO: 636555 - RNA, 20 nt, Artificial Sequence
  Synthetic
uuggauugcaucuacuguau

SEQ ID NO: 636556 - RNA, 21 nt, Artificial Sequence
  Synthetic
uuuggauugcaucuacuguau

SEQ ID NO: 636557 - RNA, 22 nt, Artificial Sequence
  Synthetic
uuuuggauugcaucuacuguau

SEQ ID NO: 636558 - RNA, 23 nt, Artificial Sequence
  Synthetic
cuuuuggauugcaucuacuguau

SEQ ID NO: 636559 - RNA, 24 nt, Artificial Sequence
  Synthetic
ucuuuuggauugcaucuacuguau

SEQ ID NO: 636560 - RNA, 18 nt, Artificial Sequence
  Synthetic
uaucaacauauccuguau

SEQ ID NO: 636561 - RNA, 19 nt, Artificial Sequence
  Synthetic
auaucaacauauccuguau

SEQ ID NO: 636562 - RNA, 20 nt, Artificial Sequence
  Synthetic
aauaucaacauauccuguau

SEQ ID NO: 636563 - RNA, 21 nt, Artificial Sequence
  Synthetic
uaauaucaacauauccuguau

SEQ ID NO: 636564 - RNA, 22 nt, Artificial Sequence
  Synthetic
cuaauaucaacauauccuguau

SEQ ID NO: 636565 - RNA, 23 nt, Artificial Sequence
  Synthetic
ucuaauaucaacauauccuguau

SEQ ID NO: 636566 - RNA, 24 nt, Artificial Sequence
  Synthetic
uucuaauaucaacauauccuguau

SEQ ID NO: 636567 - RNA, 18 nt, Artificial Sequence
  Synthetic
auuuuggguaaucuguau

SEQ ID NO: 636568 - RNA, 19 nt, Artificial Sequence
  Synthetic
uauuuuggguaaucuguau

SEQ ID NO: 636569 - RNA, 20 nt, Artificial Sequence
  Synthetic
auauuuuggguaaucuguau

SEQ ID NO: 636570 - RNA, 21 nt, Artificial Sequence
  Synthetic
uauauuuuggguaaucuguau

SEQ ID NO: 636571 - RNA, 22 nt, Artificial Sequence
  Synthetic
uuauauuuuggguaaucuguau

SEQ ID NO: 636572 - RNA, 23 nt, Artificial Sequence
  Synthetic
uuuauauuuuggguaaucuguau

SEQ ID NO: 636573 - RNA, 24 nt, Artificial Sequence
  Synthetic
uuuuauauuuuggguaaucuguau

SEQ ID NO: 636574 - RNA, 18 nt, Artificial Sequence
  Synthetic
cauaugaaucaucuguau

SEQ ID NO: 636575 - RNA, 19 nt, Artificial Sequence
  Synthetic
acauaugaaucaucuguau

SEQ ID NO: 636576 - RNA, 20 nt, Artificial Sequence
  Synthetic
uacauaugaaucaucuguau

SEQ ID NO: 636577 - RNA, 21 nt, Artificial Sequence
  Synthetic
auacauaugaaucaucuguau

SEQ ID NO: 636578 - RNA, 22 nt, Artificial Sequence
  Synthetic
aauacauaugaaucaucuguau

SEQ ID NO: 636579 - RNA, 23 nt, Artificial Sequence
  Synthetic
aaauacauaugaaucaucuguau

SEQ ID NO: 636580 - RNA, 24 nt, Artificial Sequence
  Synthetic
uaaauacauaugaaucaucuguau

SEQ ID NO: 636581 - RNA, 18 nt, Artificial Sequence
  Synthetic
ggccaucuuuaucuguau

SEQ ID NO: 636582 - RNA, 19 nt, Artificial Sequence
  Synthetic
uggccaucuuuaucuguau

SEQ ID NO: 636583 - RNA, 20 nt, Artificial Sequence
  Synthetic
uuggccaucuuuaucuguau

SEQ ID NO: 636584 - RNA, 21 nt, Artificial Sequence
  Synthetic
uuuggccaucuuuaucuguau

SEQ ID NO: 636585 - RNA, 22 nt, Artificial Sequence
  Synthetic
cuuuggccaucuuuaucuguau

SEQ ID NO: 636586 - RNA, 23 nt, Artificial Sequence
  Synthetic
gcuuuggccaucuuuaucuguau

SEQ ID NO: 636587 - RNA, 24 nt, Artificial Sequence
  Synthetic
agcuuuggccaucuuuaucuguau

SEQ ID NO: 636588 - RNA, 18 nt, Artificial Sequence
  Synthetic
accacaaauaaaguguau

SEQ ID NO: 636589 - RNA, 19 nt, Artificial Sequence
  Synthetic
caccacaaauaaaguguau

SEQ ID NO: 636590 - RNA, 20 nt, Artificial Sequence
  Synthetic
ucaccacaaauaaaguguau

SEQ ID NO: 636591 - RNA, 21 nt, Artificial Sequence
  Synthetic
cucaccacaaauaaaguguau

SEQ ID NO: 636592 - RNA, 22 nt, Artificial Sequence
  Synthetic
ucucaccacaaauaaaguguau

SEQ ID NO: 636593 - RNA, 23 nt, Artificial Sequence
  Synthetic
uucucaccacaaauaaaguguau

SEQ ID NO: 636594 - RNA, 24 nt, Artificial Sequence
  Synthetic
guucucaccacaaauaaaguguau

SEQ ID NO: 636595 - RNA, 18 nt, Artificial Sequence
  Synthetic
aagggaagauaaguguau

SEQ ID NO: 636596 - RNA, 19 nt, Artificial Sequence
  Synthetic
caagggaagauaaguguau

SEQ ID NO: 636597 - RNA, 20 nt, Artificial Sequence
  Synthetic
ccaagggaagauaaguguau

SEQ ID NO: 636598 - RNA, 21 nt, Artificial Sequence
  Synthetic
cccaagggaagauaaguguau

SEQ ID NO: 636599 - RNA, 22 nt, Artificial Sequence
  Synthetic
acccaagggaagauaaguguau

SEQ ID NO: 636600 - RNA, 23 nt, Artificial Sequence
  Synthetic
aacccaagggaagauaaguguau

SEQ ID NO: 636601 - RNA, 24 nt, Artificial Sequence
  Synthetic
gaacccaagggaagauaaguguau

SEQ ID NO: 636602 - RNA, 18 nt, Artificial Sequence
  Synthetic
aaacauuuuugaguguau

SEQ ID NO: 636603 - RNA, 19 nt, Artificial Sequence
  Synthetic
aaaacauuuuugaguguau

SEQ ID NO: 636604 - RNA, 20 nt, Artificial Sequence
  Synthetic
aaaaacauuuuugaguguau

SEQ ID NO: 636605 - RNA, 21 nt, Artificial Sequence
  Synthetic
aaaaaacauuuuugaguguau

SEQ ID NO: 636606 - RNA, 22 nt, Artificial Sequence
  Synthetic
gaaaaaacauuuuugaguguau

SEQ ID NO: 636607 - RNA, 23 nt, Artificial Sequence
  Synthetic
ugaaaaaacauuuuugaguguau

SEQ ID NO: 636608 - RNA, 24 nt, Artificial Sequence
  Synthetic
augaaaaaacauuuuugaguguau

SEQ ID NO: 636609 - RNA, 18 nt, Artificial Sequence
  Synthetic
cguuuacaucuaguguau

SEQ ID NO: 636610 - RNA, 19 nt, Artificial Sequence
  Synthetic
acguuuacaucuaguguau

SEQ ID NO: 636611 - RNA, 20 nt, Artificial Sequence
  Synthetic
aacguuuacaucuaguguau

SEQ ID NO: 636612 - RNA, 21 nt, Artificial Sequence
  Synthetic
caacguuuacaucuaguguau

SEQ ID NO: 636613 - RNA, 22 nt, Artificial Sequence
  Synthetic
gcaacguuuacaucuaguguau

SEQ ID NO: 636614 - RNA, 23 nt, Artificial Sequence
  Synthetic
ggcaacguuuacaucuaguguau

SEQ ID NO: 636615 - RNA, 24 nt, Artificial Sequence
  Synthetic
uggcaacguuuacaucuaguguau

SEQ ID NO: 636616 - RNA, 18 nt, Artificial Sequence
  Synthetic
gccugcuguuugguguau

SEQ ID NO: 636617 - RNA, 19 nt, Artificial Sequence
  Synthetic
ugccugcuguuugguguau

SEQ ID NO: 636618 - RNA, 20 nt, Artificial Sequence
  Synthetic
gugccugcuguuugguguau

SEQ ID NO: 636619 - RNA, 21 nt, Artificial Sequence
  Synthetic
ggugccugcuguuugguguau

SEQ ID NO: 636620 - RNA, 22 nt, Artificial Sequence
  Synthetic
uggugccugcuguuugguguau

SEQ ID NO: 636621 - RNA, 23 nt, Artificial Sequence
  Synthetic
cuggugccugcuguuugguguau

SEQ ID NO: 636622 - RNA, 24 nt, Artificial Sequence
  Synthetic
gcuggugccugcuguuugguguau

SEQ ID NO: 636623 - RNA, 18 nt, Artificial Sequence
  Synthetic
aaauuaacaaauguguau

SEQ ID NO: 636624 - RNA, 19 nt, Artificial Sequence
  Synthetic
caaauuaacaaauguguau

SEQ ID NO: 636625 - RNA, 20 nt, Artificial Sequence
  Synthetic
ucaaauuaacaaauguguau

SEQ ID NO: 636626 - RNA, 21 nt, Artificial Sequence
  Synthetic
uucaaauuaacaaauguguau

SEQ ID NO: 636627 - RNA, 22 nt, Artificial Sequence
  Synthetic
cuucaaauuaacaaauguguau

SEQ ID NO: 636628 - RNA, 23 nt, Artificial Sequence
  Synthetic
gcuucaaauuaacaaauguguau

SEQ ID NO: 636629 - RNA, 24 nt, Artificial Sequence
  Synthetic
ugcuucaaauuaacaaauguguau

SEQ ID NO: 636630 - RNA, 18 nt, Artificial Sequence
  Synthetic
guuauguaccauguguau

SEQ ID NO: 636631 - RNA, 19 nt, Artificial Sequence
  Synthetic
uguuauguaccauguguau

SEQ ID NO: 636632 - RNA, 20 nt, Artificial Sequence
  Synthetic
cuguuauguaccauguguau

SEQ ID NO: 636633 - RNA, 21 nt, Artificial Sequence
  Synthetic
acuguuauguaccauguguau

SEQ ID NO: 636634 - RNA, 22 nt, Artificial Sequence
  Synthetic
uacuguuauguaccauguguau

SEQ ID NO: 636635 - RNA, 23 nt, Artificial Sequence
  Synthetic
cuacuguuauguaccauguguau

SEQ ID NO: 636636 - RNA, 24 nt, Artificial Sequence
  Synthetic
ccuacuguuauguaccauguguau

SEQ ID NO: 636637 - RNA, 18 nt, Artificial Sequence
  Synthetic
uuucagcuuucuguguau

SEQ ID NO: 636638 - RNA, 19 nt, Artificial Sequence
  Synthetic
cuuucagcuuucuguguau

SEQ ID NO: 636639 - RNA, 20 nt, Artificial Sequence
  Synthetic
ucuuucagcuuucuguguau

SEQ ID NO: 636640 - RNA, 21 nt, Artificial Sequence
  Synthetic
uucuuucagcuuucuguguau

SEQ ID NO: 636641 - RNA, 22 nt, Artificial Sequence
  Synthetic
auucuuucagcuuucuguguau

SEQ ID NO: 636642 - RNA, 23 nt, Artificial Sequence
  Synthetic
aauucuuucagcuuucuguguau

SEQ ID NO: 636643 - RNA, 24 nt, Artificial Sequence
  Synthetic
caauucuuucagcuuucuguguau

SEQ ID NO: 636644 - RNA, 18 nt, Artificial Sequence
  Synthetic
ucaaacuauaguguguau

SEQ ID NO: 636645 - RNA, 19 nt, Artificial Sequence
  Synthetic
cucaaacuauaguguguau

SEQ ID NO: 636646 - RNA, 20 nt, Artificial Sequence
  Synthetic
ucucaaacuauaguguguau

SEQ ID NO: 636647 - RNA, 21 nt, Artificial Sequence
  Synthetic
gucucaaacuauaguguguau

SEQ ID NO: 636648 - RNA, 22 nt, Artificial Sequence
  Synthetic
ggucucaaacuauaguguguau

SEQ ID NO: 636649 - RNA, 23 nt, Artificial Sequence
  Synthetic
gggucucaaacuauaguguguau

SEQ ID NO: 636650 - RNA, 24 nt, Artificial Sequence
  Synthetic
ugggucucaaacuauaguguguau

SEQ ID NO: 636651 - RNA, 18 nt, Artificial Sequence
  Synthetic
aggaacacacguguguau

SEQ ID NO: 636652 - RNA, 19 nt, Artificial Sequence
  Synthetic
caggaacacacguguguau

SEQ ID NO: 636653 - RNA, 20 nt, Artificial Sequence
  Synthetic
ucaggaacacacguguguau

SEQ ID NO: 636654 - RNA, 21 nt, Artificial Sequence
  Synthetic
uucaggaacacacguguguau

SEQ ID NO: 636655 - RNA, 22 nt, Artificial Sequence
  Synthetic
uuucaggaacacacguguguau

SEQ ID NO: 636656 - RNA, 23 nt, Artificial Sequence
  Synthetic
cuuucaggaacacacguguguau

SEQ ID NO: 636657 - RNA, 24 nt, Artificial Sequence
  Synthetic
ucuuucaggaacacacguguguau

SEQ ID NO: 636658 - RNA, 18 nt, Artificial Sequence
  Synthetic
cucaagugguguguguau

SEQ ID NO: 636659 - RNA, 19 nt, Artificial Sequence
  Synthetic
ucucaagugguguguguau

SEQ ID NO: 636660 - RNA, 20 nt, Artificial Sequence
  Synthetic
gucucaagugguguguguau

SEQ ID NO: 636661 - RNA, 21 nt, Artificial Sequence
  Synthetic
ggucucaagugguguguguau

SEQ ID NO: 636662 - RNA, 22 nt, Artificial Sequence
  Synthetic
gggucucaagugguguguguau

SEQ ID NO: 636663 - RNA, 23 nt, Artificial Sequence
  Synthetic
ggggucucaagugguguguguau

SEQ ID NO: 636664 - RNA, 24 nt, Artificial Sequence
  Synthetic
uggggucucaagugguguguguau

SEQ ID NO: 636665 - RNA, 18 nt, Artificial Sequence
  Synthetic
aacaaaguguguguguau

SEQ ID NO: 636666 - RNA, 19 nt, Artificial Sequence
  Synthetic
gaacaaaguguguguguau

SEQ ID NO: 636667 - RNA, 20 nt, Artificial Sequence
  Synthetic
agaacaaaguguguguguau

SEQ ID NO: 636668 - RNA, 21 nt, Artificial Sequence
  Synthetic
aagaacaaaguguguguguau

SEQ ID NO: 636669 - RNA, 22 nt, Artificial Sequence
  Synthetic
gaagaacaaaguguguguguau

SEQ ID NO: 636670 - RNA, 23 nt, Artificial Sequence
  Synthetic
ugaagaacaaaguguguguguau

SEQ ID NO: 636671 - RNA, 24 nt, Artificial Sequence
  Synthetic
augaagaacaaaguguguguguau

SEQ ID NO: 636672 - RNA, 18 nt, Artificial Sequence
  Synthetic
uuuauauccaaauuguau

SEQ ID NO: 636673 - RNA, 19 nt, Artificial Sequence
  Synthetic
auuuauauccaaauuguau

SEQ ID NO: 636674 - RNA, 20 nt, Artificial Sequence
  Synthetic
gauuuauauccaaauuguau

SEQ ID NO: 636675 - RNA, 21 nt, Artificial Sequence
  Synthetic
ugauuuauauccaaauuguau

SEQ ID NO: 636676 - RNA, 22 nt, Artificial Sequence
  Synthetic
augauuuauauccaaauuguau

SEQ ID NO: 636677 - RNA, 23 nt, Artificial Sequence
  Synthetic
aaugauuuauauccaaauuguau

SEQ ID NO: 636678 - RNA, 24 nt, Artificial Sequence
  Synthetic
uaaugauuuauauccaaauuguau

SEQ ID NO: 636679 - RNA, 18 nt, Artificial Sequence
  Synthetic
uacaauauggacuuguau

SEQ ID NO: 636680 - RNA, 19 nt, Artificial Sequence
  Synthetic
auacaauauggacuuguau

SEQ ID NO: 636681 - RNA, 20 nt, Artificial Sequence
  Synthetic
gauacaauauggacuuguau

SEQ ID NO: 636682 - RNA, 21 nt, Artificial Sequence
  Synthetic
cgauacaauauggacuuguau

SEQ ID NO: 636683 - RNA, 22 nt, Artificial Sequence
  Synthetic
acgauacaauauggacuuguau

SEQ ID NO: 636684 - RNA, 23 nt, Artificial Sequence
  Synthetic
aacgauacaauauggacuuguau

SEQ ID NO: 636685 - RNA, 24 nt, Artificial Sequence
  Synthetic
aaacgauacaauauggacuuguau

SEQ ID NO: 636686 - RNA, 18 nt, Artificial Sequence
  Synthetic
aguacuuuggucuuguau

SEQ ID NO: 636687 - RNA, 19 nt, Artificial Sequence
  Synthetic
aaguacuuuggucuuguau

SEQ ID NO: 636688 - RNA, 20 nt, Artificial Sequence
  Synthetic
aaaguacuuuggucuuguau

SEQ ID NO: 636689 - RNA, 21 nt, Artificial Sequence
  Synthetic
uaaaguacuuuggucuuguau

SEQ ID NO: 636690 - RNA, 22 nt, Artificial Sequence
  Synthetic
uuaaaguacuuuggucuuguau

SEQ ID NO: 636691 - RNA, 23 nt, Artificial Sequence
  Synthetic
uuuaaaguacuuuggucuuguau

SEQ ID NO: 636692 - RNA, 24 nt, Artificial Sequence
  Synthetic
uuuuaaaguacuuuggucuuguau

SEQ ID NO: 636693 - RNA, 18 nt, Artificial Sequence
  Synthetic
uuuuccagauucuuguau

SEQ ID NO: 636694 - RNA, 19 nt, Artificial Sequence
  Synthetic
uuuuuccagauucuuguau

SEQ ID NO: 636695 - RNA, 20 nt, Artificial Sequence
  Synthetic
uuuuuuccagauucuuguau

SEQ ID NO: 636696 - RNA, 21 nt, Artificial Sequence
  Synthetic
uuuuuuuccagauucuuguau

SEQ ID NO: 636697 - RNA, 22 nt, Artificial Sequence
  Synthetic
uuuuuuuuccagauucuuguau

SEQ ID NO: 636698 - RNA, 23 nt, Artificial Sequence
  Synthetic
uuuuuuuuuccagauucuuguau

SEQ ID NO: 636699 - RNA, 24 nt, Artificial Sequence
  Synthetic
cuuuuuuuuuccagauucuuguau

SEQ ID NO: 636700 - RNA, 18 nt, Artificial Sequence
  Synthetic
auugaaucuaaguuguau

SEQ ID NO: 636701 - RNA, 19 nt, Artificial Sequence
  Synthetic
gauugaaucuaaguuguau

SEQ ID NO: 636702 - RNA, 20 nt, Artificial Sequence
  Synthetic
ugauugaaucuaaguuguau

SEQ ID NO: 636703 - RNA, 21 nt, Artificial Sequence
  Synthetic
augauugaaucuaaguuguau

SEQ ID NO: 636704 - RNA, 22 nt, Artificial Sequence
  Synthetic
gaugauugaaucuaaguuguau

SEQ ID NO: 636705 - RNA, 23 nt, Artificial Sequence
  Synthetic
agaugauugaaucuaaguuguau

SEQ ID NO: 636706 - RNA, 24 nt, Artificial Sequence
  Synthetic
uagaugauugaaucuaaguuguau

SEQ ID NO: 636707 - RNA, 18 nt, Artificial Sequence
  Synthetic
aguggaugucaguuguau

SEQ ID NO: 636708 - RNA, 19 nt, Artificial Sequence
  Synthetic
gaguggaugucaguuguau

SEQ ID NO: 636709 - RNA, 20 nt, Artificial Sequence
  Synthetic
ggaguggaugucaguuguau

SEQ ID NO: 636710 - RNA, 21 nt, Artificial Sequence
  Synthetic
gggaguggaugucaguuguau

SEQ ID NO: 636711 - RNA, 22 nt, Artificial Sequence
  Synthetic
ugggaguggaugucaguuguau

SEQ ID NO: 636712 - RNA, 23 nt, Artificial Sequence
  Synthetic
gugggaguggaugucaguuguau

SEQ ID NO: 636713 - RNA, 24 nt, Artificial Sequence
  Synthetic
ggugggaguggaugucaguuguau

SEQ ID NO: 636714 - RNA, 18 nt, Artificial Sequence
  Synthetic
aaccuaccuagguuguau

SEQ ID NO: 636715 - RNA, 19 nt, Artificial Sequence
  Synthetic
uaaccuaccuagguuguau

SEQ ID NO: 636716 - RNA, 20 nt, Artificial Sequence
  Synthetic
uuaaccuaccuagguuguau

SEQ ID NO: 636717 - RNA, 21 nt, Artificial Sequence
  Synthetic
uuuaaccuaccuagguuguau

SEQ ID NO: 636718 - RNA, 22 nt, Artificial Sequence
  Synthetic
uuuuaaccuaccuagguuguau

SEQ ID NO: 636719 - RNA, 23 nt, Artificial Sequence
  Synthetic
auuuuaaccuaccuagguuguau

SEQ ID NO: 636720 - RNA, 24 nt, Artificial Sequence
  Synthetic
aauuuuaaccuaccuagguuguau

SEQ ID NO: 636721 - RNA, 18 nt, Artificial Sequence
  Synthetic
aaaucaacaguguuguau

SEQ ID NO: 636722 - RNA, 19 nt, Artificial Sequence
  Synthetic
aaaaucaacaguguuguau

SEQ ID NO: 636723 - RNA, 20 nt, Artificial Sequence
  Synthetic
aaaaaucaacaguguuguau

SEQ ID NO: 636724 - RNA, 21 nt, Artificial Sequence
  Synthetic
aaaaaaucaacaguguuguau

SEQ ID NO: 636725 - RNA, 22 nt, Artificial Sequence
  Synthetic
aaaaaaaucaacaguguuguau

SEQ ID NO: 636726 - RNA, 23 nt, Artificial Sequence
  Synthetic
aaaaaaaaucaacaguguuguau

SEQ ID NO: 636727 - RNA, 24 nt, Artificial Sequence
  Synthetic
aaaaaaaaaucaacaguguuguau

SEQ ID NO: 636728 - RNA, 18 nt, Artificial Sequence
  Synthetic
agucuacugcauuuguau

SEQ ID NO: 636729 - RNA, 19 nt, Artificial Sequence
  Synthetic
cagucuacugcauuuguau

SEQ ID NO: 636730 - RNA, 20 nt, Artificial Sequence
  Synthetic
acagucuacugcauuuguau

SEQ ID NO: 636731 - RNA, 21 nt, Artificial Sequence
  Synthetic
cacagucuacugcauuuguau

SEQ ID NO: 636732 - RNA, 22 nt, Artificial Sequence
  Synthetic
acacagucuacugcauuuguau

SEQ ID NO: 636733 - RNA, 23 nt, Artificial Sequence
  Synthetic
uacacagucuacugcauuuguau

SEQ ID NO: 636734 - RNA, 24 nt, Artificial Sequence
  Synthetic
uuacacagucuacugcauuuguau

SEQ ID NO: 636735 - RNA, 18 nt, Artificial Sequence
  Synthetic
gcacuaagaccuuuguau

SEQ ID NO: 636736 - RNA, 19 nt, Artificial Sequence
  Synthetic
ugcacuaagaccuuuguau

SEQ ID NO: 636737 - RNA, 20 nt, Artificial Sequence
  Synthetic
augcacuaagaccuuuguau

SEQ ID NO: 636738 - RNA, 21 nt, Artificial Sequence
  Synthetic
aaugcacuaagaccuuuguau

SEQ ID NO: 636739 - RNA, 22 nt, Artificial Sequence
  Synthetic
uaaugcacuaagaccuuuguau

SEQ ID NO: 636740 - RNA, 23 nt, Artificial Sequence
  Synthetic
uuaaugcacuaagaccuuuguau

SEQ ID NO: 636741 - RNA, 24 nt, Artificial Sequence
  Synthetic
auuaaugcacuaagaccuuuguau

SEQ ID NO: 636742 - RNA, 18 nt, Artificial Sequence
  Synthetic
ugagaaggugcuuuguau

SEQ ID NO: 636743 - RNA, 19 nt, Artificial Sequence
  Synthetic
gugagaaggugcuuuguau

SEQ ID NO: 636744 - RNA, 20 nt, Artificial Sequence
  Synthetic
agugagaaggugcuuuguau

SEQ ID NO: 636745 - RNA, 21 nt, Artificial Sequence
  Synthetic
cagugagaaggugcuuuguau

SEQ ID NO: 636746 - RNA, 22 nt, Artificial Sequence
  Synthetic
gcagugagaaggugcuuuguau

SEQ ID NO: 636747 - RNA, 23 nt, Artificial Sequence
  Synthetic
ugcagugagaaggugcuuuguau

SEQ ID NO: 636748 - RNA, 24 nt, Artificial Sequence
  Synthetic
gugcagugagaaggugcuuuguau

SEQ ID NO: 636749 - RNA, 18 nt, Artificial Sequence
  Synthetic
acuuaaaacaguuuguau

SEQ ID NO: 636750 - RNA, 19 nt, Artificial Sequence
  Synthetic
uacuuaaaacaguuuguau

SEQ ID NO: 636751 - RNA, 20 nt, Artificial Sequence
  Synthetic
uuacuuaaaacaguuuguau

SEQ ID NO: 636752 - RNA, 21 nt, Artificial Sequence
  Synthetic
auuacuuaaaacaguuuguau

SEQ ID NO: 636753 - RNA, 22 nt, Artificial Sequence
  Synthetic
aauuacuuaaaacaguuuguau

SEQ ID NO: 636754 - RNA, 23 nt, Artificial Sequence
  Synthetic
caauuacuuaaaacaguuuguau

SEQ ID NO: 636755 - RNA, 24 nt, Artificial Sequence
  Synthetic
gcaauuacuuaaaacaguuuguau

SEQ ID NO: 636756 - RNA, 18 nt, Artificial Sequence
  Synthetic
acuuaaaggcguuuguau

SEQ ID NO: 636757 - RNA, 19 nt, Artificial Sequence
  Synthetic
aacuuaaaggcguuuguau

SEQ ID NO: 636758 - RNA, 20 nt, Artificial Sequence
  Synthetic
uaacuuaaaggcguuuguau

SEQ ID NO: 636759 - RNA, 21 nt, Artificial Sequence
  Synthetic
uuaacuuaaaggcguuuguau

SEQ ID NO: 636760 - RNA, 22 nt, Artificial Sequence
  Synthetic
uuuaacuuaaaggcguuuguau

SEQ ID NO: 636761 - RNA, 23 nt, Artificial Sequence
  Synthetic
auuuaacuuaaaggcguuuguau

SEQ ID NO: 636762 - RNA, 24 nt, Artificial Sequence
  Synthetic
uauuuaacuuaaaggcguuuguau

SEQ ID NO: 636763 - RNA, 18 nt, Artificial Sequence
  Synthetic
uaaagauacaaaaauuau

SEQ ID NO: 636764 - RNA, 19 nt, Artificial Sequence
  Synthetic
cuaaagauacaaaaauuau

SEQ ID NO: 636765 - RNA, 20 nt, Artificial Sequence
  Synthetic
acuaaagauacaaaaauuau

SEQ ID NO: 636766 - RNA, 21 nt, Artificial Sequence
  Synthetic
uacuaaagauacaaaaauuau

SEQ ID NO: 636767 - RNA, 22 nt, Artificial Sequence
  Synthetic
cuacuaaagauacaaaaauuau

SEQ ID NO: 636768 - RNA, 23 nt, Artificial Sequence
  Synthetic
ucuacuaaagauacaaaaauuau

SEQ ID NO: 636769 - RNA, 24 nt, Artificial Sequence
  Synthetic
cucuacuaaagauacaaaaauuau

SEQ ID NO: 636770 - RNA, 18 nt, Artificial Sequence
  Synthetic
aacauccuucaaaauuau

SEQ ID NO: 636771 - RNA, 19 nt, Artificial Sequence
  Synthetic
gaacauccuucaaaauuau

SEQ ID NO: 636772 - RNA, 20 nt, Artificial Sequence
  Synthetic
agaacauccuucaaaauuau

SEQ ID NO: 636773 - RNA, 21 nt, Artificial Sequence
  Synthetic
aagaacauccuucaaaauuau

SEQ ID NO: 636774 - RNA, 22 nt, Artificial Sequence
  Synthetic
aaagaacauccuucaaaauuau

SEQ ID NO: 636775 - RNA, 23 nt, Artificial Sequence
  Synthetic
gaaagaacauccuucaaaauuau

SEQ ID NO: 636776 - RNA, 24 nt, Artificial Sequence
  Synthetic
agaaagaacauccuucaaaauuau

SEQ ID NO: 636777 - RNA, 18 nt, Artificial Sequence
  Synthetic
uacgaucaugaaaauuau

SEQ ID NO: 636778 - RNA, 19 nt, Artificial Sequence
  Synthetic
guacgaucaugaaaauuau

SEQ ID NO: 636779 - RNA, 20 nt, Artificial Sequence
  Synthetic
uguacgaucaugaaaauuau

SEQ ID NO: 636780 - RNA, 21 nt, Artificial Sequence
  Synthetic
auguacgaucaugaaaauuau

SEQ ID NO: 636781 - RNA, 22 nt, Artificial Sequence
  Synthetic
aauguacgaucaugaaaauuau

SEQ ID NO: 636782 - RNA, 23 nt, Artificial Sequence
  Synthetic
aaauguacgaucaugaaaauuau

SEQ ID NO: 636783 - RNA, 24 nt, Artificial Sequence
  Synthetic
aaaauguacgaucaugaaaauuau

SEQ ID NO: 636784 - RNA, 18 nt, Artificial Sequence
  Synthetic
uucaguuuuuaaaauuau

SEQ ID NO: 636785 - RNA, 19 nt, Artificial Sequence
  Synthetic
cuucaguuuuuaaaauuau

SEQ ID NO: 636786 - RNA, 20 nt, Artificial Sequence
  Synthetic
ucuucaguuuuuaaaauuau

SEQ ID NO: 636787 - RNA, 21 nt, Artificial Sequence
  Synthetic
gucuucaguuuuuaaaauuau

SEQ ID NO: 636788 - RNA, 22 nt, Artificial Sequence
  Synthetic
ggucuucaguuuuuaaaauuau

SEQ ID NO: 636789 - RNA, 23 nt, Artificial Sequence
  Synthetic
uggucuucaguuuuuaaaauuau

SEQ ID NO: 636790 - RNA, 24 nt, Artificial Sequence
  Synthetic
cuggucuucaguuuuuaaaauuau

SEQ ID NO: 636791 - RNA, 18 nt, Artificial Sequence
  Synthetic
acaaugccuccaaauuau

SEQ ID NO: 636792 - RNA, 19 nt, Artificial Sequence
  Synthetic
aacaaugccuccaaauuau

SEQ ID NO: 636793 - RNA, 20 nt, Artificial Sequence
  Synthetic
uaacaaugccuccaaauuau

SEQ ID NO: 636794 - RNA, 21 nt, Artificial Sequence
  Synthetic
uuaacaaugccuccaaauuau

SEQ ID NO: 636795 - RNA, 22 nt, Artificial Sequence
  Synthetic
guuaacaaugccuccaaauuau

SEQ ID NO: 636796 - RNA, 23 nt, Artificial Sequence
  Synthetic
aguuaacaaugccuccaaauuau

SEQ ID NO: 636797 - RNA, 24 nt, Artificial Sequence
  Synthetic
caguuaacaaugccuccaaauuau

SEQ ID NO: 636798 - RNA, 18 nt, Artificial Sequence
  Synthetic
aacaaugacagaaauuau

SEQ ID NO: 636799 - RNA, 19 nt, Artificial Sequence
  Synthetic
uaacaaugacagaaauuau

SEQ ID NO: 636800 - RNA, 20 nt, Artificial Sequence
  Synthetic
auaacaaugacagaaauuau

SEQ ID NO: 636801 - RNA, 21 nt, Artificial Sequence
  Synthetic
uauaacaaugacagaaauuau

SEQ ID NO: 636802 - RNA, 22 nt, Artificial Sequence
  Synthetic
uuauaacaaugacagaaauuau

SEQ ID NO: 636803 - RNA, 23 nt, Artificial Sequence
  Synthetic
cuuauaacaaugacagaaauuau

SEQ ID NO: 636804 - RNA, 24 nt, Artificial Sequence
  Synthetic
gcuuauaacaaugacagaaauuau

SEQ ID NO: 636805 - RNA, 18 nt, Artificial Sequence
  Synthetic
ggaaauuuuggaaauuau

SEQ ID NO: 636806 - RNA, 19 nt, Artificial Sequence
  Synthetic
aggaaauuuuggaaauuau

SEQ ID NO: 636807 - RNA, 20 nt, Artificial Sequence
  Synthetic
caggaaauuuuggaaauuau

SEQ ID NO: 636808 - RNA, 21 nt, Artificial Sequence
  Synthetic
ccaggaaauuuuggaaauuau

SEQ ID NO: 636809 - RNA, 22 nt, Artificial Sequence
  Synthetic
gccaggaaauuuuggaaauuau

SEQ ID NO: 636810 - RNA, 23 nt, Artificial Sequence
  Synthetic
agccaggaaauuuuggaaauuau

SEQ ID NO: 636811 - RNA, 24 nt, Artificial Sequence
  Synthetic
cagccaggaaauuuuggaaauuau

SEQ ID NO: 636812 - RNA, 18 nt, Artificial Sequence
  Synthetic
augucagugugaaauuau

SEQ ID NO: 636813 - RNA, 19 nt, Artificial Sequence
  Synthetic
caugucagugugaaauuau

SEQ ID NO: 636814 - RNA, 20 nt, Artificial Sequence
  Synthetic
ucaugucagugugaaauuau

SEQ ID NO: 636815 - RNA, 21 nt, Artificial Sequence
  Synthetic
cucaugucagugugaaauuau

SEQ ID NO: 636816 - RNA, 22 nt, Artificial Sequence
  Synthetic
ccucaugucagugugaaauuau

SEQ ID NO: 636817 - RNA, 23 nt, Artificial Sequence
  Synthetic
accucaugucagugugaaauuau

SEQ ID NO: 636818 - RNA, 24 nt, Artificial Sequence
  Synthetic
aaccucaugucagugugaaauuau

SEQ ID NO: 636819 - RNA, 18 nt, Artificial Sequence
  Synthetic
ugauauuuuugaaauuau

SEQ ID NO: 636820 - RNA, 19 nt, Artificial Sequence
  Synthetic
augauauuuuugaaauuau

SEQ ID NO: 636821 - RNA, 20 nt, Artificial Sequence
  Synthetic
aaugauauuuuugaaauuau

SEQ ID NO: 636822 - RNA, 21 nt, Artificial Sequence
  Synthetic
caaugauauuuuugaaauuau

SEQ ID NO: 636823 - RNA, 22 nt, Artificial Sequence
  Synthetic
ucaaugauauuuuugaaauuau

SEQ ID NO: 636824 - RNA, 23 nt, Artificial Sequence
  Synthetic
uucaaugauauuuuugaaauuau

SEQ ID NO: 636825 - RNA, 24 nt, Artificial Sequence
  Synthetic
cuucaaugauauuuuugaaauuau

SEQ ID NO: 636826 - RNA, 18 nt, Artificial Sequence
  Synthetic
aauugcugaauaaauuau

SEQ ID NO: 636827 - RNA, 19 nt, Artificial Sequence
  Synthetic
uaauugcugaauaaauuau

SEQ ID NO: 636828 - RNA, 20 nt, Artificial Sequence
  Synthetic
auaauugcugaauaaauuau

SEQ ID NO: 636829 - RNA, 21 nt, Artificial Sequence
  Synthetic
aauaauugcugaauaaauuau

SEQ ID NO: 636830 - RNA, 22 nt, Artificial Sequence
  Synthetic
aaauaauugcugaauaaauuau

SEQ ID NO: 636831 - RNA, 23 nt, Artificial Sequence
  Synthetic
uaaauaauugcugaauaaauuau

SEQ ID NO: 636832 - RNA, 24 nt, Artificial Sequence
  Synthetic
guaaauaauugcugaauaaauuau

SEQ ID NO: 636833 - RNA, 18 nt, Artificial Sequence
  Synthetic
aacauuguaauaaauuau

SEQ ID NO: 636834 - RNA, 19 nt, Artificial Sequence
  Synthetic
uaacauuguaauaaauuau

SEQ ID NO: 636835 - RNA, 20 nt, Artificial Sequence
  Synthetic
uuaacauuguaauaaauuau

SEQ ID NO: 636836 - RNA, 21 nt, Artificial Sequence
  Synthetic
cuuaacauuguaauaaauuau

SEQ ID NO: 636837 - RNA, 22 nt, Artificial Sequence
  Synthetic
ucuuaacauuguaauaaauuau

SEQ ID NO: 636838 - RNA, 23 nt, Artificial Sequence
  Synthetic
aucuuaacauuguaauaaauuau

SEQ ID NO: 636839 - RNA, 24 nt, Artificial Sequence
  Synthetic
uaucuuaacauuguaauaaauuau

SEQ ID NO: 636840 - RNA, 18 nt, Artificial Sequence
  Synthetic
caacuuacuguaaauuau

SEQ ID NO: 636841 - RNA, 19 nt, Artificial Sequence
  Synthetic
acaacuuacuguaaauuau

SEQ ID NO: 636842 - RNA, 20 nt, Artificial Sequence
  Synthetic
cacaacuuacuguaaauuau

SEQ ID NO: 636843 - RNA, 21 nt, Artificial Sequence
  Synthetic
ccacaacuuacuguaaauuau

SEQ ID NO: 636844 - RNA, 22 nt, Artificial Sequence
  Synthetic
accacaacuuacuguaaauuau

SEQ ID NO: 636845 - RNA, 23 nt, Artificial Sequence
  Synthetic
aaccacaacuuacuguaaauuau

SEQ ID NO: 636846 - RNA, 24 nt, Artificial Sequence
  Synthetic
caaccacaacuuacuguaaauuau

SEQ ID NO: 636847 - RNA, 18 nt, Artificial Sequence
  Synthetic
ucacgauuauuaaauuau

SEQ ID NO: 636848 - RNA, 19 nt, Artificial Sequence
  Synthetic
uucacgauuauuaaauuau

SEQ ID NO: 636849 - RNA, 20 nt, Artificial Sequence
  Synthetic
uuucacgauuauuaaauuau

SEQ ID NO: 636850 - RNA, 21 nt, Artificial Sequence
  Synthetic
auuucacgauuauuaaauuau

SEQ ID NO: 636851 - RNA, 22 nt, Artificial Sequence
  Synthetic
cauuucacgauuauuaaauuau

SEQ ID NO: 636852 - RNA, 23 nt, Artificial Sequence
  Synthetic
ucauuucacgauuauuaaauuau

SEQ ID NO: 636853 - RNA, 24 nt, Artificial Sequence
  Synthetic
aucauuucacgauuauuaaauuau

SEQ ID NO: 636854 - RNA, 18 nt, Artificial Sequence
  Synthetic
uaaaacaaaaacaauuau

SEQ ID NO: 636855 - RNA, 19 nt, Artificial Sequence
  Synthetic
auaaaacaaaaacaauuau

SEQ ID NO: 636856 - RNA, 20 nt, Artificial Sequence
  Synthetic
aauaaaacaaaaacaauuau

SEQ ID NO: 636857 - RNA, 21 nt, Artificial Sequence
  Synthetic
aaauaaaacaaaaacaauuau

SEQ ID NO: 636858 - RNA, 22 nt, Artificial Sequence
  Synthetic
aaaauaaaacaaaaacaauuau

SEQ ID NO: 636859 - RNA, 23 nt, Artificial Sequence
  Synthetic
aaaaauaaaacaaaaacaauuau

SEQ ID NO: 636860 - RNA, 24 nt, Artificial Sequence
  Synthetic
uaaaaauaaaacaaaaacaauuau

SEQ ID NO: 636861 - RNA, 18 nt, Artificial Sequence
  Synthetic
acaaacauaagcaauuau

SEQ ID NO: 636862 - RNA, 19 nt, Artificial Sequence
  Synthetic
uacaaacauaagcaauuau

SEQ ID NO: 636863 - RNA, 20 nt, Artificial Sequence
  Synthetic
auacaaacauaagcaauuau

SEQ ID NO: 636864 - RNA, 21 nt, Artificial Sequence
  Synthetic
aauacaaacauaagcaauuau

SEQ ID NO: 636865 - RNA, 22 nt, Artificial Sequence
  Synthetic
gaauacaaacauaagcaauuau

SEQ ID NO: 636866 - RNA, 23 nt, Artificial Sequence
  Synthetic
ugaauacaaacauaagcaauuau

SEQ ID NO: 636867 - RNA, 24 nt, Artificial Sequence
  Synthetic
uugaauacaaacauaagcaauuau

SEQ ID NO: 636868 - RNA, 18 nt, Artificial Sequence
  Synthetic
agaaaccacagcaauuau

SEQ ID NO: 636869 - RNA, 19 nt, Artificial Sequence
  Synthetic
aagaaaccacagcaauuau

SEQ ID NO: 636870 - RNA, 20 nt, Artificial Sequence
  Synthetic
gaagaaaccacagcaauuau

SEQ ID NO: 636871 - RNA, 21 nt, Artificial Sequence
  Synthetic
ggaagaaaccacagcaauuau

SEQ ID NO: 636872 - RNA, 22 nt, Artificial Sequence
  Synthetic
uggaagaaaccacagcaauuau

SEQ ID NO: 636873 - RNA, 23 nt, Artificial Sequence
  Synthetic
cuggaagaaaccacagcaauuau

SEQ ID NO: 636874 - RNA, 24 nt, Artificial Sequence
  Synthetic
gcuggaagaaaccacagcaauuau

SEQ ID NO: 636875 - RNA, 18 nt, Artificial Sequence
  Synthetic
uagacagcucucaauuau

SEQ ID NO: 636876 - RNA, 19 nt, Artificial Sequence
  Synthetic
cuagacagcucucaauuau

SEQ ID NO: 636877 - RNA, 20 nt, Artificial Sequence
  Synthetic
ccuagacagcucucaauuau

SEQ ID NO: 636878 - RNA, 21 nt, Artificial Sequence
  Synthetic
cccuagacagcucucaauuau

SEQ ID NO: 636879 - RNA, 22 nt, Artificial Sequence
  Synthetic
ccccuagacagcucucaauuau

SEQ ID NO: 636880 - RNA, 23 nt, Artificial Sequence
  Synthetic
accccuagacagcucucaauuau

SEQ ID NO: 636881 - RNA, 24 nt, Artificial Sequence
  Synthetic
gaccccuagacagcucucaauuau

SEQ ID NO: 636882 - RNA, 18 nt, Artificial Sequence
  Synthetic
caggacacuaagaauuau

SEQ ID NO: 636883 - RNA, 19 nt, Artificial Sequence
  Synthetic
ucaggacacuaagaauuau

SEQ ID NO: 636884 - RNA, 20 nt, Artificial Sequence
  Synthetic
gucaggacacuaagaauuau

SEQ ID NO: 636885 - RNA, 21 nt, Artificial Sequence
  Synthetic
ugucaggacacuaagaauuau

SEQ ID NO: 636886 - RNA, 22 nt, Artificial Sequence
  Synthetic
gugucaggacacuaagaauuau

SEQ ID NO: 636887 - RNA, 23 nt, Artificial Sequence
  Synthetic
agugucaggacacuaagaauuau

SEQ ID NO: 636888 - RNA, 24 nt, Artificial Sequence
  Synthetic
cagugucaggacacuaagaauuau

SEQ ID NO: 636889 - RNA, 18 nt, Artificial Sequence
  Synthetic
gucaacucucagaauuau

SEQ ID NO: 636890 - RNA, 19 nt, Artificial Sequence
  Synthetic
agucaacucucagaauuau

SEQ ID NO: 636891 - RNA, 20 nt, Artificial Sequence
  Synthetic
uagucaacucucagaauuau

SEQ ID NO: 636892 - RNA, 21 nt, Artificial Sequence
  Synthetic
auagucaacucucagaauuau

SEQ ID NO: 636893 - RNA, 22 nt, Artificial Sequence
  Synthetic
cauagucaacucucagaauuau

SEQ ID NO: 636894 - RNA, 23 nt, Artificial Sequence
  Synthetic
ucauagucaacucucagaauuau

SEQ ID NO: 636895 - RNA, 24 nt, Artificial Sequence
  Synthetic
aucauagucaacucucagaauuau

SEQ ID NO: 636896 - RNA, 18 nt, Artificial Sequence
  Synthetic
aagugaggagagaauuau

SEQ ID NO: 636897 - RNA, 19 nt, Artificial Sequence
  Synthetic
gaagugaggagagaauuau

SEQ ID NO: 636898 - RNA, 20 nt, Artificial Sequence
  Synthetic
agaagugaggagagaauuau

SEQ ID NO: 636899 - RNA, 21 nt, Artificial Sequence
  Synthetic
uagaagugaggagagaauuau

SEQ ID NO: 636900 - RNA, 22 nt, Artificial Sequence
  Synthetic
auagaagugaggagagaauuau

SEQ ID NO: 636901 - RNA, 23 nt, Artificial Sequence
  Synthetic
aauagaagugaggagagaauuau

SEQ ID NO: 636902 - RNA, 24 nt, Artificial Sequence
  Synthetic
aaauagaagugaggagagaauuau

SEQ ID NO: 636903 - RNA, 18 nt, Artificial Sequence
  Synthetic
uuuucccuguagaauuau

SEQ ID NO: 636904 - RNA, 19 nt, Artificial Sequence
  Synthetic
auuuucccuguagaauuau

SEQ ID NO: 636905 - RNA, 20 nt, Artificial Sequence
  Synthetic
uauuuucccuguagaauuau

SEQ ID NO: 636906 - RNA, 21 nt, Artificial Sequence
  Synthetic
uuauuuucccuguagaauuau

SEQ ID NO: 636907 - RNA, 22 nt, Artificial Sequence
  Synthetic
cuuauuuucccuguagaauuau

SEQ ID NO: 636908 - RNA, 23 nt, Artificial Sequence
  Synthetic
ucuuauuuucccuguagaauuau

SEQ ID NO: 636909 - RNA, 24 nt, Artificial Sequence
  Synthetic
gucuuauuuucccuguagaauuau

SEQ ID NO: 636910 - RNA, 18 nt, Artificial Sequence
  Synthetic
gccaaguucaugaauuau

SEQ ID NO: 636911 - RNA, 19 nt, Artificial Sequence
  Synthetic
agccaaguucaugaauuau

SEQ ID NO: 636912 - RNA, 20 nt, Artificial Sequence
  Synthetic
aagccaaguucaugaauuau

SEQ ID NO: 636913 - RNA, 21 nt, Artificial Sequence
  Synthetic
gaagccaaguucaugaauuau

SEQ ID NO: 636914 - RNA, 22 nt, Artificial Sequence
  Synthetic
ggaagccaaguucaugaauuau

SEQ ID NO: 636915 - RNA, 23 nt, Artificial Sequence
  Synthetic
uggaagccaaguucaugaauuau

SEQ ID NO: 636916 - RNA, 24 nt, Artificial Sequence
  Synthetic
guggaagccaaguucaugaauuau

SEQ ID NO: 636917 - RNA, 18 nt, Artificial Sequence
  Synthetic
aaagaugaucugaauuau

SEQ ID NO: 636918 - RNA, 19 nt, Artificial Sequence
  Synthetic
uaaagaugaucugaauuau

SEQ ID NO: 636919 - RNA, 20 nt, Artificial Sequence
  Synthetic
uuaaagaugaucugaauuau

SEQ ID NO: 636920 - RNA, 21 nt, Artificial Sequence
  Synthetic
auuaaagaugaucugaauuau

SEQ ID NO: 636921 - RNA, 22 nt, Artificial Sequence
  Synthetic
aauuaaagaugaucugaauuau

SEQ ID NO: 636922 - RNA, 23 nt, Artificial Sequence
  Synthetic
aaauuaaagaugaucugaauuau

SEQ ID NO: 636923 - RNA, 24 nt, Artificial Sequence
  Synthetic
uaaauuaaagaugaucugaauuau

SEQ ID NO: 636924 - RNA, 18 nt, Artificial Sequence
  Synthetic
uauuacuaaaauaauuau

SEQ ID NO: 636925 - RNA, 19 nt, Artificial Sequence
  Synthetic
uuauuacuaaaauaauuau

SEQ ID NO: 636926 - RNA, 20 nt, Artificial Sequence
  Synthetic
auuauuacuaaaauaauuau

SEQ ID NO: 636927 - RNA, 21 nt, Artificial Sequence
  Synthetic
cauuauuacuaaaauaauuau

SEQ ID NO: 636928 - RNA, 22 nt, Artificial Sequence
  Synthetic
gcauuauuacuaaaauaauuau

SEQ ID NO: 636929 - RNA, 23 nt, Artificial Sequence
  Synthetic
agcauuauuacuaaaauaauuau

SEQ ID NO: 636930 - RNA, 24 nt, Artificial Sequence
  Synthetic
aagcauuauuacuaaaauaauuau

SEQ ID NO: 636931 - RNA, 18 nt, Artificial Sequence
  Synthetic
uaaccaauacauaauuau

SEQ ID NO: 636932 - RNA, 19 nt, Artificial Sequence
  Synthetic
auaaccaauacauaauuau

SEQ ID NO: 636933 - RNA, 20 nt, Artificial Sequence
  Synthetic
uauaaccaauacauaauuau

SEQ ID NO: 636934 - RNA, 21 nt, Artificial Sequence
  Synthetic
auauaaccaauacauaauuau

SEQ ID NO: 636935 - RNA, 22 nt, Artificial Sequence
  Synthetic
uauauaaccaauacauaauuau

SEQ ID NO: 636936 - RNA, 23 nt, Artificial Sequence
  Synthetic
auauauaaccaauacauaauuau

SEQ ID NO: 636937 - RNA, 24 nt, Artificial Sequence
  Synthetic
aauauauaaccaauacauaauuau

SEQ ID NO: 636938 - RNA, 18 nt, Artificial Sequence
  Synthetic
agagguuauacuaauuau

SEQ ID NO: 636939 - RNA, 19 nt, Artificial Sequence
  Synthetic
aagagguuauacuaauuau

SEQ ID NO: 636940 - RNA, 20 nt, Artificial Sequence
  Synthetic
aaagagguuauacuaauuau

SEQ ID NO: 636941 - RNA, 21 nt, Artificial Sequence
  Synthetic
gaaagagguuauacuaauuau

SEQ ID NO: 636942 - RNA, 22 nt, Artificial Sequence
  Synthetic
agaaagagguuauacuaauuau

SEQ ID NO: 636943 - RNA, 23 nt, Artificial Sequence
  Synthetic
gagaaagagguuauacuaauuau

SEQ ID NO: 636944 - RNA, 24 nt, Artificial Sequence
  Synthetic
agagaaagagguuauacuaauuau

SEQ ID NO: 636945 - RNA, 18 nt, Artificial Sequence
  Synthetic
accagucaugcuaauuau

SEQ ID NO: 636946 - RNA, 19 nt, Artificial Sequence
  Synthetic
aaccagucaugcuaauuau

SEQ ID NO: 636947 - RNA, 20 nt, Artificial Sequence
  Synthetic
uaaccagucaugcuaauuau

SEQ ID NO: 636948 - RNA, 21 nt, Artificial Sequence
  Synthetic
uuaaccagucaugcuaauuau

SEQ ID NO: 636949 - RNA, 22 nt, Artificial Sequence
  Synthetic
guuaaccagucaugcuaauuau

SEQ ID NO: 636950 - RNA, 23 nt, Artificial Sequence
  Synthetic
aguuaaccagucaugcuaauuau

SEQ ID NO: 636951 - RNA, 24 nt, Artificial Sequence
  Synthetic
aaguuaaccagucaugcuaauuau

SEQ ID NO: 636952 - RNA, 18 nt, Artificial Sequence
  Synthetic
aguaguuuuucuaauuau

SEQ ID NO: 636953 - RNA, 19 nt, Artificial Sequence
  Synthetic
aaguaguuuuucuaauuau

SEQ ID NO: 636954 - RNA, 20 nt, Artificial Sequence
  Synthetic
aaaguaguuuuucuaauuau

SEQ ID NO: 636955 - RNA, 21 nt, Artificial Sequence
  Synthetic
uaaaguaguuuuucuaauuau

SEQ ID NO: 636956 - RNA, 22 nt, Artificial Sequence
  Synthetic
uuaaaguaguuuuucuaauuau

SEQ ID NO: 636957 - RNA, 23 nt, Artificial Sequence
  Synthetic
uuuaaaguaguuuuucuaauuau

SEQ ID NO: 636958 - RNA, 24 nt, Artificial Sequence
  Synthetic
auuuaaaguaguuuuucuaauuau

SEQ ID NO: 636959 - RNA, 18 nt, Artificial Sequence
  Synthetic
augaauaauacacauuau

SEQ ID NO: 636960 - RNA, 19 nt, Artificial Sequence
  Synthetic
uaugaauaauacacauuau

SEQ ID NO: 636961 - RNA, 20 nt, Artificial Sequence
  Synthetic
auaugaauaauacacauuau

SEQ ID NO: 636962 - RNA, 21 nt, Artificial Sequence
  Synthetic
uauaugaauaauacacauuau

SEQ ID NO: 636963 - RNA, 22 nt, Artificial Sequence
  Synthetic
auauaugaauaauacacauuau

SEQ ID NO: 636964 - RNA, 23 nt, Artificial Sequence
  Synthetic
aauauaugaauaauacacauuau

SEQ ID NO: 636965 - RNA, 24 nt, Artificial Sequence
  Synthetic
caauauaugaauaauacacauuau

SEQ ID NO: 636966 - RNA, 18 nt, Artificial Sequence
  Synthetic
uaucucaaagcacauuau

SEQ ID NO: 636967 - RNA, 19 nt, Artificial Sequence
  Synthetic
auaucucaaagcacauuau

SEQ ID NO: 636968 - RNA, 20 nt, Artificial Sequence
  Synthetic
uauaucucaaagcacauuau

SEQ ID NO: 636969 - RNA, 21 nt, Artificial Sequence
  Synthetic
auauaucucaaagcacauuau

SEQ ID NO: 636970 - RNA, 22 nt, Artificial Sequence
  Synthetic
uauauaucucaaagcacauuau

SEQ ID NO: 636971 - RNA, 23 nt, Artificial Sequence
  Synthetic
auauauaucucaaagcacauuau

SEQ ID NO: 636972 - RNA, 24 nt, Artificial Sequence
  Synthetic
aauauauaucucaaagcacauuau

SEQ ID NO: 636973 - RNA, 18 nt, Artificial Sequence
  Synthetic
gagcucuuuucacauuau

SEQ ID NO: 636974 - RNA, 19 nt, Artificial Sequence
  Synthetic
agagcucuuuucacauuau

SEQ ID NO: 636975 - RNA, 20 nt, Artificial Sequence
  Synthetic
aagagcucuuuucacauuau

SEQ ID NO: 636976 - RNA, 21 nt, Artificial Sequence
  Synthetic
uaagagcucuuuucacauuau

SEQ ID NO: 636977 - RNA, 22 nt, Artificial Sequence
  Synthetic
uuaagagcucuuuucacauuau

SEQ ID NO: 636978 - RNA, 23 nt, Artificial Sequence
  Synthetic
uuuaagagcucuuuucacauuau

SEQ ID NO: 636979 - RNA, 24 nt, Artificial Sequence
  Synthetic
uuuuaagagcucuuuucacauuau

SEQ ID NO: 636980 - RNA, 18 nt, Artificial Sequence
  Synthetic
uuaaucugaggacauuau

SEQ ID NO: 636981 - RNA, 19 nt, Artificial Sequence
  Synthetic
uuuaaucugaggacauuau

SEQ ID NO: 636982 - RNA, 20 nt, Artificial Sequence
  Synthetic
uuuuaaucugaggacauuau

SEQ ID NO: 636983 - RNA, 21 nt, Artificial Sequence
  Synthetic
guuuuaaucugaggacauuau

SEQ ID NO: 636984 - RNA, 22 nt, Artificial Sequence
  Synthetic
uguuuuaaucugaggacauuau

SEQ ID NO: 636985 - RNA, 23 nt, Artificial Sequence
  Synthetic
auguuuuaaucugaggacauuau

SEQ ID NO: 636986 - RNA, 24 nt, Artificial Sequence
  Synthetic
cauguuuuaaucugaggacauuau

SEQ ID NO: 636987 - RNA, 18 nt, Artificial Sequence
  Synthetic
ccgagcuguuuacauuau

SEQ ID NO: 636988 - RNA, 19 nt, Artificial Sequence
  Synthetic
accgagcuguuuacauuau

SEQ ID NO: 636989 - RNA, 20 nt, Artificial Sequence
  Synthetic
aaccgagcuguuuacauuau

SEQ ID NO: 636990 - RNA, 21 nt, Artificial Sequence
  Synthetic
uaaccgagcuguuuacauuau

SEQ ID NO: 636991 - RNA, 22 nt, Artificial Sequence
  Synthetic
cuaaccgagcuguuuacauuau

SEQ ID NO: 636992 - RNA, 23 nt, Artificial Sequence
  Synthetic
ccuaaccgagcuguuuacauuau

SEQ ID NO: 636993 - RNA, 24 nt, Artificial Sequence
  Synthetic
uccuaaccgagcuguuuacauuau

SEQ ID NO: 636994 - RNA, 18 nt, Artificial Sequence
  Synthetic
cugcauccucaccauuau

SEQ ID NO: 636995 - RNA, 19 nt, Artificial Sequence
  Synthetic
acugcauccucaccauuau

SEQ ID NO: 636996 - RNA, 20 nt, Artificial Sequence
  Synthetic
aacugcauccucaccauuau

SEQ ID NO: 636997 - RNA, 21 nt, Artificial Sequence
  Synthetic
uaacugcauccucaccauuau

SEQ ID NO: 636998 - RNA, 22 nt, Artificial Sequence
  Synthetic
uuaacugcauccucaccauuau

SEQ ID NO: 636999 - RNA, 23 nt, Artificial Sequence
  Synthetic
uuuaacugcauccucaccauuau

SEQ ID NO: 637000 - RNA, 24 nt, Artificial Sequence
  Synthetic
auuuaacugcauccucaccauuau

SEQ ID NO: 637001 - RNA, 18 nt, Artificial Sequence
  Synthetic
ccacaucauucccauuau

SEQ ID NO: 637002 - RNA, 19 nt, Artificial Sequence
  Synthetic
accacaucauucccauuau

SEQ ID NO: 637003 - RNA, 20 nt, Artificial Sequence
  Synthetic
uaccacaucauucccauuau

SEQ ID NO: 637004 - RNA, 21 nt, Artificial Sequence
  Synthetic
uuaccacaucauucccauuau

SEQ ID NO: 637005 - RNA, 22 nt, Artificial Sequence
  Synthetic
auuaccacaucauucccauuau

SEQ ID NO: 637006 - RNA, 23 nt, Artificial Sequence
  Synthetic
aauuaccacaucauucccauuau

SEQ ID NO: 637007 - RNA, 24 nt, Artificial Sequence
  Synthetic
aaauuaccacaucauucccauuau

SEQ ID NO: 637008 - RNA, 18 nt, Artificial Sequence
  Synthetic
ugaccucuuucccauuau

SEQ ID NO: 637009 - RNA, 19 nt, Artificial Sequence
  Synthetic
gugaccucuuucccauuau

SEQ ID NO: 637010 - RNA, 20 nt, Artificial Sequence
  Synthetic
agugaccucuuucccauuau

SEQ ID NO: 637011 - RNA, 21 nt, Artificial Sequence
  Synthetic
aagugaccucuuucccauuau

SEQ ID NO: 637012 - RNA, 22 nt, Artificial Sequence
  Synthetic
aaagugaccucuuucccauuau

SEQ ID NO: 637013 - RNA, 23 nt, Artificial Sequence
  Synthetic
uaaagugaccucuuucccauuau

SEQ ID NO: 637014 - RNA, 24 nt, Artificial Sequence
  Synthetic
cuaaagugaccucuuucccauuau

SEQ ID NO: 637015 - RNA, 18 nt, Artificial Sequence
  Synthetic
gaaugagaagagcauuau

SEQ ID NO: 637016 - RNA, 19 nt, Artificial Sequence
  Synthetic
agaaugagaagagcauuau

SEQ ID NO: 637017 - RNA, 20 nt, Artificial Sequence
  Synthetic
gagaaugagaagagcauuau

SEQ ID NO: 637018 - RNA, 21 nt, Artificial Sequence
  Synthetic
agagaaugagaagagcauuau

SEQ ID NO: 637019 - RNA, 22 nt, Artificial Sequence
  Synthetic
uagagaaugagaagagcauuau

SEQ ID NO: 637020 - RNA, 23 nt, Artificial Sequence
  Synthetic
cuagagaaugagaagagcauuau

SEQ ID NO: 637021 - RNA, 24 nt, Artificial Sequence
  Synthetic
gcuagagaaugagaagagcauuau

SEQ ID NO: 637022 - RNA, 18 nt, Artificial Sequence
  Synthetic
uaaccuuuaaggcauuau

SEQ ID NO: 637023 - RNA, 19 nt, Artificial Sequence
  Synthetic
guaaccuuuaaggcauuau

SEQ ID NO: 637024 - RNA, 20 nt, Artificial Sequence
  Synthetic
aguaaccuuuaaggcauuau

SEQ ID NO: 637025 - RNA, 21 nt, Artificial Sequence
  Synthetic
gaguaaccuuuaaggcauuau

SEQ ID NO: 637026 - RNA, 22 nt, Artificial Sequence
  Synthetic
ggaguaaccuuuaaggcauuau

SEQ ID NO: 637027 - RNA, 23 nt, Artificial Sequence
  Synthetic
uggaguaaccuuuaaggcauuau

SEQ ID NO: 637028 - RNA, 24 nt, Artificial Sequence
  Synthetic
cuggaguaaccuuuaaggcauuau

SEQ ID NO: 637029 - RNA, 18 nt, Artificial Sequence
  Synthetic
ucaauaaaaaaucauuau

SEQ ID NO: 637030 - RNA, 19 nt, Artificial Sequence
  Synthetic
uucaauaaaaaaucauuau

SEQ ID NO: 637031 - RNA, 20 nt, Artificial Sequence
  Synthetic
guucaauaaaaaaucauuau

SEQ ID NO: 637032 - RNA, 21 nt, Artificial Sequence
  Synthetic
uguucaauaaaaaaucauuau

SEQ ID NO: 637033 - RNA, 22 nt, Artificial Sequence
  Synthetic
auguucaauaaaaaaucauuau

SEQ ID NO: 637034 - RNA, 23 nt, Artificial Sequence
  Synthetic
uauguucaauaaaaaaucauuau

SEQ ID NO: 637035 - RNA, 24 nt, Artificial Sequence
  Synthetic
auauguucaauaaaaaaucauuau

SEQ ID NO: 637036 - RNA, 18 nt, Artificial Sequence
  Synthetic
auuuuagaagaucauuau

SEQ ID NO: 637037 - RNA, 19 nt, Artificial Sequence
  Synthetic
gauuuuagaagaucauuau

SEQ ID NO: 637038 - RNA, 20 nt, Artificial Sequence
  Synthetic
ugauuuuagaagaucauuau

SEQ ID NO: 637039 - RNA, 21 nt, Artificial Sequence
  Synthetic
gugauuuuagaagaucauuau

SEQ ID NO: 637040 - RNA, 22 nt, Artificial Sequence
  Synthetic
agugauuuuagaagaucauuau

SEQ ID NO: 637041 - RNA, 23 nt, Artificial Sequence
  Synthetic
aagugauuuuagaagaucauuau

SEQ ID NO: 637042 - RNA, 24 nt, Artificial Sequence
  Synthetic
aaagugauuuuagaagaucauuau

SEQ ID NO: 637043 - RNA, 18 nt, Artificial Sequence
  Synthetic
ccaaccauagaucauuau

SEQ ID NO: 637044 - RNA, 19 nt, Artificial Sequence
  Synthetic
uccaaccauagaucauuau

SEQ ID NO: 637045 - RNA, 20 nt, Artificial Sequence
  Synthetic
auccaaccauagaucauuau

SEQ ID NO: 637046 - RNA, 21 nt, Artificial Sequence
  Synthetic
uauccaaccauagaucauuau

SEQ ID NO: 637047 - RNA, 22 nt, Artificial Sequence
  Synthetic
cuauccaaccauagaucauuau

SEQ ID NO: 637048 - RNA, 23 nt, Artificial Sequence
  Synthetic
acuauccaaccauagaucauuau

SEQ ID NO: 637049 - RNA, 24 nt, Artificial Sequence
  Synthetic
gacuauccaaccauagaucauuau

SEQ ID NO: 637050 - RNA, 18 nt, Artificial Sequence
  Synthetic
gcucaugcaccucauuau

SEQ ID NO: 637051 - RNA, 19 nt, Artificial Sequence
  Synthetic
agcucaugcaccucauuau

SEQ ID NO: 637052 - RNA, 20 nt, Artificial Sequence
  Synthetic
cagcucaugcaccucauuau

SEQ ID NO: 637053 - RNA, 21 nt, Artificial Sequence
  Synthetic
acagcucaugcaccucauuau

SEQ ID NO: 637054 - RNA, 22 nt, Artificial Sequence
  Synthetic
aacagcucaugcaccucauuau

SEQ ID NO: 637055 - RNA, 23 nt, Artificial Sequence
  Synthetic
aaacagcucaugcaccucauuau

SEQ ID NO: 637056 - RNA, 24 nt, Artificial Sequence
  Synthetic
gaaacagcucaugcaccucauuau

SEQ ID NO: 637057 - RNA, 18 nt, Artificial Sequence
  Synthetic
aaugcagguuuucauuau

SEQ ID NO: 637058 - RNA, 19 nt, Artificial Sequence
  Synthetic
caaugcagguuuucauuau

SEQ ID NO: 637059 - RNA, 20 nt, Artificial Sequence
  Synthetic
acaaugcagguuuucauuau

SEQ ID NO: 637060 - RNA, 21 nt, Artificial Sequence
  Synthetic
cacaaugcagguuuucauuau

SEQ ID NO: 637061 - RNA, 22 nt, Artificial Sequence
  Synthetic
acacaaugcagguuuucauuau

SEQ ID NO: 637062 - RNA, 23 nt, Artificial Sequence
  Synthetic
gacacaaugcagguuuucauuau

SEQ ID NO: 637063 - RNA, 24 nt, Artificial Sequence
  Synthetic
agacacaaugcagguuuucauuau

SEQ ID NO: 637064 - RNA, 18 nt, Artificial Sequence
  Synthetic
aauaauaacacagauuau

SEQ ID NO: 637065 - RNA, 19 nt, Artificial Sequence
  Synthetic
aaauaauaacacagauuau

SEQ ID NO: 637066 - RNA, 20 nt, Artificial Sequence
  Synthetic
caaauaauaacacagauuau

SEQ ID NO: 637067 - RNA, 21 nt, Artificial Sequence
  Synthetic
ccaaauaauaacacagauuau

SEQ ID NO: 637068 - RNA, 22 nt, Artificial Sequence
  Synthetic
uccaaauaauaacacagauuau

SEQ ID NO: 637069 - RNA, 23 nt, Artificial Sequence
  Synthetic
guccaaauaauaacacagauuau

SEQ ID NO: 637070 - RNA, 24 nt, Artificial Sequence
  Synthetic
aguccaaauaauaacacagauuau

SEQ ID NO: 637071 - RNA, 18 nt, Artificial Sequence
  Synthetic
caaaacagcugagauuau

SEQ ID NO: 637072 - RNA, 19 nt, Artificial Sequence
  Synthetic
acaaaacagcugagauuau

SEQ ID NO: 637073 - RNA, 20 nt, Artificial Sequence
  Synthetic
cacaaaacagcugagauuau

SEQ ID NO: 637074 - RNA, 21 nt, Artificial Sequence
  Synthetic
gcacaaaacagcugagauuau

SEQ ID NO: 637075 - RNA, 22 nt, Artificial Sequence
  Synthetic
ggcacaaaacagcugagauuau

SEQ ID NO: 637076 - RNA, 23 nt, Artificial Sequence
  Synthetic
cggcacaaaacagcugagauuau

SEQ ID NO: 637077 - RNA, 24 nt, Artificial Sequence
  Synthetic
acggcacaaaacagcugagauuau

SEQ ID NO: 637078 - RNA, 18 nt, Artificial Sequence
  Synthetic
aaagguauccuagauuau

SEQ ID NO: 637079 - RNA, 19 nt, Artificial Sequence
  Synthetic
aaaagguauccuagauuau

SEQ ID NO: 637080 - RNA, 20 nt, Artificial Sequence
  Synthetic
uaaaagguauccuagauuau

SEQ ID NO: 637081 - RNA, 21 nt, Artificial Sequence
  Synthetic
cuaaaagguauccuagauuau

SEQ ID NO: 637082 - RNA, 22 nt, Artificial Sequence
  Synthetic
acuaaaagguauccuagauuau

SEQ ID NO: 637083 - RNA, 23 nt, Artificial Sequence
  Synthetic
aacuaaaagguauccuagauuau

SEQ ID NO: 637084 - RNA, 24 nt, Artificial Sequence
  Synthetic
aaacuaaaagguauccuagauuau

SEQ ID NO: 637085 - RNA, 18 nt, Artificial Sequence
  Synthetic
auuucuuauuuagauuau

SEQ ID NO: 637086 - RNA, 19 nt, Artificial Sequence
  Synthetic
cauuucuuauuuagauuau

SEQ ID NO: 637087 - RNA, 20 nt, Artificial Sequence
  Synthetic
ccauuucuuauuuagauuau

SEQ ID NO: 637088 - RNA, 21 nt, Artificial Sequence
  Synthetic
gccauuucuuauuuagauuau

SEQ ID NO: 637089 - RNA, 22 nt, Artificial Sequence
  Synthetic
ugccauuucuuauuuagauuau

SEQ ID NO: 637090 - RNA, 23 nt, Artificial Sequence
  Synthetic
uugccauuucuuauuuagauuau

SEQ ID NO: 637091 - RNA, 24 nt, Artificial Sequence
  Synthetic
uuugccauuucuuauuuagauuau

SEQ ID NO: 637092 - RNA, 18 nt, Artificial Sequence
  Synthetic
aacaucauuuuagauuau

SEQ ID NO: 637093 - RNA, 19 nt, Artificial Sequence
  Synthetic
uaacaucauuuuagauuau

SEQ ID NO: 637094 - RNA, 20 nt, Artificial Sequence
  Synthetic
uuaacaucauuuuagauuau

SEQ ID NO: 637095 - RNA, 21 nt, Artificial Sequence
  Synthetic
uuuaacaucauuuuagauuau

SEQ ID NO: 637096 - RNA, 22 nt, Artificial Sequence
  Synthetic
auuuaacaucauuuuagauuau

SEQ ID NO: 637097 - RNA, 23 nt, Artificial Sequence
  Synthetic
cauuuaacaucauuuuagauuau

SEQ ID NO: 637098 - RNA, 24 nt, Artificial Sequence
  Synthetic
acauuuaacaucauuuuagauuau

SEQ ID NO: 637099 - RNA, 18 nt, Artificial Sequence
  Synthetic
aacuaucgguaggauuau

SEQ ID NO: 637100 - RNA, 19 nt, Artificial Sequence
  Synthetic
aaacuaucgguaggauuau

SEQ ID NO: 637101 - RNA, 20 nt, Artificial Sequence
  Synthetic
uaaacuaucgguaggauuau

SEQ ID NO: 637102 - RNA, 21 nt, Artificial Sequence
  Synthetic
guaaacuaucgguaggauuau

SEQ ID NO: 637103 - RNA, 22 nt, Artificial Sequence
  Synthetic
uguaaacuaucgguaggauuau

SEQ ID NO: 637104 - RNA, 23 nt, Artificial Sequence
  Synthetic
cuguaaacuaucgguaggauuau

SEQ ID NO: 637105 - RNA, 24 nt, Artificial Sequence
  Synthetic
acuguaaacuaucgguaggauuau

SEQ ID NO: 637106 - RNA, 18 nt, Artificial Sequence
  Synthetic
uagaaaugaauggauuau

SEQ ID NO: 637107 - RNA, 19 nt, Artificial Sequence
  Synthetic
guagaaaugaauggauuau

SEQ ID NO: 637108 - RNA, 20 nt, Artificial Sequence
  Synthetic
aguagaaaugaauggauuau

SEQ ID NO: 637109 - RNA, 21 nt, Artificial Sequence
  Synthetic
uaguagaaaugaauggauuau

SEQ ID NO: 637110 - RNA, 22 nt, Artificial Sequence
  Synthetic
uuaguagaaaugaauggauuau

SEQ ID NO: 637111 - RNA, 23 nt, Artificial Sequence
  Synthetic
guuaguagaaaugaauggauuau

SEQ ID NO: 637112 - RNA, 24 nt, Artificial Sequence
  Synthetic
uguuaguagaaaugaauggauuau

SEQ ID NO: 637113 - RNA, 18 nt, Artificial Sequence
  Synthetic
gcaucugguaaugauuau

SEQ ID NO: 637114 - RNA, 19 nt, Artificial Sequence
  Synthetic
agcaucugguaaugauuau

SEQ ID NO: 637115 - RNA, 20 nt, Artificial Sequence
  Synthetic
uagcaucugguaaugauuau

SEQ ID NO: 637116 - RNA, 21 nt, Artificial Sequence
  Synthetic
auagcaucugguaaugauuau

SEQ ID NO: 637117 - RNA, 22 nt, Artificial Sequence
  Synthetic
aauagcaucugguaaugauuau

SEQ ID NO: 637118 - RNA, 23 nt, Artificial Sequence
  Synthetic
aaauagcaucugguaaugauuau

SEQ ID NO: 637119 - RNA, 24 nt, Artificial Sequence
  Synthetic
aaaauagcaucugguaaugauuau

SEQ ID NO: 637120 - RNA, 18 nt, Artificial Sequence
  Synthetic
caagauagguaugauuau

SEQ ID NO: 637121 - RNA, 19 nt, Artificial Sequence
  Synthetic
ucaagauagguaugauuau

SEQ ID NO: 637122 - RNA, 20 nt, Artificial Sequence
  Synthetic
uucaagauagguaugauuau

SEQ ID NO: 637123 - RNA, 21 nt, Artificial Sequence
  Synthetic
cuucaagauagguaugauuau

SEQ ID NO: 637124 - RNA, 22 nt, Artificial Sequence
  Synthetic
ucuucaagauagguaugauuau

SEQ ID NO: 637125 - RNA, 23 nt, Artificial Sequence
  Synthetic
gucuucaagauagguaugauuau

SEQ ID NO: 637126 - RNA, 24 nt, Artificial Sequence
  Synthetic
agucuucaagauagguaugauuau

SEQ ID NO: 637127 - RNA, 18 nt, Artificial Sequence
  Synthetic
gugaaacuuacugauuau

SEQ ID NO: 637128 - RNA, 19 nt, Artificial Sequence
  Synthetic
ugugaaacuuacugauuau

SEQ ID NO: 637129 - RNA, 20 nt, Artificial Sequence
  Synthetic
uugugaaacuuacugauuau

SEQ ID NO: 637130 - RNA, 21 nt, Artificial Sequence
  Synthetic
cuugugaaacuuacugauuau

SEQ ID NO: 637131 - RNA, 22 nt, Artificial Sequence
  Synthetic
ucuugugaaacuuacugauuau

SEQ ID NO: 637132 - RNA, 23 nt, Artificial Sequence
  Synthetic
aucuugugaaacuuacugauuau

SEQ ID NO: 637133 - RNA, 24 nt, Artificial Sequence
  Synthetic
gaucuugugaaacuuacugauuau

SEQ ID NO: 637134 - RNA, 18 nt, Artificial Sequence
  Synthetic
aacuugagcugugauuau

SEQ ID NO: 637135 - RNA, 19 nt, Artificial Sequence
  Synthetic
uaacuugagcugugauuau

SEQ ID NO: 637136 - RNA, 20 nt, Artificial Sequence
  Synthetic
uuaacuugagcugugauuau

SEQ ID NO: 637137 - RNA, 21 nt, Artificial Sequence
  Synthetic
guuaacuugagcugugauuau

SEQ ID NO: 637138 - RNA, 22 nt, Artificial Sequence
  Synthetic
aguuaacuugagcugugauuau

SEQ ID NO: 637139 - RNA, 23 nt, Artificial Sequence
  Synthetic
aaguuaacuugagcugugauuau

SEQ ID NO: 637140 - RNA, 24 nt, Artificial Sequence
  Synthetic
aaaguuaacuugagcugugauuau

SEQ ID NO: 637141 - RNA, 18 nt, Artificial Sequence
  Synthetic
aaaaaaguaauugauuau

SEQ ID NO: 637142 - RNA, 19 nt, Artificial Sequence
  Synthetic
gaaaaaaguaauugauuau

SEQ ID NO: 637143 - RNA, 20 nt, Artificial Sequence
  Synthetic
ggaaaaaaguaauugauuau

SEQ ID NO: 637144 - RNA, 21 nt, Artificial Sequence
  Synthetic
aggaaaaaaguaauugauuau

SEQ ID NO: 637145 - RNA, 22 nt, Artificial Sequence
  Synthetic
gaggaaaaaaguaauugauuau

SEQ ID NO: 637146 - RNA, 23 nt, Artificial Sequence
  Synthetic
agaggaaaaaaguaauugauuau

SEQ ID NO: 637147 - RNA, 24 nt, Artificial Sequence
  Synthetic
uagaggaaaaaaguaauugauuau

SEQ ID NO: 637148 - RNA, 18 nt, Artificial Sequence
  Synthetic
auauaaagcaaauauuau

SEQ ID NO: 637149 - RNA, 19 nt, Artificial Sequence
  Synthetic
uauauaaagcaaauauuau

SEQ ID NO: 637150 - RNA, 20 nt, Artificial Sequence
  Synthetic
auauauaaagcaaauauuau

SEQ ID NO: 637151 - RNA, 21 nt, Artificial Sequence
  Synthetic
gauauauaaagcaaauauuau

SEQ ID NO: 637152 - RNA, 22 nt, Artificial Sequence
  Synthetic
agauauauaaagcaaauauuau

SEQ ID NO: 637153 - RNA, 23 nt, Artificial Sequence
  Synthetic
cagauauauaaagcaaauauuau

SEQ ID NO: 637154 - RNA, 24 nt, Artificial Sequence
  Synthetic
acagauauauaaagcaaauauuau

SEQ ID NO: 637155 - RNA, 18 nt, Artificial Sequence
  Synthetic
acugaaguucaauauuau

SEQ ID NO: 637156 - RNA, 19 nt, Artificial Sequence
  Synthetic
gacugaaguucaauauuau

SEQ ID NO: 637157 - RNA, 20 nt, Artificial Sequence
  Synthetic
agacugaaguucaauauuau

SEQ ID NO: 637158 - RNA, 21 nt, Artificial Sequence
  Synthetic
cagacugaaguucaauauuau

SEQ ID NO: 637159 - RNA, 22 nt, Artificial Sequence
  Synthetic
ucagacugaaguucaauauuau

SEQ ID NO: 637160 - RNA, 23 nt, Artificial Sequence
  Synthetic
gucagacugaaguucaauauuau

SEQ ID NO: 637161 - RNA, 24 nt, Artificial Sequence
  Synthetic
agucagacugaaguucaauauuau

SEQ ID NO: 637162 - RNA, 18 nt, Artificial Sequence
  Synthetic
gugagacaugaauauuau

SEQ ID NO: 637163 - RNA, 19 nt, Artificial Sequence
  Synthetic
ggugagacaugaauauuau

SEQ ID NO: 637164 - RNA, 20 nt, Artificial Sequence
  Synthetic
gggugagacaugaauauuau

SEQ ID NO: 637165 - RNA, 21 nt, Artificial Sequence
  Synthetic
ugggugagacaugaauauuau

SEQ ID NO: 637166 - RNA, 22 nt, Artificial Sequence
  Synthetic
augggugagacaugaauauuau

SEQ ID NO: 637167 - RNA, 23 nt, Artificial Sequence
  Synthetic
aaugggugagacaugaauauuau

SEQ ID NO: 637168 - RNA, 24 nt, Artificial Sequence
  Synthetic
aaaugggugagacaugaauauuau

SEQ ID NO: 637169 - RNA, 18 nt, Artificial Sequence
  Synthetic
aaaugcaauccauauuau

SEQ ID NO: 637170 - RNA, 19 nt, Artificial Sequence
  Synthetic
aaaaugcaauccauauuau

SEQ ID NO: 637171 - RNA, 20 nt, Artificial Sequence
  Synthetic
aaaaaugcaauccauauuau

SEQ ID NO: 637172 - RNA, 21 nt, Artificial Sequence
  Synthetic
aaaaaaugcaauccauauuau

SEQ ID NO: 637173 - RNA, 22 nt, Artificial Sequence
  Synthetic
aaaaaaaugcaauccauauuau

SEQ ID NO: 637174 - RNA, 23 nt, Artificial Sequence
  Synthetic
aaaaaaaaugcaauccauauuau

SEQ ID NO: 637175 - RNA, 24 nt, Artificial Sequence
  Synthetic
uaaaaaaaaugcaauccauauuau

SEQ ID NO: 637176 - RNA, 18 nt, Artificial Sequence
  Synthetic
uuggauguccacuauuau

SEQ ID NO: 637177 - RNA, 19 nt, Artificial Sequence
  Synthetic
cuuggauguccacuauuau

SEQ ID NO: 637178 - RNA, 20 nt, Artificial Sequence
  Synthetic
ucuuggauguccacuauuau

SEQ ID NO: 637179 - RNA, 21 nt, Artificial Sequence
  Synthetic
uucuuggauguccacuauuau

SEQ ID NO: 637180 - RNA, 22 nt, Artificial Sequence
  Synthetic
cuucuuggauguccacuauuau

SEQ ID NO: 637181 - RNA, 23 nt, Artificial Sequence
  Synthetic
ccuucuuggauguccacuauuau

SEQ ID NO: 637182 - RNA, 24 nt, Artificial Sequence
  Synthetic
accuucuuggauguccacuauuau

SEQ ID NO: 637183 - RNA, 18 nt, Artificial Sequence
  Synthetic
uguuuacuccucuauuau

SEQ ID NO: 637184 - RNA, 19 nt, Artificial Sequence
  Synthetic
cuguuuacuccucuauuau

SEQ ID NO: 637185 - RNA, 20 nt, Artificial Sequence
  Synthetic
acuguuuacuccucuauuau

SEQ ID NO: 637186 - RNA, 21 nt, Artificial Sequence
  Synthetic
cacuguuuacuccucuauuau

SEQ ID NO: 637187 - RNA, 22 nt, Artificial Sequence
  Synthetic
acacuguuuacuccucuauuau

SEQ ID NO: 637188 - RNA, 23 nt, Artificial Sequence
  Synthetic
cacacuguuuacuccucuauuau

SEQ ID NO: 637189 - RNA, 24 nt, Artificial Sequence
  Synthetic
ucacacuguuuacuccucuauuau

SEQ ID NO: 637190 - RNA, 18 nt, Artificial Sequence
  Synthetic
uuuuccauauucuauuau

SEQ ID NO: 637191 - RNA, 19 nt, Artificial Sequence
  Synthetic
cuuuuccauauucuauuau

SEQ ID NO: 637192 - RNA, 20 nt, Artificial Sequence
  Synthetic
acuuuuccauauucuauuau

SEQ ID NO: 637193 - RNA, 21 nt, Artificial Sequence
  Synthetic
uacuuuuccauauucuauuau

SEQ ID NO: 637194 - RNA, 22 nt, Artificial Sequence
  Synthetic
cuacuuuuccauauucuauuau

SEQ ID NO: 637195 - RNA, 23 nt, Artificial Sequence
  Synthetic
ccuacuuuuccauauucuauuau

SEQ ID NO: 637196 - RNA, 24 nt, Artificial Sequence
  Synthetic
uccuacuuuuccauauucuauuau

SEQ ID NO: 637197 - RNA, 18 nt, Artificial Sequence
  Synthetic
auuaugauuaaguauuau

SEQ ID NO: 637198 - RNA, 19 nt, Artificial Sequence
  Synthetic
gauuaugauuaaguauuau

SEQ ID NO: 637199 - RNA, 20 nt, Artificial Sequence
  Synthetic
ggauuaugauuaaguauuau

SEQ ID NO: 637200 - RNA, 21 nt, Artificial Sequence
  Synthetic
aggauuaugauuaaguauuau

SEQ ID NO: 637201 - RNA, 22 nt, Artificial Sequence
  Synthetic
aaggauuaugauuaaguauuau

SEQ ID NO: 637202 - RNA, 23 nt, Artificial Sequence
  Synthetic
caaggauuaugauuaaguauuau

SEQ ID NO: 637203 - RNA, 24 nt, Artificial Sequence
  Synthetic
ccaaggauuaugauuaaguauuau

SEQ ID NO: 637204 - RNA, 18 nt, Artificial Sequence
  Synthetic
uaggaaggaugguauuau

SEQ ID NO: 637205 - RNA, 19 nt, Artificial Sequence
  Synthetic
guaggaaggaugguauuau

SEQ ID NO: 637206 - RNA, 20 nt, Artificial Sequence
  Synthetic
aguaggaaggaugguauuau

SEQ ID NO: 637207 - RNA, 21 nt, Artificial Sequence
  Synthetic
uaguaggaaggaugguauuau

SEQ ID NO: 637208 - RNA, 22 nt, Artificial Sequence
  Synthetic
auaguaggaaggaugguauuau

SEQ ID NO: 637209 - RNA, 23 nt, Artificial Sequence
  Synthetic
aauaguaggaaggaugguauuau

SEQ ID NO: 637210 - RNA, 24 nt, Artificial Sequence
  Synthetic
aaauaguaggaaggaugguauuau

SEQ ID NO: 637211 - RNA, 18 nt, Artificial Sequence
  Synthetic
cuuuugagacuguauuau

SEQ ID NO: 637212 - RNA, 19 nt, Artificial Sequence
  Synthetic
ccuuuugagacuguauuau

SEQ ID NO: 637213 - RNA, 20 nt, Artificial Sequence
  Synthetic
gccuuuugagacuguauuau

SEQ ID NO: 637214 - RNA, 21 nt, Artificial Sequence
  Synthetic
ggccuuuugagacuguauuau

SEQ ID NO: 637215 - RNA, 22 nt, Artificial Sequence
  Synthetic
uggccuuuugagacuguauuau

SEQ ID NO: 637216 - RNA, 23 nt, Artificial Sequence
  Synthetic
guggccuuuugagacuguauuau

SEQ ID NO: 637217 - RNA, 24 nt, Artificial Sequence
  Synthetic
uguggccuuuugagacuguauuau

SEQ ID NO: 637218 - RNA, 18 nt, Artificial Sequence
  Synthetic
aaucuaacauuguauuau

SEQ ID NO: 637219 - RNA, 19 nt, Artificial Sequence
  Synthetic
aaaucuaacauuguauuau

SEQ ID NO: 637220 - RNA, 20 nt, Artificial Sequence
  Synthetic
aaaaucuaacauuguauuau

SEQ ID NO: 637221 - RNA, 21 nt, Artificial Sequence
  Synthetic
aaaaaucuaacauuguauuau

SEQ ID NO: 637222 - RNA, 22 nt, Artificial Sequence
  Synthetic
aaaaaaucuaacauuguauuau

SEQ ID NO: 637223 - RNA, 23 nt, Artificial Sequence
  Synthetic
aaaaaaaucuaacauuguauuau

SEQ ID NO: 637224 - RNA, 24 nt, Artificial Sequence
  Synthetic
aaaaaaaaucuaacauuguauuau

SEQ ID NO: 637225 - RNA, 18 nt, Artificial Sequence
  Synthetic
ccaagccaggauuauuau

SEQ ID NO: 637226 - RNA, 19 nt, Artificial Sequence
  Synthetic
accaagccaggauuauuau

SEQ ID NO: 637227 - RNA, 20 nt, Artificial Sequence
  Synthetic
uaccaagccaggauuauuau

SEQ ID NO: 637228 - RNA, 21 nt, Artificial Sequence
  Synthetic
cuaccaagccaggauuauuau

SEQ ID NO: 637229 - RNA, 22 nt, Artificial Sequence
  Synthetic
ucuaccaagccaggauuauuau

SEQ ID NO: 637230 - RNA, 23 nt, Artificial Sequence
  Synthetic
aucuaccaagccaggauuauuau

SEQ ID NO: 637231 - RNA, 24 nt, Artificial Sequence
  Synthetic
aaucuaccaagccaggauuauuau

SEQ ID NO: 637232 - RNA, 18 nt, Artificial Sequence
  Synthetic
uguucaaguccuuauuau

SEQ ID NO: 637233 - RNA, 19 nt, Artificial Sequence
  Synthetic
cuguucaaguccuuauuau

SEQ ID NO: 637234 - RNA, 20 nt, Artificial Sequence
  Synthetic
ucuguucaaguccuuauuau

SEQ ID NO: 637235 - RNA, 21 nt, Artificial Sequence
  Synthetic
gucuguucaaguccuuauuau

SEQ ID NO: 637236 - RNA, 22 nt, Artificial Sequence
  Synthetic
agucuguucaaguccuuauuau

SEQ ID NO: 637237 - RNA, 23 nt, Artificial Sequence
  Synthetic
aagucuguucaaguccuuauuau

SEQ ID NO: 637238 - RNA, 24 nt, Artificial Sequence
  Synthetic
gaagucuguucaaguccuuauuau

SEQ ID NO: 637239 - RNA, 18 nt, Artificial Sequence
  Synthetic
aaguucacaucuuauuau

SEQ ID NO: 637240 - RNA, 19 nt, Artificial Sequence
  Synthetic
uaaguucacaucuuauuau

SEQ ID NO: 637241 - RNA, 20 nt, Artificial Sequence
  Synthetic
auaaguucacaucuuauuau

SEQ ID NO: 637242 - RNA, 21 nt, Artificial Sequence
  Synthetic
gauaaguucacaucuuauuau

SEQ ID NO: 637243 - RNA, 22 nt, Artificial Sequence
  Synthetic
agauaaguucacaucuuauuau

SEQ ID NO: 637244 - RNA, 23 nt, Artificial Sequence
  Synthetic
aagauaaguucacaucuuauuau

SEQ ID NO: 637245 - RNA, 24 nt, Artificial Sequence
  Synthetic
caagauaaguucacaucuuauuau

SEQ ID NO: 637246 - RNA, 18 nt, Artificial Sequence
  Synthetic
ccuuuugauuguuauuau

SEQ ID NO: 637247 - RNA, 19 nt, Artificial Sequence
  Synthetic
uccuuuugauuguuauuau

SEQ ID NO: 637248 - RNA, 20 nt, Artificial Sequence
  Synthetic
uuccuuuugauuguuauuau

SEQ ID NO: 637249 - RNA, 21 nt, Artificial Sequence
  Synthetic
guuccuuuugauuguuauuau

SEQ ID NO: 637250 - RNA, 22 nt, Artificial Sequence
  Synthetic
uguuccuuuugauuguuauuau

SEQ ID NO: 637251 - RNA, 23 nt, Artificial Sequence
  Synthetic
cuguuccuuuugauuguuauuau

SEQ ID NO: 637252 - RNA, 24 nt, Artificial Sequence
  Synthetic
acuguuccuuuugauuguuauuau

SEQ ID NO: 637253 - RNA, 18 nt, Artificial Sequence
  Synthetic
auuaaauuuuguuauuau

SEQ ID NO: 637254 - RNA, 19 nt, Artificial Sequence
  Synthetic
aauuaaauuuuguuauuau

SEQ ID NO: 637255 - RNA, 20 nt, Artificial Sequence
  Synthetic
aaauuaaauuuuguuauuau

SEQ ID NO: 637256 - RNA, 21 nt, Artificial Sequence
  Synthetic
aaaauuaaauuuuguuauuau

SEQ ID NO: 637257 - RNA, 22 nt, Artificial Sequence
  Synthetic
aaaaauuaaauuuuguuauuau

SEQ ID NO: 637258 - RNA, 23 nt, Artificial Sequence
  Synthetic
uaaaaauuaaauuuuguuauuau

SEQ ID NO: 637259 - RNA, 24 nt, Artificial Sequence
  Synthetic
auaaaaauuaaauuuuguuauuau

SEQ ID NO: 637260 - RNA, 18 nt, Artificial Sequence
  Synthetic
aauguaucugaaacuuau

SEQ ID NO: 637261 - RNA, 19 nt, Artificial Sequence
  Synthetic
uaauguaucugaaacuuau

SEQ ID NO: 637262 - RNA, 20 nt, Artificial Sequence
  Synthetic
guaauguaucugaaacuuau

SEQ ID NO: 637263 - RNA, 21 nt, Artificial Sequence
  Synthetic
aguaauguaucugaaacuuau

SEQ ID NO: 637264 - RNA, 22 nt, Artificial Sequence
  Synthetic
uaguaauguaucugaaacuuau

SEQ ID NO: 637265 - RNA, 23 nt, Artificial Sequence
  Synthetic
auaguaauguaucugaaacuuau

SEQ ID NO: 637266 - RNA, 24 nt, Artificial Sequence
  Synthetic
gauaguaauguaucugaaacuuau

SEQ ID NO: 637267 - RNA, 18 nt, Artificial Sequence
  Synthetic
uucacaaaauaaacuuau

SEQ ID NO: 637268 - RNA, 19 nt, Artificial Sequence
  Synthetic
guucacaaaauaaacuuau

SEQ ID NO: 637269 - RNA, 20 nt, Artificial Sequence
  Synthetic
gguucacaaaauaaacuuau

SEQ ID NO: 637270 - RNA, 21 nt, Artificial Sequence
  Synthetic
agguucacaaaauaaacuuau

SEQ ID NO: 637271 - RNA, 22 nt, Artificial Sequence
  Synthetic
aagguucacaaaauaaacuuau

SEQ ID NO: 637272 - RNA, 23 nt, Artificial Sequence
  Synthetic
uaagguucacaaaauaaacuuau

SEQ ID NO: 637273 - RNA, 24 nt, Artificial Sequence
  Synthetic
uuaagguucacaaaauaaacuuau

SEQ ID NO: 637274 - RNA, 18 nt, Artificial Sequence
  Synthetic
aaguugcucacaacuuau

SEQ ID NO: 637275 - RNA, 19 nt, Artificial Sequence
  Synthetic
uaaguugcucacaacuuau

SEQ ID NO: 637276 - RNA, 20 nt, Artificial Sequence
  Synthetic
uuaaguugcucacaacuuau

SEQ ID NO: 637277 - RNA, 21 nt, Artificial Sequence
  Synthetic
cuuaaguugcucacaacuuau

SEQ ID NO: 637278 - RNA, 22 nt, Artificial Sequence
  Synthetic
ccuuaaguugcucacaacuuau

SEQ ID NO: 637279 - RNA, 23 nt, Artificial Sequence
  Synthetic
uccuuaaguugcucacaacuuau

SEQ ID NO: 637280 - RNA, 24 nt, Artificial Sequence
  Synthetic
auccuuaaguugcucacaacuuau

SEQ ID NO: 637281 - RNA, 18 nt, Artificial Sequence
  Synthetic
caugaccugggaacuuau

SEQ ID NO: 637282 - RNA, 19 nt, Artificial Sequence
  Synthetic
gcaugaccugggaacuuau

SEQ ID NO: 637283 - RNA, 20 nt, Artificial Sequence
  Synthetic
agcaugaccugggaacuuau

SEQ ID NO: 637284 - RNA, 21 nt, Artificial Sequence
  Synthetic
cagcaugaccugggaacuuau

SEQ ID NO: 637285 - RNA, 22 nt, Artificial Sequence
  Synthetic
ucagcaugaccugggaacuuau

SEQ ID NO: 637286 - RNA, 23 nt, Artificial Sequence
  Synthetic
aucagcaugaccugggaacuuau

SEQ ID NO: 637287 - RNA, 24 nt, Artificial Sequence
  Synthetic
uaucagcaugaccugggaacuuau

SEQ ID NO: 637288 - RNA, 18 nt, Artificial Sequence
  Synthetic
uggggcauuuuaacuuau

SEQ ID NO: 637289 - RNA, 19 nt, Artificial Sequence
  Synthetic
uuggggcauuuuaacuuau

SEQ ID NO: 637290 - RNA, 20 nt, Artificial Sequence
  Synthetic
uuuggggcauuuuaacuuau

SEQ ID NO: 637291 - RNA, 21 nt, Artificial Sequence
  Synthetic
cuuuggggcauuuuaacuuau

SEQ ID NO: 637292 - RNA, 22 nt, Artificial Sequence
  Synthetic
gcuuuggggcauuuuaacuuau

SEQ ID NO: 637293 - RNA, 23 nt, Artificial Sequence
  Synthetic
ugcuuuggggcauuuuaacuuau

SEQ ID NO: 637294 - RNA, 24 nt, Artificial Sequence
  Synthetic
cugcuuuggggcauuuuaacuuau

SEQ ID NO: 637295 - RNA, 18 nt, Artificial Sequence
  Synthetic
aacaaauuucacacuuau

SEQ ID NO: 637296 - RNA, 19 nt, Artificial Sequence
  Synthetic
caacaaauuucacacuuau

SEQ ID NO: 637297 - RNA, 20 nt, Artificial Sequence
  Synthetic
ccaacaaauuucacacuuau

SEQ ID NO: 637298 - RNA, 21 nt, Artificial Sequence
  Synthetic
cccaacaaauuucacacuuau

SEQ ID NO: 637299 - RNA, 22 nt, Artificial Sequence
  Synthetic
gcccaacaaauuucacacuuau

SEQ ID NO: 637300 - RNA, 23 nt, Artificial Sequence
  Synthetic
ggcccaacaaauuucacacuuau

SEQ ID NO: 637301 - RNA, 24 nt, Artificial Sequence
  Synthetic
cggcccaacaaauuucacacuuau

SEQ ID NO: 637302 - RNA, 18 nt, Artificial Sequence
  Synthetic
gcuuccauuuucacuuau

SEQ ID NO: 637303 - RNA, 19 nt, Artificial Sequence
  Synthetic
ugcuuccauuuucacuuau

SEQ ID NO: 637304 - RNA, 20 nt, Artificial Sequence
  Synthetic
cugcuuccauuuucacuuau

SEQ ID NO: 637305 - RNA, 21 nt, Artificial Sequence
  Synthetic
ccugcuuccauuuucacuuau

SEQ ID NO: 637306 - RNA, 22 nt, Artificial Sequence
  Synthetic
uccugcuuccauuuucacuuau

SEQ ID NO: 637307 - RNA, 23 nt, Artificial Sequence
  Synthetic
cuccugcuuccauuuucacuuau

SEQ ID NO: 637308 - RNA, 24 nt, Artificial Sequence
  Synthetic
ucuccugcuuccauuuucacuuau

SEQ ID NO: 637309 - RNA, 18 nt, Artificial Sequence
  Synthetic
acuuaauaagagacuuau

SEQ ID NO: 637310 - RNA, 19 nt, Artificial Sequence
  Synthetic
aacuuaauaagagacuuau

SEQ ID NO: 637311 - RNA, 20 nt, Artificial Sequence
  Synthetic
gaacuuaauaagagacuuau

SEQ ID NO: 637312 - RNA, 21 nt, Artificial Sequence
  Synthetic
agaacuuaauaagagacuuau

SEQ ID NO: 637313 - RNA, 22 nt, Artificial Sequence
  Synthetic
cagaacuuaauaagagacuuau

SEQ ID NO: 637314 - RNA, 23 nt, Artificial Sequence
  Synthetic
gcagaacuuaauaagagacuuau

SEQ ID NO: 637315 - RNA, 24 nt, Artificial Sequence
  Synthetic
ugcagaacuuaauaagagacuuau

SEQ ID NO: 637316 - RNA, 18 nt, Artificial Sequence
  Synthetic
aucauuuuaaugacuuau

SEQ ID NO: 637317 - RNA, 19 nt, Artificial Sequence
  Synthetic
caucauuuuaaugacuuau

SEQ ID NO: 637318 - RNA, 20 nt, Artificial Sequence
  Synthetic
acaucauuuuaaugacuuau

SEQ ID NO: 637319 - RNA, 21 nt, Artificial Sequence
  Synthetic
uacaucauuuuaaugacuuau

SEQ ID NO: 637320 - RNA, 22 nt, Artificial Sequence
  Synthetic
guacaucauuuuaaugacuuau

SEQ ID NO: 637321 - RNA, 23 nt, Artificial Sequence
  Synthetic
gguacaucauuuuaaugacuuau

SEQ ID NO: 637322 - RNA, 24 nt, Artificial Sequence
  Synthetic
agguacaucauuuuaaugacuuau

SEQ ID NO: 637323 - RNA, 18 nt, Artificial Sequence
  Synthetic
gcuaucucccugacuuau

SEQ ID NO: 637324 - RNA, 19 nt, Artificial Sequence
  Synthetic
ugcuaucucccugacuuau

SEQ ID NO: 637325 - RNA, 20 nt, Artificial Sequence
  Synthetic
cugcuaucucccugacuuau

SEQ ID NO: 637326 - RNA, 21 nt, Artificial Sequence
  Synthetic
ccugcuaucucccugacuuau

SEQ ID NO: 637327 - RNA, 22 nt, Artificial Sequence
  Synthetic
uccugcuaucucccugacuuau

SEQ ID NO: 637328 - RNA, 23 nt, Artificial Sequence
  Synthetic
uuccugcuaucucccugacuuau

SEQ ID NO: 637329 - RNA, 24 nt, Artificial Sequence
  Synthetic
uuuccugcuaucucccugacuuau

SEQ ID NO: 637330 - RNA, 18 nt, Artificial Sequence
  Synthetic
acuuauauauauacuuau

SEQ ID NO: 637331 - RNA, 19 nt, Artificial Sequence
  Synthetic
uacuuauauauauacuuau

SEQ ID NO: 637332 - RNA, 20 nt, Artificial Sequence
  Synthetic
auacuuauauauauacuuau

SEQ ID NO: 637333 - RNA, 21 nt, Artificial Sequence
  Synthetic
uauacuuauauauauacuuau

SEQ ID NO: 637334 - RNA, 22 nt, Artificial Sequence
  Synthetic
auauacuuauauauauacuuau

SEQ ID NO: 637335 - RNA, 23 nt, Artificial Sequence
  Synthetic
uauauacuuauauauauacuuau

SEQ ID NO: 637336 - RNA, 24 nt, Artificial Sequence
  Synthetic
auauauacuuauauauauacuuau

SEQ ID NO: 637337 - RNA, 18 nt, Artificial Sequence
  Synthetic
caauaaauuccuacuuau

SEQ ID NO: 637338 - RNA, 19 nt, Artificial Sequence
  Synthetic
acaauaaauuccuacuuau

SEQ ID NO: 637339 - RNA, 20 nt, Artificial Sequence
  Synthetic
aacaauaaauuccuacuuau

SEQ ID NO: 637340 - RNA, 21 nt, Artificial Sequence
  Synthetic
aaacaauaaauuccuacuuau

SEQ ID NO: 637341 - RNA, 22 nt, Artificial Sequence
  Synthetic
aaaacaauaaauuccuacuuau

SEQ ID NO: 637342 - RNA, 23 nt, Artificial Sequence
  Synthetic
gaaaacaauaaauuccuacuuau

SEQ ID NO: 637343 - RNA, 24 nt, Artificial Sequence
  Synthetic
ggaaaacaauaaauuccuacuuau

SEQ ID NO: 637344 - RNA, 18 nt, Artificial Sequence
  Synthetic
cauaacuuacuuacuuau

SEQ ID NO: 637345 - RNA, 19 nt, Artificial Sequence
  Synthetic
ucauaacuuacuuacuuau

SEQ ID NO: 637346 - RNA, 20 nt, Artificial Sequence
  Synthetic
cucauaacuuacuuacuuau

SEQ ID NO: 637347 - RNA, 21 nt, Artificial Sequence
  Synthetic
acucauaacuuacuuacuuau

SEQ ID NO: 637348 - RNA, 22 nt, Artificial Sequence
  Synthetic
cacucauaacuuacuuacuuau

SEQ ID NO: 637349 - RNA, 23 nt, Artificial Sequence
  Synthetic
ccacucauaacuuacuuacuuau

SEQ ID NO: 637350 - RNA, 24 nt, Artificial Sequence
  Synthetic
cccacucauaacuuacuuacuuau

SEQ ID NO: 637351 - RNA, 18 nt, Artificial Sequence
  Synthetic
uucacuauaguuacuuau

SEQ ID NO: 637352 - RNA, 19 nt, Artificial Sequence
  Synthetic
uuucacuauaguuacuuau

SEQ ID NO: 637353 - RNA, 20 nt, Artificial Sequence
  Synthetic
cuuucacuauaguuacuuau

SEQ ID NO: 637354 - RNA, 21 nt, Artificial Sequence
  Synthetic
gcuuucacuauaguuacuuau

SEQ ID NO: 637355 - RNA, 22 nt, Artificial Sequence
  Synthetic
ugcuuucacuauaguuacuuau

SEQ ID NO: 637356 - RNA, 23 nt, Artificial Sequence
  Synthetic
gugcuuucacuauaguuacuuau

SEQ ID NO: 637357 - RNA, 24 nt, Artificial Sequence
  Synthetic
cgugcuuucacuauaguuacuuau

SEQ ID NO: 637358 - RNA, 18 nt, Artificial Sequence
  Synthetic
aucugagaauuuacuuau

SEQ ID NO: 637359 - RNA, 19 nt, Artificial Sequence
  Synthetic
aaucugagaauuuacuuau

SEQ ID NO: 637360 - RNA, 20 nt, Artificial Sequence
  Synthetic
caaucugagaauuuacuuau

SEQ ID NO: 637361 - RNA, 21 nt, Artificial Sequence
  Synthetic
acaaucugagaauuuacuuau

SEQ ID NO: 637362 - RNA, 22 nt, Artificial Sequence
  Synthetic
aacaaucugagaauuuacuuau

SEQ ID NO: 637363 - RNA, 23 nt, Artificial Sequence
  Synthetic
aaacaaucugagaauuuacuuau

SEQ ID NO: 637364 - RNA, 24 nt, Artificial Sequence
  Synthetic
gaaacaaucugagaauuuacuuau

SEQ ID NO: 637365 - RNA, 18 nt, Artificial Sequence
  Synthetic
uguuguaauuuuacuuau

SEQ ID NO: 637366 - RNA, 19 nt, Artificial Sequence
  Synthetic
auguuguaauuuuacuuau

SEQ ID NO: 637367 - RNA, 20 nt, Artificial Sequence
  Synthetic
cauguuguaauuuuacuuau

SEQ ID NO: 637368 - RNA, 21 nt, Artificial Sequence
  Synthetic
ucauguuguaauuuuacuuau

SEQ ID NO: 637369 - RNA, 22 nt, Artificial Sequence
  Synthetic
cucauguuguaauuuuacuuau

SEQ ID NO: 637370 - RNA, 23 nt, Artificial Sequence
  Synthetic
acucauguuguaauuuuacuuau

SEQ ID NO: 637371 - RNA, 24 nt, Artificial Sequence
  Synthetic
aacucauguuguaauuuuacuuau

SEQ ID NO: 637372 - RNA, 18 nt, Artificial Sequence
  Synthetic
uaugccuauuuuacuuau

SEQ ID NO: 637373 - RNA, 19 nt, Artificial Sequence
  Synthetic
uuaugccuauuuuacuuau

SEQ ID NO: 637374 - RNA, 20 nt, Artificial Sequence
  Synthetic
auuaugccuauuuuacuuau

SEQ ID NO: 637375 - RNA, 21 nt, Artificial Sequence
  Synthetic
uauuaugccuauuuuacuuau

SEQ ID NO: 637376 - RNA, 22 nt, Artificial Sequence
  Synthetic
guauuaugccuauuuuacuuau

SEQ ID NO: 637377 - RNA, 23 nt, Artificial Sequence
  Synthetic
uguauuaugccuauuuuacuuau

SEQ ID NO: 637378 - RNA, 24 nt, Artificial Sequence
  Synthetic
cuguauuaugccuauuuuacuuau

SEQ ID NO: 637379 - RNA, 18 nt, Artificial Sequence
  Synthetic
uaugacucacaaccuuau

SEQ ID NO: 637380 - RNA, 19 nt, Artificial Sequence
  Synthetic
uuaugacucacaaccuuau

SEQ ID NO: 637381 - RNA, 20 nt, Artificial Sequence
  Synthetic
auuaugacucacaaccuuau

SEQ ID NO: 637382 - RNA, 21 nt, Artificial Sequence
  Synthetic
aauuaugacucacaaccuuau

SEQ ID NO: 637383 - RNA, 22 nt, Artificial Sequence
  Synthetic
gaauuaugacucacaaccuuau

SEQ ID NO: 637384 - RNA, 23 nt, Artificial Sequence
  Synthetic
cgaauuaugacucacaaccuuau

SEQ ID NO: 637385 - RNA, 24 nt, Artificial Sequence
  Synthetic
ccgaauuaugacucacaaccuuau

SEQ ID NO: 637386 - RNA, 18 nt, Artificial Sequence
  Synthetic
accccacagcuaccuuau

SEQ ID NO: 637387 - RNA, 19 nt, Artificial Sequence
  Synthetic
caccccacagcuaccuuau

SEQ ID NO: 637388 - RNA, 20 nt, Artificial Sequence
  Synthetic
ucaccccacagcuaccuuau

SEQ ID NO: 637389 - RNA, 21 nt, Artificial Sequence
  Synthetic
cucaccccacagcuaccuuau

SEQ ID NO: 637390 - RNA, 22 nt, Artificial Sequence
  Synthetic
ucucaccccacagcuaccuuau

SEQ ID NO: 637391 - RNA, 23 nt, Artificial Sequence
  Synthetic
gucucaccccacagcuaccuuau

SEQ ID NO: 637392 - RNA, 24 nt, Artificial Sequence
  Synthetic
ggucucaccccacagcuaccuuau

SEQ ID NO: 637393 - RNA, 18 nt, Artificial Sequence
  Synthetic
uuccuaugcuuaccuuau

SEQ ID NO: 637394 - RNA, 19 nt, Artificial Sequence
  Synthetic
auuccuaugcuuaccuuau

SEQ ID NO: 637395 - RNA, 20 nt, Artificial Sequence
  Synthetic
aauuccuaugcuuaccuuau

SEQ ID NO: 637396 - RNA, 21 nt, Artificial Sequence
  Synthetic
aaauuccuaugcuuaccuuau

SEQ ID NO: 637397 - RNA, 22 nt, Artificial Sequence
  Synthetic
uaaauuccuaugcuuaccuuau

SEQ ID NO: 637398 - RNA, 23 nt, Artificial Sequence
  Synthetic
guaaauuccuaugcuuaccuuau

SEQ ID NO: 637399 - RNA, 24 nt, Artificial Sequence
  Synthetic
uguaaauuccuaugcuuaccuuau

SEQ ID NO: 637400 - RNA, 18 nt, Artificial Sequence
  Synthetic
gaagaaaacuacccuuau

SEQ ID NO: 637401 - RNA, 19 nt, Artificial Sequence
  Synthetic
ugaagaaaacuacccuuau

SEQ ID NO: 637402 - RNA, 20 nt, Artificial Sequence
  Synthetic
uugaagaaaacuacccuuau

SEQ ID NO: 637403 - RNA, 21 nt, Artificial Sequence
  Synthetic
uuugaagaaaacuacccuuau

SEQ ID NO: 637404 - RNA, 22 nt, Artificial Sequence
  Synthetic
guuugaagaaaacuacccuuau

SEQ ID NO: 637405 - RNA, 23 nt, Artificial Sequence
  Synthetic
uguuugaagaaaacuacccuuau

SEQ ID NO: 637406 - RNA, 24 nt, Artificial Sequence
  Synthetic
cuguuugaagaaaacuacccuuau

SEQ ID NO: 637407 - RNA, 18 nt, Artificial Sequence
  Synthetic
augccaggggccccuuau

SEQ ID NO: 637408 - RNA, 19 nt, Artificial Sequence
  Synthetic
uaugccaggggccccuuau

SEQ ID NO: 637409 - RNA, 20 nt, Artificial Sequence
  Synthetic
auaugccaggggccccuuau

SEQ ID NO: 637410 - RNA, 21 nt, Artificial Sequence
  Synthetic
aauaugccaggggccccuuau

SEQ ID NO: 637411 - RNA, 22 nt, Artificial Sequence
  Synthetic
aaauaugccaggggccccuuau

SEQ ID NO: 637412 - RNA, 23 nt, Artificial Sequence
  Synthetic
uaaauaugccaggggccccuuau

SEQ ID NO: 637413 - RNA, 24 nt, Artificial Sequence
  Synthetic
uuaaauaugccaggggccccuuau

SEQ ID NO: 637414 - RNA, 18 nt, Artificial Sequence
  Synthetic
ccaaauuucagcccuuau

SEQ ID NO: 637415 - RNA, 19 nt, Artificial Sequence
  Synthetic
uccaaauuucagcccuuau

SEQ ID NO: 637416 - RNA, 20 nt, Artificial Sequence
  Synthetic
cuccaaauuucagcccuuau

SEQ ID NO: 637417 - RNA, 21 nt, Artificial Sequence
  Synthetic
gcuccaaauuucagcccuuau

SEQ ID NO: 637418 - RNA, 22 nt, Artificial Sequence
  Synthetic
agcuccaaauuucagcccuuau

SEQ ID NO: 637419 - RNA, 23 nt, Artificial Sequence
  Synthetic
uagcuccaaauuucagcccuuau

SEQ ID NO: 637420 - RNA, 24 nt, Artificial Sequence
  Synthetic
auagcuccaaauuucagcccuuau

SEQ ID NO: 637421 - RNA, 18 nt, Artificial Sequence
  Synthetic
uguucuauaaauccuuau

SEQ ID NO: 637422 - RNA, 19 nt, Artificial Sequence
  Synthetic
auguucuauaaauccuuau

SEQ ID NO: 637423 - RNA, 20 nt, Artificial Sequence
  Synthetic
aauguucuauaaauccuuau

SEQ ID NO: 637424 - RNA, 21 nt, Artificial Sequence
  Synthetic
uaauguucuauaaauccuuau

SEQ ID NO: 637425 - RNA, 22 nt, Artificial Sequence
  Synthetic
uuaauguucuauaaauccuuau

SEQ ID NO: 637426 - RNA, 23 nt, Artificial Sequence
  Synthetic
auuaauguucuauaaauccuuau

SEQ ID NO: 637427 - RNA, 24 nt, Artificial Sequence
  Synthetic
aauuaauguucuauaaauccuuau

SEQ ID NO: 637428 - RNA, 18 nt, Artificial Sequence
  Synthetic
ucacauucauuuccuuau

SEQ ID NO: 637429 - RNA, 19 nt, Artificial Sequence
  Synthetic
cucacauucauuuccuuau

SEQ ID NO: 637430 - RNA, 20 nt, Artificial Sequence
  Synthetic
gcucacauucauuuccuuau

SEQ ID NO: 637431 - RNA, 21 nt, Artificial Sequence
  Synthetic
agcucacauucauuuccuuau

SEQ ID NO: 637432 - RNA, 22 nt, Artificial Sequence
  Synthetic
cagcucacauucauuuccuuau

SEQ ID NO: 637433 - RNA, 23 nt, Artificial Sequence
  Synthetic
ccagcucacauucauuuccuuau

SEQ ID NO: 637434 - RNA, 24 nt, Artificial Sequence
  Synthetic
accagcucacauucauuuccuuau

SEQ ID NO: 637435 - RNA, 18 nt, Artificial Sequence
  Synthetic
guuuauccuuuuccuuau

SEQ ID NO: 637436 - RNA, 19 nt, Artificial Sequence
  Synthetic
aguuuauccuuuuccuuau

SEQ ID NO: 637437 - RNA, 20 nt, Artificial Sequence
  Synthetic
aaguuuauccuuuuccuuau

SEQ ID NO: 637438 - RNA, 21 nt, Artificial Sequence
  Synthetic
caaguuuauccuuuuccuuau

SEQ ID NO: 637439 - RNA, 22 nt, Artificial Sequence
  Synthetic
ucaaguuuauccuuuuccuuau

SEQ ID NO: 637440 - RNA, 23 nt, Artificial Sequence
  Synthetic
cucaaguuuauccuuuuccuuau

SEQ ID NO: 637441 - RNA, 24 nt, Artificial Sequence
  Synthetic
ucucaaguuuauccuuuuccuuau

SEQ ID NO: 637442 - RNA, 18 nt, Artificial Sequence
  Synthetic
ggaggauuucaagcuuau

SEQ ID NO: 637443 - RNA, 19 nt, Artificial Sequence
  Synthetic
aggaggauuucaagcuuau

SEQ ID NO: 637444 - RNA, 20 nt, Artificial Sequence
  Synthetic
uaggaggauuucaagcuuau

SEQ ID NO: 637445 - RNA, 21 nt, Artificial Sequence
  Synthetic
uuaggaggauuucaagcuuau

SEQ ID NO: 637446 - RNA, 22 nt, Artificial Sequence
  Synthetic
uuuaggaggauuucaagcuuau

SEQ ID NO: 637447 - RNA, 23 nt, Artificial Sequence
  Synthetic
auuuaggaggauuucaagcuuau

SEQ ID NO: 637448 - RNA, 24 nt, Artificial Sequence
  Synthetic
aauuuaggaggauuucaagcuuau

SEQ ID NO: 637449 - RNA, 18 nt, Artificial Sequence
  Synthetic
cugccaccaacagcuuau

SEQ ID NO: 637450 - RNA, 19 nt, Artificial Sequence
  Synthetic
ccugccaccaacagcuuau

SEQ ID NO: 637451 - RNA, 20 nt, Artificial Sequence
  Synthetic
uccugccaccaacagcuuau

SEQ ID NO: 637452 - RNA, 21 nt, Artificial Sequence
  Synthetic
cuccugccaccaacagcuuau

SEQ ID NO: 637453 - RNA, 22 nt, Artificial Sequence
  Synthetic
ccuccugccaccaacagcuuau

SEQ ID NO: 637454 - RNA, 23 nt, Artificial Sequence
  Synthetic
accuccugccaccaacagcuuau

SEQ ID NO: 637455 - RNA, 24 nt, Artificial Sequence
  Synthetic
caccuccugccaccaacagcuuau

SEQ ID NO: 637456 - RNA, 18 nt, Artificial Sequence
  Synthetic
cuguuaaaauacgcuuau

SEQ ID NO: 637457 - RNA, 19 nt, Artificial Sequence
  Synthetic
ccuguuaaaauacgcuuau

SEQ ID NO: 637458 - RNA, 20 nt, Artificial Sequence
  Synthetic
uccuguuaaaauacgcuuau

SEQ ID NO: 637459 - RNA, 21 nt, Artificial Sequence
  Synthetic
guccuguuaaaauacgcuuau

SEQ ID NO: 637460 - RNA, 22 nt, Artificial Sequence
  Synthetic
uguccuguuaaaauacgcuuau

SEQ ID NO: 637461 - RNA, 23 nt, Artificial Sequence
  Synthetic
auguccuguuaaaauacgcuuau

SEQ ID NO: 637462 - RNA, 24 nt, Artificial Sequence
  Synthetic
uauguccuguuaaaauacgcuuau

SEQ ID NO: 637463 - RNA, 18 nt, Artificial Sequence
  Synthetic
auguguaacguggcuuau

SEQ ID NO: 637464 - RNA, 19 nt, Artificial Sequence
  Synthetic
cauguguaacguggcuuau

SEQ ID NO: 637465 - RNA, 20 nt, Artificial Sequence
  Synthetic
ccauguguaacguggcuuau

SEQ ID NO: 637466 - RNA, 21 nt, Artificial Sequence
  Synthetic
accauguguaacguggcuuau

SEQ ID NO: 637467 - RNA, 22 nt, Artificial Sequence
  Synthetic
uaccauguguaacguggcuuau

SEQ ID NO: 637468 - RNA, 23 nt, Artificial Sequence
  Synthetic
cuaccauguguaacguggcuuau

SEQ ID NO: 637469 - RNA, 24 nt, Artificial Sequence
  Synthetic
ccuaccauguguaacguggcuuau

SEQ ID NO: 637470 - RNA, 18 nt, Artificial Sequence
  Synthetic
uacuugcuuaaugcuuau

SEQ ID NO: 637471 - RNA, 19 nt, Artificial Sequence
  Synthetic
cuacuugcuuaaugcuuau

SEQ ID NO: 637472 - RNA, 20 nt, Artificial Sequence
  Synthetic
ccuacuugcuuaaugcuuau

SEQ ID NO: 637473 - RNA, 21 nt, Artificial Sequence
  Synthetic
accuacuugcuuaaugcuuau

SEQ ID NO: 637474 - RNA, 22 nt, Artificial Sequence
  Synthetic
uaccuacuugcuuaaugcuuau

SEQ ID NO: 637475 - RNA, 23 nt, Artificial Sequence
  Synthetic
uuaccuacuugcuuaaugcuuau

SEQ ID NO: 637476 - RNA, 24 nt, Artificial Sequence
  Synthetic
uuuaccuacuugcuuaaugcuuau

SEQ ID NO: 637477 - RNA, 18 nt, Artificial Sequence
  Synthetic
ggcagguacuaugcuuau

SEQ ID NO: 637478 - RNA, 19 nt, Artificial Sequence
  Synthetic
uggcagguacuaugcuuau

SEQ ID NO: 637479 - RNA, 20 nt, Artificial Sequence
  Synthetic
auggcagguacuaugcuuau

SEQ ID NO: 637480 - RNA, 21 nt, Artificial Sequence
  Synthetic
cauggcagguacuaugcuuau

SEQ ID NO: 637481 - RNA, 22 nt, Artificial Sequence
  Synthetic
acauggcagguacuaugcuuau

SEQ ID NO: 637482 - RNA, 23 nt, Artificial Sequence
  Synthetic
cacauggcagguacuaugcuuau

SEQ ID NO: 637483 - RNA, 24 nt, Artificial Sequence
  Synthetic
ccacauggcagguacuaugcuuau

SEQ ID NO: 637484 - RNA, 18 nt, Artificial Sequence
  Synthetic
acagaucaaacugcuuau

SEQ ID NO: 637485 - RNA, 19 nt, Artificial Sequence
  Synthetic
aacagaucaaacugcuuau

SEQ ID NO: 637486 - RNA, 20 nt, Artificial Sequence
  Synthetic
gaacagaucaaacugcuuau

SEQ ID NO: 637487 - RNA, 21 nt, Artificial Sequence
  Synthetic
agaacagaucaaacugcuuau

SEQ ID NO: 637488 - RNA, 22 nt, Artificial Sequence
  Synthetic
uagaacagaucaaacugcuuau

SEQ ID NO: 637489 - RNA, 23 nt, Artificial Sequence
  Synthetic
uuagaacagaucaaacugcuuau

SEQ ID NO: 637490 - RNA, 24 nt, Artificial Sequence
  Synthetic
uuuagaacagaucaaacugcuuau

SEQ ID NO: 637491 - RNA, 18 nt, Artificial Sequence
  Synthetic
caugugaccucugcuuau

SEQ ID NO: 637492 - RNA, 19 nt, Artificial Sequence
  Synthetic
acaugugaccucugcuuau

SEQ ID NO: 637493 - RNA, 20 nt, Artificial Sequence
  Synthetic
cacaugugaccucugcuuau

SEQ ID NO: 637494 - RNA, 21 nt, Artificial Sequence
  Synthetic
ccacaugugaccucugcuuau

SEQ ID NO: 637495 - RNA, 22 nt, Artificial Sequence
  Synthetic
uccacaugugaccucugcuuau

SEQ ID NO: 637496 - RNA, 23 nt, Artificial Sequence
  Synthetic
cuccacaugugaccucugcuuau

SEQ ID NO: 637497 - RNA, 24 nt, Artificial Sequence
  Synthetic
ucuccacaugugaccucugcuuau

SEQ ID NO: 637498 - RNA, 18 nt, Artificial Sequence
  Synthetic
aucuaaaaaauugcuuau

SEQ ID NO: 637499 - RNA, 19 nt, Artificial Sequence
  Synthetic
caucuaaaaaauugcuuau

SEQ ID NO: 637500 - RNA, 20 nt, Artificial Sequence
  Synthetic
ucaucuaaaaaauugcuuau

SEQ ID NO: 637501 - RNA, 21 nt, Artificial Sequence
  Synthetic
aucaucuaaaaaauugcuuau

SEQ ID NO: 637502 - RNA, 22 nt, Artificial Sequence
  Synthetic
caucaucuaaaaaauugcuuau

SEQ ID NO: 637503 - RNA, 23 nt, Artificial Sequence
  Synthetic
gcaucaucuaaaaaauugcuuau

SEQ ID NO: 637504 - RNA, 24 nt, Artificial Sequence
  Synthetic
ugcaucaucuaaaaaauugcuuau

SEQ ID NO: 637505 - RNA, 18 nt, Artificial Sequence
  Synthetic
auuaccuguguugcuuau

SEQ ID NO: 637506 - RNA, 19 nt, Artificial Sequence
  Synthetic
gauuaccuguguugcuuau

SEQ ID NO: 637507 - RNA, 20 nt, Artificial Sequence
  Synthetic
ggauuaccuguguugcuuau

SEQ ID NO: 637508 - RNA, 21 nt, Artificial Sequence
  Synthetic
gggauuaccuguguugcuuau

SEQ ID NO: 637509 - RNA, 22 nt, Artificial Sequence
  Synthetic
ugggauuaccuguguugcuuau

SEQ ID NO: 637510 - RNA, 23 nt, Artificial Sequence
  Synthetic
uugggauuaccuguguugcuuau

SEQ ID NO: 637511 - RNA, 24 nt, Artificial Sequence
  Synthetic
uuugggauuaccuguguugcuuau

SEQ ID NO: 637512 - RNA, 18 nt, Artificial Sequence
  Synthetic
auuucuuacauaucuuau

SEQ ID NO: 637513 - RNA, 19 nt, Artificial Sequence
  Synthetic
aauuucuuacauaucuuau

SEQ ID NO: 637514 - RNA, 20 nt, Artificial Sequence
  Synthetic
uaauuucuuacauaucuuau

SEQ ID NO: 637515 - RNA, 21 nt, Artificial Sequence
  Synthetic
auaauuucuuacauaucuuau

SEQ ID NO: 637516 - RNA, 22 nt, Artificial Sequence
  Synthetic
gauaauuucuuacauaucuuau

SEQ ID NO: 637517 - RNA, 23 nt, Artificial Sequence
  Synthetic
ugauaauuucuuacauaucuuau

SEQ ID NO: 637518 - RNA, 24 nt, Artificial Sequence
  Synthetic
cugauaauuucuuacauaucuuau

SEQ ID NO: 637519 - RNA, 18 nt, Artificial Sequence
  Synthetic
aauaguuccuuaucuuau

SEQ ID NO: 637520 - RNA, 19 nt, Artificial Sequence
  Synthetic
gaauaguuccuuaucuuau

SEQ ID NO: 637521 - RNA, 20 nt, Artificial Sequence
  Synthetic
ugaauaguuccuuaucuuau

SEQ ID NO: 637522 - RNA, 21 nt, Artificial Sequence
  Synthetic
cugaauaguuccuuaucuuau

SEQ ID NO: 637523 - RNA, 22 nt, Artificial Sequence
  Synthetic
ccugaauaguuccuuaucuuau

SEQ ID NO: 637524 - RNA, 23 nt, Artificial Sequence
  Synthetic
cccugaauaguuccuuaucuuau

SEQ ID NO: 637525 - RNA, 24 nt, Artificial Sequence
  Synthetic
ucccugaauaguuccuuaucuuau

SEQ ID NO: 637526 - RNA, 18 nt, Artificial Sequence
  Synthetic
ugguguaaaugcucuuau

SEQ ID NO: 637527 - RNA, 19 nt, Artificial Sequence
  Synthetic
augguguaaaugcucuuau

SEQ ID NO: 637528 - RNA, 20 nt, Artificial Sequence
  Synthetic
aaugguguaaaugcucuuau

SEQ ID NO: 637529 - RNA, 21 nt, Artificial Sequence
  Synthetic
aaaugguguaaaugcucuuau

SEQ ID NO: 637530 - RNA, 22 nt, Artificial Sequence
  Synthetic
uaaaugguguaaaugcucuuau

SEQ ID NO: 637531 - RNA, 23 nt, Artificial Sequence
  Synthetic
auaaaugguguaaaugcucuuau

SEQ ID NO: 637532 - RNA, 24 nt, Artificial Sequence
  Synthetic
aauaaaugguguaaaugcucuuau

SEQ ID NO: 637533 - RNA, 18 nt, Artificial Sequence
  Synthetic
uaauagucagugucuuau

SEQ ID NO: 637534 - RNA, 19 nt, Artificial Sequence
  Synthetic
auaauagucagugucuuau

SEQ ID NO: 637535 - RNA, 20 nt, Artificial Sequence
  Synthetic
aauaauagucagugucuuau

SEQ ID NO: 637536 - RNA, 21 nt, Artificial Sequence
  Synthetic
uaauaauagucagugucuuau

SEQ ID NO: 637537 - RNA, 22 nt, Artificial Sequence
  Synthetic
uuaauaauagucagugucuuau

SEQ ID NO: 637538 - RNA, 23 nt, Artificial Sequence
  Synthetic
uuuaauaauagucagugucuuau

SEQ ID NO: 637539 - RNA, 24 nt, Artificial Sequence
  Synthetic
uuuuaauaauagucagugucuuau

SEQ ID NO: 637540 - RNA, 18 nt, Artificial Sequence
  Synthetic
gagauagcaaauucuuau

SEQ ID NO: 637541 - RNA, 19 nt, Artificial Sequence
  Synthetic
ugagauagcaaauucuuau

SEQ ID NO: 637542 - RNA, 20 nt, Artificial Sequence
  Synthetic
cugagauagcaaauucuuau

SEQ ID NO: 637543 - RNA, 21 nt, Artificial Sequence
  Synthetic
acugagauagcaaauucuuau

SEQ ID NO: 637544 - RNA, 22 nt, Artificial Sequence
  Synthetic
aacugagauagcaaauucuuau

SEQ ID NO: 637545 - RNA, 23 nt, Artificial Sequence
  Synthetic
caacugagauagcaaauucuuau

SEQ ID NO: 637546 - RNA, 24 nt, Artificial Sequence
  Synthetic
acaacugagauagcaaauucuuau

SEQ ID NO: 637547 - RNA, 18 nt, Artificial Sequence
  Synthetic
uccucauauaauucuuau

SEQ ID NO: 637548 - RNA, 19 nt, Artificial Sequence
  Synthetic
auccucauauaauucuuau

SEQ ID NO: 637549 - RNA, 20 nt, Artificial Sequence
  Synthetic
cauccucauauaauucuuau

SEQ ID NO: 637550 - RNA, 21 nt, Artificial Sequence
  Synthetic
acauccucauauaauucuuau

SEQ ID NO: 637551 - RNA, 22 nt, Artificial Sequence
  Synthetic
uacauccucauauaauucuuau

SEQ ID NO: 637552 - RNA, 23 nt, Artificial Sequence
  Synthetic
auacauccucauauaauucuuau

SEQ ID NO: 637553 - RNA, 24 nt, Artificial Sequence
  Synthetic
uauacauccucauauaauucuuau

SEQ ID NO: 637554 - RNA, 18 nt, Artificial Sequence
  Synthetic
aagagugguuauucuuau

SEQ ID NO: 637555 - RNA, 19 nt, Artificial Sequence
  Synthetic
caagagugguuauucuuau

SEQ ID NO: 637556 - RNA, 20 nt, Artificial Sequence
  Synthetic
acaagagugguuauucuuau

SEQ ID NO: 637557 - RNA, 21 nt, Artificial Sequence
  Synthetic
gacaagagugguuauucuuau

SEQ ID NO: 637558 - RNA, 22 nt, Artificial Sequence
  Synthetic
agacaagagugguuauucuuau

SEQ ID NO: 637559 - RNA, 23 nt, Artificial Sequence
  Synthetic
gagacaagagugguuauucuuau

SEQ ID NO: 637560 - RNA, 24 nt, Artificial Sequence
  Synthetic
agagacaagagugguuauucuuau

SEQ ID NO: 637561 - RNA, 18 nt, Artificial Sequence
  Synthetic
ugaugguguucuucuuau

SEQ ID NO: 637562 - RNA, 19 nt, Artificial Sequence
  Synthetic
cugaugguguucuucuuau

SEQ ID NO: 637563 - RNA, 20 nt, Artificial Sequence
  Synthetic
acugaugguguucuucuuau

SEQ ID NO: 637564 - RNA, 21 nt, Artificial Sequence
  Synthetic
uacugaugguguucuucuuau

SEQ ID NO: 637565 - RNA, 22 nt, Artificial Sequence
  Synthetic
auacugaugguguucuucuuau

SEQ ID NO: 637566 - RNA, 23 nt, Artificial Sequence
  Synthetic
aauacugaugguguucuucuuau

SEQ ID NO: 637567 - RNA, 24 nt, Artificial Sequence
  Synthetic
aaauacugaugguguucuucuuau

SEQ ID NO: 637568 - RNA, 18 nt, Artificial Sequence
  Synthetic
aauuuugauuguucuuau

SEQ ID NO: 637569 - RNA, 19 nt, Artificial Sequence
  Synthetic
aaauuuugauuguucuuau

SEQ ID NO: 637570 - RNA, 20 nt, Artificial Sequence
  Synthetic
aaaauuuugauuguucuuau

SEQ ID NO: 637571 - RNA, 21 nt, Artificial Sequence
  Synthetic
uaaaauuuugauuguucuuau

SEQ ID NO: 637572 - RNA, 22 nt, Artificial Sequence
  Synthetic
uuaaaauuuugauuguucuuau

SEQ ID NO: 637573 - RNA, 23 nt, Artificial Sequence
  Synthetic
auuaaaauuuugauuguucuuau

SEQ ID NO: 637574 - RNA, 24 nt, Artificial Sequence
  Synthetic
aauuaaaauuuugauuguucuuau

SEQ ID NO: 637575 - RNA, 18 nt, Artificial Sequence
  Synthetic
aucuagucaauuucuuau

SEQ ID NO: 637576 - RNA, 19 nt, Artificial Sequence
  Synthetic
uaucuagucaauuucuuau

SEQ ID NO: 637577 - RNA, 20 nt, Artificial Sequence
  Synthetic
auaucuagucaauuucuuau

SEQ ID NO: 637578 - RNA, 21 nt, Artificial Sequence
  Synthetic
uauaucuagucaauuucuuau

SEQ ID NO: 637579 - RNA, 22 nt, Artificial Sequence
  Synthetic
uuauaucuagucaauuucuuau

SEQ ID NO: 637580 - RNA, 23 nt, Artificial Sequence
  Synthetic
uuuauaucuagucaauuucuuau

SEQ ID NO: 637581 - RNA, 24 nt, Artificial Sequence
  Synthetic
uuuuauaucuagucaauuucuuau

SEQ ID NO: 637582 - RNA, 18 nt, Artificial Sequence
  Synthetic
uacucuucccuuucuuau

SEQ ID NO: 637583 - RNA, 19 nt, Artificial Sequence
  Synthetic
uuacucuucccuuucuuau

SEQ ID NO: 637584 - RNA, 20 nt, Artificial Sequence
  Synthetic
uuuacucuucccuuucuuau

SEQ ID NO: 637585 - RNA, 21 nt, Artificial Sequence
  Synthetic
uuuuacucuucccuuucuuau

SEQ ID NO: 637586 - RNA, 22 nt, Artificial Sequence
  Synthetic
auuuuacucuucccuuucuuau

SEQ ID NO: 637587 - RNA, 23 nt, Artificial Sequence
  Synthetic
cauuuuacucuucccuuucuuau

SEQ ID NO: 637588 - RNA, 24 nt, Artificial Sequence
  Synthetic
gcauuuuacucuucccuuucuuau

SEQ ID NO: 637589 - RNA, 18 nt, Artificial Sequence
  Synthetic
agaguugcuguuucuuau

SEQ ID NO: 637590 - RNA, 19 nt, Artificial Sequence
  Synthetic
cagaguugcuguuucuuau

SEQ ID NO: 637591 - RNA, 20 nt, Artificial Sequence
  Synthetic
ucagaguugcuguuucuuau

SEQ ID NO: 637592 - RNA, 21 nt, Artificial Sequence
  Synthetic
aucagaguugcuguuucuuau

SEQ ID NO: 637593 - RNA, 22 nt, Artificial Sequence
  Synthetic
caucagaguugcuguuucuuau

SEQ ID NO: 637594 - RNA, 23 nt, Artificial Sequence
  Synthetic
ucaucagaguugcuguuucuuau

SEQ ID NO: 637595 - RNA, 24 nt, Artificial Sequence
  Synthetic
aucaucagaguugcuguuucuuau

SEQ ID NO: 637596 - RNA, 18 nt, Artificial Sequence
  Synthetic
uucauuacacaaaguuau

SEQ ID NO: 637597 - RNA, 19 nt, Artificial Sequence
  Synthetic
uuucauuacacaaaguuau

SEQ ID NO: 637598 - RNA, 20 nt, Artificial Sequence
  Synthetic
auuucauuacacaaaguuau

SEQ ID NO: 637599 - RNA, 21 nt, Artificial Sequence
  Synthetic
gauuucauuacacaaaguuau

SEQ ID NO: 637600 - RNA, 22 nt, Artificial Sequence
  Synthetic
ggauuucauuacacaaaguuau

SEQ ID NO: 637601 - RNA, 23 nt, Artificial Sequence
  Synthetic
aggauuucauuacacaaaguuau

SEQ ID NO: 637602 - RNA, 24 nt, Artificial Sequence
  Synthetic
gaggauuucauuacacaaaguuau

SEQ ID NO: 637603 - RNA, 18 nt, Artificial Sequence
  Synthetic
uugccuccacaaaguuau

SEQ ID NO: 637604 - RNA, 19 nt, Artificial Sequence
  Synthetic
guugccuccacaaaguuau

SEQ ID NO: 637605 - RNA, 20 nt, Artificial Sequence
  Synthetic
uguugccuccacaaaguuau

SEQ ID NO: 637606 - RNA, 21 nt, Artificial Sequence
  Synthetic
cuguugccuccacaaaguuau

SEQ ID NO: 637607 - RNA, 22 nt, Artificial Sequence
  Synthetic
ccuguugccuccacaaaguuau

SEQ ID NO: 637608 - RNA, 23 nt, Artificial Sequence
  Synthetic
cccuguugccuccacaaaguuau

SEQ ID NO: 637609 - RNA, 24 nt, Artificial Sequence
  Synthetic
acccuguugccuccacaaaguuau

SEQ ID NO: 637610 - RNA, 18 nt, Artificial Sequence
  Synthetic
uuauuuccgcaaaguuau

SEQ ID NO: 637611 - RNA, 19 nt, Artificial Sequence
  Synthetic
auuauuuccgcaaaguuau

SEQ ID NO: 637612 - RNA, 20 nt, Artificial Sequence
  Synthetic
uauuauuuccgcaaaguuau

SEQ ID NO: 637613 - RNA, 21 nt, Artificial Sequence
  Synthetic
auauuauuuccgcaaaguuau

SEQ ID NO: 637614 - RNA, 22 nt, Artificial Sequence
  Synthetic
cauauuauuuccgcaaaguuau

SEQ ID NO: 637615 - RNA, 23 nt, Artificial Sequence
  Synthetic
acauauuauuuccgcaaaguuau

SEQ ID NO: 637616 - RNA, 24 nt, Artificial Sequence
  Synthetic
cacauauuauuuccgcaaaguuau

SEQ ID NO: 637617 - RNA, 18 nt, Artificial Sequence
  Synthetic
agaaagaaugaaaguuau

SEQ ID NO: 637618 - RNA, 19 nt, Artificial Sequence
  Synthetic
aagaaagaaugaaaguuau

SEQ ID NO: 637619 - RNA, 20 nt, Artificial Sequence
  Synthetic
aaagaaagaaugaaaguuau

SEQ ID NO: 637620 - RNA, 21 nt, Artificial Sequence
  Synthetic
uaaagaaagaaugaaaguuau

SEQ ID NO: 637621 - RNA, 22 nt, Artificial Sequence
  Synthetic
guaaagaaagaaugaaaguuau

SEQ ID NO: 637622 - RNA, 23 nt, Artificial Sequence
  Synthetic
aguaaagaaagaaugaaaguuau

SEQ ID NO: 637623 - RNA, 24 nt, Artificial Sequence
  Synthetic
gaguaaagaaagaaugaaaguuau

SEQ ID NO: 637624 - RNA, 18 nt, Artificial Sequence
  Synthetic
aaggguugaagaaguuau

SEQ ID NO: 637625 - RNA, 19 nt, Artificial Sequence
  Synthetic
aaaggguugaagaaguuau

SEQ ID NO: 637626 - RNA, 20 nt, Artificial Sequence
  Synthetic
uaaaggguugaagaaguuau

SEQ ID NO: 637627 - RNA, 21 nt, Artificial Sequence
  Synthetic
auaaaggguugaagaaguuau

SEQ ID NO: 637628 - RNA, 22 nt, Artificial Sequence
  Synthetic
uauaaaggguugaagaaguuau

SEQ ID NO: 637629 - RNA, 23 nt, Artificial Sequence
  Synthetic
auauaaaggguugaagaaguuau

SEQ ID NO: 637630 - RNA, 24 nt, Artificial Sequence
  Synthetic
uauauaaaggguugaagaaguuau

SEQ ID NO: 637631 - RNA, 18 nt, Artificial Sequence
  Synthetic
caacgucugagaaguuau

SEQ ID NO: 637632 - RNA, 19 nt, Artificial Sequence
  Synthetic
gcaacgucugagaaguuau

SEQ ID NO: 637633 - RNA, 20 nt, Artificial Sequence
  Synthetic
agcaacgucugagaaguuau

SEQ ID NO: 637634 - RNA, 21 nt, Artificial Sequence
  Synthetic
cagcaacgucugagaaguuau

SEQ ID NO: 637635 - RNA, 22 nt, Artificial Sequence
  Synthetic
ccagcaacgucugagaaguuau

SEQ ID NO: 637636 - RNA, 23 nt, Artificial Sequence
  Synthetic
accagcaacgucugagaaguuau

SEQ ID NO: 637637 - RNA, 24 nt, Artificial Sequence
  Synthetic
caccagcaacgucugagaaguuau

SEQ ID NO: 637638 - RNA, 18 nt, Artificial Sequence
  Synthetic
auccuucuaggaaguuau

SEQ ID NO: 637639 - RNA, 19 nt, Artificial Sequence
  Synthetic
uauccuucuaggaaguuau

SEQ ID NO: 637640 - RNA, 20 nt, Artificial Sequence
  Synthetic
cuauccuucuaggaaguuau

SEQ ID NO: 637641 - RNA, 21 nt, Artificial Sequence
  Synthetic
ccuauccuucuaggaaguuau

SEQ ID NO: 637642 - RNA, 22 nt, Artificial Sequence
  Synthetic
cccuauccuucuaggaaguuau

SEQ ID NO: 637643 - RNA, 23 nt, Artificial Sequence
  Synthetic
ucccuauccuucuaggaaguuau

SEQ ID NO: 637644 - RNA, 24 nt, Artificial Sequence
  Synthetic
aucccuauccuucuaggaaguuau

SEQ ID NO: 637645 - RNA, 18 nt, Artificial Sequence
  Synthetic
cauaugggcugaaguuau

SEQ ID NO: 637646 - RNA, 19 nt, Artificial Sequence
  Synthetic
gcauaugggcugaaguuau

SEQ ID NO: 637647 - RNA, 20 nt, Artificial Sequence
  Synthetic
ggcauaugggcugaaguuau

SEQ ID NO: 637648 - RNA, 21 nt, Artificial Sequence
  Synthetic
gggcauaugggcugaaguuau

SEQ ID NO: 637649 - RNA, 22 nt, Artificial Sequence
  Synthetic
agggcauaugggcugaaguuau

SEQ ID NO: 637650 - RNA, 23 nt, Artificial Sequence
  Synthetic
aagggcauaugggcugaaguuau

SEQ ID NO: 637651 - RNA, 24 nt, Artificial Sequence
  Synthetic
gaagggcauaugggcugaaguuau

SEQ ID NO: 637652 - RNA, 18 nt, Artificial Sequence
  Synthetic
aauucuuuuguaaguuau

SEQ ID NO: 637653 - RNA, 19 nt, Artificial Sequence
  Synthetic
uaauucuuuuguaaguuau

SEQ ID NO: 637654 - RNA, 20 nt, Artificial Sequence
  Synthetic
guaauucuuuuguaaguuau

SEQ ID NO: 637655 - RNA, 21 nt, Artificial Sequence
  Synthetic
gguaauucuuuuguaaguuau

SEQ ID NO: 637656 - RNA, 22 nt, Artificial Sequence
  Synthetic
ugguaauucuuuuguaaguuau

SEQ ID NO: 637657 - RNA, 23 nt, Artificial Sequence
  Synthetic
augguaauucuuuuguaaguuau

SEQ ID NO: 637658 - RNA, 24 nt, Artificial Sequence
  Synthetic
aaugguaauucuuuuguaaguuau

SEQ ID NO: 637659 - RNA, 18 nt, Artificial Sequence
  Synthetic
aaaaugaccaacaguuau

SEQ ID NO: 637660 - RNA, 19 nt, Artificial Sequence
  Synthetic
uaaaaugaccaacaguuau

SEQ ID NO: 637661 - RNA, 20 nt, Artificial Sequence
  Synthetic
uuaaaaugaccaacaguuau

SEQ ID NO: 637662 - RNA, 21 nt, Artificial Sequence
  Synthetic
auuaaaaugaccaacaguuau

SEQ ID NO: 637663 - RNA, 22 nt, Artificial Sequence
  Synthetic
cauuaaaaugaccaacaguuau

SEQ ID NO: 637664 - RNA, 23 nt, Artificial Sequence
  Synthetic
acauuaaaaugaccaacaguuau

SEQ ID NO: 637665 - RNA, 24 nt, Artificial Sequence
  Synthetic
gacauuaaaaugaccaacaguuau

SEQ ID NO: 637666 - RNA, 18 nt, Artificial Sequence
  Synthetic
gccucuagucccaguuau

SEQ ID NO: 637667 - RNA, 19 nt, Artificial Sequence
  Synthetic
ugccucuagucccaguuau

SEQ ID NO: 637668 - RNA, 20 nt, Artificial Sequence
  Synthetic
augccucuagucccaguuau

SEQ ID NO: 637669 - RNA, 21 nt, Artificial Sequence
  Synthetic
caugccucuagucccaguuau

SEQ ID NO: 637670 - RNA, 22 nt, Artificial Sequence
  Synthetic
gcaugccucuagucccaguuau

SEQ ID NO: 637671 - RNA, 23 nt, Artificial Sequence
  Synthetic
ugcaugccucuagucccaguuau

SEQ ID NO: 637672 - RNA, 24 nt, Artificial Sequence
  Synthetic
gugcaugccucuagucccaguuau

SEQ ID NO: 637673 - RNA, 18 nt, Artificial Sequence
  Synthetic
aagcuaagaagcaguuau

SEQ ID NO: 637674 - RNA, 19 nt, Artificial Sequence
  Synthetic
uaagcuaagaagcaguuau

SEQ ID NO: 637675 - RNA, 20 nt, Artificial Sequence
  Synthetic
auaagcuaagaagcaguuau

SEQ ID NO: 637676 - RNA, 21 nt, Artificial Sequence
  Synthetic
aauaagcuaagaagcaguuau

SEQ ID NO: 637677 - RNA, 22 nt, Artificial Sequence
  Synthetic
gaauaagcuaagaagcaguuau

SEQ ID NO: 637678 - RNA, 23 nt, Artificial Sequence
  Synthetic
ggaauaagcuaagaagcaguuau

SEQ ID NO: 637679 - RNA, 24 nt, Artificial Sequence
  Synthetic
aggaauaagcuaagaagcaguuau

SEQ ID NO: 637680 - RNA, 18 nt, Artificial Sequence
  Synthetic
gguaacacauucaguuau

SEQ ID NO: 637681 - RNA, 19 nt, Artificial Sequence
  Synthetic
ugguaacacauucaguuau

SEQ ID NO: 637682 - RNA, 20 nt, Artificial Sequence
  Synthetic
gugguaacacauucaguuau

SEQ ID NO: 637683 - RNA, 21 nt, Artificial Sequence
  Synthetic
agugguaacacauucaguuau

SEQ ID NO: 637684 - RNA, 22 nt, Artificial Sequence
  Synthetic
uagugguaacacauucaguuau

SEQ ID NO: 637685 - RNA, 23 nt, Artificial Sequence
  Synthetic
auagugguaacacauucaguuau

SEQ ID NO: 637686 - RNA, 24 nt, Artificial Sequence
  Synthetic
aauagugguaacacauucaguuau

SEQ ID NO: 637687 - RNA, 18 nt, Artificial Sequence
  Synthetic
ggaaacauggagaguuau

SEQ ID NO: 637688 - RNA, 19 nt, Artificial Sequence
  Synthetic
gggaaacauggagaguuau

SEQ ID NO: 637689 - RNA, 20 nt, Artificial Sequence
  Synthetic
ggggaaacauggagaguuau

SEQ ID NO: 637690 - RNA, 21 nt, Artificial Sequence
  Synthetic
aggggaaacauggagaguuau

SEQ ID NO: 637691 - RNA, 22 nt, Artificial Sequence
  Synthetic
uaggggaaacauggagaguuau

SEQ ID NO: 637692 - RNA, 23 nt, Artificial Sequence
  Synthetic
guaggggaaacauggagaguuau

SEQ ID NO: 637693 - RNA, 24 nt, Artificial Sequence
  Synthetic
gguaggggaaacauggagaguuau

SEQ ID NO: 637694 - RNA, 18 nt, Artificial Sequence
  Synthetic
caggugaauuagaguuau

SEQ ID NO: 637695 - RNA, 19 nt, Artificial Sequence
  Synthetic
ucaggugaauuagaguuau

SEQ ID NO: 637696 - RNA, 20 nt, Artificial Sequence
  Synthetic
uucaggugaauuagaguuau

SEQ ID NO: 637697 - RNA, 21 nt, Artificial Sequence
  Synthetic
auucaggugaauuagaguuau

SEQ ID NO: 637698 - RNA, 22 nt, Artificial Sequence
  Synthetic
aauucaggugaauuagaguuau

SEQ ID NO: 637699 - RNA, 23 nt, Artificial Sequence
  Synthetic
aaauucaggugaauuagaguuau

SEQ ID NO: 637700 - RNA, 24 nt, Artificial Sequence
  Synthetic
aaaauucaggugaauuagaguuau

SEQ ID NO: 637701 - RNA, 18 nt, Artificial Sequence
  Synthetic
agcuugacuuugaguuau

SEQ ID NO: 637702 - RNA, 19 nt, Artificial Sequence
  Synthetic
uagcuugacuuugaguuau

SEQ ID NO: 637703 - RNA, 20 nt, Artificial Sequence
  Synthetic
cuagcuugacuuugaguuau

SEQ ID NO: 637704 - RNA, 21 nt, Artificial Sequence
  Synthetic
ucuagcuugacuuugaguuau

SEQ ID NO: 637705 - RNA, 22 nt, Artificial Sequence
  Synthetic
uucuagcuugacuuugaguuau

SEQ ID NO: 637706 - RNA, 23 nt, Artificial Sequence
  Synthetic
uuucuagcuugacuuugaguuau

SEQ ID NO: 637707 - RNA, 24 nt, Artificial Sequence
  Synthetic
uuuucuagcuugacuuugaguuau

SEQ ID NO: 637708 - RNA, 18 nt, Artificial Sequence
  Synthetic
uuuaaacucuuuaguuau

SEQ ID NO: 637709 - RNA, 19 nt, Artificial Sequence
  Synthetic
guuuaaacucuuuaguuau

SEQ ID NO: 637710 - RNA, 20 nt, Artificial Sequence
  Synthetic
uguuuaaacucuuuaguuau

SEQ ID NO: 637711 - RNA, 21 nt, Artificial Sequence
  Synthetic
uuguuuaaacucuuuaguuau

SEQ ID NO: 637712 - RNA, 22 nt, Artificial Sequence
  Synthetic
uuuguuuaaacucuuuaguuau

SEQ ID NO: 637713 - RNA, 23 nt, Artificial Sequence
  Synthetic
guuuguuuaaacucuuuaguuau

SEQ ID NO: 637714 - RNA, 24 nt, Artificial Sequence
  Synthetic
gguuuguuuaaacucuuuaguuau

SEQ ID NO: 637715 - RNA, 18 nt, Artificial Sequence
  Synthetic
uaauaagcuaaccguuau

SEQ ID NO: 637716 - RNA, 19 nt, Artificial Sequence
  Synthetic
uuaauaagcuaaccguuau

SEQ ID NO: 637717 - RNA, 20 nt, Artificial Sequence
  Synthetic
uuuaauaagcuaaccguuau

SEQ ID NO: 637718 - RNA, 21 nt, Artificial Sequence
  Synthetic
guuuaauaagcuaaccguuau

SEQ ID NO: 637719 - RNA, 22 nt, Artificial Sequence
  Synthetic
uguuuaauaagcuaaccguuau

SEQ ID NO: 637720 - RNA, 23 nt, Artificial Sequence
  Synthetic
cuguuuaauaagcuaaccguuau

SEQ ID NO: 637721 - RNA, 24 nt, Artificial Sequence
  Synthetic
gcuguuuaauaagcuaaccguuau

SEQ ID NO: 637722 - RNA, 18 nt, Artificial Sequence
  Synthetic
cacaaagaagaggguuau

SEQ ID NO: 637723 - RNA, 19 nt, Artificial Sequence
  Synthetic
acacaaagaagaggguuau

SEQ ID NO: 637724 - RNA, 20 nt, Artificial Sequence
  Synthetic
cacacaaagaagaggguuau

SEQ ID NO: 637725 - RNA, 21 nt, Artificial Sequence
  Synthetic
acacacaaagaagaggguuau

SEQ ID NO: 637726 - RNA, 22 nt, Artificial Sequence
  Synthetic
gacacacaaagaagaggguuau

SEQ ID NO: 637727 - RNA, 23 nt, Artificial Sequence
  Synthetic
agacacacaaagaagaggguuau

SEQ ID NO: 637728 - RNA, 24 nt, Artificial Sequence
  Synthetic
aagacacacaaagaagaggguuau

SEQ ID NO: 637729 - RNA, 18 nt, Artificial Sequence
  Synthetic
aaaccacaaauggguuau

SEQ ID NO: 637730 - RNA, 19 nt, Artificial Sequence
  Synthetic
caaaccacaaauggguuau

SEQ ID NO: 637731 - RNA, 20 nt, Artificial Sequence
  Synthetic
acaaaccacaaauggguuau

SEQ ID NO: 637732 - RNA, 21 nt, Artificial Sequence
  Synthetic
cacaaaccacaaauggguuau

SEQ ID NO: 637733 - RNA, 22 nt, Artificial Sequence
  Synthetic
ucacaaaccacaaauggguuau

SEQ ID NO: 637734 - RNA, 23 nt, Artificial Sequence
  Synthetic
aucacaaaccacaaauggguuau

SEQ ID NO: 637735 - RNA, 24 nt, Artificial Sequence
  Synthetic
aaucacaaaccacaaauggguuau

SEQ ID NO: 637736 - RNA, 18 nt, Artificial Sequence
  Synthetic
aacacacagcuggguuau

SEQ ID NO: 637737 - RNA, 19 nt, Artificial Sequence
  Synthetic
caacacacagcuggguuau

SEQ ID NO: 637738 - RNA, 20 nt, Artificial Sequence
  Synthetic
ccaacacacagcuggguuau

SEQ ID NO: 637739 - RNA, 21 nt, Artificial Sequence
  Synthetic
accaacacacagcuggguuau

SEQ ID NO: 637740 - RNA, 22 nt, Artificial Sequence
  Synthetic
uaccaacacacagcuggguuau

SEQ ID NO: 637741 - RNA, 23 nt, Artificial Sequence
  Synthetic
auaccaacacacagcuggguuau

SEQ ID NO: 637742 - RNA, 24 nt, Artificial Sequence
  Synthetic
aauaccaacacacagcuggguuau

SEQ ID NO: 637743 - RNA, 18 nt, Artificial Sequence
  Synthetic
uaccuucuuguggguuau

SEQ ID NO: 637744 - RNA, 19 nt, Artificial Sequence
  Synthetic
uuaccuucuuguggguuau

SEQ ID NO: 637745 - RNA, 20 nt, Artificial Sequence
  Synthetic
cuuaccuucuuguggguuau

SEQ ID NO: 637746 - RNA, 21 nt, Artificial Sequence
  Synthetic
ucuuaccuucuuguggguuau

SEQ ID NO: 637747 - RNA, 22 nt, Artificial Sequence
  Synthetic
uucuuaccuucuuguggguuau

SEQ ID NO: 637748 - RNA, 23 nt, Artificial Sequence
  Synthetic
uuucuuaccuucuuguggguuau

SEQ ID NO: 637749 - RNA, 24 nt, Artificial Sequence
  Synthetic
uuuucuuaccuucuuguggguuau

SEQ ID NO: 637750 - RNA, 18 nt, Artificial Sequence
  Synthetic
auaaaacacaaugguuau

SEQ ID NO: 637751 - RNA, 19 nt, Artificial Sequence
  Synthetic
aauaaaacacaaugguuau

SEQ ID NO: 637752 - RNA, 20 nt, Artificial Sequence
  Synthetic
gaauaaaacacaaugguuau

SEQ ID NO: 637753 - RNA, 21 nt, Artificial Sequence
  Synthetic
ggaauaaaacacaaugguuau

SEQ ID NO: 637754 - RNA, 22 nt, Artificial Sequence
  Synthetic
aggaauaaaacacaaugguuau

SEQ ID NO: 637755 - RNA, 23 nt, Artificial Sequence
  Synthetic
gaggaauaaaacacaaugguuau

SEQ ID NO: 637756 - RNA, 24 nt, Artificial Sequence
  Synthetic
cgaggaauaaaacacaaugguuau

SEQ ID NO: 637757 - RNA, 18 nt, Artificial Sequence
  Synthetic
aucacuaucaaugguuau

SEQ ID NO: 637758 - RNA, 19 nt, Artificial Sequence
  Synthetic
caucacuaucaaugguuau

SEQ ID NO: 637759 - RNA, 20 nt, Artificial Sequence
  Synthetic
ucaucacuaucaaugguuau

SEQ ID NO: 637760 - RNA, 21 nt, Artificial Sequence
  Synthetic
gucaucacuaucaaugguuau

SEQ ID NO: 637761 - RNA, 22 nt, Artificial Sequence
  Synthetic
ugucaucacuaucaaugguuau

SEQ ID NO: 637762 - RNA, 23 nt, Artificial Sequence
  Synthetic
cugucaucacuaucaaugguuau

SEQ ID NO: 637763 - RNA, 24 nt, Artificial Sequence
  Synthetic
acugucaucacuaucaaugguuau

SEQ ID NO: 637764 - RNA, 18 nt, Artificial Sequence
  Synthetic
cuugguuagcacuguuau

SEQ ID NO: 637765 - RNA, 19 nt, Artificial Sequence
  Synthetic
ucuugguuagcacuguuau

SEQ ID NO: 637766 - RNA, 20 nt, Artificial Sequence
  Synthetic
uucuugguuagcacuguuau

SEQ ID NO: 637767 - RNA, 21 nt, Artificial Sequence
  Synthetic
cuucuugguuagcacuguuau

SEQ ID NO: 637768 - RNA, 22 nt, Artificial Sequence
  Synthetic
ucuucuugguuagcacuguuau

SEQ ID NO: 637769 - RNA, 23 nt, Artificial Sequence
  Synthetic
cucuucuugguuagcacuguuau

SEQ ID NO: 637770 - RNA, 24 nt, Artificial Sequence
  Synthetic
acucuucuugguuagcacuguuau

SEQ ID NO: 637771 - RNA, 18 nt, Artificial Sequence
  Synthetic
caaagaacagacuguuau

SEQ ID NO: 637772 - RNA, 19 nt, Artificial Sequence
  Synthetic
acaaagaacagacuguuau

SEQ ID NO: 637773 - RNA, 20 nt, Artificial Sequence
  Synthetic
aacaaagaacagacuguuau

SEQ ID NO: 637774 - RNA, 21 nt, Artificial Sequence
  Synthetic
aaacaaagaacagacuguuau

SEQ ID NO: 637775 - RNA, 22 nt, Artificial Sequence
  Synthetic
uaaacaaagaacagacuguuau

SEQ ID NO: 637776 - RNA, 23 nt, Artificial Sequence
  Synthetic
guaaacaaagaacagacuguuau

SEQ ID NO: 637777 - RNA, 24 nt, Artificial Sequence
  Synthetic
aguaaacaaagaacagacuguuau

SEQ ID NO: 637778 - RNA, 18 nt, Artificial Sequence
  Synthetic
auaaaauagcaguguuau

SEQ ID NO: 637779 - RNA, 19 nt, Artificial Sequence
  Synthetic
uauaaaauagcaguguuau

SEQ ID NO: 637780 - RNA, 20 nt, Artificial Sequence
  Synthetic
uuauaaaauagcaguguuau

SEQ ID NO: 637781 - RNA, 21 nt, Artificial Sequence
  Synthetic
uuuauaaaauagcaguguuau

SEQ ID NO: 637782 - RNA, 22 nt, Artificial Sequence
  Synthetic
uuuuauaaaauagcaguguuau

SEQ ID NO: 637783 - RNA, 23 nt, Artificial Sequence
  Synthetic
uuuuuauaaaauagcaguguuau

SEQ ID NO: 637784 - RNA, 24 nt, Artificial Sequence
  Synthetic
auuuuuauaaaauagcaguguuau

SEQ ID NO: 637785 - RNA, 18 nt, Artificial Sequence
  Synthetic
ugaauucccauguguuau

SEQ ID NO: 637786 - RNA, 19 nt, Artificial Sequence
  Synthetic
uugaauucccauguguuau

SEQ ID NO: 637787 - RNA, 20 nt, Artificial Sequence
  Synthetic
guugaauucccauguguuau

SEQ ID NO: 637788 - RNA, 21 nt, Artificial Sequence
  Synthetic
uguugaauucccauguguuau

SEQ ID NO: 637789 - RNA, 22 nt, Artificial Sequence
  Synthetic
auguugaauucccauguguuau

SEQ ID NO: 637790 - RNA, 23 nt, Artificial Sequence
  Synthetic
cauguugaauucccauguguuau

SEQ ID NO: 637791 - RNA, 24 nt, Artificial Sequence
  Synthetic
ucauguugaauucccauguguuau

SEQ ID NO: 637792 - RNA, 18 nt, Artificial Sequence
  Synthetic
aacacuagaguguguuau

SEQ ID NO: 637793 - RNA, 19 nt, Artificial Sequence
  Synthetic
gaacacuagaguguguuau

SEQ ID NO: 637794 - RNA, 20 nt, Artificial Sequence
  Synthetic
agaacacuagaguguguuau

SEQ ID NO: 637795 - RNA, 21 nt, Artificial Sequence
  Synthetic
uagaacacuagaguguguuau

SEQ ID NO: 637796 - RNA, 22 nt, Artificial Sequence
  Synthetic
uuagaacacuagaguguguuau

SEQ ID NO: 637797 - RNA, 23 nt, Artificial Sequence
  Synthetic
guuagaacacuagaguguguuau

SEQ ID NO: 637798 - RNA, 24 nt, Artificial Sequence
  Synthetic
aguuagaacacuagaguguguuau

SEQ ID NO: 637799 - RNA, 18 nt, Artificial Sequence
  Synthetic
ucaccauuauuguguuau

SEQ ID NO: 637800 - RNA, 19 nt, Artificial Sequence
  Synthetic
uucaccauuauuguguuau

SEQ ID NO: 637801 - RNA, 20 nt, Artificial Sequence
  Synthetic
uuucaccauuauuguguuau

SEQ ID NO: 637802 - RNA, 21 nt, Artificial Sequence
  Synthetic
auuucaccauuauuguguuau

SEQ ID NO: 637803 - RNA, 22 nt, Artificial Sequence
  Synthetic
uauuucaccauuauuguguuau

SEQ ID NO: 637804 - RNA, 23 nt, Artificial Sequence
  Synthetic
auauuucaccauuauuguguuau

SEQ ID NO: 637805 - RNA, 24 nt, Artificial Sequence
  Synthetic
uauauuucaccauuauuguguuau

SEQ ID NO: 637806 - RNA, 18 nt, Artificial Sequence
  Synthetic
auggauuuauuuuguuau

SEQ ID NO: 637807 - RNA, 19 nt, Artificial Sequence
  Synthetic
aauggauuuauuuuguuau

SEQ ID NO: 637808 - RNA, 20 nt, Artificial Sequence
  Synthetic
aaauggauuuauuuuguuau

SEQ ID NO: 637809 - RNA, 21 nt, Artificial Sequence
  Synthetic
aaaauggauuuauuuuguuau

SEQ ID NO: 637810 - RNA, 22 nt, Artificial Sequence
  Synthetic
uaaaauggauuuauuuuguuau

SEQ ID NO: 637811 - RNA, 23 nt, Artificial Sequence
  Synthetic
uuaaaauggauuuauuuuguuau

SEQ ID NO: 637812 - RNA, 24 nt, Artificial Sequence
  Synthetic
uuuaaaauggauuuauuuuguuau

SEQ ID NO: 637813 - RNA, 18 nt, Artificial Sequence
  Synthetic
aacaaagguuuuuguuau

SEQ ID NO: 637814 - RNA, 19 nt, Artificial Sequence
  Synthetic
aaacaaagguuuuuguuau

SEQ ID NO: 637815 - RNA, 20 nt, Artificial Sequence
  Synthetic
aaaacaaagguuuuuguuau

SEQ ID NO: 637816 - RNA, 21 nt, Artificial Sequence
  Synthetic
gaaaacaaagguuuuuguuau

SEQ ID NO: 637817 - RNA, 22 nt, Artificial Sequence
  Synthetic
ggaaaacaaagguuuuuguuau

SEQ ID NO: 637818 - RNA, 23 nt, Artificial Sequence
  Synthetic
uggaaaacaaagguuuuuguuau

SEQ ID NO: 637819 - RNA, 24 nt, Artificial Sequence
  Synthetic
uuggaaaacaaagguuuuuguuau

SEQ ID NO: 637820 - RNA, 18 nt, Artificial Sequence
  Synthetic
aaaaugacccaaauuuau

SEQ ID NO: 637821 - RNA, 19 nt, Artificial Sequence
  Synthetic
aaaaaugacccaaauuuau

SEQ ID NO: 637822 - RNA, 20 nt, Artificial Sequence
  Synthetic
gaaaaaugacccaaauuuau

SEQ ID NO: 637823 - RNA, 21 nt, Artificial Sequence
  Synthetic
agaaaaaugacccaaauuuau

SEQ ID NO: 637824 - RNA, 22 nt, Artificial Sequence
  Synthetic
aagaaaaaugacccaaauuuau

SEQ ID NO: 637825 - RNA, 23 nt, Artificial Sequence
  Synthetic
caagaaaaaugacccaaauuuau

SEQ ID NO: 637826 - RNA, 24 nt, Artificial Sequence
  Synthetic
ccaagaaaaaugacccaaauuuau

SEQ ID NO: 637827 - RNA, 18 nt, Artificial Sequence
  Synthetic
auuugccaaugaauuuau

SEQ ID NO: 637828 - RNA, 19 nt, Artificial Sequence
  Synthetic
aauuugccaaugaauuuau

SEQ ID NO: 637829 - RNA, 20 nt, Artificial Sequence
  Synthetic
aaauuugccaaugaauuuau

SEQ ID NO: 637830 - RNA, 21 nt, Artificial Sequence
  Synthetic
gaaauuugccaaugaauuuau

SEQ ID NO: 637831 - RNA, 22 nt, Artificial Sequence
  Synthetic
agaaauuugccaaugaauuuau

SEQ ID NO: 637832 - RNA, 23 nt, Artificial Sequence
  Synthetic
cagaaauuugccaaugaauuuau

SEQ ID NO: 637833 - RNA, 24 nt, Artificial Sequence
  Synthetic
ucagaaauuugccaaugaauuuau

SEQ ID NO: 637834 - RNA, 18 nt, Artificial Sequence
  Synthetic
caauauauuugaauuuau

SEQ ID NO: 637835 - RNA, 19 nt, Artificial Sequence
  Synthetic
ucaauauauuugaauuuau

SEQ ID NO: 637836 - RNA, 20 nt, Artificial Sequence
  Synthetic
uucaauauauuugaauuuau

SEQ ID NO: 637837 - RNA, 21 nt, Artificial Sequence
  Synthetic
uuucaauauauuugaauuuau

SEQ ID NO: 637838 - RNA, 22 nt, Artificial Sequence
  Synthetic
auuucaauauauuugaauuuau

SEQ ID NO: 637839 - RNA, 23 nt, Artificial Sequence
  Synthetic
uauuucaauauauuugaauuuau

SEQ ID NO: 637840 - RNA, 24 nt, Artificial Sequence
  Synthetic
uuauuucaauauauuugaauuuau

SEQ ID NO: 637841 - RNA, 18 nt, Artificial Sequence
  Synthetic
cuuuccacacuaauuuau

SEQ ID NO: 637842 - RNA, 19 nt, Artificial Sequence
  Synthetic
acuuuccacacuaauuuau

SEQ ID NO: 637843 - RNA, 20 nt, Artificial Sequence
  Synthetic
uacuuuccacacuaauuuau

SEQ ID NO: 637844 - RNA, 21 nt, Artificial Sequence
  Synthetic
auacuuuccacacuaauuuau

SEQ ID NO: 637845 - RNA, 22 nt, Artificial Sequence
  Synthetic
aauacuuuccacacuaauuuau

SEQ ID NO: 637846 - RNA, 23 nt, Artificial Sequence
  Synthetic
gaauacuuuccacacuaauuuau

SEQ ID NO: 637847 - RNA, 24 nt, Artificial Sequence
  Synthetic
ugaauacuuuccacacuaauuuau

SEQ ID NO: 637848 - RNA, 18 nt, Artificial Sequence
  Synthetic
cuacaccauuuaauuuau

SEQ ID NO: 637849 - RNA, 19 nt, Artificial Sequence
  Synthetic
ccuacaccauuuaauuuau

SEQ ID NO: 637850 - RNA, 20 nt, Artificial Sequence
  Synthetic
uccuacaccauuuaauuuau

SEQ ID NO: 637851 - RNA, 21 nt, Artificial Sequence
  Synthetic
auccuacaccauuuaauuuau

SEQ ID NO: 637852 - RNA, 22 nt, Artificial Sequence
  Synthetic
cauccuacaccauuuaauuuau

SEQ ID NO: 637853 - RNA, 23 nt, Artificial Sequence
  Synthetic
ucauccuacaccauuuaauuuau

SEQ ID NO: 637854 - RNA, 24 nt, Artificial Sequence
  Synthetic
cucauccuacaccauuuaauuuau

SEQ ID NO: 637855 - RNA, 18 nt, Artificial Sequence
  Synthetic
guaaaaucagacauuuau

SEQ ID NO: 637856 - RNA, 19 nt, Artificial Sequence
  Synthetic
aguaaaaucagacauuuau

SEQ ID NO: 637857 - RNA, 20 nt, Artificial Sequence
  Synthetic
gaguaaaaucagacauuuau

SEQ ID NO: 637858 - RNA, 21 nt, Artificial Sequence
  Synthetic
agaguaaaaucagacauuuau

SEQ ID NO: 637859 - RNA, 22 nt, Artificial Sequence
  Synthetic
aagaguaaaaucagacauuuau

SEQ ID NO: 637860 - RNA, 23 nt, Artificial Sequence
  Synthetic
gaagaguaaaaucagacauuuau

SEQ ID NO: 637861 - RNA, 24 nt, Artificial Sequence
  Synthetic
ggaagaguaaaaucagacauuuau

SEQ ID NO: 637862 - RNA, 18 nt, Artificial Sequence
  Synthetic
cauuucuaauacauuuau

SEQ ID NO: 637863 - RNA, 19 nt, Artificial Sequence
  Synthetic
acauuucuaauacauuuau

SEQ ID NO: 637864 - RNA, 20 nt, Artificial Sequence
  Synthetic
cacauuucuaauacauuuau

SEQ ID NO: 637865 - RNA, 21 nt, Artificial Sequence
  Synthetic
ucacauuucuaauacauuuau

SEQ ID NO: 637866 - RNA, 22 nt, Artificial Sequence
  Synthetic
gucacauuucuaauacauuuau

SEQ ID NO: 637867 - RNA, 23 nt, Artificial Sequence
  Synthetic
agucacauuucuaauacauuuau

SEQ ID NO: 637868 - RNA, 24 nt, Artificial Sequence
  Synthetic
aagucacauuucuaauacauuuau

SEQ ID NO: 637869 - RNA, 18 nt, Artificial Sequence
  Synthetic
caaacauuuaccauuuau

SEQ ID NO: 637870 - RNA, 19 nt, Artificial Sequence
  Synthetic
ucaaacauuuaccauuuau

SEQ ID NO: 637871 - RNA, 20 nt, Artificial Sequence
  Synthetic
cucaaacauuuaccauuuau

SEQ ID NO: 637872 - RNA, 21 nt, Artificial Sequence
  Synthetic
ccucaaacauuuaccauuuau

SEQ ID NO: 637873 - RNA, 22 nt, Artificial Sequence
  Synthetic
accucaaacauuuaccauuuau

SEQ ID NO: 637874 - RNA, 23 nt, Artificial Sequence
  Synthetic
caccucaaacauuuaccauuuau

SEQ ID NO: 637875 - RNA, 24 nt, Artificial Sequence
  Synthetic
ucaccucaaacauuuaccauuuau

SEQ ID NO: 637876 - RNA, 18 nt, Artificial Sequence
  Synthetic
aaaucaaacuccauuuau

SEQ ID NO: 637877 - RNA, 19 nt, Artificial Sequence
  Synthetic
uaaaucaaacuccauuuau

SEQ ID NO: 637878 - RNA, 20 nt, Artificial Sequence
  Synthetic
auaaaucaaacuccauuuau

SEQ ID NO: 637879 - RNA, 21 nt, Artificial Sequence
  Synthetic
gauaaaucaaacuccauuuau

SEQ ID NO: 637880 - RNA, 22 nt, Artificial Sequence
  Synthetic
ugauaaaucaaacuccauuuau

SEQ ID NO: 637881 - RNA, 23 nt, Artificial Sequence
  Synthetic
cugauaaaucaaacuccauuuau

SEQ ID NO: 637882 - RNA, 24 nt, Artificial Sequence
  Synthetic
acugauaaaucaaacuccauuuau

SEQ ID NO: 637883 - RNA, 18 nt, Artificial Sequence
  Synthetic
aagggacgaggcauuuau

SEQ ID NO: 637884 - RNA, 19 nt, Artificial Sequence
  Synthetic
gaagggacgaggcauuuau

SEQ ID NO: 637885 - RNA, 20 nt, Artificial Sequence
  Synthetic
ggaagggacgaggcauuuau

SEQ ID NO: 637886 - RNA, 21 nt, Artificial Sequence
  Synthetic
aggaagggacgaggcauuuau

SEQ ID NO: 637887 - RNA, 22 nt, Artificial Sequence
  Synthetic
caggaagggacgaggcauuuau

SEQ ID NO: 637888 - RNA, 23 nt, Artificial Sequence
  Synthetic
acaggaagggacgaggcauuuau

SEQ ID NO: 637889 - RNA, 24 nt, Artificial Sequence
  Synthetic
cacaggaagggacgaggcauuuau

SEQ ID NO: 637890 - RNA, 18 nt, Artificial Sequence
  Synthetic
cagcucagugucauuuau

SEQ ID NO: 637891 - RNA, 19 nt, Artificial Sequence
  Synthetic
ucagcucagugucauuuau

SEQ ID NO: 637892 - RNA, 20 nt, Artificial Sequence
  Synthetic
uucagcucagugucauuuau

SEQ ID NO: 637893 - RNA, 21 nt, Artificial Sequence
  Synthetic
auucagcucagugucauuuau

SEQ ID NO: 637894 - RNA, 22 nt, Artificial Sequence
  Synthetic
cauucagcucagugucauuuau

SEQ ID NO: 637895 - RNA, 23 nt, Artificial Sequence
  Synthetic
ucauucagcucagugucauuuau

SEQ ID NO: 637896 - RNA, 24 nt, Artificial Sequence
  Synthetic
uucauucagcucagugucauuuau

SEQ ID NO: 637897 - RNA, 18 nt, Artificial Sequence
  Synthetic
aguugggaagggauuuau

SEQ ID NO: 637898 - RNA, 19 nt, Artificial Sequence
  Synthetic
aaguugggaagggauuuau

SEQ ID NO: 637899 - RNA, 20 nt, Artificial Sequence
  Synthetic
uaaguugggaagggauuuau

SEQ ID NO: 637900 - RNA, 21 nt, Artificial Sequence
  Synthetic
uuaaguugggaagggauuuau

SEQ ID NO: 637901 - RNA, 22 nt, Artificial Sequence
  Synthetic
auuaaguugggaagggauuuau

SEQ ID NO: 637902 - RNA, 23 nt, Artificial Sequence
  Synthetic
uauuaaguugggaagggauuuau

SEQ ID NO: 637903 - RNA, 24 nt, Artificial Sequence
  Synthetic
auauuaaguugggaagggauuuau

SEQ ID NO: 637904 - RNA, 18 nt, Artificial Sequence
  Synthetic
agaaauaacaauauuuau

SEQ ID NO: 637905 - RNA, 19 nt, Artificial Sequence
  Synthetic
cagaaauaacaauauuuau

SEQ ID NO: 637906 - RNA, 20 nt, Artificial Sequence
  Synthetic
ucagaaauaacaauauuuau

SEQ ID NO: 637907 - RNA, 21 nt, Artificial Sequence
  Synthetic
aucagaaauaacaauauuuau

SEQ ID NO: 637908 - RNA, 22 nt, Artificial Sequence
  Synthetic
uaucagaaauaacaauauuuau

SEQ ID NO: 637909 - RNA, 23 nt, Artificial Sequence
  Synthetic
auaucagaaauaacaauauuuau

SEQ ID NO: 637910 - RNA, 24 nt, Artificial Sequence
  Synthetic
cauaucagaaauaacaauauuuau

SEQ ID NO: 637911 - RNA, 18 nt, Artificial Sequence
  Synthetic
aauuauacagcuauuuau

SEQ ID NO: 637912 - RNA, 19 nt, Artificial Sequence
  Synthetic
aaauuauacagcuauuuau

SEQ ID NO: 637913 - RNA, 20 nt, Artificial Sequence
  Synthetic
caaauuauacagcuauuuau

SEQ ID NO: 637914 - RNA, 21 nt, Artificial Sequence
  Synthetic
ucaaauuauacagcuauuuau

SEQ ID NO: 637915 - RNA, 22 nt, Artificial Sequence
  Synthetic
uucaaauuauacagcuauuuau

SEQ ID NO: 637916 - RNA, 23 nt, Artificial Sequence
  Synthetic
cuucaaauuauacagcuauuuau

SEQ ID NO: 637917 - RNA, 24 nt, Artificial Sequence
  Synthetic
gcuucaaauuauacagcuauuuau

SEQ ID NO: 637918 - RNA, 18 nt, Artificial Sequence
  Synthetic
aauauuaacaguauuuau

SEQ ID NO: 637919 - RNA, 19 nt, Artificial Sequence
  Synthetic
gaauauuaacaguauuuau

SEQ ID NO: 637920 - RNA, 20 nt, Artificial Sequence
  Synthetic
ggaauauuaacaguauuuau

SEQ ID NO: 637921 - RNA, 21 nt, Artificial Sequence
  Synthetic
gggaauauuaacaguauuuau

SEQ ID NO: 637922 - RNA, 22 nt, Artificial Sequence
  Synthetic
ugggaauauuaacaguauuuau

SEQ ID NO: 637923 - RNA, 23 nt, Artificial Sequence
  Synthetic
augggaauauuaacaguauuuau

SEQ ID NO: 637924 - RNA, 24 nt, Artificial Sequence
  Synthetic
aaugggaauauuaacaguauuuau

SEQ ID NO: 637925 - RNA, 18 nt, Artificial Sequence
  Synthetic
ugauaacucauuauuuau

SEQ ID NO: 637926 - RNA, 19 nt, Artificial Sequence
  Synthetic
gugauaacucauuauuuau

SEQ ID NO: 637927 - RNA, 20 nt, Artificial Sequence
  Synthetic
agugauaacucauuauuuau

SEQ ID NO: 637928 - RNA, 21 nt, Artificial Sequence
  Synthetic
gagugauaacucauuauuuau

SEQ ID NO: 637929 - RNA, 22 nt, Artificial Sequence
  Synthetic
ggagugauaacucauuauuuau

SEQ ID NO: 637930 - RNA, 23 nt, Artificial Sequence
  Synthetic
uggagugauaacucauuauuuau

SEQ ID NO: 637931 - RNA, 24 nt, Artificial Sequence
  Synthetic
uuggagugauaacucauuauuuau

SEQ ID NO: 637932 - RNA, 18 nt, Artificial Sequence
  Synthetic
cucuaauuauuuauuuau

SEQ ID NO: 637933 - RNA, 19 nt, Artificial Sequence
  Synthetic
ucucuaauuauuuauuuau

SEQ ID NO: 637934 - RNA, 20 nt, Artificial Sequence
  Synthetic
uucucuaauuauuuauuuau

SEQ ID NO: 637935 - RNA, 21 nt, Artificial Sequence
  Synthetic
auucucuaauuauuuauuuau

SEQ ID NO: 637936 - RNA, 22 nt, Artificial Sequence
  Synthetic
aauucucuaauuauuuauuuau

SEQ ID NO: 637937 - RNA, 23 nt, Artificial Sequence
  Synthetic
gaauucucuaauuauuuauuuau

SEQ ID NO: 637938 - RNA, 24 nt, Artificial Sequence
  Synthetic
agaauucucuaauuauuuauuuau

SEQ ID NO: 637939 - RNA, 18 nt, Artificial Sequence
  Synthetic
uuuuaaaauuuuauuuau

SEQ ID NO: 637940 - RNA, 19 nt, Artificial Sequence
  Synthetic
uuuuuaaaauuuuauuuau

SEQ ID NO: 637941 - RNA, 20 nt, Artificial Sequence
  Synthetic
auuuuuaaaauuuuauuuau

SEQ ID NO: 637942 - RNA, 21 nt, Artificial Sequence
  Synthetic
uauuuuuaaaauuuuauuuau

SEQ ID NO: 637943 - RNA, 22 nt, Artificial Sequence
  Synthetic
cuauuuuuaaaauuuuauuuau

SEQ ID NO: 637944 - RNA, 23 nt, Artificial Sequence
  Synthetic
acuauuuuuaaaauuuuauuuau

SEQ ID NO: 637945 - RNA, 24 nt, Artificial Sequence
  Synthetic
aacuauuuuuaaaauuuuauuuau

SEQ ID NO: 637946 - RNA, 18 nt, Artificial Sequence
  Synthetic
agaaacagaaaacuuuau

SEQ ID NO: 637947 - RNA, 19 nt, Artificial Sequence
  Synthetic
aagaaacagaaaacuuuau

SEQ ID NO: 637948 - RNA, 20 nt, Artificial Sequence
  Synthetic
uaagaaacagaaaacuuuau

SEQ ID NO: 637949 - RNA, 21 nt, Artificial Sequence
  Synthetic
cuaagaaacagaaaacuuuau

SEQ ID NO: 637950 - RNA, 22 nt, Artificial Sequence
  Synthetic
ccuaagaaacagaaaacuuuau

SEQ ID NO: 637951 - RNA, 23 nt, Artificial Sequence
  Synthetic
cccuaagaaacagaaaacuuuau

SEQ ID NO: 637952 - RNA, 24 nt, Artificial Sequence
  Synthetic
acccuaagaaacagaaaacuuuau

SEQ ID NO: 637953 - RNA, 18 nt, Artificial Sequence
  Synthetic
caggaagccccacuuuau

SEQ ID NO: 637954 - RNA, 19 nt, Artificial Sequence
  Synthetic
gcaggaagccccacuuuau

SEQ ID NO: 637955 - RNA, 20 nt, Artificial Sequence
  Synthetic
agcaggaagccccacuuuau

SEQ ID NO: 637956 - RNA, 21 nt, Artificial Sequence
  Synthetic
aagcaggaagccccacuuuau

SEQ ID NO: 637957 - RNA, 22 nt, Artificial Sequence
  Synthetic
aaagcaggaagccccacuuuau

SEQ ID NO: 637958 - RNA, 23 nt, Artificial Sequence
  Synthetic
aaaagcaggaagccccacuuuau

SEQ ID NO: 637959 - RNA, 24 nt, Artificial Sequence
  Synthetic
gaaaagcaggaagccccacuuuau

SEQ ID NO: 637960 - RNA, 18 nt, Artificial Sequence
  Synthetic
auuuauaucagacuuuau

SEQ ID NO: 637961 - RNA, 19 nt, Artificial Sequence
  Synthetic
gauuuauaucagacuuuau

SEQ ID NO: 637962 - RNA, 20 nt, Artificial Sequence
  Synthetic
ugauuuauaucagacuuuau

SEQ ID NO: 637963 - RNA, 21 nt, Artificial Sequence
  Synthetic
cugauuuauaucagacuuuau

SEQ ID NO: 637964 - RNA, 22 nt, Artificial Sequence
  Synthetic
ccugauuuauaucagacuuuau

SEQ ID NO: 637965 - RNA, 23 nt, Artificial Sequence
  Synthetic
accugauuuauaucagacuuuau

SEQ ID NO: 637966 - RNA, 24 nt, Artificial Sequence
  Synthetic
uaccugauuuauaucagacuuuau

SEQ ID NO: 637967 - RNA, 18 nt, Artificial Sequence
  Synthetic
aucaagcugggacuuuau

SEQ ID NO: 637968 - RNA, 19 nt, Artificial Sequence
  Synthetic
aaucaagcugggacuuuau

SEQ ID NO: 637969 - RNA, 20 nt, Artificial Sequence
  Synthetic
aaaucaagcugggacuuuau

SEQ ID NO: 637970 - RNA, 21 nt, Artificial Sequence
  Synthetic
aaaaucaagcugggacuuuau

SEQ ID NO: 637971 - RNA, 22 nt, Artificial Sequence
  Synthetic
uaaaaucaagcugggacuuuau

SEQ ID NO: 637972 - RNA, 23 nt, Artificial Sequence
  Synthetic
auaaaaucaagcugggacuuuau

SEQ ID NO: 637973 - RNA, 24 nt, Artificial Sequence
  Synthetic
uauaaaaucaagcugggacuuuau

SEQ ID NO: 637974 - RNA, 18 nt, Artificial Sequence
  Synthetic
aucgacacuggacuuuau

SEQ ID NO: 637975 - RNA, 19 nt, Artificial Sequence
  Synthetic
gaucgacacuggacuuuau

SEQ ID NO: 637976 - RNA, 20 nt, Artificial Sequence
  Synthetic
ugaucgacacuggacuuuau

SEQ ID NO: 637977 - RNA, 21 nt, Artificial Sequence
  Synthetic
cugaucgacacuggacuuuau

SEQ ID NO: 637978 - RNA, 22 nt, Artificial Sequence
  Synthetic
ccugaucgacacuggacuuuau

SEQ ID NO: 637979 - RNA, 23 nt, Artificial Sequence
  Synthetic
gccugaucgacacuggacuuuau

SEQ ID NO: 637980 - RNA, 24 nt, Artificial Sequence
  Synthetic
agccugaucgacacuggacuuuau

SEQ ID NO: 637981 - RNA, 18 nt, Artificial Sequence
  Synthetic
accuaggcuggacuuuau

SEQ ID NO: 637982 - RNA, 19 nt, Artificial Sequence
  Synthetic
uaccuaggcuggacuuuau

SEQ ID NO: 637983 - RNA, 20 nt, Artificial Sequence
  Synthetic
guaccuaggcuggacuuuau

SEQ ID NO: 637984 - RNA, 21 nt, Artificial Sequence
  Synthetic
cguaccuaggcuggacuuuau

SEQ ID NO: 637985 - RNA, 22 nt, Artificial Sequence
  Synthetic
acguaccuaggcuggacuuuau

SEQ ID NO: 637986 - RNA, 23 nt, Artificial Sequence
  Synthetic
uacguaccuaggcuggacuuuau

SEQ ID NO: 637987 - RNA, 24 nt, Artificial Sequence
  Synthetic
cuacguaccuaggcuggacuuuau

SEQ ID NO: 637988 - RNA, 18 nt, Artificial Sequence
  Synthetic
gcauuguggaggcuuuau

SEQ ID NO: 637989 - RNA, 19 nt, Artificial Sequence
  Synthetic
ugcauuguggaggcuuuau

SEQ ID NO: 637990 - RNA, 20 nt, Artificial Sequence
  Synthetic
uugcauuguggaggcuuuau

SEQ ID NO: 637991 - RNA, 21 nt, Artificial Sequence
  Synthetic
uuugcauuguggaggcuuuau

SEQ ID NO: 637992 - RNA, 22 nt, Artificial Sequence
  Synthetic
uuuugcauuguggaggcuuuau

SEQ ID NO: 637993 - RNA, 23 nt, Artificial Sequence
  Synthetic
guuuugcauuguggaggcuuuau

SEQ ID NO: 637994 - RNA, 24 nt, Artificial Sequence
  Synthetic
uguuuugcauuguggaggcuuuau

SEQ ID NO: 637995 - RNA, 18 nt, Artificial Sequence
  Synthetic
guaccugguuugcuuuau

SEQ ID NO: 637996 - RNA, 19 nt, Artificial Sequence
  Synthetic
uguaccugguuugcuuuau

SEQ ID NO: 637997 - RNA, 20 nt, Artificial Sequence
  Synthetic
cuguaccugguuugcuuuau

SEQ ID NO: 637998 - RNA, 21 nt, Artificial Sequence
  Synthetic
gcuguaccugguuugcuuuau

SEQ ID NO: 637999 - RNA, 22 nt, Artificial Sequence
  Synthetic
ugcuguaccugguuugcuuuau

SEQ ID NO: 638000 - RNA, 23 nt, Artificial Sequence
  Synthetic
augcuguaccugguuugcuuuau

SEQ ID NO: 638001 - RNA, 24 nt, Artificial Sequence
  Synthetic
uaugcuguaccugguuugcuuuau

SEQ ID NO: 638002 - RNA, 18 nt, Artificial Sequence
  Synthetic
auaaaacaagcucuuuau

SEQ ID NO: 638003 - RNA, 19 nt, Artificial Sequence
  Synthetic
gauaaaacaagcucuuuau

SEQ ID NO: 638004 - RNA, 20 nt, Artificial Sequence
  Synthetic
agauaaaacaagcucuuuau

SEQ ID NO: 638005 - RNA, 21 nt, Artificial Sequence
  Synthetic
aagauaaaacaagcucuuuau

SEQ ID NO: 638006 - RNA, 22 nt, Artificial Sequence
  Synthetic
gaagauaaaacaagcucuuuau

SEQ ID NO: 638007 - RNA, 23 nt, Artificial Sequence
  Synthetic
agaagauaaaacaagcucuuuau

SEQ ID NO: 638008 - RNA, 24 nt, Artificial Sequence
  Synthetic
aagaagauaaaacaagcucuuuau

SEQ ID NO: 638009 - RNA, 18 nt, Artificial Sequence
  Synthetic
ugaaagcauucucuuuau

SEQ ID NO: 638010 - RNA, 19 nt, Artificial Sequence
  Synthetic
uugaaagcauucucuuuau

SEQ ID NO: 638011 - RNA, 20 nt, Artificial Sequence
  Synthetic
uuugaaagcauucucuuuau

SEQ ID NO: 638012 - RNA, 21 nt, Artificial Sequence
  Synthetic
uuuugaaagcauucucuuuau

SEQ ID NO: 638013 - RNA, 22 nt, Artificial Sequence
  Synthetic
uuuuugaaagcauucucuuuau

SEQ ID NO: 638014 - RNA, 23 nt, Artificial Sequence
  Synthetic
auuuuugaaagcauucucuuuau

SEQ ID NO: 638015 - RNA, 24 nt, Artificial Sequence
  Synthetic
cauuuuugaaagcauucucuuuau

SEQ ID NO: 638016 - RNA, 18 nt, Artificial Sequence
  Synthetic
aaacgaacaagucuuuau

SEQ ID NO: 638017 - RNA, 19 nt, Artificial Sequence
  Synthetic
aaaacgaacaagucuuuau

SEQ ID NO: 638018 - RNA, 20 nt, Artificial Sequence
  Synthetic
aaaaacgaacaagucuuuau

SEQ ID NO: 638019 - RNA, 21 nt, Artificial Sequence
  Synthetic
uaaaaacgaacaagucuuuau

SEQ ID NO: 638020 - RNA, 22 nt, Artificial Sequence
  Synthetic
auaaaaacgaacaagucuuuau

SEQ ID NO: 638021 - RNA, 23 nt, Artificial Sequence
  Synthetic
uauaaaaacgaacaagucuuuau

SEQ ID NO: 638022 - RNA, 24 nt, Artificial Sequence
  Synthetic
uuauaaaaacgaacaagucuuuau

SEQ ID NO: 638023 - RNA, 18 nt, Artificial Sequence
  Synthetic
uuaucuaugggucuuuau

SEQ ID NO: 638024 - RNA, 19 nt, Artificial Sequence
  Synthetic
uuuaucuaugggucuuuau

SEQ ID NO: 638025 - RNA, 20 nt, Artificial Sequence
  Synthetic
guuuaucuaugggucuuuau

SEQ ID NO: 638026 - RNA, 21 nt, Artificial Sequence
  Synthetic
uguuuaucuaugggucuuuau

SEQ ID NO: 638027 - RNA, 22 nt, Artificial Sequence
  Synthetic
auguuuaucuaugggucuuuau

SEQ ID NO: 638028 - RNA, 23 nt, Artificial Sequence
  Synthetic
gauguuuaucuaugggucuuuau

SEQ ID NO: 638029 - RNA, 24 nt, Artificial Sequence
  Synthetic
ugauguuuaucuaugggucuuuau

SEQ ID NO: 638030 - RNA, 18 nt, Artificial Sequence
  Synthetic
ucuuucccuauucuuuau

SEQ ID NO: 638031 - RNA, 19 nt, Artificial Sequence
  Synthetic
aucuuucccuauucuuuau

SEQ ID NO: 638032 - RNA, 20 nt, Artificial Sequence
  Synthetic
caucuuucccuauucuuuau

SEQ ID NO: 638033 - RNA, 21 nt, Artificial Sequence
  Synthetic
acaucuuucccuauucuuuau

SEQ ID NO: 638034 - RNA, 22 nt, Artificial Sequence
  Synthetic
uacaucuuucccuauucuuuau

SEQ ID NO: 638035 - RNA, 23 nt, Artificial Sequence
  Synthetic
auacaucuuucccuauucuuuau

SEQ ID NO: 638036 - RNA, 24 nt, Artificial Sequence
  Synthetic
aauacaucuuucccuauucuuuau

SEQ ID NO: 638037 - RNA, 18 nt, Artificial Sequence
  Synthetic
uuuggugugucaguuuau

SEQ ID NO: 638038 - RNA, 19 nt, Artificial Sequence
  Synthetic
uuuuggugugucaguuuau

SEQ ID NO: 638039 - RNA, 20 nt, Artificial Sequence
  Synthetic
guuuuggugugucaguuuau

SEQ ID NO: 638040 - RNA, 21 nt, Artificial Sequence
  Synthetic
uguuuuggugugucaguuuau

SEQ ID NO: 638041 - RNA, 22 nt, Artificial Sequence
  Synthetic
guguuuuggugugucaguuuau

SEQ ID NO: 638042 - RNA, 23 nt, Artificial Sequence
  Synthetic
aguguuuuggugugucaguuuau

SEQ ID NO: 638043 - RNA, 24 nt, Artificial Sequence
  Synthetic
aaguguuuuggugugucaguuuau

SEQ ID NO: 638044 - RNA, 18 nt, Artificial Sequence
  Synthetic
ccauauuuaauaguuuau

SEQ ID NO: 638045 - RNA, 19 nt, Artificial Sequence
  Synthetic
accauauuuaauaguuuau

SEQ ID NO: 638046 - RNA, 20 nt, Artificial Sequence
  Synthetic
aaccauauuuaauaguuuau

SEQ ID NO: 638047 - RNA, 21 nt, Artificial Sequence
  Synthetic
gaaccauauuuaauaguuuau

SEQ ID NO: 638048 - RNA, 22 nt, Artificial Sequence
  Synthetic
ugaaccauauuuaauaguuuau

SEQ ID NO: 638049 - RNA, 23 nt, Artificial Sequence
  Synthetic
gugaaccauauuuaauaguuuau

SEQ ID NO: 638050 - RNA, 24 nt, Artificial Sequence
  Synthetic
agugaaccauauuuaauaguuuau

SEQ ID NO: 638051 - RNA, 18 nt, Artificial Sequence
  Synthetic
gcuucugcuauaguuuau

SEQ ID NO: 638052 - RNA, 19 nt, Artificial Sequence
  Synthetic
ugcuucugcuauaguuuau

SEQ ID NO: 638053 - RNA, 20 nt, Artificial Sequence
  Synthetic
uugcuucugcuauaguuuau

SEQ ID NO: 638054 - RNA, 21 nt, Artificial Sequence
  Synthetic
uuugcuucugcuauaguuuau

SEQ ID NO: 638055 - RNA, 22 nt, Artificial Sequence
  Synthetic
uuuugcuucugcuauaguuuau

SEQ ID NO: 638056 - RNA, 23 nt, Artificial Sequence
  Synthetic
auuuugcuucugcuauaguuuau

SEQ ID NO: 638057 - RNA, 24 nt, Artificial Sequence
  Synthetic
cauuuugcuucugcuauaguuuau

SEQ ID NO: 638058 - RNA, 18 nt, Artificial Sequence
  Synthetic
uaagaauaaaucguuuau

SEQ ID NO: 638059 - RNA, 19 nt, Artificial Sequence
  Synthetic
uuaagaauaaaucguuuau

SEQ ID NO: 638060 - RNA, 20 nt, Artificial Sequence
  Synthetic
cuuaagaauaaaucguuuau

SEQ ID NO: 638061 - RNA, 21 nt, Artificial Sequence
  Synthetic
acuuaagaauaaaucguuuau

SEQ ID NO: 638062 - RNA, 22 nt, Artificial Sequence
  Synthetic
aacuuaagaauaaaucguuuau

SEQ ID NO: 638063 - RNA, 23 nt, Artificial Sequence
  Synthetic
aaacuuaagaauaaaucguuuau

SEQ ID NO: 638064 - RNA, 24 nt, Artificial Sequence
  Synthetic
aaaacuuaagaauaaaucguuuau

SEQ ID NO: 638065 - RNA, 18 nt, Artificial Sequence
  Synthetic
augaauaaaaagguuuau

SEQ ID NO: 638066 - RNA, 19 nt, Artificial Sequence
  Synthetic
gaugaauaaaaagguuuau

SEQ ID NO: 638067 - RNA, 20 nt, Artificial Sequence
  Synthetic
agaugaauaaaaagguuuau

SEQ ID NO: 638068 - RNA, 21 nt, Artificial Sequence
  Synthetic
gagaugaauaaaaagguuuau

SEQ ID NO: 638069 - RNA, 22 nt, Artificial Sequence
  Synthetic
ggagaugaauaaaaagguuuau

SEQ ID NO: 638070 - RNA, 23 nt, Artificial Sequence
  Synthetic
gggagaugaauaaaaagguuuau

SEQ ID NO: 638071 - RNA, 24 nt, Artificial Sequence
  Synthetic
ugggagaugaauaaaaagguuuau

SEQ ID NO: 638072 - RNA, 18 nt, Artificial Sequence
  Synthetic
ucuucucugaggguuuau

SEQ ID NO: 638073 - RNA, 19 nt, Artificial Sequence
  Synthetic
aucuucucugaggguuuau

SEQ ID NO: 638074 - RNA, 20 nt, Artificial Sequence
  Synthetic
gaucuucucugaggguuuau

SEQ ID NO: 638075 - RNA, 21 nt, Artificial Sequence
  Synthetic
agaucuucucugaggguuuau

SEQ ID NO: 638076 - RNA, 22 nt, Artificial Sequence
  Synthetic
aagaucuucucugaggguuuau

SEQ ID NO: 638077 - RNA, 23 nt, Artificial Sequence
  Synthetic
aaagaucuucucugaggguuuau

SEQ ID NO: 638078 - RNA, 24 nt, Artificial Sequence
  Synthetic
aaaagaucuucucugaggguuuau

SEQ ID NO: 638079 - RNA, 18 nt, Artificial Sequence
  Synthetic
aauuuaugauggguuuau

SEQ ID NO: 638080 - RNA, 19 nt, Artificial Sequence
  Synthetic
caauuuaugauggguuuau

SEQ ID NO: 638081 - RNA, 20 nt, Artificial Sequence
  Synthetic
ucaauuuaugauggguuuau

SEQ ID NO: 638082 - RNA, 21 nt, Artificial Sequence
  Synthetic
uucaauuuaugauggguuuau

SEQ ID NO: 638083 - RNA, 22 nt, Artificial Sequence
  Synthetic
uuucaauuuaugauggguuuau

SEQ ID NO: 638084 - RNA, 23 nt, Artificial Sequence
  Synthetic
uuuucaauuuaugauggguuuau

SEQ ID NO: 638085 - RNA, 24 nt, Artificial Sequence
  Synthetic
auuuucaauuuaugauggguuuau

SEQ ID NO: 638086 - RNA, 18 nt, Artificial Sequence
  Synthetic
ugcaaugcuuggguuuau

SEQ ID NO: 638087 - RNA, 19 nt, Artificial Sequence
  Synthetic
augcaaugcuuggguuuau

SEQ ID NO: 638088 - RNA, 20 nt, Artificial Sequence
  Synthetic
aaugcaaugcuuggguuuau

SEQ ID NO: 638089 - RNA, 21 nt, Artificial Sequence
  Synthetic
aaaugcaaugcuuggguuuau

SEQ ID NO: 638090 - RNA, 22 nt, Artificial Sequence
  Synthetic
uaaaugcaaugcuuggguuuau

SEQ ID NO: 638091 - RNA, 23 nt, Artificial Sequence
  Synthetic
uuaaaugcaaugcuuggguuuau

SEQ ID NO: 638092 - RNA, 24 nt, Artificial Sequence
  Synthetic
cuuaaaugcaaugcuuggguuuau

SEQ ID NO: 638093 - RNA, 18 nt, Artificial Sequence
  Synthetic
agagaaaccaugguuuau

SEQ ID NO: 638094 - RNA, 19 nt, Artificial Sequence
  Synthetic
aagagaaaccaugguuuau

SEQ ID NO: 638095 - RNA, 20 nt, Artificial Sequence
  Synthetic
aaagagaaaccaugguuuau

SEQ ID NO: 638096 - RNA, 21 nt, Artificial Sequence
  Synthetic
aaaagagaaaccaugguuuau

SEQ ID NO: 638097 - RNA, 22 nt, Artificial Sequence
  Synthetic
aaaaagagaaaccaugguuuau

SEQ ID NO: 638098 - RNA, 23 nt, Artificial Sequence
  Synthetic
aaaaaagagaaaccaugguuuau

SEQ ID NO: 638099 - RNA, 24 nt, Artificial Sequence
  Synthetic
aaaaaaagagaaaccaugguuuau

SEQ ID NO: 638100 - RNA, 18 nt, Artificial Sequence
  Synthetic
agacgcuucaugguuuau

SEQ ID NO: 638101 - RNA, 19 nt, Artificial Sequence
  Synthetic
uagacgcuucaugguuuau

SEQ ID NO: 638102 - RNA, 20 nt, Artificial Sequence
  Synthetic
uuagacgcuucaugguuuau

SEQ ID NO: 638103 - RNA, 21 nt, Artificial Sequence
  Synthetic
guuagacgcuucaugguuuau

SEQ ID NO: 638104 - RNA, 22 nt, Artificial Sequence
  Synthetic
aguuagacgcuucaugguuuau

SEQ ID NO: 638105 - RNA, 23 nt, Artificial Sequence
  Synthetic
uaguuagacgcuucaugguuuau

SEQ ID NO: 638106 - RNA, 24 nt, Artificial Sequence
  Synthetic
guaguuagacgcuucaugguuuau

SEQ ID NO: 638107 - RNA, 18 nt, Artificial Sequence
  Synthetic
aaucuguuauauguuuau

SEQ ID NO: 638108 - RNA, 19 nt, Artificial Sequence
  Synthetic
aaaucuguuauauguuuau

SEQ ID NO: 638109 - RNA, 20 nt, Artificial Sequence
  Synthetic
aaaaucuguuauauguuuau

SEQ ID NO: 638110 - RNA, 21 nt, Artificial Sequence
  Synthetic
uaaaaucuguuauauguuuau

SEQ ID NO: 638111 - RNA, 22 nt, Artificial Sequence
  Synthetic
uuaaaaucuguuauauguuuau

SEQ ID NO: 638112 - RNA, 23 nt, Artificial Sequence
  Synthetic
uuuaaaaucuguuauauguuuau

SEQ ID NO: 638113 - RNA, 24 nt, Artificial Sequence
  Synthetic
uuuuaaaaucuguuauauguuuau

SEQ ID NO: 638114 - RNA, 18 nt, Artificial Sequence
  Synthetic
auauauuuuauuguuuau

SEQ ID NO: 638115 - RNA, 19 nt, Artificial Sequence
  Synthetic
gauauauuuuauuguuuau

SEQ ID NO: 638116 - RNA, 20 nt, Artificial Sequence
  Synthetic
agauauauuuuauuguuuau

SEQ ID NO: 638117 - RNA, 21 nt, Artificial Sequence
  Synthetic
aagauauauuuuauuguuuau

SEQ ID NO: 638118 - RNA, 22 nt, Artificial Sequence
  Synthetic
gaagauauauuuuauuguuuau

SEQ ID NO: 638119 - RNA, 23 nt, Artificial Sequence
  Synthetic
ugaagauauauuuuauuguuuau

SEQ ID NO: 638120 - RNA, 24 nt, Artificial Sequence
  Synthetic
uugaagauauauuuuauuguuuau

SEQ ID NO: 638121 - RNA, 18 nt, Artificial Sequence
  Synthetic
uaauaaucucaauuuuau

SEQ ID NO: 638122 - RNA, 19 nt, Artificial Sequence
  Synthetic
guaauaaucucaauuuuau

SEQ ID NO: 638123 - RNA, 20 nt, Artificial Sequence
  Synthetic
uguaauaaucucaauuuuau

SEQ ID NO: 638124 - RNA, 21 nt, Artificial Sequence
  Synthetic
uuguaauaaucucaauuuuau

SEQ ID NO: 638125 - RNA, 22 nt, Artificial Sequence
  Synthetic
uuuguaauaaucucaauuuuau

SEQ ID NO: 638126 - RNA, 23 nt, Artificial Sequence
  Synthetic
auuuguaauaaucucaauuuuau

SEQ ID NO: 638127 - RNA, 24 nt, Artificial Sequence
  Synthetic
gauuuguaauaaucucaauuuuau

SEQ ID NO: 638128 - RNA, 18 nt, Artificial Sequence
  Synthetic
gccauuuguuaauuuuau

SEQ ID NO: 638129 - RNA, 19 nt, Artificial Sequence
  Synthetic
ugccauuuguuaauuuuau

SEQ ID NO: 638130 - RNA, 20 nt, Artificial Sequence
  Synthetic
uugccauuuguuaauuuuau

SEQ ID NO: 638131 - RNA, 21 nt, Artificial Sequence
  Synthetic
uuugccauuuguuaauuuuau

SEQ ID NO: 638132 - RNA, 22 nt, Artificial Sequence
  Synthetic
guuugccauuuguuaauuuuau

SEQ ID NO: 638133 - RNA, 23 nt, Artificial Sequence
  Synthetic
uguuugccauuuguuaauuuuau

SEQ ID NO: 638134 - RNA, 24 nt, Artificial Sequence
  Synthetic
cuguuugccauuuguuaauuuuau

SEQ ID NO: 638135 - RNA, 18 nt, Artificial Sequence
  Synthetic
caauuaucuucauuuuau

SEQ ID NO: 638136 - RNA, 19 nt, Artificial Sequence
  Synthetic
ccaauuaucuucauuuuau

SEQ ID NO: 638137 - RNA, 20 nt, Artificial Sequence
  Synthetic
uccaauuaucuucauuuuau

SEQ ID NO: 638138 - RNA, 21 nt, Artificial Sequence
  Synthetic
auccaauuaucuucauuuuau

SEQ ID NO: 638139 - RNA, 22 nt, Artificial Sequence
  Synthetic
gauccaauuaucuucauuuuau

SEQ ID NO: 638140 - RNA, 23 nt, Artificial Sequence
  Synthetic
agauccaauuaucuucauuuuau

SEQ ID NO: 638141 - RNA, 24 nt, Artificial Sequence
  Synthetic
uagauccaauuaucuucauuuuau

SEQ ID NO: 638142 - RNA, 18 nt, Artificial Sequence
  Synthetic
ugagagaugggauuuuau

SEQ ID NO: 638143 - RNA, 19 nt, Artificial Sequence
  Synthetic
cugagagaugggauuuuau

SEQ ID NO: 638144 - RNA, 20 nt, Artificial Sequence
  Synthetic
ucugagagaugggauuuuau

SEQ ID NO: 638145 - RNA, 21 nt, Artificial Sequence
  Synthetic
uucugagagaugggauuuuau

SEQ ID NO: 638146 - RNA, 22 nt, Artificial Sequence
  Synthetic
auucugagagaugggauuuuau

SEQ ID NO: 638147 - RNA, 23 nt, Artificial Sequence
  Synthetic
gauucugagagaugggauuuuau

SEQ ID NO: 638148 - RNA, 24 nt, Artificial Sequence
  Synthetic
ggauucugagagaugggauuuuau

SEQ ID NO: 638149 - RNA, 18 nt, Artificial Sequence
  Synthetic
uaggauucaugauuuuau

SEQ ID NO: 638150 - RNA, 19 nt, Artificial Sequence
  Synthetic
guaggauucaugauuuuau

SEQ ID NO: 638151 - RNA, 20 nt, Artificial Sequence
  Synthetic
aguaggauucaugauuuuau

SEQ ID NO: 638152 - RNA, 21 nt, Artificial Sequence
  Synthetic
gaguaggauucaugauuuuau

SEQ ID NO: 638153 - RNA, 22 nt, Artificial Sequence
  Synthetic
ggaguaggauucaugauuuuau

SEQ ID NO: 638154 - RNA, 23 nt, Artificial Sequence
  Synthetic
gggaguaggauucaugauuuuau

SEQ ID NO: 638155 - RNA, 24 nt, Artificial Sequence
  Synthetic
ugggaguaggauucaugauuuuau

SEQ ID NO: 638156 - RNA, 18 nt, Artificial Sequence
  Synthetic
augucucaauuauuuuau

SEQ ID NO: 638157 - RNA, 19 nt, Artificial Sequence
  Synthetic
uaugucucaauuauuuuau

SEQ ID NO: 638158 - RNA, 20 nt, Artificial Sequence
  Synthetic
uuaugucucaauuauuuuau

SEQ ID NO: 638159 - RNA, 21 nt, Artificial Sequence
  Synthetic
cuuaugucucaauuauuuuau

SEQ ID NO: 638160 - RNA, 22 nt, Artificial Sequence
  Synthetic
ucuuaugucucaauuauuuuau

SEQ ID NO: 638161 - RNA, 23 nt, Artificial Sequence
  Synthetic
cucuuaugucucaauuauuuuau

SEQ ID NO: 638162 - RNA, 24 nt, Artificial Sequence
  Synthetic
ucucuuaugucucaauuauuuuau

SEQ ID NO: 638163 - RNA, 18 nt, Artificial Sequence
  Synthetic
uugcaaacacacuuuuau

SEQ ID NO: 638164 - RNA, 19 nt, Artificial Sequence
  Synthetic
cuugcaaacacacuuuuau

SEQ ID NO: 638165 - RNA, 20 nt, Artificial Sequence
  Synthetic
ucuugcaaacacacuuuuau

SEQ ID NO: 638166 - RNA, 21 nt, Artificial Sequence
  Synthetic
uucuugcaaacacacuuuuau

SEQ ID NO: 638167 - RNA, 22 nt, Artificial Sequence
  Synthetic
guucuugcaaacacacuuuuau

SEQ ID NO: 638168 - RNA, 23 nt, Artificial Sequence
  Synthetic
uguucuugcaaacacacuuuuau

SEQ ID NO: 638169 - RNA, 24 nt, Artificial Sequence
  Synthetic
cuguucuugcaaacacacuuuuau

SEQ ID NO: 638170 - RNA, 18 nt, Artificial Sequence
  Synthetic
cuugauugaaccuuuuau

SEQ ID NO: 638171 - RNA, 19 nt, Artificial Sequence
  Synthetic
ccuugauugaaccuuuuau

SEQ ID NO: 638172 - RNA, 20 nt, Artificial Sequence
  Synthetic
cccuugauugaaccuuuuau

SEQ ID NO: 638173 - RNA, 21 nt, Artificial Sequence
  Synthetic
ucccuugauugaaccuuuuau

SEQ ID NO: 638174 - RNA, 22 nt, Artificial Sequence
  Synthetic
cucccuugauugaaccuuuuau

SEQ ID NO: 638175 - RNA, 23 nt, Artificial Sequence
  Synthetic
ucucccuugauugaaccuuuuau

SEQ ID NO: 638176 - RNA, 24 nt, Artificial Sequence
  Synthetic
gucucccuugauugaaccuuuuau

SEQ ID NO: 638177 - RNA, 18 nt, Artificial Sequence
  Synthetic
aauucaacauccuuuuau

SEQ ID NO: 638178 - RNA, 19 nt, Artificial Sequence
  Synthetic
aaauucaacauccuuuuau

SEQ ID NO: 638179 - RNA, 20 nt, Artificial Sequence
  Synthetic
aaaauucaacauccuuuuau

SEQ ID NO: 638180 - RNA, 21 nt, Artificial Sequence
  Synthetic
caaaauucaacauccuuuuau

SEQ ID NO: 638181 - RNA, 22 nt, Artificial Sequence
  Synthetic
acaaaauucaacauccuuuuau

SEQ ID NO: 638182 - RNA, 23 nt, Artificial Sequence
  Synthetic
gacaaaauucaacauccuuuuau

SEQ ID NO: 638183 - RNA, 24 nt, Artificial Sequence
  Synthetic
ugacaaaauucaacauccuuuuau

SEQ ID NO: 638184 - RNA, 18 nt, Artificial Sequence
  Synthetic
uucuggagccgcuuuuau

SEQ ID NO: 638185 - RNA, 19 nt, Artificial Sequence
  Synthetic
uuucuggagccgcuuuuau

SEQ ID NO: 638186 - RNA, 20 nt, Artificial Sequence
  Synthetic
cuuucuggagccgcuuuuau

SEQ ID NO: 638187 - RNA, 21 nt, Artificial Sequence
  Synthetic
gcuuucuggagccgcuuuuau

SEQ ID NO: 638188 - RNA, 22 nt, Artificial Sequence
  Synthetic
agcuuucuggagccgcuuuuau

SEQ ID NO: 638189 - RNA, 23 nt, Artificial Sequence
  Synthetic
aagcuuucuggagccgcuuuuau

SEQ ID NO: 638190 - RNA, 24 nt, Artificial Sequence
  Synthetic
gaagcuuucuggagccgcuuuuau

SEQ ID NO: 638191 - RNA, 18 nt, Artificial Sequence
  Synthetic
ccgauuuuacucuuuuau

SEQ ID NO: 638192 - RNA, 19 nt, Artificial Sequence
  Synthetic
gccgauuuuacucuuuuau

SEQ ID NO: 638193 - RNA, 20 nt, Artificial Sequence
  Synthetic
ugccgauuuuacucuuuuau

SEQ ID NO: 638194 - RNA, 21 nt, Artificial Sequence
  Synthetic
augccgauuuuacucuuuuau

SEQ ID NO: 638195 - RNA, 22 nt, Artificial Sequence
  Synthetic
aaugccgauuuuacucuuuuau

SEQ ID NO: 638196 - RNA, 23 nt, Artificial Sequence
  Synthetic
caaugccgauuuuacucuuuuau

SEQ ID NO: 638197 - RNA, 24 nt, Artificial Sequence
  Synthetic
ucaaugccgauuuuacucuuuuau

SEQ ID NO: 638198 - RNA, 18 nt, Artificial Sequence
  Synthetic
auuguccccuucuuuuau

SEQ ID NO: 638199 - RNA, 19 nt, Artificial Sequence
  Synthetic
cauuguccccuucuuuuau

SEQ ID NO: 638200 - RNA, 20 nt, Artificial Sequence
  Synthetic
ucauuguccccuucuuuuau

SEQ ID NO: 638201 - RNA, 21 nt, Artificial Sequence
  Synthetic
gucauuguccccuucuuuuau

SEQ ID NO: 638202 - RNA, 22 nt, Artificial Sequence
  Synthetic
agucauuguccccuucuuuuau

SEQ ID NO: 638203 - RNA, 23 nt, Artificial Sequence
  Synthetic
uagucauuguccccuucuuuuau

SEQ ID NO: 638204 - RNA, 24 nt, Artificial Sequence
  Synthetic
auagucauuguccccuucuuuuau

SEQ ID NO: 638205 - RNA, 18 nt, Artificial Sequence
  Synthetic
aacccuaggcaguuuuau

SEQ ID NO: 638206 - RNA, 19 nt, Artificial Sequence
  Synthetic
aaacccuaggcaguuuuau

SEQ ID NO: 638207 - RNA, 20 nt, Artificial Sequence
  Synthetic
caaacccuaggcaguuuuau

SEQ ID NO: 638208 - RNA, 21 nt, Artificial Sequence
  Synthetic
ccaaacccuaggcaguuuuau

SEQ ID NO: 638209 - RNA, 22 nt, Artificial Sequence
  Synthetic
cccaaacccuaggcaguuuuau

SEQ ID NO: 638210 - RNA, 23 nt, Artificial Sequence
  Synthetic
ccccaaacccuaggcaguuuuau

SEQ ID NO: 638211 - RNA, 24 nt, Artificial Sequence
  Synthetic
accccaaacccuaggcaguuuuau

SEQ ID NO: 638212 - RNA, 18 nt, Artificial Sequence
  Synthetic
ccugacuucuaguuuuau

SEQ ID NO: 638213 - RNA, 19 nt, Artificial Sequence
  Synthetic
uccugacuucuaguuuuau

SEQ ID NO: 638214 - RNA, 20 nt, Artificial Sequence
  Synthetic
uuccugacuucuaguuuuau

SEQ ID NO: 638215 - RNA, 21 nt, Artificial Sequence
  Synthetic
uuuccugacuucuaguuuuau

SEQ ID NO: 638216 - RNA, 22 nt, Artificial Sequence
  Synthetic
guuuccugacuucuaguuuuau

SEQ ID NO: 638217 - RNA, 23 nt, Artificial Sequence
  Synthetic
uguuuccugacuucuaguuuuau

SEQ ID NO: 638218 - RNA, 24 nt, Artificial Sequence
  Synthetic
uuguuuccugacuucuaguuuuau

SEQ ID NO: 638219 - RNA, 18 nt, Artificial Sequence
  Synthetic
gagauccaaugguuuuau

SEQ ID NO: 638220 - RNA, 19 nt, Artificial Sequence
  Synthetic
ugagauccaaugguuuuau

SEQ ID NO: 638221 - RNA, 20 nt, Artificial Sequence
  Synthetic
augagauccaaugguuuuau

SEQ ID NO: 638222 - RNA, 21 nt, Artificial Sequence
  Synthetic
caugagauccaaugguuuuau

SEQ ID NO: 638223 - RNA, 22 nt, Artificial Sequence
  Synthetic
ucaugagauccaaugguuuuau

SEQ ID NO: 638224 - RNA, 23 nt, Artificial Sequence
  Synthetic
cucaugagauccaaugguuuuau

SEQ ID NO: 638225 - RNA, 24 nt, Artificial Sequence
  Synthetic
ucucaugagauccaaugguuuuau

SEQ ID NO: 638226 - RNA, 18 nt, Artificial Sequence
  Synthetic
gggaucugaugguuuuau

SEQ ID NO: 638227 - RNA, 19 nt, Artificial Sequence
  Synthetic
cgggaucugaugguuuuau

SEQ ID NO: 638228 - RNA, 20 nt, Artificial Sequence
  Synthetic
gcgggaucugaugguuuuau

SEQ ID NO: 638229 - RNA, 21 nt, Artificial Sequence
  Synthetic
agcgggaucugaugguuuuau

SEQ ID NO: 638230 - RNA, 22 nt, Artificial Sequence
  Synthetic
uagcgggaucugaugguuuuau

SEQ ID NO: 638231 - RNA, 23 nt, Artificial Sequence
  Synthetic
auagcgggaucugaugguuuuau

SEQ ID NO: 638232 - RNA, 24 nt, Artificial Sequence
  Synthetic
gauagcgggaucugaugguuuuau

SEQ ID NO: 638233 - RNA, 18 nt, Artificial Sequence
  Synthetic
gaggucugaugguuuuau

SEQ ID NO: 638234 - RNA, 19 nt, Artificial Sequence
  Synthetic
cgaggucugaugguuuuau

SEQ ID NO: 638235 - RNA, 20 nt, Artificial Sequence
  Synthetic
acgaggucugaugguuuuau

SEQ ID NO: 638236 - RNA, 21 nt, Artificial Sequence
  Synthetic
cacgaggucugaugguuuuau

SEQ ID NO: 638237 - RNA, 22 nt, Artificial Sequence
  Synthetic
ucacgaggucugaugguuuuau

SEQ ID NO: 638238 - RNA, 23 nt, Artificial Sequence
  Synthetic
cucacgaggucugaugguuuuau

SEQ ID NO: 638239 - RNA, 24 nt, Artificial Sequence
  Synthetic
ucucacgaggucugaugguuuuau

SEQ ID NO: 638240 - RNA, 18 nt, Artificial Sequence
  Synthetic
gagauuugaugguuuuau

SEQ ID NO: 638241 - RNA, 19 nt, Artificial Sequence
  Synthetic
ugagauuugaugguuuuau

SEQ ID NO: 638242 - RNA, 20 nt, Artificial Sequence
  Synthetic
augagauuugaugguuuuau

SEQ ID NO: 638243 - RNA, 21 nt, Artificial Sequence
  Synthetic
caugagauuugaugguuuuau

SEQ ID NO: 638244 - RNA, 22 nt, Artificial Sequence
  Synthetic
ucaugagauuugaugguuuuau

SEQ ID NO: 638245 - RNA, 23 nt, Artificial Sequence
  Synthetic
cucaugagauuugaugguuuuau

SEQ ID NO: 638246 - RNA, 24 nt, Artificial Sequence
  Synthetic
ucucaugagauuugaugguuuuau

SEQ ID NO: 638247 - RNA, 18 nt, Artificial Sequence
  Synthetic
aggauaguuuuguuuuau

SEQ ID NO: 638248 - RNA, 19 nt, Artificial Sequence
  Synthetic
aaggauaguuuuguuuuau

SEQ ID NO: 638249 - RNA, 20 nt, Artificial Sequence
  Synthetic
gaaggauaguuuuguuuuau

SEQ ID NO: 638250 - RNA, 21 nt, Artificial Sequence
  Synthetic
ugaaggauaguuuuguuuuau

SEQ ID NO: 638251 - RNA, 22 nt, Artificial Sequence
  Synthetic
uugaaggauaguuuuguuuuau

SEQ ID NO: 638252 - RNA, 23 nt, Artificial Sequence
  Synthetic
uuugaaggauaguuuuguuuuau

SEQ ID NO: 638253 - RNA, 24 nt, Artificial Sequence
  Synthetic
uuuugaaggauaguuuuguuuuau

SEQ ID NO: 638254 - RNA, 18 nt, Artificial Sequence
  Synthetic
aguagauggaauuuuuau

SEQ ID NO: 638255 - RNA, 19 nt, Artificial Sequence
  Synthetic
caguagauggaauuuuuau

SEQ ID NO: 638256 - RNA, 20 nt, Artificial Sequence
  Synthetic
gcaguagauggaauuuuuau

SEQ ID NO: 638257 - RNA, 21 nt, Artificial Sequence
  Synthetic
agcaguagauggaauuuuuau

SEQ ID NO: 638258 - RNA, 22 nt, Artificial Sequence
  Synthetic
cagcaguagauggaauuuuuau

SEQ ID NO: 638259 - RNA, 23 nt, Artificial Sequence
  Synthetic
acagcaguagauggaauuuuuau

SEQ ID NO: 638260 - RNA, 24 nt, Artificial Sequence
  Synthetic
aacagcaguagauggaauuuuuau

SEQ ID NO: 638261 - RNA, 18 nt, Artificial Sequence
  Synthetic
acugcuauagauuuuuau

SEQ ID NO: 638262 - RNA, 19 nt, Artificial Sequence
  Synthetic
aacugcuauagauuuuuau

SEQ ID NO: 638263 - RNA, 20 nt, Artificial Sequence
  Synthetic
caacugcuauagauuuuuau

SEQ ID NO: 638264 - RNA, 21 nt, Artificial Sequence
  Synthetic
ccaacugcuauagauuuuuau

SEQ ID NO: 638265 - RNA, 22 nt, Artificial Sequence
  Synthetic
gccaacugcuauagauuuuuau

SEQ ID NO: 638266 - RNA, 23 nt, Artificial Sequence
  Synthetic
ggccaacugcuauagauuuuuau

SEQ ID NO: 638267 - RNA, 24 nt, Artificial Sequence
  Synthetic
uggccaacugcuauagauuuuuau

SEQ ID NO: 638268 - RNA, 18 nt, Artificial Sequence
  Synthetic
agagauuacuauuuuuau

SEQ ID NO: 638269 - RNA, 19 nt, Artificial Sequence
  Synthetic
cagagauuacuauuuuuau

SEQ ID NO: 638270 - RNA, 20 nt, Artificial Sequence
  Synthetic
acagagauuacuauuuuuau

SEQ ID NO: 638271 - RNA, 21 nt, Artificial Sequence
  Synthetic
gacagagauuacuauuuuuau

SEQ ID NO: 638272 - RNA, 22 nt, Artificial Sequence
  Synthetic
ggacagagauuacuauuuuuau

SEQ ID NO: 638273 - RNA, 23 nt, Artificial Sequence
  Synthetic
uggacagagauuacuauuuuuau

SEQ ID NO: 638274 - RNA, 24 nt, Artificial Sequence
  Synthetic
auggacagagauuacuauuuuuau

SEQ ID NO: 638275 - RNA, 18 nt, Artificial Sequence
  Synthetic
uaaguuuuuuauuuuuau

SEQ ID NO: 638276 - RNA, 19 nt, Artificial Sequence
  Synthetic
cuaaguuuuuuauuuuuau

SEQ ID NO: 638277 - RNA, 20 nt, Artificial Sequence
  Synthetic
gcuaaguuuuuuauuuuuau

SEQ ID NO: 638278 - RNA, 21 nt, Artificial Sequence
  Synthetic
agcuaaguuuuuuauuuuuau

SEQ ID NO: 638279 - RNA, 22 nt, Artificial Sequence
  Synthetic
cagcuaaguuuuuuauuuuuau

SEQ ID NO: 638280 - RNA, 23 nt, Artificial Sequence
  Synthetic
ccagcuaaguuuuuuauuuuuau

SEQ ID NO: 638281 - RNA, 24 nt, Artificial Sequence
  Synthetic
cccagcuaaguuuuuuauuuuuau

SEQ ID NO: 638282 - RNA, 18 nt, Artificial Sequence
  Synthetic
ucugugaaaucuuuuuau

SEQ ID NO: 638283 - RNA, 19 nt, Artificial Sequence
  Synthetic
aucugugaaaucuuuuuau

SEQ ID NO: 638284 - RNA, 20 nt, Artificial Sequence
  Synthetic
aaucugugaaaucuuuuuau

SEQ ID NO: 638285 - RNA, 21 nt, Artificial Sequence
  Synthetic
uaaucugugaaaucuuuuuau

SEQ ID NO: 638286 - RNA, 22 nt, Artificial Sequence
  Synthetic
auaaucugugaaaucuuuuuau

SEQ ID NO: 638287 - RNA, 23 nt, Artificial Sequence
  Synthetic
cauaaucugugaaaucuuuuuau

SEQ ID NO: 638288 - RNA, 24 nt, Artificial Sequence
  Synthetic
gcauaaucugugaaaucuuuuuau

SEQ ID NO: 638289 - RNA, 18 nt, Artificial Sequence
  Synthetic
uccuuguucucuuuuuau

SEQ ID NO: 638290 - RNA, 19 nt, Artificial Sequence
  Synthetic
cuccuuguucucuuuuuau

SEQ ID NO: 638291 - RNA, 20 nt, Artificial Sequence
  Synthetic
ccuccuuguucucuuuuuau

SEQ ID NO: 638292 - RNA, 21 nt, Artificial Sequence
  Synthetic
uccuccuuguucucuuuuuau

SEQ ID NO: 638293 - RNA, 22 nt, Artificial Sequence
  Synthetic
uuccuccuuguucucuuuuuau

SEQ ID NO: 638294 - RNA, 23 nt, Artificial Sequence
  Synthetic
cuuccuccuuguucucuuuuuau

SEQ ID NO: 638295 - RNA, 24 nt, Artificial Sequence
  Synthetic
ccuuccuccuuguucucuuuuuau

SEQ ID NO: 638296 - RNA, 18 nt, Artificial Sequence
  Synthetic
agccccaugucuuuuuau

SEQ ID NO: 638297 - RNA, 19 nt, Artificial Sequence
  Synthetic
aagccccaugucuuuuuau

SEQ ID NO: 638298 - RNA, 20 nt, Artificial Sequence
  Synthetic
gaagccccaugucuuuuuau

SEQ ID NO: 638299 - RNA, 21 nt, Artificial Sequence
  Synthetic
ugaagccccaugucuuuuuau

SEQ ID NO: 638300 - RNA, 22 nt, Artificial Sequence
  Synthetic
augaagccccaugucuuuuuau

SEQ ID NO: 638301 - RNA, 23 nt, Artificial Sequence
  Synthetic
aaugaagccccaugucuuuuuau

SEQ ID NO: 638302 - RNA, 24 nt, Artificial Sequence
  Synthetic
aaaugaagccccaugucuuuuuau

SEQ ID NO: 638303 - RNA, 18 nt, Artificial Sequence
  Synthetic
uauccuauaauuuuuuau

SEQ ID NO: 638304 - RNA, 19 nt, Artificial Sequence
  Synthetic
guauccuauaauuuuuuau

SEQ ID NO: 638305 - RNA, 20 nt, Artificial Sequence
  Synthetic
gguauccuauaauuuuuuau

SEQ ID NO: 638306 - RNA, 21 nt, Artificial Sequence
  Synthetic
ugguauccuauaauuuuuuau

SEQ ID NO: 638307 - RNA, 22 nt, Artificial Sequence
  Synthetic
uugguauccuauaauuuuuuau

SEQ ID NO: 638308 - RNA, 23 nt, Artificial Sequence
  Synthetic
guugguauccuauaauuuuuuau

SEQ ID NO: 638309 - RNA, 24 nt, Artificial Sequence
  Synthetic
uguugguauccuauaauuuuuuau

SEQ ID NO: 638310 - RNA, 18 nt, Artificial Sequence
  Synthetic
accauacuaauuuuuuau

SEQ ID NO: 638311 - RNA, 19 nt, Artificial Sequence
  Synthetic
aaccauacuaauuuuuuau

SEQ ID NO: 638312 - RNA, 20 nt, Artificial Sequence
  Synthetic
uaaccauacuaauuuuuuau

SEQ ID NO: 638313 - RNA, 21 nt, Artificial Sequence
  Synthetic
uuaaccauacuaauuuuuuau

SEQ ID NO: 638314 - RNA, 22 nt, Artificial Sequence
  Synthetic
auuaaccauacuaauuuuuuau

SEQ ID NO: 638315 - RNA, 23 nt, Artificial Sequence
  Synthetic
uauuaaccauacuaauuuuuuau

SEQ ID NO: 638316 - RNA, 24 nt, Artificial Sequence
  Synthetic
uuauuaaccauacuaauuuuuuau

SEQ ID NO: 638317 - RNA, 18 nt, Artificial Sequence
  Synthetic
ugcaugaauguuuuuuau

SEQ ID NO: 638318 - RNA, 19 nt, Artificial Sequence
  Synthetic
gugcaugaauguuuuuuau

SEQ ID NO: 638319 - RNA, 20 nt, Artificial Sequence
  Synthetic
ugugcaugaauguuuuuuau

SEQ ID NO: 638320 - RNA, 21 nt, Artificial Sequence
  Synthetic
gugugcaugaauguuuuuuau

SEQ ID NO: 638321 - RNA, 22 nt, Artificial Sequence
  Synthetic
agugugcaugaauguuuuuuau

SEQ ID NO: 638322 - RNA, 23 nt, Artificial Sequence
  Synthetic
gagugugcaugaauguuuuuuau

SEQ ID NO: 638323 - RNA, 24 nt, Artificial Sequence
  Synthetic
ugagugugcaugaauguuuuuuau

SEQ ID NO: 638324 - RNA, 18 nt, Artificial Sequence
  Synthetic
gguaucuacuuuuuuuau

SEQ ID NO: 638325 - RNA, 19 nt, Artificial Sequence
  Synthetic
ggguaucuacuuuuuuuau

SEQ ID NO: 638326 - RNA, 20 nt, Artificial Sequence
  Synthetic
uggguaucuacuuuuuuuau

SEQ ID NO: 638327 - RNA, 21 nt, Artificial Sequence
  Synthetic
auggguaucuacuuuuuuuau

SEQ ID NO: 638328 - RNA, 22 nt, Artificial Sequence
  Synthetic
cauggguaucuacuuuuuuuau

SEQ ID NO: 638329 - RNA, 23 nt, Artificial Sequence
  Synthetic
ucauggguaucuacuuuuuuuau

SEQ ID NO: 638330 - RNA, 24 nt, Artificial Sequence
  Synthetic
uucauggguaucuacuuuuuuuau

SEQ ID NO: 638331 - RNA, 18 nt, Artificial Sequence
  Synthetic
acuuaaaaaaaaaaaacu

SEQ ID NO: 638332 - RNA, 19 nt, Artificial Sequence
  Synthetic
gacuuaaaaaaaaaaaacu

SEQ ID NO: 638333 - RNA, 20 nt, Artificial Sequence
  Synthetic
agacuuaaaaaaaaaaaacu

SEQ ID NO: 638334 - RNA, 21 nt, Artificial Sequence
  Synthetic
gagacuuaaaaaaaaaaaacu

SEQ ID NO: 638335 - RNA, 22 nt, Artificial Sequence
  Synthetic
ggagacuuaaaaaaaaaaaacu

SEQ ID NO: 638336 - RNA, 23 nt, Artificial Sequence
  Synthetic
gggagacuuaaaaaaaaaaaacu

SEQ ID NO: 638337 - RNA, 24 nt, Artificial Sequence
  Synthetic
agggagacuuaaaaaaaaaaaacu

SEQ ID NO: 638338 - RNA, 18 nt, Artificial Sequence
  Synthetic
gcaguacuuaaaaaaacu

SEQ ID NO: 638339 - RNA, 19 nt, Artificial Sequence
  Synthetic
ggcaguacuuaaaaaaacu

SEQ ID NO: 638340 - RNA, 20 nt, Artificial Sequence
  Synthetic
uggcaguacuuaaaaaaacu

SEQ ID NO: 638341 - RNA, 21 nt, Artificial Sequence
  Synthetic
uuggcaguacuuaaaaaaacu

SEQ ID NO: 638342 - RNA, 22 nt, Artificial Sequence
  Synthetic
cuuggcaguacuuaaaaaaacu

SEQ ID NO: 638343 - RNA, 23 nt, Artificial Sequence
  Synthetic
ccuuggcaguacuuaaaaaaacu

SEQ ID NO: 638344 - RNA, 24 nt, Artificial Sequence
  Synthetic
uccuuggcaguacuuaaaaaaacu

SEQ ID NO: 638345 - RNA, 18 nt, Artificial Sequence
  Synthetic
acaauuuuuuaaaaaacu

SEQ ID NO: 638346 - RNA, 19 nt, Artificial Sequence
  Synthetic
aacaauuuuuuaaaaaacu

SEQ ID NO: 638347 - RNA, 20 nt, Artificial Sequence
  Synthetic
aaacaauuuuuuaaaaaacu

SEQ ID NO: 638348 - RNA, 21 nt, Artificial Sequence
  Synthetic
aaaacaauuuuuuaaaaaacu

SEQ ID NO: 638349 - RNA, 22 nt, Artificial Sequence
  Synthetic
uaaaacaauuuuuuaaaaaacu

SEQ ID NO: 638350 - RNA, 23 nt, Artificial Sequence
  Synthetic
auaaaacaauuuuuuaaaaaacu

SEQ ID NO: 638351 - RNA, 24 nt, Artificial Sequence
  Synthetic
gauaaaacaauuuuuuaaaaaacu

SEQ ID NO: 638352 - RNA, 18 nt, Artificial Sequence
  Synthetic
ccugagagaacaaaaacu

SEQ ID NO: 638353 - RNA, 19 nt, Artificial Sequence
  Synthetic
cccugagagaacaaaaacu

SEQ ID NO: 638354 - RNA, 20 nt, Artificial Sequence
  Synthetic
ucccugagagaacaaaaacu

SEQ ID NO: 638355 - RNA, 21 nt, Artificial Sequence
  Synthetic
uucccugagagaacaaaaacu

SEQ ID NO: 638356 - RNA, 22 nt, Artificial Sequence
  Synthetic
auucccugagagaacaaaaacu

SEQ ID NO: 638357 - RNA, 23 nt, Artificial Sequence
  Synthetic
gauucccugagagaacaaaaacu

SEQ ID NO: 638358 - RNA, 24 nt, Artificial Sequence
  Synthetic
agauucccugagagaacaaaaacu

SEQ ID NO: 638359 - RNA, 18 nt, Artificial Sequence
  Synthetic
ugauaaaacccaaaaacu

SEQ ID NO: 638360 - RNA, 19 nt, Artificial Sequence
  Synthetic
cugauaaaacccaaaaacu

SEQ ID NO: 638361 - RNA, 20 nt, Artificial Sequence
  Synthetic
ucugauaaaacccaaaaacu

SEQ ID NO: 638362 - RNA, 21 nt, Artificial Sequence
  Synthetic
uucugauaaaacccaaaaacu

SEQ ID NO: 638363 - RNA, 22 nt, Artificial Sequence
  Synthetic
cuucugauaaaacccaaaaacu

SEQ ID NO: 638364 - RNA, 23 nt, Artificial Sequence
  Synthetic
acuucugauaaaacccaaaaacu

SEQ ID NO: 638365 - RNA, 24 nt, Artificial Sequence
  Synthetic
aacuucugauaaaacccaaaaacu

SEQ ID NO: 638366 - RNA, 18 nt, Artificial Sequence
  Synthetic
cauugcuuuugaaaaacu

SEQ ID NO: 638367 - RNA, 19 nt, Artificial Sequence
  Synthetic
ccauugcuuuugaaaaacu

SEQ ID NO: 638368 - RNA, 20 nt, Artificial Sequence
  Synthetic
gccauugcuuuugaaaaacu

SEQ ID NO: 638369 - RNA, 21 nt, Artificial Sequence
  Synthetic
ugccauugcuuuugaaaaacu

SEQ ID NO: 638370 - RNA, 22 nt, Artificial Sequence
  Synthetic
uugccauugcuuuugaaaaacu

SEQ ID NO: 638371 - RNA, 23 nt, Artificial Sequence
  Synthetic
guugccauugcuuuugaaaaacu

SEQ ID NO: 638372 - RNA, 24 nt, Artificial Sequence
  Synthetic
uguugccauugcuuuugaaaaacu

SEQ ID NO: 638373 - RNA, 18 nt, Artificial Sequence
  Synthetic
cauaagcaaaacaaaacu

SEQ ID NO: 638374 - RNA, 19 nt, Artificial Sequence
  Synthetic
ucauaagcaaaacaaaacu

SEQ ID NO: 638375 - RNA, 20 nt, Artificial Sequence
  Synthetic
uucauaagcaaaacaaaacu

SEQ ID NO: 638376 - RNA, 21 nt, Artificial Sequence
  Synthetic
uuucauaagcaaaacaaaacu

SEQ ID NO: 638377 - RNA, 22 nt, Artificial Sequence
  Synthetic
cuuucauaagcaaaacaaaacu

SEQ ID NO: 638378 - RNA, 23 nt, Artificial Sequence
  Synthetic
acuuucauaagcaaaacaaaacu

SEQ ID NO: 638379 - RNA, 24 nt, Artificial Sequence
  Synthetic
cacuuucauaagcaaaacaaaacu

SEQ ID NO: 638380 - RNA, 18 nt, Artificial Sequence
  Synthetic
gaaaaauuauccaaaacu

SEQ ID NO: 638381 - RNA, 19 nt, Artificial Sequence
  Synthetic
agaaaaauuauccaaaacu

SEQ ID NO: 638382 - RNA, 20 nt, Artificial Sequence
  Synthetic
aagaaaaauuauccaaaacu

SEQ ID NO: 638383 - RNA, 21 nt, Artificial Sequence
  Synthetic
uaagaaaaauuauccaaaacu

SEQ ID NO: 638384 - RNA, 22 nt, Artificial Sequence
  Synthetic
uuaagaaaaauuauccaaaacu

SEQ ID NO: 638385 - RNA, 23 nt, Artificial Sequence
  Synthetic
uuuaagaaaaauuauccaaaacu

SEQ ID NO: 638386 - RNA, 24 nt, Artificial Sequence
  Synthetic
auuuaagaaaaauuauccaaaacu

SEQ ID NO: 638387 - RNA, 18 nt, Artificial Sequence
  Synthetic
gcaaacuuuggcaaaacu

SEQ ID NO: 638388 - RNA, 19 nt, Artificial Sequence
  Synthetic
agcaaacuuuggcaaaacu

SEQ ID NO: 638389 - RNA, 20 nt, Artificial Sequence
  Synthetic
aagcaaacuuuggcaaaacu

SEQ ID NO: 638390 - RNA, 21 nt, Artificial Sequence
  Synthetic
aaagcaaacuuuggcaaaacu

SEQ ID NO: 638391 - RNA, 22 nt, Artificial Sequence
  Synthetic
aaaagcaaacuuuggcaaaacu

SEQ ID NO: 638392 - RNA, 23 nt, Artificial Sequence
  Synthetic
caaaagcaaacuuuggcaaaacu

SEQ ID NO: 638393 - RNA, 24 nt, Artificial Sequence
  Synthetic
ucaaaagcaaacuuuggcaaaacu

SEQ ID NO: 638394 - RNA, 18 nt, Artificial Sequence
  Synthetic
agguccuagaucaaaacu

SEQ ID NO: 638395 - RNA, 19 nt, Artificial Sequence
  Synthetic
gagguccuagaucaaaacu

SEQ ID NO: 638396 - RNA, 20 nt, Artificial Sequence
  Synthetic
agagguccuagaucaaaacu

SEQ ID NO: 638397 - RNA, 21 nt, Artificial Sequence
  Synthetic
aagagguccuagaucaaaacu

SEQ ID NO: 638398 - RNA, 22 nt, Artificial Sequence
  Synthetic
aaagagguccuagaucaaaacu

SEQ ID NO: 638399 - RNA, 23 nt, Artificial Sequence
  Synthetic
aaaagagguccuagaucaaaacu

SEQ ID NO: 638400 - RNA, 24 nt, Artificial Sequence
  Synthetic
gaaaagagguccuagaucaaaacu

SEQ ID NO: 638401 - RNA, 18 nt, Artificial Sequence
  Synthetic
ggugucauguucaaaacu

SEQ ID NO: 638402 - RNA, 19 nt, Artificial Sequence
  Synthetic
gggugucauguucaaaacu

SEQ ID NO: 638403 - RNA, 20 nt, Artificial Sequence
  Synthetic
ugggugucauguucaaaacu

SEQ ID NO: 638404 - RNA, 21 nt, Artificial Sequence
  Synthetic
cugggugucauguucaaaacu

SEQ ID NO: 638405 - RNA, 22 nt, Artificial Sequence
  Synthetic
gcugggugucauguucaaaacu

SEQ ID NO: 638406 - RNA, 23 nt, Artificial Sequence
  Synthetic
ugcugggugucauguucaaaacu

SEQ ID NO: 638407 - RNA, 24 nt, Artificial Sequence
  Synthetic
uugcugggugucauguucaaaacu

SEQ ID NO: 638408 - RNA, 18 nt, Artificial Sequence
  Synthetic
gggguacggaagaaaacu

SEQ ID NO: 638409 - RNA, 19 nt, Artificial Sequence
  Synthetic
ugggguacggaagaaaacu

SEQ ID NO: 638410 - RNA, 20 nt, Artificial Sequence
  Synthetic
uugggguacggaagaaaacu

SEQ ID NO: 638411 - RNA, 21 nt, Artificial Sequence
  Synthetic
cuugggguacggaagaaaacu

SEQ ID NO: 638412 - RNA, 22 nt, Artificial Sequence
  Synthetic
acuugggguacggaagaaaacu

SEQ ID NO: 638413 - RNA, 23 nt, Artificial Sequence
  Synthetic
uacuugggguacggaagaaaacu

SEQ ID NO: 638414 - RNA, 24 nt, Artificial Sequence
  Synthetic
cuacuugggguacggaagaaaacu

SEQ ID NO: 638415 - RNA, 18 nt, Artificial Sequence
  Synthetic
uuauaauaccagaaaacu

SEQ ID NO: 638416 - RNA, 19 nt, Artificial Sequence
  Synthetic
cuuauaauaccagaaaacu

SEQ ID NO: 638417 - RNA, 20 nt, Artificial Sequence
  Synthetic
ucuuauaauaccagaaaacu

SEQ ID NO: 638418 - RNA, 21 nt, Artificial Sequence
  Synthetic
uucuuauaauaccagaaaacu

SEQ ID NO: 638419 - RNA, 22 nt, Artificial Sequence
  Synthetic
guucuuauaauaccagaaaacu

SEQ ID NO: 638420 - RNA, 23 nt, Artificial Sequence
  Synthetic
aguucuuauaauaccagaaaacu

SEQ ID NO: 638421 - RNA, 24 nt, Artificial Sequence
  Synthetic
gaguucuuauaauaccagaaaacu

SEQ ID NO: 638422 - RNA, 18 nt, Artificial Sequence
  Synthetic
aucauguuucagaaaacu

SEQ ID NO: 638423 - RNA, 19 nt, Artificial Sequence
  Synthetic
gaucauguuucagaaaacu

SEQ ID NO: 638424 - RNA, 20 nt, Artificial Sequence
  Synthetic
ggaucauguuucagaaaacu

SEQ ID NO: 638425 - RNA, 21 nt, Artificial Sequence
  Synthetic
gggaucauguuucagaaaacu

SEQ ID NO: 638426 - RNA, 22 nt, Artificial Sequence
  Synthetic
ugggaucauguuucagaaaacu

SEQ ID NO: 638427 - RNA, 23 nt, Artificial Sequence
  Synthetic
augggaucauguuucagaaaacu

SEQ ID NO: 638428 - RNA, 24 nt, Artificial Sequence
  Synthetic
caugggaucauguuucagaaaacu

SEQ ID NO: 638429 - RNA, 18 nt, Artificial Sequence
  Synthetic
uuaaucaacuagaaaacu

SEQ ID NO: 638430 - RNA, 19 nt, Artificial Sequence
  Synthetic
uuuaaucaacuagaaaacu

SEQ ID NO: 638431 - RNA, 20 nt, Artificial Sequence
  Synthetic
guuuaaucaacuagaaaacu

SEQ ID NO: 638432 - RNA, 21 nt, Artificial Sequence
  Synthetic
uguuuaaucaacuagaaaacu

SEQ ID NO: 638433 - RNA, 22 nt, Artificial Sequence
  Synthetic
guguuuaaucaacuagaaaacu

SEQ ID NO: 638434 - RNA, 23 nt, Artificial Sequence
  Synthetic
aguguuuaaucaacuagaaaacu

SEQ ID NO: 638435 - RNA, 24 nt, Artificial Sequence
  Synthetic
caguguuuaaucaacuagaaaacu

SEQ ID NO: 638436 - RNA, 18 nt, Artificial Sequence
  Synthetic
cuggauugcuggaaaacu

SEQ ID NO: 638437 - RNA, 19 nt, Artificial Sequence
  Synthetic
acuggauugcuggaaaacu

SEQ ID NO: 638438 - RNA, 20 nt, Artificial Sequence
  Synthetic
cacuggauugcuggaaaacu

SEQ ID NO: 638439 - RNA, 21 nt, Artificial Sequence
  Synthetic
acacuggauugcuggaaaacu

SEQ ID NO: 638440 - RNA, 22 nt, Artificial Sequence
  Synthetic
aacacuggauugcuggaaaacu

SEQ ID NO: 638441 - RNA, 23 nt, Artificial Sequence
  Synthetic
aaacacuggauugcuggaaaacu

SEQ ID NO: 638442 - RNA, 24 nt, Artificial Sequence
  Synthetic
caaacacuggauugcuggaaaacu

SEQ ID NO: 638443 - RNA, 18 nt, Artificial Sequence
  Synthetic
aaaaaauaaaugaaaacu

SEQ ID NO: 638444 - RNA, 19 nt, Artificial Sequence
  Synthetic
gaaaaaauaaaugaaaacu

SEQ ID NO: 638445 - RNA, 20 nt, Artificial Sequence
  Synthetic
ggaaaaaauaaaugaaaacu

SEQ ID NO: 638446 - RNA, 21 nt, Artificial Sequence
  Synthetic
gggaaaaaauaaaugaaaacu

SEQ ID NO: 638447 - RNA, 22 nt, Artificial Sequence
  Synthetic
ggggaaaaaauaaaugaaaacu

SEQ ID NO: 638448 - RNA, 23 nt, Artificial Sequence
  Synthetic
aggggaaaaaauaaaugaaaacu

SEQ ID NO: 638449 - RNA, 24 nt, Artificial Sequence
  Synthetic
caggggaaaaaauaaaugaaaacu

SEQ ID NO: 638450 - RNA, 18 nt, Artificial Sequence
  Synthetic
cauagcaguaugaaaacu

SEQ ID NO: 638451 - RNA, 19 nt, Artificial Sequence
  Synthetic
ucauagcaguaugaaaacu

SEQ ID NO: 638452 - RNA, 20 nt, Artificial Sequence
  Synthetic
uucauagcaguaugaaaacu

SEQ ID NO: 638453 - RNA, 21 nt, Artificial Sequence
  Synthetic
cuucauagcaguaugaaaacu

SEQ ID NO: 638454 - RNA, 22 nt, Artificial Sequence
  Synthetic
ucuucauagcaguaugaaaacu

SEQ ID NO: 638455 - RNA, 23 nt, Artificial Sequence
  Synthetic
uucuucauagcaguaugaaaacu

SEQ ID NO: 638456 - RNA, 24 nt, Artificial Sequence
  Synthetic
uuucuucauagcaguaugaaaacu

SEQ ID NO: 638457 - RNA, 18 nt, Artificial Sequence
  Synthetic
ucagagaaguugaaaacu

SEQ ID NO: 638458 - RNA, 19 nt, Artificial Sequence
  Synthetic
aucagagaaguugaaaacu

SEQ ID NO: 638459 - RNA, 20 nt, Artificial Sequence
  Synthetic
uaucagagaaguugaaaacu

SEQ ID NO: 638460 - RNA, 21 nt, Artificial Sequence
  Synthetic
auaucagagaaguugaaaacu

SEQ ID NO: 638461 - RNA, 22 nt, Artificial Sequence
  Synthetic
aauaucagagaaguugaaaacu

SEQ ID NO: 638462 - RNA, 23 nt, Artificial Sequence
  Synthetic
caauaucagagaaguugaaaacu

SEQ ID NO: 638463 - RNA, 24 nt, Artificial Sequence
  Synthetic
acaauaucagagaaguugaaaacu

SEQ ID NO: 638464 - RNA, 18 nt, Artificial Sequence
  Synthetic
aaagcaaauuugaaaacu

SEQ ID NO: 638465 - RNA, 19 nt, Artificial Sequence
  Synthetic
caaagcaaauuugaaaacu

SEQ ID NO: 638466 - RNA, 20 nt, Artificial Sequence
  Synthetic
gcaaagcaaauuugaaaacu

SEQ ID NO: 638467 - RNA, 21 nt, Artificial Sequence
  Synthetic
agcaaagcaaauuugaaaacu

SEQ ID NO: 638468 - RNA, 22 nt, Artificial Sequence
  Synthetic
aagcaaagcaaauuugaaaacu

SEQ ID NO: 638469 - RNA, 23 nt, Artificial Sequence
  Synthetic
caagcaaagcaaauuugaaaacu

SEQ ID NO: 638470 - RNA, 24 nt, Artificial Sequence
  Synthetic
ccaagcaaagcaaauuugaaaacu

SEQ ID NO: 638471 - RNA, 18 nt, Artificial Sequence
  Synthetic
gaaguuaacaauaaaacu

SEQ ID NO: 638472 - RNA, 19 nt, Artificial Sequence
  Synthetic
agaaguuaacaauaaaacu

SEQ ID NO: 638473 - RNA, 20 nt, Artificial Sequence
  Synthetic
aagaaguuaacaauaaaacu

SEQ ID NO: 638474 - RNA, 21 nt, Artificial Sequence
  Synthetic
aaagaaguuaacaauaaaacu

SEQ ID NO: 638475 - RNA, 22 nt, Artificial Sequence
  Synthetic
gaaagaaguuaacaauaaaacu

SEQ ID NO: 638476 - RNA, 23 nt, Artificial Sequence
  Synthetic
ggaaagaaguuaacaauaaaacu

SEQ ID NO: 638477 - RNA, 24 nt, Artificial Sequence
  Synthetic
aggaaagaaguuaacaauaaaacu

SEQ ID NO: 638478 - RNA, 18 nt, Artificial Sequence
  Synthetic
uacaggaggaauaaaacu

SEQ ID NO: 638479 - RNA, 19 nt, Artificial Sequence
  Synthetic
cuacaggaggaauaaaacu

SEQ ID NO: 638480 - RNA, 20 nt, Artificial Sequence
  Synthetic
acuacaggaggaauaaaacu

SEQ ID NO: 638481 - RNA, 21 nt, Artificial Sequence
  Synthetic
gacuacaggaggaauaaaacu

SEQ ID NO: 638482 - RNA, 22 nt, Artificial Sequence
  Synthetic
ugacuacaggaggaauaaaacu

SEQ ID NO: 638483 - RNA, 23 nt, Artificial Sequence
  Synthetic
augacuacaggaggaauaaaacu

SEQ ID NO: 638484 - RNA, 24 nt, Artificial Sequence
  Synthetic
uaugacuacaggaggaauaaaacu

SEQ ID NO: 638485 - RNA, 18 nt, Artificial Sequence
  Synthetic
aauggaacuuauaaaacu

SEQ ID NO: 638486 - RNA, 19 nt, Artificial Sequence
  Synthetic
caauggaacuuauaaaacu

SEQ ID NO: 638487 - RNA, 20 nt, Artificial Sequence
  Synthetic
ucaauggaacuuauaaaacu

SEQ ID NO: 638488 - RNA, 21 nt, Artificial Sequence
  Synthetic
uucaauggaacuuauaaaacu

SEQ ID NO: 638489 - RNA, 22 nt, Artificial Sequence
  Synthetic
guucaauggaacuuauaaaacu

SEQ ID NO: 638490 - RNA, 23 nt, Artificial Sequence
  Synthetic
aguucaauggaacuuauaaaacu

SEQ ID NO: 638491 - RNA, 24 nt, Artificial Sequence
  Synthetic
caguucaauggaacuuauaaaacu

SEQ ID NO: 638492 - RNA, 18 nt, Artificial Sequence
  Synthetic
accugcuguccuaaaacu

SEQ ID NO: 638493 - RNA, 19 nt, Artificial Sequence
  Synthetic
aaccugcuguccuaaaacu

SEQ ID NO: 638494 - RNA, 20 nt, Artificial Sequence
  Synthetic
uaaccugcuguccuaaaacu

SEQ ID NO: 638495 - RNA, 21 nt, Artificial Sequence
  Synthetic
auaaccugcuguccuaaaacu

SEQ ID NO: 638496 - RNA, 22 nt, Artificial Sequence
  Synthetic
cauaaccugcuguccuaaaacu

SEQ ID NO: 638497 - RNA, 23 nt, Artificial Sequence
  Synthetic
acauaaccugcuguccuaaaacu

SEQ ID NO: 638498 - RNA, 24 nt, Artificial Sequence
  Synthetic
cacauaaccugcuguccuaaaacu

SEQ ID NO: 638499 - RNA, 18 nt, Artificial Sequence
  Synthetic
caugaaaaacuuaaaacu

SEQ ID NO: 638500 - RNA, 19 nt, Artificial Sequence
  Synthetic
acaugaaaaacuuaaaacu

SEQ ID NO: 638501 - RNA, 20 nt, Artificial Sequence
  Synthetic
aacaugaaaaacuuaaaacu

SEQ ID NO: 638502 - RNA, 21 nt, Artificial Sequence
  Synthetic
gaacaugaaaaacuuaaaacu

SEQ ID NO: 638503 - RNA, 22 nt, Artificial Sequence
  Synthetic
ugaacaugaaaaacuuaaaacu

SEQ ID NO: 638504 - RNA, 23 nt, Artificial Sequence
  Synthetic
augaacaugaaaaacuuaaaacu

SEQ ID NO: 638505 - RNA, 24 nt, Artificial Sequence
  Synthetic
aaugaacaugaaaaacuuaaaacu

SEQ ID NO: 638506 - RNA, 18 nt, Artificial Sequence
  Synthetic
uaucauuuagcacaaacu

SEQ ID NO: 638507 - RNA, 19 nt, Artificial Sequence
  Synthetic
cuaucauuuagcacaaacu

SEQ ID NO: 638508 - RNA, 20 nt, Artificial Sequence
  Synthetic
gcuaucauuuagcacaaacu

SEQ ID NO: 638509 - RNA, 21 nt, Artificial Sequence
  Synthetic
ugcuaucauuuagcacaaacu

SEQ ID NO: 638510 - RNA, 22 nt, Artificial Sequence
  Synthetic
uugcuaucauuuagcacaaacu

SEQ ID NO: 638511 - RNA, 23 nt, Artificial Sequence
  Synthetic
auugcuaucauuuagcacaaacu

SEQ ID NO: 638512 - RNA, 24 nt, Artificial Sequence
  Synthetic
gauugcuaucauuuagcacaaacu

SEQ ID NO: 638513 - RNA, 18 nt, Artificial Sequence
  Synthetic
ggcaaaaaaucacaaacu

SEQ ID NO: 638514 - RNA, 19 nt, Artificial Sequence
  Synthetic
uggcaaaaaaucacaaacu

SEQ ID NO: 638515 - RNA, 20 nt, Artificial Sequence
  Synthetic
uuggcaaaaaaucacaaacu

SEQ ID NO: 638516 - RNA, 21 nt, Artificial Sequence
  Synthetic
auuggcaaaaaaucacaaacu

SEQ ID NO: 638517 - RNA, 22 nt, Artificial Sequence
  Synthetic
aauuggcaaaaaaucacaaacu

SEQ ID NO: 638518 - RNA, 23 nt, Artificial Sequence
  Synthetic
aaauuggcaaaaaaucacaaacu

SEQ ID NO: 638519 - RNA, 24 nt, Artificial Sequence
  Synthetic
aaaauuggcaaaaaaucacaaacu

SEQ ID NO: 638520 - RNA, 18 nt, Artificial Sequence
  Synthetic
gaaaagcaaggacaaacu

SEQ ID NO: 638521 - RNA, 19 nt, Artificial Sequence
  Synthetic
ugaaaagcaaggacaaacu

SEQ ID NO: 638522 - RNA, 20 nt, Artificial Sequence
  Synthetic
augaaaagcaaggacaaacu

SEQ ID NO: 638523 - RNA, 21 nt, Artificial Sequence
  Synthetic
uaugaaaagcaaggacaaacu

SEQ ID NO: 638524 - RNA, 22 nt, Artificial Sequence
  Synthetic
cuaugaaaagcaaggacaaacu

SEQ ID NO: 638525 - RNA, 23 nt, Artificial Sequence
  Synthetic
gcuaugaaaagcaaggacaaacu

SEQ ID NO: 638526 - RNA, 24 nt, Artificial Sequence
  Synthetic
ggcuaugaaaagcaaggacaaacu

SEQ ID NO: 638527 - RNA, 18 nt, Artificial Sequence
  Synthetic
cuggaauagaaccaaacu

SEQ ID NO: 638528 - RNA, 19 nt, Artificial Sequence
  Synthetic
acuggaauagaaccaaacu

SEQ ID NO: 638529 - RNA, 20 nt, Artificial Sequence
  Synthetic
uacuggaauagaaccaaacu

SEQ ID NO: 638530 - RNA, 21 nt, Artificial Sequence
  Synthetic
uuacuggaauagaaccaaacu

SEQ ID NO: 638531 - RNA, 22 nt, Artificial Sequence
  Synthetic
auuacuggaauagaaccaaacu

SEQ ID NO: 638532 - RNA, 23 nt, Artificial Sequence
  Synthetic
uauuacuggaauagaaccaaacu

SEQ ID NO: 638533 - RNA, 24 nt, Artificial Sequence
  Synthetic
auauuacuggaauagaaccaaacu

SEQ ID NO: 638534 - RNA, 18 nt, Artificial Sequence
  Synthetic
ucugacauagcccaaacu

SEQ ID NO: 638535 - RNA, 19 nt, Artificial Sequence
  Synthetic
uucugacauagcccaaacu

SEQ ID NO: 638536 - RNA, 20 nt, Artificial Sequence
  Synthetic
guucugacauagcccaaacu

SEQ ID NO: 638537 - RNA, 21 nt, Artificial Sequence
  Synthetic
gguucugacauagcccaaacu

SEQ ID NO: 638538 - RNA, 22 nt, Artificial Sequence
  Synthetic
ugguucugacauagcccaaacu

SEQ ID NO: 638539 - RNA, 23 nt, Artificial Sequence
  Synthetic
augguucugacauagcccaaacu

SEQ ID NO: 638540 - RNA, 24 nt, Artificial Sequence
  Synthetic
aaugguucugacauagcccaaacu

SEQ ID NO: 638541 - RNA, 18 nt, Artificial Sequence
  Synthetic
uggucauuauuccaaacu

SEQ ID NO: 638542 - RNA, 19 nt, Artificial Sequence
  Synthetic
guggucauuauuccaaacu

SEQ ID NO: 638543 - RNA, 20 nt, Artificial Sequence
  Synthetic
aguggucauuauuccaaacu

SEQ ID NO: 638544 - RNA, 21 nt, Artificial Sequence
  Synthetic
caguggucauuauuccaaacu

SEQ ID NO: 638545 - RNA, 22 nt, Artificial Sequence
  Synthetic
ucaguggucauuauuccaaacu

SEQ ID NO: 638546 - RNA, 23 nt, Artificial Sequence
  Synthetic
uucaguggucauuauuccaaacu

SEQ ID NO: 638547 - RNA, 24 nt, Artificial Sequence
  Synthetic
auucaguggucauuauuccaaacu

SEQ ID NO: 638548 - RNA, 18 nt, Artificial Sequence
  Synthetic
guacucaguuuccaaacu

SEQ ID NO: 638549 - RNA, 19 nt, Artificial Sequence
  Synthetic
gguacucaguuuccaaacu

SEQ ID NO: 638550 - RNA, 20 nt, Artificial Sequence
  Synthetic
ggguacucaguuuccaaacu

SEQ ID NO: 638551 - RNA, 21 nt, Artificial Sequence
  Synthetic
uggguacucaguuuccaaacu

SEQ ID NO: 638552 - RNA, 22 nt, Artificial Sequence
  Synthetic
guggguacucaguuuccaaacu

SEQ ID NO: 638553 - RNA, 23 nt, Artificial Sequence
  Synthetic
uguggguacucaguuuccaaacu

SEQ ID NO: 638554 - RNA, 24 nt, Artificial Sequence
  Synthetic
cuguggguacucaguuuccaaacu

SEQ ID NO: 638555 - RNA, 18 nt, Artificial Sequence
  Synthetic
ggacaggugcugcaaacu

SEQ ID NO: 638556 - RNA, 19 nt, Artificial Sequence
  Synthetic
gggacaggugcugcaaacu

SEQ ID NO: 638557 - RNA, 20 nt, Artificial Sequence
  Synthetic
ugggacaggugcugcaaacu

SEQ ID NO: 638558 - RNA, 21 nt, Artificial Sequence
  Synthetic
gugggacaggugcugcaaacu

SEQ ID NO: 638559 - RNA, 22 nt, Artificial Sequence
  Synthetic
agugggacaggugcugcaaacu

SEQ ID NO: 638560 - RNA, 23 nt, Artificial Sequence
  Synthetic
aagugggacaggugcugcaaacu

SEQ ID NO: 638561 - RNA, 24 nt, Artificial Sequence
  Synthetic
aaagugggacaggugcugcaaacu

SEQ ID NO: 638562 - RNA, 18 nt, Artificial Sequence
  Synthetic
cucugauauuugcaaacu

SEQ ID NO: 638563 - RNA, 19 nt, Artificial Sequence
  Synthetic
ucucugauauuugcaaacu

SEQ ID NO: 638564 - RNA, 20 nt, Artificial Sequence
  Synthetic
aucucugauauuugcaaacu

SEQ ID NO: 638565 - RNA, 21 nt, Artificial Sequence
  Synthetic
uaucucugauauuugcaaacu

SEQ ID NO: 638566 - RNA, 22 nt, Artificial Sequence
  Synthetic
uuaucucugauauuugcaaacu

SEQ ID NO: 638567 - RNA, 23 nt, Artificial Sequence
  Synthetic
cuuaucucugauauuugcaaacu

SEQ ID NO: 638568 - RNA, 24 nt, Artificial Sequence
  Synthetic
gcuuaucucugauauuugcaaacu

SEQ ID NO: 638569 - RNA, 18 nt, Artificial Sequence
  Synthetic
gaggacugaaaucaaacu

SEQ ID NO: 638570 - RNA, 19 nt, Artificial Sequence
  Synthetic
agaggacugaaaucaaacu

SEQ ID NO: 638571 - RNA, 20 nt, Artificial Sequence
  Synthetic
aagaggacugaaaucaaacu

SEQ ID NO: 638572 - RNA, 21 nt, Artificial Sequence
  Synthetic
gaagaggacugaaaucaaacu

SEQ ID NO: 638573 - RNA, 22 nt, Artificial Sequence
  Synthetic
ugaagaggacugaaaucaaacu

SEQ ID NO: 638574 - RNA, 23 nt, Artificial Sequence
  Synthetic
cugaagaggacugaaaucaaacu

SEQ ID NO: 638575 - RNA, 24 nt, Artificial Sequence
  Synthetic
acugaagaggacugaaaucaaacu

SEQ ID NO: 638576 - RNA, 18 nt, Artificial Sequence
  Synthetic
agacaacuauaucaaacu

SEQ ID NO: 638577 - RNA, 19 nt, Artificial Sequence
  Synthetic
aagacaacuauaucaaacu

SEQ ID NO: 638578 - RNA, 20 nt, Artificial Sequence
  Synthetic
uaagacaacuauaucaaacu

SEQ ID NO: 638579 - RNA, 21 nt, Artificial Sequence
  Synthetic
uuaagacaacuauaucaaacu

SEQ ID NO: 638580 - RNA, 22 nt, Artificial Sequence
  Synthetic
guuaagacaacuauaucaaacu

SEQ ID NO: 638581 - RNA, 23 nt, Artificial Sequence
  Synthetic
uguuaagacaacuauaucaaacu

SEQ ID NO: 638582 - RNA, 24 nt, Artificial Sequence
  Synthetic
auguuaagacaacuauaucaaacu

SEQ ID NO: 638583 - RNA, 18 nt, Artificial Sequence
  Synthetic
aaucuaagaccucaaacu

SEQ ID NO: 638584 - RNA, 19 nt, Artificial Sequence
  Synthetic
aaaucuaagaccucaaacu

SEQ ID NO: 638585 - RNA, 20 nt, Artificial Sequence
  Synthetic
aaaaucuaagaccucaaacu

SEQ ID NO: 638586 - RNA, 21 nt, Artificial Sequence
  Synthetic
uaaaaucuaagaccucaaacu

SEQ ID NO: 638587 - RNA, 22 nt, Artificial Sequence
  Synthetic
cuaaaaucuaagaccucaaacu

SEQ ID NO: 638588 - RNA, 23 nt, Artificial Sequence
  Synthetic
acuaaaaucuaagaccucaaacu

SEQ ID NO: 638589 - RNA, 24 nt, Artificial Sequence
  Synthetic
gacuaaaaucuaagaccucaaacu

SEQ ID NO: 638590 - RNA, 18 nt, Artificial Sequence
  Synthetic
uuuuuuaaaucucaaacu

SEQ ID NO: 638591 - RNA, 19 nt, Artificial Sequence
  Synthetic
auuuuuuaaaucucaaacu

SEQ ID NO: 638592 - RNA, 20 nt, Artificial Sequence
  Synthetic
gauuuuuuaaaucucaaacu

SEQ ID NO: 638593 - RNA, 21 nt, Artificial Sequence
  Synthetic
agauuuuuuaaaucucaaacu

SEQ ID NO: 638594 - RNA, 22 nt, Artificial Sequence
  Synthetic
uagauuuuuuaaaucucaaacu

SEQ ID NO: 638595 - RNA, 23 nt, Artificial Sequence
  Synthetic
cuagauuuuuuaaaucucaaacu

SEQ ID NO: 638596 - RNA, 24 nt, Artificial Sequence
  Synthetic
ucuagauuuuuuaaaucucaaacu

SEQ ID NO: 638597 - RNA, 18 nt, Artificial Sequence
  Synthetic
agaaaucgaucucaaacu

SEQ ID NO: 638598 - RNA, 19 nt, Artificial Sequence
  Synthetic
uagaaaucgaucucaaacu

SEQ ID NO: 638599 - RNA, 20 nt, Artificial Sequence
  Synthetic
guagaaaucgaucucaaacu

SEQ ID NO: 638600 - RNA, 21 nt, Artificial Sequence
  Synthetic
uguagaaaucgaucucaaacu

SEQ ID NO: 638601 - RNA, 22 nt, Artificial Sequence
  Synthetic
uuguagaaaucgaucucaaacu

SEQ ID NO: 638602 - RNA, 23 nt, Artificial Sequence
  Synthetic
cuuguagaaaucgaucucaaacu

SEQ ID NO: 638603 - RNA, 24 nt, Artificial Sequence
  Synthetic
ccuuguagaaaucgaucucaaacu

SEQ ID NO: 638604 - RNA, 18 nt, Artificial Sequence
  Synthetic
aucuaaaaaugucaaacu

SEQ ID NO: 638605 - RNA, 19 nt, Artificial Sequence
  Synthetic
aaucuaaaaaugucaaacu

SEQ ID NO: 638606 - RNA, 20 nt, Artificial Sequence
  Synthetic
aaaucuaaaaaugucaaacu

SEQ ID NO: 638607 - RNA, 21 nt, Artificial Sequence
  Synthetic
gaaaucuaaaaaugucaaacu

SEQ ID NO: 638608 - RNA, 22 nt, Artificial Sequence
  Synthetic
ugaaaucuaaaaaugucaaacu

SEQ ID NO: 638609 - RNA, 23 nt, Artificial Sequence
  Synthetic
gugaaaucuaaaaaugucaaacu

SEQ ID NO: 638610 - RNA, 24 nt, Artificial Sequence
  Synthetic
ugugaaaucuaaaaaugucaaacu

SEQ ID NO: 638611 - RNA, 18 nt, Artificial Sequence
  Synthetic
ccaacugacacagaaacu

SEQ ID NO: 638612 - RNA, 19 nt, Artificial Sequence
  Synthetic
accaacugacacagaaacu

SEQ ID NO: 638613 - RNA, 20 nt, Artificial Sequence
  Synthetic
gaccaacugacacagaaacu

SEQ ID NO: 638614 - RNA, 21 nt, Artificial Sequence
  Synthetic
agaccaacugacacagaaacu

SEQ ID NO: 638615 - RNA, 22 nt, Artificial Sequence
  Synthetic
cagaccaacugacacagaaacu

SEQ ID NO: 638616 - RNA, 23 nt, Artificial Sequence
  Synthetic
ccagaccaacugacacagaaacu

SEQ ID NO: 638617 - RNA, 24 nt, Artificial Sequence
  Synthetic
cccagaccaacugacacagaaacu

SEQ ID NO: 638618 - RNA, 18 nt, Artificial Sequence
  Synthetic
ugcuuaagagcagaaacu

SEQ ID NO: 638619 - RNA, 19 nt, Artificial Sequence
  Synthetic
gugcuuaagagcagaaacu

SEQ ID NO: 638620 - RNA, 20 nt, Artificial Sequence
  Synthetic
agugcuuaagagcagaaacu

SEQ ID NO: 638621 - RNA, 21 nt, Artificial Sequence
  Synthetic
uagugcuuaagagcagaaacu

SEQ ID NO: 638622 - RNA, 22 nt, Artificial Sequence
  Synthetic
guagugcuuaagagcagaaacu

SEQ ID NO: 638623 - RNA, 23 nt, Artificial Sequence
  Synthetic
cguagugcuuaagagcagaaacu

SEQ ID NO: 638624 - RNA, 24 nt, Artificial Sequence
  Synthetic
gcguagugcuuaagagcagaaacu

SEQ ID NO: 638625 - RNA, 18 nt, Artificial Sequence
  Synthetic
gcuaguaaaucagaaacu

SEQ ID NO: 638626 - RNA, 19 nt, Artificial Sequence
  Synthetic
agcuaguaaaucagaaacu

SEQ ID NO: 638627 - RNA, 20 nt, Artificial Sequence
  Synthetic
gagcuaguaaaucagaaacu

SEQ ID NO: 638628 - RNA, 21 nt, Artificial Sequence
  Synthetic
agagcuaguaaaucagaaacu

SEQ ID NO: 638629 - RNA, 22 nt, Artificial Sequence
  Synthetic
cagagcuaguaaaucagaaacu

SEQ ID NO: 638630 - RNA, 23 nt, Artificial Sequence
  Synthetic
ccagagcuaguaaaucagaaacu

SEQ ID NO: 638631 - RNA, 24 nt, Artificial Sequence
  Synthetic
cccagagcuaguaaaucagaaacu

SEQ ID NO: 638632 - RNA, 18 nt, Artificial Sequence
  Synthetic
aacaaaccaucagaaacu

SEQ ID NO: 638633 - RNA, 19 nt, Artificial Sequence
  Synthetic
caacaaaccaucagaaacu

SEQ ID NO: 638634 - RNA, 20 nt, Artificial Sequence
  Synthetic
ccaacaaaccaucagaaacu

SEQ ID NO: 638635 - RNA, 21 nt, Artificial Sequence
  Synthetic
gccaacaaaccaucagaaacu

SEQ ID NO: 638636 - RNA, 22 nt, Artificial Sequence
  Synthetic
ugccaacaaaccaucagaaacu

SEQ ID NO: 638637 - RNA, 23 nt, Artificial Sequence
  Synthetic
uugccaacaaaccaucagaaacu

SEQ ID NO: 638638 - RNA, 24 nt, Artificial Sequence
  Synthetic
auugccaacaaaccaucagaaacu

SEQ ID NO: 638639 - RNA, 18 nt, Artificial Sequence
  Synthetic
ugacuguucugagaaacu

SEQ ID NO: 638640 - RNA, 19 nt, Artificial Sequence
  Synthetic
cugacuguucugagaaacu

SEQ ID NO: 638641 - RNA, 20 nt, Artificial Sequence
  Synthetic
acugacuguucugagaaacu

SEQ ID NO: 638642 - RNA, 21 nt, Artificial Sequence
  Synthetic
cacugacuguucugagaaacu

SEQ ID NO: 638643 - RNA, 22 nt, Artificial Sequence
  Synthetic
gcacugacuguucugagaaacu

SEQ ID NO: 638644 - RNA, 23 nt, Artificial Sequence
  Synthetic
ugcacugacuguucugagaaacu

SEQ ID NO: 638645 - RNA, 24 nt, Artificial Sequence
  Synthetic
augcacugacuguucugagaaacu

SEQ ID NO: 638646 - RNA, 18 nt, Artificial Sequence
  Synthetic
agaucagccuuagaaacu

SEQ ID NO: 638647 - RNA, 19 nt, Artificial Sequence
  Synthetic
aagaucagccuuagaaacu

SEQ ID NO: 638648 - RNA, 20 nt, Artificial Sequence
  Synthetic
caagaucagccuuagaaacu

SEQ ID NO: 638649 - RNA, 21 nt, Artificial Sequence
  Synthetic
ccaagaucagccuuagaaacu

SEQ ID NO: 638650 - RNA, 22 nt, Artificial Sequence
  Synthetic
uccaagaucagccuuagaaacu

SEQ ID NO: 638651 - RNA, 23 nt, Artificial Sequence
  Synthetic
auccaagaucagccuuagaaacu

SEQ ID NO: 638652 - RNA, 24 nt, Artificial Sequence
  Synthetic
aauccaagaucagccuuagaaacu

SEQ ID NO: 638653 - RNA, 18 nt, Artificial Sequence
  Synthetic
uuuacagagaaggaaacu

SEQ ID NO: 638654 - RNA, 19 nt, Artificial Sequence
  Synthetic
uuuuacagagaaggaaacu

SEQ ID NO: 638655 - RNA, 20 nt, Artificial Sequence
  Synthetic
auuuuacagagaaggaaacu

SEQ ID NO: 638656 - RNA, 21 nt, Artificial Sequence
  Synthetic
uauuuuacagagaaggaaacu

SEQ ID NO: 638657 - RNA, 22 nt, Artificial Sequence
  Synthetic
cuauuuuacagagaaggaaacu

SEQ ID NO: 638658 - RNA, 23 nt, Artificial Sequence
  Synthetic
ccuauuuuacagagaaggaaacu

SEQ ID NO: 638659 - RNA, 24 nt, Artificial Sequence
  Synthetic
gccuauuuuacagagaaggaaacu

SEQ ID NO: 638660 - RNA, 18 nt, Artificial Sequence
  Synthetic
agaacaucaacggaaacu

SEQ ID NO: 638661 - RNA, 19 nt, Artificial Sequence
  Synthetic
cagaacaucaacggaaacu

SEQ ID NO: 638662 - RNA, 20 nt, Artificial Sequence
  Synthetic
ucagaacaucaacggaaacu

SEQ ID NO: 638663 - RNA, 21 nt, Artificial Sequence
  Synthetic
uucagaacaucaacggaaacu

SEQ ID NO: 638664 - RNA, 22 nt, Artificial Sequence
  Synthetic
cuucagaacaucaacggaaacu

SEQ ID NO: 638665 - RNA, 23 nt, Artificial Sequence
  Synthetic
ucuucagaacaucaacggaaacu

SEQ ID NO: 638666 - RNA, 24 nt, Artificial Sequence
  Synthetic
uucuucagaacaucaacggaaacu

SEQ ID NO: 638667 - RNA, 18 nt, Artificial Sequence
  Synthetic
ggaauacaaagggaaacu

SEQ ID NO: 638668 - RNA, 19 nt, Artificial Sequence
  Synthetic
uggaauacaaagggaaacu

SEQ ID NO: 638669 - RNA, 20 nt, Artificial Sequence
  Synthetic
auggaauacaaagggaaacu

SEQ ID NO: 638670 - RNA, 21 nt, Artificial Sequence
  Synthetic
aauggaauacaaagggaaacu

SEQ ID NO: 638671 - RNA, 22 nt, Artificial Sequence
  Synthetic
caauggaauacaaagggaaacu

SEQ ID NO: 638672 - RNA, 23 nt, Artificial Sequence
  Synthetic
ccaauggaauacaaagggaaacu

SEQ ID NO: 638673 - RNA, 24 nt, Artificial Sequence
  Synthetic
gccaauggaauacaaagggaaacu

SEQ ID NO: 638674 - RNA, 18 nt, Artificial Sequence
  Synthetic
aggaaaguaugggaaacu

SEQ ID NO: 638675 - RNA, 19 nt, Artificial Sequence
  Synthetic
caggaaaguaugggaaacu

SEQ ID NO: 638676 - RNA, 20 nt, Artificial Sequence
  Synthetic
acaggaaaguaugggaaacu

SEQ ID NO: 638677 - RNA, 21 nt, Artificial Sequence
  Synthetic
gacaggaaaguaugggaaacu

SEQ ID NO: 638678 - RNA, 22 nt, Artificial Sequence
  Synthetic
agacaggaaaguaugggaaacu

SEQ ID NO: 638679 - RNA, 23 nt, Artificial Sequence
  Synthetic
aagacaggaaaguaugggaaacu

SEQ ID NO: 638680 - RNA, 24 nt, Artificial Sequence
  Synthetic
gaagacaggaaaguaugggaaacu

SEQ ID NO: 638681 - RNA, 18 nt, Artificial Sequence
  Synthetic
ugacaccacugggaaacu

SEQ ID NO: 638682 - RNA, 19 nt, Artificial Sequence
  Synthetic
uugacaccacugggaaacu

SEQ ID NO: 638683 - RNA, 20 nt, Artificial Sequence
  Synthetic
uuugacaccacugggaaacu

SEQ ID NO: 638684 - RNA, 21 nt, Artificial Sequence
  Synthetic
uuuugacaccacugggaaacu

SEQ ID NO: 638685 - RNA, 22 nt, Artificial Sequence
  Synthetic
uuuuugacaccacugggaaacu

SEQ ID NO: 638686 - RNA, 23 nt, Artificial Sequence
  Synthetic
cuuuuugacaccacugggaaacu

SEQ ID NO: 638687 - RNA, 24 nt, Artificial Sequence
  Synthetic
acuuuuugacaccacugggaaacu

SEQ ID NO: 638688 - RNA, 18 nt, Artificial Sequence
  Synthetic
guacuaccuauggaaacu

SEQ ID NO: 638689 - RNA, 19 nt, Artificial Sequence
  Synthetic
gguacuaccuauggaaacu

SEQ ID NO: 638690 - RNA, 20 nt, Artificial Sequence
  Synthetic
agguacuaccuauggaaacu

SEQ ID NO: 638691 - RNA, 21 nt, Artificial Sequence
  Synthetic
uagguacuaccuauggaaacu

SEQ ID NO: 638692 - RNA, 22 nt, Artificial Sequence
  Synthetic
guagguacuaccuauggaaacu

SEQ ID NO: 638693 - RNA, 23 nt, Artificial Sequence
  Synthetic
aguagguacuaccuauggaaacu

SEQ ID NO: 638694 - RNA, 24 nt, Artificial Sequence
  Synthetic
aaguagguacuaccuauggaaacu

SEQ ID NO: 638695 - RNA, 18 nt, Artificial Sequence
  Synthetic
augaaucacuuggaaacu

SEQ ID NO: 638696 - RNA, 19 nt, Artificial Sequence
  Synthetic
caugaaucacuuggaaacu

SEQ ID NO: 638697 - RNA, 20 nt, Artificial Sequence
  Synthetic
ccaugaaucacuuggaaacu

SEQ ID NO: 638698 - RNA, 21 nt, Artificial Sequence
  Synthetic
cccaugaaucacuuggaaacu

SEQ ID NO: 638699 - RNA, 22 nt, Artificial Sequence
  Synthetic
gcccaugaaucacuuggaaacu

SEQ ID NO: 638700 - RNA, 23 nt, Artificial Sequence
  Synthetic
ugcccaugaaucacuuggaaacu

SEQ ID NO: 638701 - RNA, 24 nt, Artificial Sequence
  Synthetic
gugcccaugaaucacuuggaaacu

SEQ ID NO: 638702 - RNA, 18 nt, Artificial Sequence
  Synthetic
ccaugggucacugaaacu

SEQ ID NO: 638703 - RNA, 19 nt, Artificial Sequence
  Synthetic
accaugggucacugaaacu

SEQ ID NO: 638704 - RNA, 20 nt, Artificial Sequence
  Synthetic
gaccaugggucacugaaacu

SEQ ID NO: 638705 - RNA, 21 nt, Artificial Sequence
  Synthetic
ugaccaugggucacugaaacu

SEQ ID NO: 638706 - RNA, 22 nt, Artificial Sequence
  Synthetic
uugaccaugggucacugaaacu

SEQ ID NO: 638707 - RNA, 23 nt, Artificial Sequence
  Synthetic
guugaccaugggucacugaaacu

SEQ ID NO: 638708 - RNA, 24 nt, Artificial Sequence
  Synthetic
aguugaccaugggucacugaaacu

SEQ ID NO: 638709 - RNA, 18 nt, Artificial Sequence
  Synthetic
caaguguugccugaaacu

SEQ ID NO: 638710 - RNA, 19 nt, Artificial Sequence
  Synthetic
acaaguguugccugaaacu

SEQ ID NO: 638711 - RNA, 20 nt, Artificial Sequence
  Synthetic
gacaaguguugccugaaacu

SEQ ID NO: 638712 - RNA, 21 nt, Artificial Sequence
  Synthetic
cgacaaguguugccugaaacu

SEQ ID NO: 638713 - RNA, 22 nt, Artificial Sequence
  Synthetic
acgacaaguguugccugaaacu

SEQ ID NO: 638714 - RNA, 23 nt, Artificial Sequence
  Synthetic
uacgacaaguguugccugaaacu

SEQ ID NO: 638715 - RNA, 24 nt, Artificial Sequence
  Synthetic
auacgacaaguguugccugaaacu

SEQ ID NO: 638716 - RNA, 18 nt, Artificial Sequence
  Synthetic
aaaauaagaucugaaacu

SEQ ID NO: 638717 - RNA, 19 nt, Artificial Sequence
  Synthetic
aaaaauaagaucugaaacu

SEQ ID NO: 638718 - RNA, 20 nt, Artificial Sequence
  Synthetic
uaaaaauaagaucugaaacu

SEQ ID NO: 638719 - RNA, 21 nt, Artificial Sequence
  Synthetic
uuaaaaauaagaucugaaacu

SEQ ID NO: 638720 - RNA, 22 nt, Artificial Sequence
  Synthetic
cuuaaaaauaagaucugaaacu

SEQ ID NO: 638721 - RNA, 23 nt, Artificial Sequence
  Synthetic
acuuaaaaauaagaucugaaacu

SEQ ID NO: 638722 - RNA, 24 nt, Artificial Sequence
  Synthetic
gacuuaaaaauaagaucugaaacu

SEQ ID NO: 638723 - RNA, 18 nt, Artificial Sequence
  Synthetic
uuuuugcccucugaaacu

SEQ ID NO: 638724 - RNA, 19 nt, Artificial Sequence
  Synthetic
guuuuugcccucugaaacu

SEQ ID NO: 638725 - RNA, 20 nt, Artificial Sequence
  Synthetic
aguuuuugcccucugaaacu

SEQ ID NO: 638726 - RNA, 21 nt, Artificial Sequence
  Synthetic
aaguuuuugcccucugaaacu

SEQ ID NO: 638727 - RNA, 22 nt, Artificial Sequence
  Synthetic
uaaguuuuugcccucugaaacu

SEQ ID NO: 638728 - RNA, 23 nt, Artificial Sequence
  Synthetic
uuaaguuuuugcccucugaaacu

SEQ ID NO: 638729 - RNA, 24 nt, Artificial Sequence
  Synthetic
guuaaguuuuugcccucugaaacu

SEQ ID NO: 638730 - RNA, 18 nt, Artificial Sequence
  Synthetic
ccauggcagagugaaacu

SEQ ID NO: 638731 - RNA, 19 nt, Artificial Sequence
  Synthetic
cccauggcagagugaaacu

SEQ ID NO: 638732 - RNA, 20 nt, Artificial Sequence
  Synthetic
ucccauggcagagugaaacu

SEQ ID NO: 638733 - RNA, 21 nt, Artificial Sequence
  Synthetic
cucccauggcagagugaaacu

SEQ ID NO: 638734 - RNA, 22 nt, Artificial Sequence
  Synthetic
ucucccauggcagagugaaacu

SEQ ID NO: 638735 - RNA, 23 nt, Artificial Sequence
  Synthetic
uucucccauggcagagugaaacu

SEQ ID NO: 638736 - RNA, 24 nt, Artificial Sequence
  Synthetic
auucucccauggcagagugaaacu

SEQ ID NO: 638737 - RNA, 18 nt, Artificial Sequence
  Synthetic
ggaaaguguugugaaacu

SEQ ID NO: 638738 - RNA, 19 nt, Artificial Sequence
  Synthetic
uggaaaguguugugaaacu

SEQ ID NO: 638739 - RNA, 20 nt, Artificial Sequence
  Synthetic
cuggaaaguguugugaaacu

SEQ ID NO: 638740 - RNA, 21 nt, Artificial Sequence
  Synthetic
acuggaaaguguugugaaacu

SEQ ID NO: 638741 - RNA, 22 nt, Artificial Sequence
  Synthetic
aacuggaaaguguugugaaacu

SEQ ID NO: 638742 - RNA, 23 nt, Artificial Sequence
  Synthetic
aaacuggaaaguguugugaaacu

SEQ ID NO: 638743 - RNA, 24 nt, Artificial Sequence
  Synthetic
uaaacuggaaaguguugugaaacu

SEQ ID NO: 638744 - RNA, 18 nt, Artificial Sequence
  Synthetic
ggagaaucacuugaaacu

SEQ ID NO: 638745 - RNA, 19 nt, Artificial Sequence
  Synthetic
aggagaaucacuugaaacu

SEQ ID NO: 638746 - RNA, 20 nt, Artificial Sequence
  Synthetic
caggagaaucacuugaaacu

SEQ ID NO: 638747 - RNA, 21 nt, Artificial Sequence
  Synthetic
gcaggagaaucacuugaaacu

SEQ ID NO: 638748 - RNA, 22 nt, Artificial Sequence
  Synthetic
ggcaggagaaucacuugaaacu

SEQ ID NO: 638749 - RNA, 23 nt, Artificial Sequence
  Synthetic
aggcaggagaaucacuugaaacu

SEQ ID NO: 638750 - RNA, 24 nt, Artificial Sequence
  Synthetic
gaggcaggagaaucacuugaaacu

SEQ ID NO: 638751 - RNA, 18 nt, Artificial Sequence
  Synthetic
gcauucuuaguugaaacu

SEQ ID NO: 638752 - RNA, 19 nt, Artificial Sequence
  Synthetic
ggcauucuuaguugaaacu

SEQ ID NO: 638753 - RNA, 20 nt, Artificial Sequence
  Synthetic
uggcauucuuaguugaaacu

SEQ ID NO: 638754 - RNA, 21 nt, Artificial Sequence
  Synthetic
uuggcauucuuaguugaaacu

SEQ ID NO: 638755 - RNA, 22 nt, Artificial Sequence
  Synthetic
guuggcauucuuaguugaaacu

SEQ ID NO: 638756 - RNA, 23 nt, Artificial Sequence
  Synthetic
uguuggcauucuuaguugaaacu

SEQ ID NO: 638757 - RNA, 24 nt, Artificial Sequence
  Synthetic
cuguuggcauucuuaguugaaacu

SEQ ID NO: 638758 - RNA, 18 nt, Artificial Sequence
  Synthetic
augcuggauuuugaaacu

SEQ ID NO: 638759 - RNA, 19 nt, Artificial Sequence
  Synthetic
uaugcuggauuuugaaacu

SEQ ID NO: 638760 - RNA, 20 nt, Artificial Sequence
  Synthetic
cuaugcuggauuuugaaacu

SEQ ID NO: 638761 - RNA, 21 nt, Artificial Sequence
  Synthetic
ccuaugcuggauuuugaaacu

SEQ ID NO: 638762 - RNA, 22 nt, Artificial Sequence
  Synthetic
accuaugcuggauuuugaaacu

SEQ ID NO: 638763 - RNA, 23 nt, Artificial Sequence
  Synthetic
uaccuaugcuggauuuugaaacu

SEQ ID NO: 638764 - RNA, 24 nt, Artificial Sequence
  Synthetic
guaccuaugcuggauuuugaaacu

SEQ ID NO: 638765 - RNA, 18 nt, Artificial Sequence
  Synthetic
agagccucuuuugaaacu

SEQ ID NO: 638766 - RNA, 19 nt, Artificial Sequence
  Synthetic
gagagccucuuuugaaacu

SEQ ID NO: 638767 - RNA, 20 nt, Artificial Sequence
  Synthetic
agagagccucuuuugaaacu

SEQ ID NO: 638768 - RNA, 21 nt, Artificial Sequence
  Synthetic
uagagagccucuuuugaaacu

SEQ ID NO: 638769 - RNA, 22 nt, Artificial Sequence
  Synthetic
auagagagccucuuuugaaacu

SEQ ID NO: 638770 - RNA, 23 nt, Artificial Sequence
  Synthetic
uauagagagccucuuuugaaacu

SEQ ID NO: 638771 - RNA, 24 nt, Artificial Sequence
  Synthetic
auauagagagccucuuuugaaacu

SEQ ID NO: 638772 - RNA, 18 nt, Artificial Sequence
  Synthetic
ugaucauuuuaauaaacu

SEQ ID NO: 638773 - RNA, 19 nt, Artificial Sequence
  Synthetic
augaucauuuuaauaaacu

SEQ ID NO: 638774 - RNA, 20 nt, Artificial Sequence
  Synthetic
uaugaucauuuuaauaaacu

SEQ ID NO: 638775 - RNA, 21 nt, Artificial Sequence
  Synthetic
guaugaucauuuuaauaaacu

SEQ ID NO: 638776 - RNA, 22 nt, Artificial Sequence
  Synthetic
cguaugaucauuuuaauaaacu

SEQ ID NO: 638777 - RNA, 23 nt, Artificial Sequence
  Synthetic
ccguaugaucauuuuaauaaacu

SEQ ID NO: 638778 - RNA, 24 nt, Artificial Sequence
  Synthetic
accguaugaucauuuuaauaaacu

SEQ ID NO: 638779 - RNA, 18 nt, Artificial Sequence
  Synthetic
aaccaguuuucauaaacu

SEQ ID NO: 638780 - RNA, 19 nt, Artificial Sequence
  Synthetic
gaaccaguuuucauaaacu

SEQ ID NO: 638781 - RNA, 20 nt, Artificial Sequence
  Synthetic
ugaaccaguuuucauaaacu

SEQ ID NO: 638782 - RNA, 21 nt, Artificial Sequence
  Synthetic
gugaaccaguuuucauaaacu

SEQ ID NO: 638783 - RNA, 22 nt, Artificial Sequence
  Synthetic
ugugaaccaguuuucauaaacu

SEQ ID NO: 638784 - RNA, 23 nt, Artificial Sequence
  Synthetic
uugugaaccaguuuucauaaacu

SEQ ID NO: 638785 - RNA, 24 nt, Artificial Sequence
  Synthetic
auugugaaccaguuuucauaaacu

SEQ ID NO: 638786 - RNA, 18 nt, Artificial Sequence
  Synthetic
uaccaaaauggauaaacu

SEQ ID NO: 638787 - RNA, 19 nt, Artificial Sequence
  Synthetic
cuaccaaaauggauaaacu

SEQ ID NO: 638788 - RNA, 20 nt, Artificial Sequence
  Synthetic
ucuaccaaaauggauaaacu

SEQ ID NO: 638789 - RNA, 21 nt, Artificial Sequence
  Synthetic
uucuaccaaaauggauaaacu

SEQ ID NO: 638790 - RNA, 22 nt, Artificial Sequence
  Synthetic
guucuaccaaaauggauaaacu

SEQ ID NO: 638791 - RNA, 23 nt, Artificial Sequence
  Synthetic
uguucuaccaaaauggauaaacu

SEQ ID NO: 638792 - RNA, 24 nt, Artificial Sequence
  Synthetic
guguucuaccaaaauggauaaacu

SEQ ID NO: 638793 - RNA, 18 nt, Artificial Sequence
  Synthetic
gcuauguauauauaaacu

SEQ ID NO: 638794 - RNA, 19 nt, Artificial Sequence
  Synthetic
agcuauguauauauaaacu

SEQ ID NO: 638795 - RNA, 20 nt, Artificial Sequence
  Synthetic
cagcuauguauauauaaacu

SEQ ID NO: 638796 - RNA, 21 nt, Artificial Sequence
  Synthetic
gcagcuauguauauauaaacu

SEQ ID NO: 638797 - RNA, 22 nt, Artificial Sequence
  Synthetic
ggcagcuauguauauauaaacu

SEQ ID NO: 638798 - RNA, 23 nt, Artificial Sequence
  Synthetic
aggcagcuauguauauauaaacu

SEQ ID NO: 638799 - RNA, 24 nt, Artificial Sequence
  Synthetic
aaggcagcuauguauauauaaacu

SEQ ID NO: 638800 - RNA, 18 nt, Artificial Sequence
  Synthetic
agagagaugaacuaaacu

SEQ ID NO: 638801 - RNA, 19 nt, Artificial Sequence
  Synthetic
aagagagaugaacuaaacu

SEQ ID NO: 638802 - RNA, 20 nt, Artificial Sequence
  Synthetic
gaagagagaugaacuaaacu

SEQ ID NO: 638803 - RNA, 21 nt, Artificial Sequence
  Synthetic
agaagagagaugaacuaaacu

SEQ ID NO: 638804 - RNA, 22 nt, Artificial Sequence
  Synthetic
gagaagagagaugaacuaaacu

SEQ ID NO: 638805 - RNA, 23 nt, Artificial Sequence
  Synthetic
agagaagagagaugaacuaaacu

SEQ ID NO: 638806 - RNA, 24 nt, Artificial Sequence
  Synthetic
aagagaagagagaugaacuaaacu

SEQ ID NO: 638807 - RNA, 18 nt, Artificial Sequence
  Synthetic
ccagaggcaaccuaaacu

SEQ ID NO: 638808 - RNA, 19 nt, Artificial Sequence
  Synthetic
cccagaggcaaccuaaacu

SEQ ID NO: 638809 - RNA, 20 nt, Artificial Sequence
  Synthetic
gcccagaggcaaccuaaacu

SEQ ID NO: 638810 - RNA, 21 nt, Artificial Sequence
  Synthetic
ugcccagaggcaaccuaaacu

SEQ ID NO: 638811 - RNA, 22 nt, Artificial Sequence
  Synthetic
uugcccagaggcaaccuaaacu

SEQ ID NO: 638812 - RNA, 23 nt, Artificial Sequence
  Synthetic
cuugcccagaggcaaccuaaacu

SEQ ID NO: 638813 - RNA, 24 nt, Artificial Sequence
  Synthetic
ucuugcccagaggcaaccuaaacu

SEQ ID NO: 638814 - RNA, 18 nt, Artificial Sequence
  Synthetic
gacuugccuuccuaaacu

SEQ ID NO: 638815 - RNA, 19 nt, Artificial Sequence
  Synthetic
ugacuugccuuccuaaacu

SEQ ID NO: 638816 - RNA, 20 nt, Artificial Sequence
  Synthetic
uugacuugccuuccuaaacu

SEQ ID NO: 638817 - RNA, 21 nt, Artificial Sequence
  Synthetic
cuugacuugccuuccuaaacu

SEQ ID NO: 638818 - RNA, 22 nt, Artificial Sequence
  Synthetic
ucuugacuugccuuccuaaacu

SEQ ID NO: 638819 - RNA, 23 nt, Artificial Sequence
  Synthetic
uucuugacuugccuuccuaaacu

SEQ ID NO: 638820 - RNA, 24 nt, Artificial Sequence
  Synthetic
guucuugacuugccuuccuaaacu

SEQ ID NO: 638821 - RNA, 18 nt, Artificial Sequence
  Synthetic
gccugcuaaaucuaaacu

SEQ ID NO: 638822 - RNA, 19 nt, Artificial Sequence
  Synthetic
ugccugcuaaaucuaaacu

SEQ ID NO: 638823 - RNA, 20 nt, Artificial Sequence
  Synthetic
cugccugcuaaaucuaaacu

SEQ ID NO: 638824 - RNA, 21 nt, Artificial Sequence
  Synthetic
acugccugcuaaaucuaaacu

SEQ ID NO: 638825 - RNA, 22 nt, Artificial Sequence
  Synthetic
aacugccugcuaaaucuaaacu

SEQ ID NO: 638826 - RNA, 23 nt, Artificial Sequence
  Synthetic
aaacugccugcuaaaucuaaacu

SEQ ID NO: 638827 - RNA, 24 nt, Artificial Sequence
  Synthetic
aaaacugccugcuaaaucuaaacu

SEQ ID NO: 638828 - RNA, 18 nt, Artificial Sequence
  Synthetic
auccuccaaaaguaaacu

SEQ ID NO: 638829 - RNA, 19 nt, Artificial Sequence
  Synthetic
gauccuccaaaaguaaacu

SEQ ID NO: 638830 - RNA, 20 nt, Artificial Sequence
  Synthetic
agauccuccaaaaguaaacu

SEQ ID NO: 638831 - RNA, 21 nt, Artificial Sequence
  Synthetic
cagauccuccaaaaguaaacu

SEQ ID NO: 638832 - RNA, 22 nt, Artificial Sequence
  Synthetic
gcagauccuccaaaaguaaacu

SEQ ID NO: 638833 - RNA, 23 nt, Artificial Sequence
  Synthetic
agcagauccuccaaaaguaaacu

SEQ ID NO: 638834 - RNA, 24 nt, Artificial Sequence
  Synthetic
cagcagauccuccaaaaguaaacu

SEQ ID NO: 638835 - RNA, 18 nt, Artificial Sequence
  Synthetic
ccaguagaagaguaaacu

SEQ ID NO: 638836 - RNA, 19 nt, Artificial Sequence
  Synthetic
uccaguagaagaguaaacu

SEQ ID NO: 638837 - RNA, 20 nt, Artificial Sequence
  Synthetic
uuccaguagaagaguaaacu

SEQ ID NO: 638838 - RNA, 21 nt, Artificial Sequence
  Synthetic
auuccaguagaagaguaaacu

SEQ ID NO: 638839 - RNA, 22 nt, Artificial Sequence
  Synthetic
aauuccaguagaagaguaaacu

SEQ ID NO: 638840 - RNA, 23 nt, Artificial Sequence
  Synthetic
uaauuccaguagaagaguaaacu

SEQ ID NO: 638841 - RNA, 24 nt, Artificial Sequence
  Synthetic
guaauuccaguagaagaguaaacu

SEQ ID NO: 638842 - RNA, 18 nt, Artificial Sequence
  Synthetic
aaaaacccuucguaaacu

SEQ ID NO: 638843 - RNA, 19 nt, Artificial Sequence
  Synthetic
gaaaaacccuucguaaacu

SEQ ID NO: 638844 - RNA, 20 nt, Artificial Sequence
  Synthetic
agaaaaacccuucguaaacu

SEQ ID NO: 638845 - RNA, 21 nt, Artificial Sequence
  Synthetic
uagaaaaacccuucguaaacu

SEQ ID NO: 638846 - RNA, 22 nt, Artificial Sequence
  Synthetic
auagaaaaacccuucguaaacu

SEQ ID NO: 638847 - RNA, 23 nt, Artificial Sequence
  Synthetic
aauagaaaaacccuucguaaacu

SEQ ID NO: 638848 - RNA, 24 nt, Artificial Sequence
  Synthetic
gaauagaaaaacccuucguaaacu

SEQ ID NO: 638849 - RNA, 18 nt, Artificial Sequence
  Synthetic
agagucaacagguaaacu

SEQ ID NO: 638850 - RNA, 19 nt, Artificial Sequence
  Synthetic
cagagucaacagguaaacu

SEQ ID NO: 638851 - RNA, 20 nt, Artificial Sequence
  Synthetic
ucagagucaacagguaaacu

SEQ ID NO: 638852 - RNA, 21 nt, Artificial Sequence
  Synthetic
uucagagucaacagguaaacu

SEQ ID NO: 638853 - RNA, 22 nt, Artificial Sequence
  Synthetic
guucagagucaacagguaaacu

SEQ ID NO: 638854 - RNA, 23 nt, Artificial Sequence
  Synthetic
uguucagagucaacagguaaacu

SEQ ID NO: 638855 - RNA, 24 nt, Artificial Sequence
  Synthetic
guguucagagucaacagguaaacu

SEQ ID NO: 638856 - RNA, 18 nt, Artificial Sequence
  Synthetic
acuauuguuauguaaacu

SEQ ID NO: 638857 - RNA, 19 nt, Artificial Sequence
  Synthetic
cacuauuguuauguaaacu

SEQ ID NO: 638858 - RNA, 20 nt, Artificial Sequence
  Synthetic
ccacuauuguuauguaaacu

SEQ ID NO: 638859 - RNA, 21 nt, Artificial Sequence
  Synthetic
gccacuauuguuauguaaacu

SEQ ID NO: 638860 - RNA, 22 nt, Artificial Sequence
  Synthetic
ggccacuauuguuauguaaacu

SEQ ID NO: 638861 - RNA, 23 nt, Artificial Sequence
  Synthetic
gggccacuauuguuauguaaacu

SEQ ID NO: 638862 - RNA, 24 nt, Artificial Sequence
  Synthetic
agggccacuauuguuauguaaacu

SEQ ID NO: 638863 - RNA, 18 nt, Artificial Sequence
  Synthetic
aauucuagaaauuaaacu

SEQ ID NO: 638864 - RNA, 19 nt, Artificial Sequence
  Synthetic
caauucuagaaauuaaacu

SEQ ID NO: 638865 - RNA, 20 nt, Artificial Sequence
  Synthetic
acaauucuagaaauuaaacu

SEQ ID NO: 638866 - RNA, 21 nt, Artificial Sequence
  Synthetic
cacaauucuagaaauuaaacu

SEQ ID NO: 638867 - RNA, 22 nt, Artificial Sequence
  Synthetic
ucacaauucuagaaauuaaacu

SEQ ID NO: 638868 - RNA, 23 nt, Artificial Sequence
  Synthetic
uucacaauucuagaaauuaaacu

SEQ ID NO: 638869 - RNA, 24 nt, Artificial Sequence
  Synthetic
auucacaauucuagaaauuaaacu

SEQ ID NO: 638870 - RNA, 18 nt, Artificial Sequence
  Synthetic
gagcacugaaauuaaacu

SEQ ID NO: 638871 - RNA, 19 nt, Artificial Sequence
  Synthetic
agagcacugaaauuaaacu

SEQ ID NO: 638872 - RNA, 20 nt, Artificial Sequence
  Synthetic
aagagcacugaaauuaaacu

SEQ ID NO: 638873 - RNA, 21 nt, Artificial Sequence
  Synthetic
gaagagcacugaaauuaaacu

SEQ ID NO: 638874 - RNA, 22 nt, Artificial Sequence
  Synthetic
ugaagagcacugaaauuaaacu

SEQ ID NO: 638875 - RNA, 23 nt, Artificial Sequence
  Synthetic
cugaagagcacugaaauuaaacu

SEQ ID NO: 638876 - RNA, 24 nt, Artificial Sequence
  Synthetic
gcugaagagcacugaaauuaaacu

SEQ ID NO: 638877 - RNA, 18 nt, Artificial Sequence
  Synthetic
uaaaaaacugauuaaacu

SEQ ID NO: 638878 - RNA, 19 nt, Artificial Sequence
  Synthetic
auaaaaaacugauuaaacu

SEQ ID NO: 638879 - RNA, 20 nt, Artificial Sequence
  Synthetic
aauaaaaaacugauuaaacu

SEQ ID NO: 638880 - RNA, 21 nt, Artificial Sequence
  Synthetic
aaauaaaaaacugauuaaacu

SEQ ID NO: 638881 - RNA, 22 nt, Artificial Sequence
  Synthetic
caaauaaaaaacugauuaaacu

SEQ ID NO: 638882 - RNA, 23 nt, Artificial Sequence
  Synthetic
ucaaauaaaaaacugauuaaacu

SEQ ID NO: 638883 - RNA, 24 nt, Artificial Sequence
  Synthetic
uucaaauaaaaaacugauuaaacu

SEQ ID NO: 638884 - RNA, 18 nt, Artificial Sequence
  Synthetic
cacuucuaauauuaaacu

SEQ ID NO: 638885 - RNA, 19 nt, Artificial Sequence
  Synthetic
gcacuucuaauauuaaacu

SEQ ID NO: 638886 - RNA, 20 nt, Artificial Sequence
  Synthetic
agcacuucuaauauuaaacu

SEQ ID NO: 638887 - RNA, 21 nt, Artificial Sequence
  Synthetic
aagcacuucuaauauuaaacu

SEQ ID NO: 638888 - RNA, 22 nt, Artificial Sequence
  Synthetic
caagcacuucuaauauuaaacu

SEQ ID NO: 638889 - RNA, 23 nt, Artificial Sequence
  Synthetic
ccaagcacuucuaauauuaaacu

SEQ ID NO: 638890 - RNA, 24 nt, Artificial Sequence
  Synthetic
cccaagcacuucuaauauuaaacu

SEQ ID NO: 638891 - RNA, 18 nt, Artificial Sequence
  Synthetic
uucgggacuguuuaaacu

SEQ ID NO: 638892 - RNA, 19 nt, Artificial Sequence
  Synthetic
auucgggacuguuuaaacu

SEQ ID NO: 638893 - RNA, 20 nt, Artificial Sequence
  Synthetic
aauucgggacuguuuaaacu

SEQ ID NO: 638894 - RNA, 21 nt, Artificial Sequence
  Synthetic
aaauucgggacuguuuaaacu

SEQ ID NO: 638895 - RNA, 22 nt, Artificial Sequence
  Synthetic
aaaauucgggacuguuuaaacu

SEQ ID NO: 638896 - RNA, 23 nt, Artificial Sequence
  Synthetic
aaaaauucgggacuguuuaaacu

SEQ ID NO: 638897 - RNA, 24 nt, Artificial Sequence
  Synthetic
aaaaaauucgggacuguuuaaacu

SEQ ID NO: 638898 - RNA, 18 nt, Artificial Sequence
  Synthetic
aacauaaaauaaacaacu

SEQ ID NO: 638899 - RNA, 19 nt, Artificial Sequence
  Synthetic
caacauaaaauaaacaacu

SEQ ID NO: 638900 - RNA, 20 nt, Artificial Sequence
  Synthetic
gcaacauaaaauaaacaacu

SEQ ID NO: 638901 - RNA, 21 nt, Artificial Sequence
  Synthetic
ggcaacauaaaauaaacaacu

SEQ ID NO: 638902 - RNA, 22 nt, Artificial Sequence
  Synthetic
aggcaacauaaaauaaacaacu

SEQ ID NO: 638903 - RNA, 23 nt, Artificial Sequence
  Synthetic
aaggcaacauaaaauaaacaacu

SEQ ID NO: 638904 - RNA, 24 nt, Artificial Sequence
  Synthetic
gaaggcaacauaaaauaaacaacu

SEQ ID NO: 638905 - RNA, 18 nt, Artificial Sequence
  Synthetic
gugggauggacaacaacu

SEQ ID NO: 638906 - RNA, 19 nt, Artificial Sequence
  Synthetic
agugggauggacaacaacu

SEQ ID NO: 638907 - RNA, 20 nt, Artificial Sequence
  Synthetic
gagugggauggacaacaacu

SEQ ID NO: 638908 - RNA, 21 nt, Artificial Sequence
  Synthetic
ggagugggauggacaacaacu

SEQ ID NO: 638909 - RNA, 22 nt, Artificial Sequence
  Synthetic
gggagugggauggacaacaacu

SEQ ID NO: 638910 - RNA, 23 nt, Artificial Sequence
  Synthetic
ggggagugggauggacaacaacu

SEQ ID NO: 638911 - RNA, 24 nt, Artificial Sequence
  Synthetic
gggggagugggauggacaacaacu

SEQ ID NO: 638912 - RNA, 18 nt, Artificial Sequence
  Synthetic
uguauguuuggaacaacu

SEQ ID NO: 638913 - RNA, 19 nt, Artificial Sequence
  Synthetic
guguauguuuggaacaacu

SEQ ID NO: 638914 - RNA, 20 nt, Artificial Sequence
  Synthetic
uguguauguuuggaacaacu

SEQ ID NO: 638915 - RNA, 21 nt, Artificial Sequence
  Synthetic
uuguguauguuuggaacaacu

SEQ ID NO: 638916 - RNA, 22 nt, Artificial Sequence
  Synthetic
uuuguguauguuuggaacaacu

SEQ ID NO: 638917 - RNA, 23 nt, Artificial Sequence
  Synthetic
uuuuguguauguuuggaacaacu

SEQ ID NO: 638918 - RNA, 24 nt, Artificial Sequence
  Synthetic
cuuuuguguauguuuggaacaacu

SEQ ID NO: 638919 - RNA, 18 nt, Artificial Sequence
  Synthetic
augacagaaauaacaacu

SEQ ID NO: 638920 - RNA, 19 nt, Artificial Sequence
  Synthetic
aaugacagaaauaacaacu

SEQ ID NO: 638921 - RNA, 20 nt, Artificial Sequence
  Synthetic
aaaugacagaaauaacaacu

SEQ ID NO: 638922 - RNA, 21 nt, Artificial Sequence
  Synthetic
gaaaugacagaaauaacaacu

SEQ ID NO: 638923 - RNA, 22 nt, Artificial Sequence
  Synthetic
ggaaaugacagaaauaacaacu

SEQ ID NO: 638924 - RNA, 23 nt, Artificial Sequence
  Synthetic
gggaaaugacagaaauaacaacu

SEQ ID NO: 638925 - RNA, 24 nt, Artificial Sequence
  Synthetic
ggggaaaugacagaaauaacaacu

SEQ ID NO: 638926 - RNA, 18 nt, Artificial Sequence
  Synthetic
caucaaauuguaacaacu

SEQ ID NO: 638927 - RNA, 19 nt, Artificial Sequence
  Synthetic
acaucaaauuguaacaacu

SEQ ID NO: 638928 - RNA, 20 nt, Artificial Sequence
  Synthetic
aacaucaaauuguaacaacu

SEQ ID NO: 638929 - RNA, 21 nt, Artificial Sequence
  Synthetic
aaacaucaaauuguaacaacu

SEQ ID NO: 638930 - RNA, 22 nt, Artificial Sequence
  Synthetic
gaaacaucaaauuguaacaacu

SEQ ID NO: 638931 - RNA, 23 nt, Artificial Sequence
  Synthetic
ugaaacaucaaauuguaacaacu

SEQ ID NO: 638932 - RNA, 24 nt, Artificial Sequence
  Synthetic
cugaaacaucaaauuguaacaacu

SEQ ID NO: 638933 - RNA, 18 nt, Artificial Sequence
  Synthetic
ugccaagaauacacaacu

SEQ ID NO: 638934 - RNA, 19 nt, Artificial Sequence
  Synthetic
gugccaagaauacacaacu

SEQ ID NO: 638935 - RNA, 20 nt, Artificial Sequence
  Synthetic
ggugccaagaauacacaacu

SEQ ID NO: 638936 - RNA, 21 nt, Artificial Sequence
  Synthetic
gggugccaagaauacacaacu

SEQ ID NO: 638937 - RNA, 22 nt, Artificial Sequence
  Synthetic
ggggugccaagaauacacaacu

SEQ ID NO: 638938 - RNA, 23 nt, Artificial Sequence
  Synthetic
aggggugccaagaauacacaacu

SEQ ID NO: 638939 - RNA, 24 nt, Artificial Sequence
  Synthetic
uaggggugccaagaauacacaacu

SEQ ID NO: 638940 - RNA, 18 nt, Artificial Sequence
  Synthetic
cuaaaguacuccacaacu

SEQ ID NO: 638941 - RNA, 19 nt, Artificial Sequence
  Synthetic
gcuaaaguacuccacaacu

SEQ ID NO: 638942 - RNA, 20 nt, Artificial Sequence
  Synthetic
ugcuaaaguacuccacaacu

SEQ ID NO: 638943 - RNA, 21 nt, Artificial Sequence
  Synthetic
uugcuaaaguacuccacaacu

SEQ ID NO: 638944 - RNA, 22 nt, Artificial Sequence
  Synthetic
uuugcuaaaguacuccacaacu

SEQ ID NO: 638945 - RNA, 23 nt, Artificial Sequence
  Synthetic
uuuugcuaaaguacuccacaacu

SEQ ID NO: 638946 - RNA, 24 nt, Artificial Sequence
  Synthetic
auuuugcuaaaguacuccacaacu

SEQ ID NO: 638947 - RNA, 18 nt, Artificial Sequence
  Synthetic
aaauuggcacagacaacu

SEQ ID NO: 638948 - RNA, 19 nt, Artificial Sequence
  Synthetic
caaauuggcacagacaacu

SEQ ID NO: 638949 - RNA, 20 nt, Artificial Sequence
  Synthetic
gcaaauuggcacagacaacu

SEQ ID NO: 638950 - RNA, 21 nt, Artificial Sequence
  Synthetic
ggcaaauuggcacagacaacu

SEQ ID NO: 638951 - RNA, 22 nt, Artificial Sequence
  Synthetic
aggcaaauuggcacagacaacu

SEQ ID NO: 638952 - RNA, 23 nt, Artificial Sequence
  Synthetic
aaggcaaauuggcacagacaacu

SEQ ID NO: 638953 - RNA, 24 nt, Artificial Sequence
  Synthetic
gaaggcaaauuggcacagacaacu

SEQ ID NO: 638954 - RNA, 18 nt, Artificial Sequence
  Synthetic
aaauaacaauagacaacu

SEQ ID NO: 638955 - RNA, 19 nt, Artificial Sequence
  Synthetic
uaaauaacaauagacaacu

SEQ ID NO: 638956 - RNA, 20 nt, Artificial Sequence
  Synthetic
uuaaauaacaauagacaacu

SEQ ID NO: 638957 - RNA, 21 nt, Artificial Sequence
  Synthetic
uuuaaauaacaauagacaacu

SEQ ID NO: 638958 - RNA, 22 nt, Artificial Sequence
  Synthetic
uuuuaaauaacaauagacaacu

SEQ ID NO: 638959 - RNA, 23 nt, Artificial Sequence
  Synthetic
uuuuuaaauaacaauagacaacu

SEQ ID NO: 638960 - RNA, 24 nt, Artificial Sequence
  Synthetic
guuuuuaaauaacaauagacaacu

SEQ ID NO: 638961 - RNA, 18 nt, Artificial Sequence
  Synthetic
uuuaucacaaggacaacu

SEQ ID NO: 638962 - RNA, 19 nt, Artificial Sequence
  Synthetic
uuuuaucacaaggacaacu

SEQ ID NO: 638963 - RNA, 20 nt, Artificial Sequence
  Synthetic
auuuuaucacaaggacaacu

SEQ ID NO: 638964 - RNA, 21 nt, Artificial Sequence
  Synthetic
aauuuuaucacaaggacaacu

SEQ ID NO: 638965 - RNA, 22 nt, Artificial Sequence
  Synthetic
gaauuuuaucacaaggacaacu

SEQ ID NO: 638966 - RNA, 23 nt, Artificial Sequence
  Synthetic
ugaauuuuaucacaaggacaacu

SEQ ID NO: 638967 - RNA, 24 nt, Artificial Sequence
  Synthetic
uugaauuuuaucacaaggacaacu

SEQ ID NO: 638968 - RNA, 18 nt, Artificial Sequence
  Synthetic
uuugaaaguuggacaacu

SEQ ID NO: 638969 - RNA, 19 nt, Artificial Sequence
  Synthetic
cuuugaaaguuggacaacu

SEQ ID NO: 638970 - RNA, 20 nt, Artificial Sequence
  Synthetic
ccuuugaaaguuggacaacu

SEQ ID NO: 638971 - RNA, 21 nt, Artificial Sequence
  Synthetic
cccuuugaaaguuggacaacu

SEQ ID NO: 638972 - RNA, 22 nt, Artificial Sequence
  Synthetic
gcccuuugaaaguuggacaacu

SEQ ID NO: 638973 - RNA, 23 nt, Artificial Sequence
  Synthetic
agcccuuugaaaguuggacaacu

SEQ ID NO: 638974 - RNA, 24 nt, Artificial Sequence
  Synthetic
aagcccuuugaaaguuggacaacu

SEQ ID NO: 638975 - RNA, 18 nt, Artificial Sequence
  Synthetic
uuacucagauugacaacu

SEQ ID NO: 638976 - RNA, 19 nt, Artificial Sequence
  Synthetic
auuacucagauugacaacu

SEQ ID NO: 638977 - RNA, 20 nt, Artificial Sequence
  Synthetic
aauuacucagauugacaacu

SEQ ID NO: 638978 - RNA, 21 nt, Artificial Sequence
  Synthetic
caauuacucagauugacaacu

SEQ ID NO: 638979 - RNA, 22 nt, Artificial Sequence
  Synthetic
acaauuacucagauugacaacu

SEQ ID NO: 638980 - RNA, 23 nt, Artificial Sequence
  Synthetic
aacaauuacucagauugacaacu

SEQ ID NO: 638981 - RNA, 24 nt, Artificial Sequence
  Synthetic
uaacaauuacucagauugacaacu

SEQ ID NO: 638982 - RNA, 18 nt, Artificial Sequence
  Synthetic
cccuugugguugacaacu

SEQ ID NO: 638983 - RNA, 19 nt, Artificial Sequence
  Synthetic
ccccuugugguugacaacu

SEQ ID NO: 638984 - RNA, 20 nt, Artificial Sequence
  Synthetic
cccccuugugguugacaacu

SEQ ID NO: 638985 - RNA, 21 nt, Artificial Sequence
  Synthetic
acccccuugugguugacaacu

SEQ ID NO: 638986 - RNA, 22 nt, Artificial Sequence
  Synthetic
uacccccuugugguugacaacu

SEQ ID NO: 638987 - RNA, 23 nt, Artificial Sequence
  Synthetic
uuacccccuugugguugacaacu

SEQ ID NO: 638988 - RNA, 24 nt, Artificial Sequence
  Synthetic
uuuacccccuugugguugacaacu

SEQ ID NO: 638989 - RNA, 18 nt, Artificial Sequence
  Synthetic
gagaucaugaauacaacu

SEQ ID NO: 638990 - RNA, 19 nt, Artificial Sequence
  Synthetic
agagaucaugaauacaacu

SEQ ID NO: 638991 - RNA, 20 nt, Artificial Sequence
  Synthetic
gagagaucaugaauacaacu

SEQ ID NO: 638992 - RNA, 21 nt, Artificial Sequence
  Synthetic
ugagagaucaugaauacaacu

SEQ ID NO: 638993 - RNA, 22 nt, Artificial Sequence
  Synthetic
uugagagaucaugaauacaacu

SEQ ID NO: 638994 - RNA, 23 nt, Artificial Sequence
  Synthetic
uuugagagaucaugaauacaacu

SEQ ID NO: 638995 - RNA, 24 nt, Artificial Sequence
  Synthetic
uuuugagagaucaugaauacaacu

SEQ ID NO: 638996 - RNA, 18 nt, Artificial Sequence
  Synthetic
auaaguaauaauacaacu

SEQ ID NO: 638997 - RNA, 19 nt, Artificial Sequence
  Synthetic
cauaaguaauaauacaacu

SEQ ID NO: 638998 - RNA, 20 nt, Artificial Sequence
  Synthetic
ucauaaguaauaauacaacu

SEQ ID NO: 638999 - RNA, 21 nt, Artificial Sequence
  Synthetic
uucauaaguaauaauacaacu

SEQ ID NO: 639000 - RNA, 22 nt, Artificial Sequence
  Synthetic
guucauaaguaauaauacaacu

SEQ ID NO: 639001 - RNA, 23 nt, Artificial Sequence
  Synthetic
uguucauaaguaauaauacaacu

SEQ ID NO: 639002 - RNA, 24 nt, Artificial Sequence
  Synthetic
guguucauaaguaauaauacaacu

SEQ ID NO: 639003 - RNA, 18 nt, Artificial Sequence
  Synthetic
aguguaacuaauacaacu

SEQ ID NO: 639004 - RNA, 19 nt, Artificial Sequence
  Synthetic
aaguguaacuaauacaacu

SEQ ID NO: 639005 - RNA, 20 nt, Artificial Sequence
  Synthetic
uaaguguaacuaauacaacu

SEQ ID NO: 639006 - RNA, 21 nt, Artificial Sequence
  Synthetic
uuaaguguaacuaauacaacu

SEQ ID NO: 639007 - RNA, 22 nt, Artificial Sequence
  Synthetic
uuuaaguguaacuaauacaacu

SEQ ID NO: 639008 - RNA, 23 nt, Artificial Sequence
  Synthetic
cuuuaaguguaacuaauacaacu

SEQ ID NO: 639009 - RNA, 24 nt, Artificial Sequence
  Synthetic
ucuuuaaguguaacuaauacaacu

SEQ ID NO: 639010 - RNA, 18 nt, Artificial Sequence
  Synthetic
uauauucuacauacaacu

SEQ ID NO: 639011 - RNA, 19 nt, Artificial Sequence
  Synthetic
auauauucuacauacaacu

SEQ ID NO: 639012 - RNA, 20 nt, Artificial Sequence
  Synthetic
aauauauucuacauacaacu

SEQ ID NO: 639013 - RNA, 21 nt, Artificial Sequence
  Synthetic
aaauauauucuacauacaacu

SEQ ID NO: 639014 - RNA, 22 nt, Artificial Sequence
  Synthetic
gaaauauauucuacauacaacu

SEQ ID NO: 639015 - RNA, 23 nt, Artificial Sequence
  Synthetic
ugaaauauauucuacauacaacu

SEQ ID NO: 639016 - RNA, 24 nt, Artificial Sequence
  Synthetic
gugaaauauauucuacauacaacu

SEQ ID NO: 639017 - RNA, 18 nt, Artificial Sequence
  Synthetic
cuacuugaucauacaacu

SEQ ID NO: 639018 - RNA, 19 nt, Artificial Sequence
  Synthetic
acuacuugaucauacaacu

SEQ ID NO: 639019 - RNA, 20 nt, Artificial Sequence
  Synthetic
aacuacuugaucauacaacu

SEQ ID NO: 639020 - RNA, 21 nt, Artificial Sequence
  Synthetic
uaacuacuugaucauacaacu

SEQ ID NO: 639021 - RNA, 22 nt, Artificial Sequence
  Synthetic
uuaacuacuugaucauacaacu

SEQ ID NO: 639022 - RNA, 23 nt, Artificial Sequence
  Synthetic
uuuaacuacuugaucauacaacu

SEQ ID NO: 639023 - RNA, 24 nt, Artificial Sequence
  Synthetic
auuuaacuacuugaucauacaacu

SEQ ID NO: 639024 - RNA, 18 nt, Artificial Sequence
  Synthetic
uacagucuaauuacaacu

SEQ ID NO: 639025 - RNA, 19 nt, Artificial Sequence
  Synthetic
uuacagucuaauuacaacu

SEQ ID NO: 639026 - RNA, 20 nt, Artificial Sequence
  Synthetic
uuuacagucuaauuacaacu

SEQ ID NO: 639027 - RNA, 21 nt, Artificial Sequence
  Synthetic
cuuuacagucuaauuacaacu

SEQ ID NO: 639028 - RNA, 22 nt, Artificial Sequence
  Synthetic
acuuuacagucuaauuacaacu

SEQ ID NO: 639029 - RNA, 23 nt, Artificial Sequence
  Synthetic
gacuuuacagucuaauuacaacu

SEQ ID NO: 639030 - RNA, 24 nt, Artificial Sequence
  Synthetic
ggacuuuacagucuaauuacaacu

SEQ ID NO: 639031 - RNA, 18 nt, Artificial Sequence
  Synthetic
aauacagaacaaccaacu

SEQ ID NO: 639032 - RNA, 19 nt, Artificial Sequence
  Synthetic
aaauacagaacaaccaacu

SEQ ID NO: 639033 - RNA, 20 nt, Artificial Sequence
  Synthetic
aaaauacagaacaaccaacu

SEQ ID NO: 639034 - RNA, 21 nt, Artificial Sequence
  Synthetic
aaaaauacagaacaaccaacu

SEQ ID NO: 639035 - RNA, 22 nt, Artificial Sequence
  Synthetic
uaaaaauacagaacaaccaacu

SEQ ID NO: 639036 - RNA, 23 nt, Artificial Sequence
  Synthetic
auaaaaauacagaacaaccaacu

SEQ ID NO: 639037 - RNA, 24 nt, Artificial Sequence
  Synthetic
cauaaaaauacagaacaaccaacu

SEQ ID NO: 639038 - RNA, 18 nt, Artificial Sequence
  Synthetic
caccggcgggaaccaacu

SEQ ID NO: 639039 - RNA, 19 nt, Artificial Sequence
  Synthetic
ccaccggcgggaaccaacu

SEQ ID NO: 639040 - RNA, 20 nt, Artificial Sequence
  Synthetic
cccaccggcgggaaccaacu

SEQ ID NO: 639041 - RNA, 21 nt, Artificial Sequence
  Synthetic
acccaccggcgggaaccaacu

SEQ ID NO: 639042 - RNA, 22 nt, Artificial Sequence
  Synthetic
aacccaccggcgggaaccaacu

SEQ ID NO: 639043 - RNA, 23 nt, Artificial Sequence
  Synthetic
gaacccaccggcgggaaccaacu

SEQ ID NO: 639044 - RNA, 24 nt, Artificial Sequence
  Synthetic
cgaacccaccggcgggaaccaacu

SEQ ID NO: 639045 - RNA, 18 nt, Artificial Sequence
  Synthetic
uaaaucagcacaccaacu

SEQ ID NO: 639046 - RNA, 19 nt, Artificial Sequence
  Synthetic
cuaaaucagcacaccaacu

SEQ ID NO: 639047 - RNA, 20 nt, Artificial Sequence
  Synthetic
ucuaaaucagcacaccaacu

SEQ ID NO: 639048 - RNA, 21 nt, Artificial Sequence
  Synthetic
uucuaaaucagcacaccaacu

SEQ ID NO: 639049 - RNA, 22 nt, Artificial Sequence
  Synthetic
uuucuaaaucagcacaccaacu

SEQ ID NO: 639050 - RNA, 23 nt, Artificial Sequence
  Synthetic
uuuucuaaaucagcacaccaacu

SEQ ID NO: 639051 - RNA, 24 nt, Artificial Sequence
  Synthetic
guuuucuaaaucagcacaccaacu

SEQ ID NO: 639052 - RNA, 18 nt, Artificial Sequence
  Synthetic
cuucaauacccaccaacu

SEQ ID NO: 639053 - RNA, 19 nt, Artificial Sequence
  Synthetic
ccuucaauacccaccaacu

SEQ ID NO: 639054 - RNA, 20 nt, Artificial Sequence
  Synthetic
cccuucaauacccaccaacu

SEQ ID NO: 639055 - RNA, 21 nt, Artificial Sequence
  Synthetic
ucccuucaauacccaccaacu

SEQ ID NO: 639056 - RNA, 22 nt, Artificial Sequence
  Synthetic
cucccuucaauacccaccaacu

SEQ ID NO: 639057 - RNA, 23 nt, Artificial Sequence
  Synthetic
acucccuucaauacccaccaacu

SEQ ID NO: 639058 - RNA, 24 nt, Artificial Sequence
  Synthetic
uacucccuucaauacccaccaacu

SEQ ID NO: 639059 - RNA, 18 nt, Artificial Sequence
  Synthetic
auucacuaaaugccaacu

SEQ ID NO: 639060 - RNA, 19 nt, Artificial Sequence
  Synthetic
cauucacuaaaugccaacu

SEQ ID NO: 639061 - RNA, 20 nt, Artificial Sequence
  Synthetic
acauucacuaaaugccaacu

SEQ ID NO: 639062 - RNA, 21 nt, Artificial Sequence
  Synthetic
gacauucacuaaaugccaacu

SEQ ID NO: 639063 - RNA, 22 nt, Artificial Sequence
  Synthetic
agacauucacuaaaugccaacu

SEQ ID NO: 639064 - RNA, 23 nt, Artificial Sequence
  Synthetic
uagacauucacuaaaugccaacu

SEQ ID NO: 639065 - RNA, 24 nt, Artificial Sequence
  Synthetic
cuagacauucacuaaaugccaacu

SEQ ID NO: 639066 - RNA, 18 nt, Artificial Sequence
  Synthetic
aucucaaaucugccaacu

SEQ ID NO: 639067 - RNA, 19 nt, Artificial Sequence
  Synthetic
caucucaaaucugccaacu

SEQ ID NO: 639068 - RNA, 20 nt, Artificial Sequence
  Synthetic
ucaucucaaaucugccaacu

SEQ ID NO: 639069 - RNA, 21 nt, Artificial Sequence
  Synthetic
aucaucucaaaucugccaacu

SEQ ID NO: 639070 - RNA, 22 nt, Artificial Sequence
  Synthetic
aaucaucucaaaucugccaacu

SEQ ID NO: 639071 - RNA, 23 nt, Artificial Sequence
  Synthetic
gaaucaucucaaaucugccaacu

SEQ ID NO: 639072 - RNA, 24 nt, Artificial Sequence
  Synthetic
agaaucaucucaaaucugccaacu

SEQ ID NO: 639073 - RNA, 18 nt, Artificial Sequence
  Synthetic
ucacgaacauuuccaacu

SEQ ID NO: 639074 - RNA, 19 nt, Artificial Sequence
  Synthetic
uucacgaacauuuccaacu

SEQ ID NO: 639075 - RNA, 20 nt, Artificial Sequence
  Synthetic
auucacgaacauuuccaacu

SEQ ID NO: 639076 - RNA, 21 nt, Artificial Sequence
  Synthetic
aauucacgaacauuuccaacu

SEQ ID NO: 639077 - RNA, 22 nt, Artificial Sequence
  Synthetic
aaauucacgaacauuuccaacu

SEQ ID NO: 639078 - RNA, 23 nt, Artificial Sequence
  Synthetic
uaaauucacgaacauuuccaacu

SEQ ID NO: 639079 - RNA, 24 nt, Artificial Sequence
  Synthetic
uuaaauucacgaacauuuccaacu

SEQ ID NO: 639080 - RNA, 18 nt, Artificial Sequence
  Synthetic
agaugggucuuuccaacu

SEQ ID NO: 639081 - RNA, 19 nt, Artificial Sequence
  Synthetic
cagaugggucuuuccaacu

SEQ ID NO: 639082 - RNA, 20 nt, Artificial Sequence
  Synthetic
ccagaugggucuuuccaacu

SEQ ID NO: 639083 - RNA, 21 nt, Artificial Sequence
  Synthetic
accagaugggucuuuccaacu

SEQ ID NO: 639084 - RNA, 22 nt, Artificial Sequence
  Synthetic
gaccagaugggucuuuccaacu

SEQ ID NO: 639085 - RNA, 23 nt, Artificial Sequence
  Synthetic
agaccagaugggucuuuccaacu

SEQ ID NO: 639086 - RNA, 24 nt, Artificial Sequence
  Synthetic
aagaccagaugggucuuuccaacu

SEQ ID NO: 639087 - RNA, 18 nt, Artificial Sequence
  Synthetic
uaguauagaaaagcaacu

SEQ ID NO: 639088 - RNA, 19 nt, Artificial Sequence
  Synthetic
auaguauagaaaagcaacu

SEQ ID NO: 639089 - RNA, 20 nt, Artificial Sequence
  Synthetic
aauaguauagaaaagcaacu

SEQ ID NO: 639090 - RNA, 21 nt, Artificial Sequence
  Synthetic
aaauaguauagaaaagcaacu

SEQ ID NO: 639091 - RNA, 22 nt, Artificial Sequence
  Synthetic
aaaauaguauagaaaagcaacu

SEQ ID NO: 639092 - RNA, 23 nt, Artificial Sequence
  Synthetic
aaaaauaguauagaaaagcaacu

SEQ ID NO: 639093 - RNA, 24 nt, Artificial Sequence
  Synthetic
gaaaaauaguauagaaaagcaacu

SEQ ID NO: 639094 - RNA, 18 nt, Artificial Sequence
  Synthetic
uuuggaugucaagcaacu

SEQ ID NO: 639095 - RNA, 19 nt, Artificial Sequence
  Synthetic
cuuuggaugucaagcaacu

SEQ ID NO: 639096 - RNA, 20 nt, Artificial Sequence
  Synthetic
gcuuuggaugucaagcaacu

SEQ ID NO: 639097 - RNA, 21 nt, Artificial Sequence
  Synthetic
ugcuuuggaugucaagcaacu

SEQ ID NO: 639098 - RNA, 22 nt, Artificial Sequence
  Synthetic
gugcuuuggaugucaagcaacu

SEQ ID NO: 639099 - RNA, 23 nt, Artificial Sequence
  Synthetic
ugugcuuuggaugucaagcaacu

SEQ ID NO: 639100 - RNA, 24 nt, Artificial Sequence
  Synthetic
gugugcuuuggaugucaagcaacu

SEQ ID NO: 639101 - RNA, 18 nt, Artificial Sequence
  Synthetic
aaaaauguggaagcaacu

SEQ ID NO: 639102 - RNA, 19 nt, Artificial Sequence
  Synthetic
caaaaauguggaagcaacu

SEQ ID NO: 639103 - RNA, 20 nt, Artificial Sequence
  Synthetic
ccaaaaauguggaagcaacu

SEQ ID NO: 639104 - RNA, 21 nt, Artificial Sequence
  Synthetic
cccaaaaauguggaagcaacu

SEQ ID NO: 639105 - RNA, 22 nt, Artificial Sequence
  Synthetic
acccaaaaauguggaagcaacu

SEQ ID NO: 639106 - RNA, 23 nt, Artificial Sequence
  Synthetic
aacccaaaaauguggaagcaacu

SEQ ID NO: 639107 - RNA, 24 nt, Artificial Sequence
  Synthetic
aaacccaaaaauguggaagcaacu

SEQ ID NO: 639108 - RNA, 18 nt, Artificial Sequence
  Synthetic
ccuguaaucccagcaacu

SEQ ID NO: 639109 - RNA, 19 nt, Artificial Sequence
  Synthetic
gccuguaaucccagcaacu

SEQ ID NO: 639110 - RNA, 20 nt, Artificial Sequence
  Synthetic
ugccuguaaucccagcaacu

SEQ ID NO: 639111 - RNA, 21 nt, Artificial Sequence
  Synthetic
uugccuguaaucccagcaacu

SEQ ID NO: 639112 - RNA, 22 nt, Artificial Sequence
  Synthetic
guugccuguaaucccagcaacu

SEQ ID NO: 639113 - RNA, 23 nt, Artificial Sequence
  Synthetic
gguugccuguaaucccagcaacu

SEQ ID NO: 639114 - RNA, 24 nt, Artificial Sequence
  Synthetic
cgguugccuguaaucccagcaacu

SEQ ID NO: 639115 - RNA, 18 nt, Artificial Sequence
  Synthetic
agggcauguggagcaacu

SEQ ID NO: 639116 - RNA, 19 nt, Artificial Sequence
  Synthetic
gagggcauguggagcaacu

SEQ ID NO: 639117 - RNA, 20 nt, Artificial Sequence
  Synthetic
agagggcauguggagcaacu

SEQ ID NO: 639118 - RNA, 21 nt, Artificial Sequence
  Synthetic
cagagggcauguggagcaacu

SEQ ID NO: 639119 - RNA, 22 nt, Artificial Sequence
  Synthetic
ucagagggcauguggagcaacu

SEQ ID NO: 639120 - RNA, 23 nt, Artificial Sequence
  Synthetic
cucagagggcauguggagcaacu

SEQ ID NO: 639121 - RNA, 24 nt, Artificial Sequence
  Synthetic
ucucagagggcauguggagcaacu

SEQ ID NO: 639122 - RNA, 18 nt, Artificial Sequence
  Synthetic
agaauauccaaggcaacu

SEQ ID NO: 639123 - RNA, 19 nt, Artificial Sequence
  Synthetic
aagaauauccaaggcaacu

SEQ ID NO: 639124 - RNA, 20 nt, Artificial Sequence
  Synthetic
uaagaauauccaaggcaacu

SEQ ID NO: 639125 - RNA, 21 nt, Artificial Sequence
  Synthetic
cuaagaauauccaaggcaacu

SEQ ID NO: 639126 - RNA, 22 nt, Artificial Sequence
  Synthetic
gcuaagaauauccaaggcaacu

SEQ ID NO: 639127 - RNA, 23 nt, Artificial Sequence
  Synthetic
ggcuaagaauauccaaggcaacu

SEQ ID NO: 639128 - RNA, 24 nt, Artificial Sequence
  Synthetic
gggcuaagaauauccaaggcaacu

SEQ ID NO: 639129 - RNA, 18 nt, Artificial Sequence
  Synthetic
gcaauuauggaggcaacu

SEQ ID NO: 639130 - RNA, 19 nt, Artificial Sequence
  Synthetic
ugcaauuauggaggcaacu

SEQ ID NO: 639131 - RNA, 20 nt, Artificial Sequence
  Synthetic
augcaauuauggaggcaacu

SEQ ID NO: 639132 - RNA, 21 nt, Artificial Sequence
  Synthetic
caugcaauuauggaggcaacu

SEQ ID NO: 639133 - RNA, 22 nt, Artificial Sequence
  Synthetic
ucaugcaauuauggaggcaacu

SEQ ID NO: 639134 - RNA, 23 nt, Artificial Sequence
  Synthetic
cucaugcaauuauggaggcaacu

SEQ ID NO: 639135 - RNA, 24 nt, Artificial Sequence
  Synthetic
gcucaugcaauuauggaggcaacu

SEQ ID NO: 639136 - RNA, 18 nt, Artificial Sequence
  Synthetic
auuuauguaauggcaacu

SEQ ID NO: 639137 - RNA, 19 nt, Artificial Sequence
  Synthetic
gauuuauguaauggcaacu

SEQ ID NO: 639138 - RNA, 20 nt, Artificial Sequence
  Synthetic
agauuuauguaauggcaacu

SEQ ID NO: 639139 - RNA, 21 nt, Artificial Sequence
  Synthetic
cagauuuauguaauggcaacu

SEQ ID NO: 639140 - RNA, 22 nt, Artificial Sequence
  Synthetic
acagauuuauguaauggcaacu

SEQ ID NO: 639141 - RNA, 23 nt, Artificial Sequence
  Synthetic
cacagauuuauguaauggcaacu

SEQ ID NO: 639142 - RNA, 24 nt, Artificial Sequence
  Synthetic
gcacagauuuauguaauggcaacu

SEQ ID NO: 639143 - RNA, 18 nt, Artificial Sequence
  Synthetic
gagcccauccuggcaacu

SEQ ID NO: 639144 - RNA, 19 nt, Artificial Sequence
  Synthetic
agagcccauccuggcaacu

SEQ ID NO: 639145 - RNA, 20 nt, Artificial Sequence
  Synthetic
cagagcccauccuggcaacu

SEQ ID NO: 639146 - RNA, 21 nt, Artificial Sequence
  Synthetic
ccagagcccauccuggcaacu

SEQ ID NO: 639147 - RNA, 22 nt, Artificial Sequence
  Synthetic
gccagagcccauccuggcaacu

SEQ ID NO: 639148 - RNA, 23 nt, Artificial Sequence
  Synthetic
ggccagagcccauccuggcaacu

SEQ ID NO: 639149 - RNA, 24 nt, Artificial Sequence
  Synthetic
aggccagagcccauccuggcaacu

SEQ ID NO: 639150 - RNA, 18 nt, Artificial Sequence
  Synthetic
gggucccuugcugcaacu

SEQ ID NO: 639151 - RNA, 19 nt, Artificial Sequence
  Synthetic
ugggucccuugcugcaacu

SEQ ID NO: 639152 - RNA, 20 nt, Artificial Sequence
  Synthetic
cugggucccuugcugcaacu

SEQ ID NO: 639153 - RNA, 21 nt, Artificial Sequence
  Synthetic
ccugggucccuugcugcaacu

SEQ ID NO: 639154 - RNA, 22 nt, Artificial Sequence
  Synthetic
uccugggucccuugcugcaacu

SEQ ID NO: 639155 - RNA, 23 nt, Artificial Sequence
  Synthetic
auccugggucccuugcugcaacu

SEQ ID NO: 639156 - RNA, 24 nt, Artificial Sequence
  Synthetic
aauccugggucccuugcugcaacu

SEQ ID NO: 639157 - RNA, 18 nt, Artificial Sequence
  Synthetic
auaaauacuguugcaacu

SEQ ID NO: 639158 - RNA, 19 nt, Artificial Sequence
  Synthetic
aauaaauacuguugcaacu

SEQ ID NO: 639159 - RNA, 20 nt, Artificial Sequence
  Synthetic
aaauaaauacuguugcaacu

SEQ ID NO: 639160 - RNA, 21 nt, Artificial Sequence
  Synthetic
caaauaaauacuguugcaacu

SEQ ID NO: 639161 - RNA, 22 nt, Artificial Sequence
  Synthetic
gcaaauaaauacuguugcaacu

SEQ ID NO: 639162 - RNA, 23 nt, Artificial Sequence
  Synthetic
ggcaaauaaauacuguugcaacu

SEQ ID NO: 639163 - RNA, 24 nt, Artificial Sequence
  Synthetic
gggcaaauaaauacuguugcaacu

SEQ ID NO: 639164 - RNA, 18 nt, Artificial Sequence
  Synthetic
uucacuuucuuugcaacu

SEQ ID NO: 639165 - RNA, 19 nt, Artificial Sequence
  Synthetic
auucacuuucuuugcaacu

SEQ ID NO: 639166 - RNA, 20 nt, Artificial Sequence
  Synthetic
cauucacuuucuuugcaacu

SEQ ID NO: 639167 - RNA, 21 nt, Artificial Sequence
  Synthetic
ccauucacuuucuuugcaacu

SEQ ID NO: 639168 - RNA, 22 nt, Artificial Sequence
  Synthetic
uccauucacuuucuuugcaacu

SEQ ID NO: 639169 - RNA, 23 nt, Artificial Sequence
  Synthetic
uuccauucacuuucuuugcaacu

SEQ ID NO: 639170 - RNA, 24 nt, Artificial Sequence
  Synthetic
cuuccauucacuuucuuugcaacu

SEQ ID NO: 639171 - RNA, 18 nt, Artificial Sequence
  Synthetic
gagaggauuuuugcaacu

SEQ ID NO: 639172 - RNA, 19 nt, Artificial Sequence
  Synthetic
agagaggauuuuugcaacu

SEQ ID NO: 639173 - RNA, 20 nt, Artificial Sequence
  Synthetic
aagagaggauuuuugcaacu

SEQ ID NO: 639174 - RNA, 21 nt, Artificial Sequence
  Synthetic
aaagagaggauuuuugcaacu

SEQ ID NO: 639175 - RNA, 22 nt, Artificial Sequence
  Synthetic
uaaagagaggauuuuugcaacu

SEQ ID NO: 639176 - RNA, 23 nt, Artificial Sequence
  Synthetic
auaaagagaggauuuuugcaacu

SEQ ID NO: 639177 - RNA, 24 nt, Artificial Sequence
  Synthetic
cauaaagagaggauuuuugcaacu

SEQ ID NO: 639178 - RNA, 18 nt, Artificial Sequence
  Synthetic
ucuguuacagcaucaacu

SEQ ID NO: 639179 - RNA, 19 nt, Artificial Sequence
  Synthetic
cucuguuacagcaucaacu

SEQ ID NO: 639180 - RNA, 20 nt, Artificial Sequence
  Synthetic
gcucuguuacagcaucaacu

SEQ ID NO: 639181 - RNA, 21 nt, Artificial Sequence
  Synthetic
agcucuguuacagcaucaacu

SEQ ID NO: 639182 - RNA, 22 nt, Artificial Sequence
  Synthetic
uagcucuguuacagcaucaacu

SEQ ID NO: 639183 - RNA, 23 nt, Artificial Sequence
  Synthetic
uuagcucuguuacagcaucaacu

SEQ ID NO: 639184 - RNA, 24 nt, Artificial Sequence
  Synthetic
uuuagcucuguuacagcaucaacu

SEQ ID NO: 639185 - RNA, 18 nt, Artificial Sequence
  Synthetic
aaguaaucucacucaacu

SEQ ID NO: 639186 - RNA, 19 nt, Artificial Sequence
  Synthetic
uaaguaaucucacucaacu

SEQ ID NO: 639187 - RNA, 20 nt, Artificial Sequence
  Synthetic
guaaguaaucucacucaacu

SEQ ID NO: 639188 - RNA, 21 nt, Artificial Sequence
  Synthetic
uguaaguaaucucacucaacu

SEQ ID NO: 639189 - RNA, 22 nt, Artificial Sequence
  Synthetic
cuguaaguaaucucacucaacu

SEQ ID NO: 639190 - RNA, 23 nt, Artificial Sequence
  Synthetic
ucuguaaguaaucucacucaacu

SEQ ID NO: 639191 - RNA, 24 nt, Artificial Sequence
  Synthetic
aucuguaaguaaucucacucaacu

SEQ ID NO: 639192 - RNA, 18 nt, Artificial Sequence
  Synthetic
gucuugucuuacucaacu

SEQ ID NO: 639193 - RNA, 19 nt, Artificial Sequence
  Synthetic
agucuugucuuacucaacu

SEQ ID NO: 639194 - RNA, 20 nt, Artificial Sequence
  Synthetic
gagucuugucuuacucaacu

SEQ ID NO: 639195 - RNA, 21 nt, Artificial Sequence
  Synthetic
cgagucuugucuuacucaacu

SEQ ID NO: 639196 - RNA, 22 nt, Artificial Sequence
  Synthetic
acgagucuugucuuacucaacu

SEQ ID NO: 639197 - RNA, 23 nt, Artificial Sequence
  Synthetic
cacgagucuugucuuacucaacu

SEQ ID NO: 639198 - RNA, 24 nt, Artificial Sequence
  Synthetic
ucacgagucuugucuuacucaacu

SEQ ID NO: 639199 - RNA, 18 nt, Artificial Sequence
  Synthetic
ugacuugccaccucaacu

SEQ ID NO: 639200 - RNA, 19 nt, Artificial Sequence
  Synthetic
cugacuugccaccucaacu

SEQ ID NO: 639201 - RNA, 20 nt, Artificial Sequence
  Synthetic
gcugacuugccaccucaacu

SEQ ID NO: 639202 - RNA, 21 nt, Artificial Sequence
  Synthetic
agcugacuugccaccucaacu

SEQ ID NO: 639203 - RNA, 22 nt, Artificial Sequence
  Synthetic
cagcugacuugccaccucaacu

SEQ ID NO: 639204 - RNA, 23 nt, Artificial Sequence
  Synthetic
acagcugacuugccaccucaacu

SEQ ID NO: 639205 - RNA, 24 nt, Artificial Sequence
  Synthetic
uacagcugacuugccaccucaacu

SEQ ID NO: 639206 - RNA, 18 nt, Artificial Sequence
  Synthetic
uauucaguuuccucaacu

SEQ ID NO: 639207 - RNA, 19 nt, Artificial Sequence
  Synthetic
uuauucaguuuccucaacu

SEQ ID NO: 639208 - RNA, 20 nt, Artificial Sequence
  Synthetic
cuuauucaguuuccucaacu

SEQ ID NO: 639209 - RNA, 21 nt, Artificial Sequence
  Synthetic
ucuuauucaguuuccucaacu

SEQ ID NO: 639210 - RNA, 22 nt, Artificial Sequence
  Synthetic
cucuuauucaguuuccucaacu

SEQ ID NO: 639211 - RNA, 23 nt, Artificial Sequence
  Synthetic
ccucuuauucaguuuccucaacu

SEQ ID NO: 639212 - RNA, 24 nt, Artificial Sequence
  Synthetic
uccucuuauucaguuuccucaacu

SEQ ID NO: 639213 - RNA, 18 nt, Artificial Sequence
  Synthetic
gccugacagugcucaacu

SEQ ID NO: 639214 - RNA, 19 nt, Artificial Sequence
  Synthetic
agccugacagugcucaacu

SEQ ID NO: 639215 - RNA, 20 nt, Artificial Sequence
  Synthetic
cagccugacagugcucaacu

SEQ ID NO: 639216 - RNA, 21 nt, Artificial Sequence
  Synthetic
ucagccugacagugcucaacu

SEQ ID NO: 639217 - RNA, 22 nt, Artificial Sequence
  Synthetic
aucagccugacagugcucaacu

SEQ ID NO: 639218 - RNA, 23 nt, Artificial Sequence
  Synthetic
aaucagccugacagugcucaacu

SEQ ID NO: 639219 - RNA, 24 nt, Artificial Sequence
  Synthetic
aaaucagccugacagugcucaacu

SEQ ID NO: 639220 - RNA, 18 nt, Artificial Sequence
  Synthetic
auuuauccuuagucaacu

SEQ ID NO: 639221 - RNA, 19 nt, Artificial Sequence
  Synthetic
aauuuauccuuagucaacu

SEQ ID NO: 639222 - RNA, 20 nt, Artificial Sequence
  Synthetic
aaauuuauccuuagucaacu

SEQ ID NO: 639223 - RNA, 21 nt, Artificial Sequence
  Synthetic
aaaauuuauccuuagucaacu

SEQ ID NO: 639224 - RNA, 22 nt, Artificial Sequence
  Synthetic
aaaaauuuauccuuagucaacu

SEQ ID NO: 639225 - RNA, 23 nt, Artificial Sequence
  Synthetic
uaaaaauuuauccuuagucaacu

SEQ ID NO: 639226 - RNA, 24 nt, Artificial Sequence
  Synthetic
uuaaaaauuuauccuuagucaacu

SEQ ID NO: 639227 - RNA, 18 nt, Artificial Sequence
  Synthetic
cuuucuaacauuucaacu

SEQ ID NO: 639228 - RNA, 19 nt, Artificial Sequence
  Synthetic
ucuuucuaacauuucaacu

SEQ ID NO: 639229 - RNA, 20 nt, Artificial Sequence
  Synthetic
aucuuucuaacauuucaacu

SEQ ID NO: 639230 - RNA, 21 nt, Artificial Sequence
  Synthetic
caucuuucuaacauuucaacu

SEQ ID NO: 639231 - RNA, 22 nt, Artificial Sequence
  Synthetic
acaucuuucuaacauuucaacu

SEQ ID NO: 639232 - RNA, 23 nt, Artificial Sequence
  Synthetic
aacaucuuucuaacauuucaacu

SEQ ID NO: 639233 - RNA, 24 nt, Artificial Sequence
  Synthetic
uaacaucuuucuaacauuucaacu

SEQ ID NO: 639234 - RNA, 18 nt, Artificial Sequence
  Synthetic
cuggccuggcuuucaacu

SEQ ID NO: 639235 - RNA, 19 nt, Artificial Sequence
  Synthetic
acuggccuggcuuucaacu

SEQ ID NO: 639236 - RNA, 20 nt, Artificial Sequence
  Synthetic
gacuggccuggcuuucaacu

SEQ ID NO: 639237 - RNA, 21 nt, Artificial Sequence
  Synthetic
agacuggccuggcuuucaacu

SEQ ID NO: 639238 - RNA, 22 nt, Artificial Sequence
  Synthetic
cagacuggccuggcuuucaacu

SEQ ID NO: 639239 - RNA, 23 nt, Artificial Sequence
  Synthetic
gcagacuggccuggcuuucaacu

SEQ ID NO: 639240 - RNA, 24 nt, Artificial Sequence
  Synthetic
ugcagacuggccuggcuuucaacu

SEQ ID NO: 639241 - RNA, 18 nt, Artificial Sequence
  Synthetic
gcaaugcucuuuucaacu

SEQ ID NO: 639242 - RNA, 19 nt, Artificial Sequence
  Synthetic
cgcaaugcucuuuucaacu

SEQ ID NO: 639243 - RNA, 20 nt, Artificial Sequence
  Synthetic
ccgcaaugcucuuuucaacu

SEQ ID NO: 639244 - RNA, 21 nt, Artificial Sequence
  Synthetic
gccgcaaugcucuuuucaacu

SEQ ID NO: 639245 - RNA, 22 nt, Artificial Sequence
  Synthetic
ggccgcaaugcucuuuucaacu

SEQ ID NO: 639246 - RNA, 23 nt, Artificial Sequence
  Synthetic
cggccgcaaugcucuuuucaacu

SEQ ID NO: 639247 - RNA, 24 nt, Artificial Sequence
  Synthetic
ccggccgcaaugcucuuuucaacu

SEQ ID NO: 639248 - RNA, 18 nt, Artificial Sequence
  Synthetic
uuuccccagcaaagaacu

SEQ ID NO: 639249 - RNA, 19 nt, Artificial Sequence
  Synthetic
uuuuccccagcaaagaacu

SEQ ID NO: 639250 - RNA, 20 nt, Artificial Sequence
  Synthetic
cuuuuccccagcaaagaacu

SEQ ID NO: 639251 - RNA, 21 nt, Artificial Sequence
  Synthetic
acuuuuccccagcaaagaacu

SEQ ID NO: 639252 - RNA, 22 nt, Artificial Sequence
  Synthetic
cacuuuuccccagcaaagaacu

SEQ ID NO: 639253 - RNA, 23 nt, Artificial Sequence
  Synthetic
ccacuuuuccccagcaaagaacu

SEQ ID NO: 639254 - RNA, 24 nt, Artificial Sequence
  Synthetic
uccacuuuuccccagcaaagaacu

SEQ ID NO: 639255 - RNA, 18 nt, Artificial Sequence
  Synthetic
ugcacaaaagaaagaacu

SEQ ID NO: 639256 - RNA, 19 nt, Artificial Sequence
  Synthetic
gugcacaaaagaaagaacu

SEQ ID NO: 639257 - RNA, 20 nt, Artificial Sequence
  Synthetic
ugugcacaaaagaaagaacu

SEQ ID NO: 639258 - RNA, 21 nt, Artificial Sequence
  Synthetic
cugugcacaaaagaaagaacu

SEQ ID NO: 639259 - RNA, 22 nt, Artificial Sequence
  Synthetic
ucugugcacaaaagaaagaacu

SEQ ID NO: 639260 - RNA, 23 nt, Artificial Sequence
  Synthetic
aucugugcacaaaagaaagaacu

SEQ ID NO: 639261 - RNA, 24 nt, Artificial Sequence
  Synthetic
aaucugugcacaaaagaaagaacu

SEQ ID NO: 639262 - RNA, 18 nt, Artificial Sequence
  Synthetic
guagcauuaacaagaacu

SEQ ID NO: 639263 - RNA, 19 nt, Artificial Sequence
  Synthetic
gguagcauuaacaagaacu

SEQ ID NO: 639264 - RNA, 20 nt, Artificial Sequence
  Synthetic
agguagcauuaacaagaacu

SEQ ID NO: 639265 - RNA, 21 nt, Artificial Sequence
  Synthetic
aagguagcauuaacaagaacu

SEQ ID NO: 639266 - RNA, 22 nt, Artificial Sequence
  Synthetic
uaagguagcauuaacaagaacu

SEQ ID NO: 639267 - RNA, 23 nt, Artificial Sequence
  Synthetic
uuaagguagcauuaacaagaacu

SEQ ID NO: 639268 - RNA, 24 nt, Artificial Sequence
  Synthetic
cuuaagguagcauuaacaagaacu

SEQ ID NO: 639269 - RNA, 18 nt, Artificial Sequence
  Synthetic
caugcauguugaagaacu

SEQ ID NO: 639270 - RNA, 19 nt, Artificial Sequence
  Synthetic
acaugcauguugaagaacu

SEQ ID NO: 639271 - RNA, 20 nt, Artificial Sequence
  Synthetic
gacaugcauguugaagaacu

SEQ ID NO: 639272 - RNA, 21 nt, Artificial Sequence
  Synthetic
ugacaugcauguugaagaacu

SEQ ID NO: 639273 - RNA, 22 nt, Artificial Sequence
  Synthetic
augacaugcauguugaagaacu

SEQ ID NO: 639274 - RNA, 23 nt, Artificial Sequence
  Synthetic
aaugacaugcauguugaagaacu

SEQ ID NO: 639275 - RNA, 24 nt, Artificial Sequence
  Synthetic
uaaugacaugcauguugaagaacu

SEQ ID NO: 639276 - RNA, 18 nt, Artificial Sequence
  Synthetic
gccauuaugauaagaacu

SEQ ID NO: 639277 - RNA, 19 nt, Artificial Sequence
  Synthetic
agccauuaugauaagaacu

SEQ ID NO: 639278 - RNA, 20 nt, Artificial Sequence
  Synthetic
cagccauuaugauaagaacu

SEQ ID NO: 639279 - RNA, 21 nt, Artificial Sequence
  Synthetic
ccagccauuaugauaagaacu

SEQ ID NO: 639280 - RNA, 22 nt, Artificial Sequence
  Synthetic
accagccauuaugauaagaacu

SEQ ID NO: 639281 - RNA, 23 nt, Artificial Sequence
  Synthetic
caccagccauuaugauaagaacu

SEQ ID NO: 639282 - RNA, 24 nt, Artificial Sequence
  Synthetic
acaccagccauuaugauaagaacu

SEQ ID NO: 639283 - RNA, 18 nt, Artificial Sequence
  Synthetic
ugaagugcuauaagaacu

SEQ ID NO: 639284 - RNA, 19 nt, Artificial Sequence
  Synthetic
augaagugcuauaagaacu

SEQ ID NO: 639285 - RNA, 20 nt, Artificial Sequence
  Synthetic
aaugaagugcuauaagaacu

SEQ ID NO: 639286 - RNA, 21 nt, Artificial Sequence
  Synthetic
aaaugaagugcuauaagaacu

SEQ ID NO: 639287 - RNA, 22 nt, Artificial Sequence
  Synthetic
aaaaugaagugcuauaagaacu

SEQ ID NO: 639288 - RNA, 23 nt, Artificial Sequence
  Synthetic
aaaaaugaagugcuauaagaacu

SEQ ID NO: 639289 - RNA, 24 nt, Artificial Sequence
  Synthetic
aaaaaaugaagugcuauaagaacu

SEQ ID NO: 639290 - RNA, 18 nt, Artificial Sequence
  Synthetic
gacuuuuaucuaagaacu

SEQ ID NO: 639291 - RNA, 19 nt, Artificial Sequence
  Synthetic
ugacuuuuaucuaagaacu

SEQ ID NO: 639292 - RNA, 20 nt, Artificial Sequence
  Synthetic
augacuuuuaucuaagaacu

SEQ ID NO: 639293 - RNA, 21 nt, Artificial Sequence
  Synthetic
uaugacuuuuaucuaagaacu

SEQ ID NO: 639294 - RNA, 22 nt, Artificial Sequence
  Synthetic
cuaugacuuuuaucuaagaacu

SEQ ID NO: 639295 - RNA, 23 nt, Artificial Sequence
  Synthetic
acuaugacuuuuaucuaagaacu

SEQ ID NO: 639296 - RNA, 24 nt, Artificial Sequence
  Synthetic
uacuaugacuuuuaucuaagaacu

SEQ ID NO: 639297 - RNA, 18 nt, Artificial Sequence
  Synthetic
gucugauuucuaagaacu

SEQ ID NO: 639298 - RNA, 19 nt, Artificial Sequence
  Synthetic
ggucugauuucuaagaacu

SEQ ID NO: 639299 - RNA, 20 nt, Artificial Sequence
  Synthetic
uggucugauuucuaagaacu

SEQ ID NO: 639300 - RNA, 21 nt, Artificial Sequence
  Synthetic
guggucugauuucuaagaacu

SEQ ID NO: 639301 - RNA, 22 nt, Artificial Sequence
  Synthetic
aguggucugauuucuaagaacu

SEQ ID NO: 639302 - RNA, 23 nt, Artificial Sequence
  Synthetic
aaguggucugauuucuaagaacu

SEQ ID NO: 639303 - RNA, 24 nt, Artificial Sequence
  Synthetic
aaaguggucugauuucuaagaacu

SEQ ID NO: 639304 - RNA, 18 nt, Artificial Sequence
  Synthetic
acaaauuuaaacagaacu

SEQ ID NO: 639305 - RNA, 19 nt, Artificial Sequence
  Synthetic
aacaaauuuaaacagaacu

SEQ ID NO: 639306 - RNA, 20 nt, Artificial Sequence
  Synthetic
aaacaaauuuaaacagaacu

SEQ ID NO: 639307 - RNA, 21 nt, Artificial Sequence
  Synthetic
gaaacaaauuuaaacagaacu

SEQ ID NO: 639308 - RNA, 22 nt, Artificial Sequence
  Synthetic
ugaaacaaauuuaaacagaacu

SEQ ID NO: 639309 - RNA, 23 nt, Artificial Sequence
  Synthetic
cugaaacaaauuuaaacagaacu

SEQ ID NO: 639310 - RNA, 24 nt, Artificial Sequence
  Synthetic
ucugaaacaaauuuaaacagaacu

SEQ ID NO: 639311 - RNA, 18 nt, Artificial Sequence
  Synthetic
aucccagccuccagaacu

SEQ ID NO: 639312 - RNA, 19 nt, Artificial Sequence
  Synthetic
aaucccagccuccagaacu

SEQ ID NO: 639313 - RNA, 20 nt, Artificial Sequence
  Synthetic
gaaucccagccuccagaacu

SEQ ID NO: 639314 - RNA, 21 nt, Artificial Sequence
  Synthetic
ggaaucccagccuccagaacu

SEQ ID NO: 639315 - RNA, 22 nt, Artificial Sequence
  Synthetic
uggaaucccagccuccagaacu

SEQ ID NO: 639316 - RNA, 23 nt, Artificial Sequence
  Synthetic
uuggaaucccagccuccagaacu

SEQ ID NO: 639317 - RNA, 24 nt, Artificial Sequence
  Synthetic
cuuggaaucccagccuccagaacu

SEQ ID NO: 639318 - RNA, 18 nt, Artificial Sequence
  Synthetic
uucgcagccuccagaacu

SEQ ID NO: 639319 - RNA, 19 nt, Artificial Sequence
  Synthetic
cuucgcagccuccagaacu

SEQ ID NO: 639320 - RNA, 20 nt, Artificial Sequence
  Synthetic
acuucgcagccuccagaacu

SEQ ID NO: 639321 - RNA, 21 nt, Artificial Sequence
  Synthetic
gacuucgcagccuccagaacu

SEQ ID NO: 639322 - RNA, 22 nt, Artificial Sequence
  Synthetic
ggacuucgcagccuccagaacu

SEQ ID NO: 639323 - RNA, 23 nt, Artificial Sequence
  Synthetic
uggacuucgcagccuccagaacu

SEQ ID NO: 639324 - RNA, 24 nt, Artificial Sequence
  Synthetic
uuggacuucgcagccuccagaacu

SEQ ID NO: 639325 - RNA, 18 nt, Artificial Sequence
  Synthetic
uuccuagucuccagaacu

SEQ ID NO: 639326 - RNA, 19 nt, Artificial Sequence
  Synthetic
cuuccuagucuccagaacu

SEQ ID NO: 639327 - RNA, 20 nt, Artificial Sequence
  Synthetic
acuuccuagucuccagaacu

SEQ ID NO: 639328 - RNA, 21 nt, Artificial Sequence
  Synthetic
gacuuccuagucuccagaacu

SEQ ID NO: 639329 - RNA, 22 nt, Artificial Sequence
  Synthetic
agacuuccuagucuccagaacu

SEQ ID NO: 639330 - RNA, 23 nt, Artificial Sequence
  Synthetic
uagacuuccuagucuccagaacu

SEQ ID NO: 639331 - RNA, 24 nt, Artificial Sequence
  Synthetic
uuagacuuccuagucuccagaacu

SEQ ID NO: 639332 - RNA, 18 nt, Artificial Sequence
  Synthetic
gguacagccugcagaacu

SEQ ID NO: 639333 - RNA, 19 nt, Artificial Sequence
  Synthetic
cgguacagccugcagaacu

SEQ ID NO: 639334 - RNA, 20 nt, Artificial Sequence
  Synthetic
ccgguacagccugcagaacu

SEQ ID NO: 639335 - RNA, 21 nt, Artificial Sequence
  Synthetic
uccgguacagccugcagaacu

SEQ ID NO: 639336 - RNA, 22 nt, Artificial Sequence
  Synthetic
uuccgguacagccugcagaacu

SEQ ID NO: 639337 - RNA, 23 nt, Artificial Sequence
  Synthetic
cuuccgguacagccugcagaacu

SEQ ID NO: 639338 - RNA, 24 nt, Artificial Sequence
  Synthetic
gcuuccgguacagccugcagaacu

SEQ ID NO: 639339 - RNA, 18 nt, Artificial Sequence
  Synthetic
aacgagggacagagaacu

SEQ ID NO: 639340 - RNA, 19 nt, Artificial Sequence
  Synthetic
aaacgagggacagagaacu

SEQ ID NO: 639341 - RNA, 20 nt, Artificial Sequence
  Synthetic
gaaacgagggacagagaacu

SEQ ID NO: 639342 - RNA, 21 nt, Artificial Sequence
  Synthetic
agaaacgagggacagagaacu

SEQ ID NO: 639343 - RNA, 22 nt, Artificial Sequence
  Synthetic
aagaaacgagggacagagaacu

SEQ ID NO: 639344 - RNA, 23 nt, Artificial Sequence
  Synthetic
gaagaaacgagggacagagaacu

SEQ ID NO: 639345 - RNA, 24 nt, Artificial Sequence
  Synthetic
ggaagaaacgagggacagagaacu

SEQ ID NO: 639346 - RNA, 18 nt, Artificial Sequence
  Synthetic
acauuuauuuagagaacu

SEQ ID NO: 639347 - RNA, 19 nt, Artificial Sequence
  Synthetic
cacauuuauuuagagaacu

SEQ ID NO: 639348 - RNA, 20 nt, Artificial Sequence
  Synthetic
acacauuuauuuagagaacu

SEQ ID NO: 639349 - RNA, 21 nt, Artificial Sequence
  Synthetic
gacacauuuauuuagagaacu

SEQ ID NO: 639350 - RNA, 22 nt, Artificial Sequence
  Synthetic
ggacacauuuauuuagagaacu

SEQ ID NO: 639351 - RNA, 23 nt, Artificial Sequence
  Synthetic
aggacacauuuauuuagagaacu

SEQ ID NO: 639352 - RNA, 24 nt, Artificial Sequence
  Synthetic
aaggacacauuuauuuagagaacu

SEQ ID NO: 639353 - RNA, 18 nt, Artificial Sequence
  Synthetic
auuuuaaucucgagaacu

SEQ ID NO: 639354 - RNA, 19 nt, Artificial Sequence
  Synthetic
cauuuuaaucucgagaacu

SEQ ID NO: 639355 - RNA, 20 nt, Artificial Sequence
  Synthetic
acauuuuaaucucgagaacu

SEQ ID NO: 639356 - RNA, 21 nt, Artificial Sequence
  Synthetic
aacauuuuaaucucgagaacu

SEQ ID NO: 639357 - RNA, 22 nt, Artificial Sequence
  Synthetic
uaacauuuuaaucucgagaacu

SEQ ID NO: 639358 - RNA, 23 nt, Artificial Sequence
  Synthetic
auaacauuuuaaucucgagaacu

SEQ ID NO: 639359 - RNA, 24 nt, Artificial Sequence
  Synthetic
uauaacauuuuaaucucgagaacu

SEQ ID NO: 639360 - RNA, 18 nt, Artificial Sequence
  Synthetic
aggaacaagaggagaacu

SEQ ID NO: 639361 - RNA, 19 nt, Artificial Sequence
  Synthetic
gaggaacaagaggagaacu

SEQ ID NO: 639362 - RNA, 20 nt, Artificial Sequence
  Synthetic
agaggaacaagaggagaacu

SEQ ID NO: 639363 - RNA, 21 nt, Artificial Sequence
  Synthetic
gagaggaacaagaggagaacu

SEQ ID NO: 639364 - RNA, 22 nt, Artificial Sequence
  Synthetic
ugagaggaacaagaggagaacu

SEQ ID NO: 639365 - RNA, 23 nt, Artificial Sequence
  Synthetic
augagaggaacaagaggagaacu

SEQ ID NO: 639366 - RNA, 24 nt, Artificial Sequence
  Synthetic
caugagaggaacaagaggagaacu

SEQ ID NO: 639367 - RNA, 18 nt, Artificial Sequence
  Synthetic
aauuacucugauagaacu

SEQ ID NO: 639368 - RNA, 19 nt, Artificial Sequence
  Synthetic
caauuacucugauagaacu

SEQ ID NO: 639369 - RNA, 20 nt, Artificial Sequence
  Synthetic
acaauuacucugauagaacu

SEQ ID NO: 639370 - RNA, 21 nt, Artificial Sequence
  Synthetic
uacaauuacucugauagaacu

SEQ ID NO: 639371 - RNA, 22 nt, Artificial Sequence
  Synthetic
uuacaauuacucugauagaacu

SEQ ID NO: 639372 - RNA, 23 nt, Artificial Sequence
  Synthetic
guuacaauuacucugauagaacu

SEQ ID NO: 639373 - RNA, 24 nt, Artificial Sequence
  Synthetic
aguuacaauuacucugauagaacu

SEQ ID NO: 639374 - RNA, 18 nt, Artificial Sequence
  Synthetic
ccucaauuugguagaacu

SEQ ID NO: 639375 - RNA, 19 nt, Artificial Sequence
  Synthetic
gccucaauuugguagaacu

SEQ ID NO: 639376 - RNA, 20 nt, Artificial Sequence
  Synthetic
ugccucaauuugguagaacu

SEQ ID NO: 639377 - RNA, 21 nt, Artificial Sequence
  Synthetic
uugccucaauuugguagaacu

SEQ ID NO: 639378 - RNA, 22 nt, Artificial Sequence
  Synthetic
uuugccucaauuugguagaacu

SEQ ID NO: 639379 - RNA, 23 nt, Artificial Sequence
  Synthetic
auuugccucaauuugguagaacu

SEQ ID NO: 639380 - RNA, 24 nt, Artificial Sequence
  Synthetic
cauuugccucaauuugguagaacu

SEQ ID NO: 639381 - RNA, 18 nt, Artificial Sequence
  Synthetic
guucugucucuuagaacu

SEQ ID NO: 639382 - RNA, 19 nt, Artificial Sequence
  Synthetic
cguucugucucuuagaacu

SEQ ID NO: 639383 - RNA, 20 nt, Artificial Sequence
  Synthetic
ucguucugucucuuagaacu

SEQ ID NO: 639384 - RNA, 21 nt, Artificial Sequence
  Synthetic
uucguucugucucuuagaacu

SEQ ID NO: 639385 - RNA, 22 nt, Artificial Sequence
  Synthetic
cuucguucugucucuuagaacu

SEQ ID NO: 639386 - RNA, 23 nt, Artificial Sequence
  Synthetic
ccuucguucugucucuuagaacu

SEQ ID NO: 639387 - RNA, 24 nt, Artificial Sequence
  Synthetic
cccuucguucugucucuuagaacu

SEQ ID NO: 639388 - RNA, 18 nt, Artificial Sequence
  Synthetic
cugauaaguguuagaacu

SEQ ID NO: 639389 - RNA, 19 nt, Artificial Sequence
  Synthetic
gcugauaaguguuagaacu

SEQ ID NO: 639390 - RNA, 20 nt, Artificial Sequence
  Synthetic
agcugauaaguguuagaacu

SEQ ID NO: 639391 - RNA, 21 nt, Artificial Sequence
  Synthetic
uagcugauaaguguuagaacu

SEQ ID NO: 639392 - RNA, 22 nt, Artificial Sequence
  Synthetic
auagcugauaaguguuagaacu

SEQ ID NO: 639393 - RNA, 23 nt, Artificial Sequence
  Synthetic
uauagcugauaaguguuagaacu

SEQ ID NO: 639394 - RNA, 24 nt, Artificial Sequence
  Synthetic
auauagcugauaaguguuagaacu

SEQ ID NO: 639395 - RNA, 18 nt, Artificial Sequence
  Synthetic
aaacguuaagaacgaacu

SEQ ID NO: 639396 - RNA, 19 nt, Artificial Sequence
  Synthetic
aaaacguuaagaacgaacu

SEQ ID NO: 639397 - RNA, 20 nt, Artificial Sequence
  Synthetic
aaaaacguuaagaacgaacu

SEQ ID NO: 639398 - RNA, 21 nt, Artificial Sequence
  Synthetic
caaaaacguuaagaacgaacu

SEQ ID NO: 639399 - RNA, 22 nt, Artificial Sequence
  Synthetic
gcaaaaacguuaagaacgaacu

SEQ ID NO: 639400 - RNA, 23 nt, Artificial Sequence
  Synthetic
ugcaaaaacguuaagaacgaacu

SEQ ID NO: 639401 - RNA, 24 nt, Artificial Sequence
  Synthetic
gugcaaaaacguuaagaacgaacu

SEQ ID NO: 639402 - RNA, 18 nt, Artificial Sequence
  Synthetic
auuaaccacacgcgaacu

SEQ ID NO: 639403 - RNA, 19 nt, Artificial Sequence
  Synthetic
aauuaaccacacgcgaacu

SEQ ID NO: 639404 - RNA, 20 nt, Artificial Sequence
  Synthetic
gaauuaaccacacgcgaacu

SEQ ID NO: 639405 - RNA, 21 nt, Artificial Sequence
  Synthetic
ggaauuaaccacacgcgaacu

SEQ ID NO: 639406 - RNA, 22 nt, Artificial Sequence
  Synthetic
gggaauuaaccacacgcgaacu

SEQ ID NO: 639407 - RNA, 23 nt, Artificial Sequence
  Synthetic
ugggaauuaaccacacgcgaacu

SEQ ID NO: 639408 - RNA, 24 nt, Artificial Sequence
  Synthetic
uugggaauuaaccacacgcgaacu

SEQ ID NO: 639409 - RNA, 18 nt, Artificial Sequence
  Synthetic
gagauggcaaaaggaacu

SEQ ID NO: 639410 - RNA, 19 nt, Artificial Sequence
  Synthetic
agagauggcaaaaggaacu

SEQ ID NO: 639411 - RNA, 20 nt, Artificial Sequence
  Synthetic
aagagauggcaaaaggaacu

SEQ ID NO: 639412 - RNA, 21 nt, Artificial Sequence
  Synthetic
caagagauggcaaaaggaacu

SEQ ID NO: 639413 - RNA, 22 nt, Artificial Sequence
  Synthetic
gcaagagauggcaaaaggaacu

SEQ ID NO: 639414 - RNA, 23 nt, Artificial Sequence
  Synthetic
ugcaagagauggcaaaaggaacu

SEQ ID NO: 639415 - RNA, 24 nt, Artificial Sequence
  Synthetic
cugcaagagauggcaaaaggaacu

SEQ ID NO: 639416 - RNA, 18 nt, Artificial Sequence
  Synthetic
accaaaugcaaaggaacu

SEQ ID NO: 639417 - RNA, 19 nt, Artificial Sequence
  Synthetic
caccaaaugcaaaggaacu

SEQ ID NO: 639418 - RNA, 20 nt, Artificial Sequence
  Synthetic
ccaccaaaugcaaaggaacu

SEQ ID NO: 639419 - RNA, 21 nt, Artificial Sequence
  Synthetic
accaccaaaugcaaaggaacu

SEQ ID NO: 639420 - RNA, 22 nt, Artificial Sequence
  Synthetic
caccaccaaaugcaaaggaacu

SEQ ID NO: 639421 - RNA, 23 nt, Artificial Sequence
  Synthetic
acaccaccaaaugcaaaggaacu

SEQ ID NO: 639422 - RNA, 24 nt, Artificial Sequence
  Synthetic
uacaccaccaaaugcaaaggaacu

SEQ ID NO: 639423 - RNA, 18 nt, Artificial Sequence
  Synthetic
aaagacauauaaggaacu

SEQ ID NO: 639424 - RNA, 19 nt, Artificial Sequence
  Synthetic
caaagacauauaaggaacu

SEQ ID NO: 639425 - RNA, 20 nt, Artificial Sequence
  Synthetic
acaaagacauauaaggaacu

SEQ ID NO: 639426 - RNA, 21 nt, Artificial Sequence
  Synthetic
uacaaagacauauaaggaacu

SEQ ID NO: 639427 - RNA, 22 nt, Artificial Sequence
  Synthetic
auacaaagacauauaaggaacu

SEQ ID NO: 639428 - RNA, 23 nt, Artificial Sequence
  Synthetic
cauacaaagacauauaaggaacu

SEQ ID NO: 639429 - RNA, 24 nt, Artificial Sequence
  Synthetic
acauacaaagacauauaaggaacu

SEQ ID NO: 639430 - RNA, 18 nt, Artificial Sequence
  Synthetic
uuauuaaauuaaggaacu

SEQ ID NO: 639431 - RNA, 19 nt, Artificial Sequence
  Synthetic
auuauuaaauuaaggaacu

SEQ ID NO: 639432 - RNA, 20 nt, Artificial Sequence
  Synthetic
uauuauuaaauuaaggaacu

SEQ ID NO: 639433 - RNA, 21 nt, Artificial Sequence
  Synthetic
auauuauuaaauuaaggaacu

SEQ ID NO: 639434 - RNA, 22 nt, Artificial Sequence
  Synthetic
aauauuauuaaauuaaggaacu

SEQ ID NO: 639435 - RNA, 23 nt, Artificial Sequence
  Synthetic
caauauuauuaaauuaaggaacu

SEQ ID NO: 639436 - RNA, 24 nt, Artificial Sequence
  Synthetic
ucaauauuauuaaauuaaggaacu

SEQ ID NO: 639437 - RNA, 18 nt, Artificial Sequence
  Synthetic
cauuuugaaucaggaacu

SEQ ID NO: 639438 - RNA, 19 nt, Artificial Sequence
  Synthetic
acauuuugaaucaggaacu

SEQ ID NO: 639439 - RNA, 20 nt, Artificial Sequence
  Synthetic
gacauuuugaaucaggaacu

SEQ ID NO: 639440 - RNA, 21 nt, Artificial Sequence
  Synthetic
agacauuuugaaucaggaacu

SEQ ID NO: 639441 - RNA, 22 nt, Artificial Sequence
  Synthetic
cagacauuuugaaucaggaacu

SEQ ID NO: 639442 - RNA, 23 nt, Artificial Sequence
  Synthetic
ccagacauuuugaaucaggaacu

SEQ ID NO: 639443 - RNA, 24 nt, Artificial Sequence
  Synthetic
cccagacauuuugaaucaggaacu

SEQ ID NO: 639444 - RNA, 18 nt, Artificial Sequence
  Synthetic
uucucugcccuaggaacu

SEQ ID NO: 639445 - RNA, 19 nt, Artificial Sequence
  Synthetic
guucucugcccuaggaacu

SEQ ID NO: 639446 - RNA, 20 nt, Artificial Sequence
  Synthetic
uguucucugcccuaggaacu

SEQ ID NO: 639447 - RNA, 21 nt, Artificial Sequence
  Synthetic
cuguucucugcccuaggaacu

SEQ ID NO: 639448 - RNA, 22 nt, Artificial Sequence
  Synthetic
ccuguucucugcccuaggaacu

SEQ ID NO: 639449 - RNA, 23 nt, Artificial Sequence
  Synthetic
uccuguucucugcccuaggaacu

SEQ ID NO: 639450 - RNA, 24 nt, Artificial Sequence
  Synthetic
auccuguucucugcccuaggaacu

SEQ ID NO: 639451 - RNA, 18 nt, Artificial Sequence
  Synthetic
agauacuggucuggaacu

SEQ ID NO: 639452 - RNA, 19 nt, Artificial Sequence
  Synthetic
aagauacuggucuggaacu

SEQ ID NO: 639453 - RNA, 20 nt, Artificial Sequence
  Synthetic
gaagauacuggucuggaacu

SEQ ID NO: 639454 - RNA, 21 nt, Artificial Sequence
  Synthetic
ugaagauacuggucuggaacu

SEQ ID NO: 639455 - RNA, 22 nt, Artificial Sequence
  Synthetic
uugaagauacuggucuggaacu

SEQ ID NO: 639456 - RNA, 23 nt, Artificial Sequence
  Synthetic
guugaagauacuggucuggaacu

SEQ ID NO: 639457 - RNA, 24 nt, Artificial Sequence
  Synthetic
aguugaagauacuggucuggaacu

SEQ ID NO: 639458 - RNA, 18 nt, Artificial Sequence
  Synthetic
cuagagaucuguggaacu

SEQ ID NO: 639459 - RNA, 19 nt, Artificial Sequence
  Synthetic
ccuagagaucuguggaacu

SEQ ID NO: 639460 - RNA, 20 nt, Artificial Sequence
  Synthetic
accuagagaucuguggaacu

SEQ ID NO: 639461 - RNA, 21 nt, Artificial Sequence
  Synthetic
gaccuagagaucuguggaacu

SEQ ID NO: 639462 - RNA, 22 nt, Artificial Sequence
  Synthetic
ugaccuagagaucuguggaacu

SEQ ID NO: 639463 - RNA, 23 nt, Artificial Sequence
  Synthetic
cugaccuagagaucuguggaacu

SEQ ID NO: 639464 - RNA, 24 nt, Artificial Sequence
  Synthetic
ccugaccuagagaucuguggaacu

SEQ ID NO: 639465 - RNA, 18 nt, Artificial Sequence
  Synthetic
uaguuaaaagaaugaacu

SEQ ID NO: 639466 - RNA, 19 nt, Artificial Sequence
  Synthetic
cuaguuaaaagaaugaacu

SEQ ID NO: 639467 - RNA, 20 nt, Artificial Sequence
  Synthetic
acuaguuaaaagaaugaacu

SEQ ID NO: 639468 - RNA, 21 nt, Artificial Sequence
  Synthetic
uacuaguuaaaagaaugaacu

SEQ ID NO: 639469 - RNA, 22 nt, Artificial Sequence
  Synthetic
auacuaguuaaaagaaugaacu

SEQ ID NO: 639470 - RNA, 23 nt, Artificial Sequence
  Synthetic
cauacuaguuaaaagaaugaacu

SEQ ID NO: 639471 - RNA, 24 nt, Artificial Sequence
  Synthetic
gcauacuaguuaaaagaaugaacu

SEQ ID NO: 639472 - RNA, 18 nt, Artificial Sequence
  Synthetic
ccaaggcagacaugaacu

SEQ ID NO: 639473 - RNA, 19 nt, Artificial Sequence
  Synthetic
cccaaggcagacaugaacu

SEQ ID NO: 639474 - RNA, 20 nt, Artificial Sequence
  Synthetic
ucccaaggcagacaugaacu

SEQ ID NO: 639475 - RNA, 21 nt, Artificial Sequence
  Synthetic
cucccaaggcagacaugaacu

SEQ ID NO: 639476 - RNA, 22 nt, Artificial Sequence
  Synthetic
gcucccaaggcagacaugaacu

SEQ ID NO: 639477 - RNA, 23 nt, Artificial Sequence
  Synthetic
agcucccaaggcagacaugaacu

SEQ ID NO: 639478 - RNA, 24 nt, Artificial Sequence
  Synthetic
uagcucccaaggcagacaugaacu

SEQ ID NO: 639479 - RNA, 18 nt, Artificial Sequence
  Synthetic
acaagguacagaugaacu

SEQ ID NO: 639480 - RNA, 19 nt, Artificial Sequence
  Synthetic
uacaagguacagaugaacu

SEQ ID NO: 639481 - RNA, 20 nt, Artificial Sequence
  Synthetic
guacaagguacagaugaacu

SEQ ID NO: 639482 - RNA, 21 nt, Artificial Sequence
  Synthetic
gguacaagguacagaugaacu

SEQ ID NO: 639483 - RNA, 22 nt, Artificial Sequence
  Synthetic
ugguacaagguacagaugaacu

SEQ ID NO: 639484 - RNA, 23 nt, Artificial Sequence
  Synthetic
uugguacaagguacagaugaacu

SEQ ID NO: 639485 - RNA, 24 nt, Artificial Sequence
  Synthetic
uuugguacaagguacagaugaacu

SEQ ID NO: 639486 - RNA, 18 nt, Artificial Sequence
  Synthetic
uaaauaaugauaugaacu

SEQ ID NO: 639487 - RNA, 19 nt, Artificial Sequence
  Synthetic
uuaaauaaugauaugaacu

SEQ ID NO: 639488 - RNA, 20 nt, Artificial Sequence
  Synthetic
cuuaaauaaugauaugaacu

SEQ ID NO: 639489 - RNA, 21 nt, Artificial Sequence
  Synthetic
acuuaaauaaugauaugaacu

SEQ ID NO: 639490 - RNA, 22 nt, Artificial Sequence
  Synthetic
uacuuaaauaaugauaugaacu

SEQ ID NO: 639491 - RNA, 23 nt, Artificial Sequence
  Synthetic
uuacuuaaauaaugauaugaacu

SEQ ID NO: 639492 - RNA, 24 nt, Artificial Sequence
  Synthetic
guuacuuaaauaaugauaugaacu

SEQ ID NO: 639493 - RNA, 18 nt, Artificial Sequence
  Synthetic
uacaauaaauacugaacu

SEQ ID NO: 639494 - RNA, 19 nt, Artificial Sequence
  Synthetic
uuacaauaaauacugaacu

SEQ ID NO: 639495 - RNA, 20 nt, Artificial Sequence
  Synthetic
guuacaauaaauacugaacu

SEQ ID NO: 639496 - RNA, 21 nt, Artificial Sequence
  Synthetic
uguuacaauaaauacugaacu

SEQ ID NO: 639497 - RNA, 22 nt, Artificial Sequence
  Synthetic
guguuacaauaaauacugaacu

SEQ ID NO: 639498 - RNA, 23 nt, Artificial Sequence
  Synthetic
uguguuacaauaaauacugaacu

SEQ ID NO: 639499 - RNA, 24 nt, Artificial Sequence
  Synthetic
auguguuacaauaaauacugaacu

SEQ ID NO: 639500 - RNA, 18 nt, Artificial Sequence
  Synthetic
uggugucuaaccugaacu

SEQ ID NO: 639501 - RNA, 19 nt, Artificial Sequence
  Synthetic
auggugucuaaccugaacu

SEQ ID NO: 639502 - RNA, 20 nt, Artificial Sequence
  Synthetic
aauggugucuaaccugaacu

SEQ ID NO: 639503 - RNA, 21 nt, Artificial Sequence
  Synthetic
aaauggugucuaaccugaacu

SEQ ID NO: 639504 - RNA, 22 nt, Artificial Sequence
  Synthetic
aaaauggugucuaaccugaacu

SEQ ID NO: 639505 - RNA, 23 nt, Artificial Sequence
  Synthetic
uaaaauggugucuaaccugaacu

SEQ ID NO: 639506 - RNA, 24 nt, Artificial Sequence
  Synthetic
guaaaauggugucuaaccugaacu

SEQ ID NO: 639507 - RNA, 18 nt, Artificial Sequence
  Synthetic
ucuuuuaaucucugaacu

SEQ ID NO: 639508 - RNA, 19 nt, Artificial Sequence
  Synthetic
aucuuuuaaucucugaacu

SEQ ID NO: 639509 - RNA, 20 nt, Artificial Sequence
  Synthetic
uaucuuuuaaucucugaacu

SEQ ID NO: 639510 - RNA, 21 nt, Artificial Sequence
  Synthetic
auaucuuuuaaucucugaacu

SEQ ID NO: 639511 - RNA, 22 nt, Artificial Sequence
  Synthetic
cauaucuuuuaaucucugaacu

SEQ ID NO: 639512 - RNA, 23 nt, Artificial Sequence
  Synthetic
acauaucuuuuaaucucugaacu

SEQ ID NO: 639513 - RNA, 24 nt, Artificial Sequence
  Synthetic
uacauaucuuuuaaucucugaacu

SEQ ID NO: 639514 - RNA, 18 nt, Artificial Sequence
  Synthetic
cuaaccucuaagugaacu

SEQ ID NO: 639515 - RNA, 19 nt, Artificial Sequence
  Synthetic
acuaaccucuaagugaacu

SEQ ID NO: 639516 - RNA, 20 nt, Artificial Sequence
  Synthetic
aacuaaccucuaagugaacu

SEQ ID NO: 639517 - RNA, 21 nt, Artificial Sequence
  Synthetic
aaacuaaccucuaagugaacu

SEQ ID NO: 639518 - RNA, 22 nt, Artificial Sequence
  Synthetic
uaaacuaaccucuaagugaacu

SEQ ID NO: 639519 - RNA, 23 nt, Artificial Sequence
  Synthetic
uuaaacuaaccucuaagugaacu

SEQ ID NO: 639520 - RNA, 24 nt, Artificial Sequence
  Synthetic
uuuaaacuaaccucuaagugaacu

SEQ ID NO: 639521 - RNA, 18 nt, Artificial Sequence
  Synthetic
uaagcucuuuagugaacu

SEQ ID NO: 639522 - RNA, 19 nt, Artificial Sequence
  Synthetic
guaagcucuuuagugaacu

SEQ ID NO: 639523 - RNA, 20 nt, Artificial Sequence
  Synthetic
aguaagcucuuuagugaacu

SEQ ID NO: 639524 - RNA, 21 nt, Artificial Sequence
  Synthetic
caguaagcucuuuagugaacu

SEQ ID NO: 639525 - RNA, 22 nt, Artificial Sequence
  Synthetic
gcaguaagcucuuuagugaacu

SEQ ID NO: 639526 - RNA, 23 nt, Artificial Sequence
  Synthetic
ugcaguaagcucuuuagugaacu

SEQ ID NO: 639527 - RNA, 24 nt, Artificial Sequence
  Synthetic
gugcaguaagcucuuuagugaacu

SEQ ID NO: 639528 - RNA, 18 nt, Artificial Sequence
  Synthetic
uugauuuaauggugaacu

SEQ ID NO: 639529 - RNA, 19 nt, Artificial Sequence
  Synthetic
guugauuuaauggugaacu

SEQ ID NO: 639530 - RNA, 20 nt, Artificial Sequence
  Synthetic
aguugauuuaauggugaacu

SEQ ID NO: 639531 - RNA, 21 nt, Artificial Sequence
  Synthetic
aaguugauuuaauggugaacu

SEQ ID NO: 639532 - RNA, 22 nt, Artificial Sequence
  Synthetic
uaaguugauuuaauggugaacu

SEQ ID NO: 639533 - RNA, 23 nt, Artificial Sequence
  Synthetic
auaaguugauuuaauggugaacu

SEQ ID NO: 639534 - RNA, 24 nt, Artificial Sequence
  Synthetic
aauaaguugauuuaauggugaacu

SEQ ID NO: 639535 - RNA, 18 nt, Artificial Sequence
  Synthetic
aggagaauggugugaacu

SEQ ID NO: 639536 - RNA, 19 nt, Artificial Sequence
  Synthetic
caggagaauggugugaacu

SEQ ID NO: 639537 - RNA, 20 nt, Artificial Sequence
  Synthetic
gcaggagaauggugugaacu

SEQ ID NO: 639538 - RNA, 21 nt, Artificial Sequence
  Synthetic
ggcaggagaauggugugaacu

SEQ ID NO: 639539 - RNA, 22 nt, Artificial Sequence
  Synthetic
aggcaggagaauggugugaacu

SEQ ID NO: 639540 - RNA, 23 nt, Artificial Sequence
  Synthetic
gaggcaggagaauggugugaacu

SEQ ID NO: 639541 - RNA, 24 nt, Artificial Sequence
  Synthetic
ugaggcaggagaauggugugaacu

SEQ ID NO: 639542 - RNA, 18 nt, Artificial Sequence
  Synthetic
cggcauucccauugaacu

SEQ ID NO: 639543 - RNA, 19 nt, Artificial Sequence
  Synthetic
ucggcauucccauugaacu

SEQ ID NO: 639544 - RNA, 20 nt, Artificial Sequence
  Synthetic
aucggcauucccauugaacu

SEQ ID NO: 639545 - RNA, 21 nt, Artificial Sequence
  Synthetic
caucggcauucccauugaacu

SEQ ID NO: 639546 - RNA, 22 nt, Artificial Sequence
  Synthetic
acaucggcauucccauugaacu

SEQ ID NO: 639547 - RNA, 23 nt, Artificial Sequence
  Synthetic
uacaucggcauucccauugaacu

SEQ ID NO: 639548 - RNA, 24 nt, Artificial Sequence
  Synthetic
auacaucggcauucccauugaacu

SEQ ID NO: 639549 - RNA, 18 nt, Artificial Sequence
  Synthetic
auaugcauagaaauaacu

SEQ ID NO: 639550 - RNA, 19 nt, Artificial Sequence
  Synthetic
aauaugcauagaaauaacu

SEQ ID NO: 639551 - RNA, 20 nt, Artificial Sequence
  Synthetic
uaauaugcauagaaauaacu

SEQ ID NO: 639552 - RNA, 21 nt, Artificial Sequence
  Synthetic
uuaauaugcauagaaauaacu

SEQ ID NO: 639553 - RNA, 22 nt, Artificial Sequence
  Synthetic
uuuaauaugcauagaaauaacu

SEQ ID NO: 639554 - RNA, 23 nt, Artificial Sequence
  Synthetic
uuuuaauaugcauagaaauaacu

SEQ ID NO: 639555 - RNA, 24 nt, Artificial Sequence
  Synthetic
auuuuaauaugcauagaaauaacu

SEQ ID NO: 639556 - RNA, 18 nt, Artificial Sequence
  Synthetic
augcuaggggaaauaacu

SEQ ID NO: 639557 - RNA, 19 nt, Artificial Sequence
  Synthetic
gaugcuaggggaaauaacu

SEQ ID NO: 639558 - RNA, 20 nt, Artificial Sequence
  Synthetic
ugaugcuaggggaaauaacu

SEQ ID NO: 639559 - RNA, 21 nt, Artificial Sequence
  Synthetic
uugaugcuaggggaaauaacu

SEQ ID NO: 639560 - RNA, 22 nt, Artificial Sequence
  Synthetic
cuugaugcuaggggaaauaacu

SEQ ID NO: 639561 - RNA, 23 nt, Artificial Sequence
  Synthetic
ccuugaugcuaggggaaauaacu

SEQ ID NO: 639562 - RNA, 24 nt, Artificial Sequence
  Synthetic
cccuugaugcuaggggaaauaacu

SEQ ID NO: 639563 - RNA, 18 nt, Artificial Sequence
  Synthetic
gccauugcuuaaauaacu

SEQ ID NO: 639564 - RNA, 19 nt, Artificial Sequence
  Synthetic
ugccauugcuuaaauaacu

SEQ ID NO: 639565 - RNA, 20 nt, Artificial Sequence
  Synthetic
augccauugcuuaaauaacu

SEQ ID NO: 639566 - RNA, 21 nt, Artificial Sequence
  Synthetic
gaugccauugcuuaaauaacu

SEQ ID NO: 639567 - RNA, 22 nt, Artificial Sequence
  Synthetic
ugaugccauugcuuaaauaacu

SEQ ID NO: 639568 - RNA, 23 nt, Artificial Sequence
  Synthetic
cugaugccauugcuuaaauaacu

SEQ ID NO: 639569 - RNA, 24 nt, Artificial Sequence
  Synthetic
ucugaugccauugcuuaaauaacu

SEQ ID NO: 639570 - RNA, 18 nt, Artificial Sequence
  Synthetic
uccucauccacaauaacu

SEQ ID NO: 639571 - RNA, 19 nt, Artificial Sequence
  Synthetic
auccucauccacaauaacu

SEQ ID NO: 639572 - RNA, 20 nt, Artificial Sequence
  Synthetic
uauccucauccacaauaacu

SEQ ID NO: 639573 - RNA, 21 nt, Artificial Sequence
  Synthetic
auauccucauccacaauaacu

SEQ ID NO: 639574 - RNA, 22 nt, Artificial Sequence
  Synthetic
uauauccucauccacaauaacu

SEQ ID NO: 639575 - RNA, 23 nt, Artificial Sequence
  Synthetic
auauauccucauccacaauaacu

SEQ ID NO: 639576 - RNA, 24 nt, Artificial Sequence
  Synthetic
uauauauccucauccacaauaacu

SEQ ID NO: 639577 - RNA, 18 nt, Artificial Sequence
  Synthetic
cacuaccagcuaauaacu

SEQ ID NO: 639578 - RNA, 19 nt, Artificial Sequence
  Synthetic
ccacuaccagcuaauaacu

SEQ ID NO: 639579 - RNA, 20 nt, Artificial Sequence
  Synthetic
gccacuaccagcuaauaacu

SEQ ID NO: 639580 - RNA, 21 nt, Artificial Sequence
  Synthetic
ugccacuaccagcuaauaacu

SEQ ID NO: 639581 - RNA, 22 nt, Artificial Sequence
  Synthetic
augccacuaccagcuaauaacu

SEQ ID NO: 639582 - RNA, 23 nt, Artificial Sequence
  Synthetic
caugccacuaccagcuaauaacu

SEQ ID NO: 639583 - RNA, 24 nt, Artificial Sequence
  Synthetic
ucaugccacuaccagcuaauaacu

SEQ ID NO: 639584 - RNA, 18 nt, Artificial Sequence
  Synthetic
uuaugcuauaucauaacu

SEQ ID NO: 639585 - RNA, 19 nt, Artificial Sequence
  Synthetic
auuaugcuauaucauaacu

SEQ ID NO: 639586 - RNA, 20 nt, Artificial Sequence
  Synthetic
uauuaugcuauaucauaacu

SEQ ID NO: 639587 - RNA, 21 nt, Artificial Sequence
  Synthetic
cuauuaugcuauaucauaacu

SEQ ID NO: 639588 - RNA, 22 nt, Artificial Sequence
  Synthetic
acuauuaugcuauaucauaacu

SEQ ID NO: 639589 - RNA, 23 nt, Artificial Sequence
  Synthetic
aacuauuaugcuauaucauaacu

SEQ ID NO: 639590 - RNA, 24 nt, Artificial Sequence
  Synthetic
aaacuauuaugcuauaucauaacu

SEQ ID NO: 639591 - RNA, 18 nt, Artificial Sequence
  Synthetic
ggggagaggcucauaacu

SEQ ID NO: 639592 - RNA, 19 nt, Artificial Sequence
  Synthetic
aggggagaggcucauaacu

SEQ ID NO: 639593 - RNA, 20 nt, Artificial Sequence
  Synthetic
caggggagaggcucauaacu

SEQ ID NO: 639594 - RNA, 21 nt, Artificial Sequence
  Synthetic
gcaggggagaggcucauaacu

SEQ ID NO: 639595 - RNA, 22 nt, Artificial Sequence
  Synthetic
ggcaggggagaggcucauaacu

SEQ ID NO: 639596 - RNA, 23 nt, Artificial Sequence
  Synthetic
uggcaggggagaggcucauaacu

SEQ ID NO: 639597 - RNA, 24 nt, Artificial Sequence
  Synthetic
guggcaggggagaggcucauaacu

SEQ ID NO: 639598 - RNA, 18 nt, Artificial Sequence
  Synthetic
acagcaucugucauaacu

SEQ ID NO: 639599 - RNA, 19 nt, Artificial Sequence
  Synthetic
aacagcaucugucauaacu

SEQ ID NO: 639600 - RNA, 20 nt, Artificial Sequence
  Synthetic
uaacagcaucugucauaacu

SEQ ID NO: 639601 - RNA, 21 nt, Artificial Sequence
  Synthetic
auaacagcaucugucauaacu

SEQ ID NO: 639602 - RNA, 22 nt, Artificial Sequence
  Synthetic
aauaacagcaucugucauaacu

SEQ ID NO: 639603 - RNA, 23 nt, Artificial Sequence
  Synthetic
caauaacagcaucugucauaacu

SEQ ID NO: 639604 - RNA, 24 nt, Artificial Sequence
  Synthetic
ucaauaacagcaucugucauaacu

SEQ ID NO: 639605 - RNA, 18 nt, Artificial Sequence
  Synthetic
uacaauuucuucauaacu

SEQ ID NO: 639606 - RNA, 19 nt, Artificial Sequence
  Synthetic
cuacaauuucuucauaacu

SEQ ID NO: 639607 - RNA, 20 nt, Artificial Sequence
  Synthetic
acuacaauuucuucauaacu

SEQ ID NO: 639608 - RNA, 21 nt, Artificial Sequence
  Synthetic
uacuacaauuucuucauaacu

SEQ ID NO: 639609 - RNA, 22 nt, Artificial Sequence
  Synthetic
uuacuacaauuucuucauaacu

SEQ ID NO: 639610 - RNA, 23 nt, Artificial Sequence
  Synthetic
cuuacuacaauuucuucauaacu

SEQ ID NO: 639611 - RNA, 24 nt, Artificial Sequence
  Synthetic
gcuuacuacaauuucuucauaacu

SEQ ID NO: 639612 - RNA, 18 nt, Artificial Sequence
  Synthetic
ucucugcuuuucauaacu

SEQ ID NO: 639613 - RNA, 19 nt, Artificial Sequence
  Synthetic
aucucugcuuuucauaacu

SEQ ID NO: 639614 - RNA, 20 nt, Artificial Sequence
  Synthetic
aaucucugcuuuucauaacu

SEQ ID NO: 639615 - RNA, 21 nt, Artificial Sequence
  Synthetic
aaaucucugcuuuucauaacu

SEQ ID NO: 639616 - RNA, 22 nt, Artificial Sequence
  Synthetic
aaaaucucugcuuuucauaacu

SEQ ID NO: 639617 - RNA, 23 nt, Artificial Sequence
  Synthetic
uaaaaucucugcuuuucauaacu

SEQ ID NO: 639618 - RNA, 24 nt, Artificial Sequence
  Synthetic
uuaaaaucucugcuuuucauaacu

SEQ ID NO: 639619 - RNA, 18 nt, Artificial Sequence
  Synthetic
accuugucuaagauaacu

SEQ ID NO: 639620 - RNA, 19 nt, Artificial Sequence
  Synthetic
caccuugucuaagauaacu

SEQ ID NO: 639621 - RNA, 20 nt, Artificial Sequence
  Synthetic
gcaccuugucuaagauaacu

SEQ ID NO: 639622 - RNA, 21 nt, Artificial Sequence
  Synthetic
ugcaccuugucuaagauaacu

SEQ ID NO: 639623 - RNA, 22 nt, Artificial Sequence
  Synthetic
cugcaccuugucuaagauaacu

SEQ ID NO: 639624 - RNA, 23 nt, Artificial Sequence
  Synthetic
ccugcaccuugucuaagauaacu

SEQ ID NO: 639625 - RNA, 24 nt, Artificial Sequence
  Synthetic
uccugcaccuugucuaagauaacu

SEQ ID NO: 639626 - RNA, 18 nt, Artificial Sequence
  Synthetic
guugauaaacagauaacu

SEQ ID NO: 639627 - RNA, 19 nt, Artificial Sequence
  Synthetic
aguugauaaacagauaacu

SEQ ID NO: 639628 - RNA, 20 nt, Artificial Sequence
  Synthetic
caguugauaaacagauaacu

SEQ ID NO: 639629 - RNA, 21 nt, Artificial Sequence
  Synthetic
ucaguugauaaacagauaacu

SEQ ID NO: 639630 - RNA, 22 nt, Artificial Sequence
  Synthetic
gucaguugauaaacagauaacu

SEQ ID NO: 639631 - RNA, 23 nt, Artificial Sequence
  Synthetic
ggucaguugauaaacagauaacu

SEQ ID NO: 639632 - RNA, 24 nt, Artificial Sequence
  Synthetic
aggucaguugauaaacagauaacu

SEQ ID NO: 639633 - RNA, 18 nt, Artificial Sequence
  Synthetic
aggacugaaaauauaacu

SEQ ID NO: 639634 - RNA, 19 nt, Artificial Sequence
  Synthetic
uaggacugaaaauauaacu

SEQ ID NO: 639635 - RNA, 20 nt, Artificial Sequence
  Synthetic
uuaggacugaaaauauaacu

SEQ ID NO: 639636 - RNA, 21 nt, Artificial Sequence
  Synthetic
auuaggacugaaaauauaacu

SEQ ID NO: 639637 - RNA, 22 nt, Artificial Sequence
  Synthetic
uauuaggacugaaaauauaacu

SEQ ID NO: 639638 - RNA, 23 nt, Artificial Sequence
  Synthetic
auauuaggacugaaaauauaacu

SEQ ID NO: 639639 - RNA, 24 nt, Artificial Sequence
  Synthetic
aauauuaggacugaaaauauaacu

SEQ ID NO: 639640 - RNA, 18 nt, Artificial Sequence
  Synthetic
gcaguucuuaauauaacu

SEQ ID NO: 639641 - RNA, 19 nt, Artificial Sequence
  Synthetic
ugcaguucuuaauauaacu

SEQ ID NO: 639642 - RNA, 20 nt, Artificial Sequence
  Synthetic
uugcaguucuuaauauaacu

SEQ ID NO: 639643 - RNA, 21 nt, Artificial Sequence
  Synthetic
uuugcaguucuuaauauaacu

SEQ ID NO: 639644 - RNA, 22 nt, Artificial Sequence
  Synthetic
cuuugcaguucuuaauauaacu

SEQ ID NO: 639645 - RNA, 23 nt, Artificial Sequence
  Synthetic
acuuugcaguucuuaauauaacu

SEQ ID NO: 639646 - RNA, 24 nt, Artificial Sequence
  Synthetic
uacuuugcaguucuuaauauaacu

SEQ ID NO: 639647 - RNA, 18 nt, Artificial Sequence
  Synthetic
aggcugaguuguauaacu

SEQ ID NO: 639648 - RNA, 19 nt, Artificial Sequence
  Synthetic
gaggcugaguuguauaacu

SEQ ID NO: 639649 - RNA, 20 nt, Artificial Sequence
  Synthetic
agaggcugaguuguauaacu

SEQ ID NO: 639650 - RNA, 21 nt, Artificial Sequence
  Synthetic
gagaggcugaguuguauaacu

SEQ ID NO: 639651 - RNA, 22 nt, Artificial Sequence
  Synthetic
ggagaggcugaguuguauaacu

SEQ ID NO: 639652 - RNA, 23 nt, Artificial Sequence
  Synthetic
gggagaggcugaguuguauaacu

SEQ ID NO: 639653 - RNA, 24 nt, Artificial Sequence
  Synthetic
ugggagaggcugaguuguauaacu

SEQ ID NO: 639654 - RNA, 18 nt, Artificial Sequence
  Synthetic
uauaccaauuuuauaacu

SEQ ID NO: 639655 - RNA, 19 nt, Artificial Sequence
  Synthetic
uuauaccaauuuuauaacu

SEQ ID NO: 639656 - RNA, 20 nt, Artificial Sequence
  Synthetic
uuuauaccaauuuuauaacu

SEQ ID NO: 639657 - RNA, 21 nt, Artificial Sequence
  Synthetic
uuuuauaccaauuuuauaacu

SEQ ID NO: 639658 - RNA, 22 nt, Artificial Sequence
  Synthetic
cuuuuauaccaauuuuauaacu

SEQ ID NO: 639659 - RNA, 23 nt, Artificial Sequence
  Synthetic
ccuuuuauaccaauuuuauaacu

SEQ ID NO: 639660 - RNA, 24 nt, Artificial Sequence
  Synthetic
accuuuuauaccaauuuuauaacu

SEQ ID NO: 639661 - RNA, 18 nt, Artificial Sequence
  Synthetic
caccaagauuuuauaacu

SEQ ID NO: 639662 - RNA, 19 nt, Artificial Sequence
  Synthetic
ucaccaagauuuuauaacu

SEQ ID NO: 639663 - RNA, 20 nt, Artificial Sequence
  Synthetic
aucaccaagauuuuauaacu

SEQ ID NO: 639664 - RNA, 21 nt, Artificial Sequence
  Synthetic
aaucaccaagauuuuauaacu

SEQ ID NO: 639665 - RNA, 22 nt, Artificial Sequence
  Synthetic
gaaucaccaagauuuuauaacu

SEQ ID NO: 639666 - RNA, 23 nt, Artificial Sequence
  Synthetic
agaaucaccaagauuuuauaacu

SEQ ID NO: 639667 - RNA, 24 nt, Artificial Sequence
  Synthetic
cagaaucaccaagauuuuauaacu

SEQ ID NO: 639668 - RNA, 18 nt, Artificial Sequence
  Synthetic
ugacggacaugacuaacu

SEQ ID NO: 639669 - RNA, 19 nt, Artificial Sequence
  Synthetic
gugacggacaugacuaacu

SEQ ID NO: 639670 - RNA, 20 nt, Artificial Sequence
  Synthetic
agugacggacaugacuaacu

SEQ ID NO: 639671 - RNA, 21 nt, Artificial Sequence
  Synthetic
gagugacggacaugacuaacu

SEQ ID NO: 639672 - RNA, 22 nt, Artificial Sequence
  Synthetic
agagugacggacaugacuaacu

SEQ ID NO: 639673 - RNA, 23 nt, Artificial Sequence
  Synthetic
aagagugacggacaugacuaacu

SEQ ID NO: 639674 - RNA, 24 nt, Artificial Sequence
  Synthetic
gaagagugacggacaugacuaacu

SEQ ID NO: 639675 - RNA, 18 nt, Artificial Sequence
  Synthetic
aaguaacagugacuaacu

SEQ ID NO: 639676 - RNA, 19 nt, Artificial Sequence
  Synthetic
uaaguaacagugacuaacu

SEQ ID NO: 639677 - RNA, 20 nt, Artificial Sequence
  Synthetic
uuaaguaacagugacuaacu

SEQ ID NO: 639678 - RNA, 21 nt, Artificial Sequence
  Synthetic
uuuaaguaacagugacuaacu

SEQ ID NO: 639679 - RNA, 22 nt, Artificial Sequence
  Synthetic
guuuaaguaacagugacuaacu

SEQ ID NO: 639680 - RNA, 23 nt, Artificial Sequence
  Synthetic
uguuuaaguaacagugacuaacu

SEQ ID NO: 639681 - RNA, 24 nt, Artificial Sequence
  Synthetic
guguuuaaguaacagugacuaacu

SEQ ID NO: 639682 - RNA, 18 nt, Artificial Sequence
  Synthetic
auugaucuauggcuaacu

SEQ ID NO: 639683 - RNA, 19 nt, Artificial Sequence
  Synthetic
uauugaucuauggcuaacu

SEQ ID NO: 639684 - RNA, 20 nt, Artificial Sequence
  Synthetic
auauugaucuauggcuaacu

SEQ ID NO: 639685 - RNA, 21 nt, Artificial Sequence
  Synthetic
gauauugaucuauggcuaacu

SEQ ID NO: 639686 - RNA, 22 nt, Artificial Sequence
  Synthetic
ggauauugaucuauggcuaacu

SEQ ID NO: 639687 - RNA, 23 nt, Artificial Sequence
  Synthetic
gggauauugaucuauggcuaacu

SEQ ID NO: 639688 - RNA, 24 nt, Artificial Sequence
  Synthetic
ggggauauugaucuauggcuaacu

SEQ ID NO: 639689 - RNA, 18 nt, Artificial Sequence
  Synthetic
auuccaaguaaaguaacu

SEQ ID NO: 639690 - RNA, 19 nt, Artificial Sequence
  Synthetic
uauuccaaguaaaguaacu

SEQ ID NO: 639691 - RNA, 20 nt, Artificial Sequence
  Synthetic
cuauuccaaguaaaguaacu

SEQ ID NO: 639692 - RNA, 21 nt, Artificial Sequence
  Synthetic
acuauuccaaguaaaguaacu

SEQ ID NO: 639693 - RNA, 22 nt, Artificial Sequence
  Synthetic
cacuauuccaaguaaaguaacu

SEQ ID NO: 639694 - RNA, 23 nt, Artificial Sequence
  Synthetic
ccacuauuccaaguaaaguaacu

SEQ ID NO: 639695 - RNA, 24 nt, Artificial Sequence
  Synthetic
gccacuauuccaaguaaaguaacu

SEQ ID NO: 639696 - RNA, 18 nt, Artificial Sequence
  Synthetic
auuguaagugaaguaacu

SEQ ID NO: 639697 - RNA, 19 nt, Artificial Sequence
  Synthetic
cauuguaagugaaguaacu

SEQ ID NO: 639698 - RNA, 20 nt, Artificial Sequence
  Synthetic
ucauuguaagugaaguaacu

SEQ ID NO: 639699 - RNA, 21 nt, Artificial Sequence
  Synthetic
aucauuguaagugaaguaacu

SEQ ID NO: 639700 - RNA, 22 nt, Artificial Sequence
  Synthetic
uaucauuguaagugaaguaacu

SEQ ID NO: 639701 - RNA, 23 nt, Artificial Sequence
  Synthetic
cuaucauuguaagugaaguaacu

SEQ ID NO: 639702 - RNA, 24 nt, Artificial Sequence
  Synthetic
acuaucauuguaagugaaguaacu

SEQ ID NO: 639703 - RNA, 18 nt, Artificial Sequence
  Synthetic
caucagagcuaaguaacu

SEQ ID NO: 639704 - RNA, 19 nt, Artificial Sequence
  Synthetic
acaucagagcuaaguaacu

SEQ ID NO: 639705 - RNA, 20 nt, Artificial Sequence
  Synthetic
cacaucagagcuaaguaacu

SEQ ID NO: 639706 - RNA, 21 nt, Artificial Sequence
  Synthetic
acacaucagagcuaaguaacu

SEQ ID NO: 639707 - RNA, 22 nt, Artificial Sequence
  Synthetic
uacacaucagagcuaaguaacu

SEQ ID NO: 639708 - RNA, 23 nt, Artificial Sequence
  Synthetic
auacacaucagagcuaaguaacu

SEQ ID NO: 639709 - RNA, 24 nt, Artificial Sequence
  Synthetic
aauacacaucagagcuaaguaacu

SEQ ID NO: 639710 - RNA, 18 nt, Artificial Sequence
  Synthetic
gcccuuugcuaaguaacu

SEQ ID NO: 639711 - RNA, 19 nt, Artificial Sequence
  Synthetic
ugcccuuugcuaaguaacu

SEQ ID NO: 639712 - RNA, 20 nt, Artificial Sequence
  Synthetic
augcccuuugcuaaguaacu

SEQ ID NO: 639713 - RNA, 21 nt, Artificial Sequence
  Synthetic
caugcccuuugcuaaguaacu

SEQ ID NO: 639714 - RNA, 22 nt, Artificial Sequence
  Synthetic
ccaugcccuuugcuaaguaacu

SEQ ID NO: 639715 - RNA, 23 nt, Artificial Sequence
  Synthetic
uccaugcccuuugcuaaguaacu

SEQ ID NO: 639716 - RNA, 24 nt, Artificial Sequence
  Synthetic
auccaugcccuuugcuaaguaacu

SEQ ID NO: 639717 - RNA, 18 nt, Artificial Sequence
  Synthetic
uguucuucagcaguaacu

SEQ ID NO: 639718 - RNA, 19 nt, Artificial Sequence
  Synthetic
guguucuucagcaguaacu

SEQ ID NO: 639719 - RNA, 20 nt, Artificial Sequence
  Synthetic
aguguucuucagcaguaacu

SEQ ID NO: 639720 - RNA, 21 nt, Artificial Sequence
  Synthetic
aaguguucuucagcaguaacu

SEQ ID NO: 639721 - RNA, 22 nt, Artificial Sequence
  Synthetic
uaaguguucuucagcaguaacu

SEQ ID NO: 639722 - RNA, 23 nt, Artificial Sequence
  Synthetic
cuaaguguucuucagcaguaacu

SEQ ID NO: 639723 - RNA, 24 nt, Artificial Sequence
  Synthetic
ucuaaguguucuucagcaguaacu

SEQ ID NO: 639724 - RNA, 18 nt, Artificial Sequence
  Synthetic
gaaaccacuuccguaacu

SEQ ID NO: 639725 - RNA, 19 nt, Artificial Sequence
  Synthetic
ugaaaccacuuccguaacu

SEQ ID NO: 639726 - RNA, 20 nt, Artificial Sequence
  Synthetic
uugaaaccacuuccguaacu

SEQ ID NO: 639727 - RNA, 21 nt, Artificial Sequence
  Synthetic
auugaaaccacuuccguaacu

SEQ ID NO: 639728 - RNA, 22 nt, Artificial Sequence
  Synthetic
uauugaaaccacuuccguaacu

SEQ ID NO: 639729 - RNA, 23 nt, Artificial Sequence
  Synthetic
auauugaaaccacuuccguaacu

SEQ ID NO: 639730 - RNA, 24 nt, Artificial Sequence
  Synthetic
cauauugaaaccacuuccguaacu

SEQ ID NO: 639731 - RNA, 18 nt, Artificial Sequence
  Synthetic
uuugguuaauauguaacu

SEQ ID NO: 639732 - RNA, 19 nt, Artificial Sequence
  Synthetic
auuugguuaauauguaacu

SEQ ID NO: 639733 - RNA, 20 nt, Artificial Sequence
  Synthetic
uauuugguuaauauguaacu

SEQ ID NO: 639734 - RNA, 21 nt, Artificial Sequence
  Synthetic
guauuugguuaauauguaacu

SEQ ID NO: 639735 - RNA, 22 nt, Artificial Sequence
  Synthetic
uguauuugguuaauauguaacu

SEQ ID NO: 639736 - RNA, 23 nt, Artificial Sequence
  Synthetic
cuguauuugguuaauauguaacu

SEQ ID NO: 639737 - RNA, 24 nt, Artificial Sequence
  Synthetic
acuguauuugguuaauauguaacu

SEQ ID NO: 639738 - RNA, 18 nt, Artificial Sequence
  Synthetic
ccuagccuguauguaacu

SEQ ID NO: 639739 - RNA, 19 nt, Artificial Sequence
  Synthetic
cccuagccuguauguaacu

SEQ ID NO: 639740 - RNA, 20 nt, Artificial Sequence
  Synthetic
ucccuagccuguauguaacu

SEQ ID NO: 639741 - RNA, 21 nt, Artificial Sequence
  Synthetic
cucccuagccuguauguaacu

SEQ ID NO: 639742 - RNA, 22 nt, Artificial Sequence
  Synthetic
acucccuagccuguauguaacu

SEQ ID NO: 639743 - RNA, 23 nt, Artificial Sequence
  Synthetic
cacucccuagccuguauguaacu

SEQ ID NO: 639744 - RNA, 24 nt, Artificial Sequence
  Synthetic
ccacucccuagccuguauguaacu

SEQ ID NO: 639745 - RNA, 18 nt, Artificial Sequence
  Synthetic
gcaacaugaacuguaacu

SEQ ID NO: 639746 - RNA, 19 nt, Artificial Sequence
  Synthetic
agcaacaugaacuguaacu

SEQ ID NO: 639747 - RNA, 20 nt, Artificial Sequence
  Synthetic
cagcaacaugaacuguaacu

SEQ ID NO: 639748 - RNA, 21 nt, Artificial Sequence
  Synthetic
acagcaacaugaacuguaacu

SEQ ID NO: 639749 - RNA, 22 nt, Artificial Sequence
  Synthetic
aacagcaacaugaacuguaacu

SEQ ID NO: 639750 - RNA, 23 nt, Artificial Sequence
  Synthetic
gaacagcaacaugaacuguaacu

SEQ ID NO: 639751 - RNA, 24 nt, Artificial Sequence
  Synthetic
ggaacagcaacaugaacuguaacu

SEQ ID NO: 639752 - RNA, 18 nt, Artificial Sequence
  Synthetic
guuuucaccuguguaacu

SEQ ID NO: 639753 - RNA, 19 nt, Artificial Sequence
  Synthetic
aguuuucaccuguguaacu

SEQ ID NO: 639754 - RNA, 20 nt, Artificial Sequence
  Synthetic
aaguuuucaccuguguaacu

SEQ ID NO: 639755 - RNA, 21 nt, Artificial Sequence
  Synthetic
aaaguuuucaccuguguaacu

SEQ ID NO: 639756 - RNA, 22 nt, Artificial Sequence
  Synthetic
aaaaguuuucaccuguguaacu

SEQ ID NO: 639757 - RNA, 23 nt, Artificial Sequence
  Synthetic
caaaaguuuucaccuguguaacu

SEQ ID NO: 639758 - RNA, 24 nt, Artificial Sequence
  Synthetic
ucaaaaguuuucaccuguguaacu

SEQ ID NO: 639759 - RNA, 18 nt, Artificial Sequence
  Synthetic
uuucuguuaguuguaacu

SEQ ID NO: 639760 - RNA, 19 nt, Artificial Sequence
  Synthetic
cuuucuguuaguuguaacu

SEQ ID NO: 639761 - RNA, 20 nt, Artificial Sequence
  Synthetic
acuuucuguuaguuguaacu

SEQ ID NO: 639762 - RNA, 21 nt, Artificial Sequence
  Synthetic
cacuuucuguuaguuguaacu

SEQ ID NO: 639763 - RNA, 22 nt, Artificial Sequence
  Synthetic
ucacuuucuguuaguuguaacu

SEQ ID NO: 639764 - RNA, 23 nt, Artificial Sequence
  Synthetic
gucacuuucuguuaguuguaacu

SEQ ID NO: 639765 - RNA, 24 nt, Artificial Sequence
  Synthetic
agucacuuucuguuaguuguaacu

SEQ ID NO: 639766 - RNA, 18 nt, Artificial Sequence
  Synthetic
aaagaaguuuuuguaacu

SEQ ID NO: 639767 - RNA, 19 nt, Artificial Sequence
  Synthetic
aaaagaaguuuuuguaacu

SEQ ID NO: 639768 - RNA, 20 nt, Artificial Sequence
  Synthetic
gaaaagaaguuuuuguaacu

SEQ ID NO: 639769 - RNA, 21 nt, Artificial Sequence
  Synthetic
agaaaagaaguuuuuguaacu

SEQ ID NO: 639770 - RNA, 22 nt, Artificial Sequence
  Synthetic
uagaaaagaaguuuuuguaacu

SEQ ID NO: 639771 - RNA, 23 nt, Artificial Sequence
  Synthetic
cuagaaaagaaguuuuuguaacu

SEQ ID NO: 639772 - RNA, 24 nt, Artificial Sequence
  Synthetic
ucuagaaaagaaguuuuuguaacu

SEQ ID NO: 639773 - RNA, 18 nt, Artificial Sequence
  Synthetic
aaauacaaaaaauuaacu

SEQ ID NO: 639774 - RNA, 19 nt, Artificial Sequence
  Synthetic
aaaauacaaaaaauuaacu

SEQ ID NO: 639775 - RNA, 20 nt, Artificial Sequence
  Synthetic
aaaaauacaaaaaauuaacu

SEQ ID NO: 639776 - RNA, 21 nt, Artificial Sequence
  Synthetic
caaaaauacaaaaaauuaacu

SEQ ID NO: 639777 - RNA, 22 nt, Artificial Sequence
  Synthetic
ccaaaaauacaaaaaauuaacu

SEQ ID NO: 639778 - RNA, 23 nt, Artificial Sequence
  Synthetic
accaaaaauacaaaaaauuaacu

SEQ ID NO: 639779 - RNA, 24 nt, Artificial Sequence
  Synthetic
uaccaaaaauacaaaaaauuaacu

SEQ ID NO: 639780 - RNA, 18 nt, Artificial Sequence
  Synthetic
gacauaaaacaauuaacu

SEQ ID NO: 639781 - RNA, 19 nt, Artificial Sequence
  Synthetic
ugacauaaaacaauuaacu

SEQ ID NO: 639782 - RNA, 20 nt, Artificial Sequence
  Synthetic
augacauaaaacaauuaacu

SEQ ID NO: 639783 - RNA, 21 nt, Artificial Sequence
  Synthetic
uaugacauaaaacaauuaacu

SEQ ID NO: 639784 - RNA, 22 nt, Artificial Sequence
  Synthetic
auaugacauaaaacaauuaacu

SEQ ID NO: 639785 - RNA, 23 nt, Artificial Sequence
  Synthetic
aauaugacauaaaacaauuaacu

SEQ ID NO: 639786 - RNA, 24 nt, Artificial Sequence
  Synthetic
aaauaugacauaaaacaauuaacu

SEQ ID NO: 639787 - RNA, 18 nt, Artificial Sequence
  Synthetic
uugaaaagguaauuaacu

SEQ ID NO: 639788 - RNA, 19 nt, Artificial Sequence
  Synthetic
uuugaaaagguaauuaacu

SEQ ID NO: 639789 - RNA, 20 nt, Artificial Sequence
  Synthetic
uuuugaaaagguaauuaacu

SEQ ID NO: 639790 - RNA, 21 nt, Artificial Sequence
  Synthetic
auuuugaaaagguaauuaacu

SEQ ID NO: 639791 - RNA, 22 nt, Artificial Sequence
  Synthetic
uauuuugaaaagguaauuaacu

SEQ ID NO: 639792 - RNA, 23 nt, Artificial Sequence
  Synthetic
auauuuugaaaagguaauuaacu

SEQ ID NO: 639793 - RNA, 24 nt, Artificial Sequence
  Synthetic
uauauuuugaaaagguaauuaacu

SEQ ID NO: 639794 - RNA, 18 nt, Artificial Sequence
  Synthetic
aagccugcaacauuaacu

SEQ ID NO: 639795 - RNA, 19 nt, Artificial Sequence
  Synthetic
caagccugcaacauuaacu

SEQ ID NO: 639796 - RNA, 20 nt, Artificial Sequence
  Synthetic
ccaagccugcaacauuaacu

SEQ ID NO: 639797 - RNA, 21 nt, Artificial Sequence
  Synthetic
uccaagccugcaacauuaacu

SEQ ID NO: 639798 - RNA, 22 nt, Artificial Sequence
  Synthetic
auccaagccugcaacauuaacu

SEQ ID NO: 639799 - RNA, 23 nt, Artificial Sequence
  Synthetic
uauccaagccugcaacauuaacu

SEQ ID NO: 639800 - RNA, 24 nt, Artificial Sequence
  Synthetic
guauccaagccugcaacauuaacu

SEQ ID NO: 639801 - RNA, 18 nt, Artificial Sequence
  Synthetic
ccagauagucuauuaacu

SEQ ID NO: 639802 - RNA, 19 nt, Artificial Sequence
  Synthetic
cccagauagucuauuaacu

SEQ ID NO: 639803 - RNA, 20 nt, Artificial Sequence
  Synthetic
acccagauagucuauuaacu

SEQ ID NO: 639804 - RNA, 21 nt, Artificial Sequence
  Synthetic
cacccagauagucuauuaacu

SEQ ID NO: 639805 - RNA, 22 nt, Artificial Sequence
  Synthetic
ucacccagauagucuauuaacu

SEQ ID NO: 639806 - RNA, 23 nt, Artificial Sequence
  Synthetic
aucacccagauagucuauuaacu

SEQ ID NO: 639807 - RNA, 24 nt, Artificial Sequence
  Synthetic
caucacccagauagucuauuaacu

SEQ ID NO: 639808 - RNA, 18 nt, Artificial Sequence
  Synthetic
uucaauauauuauuaacu

SEQ ID NO: 639809 - RNA, 19 nt, Artificial Sequence
  Synthetic
auucaauauauuauuaacu

SEQ ID NO: 639810 - RNA, 20 nt, Artificial Sequence
  Synthetic
cauucaauauauuauuaacu

SEQ ID NO: 639811 - RNA, 21 nt, Artificial Sequence
  Synthetic
ucauucaauauauuauuaacu

SEQ ID NO: 639812 - RNA, 22 nt, Artificial Sequence
  Synthetic
uucauucaauauauuauuaacu

SEQ ID NO: 639813 - RNA, 23 nt, Artificial Sequence
  Synthetic
uuucauucaauauauuauuaacu

SEQ ID NO: 639814 - RNA, 24 nt, Artificial Sequence
  Synthetic
uuuucauucaauauauuauuaacu

SEQ ID NO: 639815 - RNA, 18 nt, Artificial Sequence
  Synthetic
ccgugcuuggucuuaacu

SEQ ID NO: 639816 - RNA, 19 nt, Artificial Sequence
  Synthetic
uccgugcuuggucuuaacu

SEQ ID NO: 639817 - RNA, 20 nt, Artificial Sequence
  Synthetic
guccgugcuuggucuuaacu

SEQ ID NO: 639818 - RNA, 21 nt, Artificial Sequence
  Synthetic
aguccgugcuuggucuuaacu

SEQ ID NO: 639819 - RNA, 22 nt, Artificial Sequence
  Synthetic
caguccgugcuuggucuuaacu

SEQ ID NO: 639820 - RNA, 23 nt, Artificial Sequence
  Synthetic
acaguccgugcuuggucuuaacu

SEQ ID NO: 639821 - RNA, 24 nt, Artificial Sequence
  Synthetic
uacaguccgugcuuggucuuaacu

SEQ ID NO: 639822 - RNA, 18 nt, Artificial Sequence
  Synthetic
uacauacaguucuuaacu

SEQ ID NO: 639823 - RNA, 19 nt, Artificial Sequence
  Synthetic
auacauacaguucuuaacu

SEQ ID NO: 639824 - RNA, 20 nt, Artificial Sequence
  Synthetic
uauacauacaguucuuaacu

SEQ ID NO: 639825 - RNA, 21 nt, Artificial Sequence
  Synthetic
uuauacauacaguucuuaacu

SEQ ID NO: 639826 - RNA, 22 nt, Artificial Sequence
  Synthetic
uuuauacauacaguucuuaacu

SEQ ID NO: 639827 - RNA, 23 nt, Artificial Sequence
  Synthetic
cuuuauacauacaguucuuaacu

SEQ ID NO: 639828 - RNA, 24 nt, Artificial Sequence
  Synthetic
acuuuauacauacaguucuuaacu

SEQ ID NO: 639829 - RNA, 18 nt, Artificial Sequence
  Synthetic
ugauuagguggguuaacu

SEQ ID NO: 639830 - RNA, 19 nt, Artificial Sequence
  Synthetic
augauuagguggguuaacu

SEQ ID NO: 639831 - RNA, 20 nt, Artificial Sequence
  Synthetic
uaugauuagguggguuaacu

SEQ ID NO: 639832 - RNA, 21 nt, Artificial Sequence
  Synthetic
auaugauuagguggguuaacu

SEQ ID NO: 639833 - RNA, 22 nt, Artificial Sequence
  Synthetic
aauaugauuagguggguuaacu

SEQ ID NO: 639834 - RNA, 23 nt, Artificial Sequence
  Synthetic
aaauaugauuagguggguuaacu

SEQ ID NO: 639835 - RNA, 24 nt, Artificial Sequence
  Synthetic
gaaauaugauuagguggguuaacu

SEQ ID NO: 639836 - RNA, 18 nt, Artificial Sequence
  Synthetic
aaaauucucccuuuaacu

SEQ ID NO: 639837 - RNA, 19 nt, Artificial Sequence
  Synthetic
uaaaauucucccuuuaacu

SEQ ID NO: 639838 - RNA, 20 nt, Artificial Sequence
  Synthetic
cuaaaauucucccuuuaacu

SEQ ID NO: 639839 - RNA, 21 nt, Artificial Sequence
  Synthetic
ucuaaaauucucccuuuaacu

SEQ ID NO: 639840 - RNA, 22 nt, Artificial Sequence
  Synthetic
cucuaaaauucucccuuuaacu

SEQ ID NO: 639841 - RNA, 23 nt, Artificial Sequence
  Synthetic
acucuaaaauucucccuuuaacu

SEQ ID NO: 639842 - RNA, 24 nt, Artificial Sequence
  Synthetic
aacucuaaaauucucccuuuaacu

SEQ ID NO: 639843 - RNA, 18 nt, Artificial Sequence
  Synthetic
gacuuuguaucuuuaacu

SEQ ID NO: 639844 - RNA, 19 nt, Artificial Sequence
  Synthetic
ugacuuuguaucuuuaacu

SEQ ID NO: 639845 - RNA, 20 nt, Artificial Sequence
  Synthetic
cugacuuuguaucuuuaacu

SEQ ID NO: 639846 - RNA, 21 nt, Artificial Sequence
  Synthetic
acugacuuuguaucuuuaacu

SEQ ID NO: 639847 - RNA, 22 nt, Artificial Sequence
  Synthetic
uacugacuuuguaucuuuaacu

SEQ ID NO: 639848 - RNA, 23 nt, Artificial Sequence
  Synthetic
uuacugacuuuguaucuuuaacu

SEQ ID NO: 639849 - RNA, 24 nt, Artificial Sequence
  Synthetic
cuuacugacuuuguaucuuuaacu

SEQ ID NO: 639850 - RNA, 18 nt, Artificial Sequence
  Synthetic
cagauucaacuuuuaacu

SEQ ID NO: 639851 - RNA, 19 nt, Artificial Sequence
  Synthetic
acagauucaacuuuuaacu

SEQ ID NO: 639852 - RNA, 20 nt, Artificial Sequence
  Synthetic
uacagauucaacuuuuaacu

SEQ ID NO: 639853 - RNA, 21 nt, Artificial Sequence
  Synthetic
cuacagauucaacuuuuaacu

SEQ ID NO: 639854 - RNA, 22 nt, Artificial Sequence
  Synthetic
acuacagauucaacuuuuaacu

SEQ ID NO: 639855 - RNA, 23 nt, Artificial Sequence
  Synthetic
cacuacagauucaacuuuuaacu

SEQ ID NO: 639856 - RNA, 24 nt, Artificial Sequence
  Synthetic
gcacuacagauucaacuuuuaacu

SEQ ID NO: 639857 - RNA, 18 nt, Artificial Sequence
  Synthetic
ggcuugucuuuuuuaacu

SEQ ID NO: 639858 - RNA, 19 nt, Artificial Sequence
  Synthetic
gggcuugucuuuuuuaacu

SEQ ID NO: 639859 - RNA, 20 nt, Artificial Sequence
  Synthetic
ugggcuugucuuuuuuaacu

SEQ ID NO: 639860 - RNA, 21 nt, Artificial Sequence
  Synthetic
augggcuugucuuuuuuaacu

SEQ ID NO: 639861 - RNA, 22 nt, Artificial Sequence
  Synthetic
caugggcuugucuuuuuuaacu

SEQ ID NO: 639862 - RNA, 23 nt, Artificial Sequence
  Synthetic
acaugggcuugucuuuuuuaacu

SEQ ID NO: 639863 - RNA, 24 nt, Artificial Sequence
  Synthetic
cacaugggcuugucuuuuuuaacu

SEQ ID NO: 639864 - RNA, 18 nt, Artificial Sequence
  Synthetic
uuuuaguguuuuuuaacu

SEQ ID NO: 639865 - RNA, 19 nt, Artificial Sequence
  Synthetic
guuuuaguguuuuuuaacu

SEQ ID NO: 639866 - RNA, 20 nt, Artificial Sequence
  Synthetic
aguuuuaguguuuuuuaacu

SEQ ID NO: 639867 - RNA, 21 nt, Artificial Sequence
  Synthetic
uaguuuuaguguuuuuuaacu

SEQ ID NO: 639868 - RNA, 22 nt, Artificial Sequence
  Synthetic
uuaguuuuaguguuuuuuaacu

SEQ ID NO: 639869 - RNA, 23 nt, Artificial Sequence
  Synthetic
uuuaguuuuaguguuuuuuaacu

SEQ ID NO: 639870 - RNA, 24 nt, Artificial Sequence
  Synthetic
uuuuaguuuuaguguuuuuuaacu

SEQ ID NO: 639871 - RNA, 18 nt, Artificial Sequence
  Synthetic
aauaguauggaaaacacu

SEQ ID NO: 639872 - RNA, 19 nt, Artificial Sequence
  Synthetic
aaauaguauggaaaacacu

SEQ ID NO: 639873 - RNA, 20 nt, Artificial Sequence
  Synthetic
aaaauaguauggaaaacacu

SEQ ID NO: 639874 - RNA, 21 nt, Artificial Sequence
  Synthetic
aaaaauaguauggaaaacacu

SEQ ID NO: 639875 - RNA, 22 nt, Artificial Sequence
  Synthetic
gaaaaauaguauggaaaacacu

SEQ ID NO: 639876 - RNA, 23 nt, Artificial Sequence
  Synthetic
agaaaaauaguauggaaaacacu

SEQ ID NO: 639877 - RNA, 24 nt, Artificial Sequence
  Synthetic
cagaaaaauaguauggaaaacacu

SEQ ID NO: 639878 - RNA, 18 nt, Artificial Sequence
  Synthetic
ugagcuacguaaaacacu

SEQ ID NO: 639879 - RNA, 19 nt, Artificial Sequence
  Synthetic
uugagcuacguaaaacacu

SEQ ID NO: 639880 - RNA, 20 nt, Artificial Sequence
  Synthetic
auugagcuacguaaaacacu

SEQ ID NO: 639881 - RNA, 21 nt, Artificial Sequence
  Synthetic
uauugagcuacguaaaacacu

SEQ ID NO: 639882 - RNA, 22 nt, Artificial Sequence
  Synthetic
guauugagcuacguaaaacacu

SEQ ID NO: 639883 - RNA, 23 nt, Artificial Sequence
  Synthetic
aguauugagcuacguaaaacacu

SEQ ID NO: 639884 - RNA, 24 nt, Artificial Sequence
  Synthetic
aaguauugagcuacguaaaacacu

SEQ ID NO: 639885 - RNA, 18 nt, Artificial Sequence
  Synthetic
aaauuagaaacaaacacu

SEQ ID NO: 639886 - RNA, 19 nt, Artificial Sequence
  Synthetic
aaaauuagaaacaaacacu

SEQ ID NO: 639887 - RNA, 20 nt, Artificial Sequence
  Synthetic
gaaaauuagaaacaaacacu

SEQ ID NO: 639888 - RNA, 21 nt, Artificial Sequence
  Synthetic
ggaaaauuagaaacaaacacu

SEQ ID NO: 639889 - RNA, 22 nt, Artificial Sequence
  Synthetic
uggaaaauuagaaacaaacacu

SEQ ID NO: 639890 - RNA, 23 nt, Artificial Sequence
  Synthetic
uuggaaaauuagaaacaaacacu

SEQ ID NO: 639891 - RNA, 24 nt, Artificial Sequence
  Synthetic
guuggaaaauuagaaacaaacacu

SEQ ID NO: 639892 - RNA, 18 nt, Artificial Sequence
  Synthetic
uuuucauguccaaacacu

SEQ ID NO: 639893 - RNA, 19 nt, Artificial Sequence
  Synthetic
auuuucauguccaaacacu

SEQ ID NO: 639894 - RNA, 20 nt, Artificial Sequence
  Synthetic
gauuuucauguccaaacacu

SEQ ID NO: 639895 - RNA, 21 nt, Artificial Sequence
  Synthetic
agauuuucauguccaaacacu

SEQ ID NO: 639896 - RNA, 22 nt, Artificial Sequence
  Synthetic
gagauuuucauguccaaacacu

SEQ ID NO: 639897 - RNA, 23 nt, Artificial Sequence
  Synthetic
ggagauuuucauguccaaacacu

SEQ ID NO: 639898 - RNA, 24 nt, Artificial Sequence
  Synthetic
aggagauuuucauguccaaacacu

SEQ ID NO: 639899 - RNA, 18 nt, Artificial Sequence
  Synthetic
cacuauaagauaaacacu

SEQ ID NO: 639900 - RNA, 19 nt, Artificial Sequence
  Synthetic
ucacuauaagauaaacacu

SEQ ID NO: 639901 - RNA, 20 nt, Artificial Sequence
  Synthetic
uucacuauaagauaaacacu

SEQ ID NO: 639902 - RNA, 21 nt, Artificial Sequence
  Synthetic
auucacuauaagauaaacacu

SEQ ID NO: 639903 - RNA, 22 nt, Artificial Sequence
  Synthetic
uauucacuauaagauaaacacu

SEQ ID NO: 639904 - RNA, 23 nt, Artificial Sequence
  Synthetic
auauucacuauaagauaaacacu

SEQ ID NO: 639905 - RNA, 24 nt, Artificial Sequence
  Synthetic
cauauucacuauaagauaaacacu

SEQ ID NO: 639906 - RNA, 18 nt, Artificial Sequence
  Synthetic
accuauaaucccaacacu

SEQ ID NO: 639907 - RNA, 19 nt, Artificial Sequence
  Synthetic
caccuauaaucccaacacu

SEQ ID NO: 639908 - RNA, 20 nt, Artificial Sequence
  Synthetic
acaccuauaaucccaacacu

SEQ ID NO: 639909 - RNA, 21 nt, Artificial Sequence
  Synthetic
cacaccuauaaucccaacacu

SEQ ID NO: 639910 - RNA, 22 nt, Artificial Sequence
  Synthetic
ucacaccuauaaucccaacacu

SEQ ID NO: 639911 - RNA, 23 nt, Artificial Sequence
  Synthetic
aucacaccuauaaucccaacacu

SEQ ID NO: 639912 - RNA, 24 nt, Artificial Sequence
  Synthetic
gaucacaccuauaaucccaacacu

SEQ ID NO: 639913 - RNA, 18 nt, Artificial Sequence
  Synthetic
ugcuaauuucucaacacu

SEQ ID NO: 639914 - RNA, 19 nt, Artificial Sequence
  Synthetic
augcuaauuucucaacacu

SEQ ID NO: 639915 - RNA, 20 nt, Artificial Sequence
  Synthetic
aaugcuaauuucucaacacu

SEQ ID NO: 639916 - RNA, 21 nt, Artificial Sequence
  Synthetic
aaaugcuaauuucucaacacu

SEQ ID NO: 639917 - RNA, 22 nt, Artificial Sequence
  Synthetic
caaaugcuaauuucucaacacu

SEQ ID NO: 639918 - RNA, 23 nt, Artificial Sequence
  Synthetic
acaaaugcuaauuucucaacacu

SEQ ID NO: 639919 - RNA, 24 nt, Artificial Sequence
  Synthetic
aacaaaugcuaauuucucaacacu

SEQ ID NO: 639920 - RNA, 18 nt, Artificial Sequence
  Synthetic
ugauuuucuuucaacacu

SEQ ID NO: 639921 - RNA, 19 nt, Artificial Sequence
  Synthetic
uugauuuucuuucaacacu

SEQ ID NO: 639922 - RNA, 20 nt, Artificial Sequence
  Synthetic
uuugauuuucuuucaacacu

SEQ ID NO: 639923 - RNA, 21 nt, Artificial Sequence
  Synthetic
auuugauuuucuuucaacacu

SEQ ID NO: 639924 - RNA, 22 nt, Artificial Sequence
  Synthetic
gauuugauuuucuuucaacacu

SEQ ID NO: 639925 - RNA, 23 nt, Artificial Sequence
  Synthetic
agauuugauuuucuuucaacacu

SEQ ID NO: 639926 - RNA, 24 nt, Artificial Sequence
  Synthetic
gagauuugauuuucuuucaacacu

SEQ ID NO: 639927 - RNA, 18 nt, Artificial Sequence
  Synthetic
cuacuacaagagaacacu

SEQ ID NO: 639928 - RNA, 19 nt, Artificial Sequence
  Synthetic
acuacuacaagagaacacu

SEQ ID NO: 639929 - RNA, 20 nt, Artificial Sequence
  Synthetic
aacuacuacaagagaacacu

SEQ ID NO: 639930 - RNA, 21 nt, Artificial Sequence
  Synthetic
aaacuacuacaagagaacacu

SEQ ID NO: 639931 - RNA, 22 nt, Artificial Sequence
  Synthetic
gaaacuacuacaagagaacacu

SEQ ID NO: 639932 - RNA, 23 nt, Artificial Sequence
  Synthetic
ugaaacuacuacaagagaacacu

SEQ ID NO: 639933 - RNA, 24 nt, Artificial Sequence
  Synthetic
augaaacuacuacaagagaacacu

SEQ ID NO: 639934 - RNA, 18 nt, Artificial Sequence
  Synthetic
cacauuuucuagaacacu

SEQ ID NO: 639935 - RNA, 19 nt, Artificial Sequence
  Synthetic
acacauuuucuagaacacu

SEQ ID NO: 639936 - RNA, 20 nt, Artificial Sequence
  Synthetic
aacacauuuucuagaacacu

SEQ ID NO: 639937 - RNA, 21 nt, Artificial Sequence
  Synthetic
gaacacauuuucuagaacacu

SEQ ID NO: 639938 - RNA, 22 nt, Artificial Sequence
  Synthetic
ugaacacauuuucuagaacacu

SEQ ID NO: 639939 - RNA, 23 nt, Artificial Sequence
  Synthetic
augaacacauuuucuagaacacu

SEQ ID NO: 639940 - RNA, 24 nt, Artificial Sequence
  Synthetic
caugaacacauuuucuagaacacu

SEQ ID NO: 639941 - RNA, 18 nt, Artificial Sequence
  Synthetic
uuuuuucccaugaacacu

SEQ ID NO: 639942 - RNA, 19 nt, Artificial Sequence
  Synthetic
uuuuuuucccaugaacacu

SEQ ID NO: 639943 - RNA, 20 nt, Artificial Sequence
  Synthetic
uuuuuuuucccaugaacacu

SEQ ID NO: 639944 - RNA, 21 nt, Artificial Sequence
  Synthetic
cuuuuuuuucccaugaacacu

SEQ ID NO: 639945 - RNA, 22 nt, Artificial Sequence
  Synthetic
ucuuuuuuuucccaugaacacu

SEQ ID NO: 639946 - RNA, 23 nt, Artificial Sequence
  Synthetic
cucuuuuuuuucccaugaacacu

SEQ ID NO: 639947 - RNA, 24 nt, Artificial Sequence
  Synthetic
acucuuuuuuuucccaugaacacu

SEQ ID NO: 639948 - RNA, 18 nt, Artificial Sequence
  Synthetic
acgugcuucaugaacacu

SEQ ID NO: 639949 - RNA, 19 nt, Artificial Sequence
  Synthetic
uacgugcuucaugaacacu

SEQ ID NO: 639950 - RNA, 20 nt, Artificial Sequence
  Synthetic
auacgugcuucaugaacacu

SEQ ID NO: 639951 - RNA, 21 nt, Artificial Sequence
  Synthetic
cauacgugcuucaugaacacu

SEQ ID NO: 639952 - RNA, 22 nt, Artificial Sequence
  Synthetic
ccauacgugcuucaugaacacu

SEQ ID NO: 639953 - RNA, 23 nt, Artificial Sequence
  Synthetic
gccauacgugcuucaugaacacu

SEQ ID NO: 639954 - RNA, 24 nt, Artificial Sequence
  Synthetic
ggccauacgugcuucaugaacacu

SEQ ID NO: 639955 - RNA, 18 nt, Artificial Sequence
  Synthetic
ucaaaacaacugaacacu

SEQ ID NO: 639956 - RNA, 19 nt, Artificial Sequence
  Synthetic
aucaaaacaacugaacacu

SEQ ID NO: 639957 - RNA, 20 nt, Artificial Sequence
  Synthetic
aaucaaaacaacugaacacu

SEQ ID NO: 639958 - RNA, 21 nt, Artificial Sequence
  Synthetic
aaaucaaaacaacugaacacu

SEQ ID NO: 639959 - RNA, 22 nt, Artificial Sequence
  Synthetic
aaaaucaaaacaacugaacacu

SEQ ID NO: 639960 - RNA, 23 nt, Artificial Sequence
  Synthetic
aaaaaucaaaacaacugaacacu

SEQ ID NO: 639961 - RNA, 24 nt, Artificial Sequence
  Synthetic
uaaaaaucaaaacaacugaacacu

SEQ ID NO: 639962 - RNA, 18 nt, Artificial Sequence
  Synthetic
auuuucauuacuaacacu

SEQ ID NO: 639963 - RNA, 19 nt, Artificial Sequence
  Synthetic
aauuuucauuacuaacacu

SEQ ID NO: 639964 - RNA, 20 nt, Artificial Sequence
  Synthetic
gaauuuucauuacuaacacu

SEQ ID NO: 639965 - RNA, 21 nt, Artificial Sequence
  Synthetic
ugaauuuucauuacuaacacu

SEQ ID NO: 639966 - RNA, 22 nt, Artificial Sequence
  Synthetic
gugaauuuucauuacuaacacu

SEQ ID NO: 639967 - RNA, 23 nt, Artificial Sequence
  Synthetic
agugaauuuucauuacuaacacu

SEQ ID NO: 639968 - RNA, 24 nt, Artificial Sequence
  Synthetic
aagugaauuuucauuacuaacacu

SEQ ID NO: 639969 - RNA, 18 nt, Artificial Sequence
  Synthetic
aagcuaaguaguaacacu

SEQ ID NO: 639970 - RNA, 19 nt, Artificial Sequence
  Synthetic
aaagcuaaguaguaacacu

SEQ ID NO: 639971 - RNA, 20 nt, Artificial Sequence
  Synthetic
uaaagcuaaguaguaacacu

SEQ ID NO: 639972 - RNA, 21 nt, Artificial Sequence
  Synthetic
auaaagcuaaguaguaacacu

SEQ ID NO: 639973 - RNA, 22 nt, Artificial Sequence
  Synthetic
aauaaagcuaaguaguaacacu

SEQ ID NO: 639974 - RNA, 23 nt, Artificial Sequence
  Synthetic
aaauaaagcuaaguaguaacacu

SEQ ID NO: 639975 - RNA, 24 nt, Artificial Sequence
  Synthetic
uaaauaaagcuaaguaguaacacu

SEQ ID NO: 639976 - RNA, 18 nt, Artificial Sequence
  Synthetic
aauuuaaaaauuaacacu

SEQ ID NO: 639977 - RNA, 19 nt, Artificial Sequence
  Synthetic
uaauuuaaaaauuaacacu

SEQ ID NO: 639978 - RNA, 20 nt, Artificial Sequence
  Synthetic
uuaauuuaaaaauuaacacu

SEQ ID NO: 639979 - RNA, 21 nt, Artificial Sequence
  Synthetic
uuuaauuuaaaaauuaacacu

SEQ ID NO: 639980 - RNA, 22 nt, Artificial Sequence
  Synthetic
uuuuaauuuaaaaauuaacacu

SEQ ID NO: 639981 - RNA, 23 nt, Artificial Sequence
  Synthetic
auuuuaauuuaaaaauuaacacu

SEQ ID NO: 639982 - RNA, 24 nt, Artificial Sequence
  Synthetic
aauuuuaauuuaaaaauuaacacu

SEQ ID NO: 639983 - RNA, 18 nt, Artificial Sequence
  Synthetic
acuuauucgauuaacacu

SEQ ID NO: 639984 - RNA, 19 nt, Artificial Sequence
  Synthetic
uacuuauucgauuaacacu

SEQ ID NO: 639985 - RNA, 20 nt, Artificial Sequence
  Synthetic
uuacuuauucgauuaacacu

SEQ ID NO: 639986 - RNA, 21 nt, Artificial Sequence
  Synthetic
auuacuuauucgauuaacacu

SEQ ID NO: 639987 - RNA, 22 nt, Artificial Sequence
  Synthetic
cauuacuuauucgauuaacacu

SEQ ID NO: 639988 - RNA, 23 nt, Artificial Sequence
  Synthetic
acauuacuuauucgauuaacacu

SEQ ID NO: 639989 - RNA, 24 nt, Artificial Sequence
  Synthetic
cacauuacuuauucgauuaacacu

SEQ ID NO: 639990 - RNA, 18 nt, Artificial Sequence
  Synthetic
aucauuaccuaacacacu

SEQ ID NO: 639991 - RNA, 19 nt, Artificial Sequence
  Synthetic
uaucauuaccuaacacacu

SEQ ID NO: 639992 - RNA, 20 nt, Artificial Sequence
  Synthetic
cuaucauuaccuaacacacu

SEQ ID NO: 639993 - RNA, 21 nt, Artificial Sequence
  Synthetic
acuaucauuaccuaacacacu

SEQ ID NO: 639994 - RNA, 22 nt, Artificial Sequence
  Synthetic
aacuaucauuaccuaacacacu

SEQ ID NO: 639995 - RNA, 23 nt, Artificial Sequence
  Synthetic
uaacuaucauuaccuaacacacu

SEQ ID NO: 639996 - RNA, 24 nt, Artificial Sequence
  Synthetic
uuaacuaucauuaccuaacacacu

SEQ ID NO: 639997 - RNA, 18 nt, Artificial Sequence
  Synthetic
uccagguuaccacacacu

SEQ ID NO: 639998 - RNA, 19 nt, Artificial Sequence
  Synthetic
cuccagguuaccacacacu

SEQ ID NO: 639999 - RNA, 20 nt, Artificial Sequence
  Synthetic
gcuccagguuaccacacacu

SEQ ID NO: 640000 - RNA, 21 nt, Artificial Sequence
  Synthetic
ugcuccagguuaccacacacu

SEQ ID NO: 640001 - RNA, 22 nt, Artificial Sequence
  Synthetic
uugcuccagguuaccacacacu

SEQ ID NO: 640002 - RNA, 23 nt, Artificial Sequence
  Synthetic
auugcuccagguuaccacacacu

SEQ ID NO: 640003 - RNA, 24 nt, Artificial Sequence
  Synthetic
uauugcuccagguuaccacacacu

SEQ ID NO: 640004 - RNA, 18 nt, Artificial Sequence
  Synthetic
gggcaguuugcacacacu

SEQ ID NO: 640005 - RNA, 19 nt, Artificial Sequence
  Synthetic
agggcaguuugcacacacu

SEQ ID NO: 640006 - RNA, 20 nt, Artificial Sequence
  Synthetic
cagggcaguuugcacacacu

SEQ ID NO: 640007 - RNA, 21 nt, Artificial Sequence
  Synthetic
ucagggcaguuugcacacacu

SEQ ID NO: 640008 - RNA, 22 nt, Artificial Sequence
  Synthetic
aucagggcaguuugcacacacu

SEQ ID NO: 640009 - RNA, 23 nt, Artificial Sequence
  Synthetic
gaucagggcaguuugcacacacu

SEQ ID NO: 640010 - RNA, 24 nt, Artificial Sequence
  Synthetic
agaucagggcaguuugcacacacu

SEQ ID NO: 640011 - RNA, 18 nt, Artificial Sequence
  Synthetic
ugaucugggacccacacu

SEQ ID NO: 640012 - RNA, 19 nt, Artificial Sequence
  Synthetic
cugaucugggacccacacu

SEQ ID NO: 640013 - RNA, 20 nt, Artificial Sequence
  Synthetic
gcugaucugggacccacacu

SEQ ID NO: 640014 - RNA, 21 nt, Artificial Sequence
  Synthetic
ugcugaucugggacccacacu

SEQ ID NO: 640015 - RNA, 22 nt, Artificial Sequence
  Synthetic
augcugaucugggacccacacu

SEQ ID NO: 640016 - RNA, 23 nt, Artificial Sequence
  Synthetic
gaugcugaucugggacccacacu

SEQ ID NO: 640017 - RNA, 24 nt, Artificial Sequence
  Synthetic
ugaugcugaucugggacccacacu

SEQ ID NO: 640018 - RNA, 18 nt, Artificial Sequence
  Synthetic
cuaaaaccaccccacacu

SEQ ID NO: 640019 - RNA, 19 nt, Artificial Sequence
  Synthetic
gcuaaaaccaccccacacu

SEQ ID NO: 640020 - RNA, 20 nt, Artificial Sequence
  Synthetic
agcuaaaaccaccccacacu

SEQ ID NO: 640021 - RNA, 21 nt, Artificial Sequence
  Synthetic
uagcuaaaaccaccccacacu

SEQ ID NO: 640022 - RNA, 22 nt, Artificial Sequence
  Synthetic
uuagcuaaaaccaccccacacu

SEQ ID NO: 640023 - RNA, 23 nt, Artificial Sequence
  Synthetic
guuagcuaaaaccaccccacacu

SEQ ID NO: 640024 - RNA, 24 nt, Artificial Sequence
  Synthetic
gguuagcuaaaaccaccccacacu

SEQ ID NO: 640025 - RNA, 18 nt, Artificial Sequence
  Synthetic
uacugagaugcccacacu

SEQ ID NO: 640026 - RNA, 19 nt, Artificial Sequence
  Synthetic
uuacugagaugcccacacu

SEQ ID NO: 640027 - RNA, 20 nt, Artificial Sequence
  Synthetic
cuuacugagaugcccacacu

SEQ ID NO: 640028 - RNA, 21 nt, Artificial Sequence
  Synthetic
ucuuacugagaugcccacacu

SEQ ID NO: 640029 - RNA, 22 nt, Artificial Sequence
  Synthetic
cucuuacugagaugcccacacu

SEQ ID NO: 640030 - RNA, 23 nt, Artificial Sequence
  Synthetic
ccucuuacugagaugcccacacu

SEQ ID NO: 640031 - RNA, 24 nt, Artificial Sequence
  Synthetic
cccucuuacugagaugcccacacu

SEQ ID NO: 640032 - RNA, 18 nt, Artificial Sequence
  Synthetic
uucagggcugagcacacu

SEQ ID NO: 640033 - RNA, 19 nt, Artificial Sequence
  Synthetic
uuucagggcugagcacacu

SEQ ID NO: 640034 - RNA, 20 nt, Artificial Sequence
  Synthetic
guuucagggcugagcacacu

SEQ ID NO: 640035 - RNA, 21 nt, Artificial Sequence
  Synthetic
cguuucagggcugagcacacu

SEQ ID NO: 640036 - RNA, 22 nt, Artificial Sequence
  Synthetic
gcguuucagggcugagcacacu

SEQ ID NO: 640037 - RNA, 23 nt, Artificial Sequence
  Synthetic
ggcguuucagggcugagcacacu

SEQ ID NO: 640038 - RNA, 24 nt, Artificial Sequence
  Synthetic
uggcguuucagggcugagcacacu

SEQ ID NO: 640039 - RNA, 18 nt, Artificial Sequence
  Synthetic
gaaugggaacaucacacu

SEQ ID NO: 640040 - RNA, 19 nt, Artificial Sequence
  Synthetic
ggaaugggaacaucacacu

SEQ ID NO: 640041 - RNA, 20 nt, Artificial Sequence
  Synthetic
aggaaugggaacaucacacu

SEQ ID NO: 640042 - RNA, 21 nt, Artificial Sequence
  Synthetic
caggaaugggaacaucacacu

SEQ ID NO: 640043 - RNA, 22 nt, Artificial Sequence
  Synthetic
acaggaaugggaacaucacacu

SEQ ID NO: 640044 - RNA, 23 nt, Artificial Sequence
  Synthetic
cacaggaaugggaacaucacacu

SEQ ID NO: 640045 - RNA, 24 nt, Artificial Sequence
  Synthetic
acacaggaaugggaacaucacacu

SEQ ID NO: 640046 - RNA, 21 nt, Artificial Sequence
  Synthetic
caggaaggggaauaucacacu

SEQ ID NO: 640047 - RNA, 22 nt, Artificial Sequence
  Synthetic
acaggaaggggaauaucacacu

SEQ ID NO: 640048 - RNA, 23 nt, Artificial Sequence
  Synthetic
cacaggaaggggaauaucacacu

SEQ ID NO: 640049 - RNA, 24 nt, Artificial Sequence
  Synthetic
acacaggaaggggaauaucacacu

SEQ ID NO: 640050 - RNA, 18 nt, Artificial Sequence
  Synthetic
gcaucaucuucucacacu

SEQ ID NO: 640051 - RNA, 19 nt, Artificial Sequence
  Synthetic
agcaucaucuucucacacu

SEQ ID NO: 640052 - RNA, 20 nt, Artificial Sequence
  Synthetic
cagcaucaucuucucacacu

SEQ ID NO: 640053 - RNA, 21 nt, Artificial Sequence
  Synthetic
ucagcaucaucuucucacacu

SEQ ID NO: 640054 - RNA, 22 nt, Artificial Sequence
  Synthetic
gucagcaucaucuucucacacu

SEQ ID NO: 640055 - RNA, 23 nt, Artificial Sequence
  Synthetic
agucagcaucaucuucucacacu

SEQ ID NO: 640056 - RNA, 24 nt, Artificial Sequence
  Synthetic
cagucagcaucaucuucucacacu

SEQ ID NO: 640057 - RNA, 18 nt, Artificial Sequence
  Synthetic
aucaaucaaauucacacu

SEQ ID NO: 640058 - RNA, 19 nt, Artificial Sequence
  Synthetic
aaucaaucaaauucacacu

SEQ ID NO: 640059 - RNA, 20 nt, Artificial Sequence
  Synthetic
caaucaaucaaauucacacu

SEQ ID NO: 640060 - RNA, 21 nt, Artificial Sequence
  Synthetic
ucaaucaaucaaauucacacu

SEQ ID NO: 640061 - RNA, 22 nt, Artificial Sequence
  Synthetic
aucaaucaaucaaauucacacu

SEQ ID NO: 640062 - RNA, 23 nt, Artificial Sequence
  Synthetic
aaucaaucaaucaaauucacacu

SEQ ID NO: 640063 - RNA, 24 nt, Artificial Sequence
  Synthetic
caaucaaucaaucaaauucacacu

SEQ ID NO: 640064 - RNA, 18 nt, Artificial Sequence
  Synthetic
ccaagugucauucacacu

SEQ ID NO: 640065 - RNA, 19 nt, Artificial Sequence
  Synthetic
cccaagugucauucacacu

SEQ ID NO: 640066 - RNA, 20 nt, Artificial Sequence
  Synthetic
acccaagugucauucacacu

SEQ ID NO: 640067 - RNA, 21 nt, Artificial Sequence
  Synthetic
uacccaagugucauucacacu

SEQ ID NO: 640068 - RNA, 22 nt, Artificial Sequence
  Synthetic
uuacccaagugucauucacacu

SEQ ID NO: 640069 - RNA, 23 nt, Artificial Sequence
  Synthetic
uuuacccaagugucauucacacu

SEQ ID NO: 640070 - RNA, 24 nt, Artificial Sequence
  Synthetic
uuuuacccaagugucauucacacu

SEQ ID NO: 640071 - RNA, 18 nt, Artificial Sequence
  Synthetic
ggcuucaaaguucacacu

SEQ ID NO: 640072 - RNA, 19 nt, Artificial Sequence
  Synthetic
gggcuucaaaguucacacu

SEQ ID NO: 640073 - RNA, 20 nt, Artificial Sequence
  Synthetic
cgggcuucaaaguucacacu

SEQ ID NO: 640074 - RNA, 21 nt, Artificial Sequence
  Synthetic
ucgggcuucaaaguucacacu

SEQ ID NO: 640075 - RNA, 22 nt, Artificial Sequence
  Synthetic
gucgggcuucaaaguucacacu

SEQ ID NO: 640076 - RNA, 23 nt, Artificial Sequence
  Synthetic
agucgggcuucaaaguucacacu

SEQ ID NO: 640077 - RNA, 24 nt, Artificial Sequence
  Synthetic
cagucgggcuucaaaguucacacu

SEQ ID NO: 640078 - RNA, 18 nt, Artificial Sequence
  Synthetic
aagucaauaaaagacacu

SEQ ID NO: 640079 - RNA, 19 nt, Artificial Sequence
  Synthetic
aaagucaauaaaagacacu

SEQ ID NO: 640080 - RNA, 20 nt, Artificial Sequence
  Synthetic
caaagucaauaaaagacacu

SEQ ID NO: 640081 - RNA, 21 nt, Artificial Sequence
  Synthetic
ucaaagucaauaaaagacacu

SEQ ID NO: 640082 - RNA, 22 nt, Artificial Sequence
  Synthetic
aucaaagucaauaaaagacacu

SEQ ID NO: 640083 - RNA, 23 nt, Artificial Sequence
  Synthetic
uaucaaagucaauaaaagacacu

SEQ ID NO: 640084 - RNA, 24 nt, Artificial Sequence
  Synthetic
auaucaaagucaauaaaagacacu

SEQ ID NO: 640085 - RNA, 18 nt, Artificial Sequence
  Synthetic
cauuugacaacagacacu

SEQ ID NO: 640086 - RNA, 19 nt, Artificial Sequence
  Synthetic
ucauuugacaacagacacu

SEQ ID NO: 640087 - RNA, 20 nt, Artificial Sequence
  Synthetic
aucauuugacaacagacacu

SEQ ID NO: 640088 - RNA, 21 nt, Artificial Sequence
  Synthetic
aaucauuugacaacagacacu

SEQ ID NO: 640089 - RNA, 22 nt, Artificial Sequence
  Synthetic
gaaucauuugacaacagacacu

SEQ ID NO: 640090 - RNA, 23 nt, Artificial Sequence
  Synthetic
agaaucauuugacaacagacacu

SEQ ID NO: 640091 - RNA, 24 nt, Artificial Sequence
  Synthetic
gagaaucauuugacaacagacacu

SEQ ID NO: 640092 - RNA, 18 nt, Artificial Sequence
  Synthetic
uccuauuagccagacacu

SEQ ID NO: 640093 - RNA, 19 nt, Artificial Sequence
  Synthetic
cuccuauuagccagacacu

SEQ ID NO: 640094 - RNA, 20 nt, Artificial Sequence
  Synthetic
ccuccuauuagccagacacu

SEQ ID NO: 640095 - RNA, 21 nt, Artificial Sequence
  Synthetic
accuccuauuagccagacacu

SEQ ID NO: 640096 - RNA, 22 nt, Artificial Sequence
  Synthetic
uaccuccuauuagccagacacu

SEQ ID NO: 640097 - RNA, 23 nt, Artificial Sequence
  Synthetic
auaccuccuauuagccagacacu

SEQ ID NO: 640098 - RNA, 24 nt, Artificial Sequence
  Synthetic
gauaccuccuauuagccagacacu

SEQ ID NO: 640099 - RNA, 18 nt, Artificial Sequence
  Synthetic
acaggaacaauagacacu

SEQ ID NO: 640100 - RNA, 19 nt, Artificial Sequence
  Synthetic
gacaggaacaauagacacu

SEQ ID NO: 640101 - RNA, 20 nt, Artificial Sequence
  Synthetic
agacaggaacaauagacacu

SEQ ID NO: 640102 - RNA, 21 nt, Artificial Sequence
  Synthetic
aagacaggaacaauagacacu

SEQ ID NO: 640103 - RNA, 22 nt, Artificial Sequence
  Synthetic
aaagacaggaacaauagacacu

SEQ ID NO: 640104 - RNA, 23 nt, Artificial Sequence
  Synthetic
uaaagacaggaacaauagacacu

SEQ ID NO: 640105 - RNA, 24 nt, Artificial Sequence
  Synthetic
auaaagacaggaacaauagacacu

SEQ ID NO: 640106 - RNA, 18 nt, Artificial Sequence
  Synthetic
uuggggguuguagacacu

SEQ ID NO: 640107 - RNA, 19 nt, Artificial Sequence
  Synthetic
guuggggguuguagacacu

SEQ ID NO: 640108 - RNA, 20 nt, Artificial Sequence
  Synthetic
aguuggggguuguagacacu

SEQ ID NO: 640109 - RNA, 21 nt, Artificial Sequence
  Synthetic
gaguuggggguuguagacacu

SEQ ID NO: 640110 - RNA, 22 nt, Artificial Sequence
  Synthetic
ggaguuggggguuguagacacu

SEQ ID NO: 640111 - RNA, 23 nt, Artificial Sequence
  Synthetic
gggaguuggggguuguagacacu

SEQ ID NO: 640112 - RNA, 24 nt, Artificial Sequence
  Synthetic
ugggaguuggggguuguagacacu

SEQ ID NO: 640113 - RNA, 18 nt, Artificial Sequence
  Synthetic
aucaauauuuuagacacu

SEQ ID NO: 640114 - RNA, 19 nt, Artificial Sequence
  Synthetic
aaucaauauuuuagacacu

SEQ ID NO: 640115 - RNA, 20 nt, Artificial Sequence
  Synthetic
aaaucaauauuuuagacacu

SEQ ID NO: 640116 - RNA, 21 nt, Artificial Sequence
  Synthetic
caaaucaauauuuuagacacu

SEQ ID NO: 640117 - RNA, 22 nt, Artificial Sequence
  Synthetic
acaaaucaauauuuuagacacu

SEQ ID NO: 640118 - RNA, 23 nt, Artificial Sequence
  Synthetic
uacaaaucaauauuuuagacacu

SEQ ID NO: 640119 - RNA, 24 nt, Artificial Sequence
  Synthetic
uuacaaaucaauauuuuagacacu

SEQ ID NO: 640120 - RNA, 18 nt, Artificial Sequence
  Synthetic
uuuaacccuaucgacacu

SEQ ID NO: 640121 - RNA, 19 nt, Artificial Sequence
  Synthetic
cuuuaacccuaucgacacu

SEQ ID NO: 640122 - RNA, 20 nt, Artificial Sequence
  Synthetic
ucuuuaacccuaucgacacu

SEQ ID NO: 640123 - RNA, 21 nt, Artificial Sequence
  Synthetic
gucuuuaacccuaucgacacu

SEQ ID NO: 640124 - RNA, 22 nt, Artificial Sequence
  Synthetic
ugucuuuaacccuaucgacacu

SEQ ID NO: 640125 - RNA, 23 nt, Artificial Sequence
  Synthetic
cugucuuuaacccuaucgacacu

SEQ ID NO: 640126 - RNA, 24 nt, Artificial Sequence
  Synthetic
acugucuuuaacccuaucgacacu

SEQ ID NO: 640127 - RNA, 18 nt, Artificial Sequence
  Synthetic
guucauuccugggacacu

SEQ ID NO: 640128 - RNA, 19 nt, Artificial Sequence
  Synthetic
uguucauuccugggacacu

SEQ ID NO: 640129 - RNA, 20 nt, Artificial Sequence
  Synthetic
cuguucauuccugggacacu

SEQ ID NO: 640130 - RNA, 21 nt, Artificial Sequence
  Synthetic
acuguucauuccugggacacu

SEQ ID NO: 640131 - RNA, 22 nt, Artificial Sequence
  Synthetic
cacuguucauuccugggacacu

SEQ ID NO: 640132 - RNA, 23 nt, Artificial Sequence
  Synthetic
ccacuguucauuccugggacacu

SEQ ID NO: 640133 - RNA, 24 nt, Artificial Sequence
  Synthetic
uccacuguucauuccugggacacu

SEQ ID NO: 640134 - RNA, 18 nt, Artificial Sequence
  Synthetic
auuuaacuucaugacacu

SEQ ID NO: 640135 - RNA, 19 nt, Artificial Sequence
  Synthetic
uauuuaacuucaugacacu

SEQ ID NO: 640136 - RNA, 20 nt, Artificial Sequence
  Synthetic
uuauuuaacuucaugacacu

SEQ ID NO: 640137 - RNA, 21 nt, Artificial Sequence
  Synthetic
guuauuuaacuucaugacacu

SEQ ID NO: 640138 - RNA, 22 nt, Artificial Sequence
  Synthetic
uguuauuuaacuucaugacacu

SEQ ID NO: 640139 - RNA, 23 nt, Artificial Sequence
  Synthetic
auguuauuuaacuucaugacacu

SEQ ID NO: 640140 - RNA, 24 nt, Artificial Sequence
  Synthetic
cauguuauuuaacuucaugacacu

SEQ ID NO: 640141 - RNA, 18 nt, Artificial Sequence
  Synthetic
uccugacuuggugacacu

SEQ ID NO: 640142 - RNA, 19 nt, Artificial Sequence
  Synthetic
auccugacuuggugacacu

SEQ ID NO: 640143 - RNA, 20 nt, Artificial Sequence
  Synthetic
cauccugacuuggugacacu

SEQ ID NO: 640144 - RNA, 21 nt, Artificial Sequence
  Synthetic
ccauccugacuuggugacacu

SEQ ID NO: 640145 - RNA, 22 nt, Artificial Sequence
  Synthetic
accauccugacuuggugacacu

SEQ ID NO: 640146 - RNA, 23 nt, Artificial Sequence
  Synthetic
caccauccugacuuggugacacu

SEQ ID NO: 640147 - RNA, 24 nt, Artificial Sequence
  Synthetic
ccaccauccugacuuggugacacu

SEQ ID NO: 640148 - RNA, 18 nt, Artificial Sequence
  Synthetic
auaaacacuauugacacu

SEQ ID NO: 640149 - RNA, 19 nt, Artificial Sequence
  Synthetic
cauaaacacuauugacacu

SEQ ID NO: 640150 - RNA, 20 nt, Artificial Sequence
  Synthetic
acauaaacacuauugacacu

SEQ ID NO: 640151 - RNA, 21 nt, Artificial Sequence
  Synthetic
aacauaaacacuauugacacu

SEQ ID NO: 640152 - RNA, 22 nt, Artificial Sequence
  Synthetic
aaacauaaacacuauugacacu

SEQ ID NO: 640153 - RNA, 23 nt, Artificial Sequence
  Synthetic
uaaacauaaacacuauugacacu

SEQ ID NO: 640154 - RNA, 24 nt, Artificial Sequence
  Synthetic
cuaaacauaaacacuauugacacu

SEQ ID NO: 640155 - RNA, 18 nt, Artificial Sequence
  Synthetic
aagauggaaguugacacu

SEQ ID NO: 640156 - RNA, 19 nt, Artificial Sequence
  Synthetic
uaagauggaaguugacacu

SEQ ID NO: 640157 - RNA, 20 nt, Artificial Sequence
  Synthetic
guaagauggaaguugacacu

SEQ ID NO: 640158 - RNA, 21 nt, Artificial Sequence
  Synthetic
uguaagauggaaguugacacu

SEQ ID NO: 640159 - RNA, 22 nt, Artificial Sequence
  Synthetic
guguaagauggaaguugacacu

SEQ ID NO: 640160 - RNA, 23 nt, Artificial Sequence
  Synthetic
aguguaagauggaaguugacacu

SEQ ID NO: 640161 - RNA, 24 nt, Artificial Sequence
  Synthetic
gaguguaagauggaaguugacacu

SEQ ID NO: 640162 - RNA, 18 nt, Artificial Sequence
  Synthetic
uugaaauaugcauacacu

SEQ ID NO: 640163 - RNA, 19 nt, Artificial Sequence
  Synthetic
uuugaaauaugcauacacu

SEQ ID NO: 640164 - RNA, 20 nt, Artificial Sequence
  Synthetic
uuuugaaauaugcauacacu

SEQ ID NO: 640165 - RNA, 21 nt, Artificial Sequence
  Synthetic
guuuugaaauaugcauacacu

SEQ ID NO: 640166 - RNA, 22 nt, Artificial Sequence
  Synthetic
uguuuugaaauaugcauacacu

SEQ ID NO: 640167 - RNA, 23 nt, Artificial Sequence
  Synthetic
auguuuugaaauaugcauacacu

SEQ ID NO: 640168 - RNA, 24 nt, Artificial Sequence
  Synthetic
cauguuuugaaauaugcauacacu

SEQ ID NO: 640169 - RNA, 18 nt, Artificial Sequence
  Synthetic
augugguacauauacacu

SEQ ID NO: 640170 - RNA, 19 nt, Artificial Sequence
  Synthetic
aaugugguacauauacacu

SEQ ID NO: 640171 - RNA, 20 nt, Artificial Sequence
  Synthetic
aaaugugguacauauacacu

SEQ ID NO: 640172 - RNA, 21 nt, Artificial Sequence
  Synthetic
aaaaugugguacauauacacu

SEQ ID NO: 640173 - RNA, 22 nt, Artificial Sequence
  Synthetic
gaaaaugugguacauauacacu

SEQ ID NO: 640174 - RNA, 23 nt, Artificial Sequence
  Synthetic
agaaaaugugguacauauacacu

SEQ ID NO: 640175 - RNA, 24 nt, Artificial Sequence
  Synthetic
aagaaaaugugguacauauacacu

SEQ ID NO: 640176 - RNA, 18 nt, Artificial Sequence
  Synthetic
cugauauauguauacacu

SEQ ID NO: 640177 - RNA, 19 nt, Artificial Sequence
  Synthetic
ucugauauauguauacacu

SEQ ID NO: 640178 - RNA, 20 nt, Artificial Sequence
  Synthetic
uucugauauauguauacacu

SEQ ID NO: 640179 - RNA, 21 nt, Artificial Sequence
  Synthetic
guucugauauauguauacacu

SEQ ID NO: 640180 - RNA, 22 nt, Artificial Sequence
  Synthetic
uguucugauauauguauacacu

SEQ ID NO: 640181 - RNA, 23 nt, Artificial Sequence
  Synthetic
auguucugauauauguauacacu

SEQ ID NO: 640182 - RNA, 24 nt, Artificial Sequence
  Synthetic
uauguucugauauauguauacacu

SEQ ID NO: 640183 - RNA, 18 nt, Artificial Sequence
  Synthetic
cuuucuacaaccuacacu

SEQ ID NO: 640184 - RNA, 19 nt, Artificial Sequence
  Synthetic
ucuuucuacaaccuacacu

SEQ ID NO: 640185 - RNA, 20 nt, Artificial Sequence
  Synthetic
gucuuucuacaaccuacacu

SEQ ID NO: 640186 - RNA, 21 nt, Artificial Sequence
  Synthetic
agucuuucuacaaccuacacu

SEQ ID NO: 640187 - RNA, 22 nt, Artificial Sequence
  Synthetic
cagucuuucuacaaccuacacu

SEQ ID NO: 640188 - RNA, 23 nt, Artificial Sequence
  Synthetic
acagucuuucuacaaccuacacu

SEQ ID NO: 640189 - RNA, 24 nt, Artificial Sequence
  Synthetic
cacagucuuucuacaaccuacacu

SEQ ID NO: 640190 - RNA, 18 nt, Artificial Sequence
  Synthetic
cacauggcuagcuacacu

SEQ ID NO: 640191 - RNA, 19 nt, Artificial Sequence
  Synthetic
ccacauggcuagcuacacu

SEQ ID NO: 640192 - RNA, 20 nt, Artificial Sequence
  Synthetic
uccacauggcuagcuacacu

SEQ ID NO: 640193 - RNA, 21 nt, Artificial Sequence
  Synthetic
uuccacauggcuagcuacacu

SEQ ID NO: 640194 - RNA, 22 nt, Artificial Sequence
  Synthetic
guuccacauggcuagcuacacu

SEQ ID NO: 640195 - RNA, 23 nt, Artificial Sequence
  Synthetic
aguuccacauggcuagcuacacu

SEQ ID NO: 640196 - RNA, 24 nt, Artificial Sequence
  Synthetic
caguuccacauggcuagcuacacu

SEQ ID NO: 640197 - RNA, 18 nt, Artificial Sequence
  Synthetic
cucaaccuuagcuacacu

SEQ ID NO: 640198 - RNA, 19 nt, Artificial Sequence
  Synthetic
ucucaaccuuagcuacacu

SEQ ID NO: 640199 - RNA, 20 nt, Artificial Sequence
  Synthetic
uucucaaccuuagcuacacu

SEQ ID NO: 640200 - RNA, 21 nt, Artificial Sequence
  Synthetic
uuucucaaccuuagcuacacu

SEQ ID NO: 640201 - RNA, 22 nt, Artificial Sequence
  Synthetic
guuucucaaccuuagcuacacu

SEQ ID NO: 640202 - RNA, 23 nt, Artificial Sequence
  Synthetic
uguuucucaaccuuagcuacacu

SEQ ID NO: 640203 - RNA, 24 nt, Artificial Sequence
  Synthetic
guguuucucaaccuuagcuacacu

SEQ ID NO: 640204 - RNA, 18 nt, Artificial Sequence
  Synthetic
cuugaagucaaguacacu

SEQ ID NO: 640205 - RNA, 19 nt, Artificial Sequence
  Synthetic
ccuugaagucaaguacacu

SEQ ID NO: 640206 - RNA, 20 nt, Artificial Sequence
  Synthetic
gccuugaagucaaguacacu

SEQ ID NO: 640207 - RNA, 21 nt, Artificial Sequence
  Synthetic
ggccuugaagucaaguacacu

SEQ ID NO: 640208 - RNA, 22 nt, Artificial Sequence
  Synthetic
gggccuugaagucaaguacacu

SEQ ID NO: 640209 - RNA, 23 nt, Artificial Sequence
  Synthetic
ugggccuugaagucaaguacacu

SEQ ID NO: 640210 - RNA, 24 nt, Artificial Sequence
  Synthetic
gugggccuugaagucaaguacacu

SEQ ID NO: 640211 - RNA, 18 nt, Artificial Sequence
  Synthetic
auacccagggaguacacu

SEQ ID NO: 640212 - RNA, 19 nt, Artificial Sequence
  Synthetic
aauacccagggaguacacu

SEQ ID NO: 640213 - RNA, 20 nt, Artificial Sequence
  Synthetic
caauacccagggaguacacu

SEQ ID NO: 640214 - RNA, 21 nt, Artificial Sequence
  Synthetic
gcaauacccagggaguacacu

SEQ ID NO: 640215 - RNA, 22 nt, Artificial Sequence
  Synthetic
ugcaauacccagggaguacacu

SEQ ID NO: 640216 - RNA, 23 nt, Artificial Sequence
  Synthetic
uugcaauacccagggaguacacu

SEQ ID NO: 640217 - RNA, 24 nt, Artificial Sequence
  Synthetic
guugcaauacccagggaguacacu

SEQ ID NO: 640218 - RNA, 18 nt, Artificial Sequence
  Synthetic
uaucuccaauuguacacu

SEQ ID NO: 640219 - RNA, 19 nt, Artificial Sequence
  Synthetic
guaucuccaauuguacacu

SEQ ID NO: 640220 - RNA, 20 nt, Artificial Sequence
  Synthetic
uguaucuccaauuguacacu

SEQ ID NO: 640221 - RNA, 21 nt, Artificial Sequence
  Synthetic
guguaucuccaauuguacacu

SEQ ID NO: 640222 - RNA, 22 nt, Artificial Sequence
  Synthetic
gguguaucuccaauuguacacu

SEQ ID NO: 640223 - RNA, 23 nt, Artificial Sequence
  Synthetic
ugguguaucuccaauuguacacu

SEQ ID NO: 640224 - RNA, 24 nt, Artificial Sequence
  Synthetic
cugguguaucuccaauuguacacu

SEQ ID NO: 640225 - RNA, 18 nt, Artificial Sequence
  Synthetic
accacugaauuguacacu

SEQ ID NO: 640226 - RNA, 19 nt, Artificial Sequence
  Synthetic
caccacugaauuguacacu

SEQ ID NO: 640227 - RNA, 20 nt, Artificial Sequence
  Synthetic
acaccacugaauuguacacu

SEQ ID NO: 640228 - RNA, 21 nt, Artificial Sequence
  Synthetic
aacaccacugaauuguacacu

SEQ ID NO: 640229 - RNA, 22 nt, Artificial Sequence
  Synthetic
aaacaccacugaauuguacacu

SEQ ID NO: 640230 - RNA, 23 nt, Artificial Sequence
  Synthetic
uaaacaccacugaauuguacacu

SEQ ID NO: 640231 - RNA, 24 nt, Artificial Sequence
  Synthetic
cuaaacaccacugaauuguacacu

SEQ ID NO: 640232 - RNA, 18 nt, Artificial Sequence
  Synthetic
cuuauguucuuguacacu

SEQ ID NO: 640233 - RNA, 19 nt, Artificial Sequence
  Synthetic
gcuuauguucuuguacacu

SEQ ID NO: 640234 - RNA, 20 nt, Artificial Sequence
  Synthetic
cgcuuauguucuuguacacu

SEQ ID NO: 640235 - RNA, 21 nt, Artificial Sequence
  Synthetic
acgcuuauguucuuguacacu

SEQ ID NO: 640236 - RNA, 22 nt, Artificial Sequence
  Synthetic
aacgcuuauguucuuguacacu

SEQ ID NO: 640237 - RNA, 23 nt, Artificial Sequence
  Synthetic
aaacgcuuauguucuuguacacu

SEQ ID NO: 640238 - RNA, 24 nt, Artificial Sequence
  Synthetic
aaaacgcuuauguucuuguacacu

SEQ ID NO: 640239 - RNA, 18 nt, Artificial Sequence
  Synthetic
uagggcagucauuacacu

SEQ ID NO: 640240 - RNA, 19 nt, Artificial Sequence
  Synthetic
auagggcagucauuacacu

SEQ ID NO: 640241 - RNA, 20 nt, Artificial Sequence
  Synthetic
aauagggcagucauuacacu

SEQ ID NO: 640242 - RNA, 21 nt, Artificial Sequence
  Synthetic
caauagggcagucauuacacu

SEQ ID NO: 640243 - RNA, 22 nt, Artificial Sequence
  Synthetic
ccaauagggcagucauuacacu

SEQ ID NO: 640244 - RNA, 23 nt, Artificial Sequence
  Synthetic
uccaauagggcagucauuacacu

SEQ ID NO: 640245 - RNA, 24 nt, Artificial Sequence
  Synthetic
auccaauagggcagucauuacacu

SEQ ID NO: 640246 - RNA, 18 nt, Artificial Sequence
  Synthetic
ggacccaacucuuacacu

SEQ ID NO: 640247 - RNA, 19 nt, Artificial Sequence
  Synthetic
gggacccaacucuuacacu

SEQ ID NO: 640248 - RNA, 20 nt, Artificial Sequence
  Synthetic
ugggacccaacucuuacacu

SEQ ID NO: 640249 - RNA, 21 nt, Artificial Sequence
  Synthetic
uugggacccaacucuuacacu

SEQ ID NO: 640250 - RNA, 22 nt, Artificial Sequence
  Synthetic
cuugggacccaacucuuacacu

SEQ ID NO: 640251 - RNA, 23 nt, Artificial Sequence
  Synthetic
ucuugggacccaacucuuacacu

SEQ ID NO: 640252 - RNA, 24 nt, Artificial Sequence
  Synthetic
cucuugggacccaacucuuacacu

SEQ ID NO: 640253 - RNA, 18 nt, Artificial Sequence
  Synthetic
auccccucaauuuacacu

SEQ ID NO: 640254 - RNA, 19 nt, Artificial Sequence
  Synthetic
uauccccucaauuuacacu

SEQ ID NO: 640255 - RNA, 20 nt, Artificial Sequence
  Synthetic
uuauccccucaauuuacacu

SEQ ID NO: 640256 - RNA, 21 nt, Artificial Sequence
  Synthetic
uuuauccccucaauuuacacu

SEQ ID NO: 640257 - RNA, 22 nt, Artificial Sequence
  Synthetic
uuuuauccccucaauuuacacu

SEQ ID NO: 640258 - RNA, 23 nt, Artificial Sequence
  Synthetic
uuuuuauccccucaauuuacacu

SEQ ID NO: 640259 - RNA, 24 nt, Artificial Sequence
  Synthetic
uuuuuuauccccucaauuuacacu

SEQ ID NO: 640260 - RNA, 18 nt, Artificial Sequence
  Synthetic
gacggcuuuguuuacacu

SEQ ID NO: 640261 - RNA, 19 nt, Artificial Sequence
  Synthetic
ugacggcuuuguuuacacu

SEQ ID NO: 640262 - RNA, 20 nt, Artificial Sequence
  Synthetic
uugacggcuuuguuuacacu

SEQ ID NO: 640263 - RNA, 21 nt, Artificial Sequence
  Synthetic
cuugacggcuuuguuuacacu

SEQ ID NO: 640264 - RNA, 22 nt, Artificial Sequence
  Synthetic
ucuugacggcuuuguuuacacu

SEQ ID NO: 640265 - RNA, 23 nt, Artificial Sequence
  Synthetic
uucuugacggcuuuguuuacacu

SEQ ID NO: 640266 - RNA, 24 nt, Artificial Sequence
  Synthetic
cuucuugacggcuuuguuuacacu

SEQ ID NO: 640267 - RNA, 18 nt, Artificial Sequence
  Synthetic
uaaauuagcacaaccacu

SEQ ID NO: 640268 - RNA, 19 nt, Artificial Sequence
  Synthetic
guaaauuagcacaaccacu

SEQ ID NO: 640269 - RNA, 20 nt, Artificial Sequence
  Synthetic
uguaaauuagcacaaccacu

SEQ ID NO: 640270 - RNA, 21 nt, Artificial Sequence
  Synthetic
auguaaauuagcacaaccacu

SEQ ID NO: 640271 - RNA, 22 nt, Artificial Sequence
  Synthetic
aauguaaauuagcacaaccacu

SEQ ID NO: 640272 - RNA, 23 nt, Artificial Sequence
  Synthetic
aaauguaaauuagcacaaccacu

SEQ ID NO: 640273 - RNA, 24 nt, Artificial Sequence
  Synthetic
gaaauguaaauuagcacaaccacu

SEQ ID NO: 640274 - RNA, 18 nt, Artificial Sequence
  Synthetic
agacauguuguaaccacu

SEQ ID NO: 640275 - RNA, 19 nt, Artificial Sequence
  Synthetic
aagacauguuguaaccacu

SEQ ID NO: 640276 - RNA, 20 nt, Artificial Sequence
  Synthetic
gaagacauguuguaaccacu

SEQ ID NO: 640277 - RNA, 21 nt, Artificial Sequence
  Synthetic
agaagacauguuguaaccacu

SEQ ID NO: 640278 - RNA, 22 nt, Artificial Sequence
  Synthetic
uagaagacauguuguaaccacu

SEQ ID NO: 640279 - RNA, 23 nt, Artificial Sequence
  Synthetic
auagaagacauguuguaaccacu

SEQ ID NO: 640280 - RNA, 24 nt, Artificial Sequence
  Synthetic
gauagaagacauguuguaaccacu

SEQ ID NO: 640281 - RNA, 18 nt, Artificial Sequence
  Synthetic
agccuaggaaacaccacu

SEQ ID NO: 640282 - RNA, 19 nt, Artificial Sequence
  Synthetic
aagccuaggaaacaccacu

SEQ ID NO: 640283 - RNA, 20 nt, Artificial Sequence
  Synthetic
aaagccuaggaaacaccacu

SEQ ID NO: 640284 - RNA, 21 nt, Artificial Sequence
  Synthetic
gaaagccuaggaaacaccacu

SEQ ID NO: 640285 - RNA, 22 nt, Artificial Sequence
  Synthetic
agaaagccuaggaaacaccacu

SEQ ID NO: 640286 - RNA, 23 nt, Artificial Sequence
  Synthetic
aagaaagccuaggaaacaccacu

SEQ ID NO: 640287 - RNA, 24 nt, Artificial Sequence
  Synthetic
uaagaaagccuaggaaacaccacu

SEQ ID NO: 640288 - RNA, 18 nt, Artificial Sequence
  Synthetic
uaacuuuuugacaccacu

SEQ ID NO: 640289 - RNA, 19 nt, Artificial Sequence
  Synthetic
auaacuuuuugacaccacu

SEQ ID NO: 640290 - RNA, 20 nt, Artificial Sequence
  Synthetic
aauaacuuuuugacaccacu

SEQ ID NO: 640291 - RNA, 21 nt, Artificial Sequence
  Synthetic
aaauaacuuuuugacaccacu

SEQ ID NO: 640292 - RNA, 22 nt, Artificial Sequence
  Synthetic
aaaauaacuuuuugacaccacu

SEQ ID NO: 640293 - RNA, 23 nt, Artificial Sequence
  Synthetic
caaaauaacuuuuugacaccacu

SEQ ID NO: 640294 - RNA, 24 nt, Artificial Sequence
  Synthetic
ccaaaauaacuuuuugacaccacu

SEQ ID NO: 640295 - RNA, 18 nt, Artificial Sequence
  Synthetic
gccuguaaucccaccacu

SEQ ID NO: 640296 - RNA, 19 nt, Artificial Sequence
  Synthetic
cgccuguaaucccaccacu

SEQ ID NO: 640297 - RNA, 20 nt, Artificial Sequence
  Synthetic
acgccuguaaucccaccacu

SEQ ID NO: 640298 - RNA, 21 nt, Artificial Sequence
  Synthetic
cacgccuguaaucccaccacu

SEQ ID NO: 640299 - RNA, 22 nt, Artificial Sequence
  Synthetic
ucacgccuguaaucccaccacu

SEQ ID NO: 640300 - RNA, 23 nt, Artificial Sequence
  Synthetic
cucacgccuguaaucccaccacu

SEQ ID NO: 640301 - RNA, 24 nt, Artificial Sequence
  Synthetic
gcucacgccuguaaucccaccacu

SEQ ID NO: 640302 - RNA, 18 nt, Artificial Sequence
  Synthetic
auauuuuguuccaccacu

SEQ ID NO: 640303 - RNA, 19 nt, Artificial Sequence
  Synthetic
gauauuuuguuccaccacu

SEQ ID NO: 640304 - RNA, 20 nt, Artificial Sequence
  Synthetic
ggauauuuuguuccaccacu

SEQ ID NO: 640305 - RNA, 21 nt, Artificial Sequence
  Synthetic
uggauauuuuguuccaccacu

SEQ ID NO: 640306 - RNA, 22 nt, Artificial Sequence
  Synthetic
guggauauuuuguuccaccacu

SEQ ID NO: 640307 - RNA, 23 nt, Artificial Sequence
  Synthetic
uguggauauuuuguuccaccacu

SEQ ID NO: 640308 - RNA, 24 nt, Artificial Sequence
  Synthetic
cuguggauauuuuguuccaccacu

SEQ ID NO: 640309 - RNA, 18 nt, Artificial Sequence
  Synthetic
caaggauggcucaccacu

SEQ ID NO: 640310 - RNA, 19 nt, Artificial Sequence
  Synthetic
ccaaggauggcucaccacu

SEQ ID NO: 640311 - RNA, 20 nt, Artificial Sequence
  Synthetic
cccaaggauggcucaccacu

SEQ ID NO: 640312 - RNA, 21 nt, Artificial Sequence
  Synthetic
acccaaggauggcucaccacu

SEQ ID NO: 640313 - RNA, 22 nt, Artificial Sequence
  Synthetic
cacccaaggauggcucaccacu

SEQ ID NO: 640314 - RNA, 23 nt, Artificial Sequence
  Synthetic
ccacccaaggauggcucaccacu

SEQ ID NO: 640315 - RNA, 24 nt, Artificial Sequence
  Synthetic
accacccaaggauggcucaccacu

SEQ ID NO: 640316 - RNA, 18 nt, Artificial Sequence
  Synthetic
cuuuucaaaguuaccacu

SEQ ID NO: 640317 - RNA, 19 nt, Artificial Sequence
  Synthetic
ccuuuucaaaguuaccacu

SEQ ID NO: 640318 - RNA, 20 nt, Artificial Sequence
  Synthetic
cccuuuucaaaguuaccacu

SEQ ID NO: 640319 - RNA, 21 nt, Artificial Sequence
  Synthetic
ucccuuuucaaaguuaccacu

SEQ ID NO: 640320 - RNA, 22 nt, Artificial Sequence
  Synthetic
gucccuuuucaaaguuaccacu

SEQ ID NO: 640321 - RNA, 23 nt, Artificial Sequence
  Synthetic
ugucccuuuucaaaguuaccacu

SEQ ID NO: 640322 - RNA, 24 nt, Artificial Sequence
  Synthetic
uugucccuuuucaaaguuaccacu

SEQ ID NO: 640323 - RNA, 18 nt, Artificial Sequence
  Synthetic
aagcaggcuguuaccacu

SEQ ID NO: 640324 - RNA, 19 nt, Artificial Sequence
  Synthetic
gaagcaggcuguuaccacu

SEQ ID NO: 640325 - RNA, 20 nt, Artificial Sequence
  Synthetic
ugaagcaggcuguuaccacu

SEQ ID NO: 640326 - RNA, 21 nt, Artificial Sequence
  Synthetic
augaagcaggcuguuaccacu

SEQ ID NO: 640327 - RNA, 22 nt, Artificial Sequence
  Synthetic
aaugaagcaggcuguuaccacu

SEQ ID NO: 640328 - RNA, 23 nt, Artificial Sequence
  Synthetic
aaaugaagcaggcuguuaccacu

SEQ ID NO: 640329 - RNA, 24 nt, Artificial Sequence
  Synthetic
aaaaugaagcaggcuguuaccacu

SEQ ID NO: 640330 - RNA, 18 nt, Artificial Sequence
  Synthetic
gauaucccuacacccacu

SEQ ID NO: 640331 - RNA, 19 nt, Artificial Sequence
  Synthetic
agauaucccuacacccacu

SEQ ID NO: 640332 - RNA, 20 nt, Artificial Sequence
  Synthetic
aagauaucccuacacccacu

SEQ ID NO: 640333 - RNA, 21 nt, Artificial Sequence
  Synthetic
aaagauaucccuacacccacu

SEQ ID NO: 640334 - RNA, 22 nt, Artificial Sequence
  Synthetic
caaagauaucccuacacccacu

SEQ ID NO: 640335 - RNA, 23 nt, Artificial Sequence
  Synthetic
ucaaagauaucccuacacccacu

SEQ ID NO: 640336 - RNA, 24 nt, Artificial Sequence
  Synthetic
uucaaagauaucccuacacccacu

SEQ ID NO: 640337 - RNA, 18 nt, Artificial Sequence
  Synthetic
gggauauaaguucccacu

SEQ ID NO: 640338 - RNA, 19 nt, Artificial Sequence
  Synthetic
ugggauauaaguucccacu

SEQ ID NO: 640339 - RNA, 20 nt, Artificial Sequence
  Synthetic
cugggauauaaguucccacu

SEQ ID NO: 640340 - RNA, 21 nt, Artificial Sequence
  Synthetic
acugggauauaaguucccacu

SEQ ID NO: 640341 - RNA, 22 nt, Artificial Sequence
  Synthetic
aacugggauauaaguucccacu

SEQ ID NO: 640342 - RNA, 23 nt, Artificial Sequence
  Synthetic
aaacugggauauaaguucccacu

SEQ ID NO: 640343 - RNA, 24 nt, Artificial Sequence
  Synthetic
aaaacugggauauaaguucccacu

SEQ ID NO: 640344 - RNA, 18 nt, Artificial Sequence
  Synthetic
cuuauuuuugaagccacu

SEQ ID NO: 640345 - RNA, 19 nt, Artificial Sequence
  Synthetic
ucuuauuuuugaagccacu

SEQ ID NO: 640346 - RNA, 20 nt, Artificial Sequence
  Synthetic
uucuuauuuuugaagccacu

SEQ ID NO: 640347 - RNA, 21 nt, Artificial Sequence
  Synthetic
auucuuauuuuugaagccacu

SEQ ID NO: 640348 - RNA, 22 nt, Artificial Sequence
  Synthetic
uauucuuauuuuugaagccacu

SEQ ID NO: 640349 - RNA, 23 nt, Artificial Sequence
  Synthetic
uuauucuuauuuuugaagccacu

SEQ ID NO: 640350 - RNA, 24 nt, Artificial Sequence
  Synthetic
auuauucuuauuuuugaagccacu

SEQ ID NO: 640351 - RNA, 18 nt, Artificial Sequence
  Synthetic
ccuguaaucccagccacu

SEQ ID NO: 640352 - RNA, 19 nt, Artificial Sequence
  Synthetic
accuguaaucccagccacu

SEQ ID NO: 640353 - RNA, 20 nt, Artificial Sequence
  Synthetic
caccuguaaucccagccacu

SEQ ID NO: 640354 - RNA, 21 nt, Artificial Sequence
  Synthetic
acaccuguaaucccagccacu

SEQ ID NO: 640355 - RNA, 22 nt, Artificial Sequence
  Synthetic
cacaccuguaaucccagccacu

SEQ ID NO: 640356 - RNA, 23 nt, Artificial Sequence
  Synthetic
gcacaccuguaaucccagccacu

SEQ ID NO: 640357 - RNA, 24 nt, Artificial Sequence
  Synthetic
ugcacaccuguaaucccagccacu

SEQ ID NO: 640358 - RNA, 19 nt, Artificial Sequence
  Synthetic
gccuguaaucccagccacu

SEQ ID NO: 640359 - RNA, 20 nt, Artificial Sequence
  Synthetic
ugccuguaaucccagccacu

SEQ ID NO: 640360 - RNA, 21 nt, Artificial Sequence
  Synthetic
gugccuguaaucccagccacu

SEQ ID NO: 640361 - RNA, 22 nt, Artificial Sequence
  Synthetic
ggugccuguaaucccagccacu

SEQ ID NO: 640362 - RNA, 23 nt, Artificial Sequence
  Synthetic
gggugccuguaaucccagccacu

SEQ ID NO: 640363 - RNA, 24 nt, Artificial Sequence
  Synthetic
ugggugccuguaaucccagccacu

SEQ ID NO: 640364 - RNA, 18 nt, Artificial Sequence
  Synthetic
ccuguagucccagccacu

SEQ ID NO: 640365 - RNA, 19 nt, Artificial Sequence
  Synthetic
gccuguagucccagccacu

SEQ ID NO: 640366 - RNA, 20 nt, Artificial Sequence
  Synthetic
ugccuguagucccagccacu

SEQ ID NO: 640367 - RNA, 21 nt, Artificial Sequence
  Synthetic
gugccuguagucccagccacu

SEQ ID NO: 640368 - RNA, 22 nt, Artificial Sequence
  Synthetic
cgugccuguagucccagccacu

SEQ ID NO: 640369 - RNA, 23 nt, Artificial Sequence
  Synthetic
acgugccuguagucccagccacu

SEQ ID NO: 640370 - RNA, 24 nt, Artificial Sequence
  Synthetic
cacgugccuguagucccagccacu

SEQ ID NO: 640371 - RNA, 18 nt, Artificial Sequence
  Synthetic
uaaauuaguucagccacu

SEQ ID NO: 640372 - RNA, 19 nt, Artificial Sequence
  Synthetic
guaaauuaguucagccacu

SEQ ID NO: 640373 - RNA, 20 nt, Artificial Sequence
  Synthetic
uguaaauuaguucagccacu

SEQ ID NO: 640374 - RNA, 21 nt, Artificial Sequence
  Synthetic
auguaaauuaguucagccacu

SEQ ID NO: 640375 - RNA, 22 nt, Artificial Sequence
  Synthetic
aauguaaauuaguucagccacu

SEQ ID NO: 640376 - RNA, 23 nt, Artificial Sequence
  Synthetic
gaauguaaauuaguucagccacu

SEQ ID NO: 640377 - RNA, 24 nt, Artificial Sequence
  Synthetic
ggaauguaaauuaguucagccacu

SEQ ID NO: 640378 - RNA, 18 nt, Artificial Sequence
  Synthetic
caccgauacagagccacu

SEQ ID NO: 640379 - RNA, 19 nt, Artificial Sequence
  Synthetic
ccaccgauacagagccacu

SEQ ID NO: 640380 - RNA, 20 nt, Artificial Sequence
  Synthetic
accaccgauacagagccacu

SEQ ID NO: 640381 - RNA, 21 nt, Artificial Sequence
  Synthetic
aaccaccgauacagagccacu

SEQ ID NO: 640382 - RNA, 22 nt, Artificial Sequence
  Synthetic
aaaccaccgauacagagccacu

SEQ ID NO: 640383 - RNA, 23 nt, Artificial Sequence
  Synthetic
aaaaccaccgauacagagccacu

SEQ ID NO: 640384 - RNA, 24 nt, Artificial Sequence
  Synthetic
gaaaaccaccgauacagagccacu

SEQ ID NO: 640385 - RNA, 18 nt, Artificial Sequence
  Synthetic
ugaaaagguguagccacu

SEQ ID NO: 640386 - RNA, 19 nt, Artificial Sequence
  Synthetic
gugaaaagguguagccacu

SEQ ID NO: 640387 - RNA, 20 nt, Artificial Sequence
  Synthetic
ugugaaaagguguagccacu

SEQ ID NO: 640388 - RNA, 21 nt, Artificial Sequence
  Synthetic
augugaaaagguguagccacu

SEQ ID NO: 640389 - RNA, 22 nt, Artificial Sequence
  Synthetic
aaugugaaaagguguagccacu

SEQ ID NO: 640390 - RNA, 23 nt, Artificial Sequence
  Synthetic
gaaugugaaaagguguagccacu

SEQ ID NO: 640391 - RNA, 24 nt, Artificial Sequence
  Synthetic
ggaaugugaaaagguguagccacu

SEQ ID NO: 640392 - RNA, 18 nt, Artificial Sequence
  Synthetic
uuggcaaaccuggccacu

SEQ ID NO: 640393 - RNA, 19 nt, Artificial Sequence
  Synthetic
cuuggcaaaccuggccacu

SEQ ID NO: 640394 - RNA, 20 nt, Artificial Sequence
  Synthetic
acuuggcaaaccuggccacu

SEQ ID NO: 640395 - RNA, 21 nt, Artificial Sequence
  Synthetic
uacuuggcaaaccuggccacu

SEQ ID NO: 640396 - RNA, 22 nt, Artificial Sequence
  Synthetic
auacuuggcaaaccuggccacu

SEQ ID NO: 640397 - RNA, 23 nt, Artificial Sequence
  Synthetic
uauacuuggcaaaccuggccacu

SEQ ID NO: 640398 - RNA, 24 nt, Artificial Sequence
  Synthetic
cuauacuuggcaaaccuggccacu

SEQ ID NO: 640399 - RNA, 18 nt, Artificial Sequence
  Synthetic
guuucuuccacugccacu

SEQ ID NO: 640400 - RNA, 19 nt, Artificial Sequence
  Synthetic
uguuucuuccacugccacu

SEQ ID NO: 640401 - RNA, 20 nt, Artificial Sequence
  Synthetic
auguuucuuccacugccacu

SEQ ID NO: 640402 - RNA, 21 nt, Artificial Sequence
  Synthetic
cauguuucuuccacugccacu

SEQ ID NO: 640403 - RNA, 22 nt, Artificial Sequence
  Synthetic
ccauguuucuuccacugccacu

SEQ ID NO: 640404 - RNA, 23 nt, Artificial Sequence
  Synthetic
uccauguuucuuccacugccacu

SEQ ID NO: 640405 - RNA, 24 nt, Artificial Sequence
  Synthetic
uuccauguuucuuccacugccacu

SEQ ID NO: 640406 - RNA, 18 nt, Artificial Sequence
  Synthetic
aagcuaagagcugccacu

SEQ ID NO: 640407 - RNA, 19 nt, Artificial Sequence
  Synthetic
uaagcuaagagcugccacu

SEQ ID NO: 640408 - RNA, 20 nt, Artificial Sequence
  Synthetic
auaagcuaagagcugccacu

SEQ ID NO: 640409 - RNA, 21 nt, Artificial Sequence
  Synthetic
aauaagcuaagagcugccacu

SEQ ID NO: 640410 - RNA, 22 nt, Artificial Sequence
  Synthetic
uaauaagcuaagagcugccacu

SEQ ID NO: 640411 - RNA, 23 nt, Artificial Sequence
  Synthetic
auaauaagcuaagagcugccacu

SEQ ID NO: 640412 - RNA, 24 nt, Artificial Sequence
  Synthetic
gauaauaagcuaagagcugccacu

SEQ ID NO: 640413 - RNA, 18 nt, Artificial Sequence
  Synthetic
uuuuugacaauugccacu

SEQ ID NO: 640414 - RNA, 19 nt, Artificial Sequence
  Synthetic
auuuuugacaauugccacu

SEQ ID NO: 640415 - RNA, 20 nt, Artificial Sequence
  Synthetic
aauuuuugacaauugccacu

SEQ ID NO: 640416 - RNA, 21 nt, Artificial Sequence
  Synthetic
aaauuuuugacaauugccacu

SEQ ID NO: 640417 - RNA, 22 nt, Artificial Sequence
  Synthetic
caaauuuuugacaauugccacu

SEQ ID NO: 640418 - RNA, 23 nt, Artificial Sequence
  Synthetic
ccaaauuuuugacaauugccacu

SEQ ID NO: 640419 - RNA, 24 nt, Artificial Sequence
  Synthetic
cccaaauuuuugacaauugccacu

SEQ ID NO: 640420 - RNA, 18 nt, Artificial Sequence
  Synthetic
ucagugcuguaauccacu

SEQ ID NO: 640421 - RNA, 19 nt, Artificial Sequence
  Synthetic
aucagugcuguaauccacu

SEQ ID NO: 640422 - RNA, 20 nt, Artificial Sequence
  Synthetic
uaucagugcuguaauccacu

SEQ ID NO: 640423 - RNA, 21 nt, Artificial Sequence
  Synthetic
uuaucagugcuguaauccacu

SEQ ID NO: 640424 - RNA, 22 nt, Artificial Sequence
  Synthetic
guuaucagugcuguaauccacu

SEQ ID NO: 640425 - RNA, 23 nt, Artificial Sequence
  Synthetic
aguuaucagugcuguaauccacu

SEQ ID NO: 640426 - RNA, 24 nt, Artificial Sequence
  Synthetic
uaguuaucagugcuguaauccacu

SEQ ID NO: 640427 - RNA, 18 nt, Artificial Sequence
  Synthetic
cucccagguuacuccacu

SEQ ID NO: 640428 - RNA, 19 nt, Artificial Sequence
  Synthetic
acucccagguuacuccacu

SEQ ID NO: 640429 - RNA, 20 nt, Artificial Sequence
  Synthetic
uacucccagguuacuccacu

SEQ ID NO: 640430 - RNA, 21 nt, Artificial Sequence
  Synthetic
guacucccagguuacuccacu

SEQ ID NO: 640431 - RNA, 22 nt, Artificial Sequence
  Synthetic
uguacucccagguuacuccacu

SEQ ID NO: 640432 - RNA, 23 nt, Artificial Sequence
  Synthetic
auguacucccagguuacuccacu

SEQ ID NO: 640433 - RNA, 24 nt, Artificial Sequence
  Synthetic
cauguacucccagguuacuccacu

SEQ ID NO: 640434 - RNA, 18 nt, Artificial Sequence
  Synthetic
aggcugcugggcuccacu

SEQ ID NO: 640435 - RNA, 19 nt, Artificial Sequence
  Synthetic
caggcugcugggcuccacu

SEQ ID NO: 640436 - RNA, 20 nt, Artificial Sequence
  Synthetic
acaggcugcugggcuccacu

SEQ ID NO: 640437 - RNA, 21 nt, Artificial Sequence
  Synthetic
cacaggcugcugggcuccacu

SEQ ID NO: 640438 - RNA, 22 nt, Artificial Sequence
  Synthetic
acacaggcugcugggcuccacu

SEQ ID NO: 640439 - RNA, 23 nt, Artificial Sequence
  Synthetic
aacacaggcugcugggcuccacu

SEQ ID NO: 640440 - RNA, 24 nt, Artificial Sequence
  Synthetic
aaacacaggcugcugggcuccacu

SEQ ID NO: 640441 - RNA, 18 nt, Artificial Sequence
  Synthetic
uuuuuuuuuuucuccacu

SEQ ID NO: 640442 - RNA, 19 nt, Artificial Sequence
  Synthetic
uuuuuuuuuuuucuccacu

SEQ ID NO: 640443 - RNA, 20 nt, Artificial Sequence
  Synthetic
uuuuuuuuuuuuucuccacu

SEQ ID NO: 640444 - RNA, 21 nt, Artificial Sequence
  Synthetic
guuuuuuuuuuuuucuccacu

SEQ ID NO: 640445 - RNA, 22 nt, Artificial Sequence
  Synthetic
aguuuuuuuuuuuuucuccacu

SEQ ID NO: 640446 - RNA, 23 nt, Artificial Sequence
  Synthetic
gaguuuuuuuuuuuuucuccacu

SEQ ID NO: 640447 - RNA, 24 nt, Artificial Sequence
  Synthetic
ggaguuuuuuuuuuuuucuccacu

SEQ ID NO: 640448 - RNA, 18 nt, Artificial Sequence
  Synthetic
gaucacauaugguccacu

SEQ ID NO: 640449 - RNA, 19 nt, Artificial Sequence
  Synthetic
ugaucacauaugguccacu

SEQ ID NO: 640450 - RNA, 20 nt, Artificial Sequence
  Synthetic
augaucacauaugguccacu

SEQ ID NO: 640451 - RNA, 21 nt, Artificial Sequence
  Synthetic
uaugaucacauaugguccacu

SEQ ID NO: 640452 - RNA, 22 nt, Artificial Sequence
  Synthetic
cuaugaucacauaugguccacu

SEQ ID NO: 640453 - RNA, 23 nt, Artificial Sequence
  Synthetic
ucuaugaucacauaugguccacu

SEQ ID NO: 640454 - RNA, 24 nt, Artificial Sequence
  Synthetic
cucuaugaucacauaugguccacu

SEQ ID NO: 640455 - RNA, 18 nt, Artificial Sequence
  Synthetic
uuaaauaauauguccacu

SEQ ID NO: 640456 - RNA, 19 nt, Artificial Sequence
  Synthetic
uuuaaauaauauguccacu

SEQ ID NO: 640457 - RNA, 20 nt, Artificial Sequence
  Synthetic
uuuuaaauaauauguccacu

SEQ ID NO: 640458 - RNA, 21 nt, Artificial Sequence
  Synthetic
auuuuaaauaauauguccacu

SEQ ID NO: 640459 - RNA, 22 nt, Artificial Sequence
  Synthetic
gauuuuaaauaauauguccacu

SEQ ID NO: 640460 - RNA, 23 nt, Artificial Sequence
  Synthetic
agauuuuaaauaauauguccacu

SEQ ID NO: 640461 - RNA, 24 nt, Artificial Sequence
  Synthetic
aagauuuuaaauaauauguccacu

SEQ ID NO: 640462 - RNA, 18 nt, Artificial Sequence
  Synthetic
accauacugcauuccacu

SEQ ID NO: 640463 - RNA, 19 nt, Artificial Sequence
  Synthetic
aaccauacugcauuccacu

SEQ ID NO: 640464 - RNA, 20 nt, Artificial Sequence
  Synthetic
aaaccauacugcauuccacu

SEQ ID NO: 640465 - RNA, 21 nt, Artificial Sequence
  Synthetic
gaaaccauacugcauuccacu

SEQ ID NO: 640466 - RNA, 22 nt, Artificial Sequence
  Synthetic
ugaaaccauacugcauuccacu

SEQ ID NO: 640467 - RNA, 23 nt, Artificial Sequence
  Synthetic
augaaaccauacugcauuccacu

SEQ ID NO: 640468 - RNA, 24 nt, Artificial Sequence
  Synthetic
caugaaaccauacugcauuccacu

SEQ ID NO: 640469 - RNA, 18 nt, Artificial Sequence
  Synthetic
gguuuaccgccuuccacu

SEQ ID NO: 640470 - RNA, 19 nt, Artificial Sequence
  Synthetic
cgguuuaccgccuuccacu

SEQ ID NO: 640471 - RNA, 20 nt, Artificial Sequence
  Synthetic
acgguuuaccgccuuccacu

SEQ ID NO: 640472 - RNA, 21 nt, Artificial Sequence
  Synthetic
aacgguuuaccgccuuccacu

SEQ ID NO: 640473 - RNA, 22 nt, Artificial Sequence
  Synthetic
aaacgguuuaccgccuuccacu

SEQ ID NO: 640474 - RNA, 23 nt, Artificial Sequence
  Synthetic
uaaacgguuuaccgccuuccacu

SEQ ID NO: 640475 - RNA, 24 nt, Artificial Sequence
  Synthetic
guaaacgguuuaccgccuuccacu

SEQ ID NO: 640476 - RNA, 18 nt, Artificial Sequence
  Synthetic
guaucacuuaaaagcacu

SEQ ID NO: 640477 - RNA, 19 nt, Artificial Sequence
  Synthetic
cguaucacuuaaaagcacu

SEQ ID NO: 640478 - RNA, 20 nt, Artificial Sequence
  Synthetic
ucguaucacuuaaaagcacu

SEQ ID NO: 640479 - RNA, 21 nt, Artificial Sequence
  Synthetic
uucguaucacuuaaaagcacu

SEQ ID NO: 640480 - RNA, 22 nt, Artificial Sequence
  Synthetic
cuucguaucacuuaaaagcacu

SEQ ID NO: 640481 - RNA, 23 nt, Artificial Sequence
  Synthetic
acuucguaucacuuaaaagcacu

SEQ ID NO: 640482 - RNA, 24 nt, Artificial Sequence
  Synthetic
gacuucguaucacuuaaaagcacu

SEQ ID NO: 640483 - RNA, 18 nt, Artificial Sequence
  Synthetic
uaccuuacacaaagcacu

SEQ ID NO: 640484 - RNA, 19 nt, Artificial Sequence
  Synthetic
uuaccuuacacaaagcacu

SEQ ID NO: 640485 - RNA, 20 nt, Artificial Sequence
  Synthetic
guuaccuuacacaaagcacu

SEQ ID NO: 640486 - RNA, 21 nt, Artificial Sequence
  Synthetic
uguuaccuuacacaaagcacu

SEQ ID NO: 640487 - RNA, 22 nt, Artificial Sequence
  Synthetic
cuguuaccuuacacaaagcacu

SEQ ID NO: 640488 - RNA, 23 nt, Artificial Sequence
  Synthetic
ccuguuaccuuacacaaagcacu

SEQ ID NO: 640489 - RNA, 24 nt, Artificial Sequence
  Synthetic
gccuguuaccuuacacaaagcacu

SEQ ID NO: 640490 - RNA, 18 nt, Artificial Sequence
  Synthetic
ccucgacaagcaagcacu

SEQ ID NO: 640491 - RNA, 19 nt, Artificial Sequence
  Synthetic
accucgacaagcaagcacu

SEQ ID NO: 640492 - RNA, 20 nt, Artificial Sequence
  Synthetic
caccucgacaagcaagcacu

SEQ ID NO: 640493 - RNA, 21 nt, Artificial Sequence
  Synthetic
acaccucgacaagcaagcacu

SEQ ID NO: 640494 - RNA, 22 nt, Artificial Sequence
  Synthetic
cacaccucgacaagcaagcacu

SEQ ID NO: 640495 - RNA, 23 nt, Artificial Sequence
  Synthetic
acacaccucgacaagcaagcacu

SEQ ID NO: 640496 - RNA, 24 nt, Artificial Sequence
  Synthetic
uacacaccucgacaagcaagcacu

SEQ ID NO: 640497 - RNA, 18 nt, Artificial Sequence
  Synthetic
caugggcuggcaagcacu

SEQ ID NO: 640498 - RNA, 19 nt, Artificial Sequence
  Synthetic
gcaugggcuggcaagcacu

SEQ ID NO: 640499 - RNA, 20 nt, Artificial Sequence
  Synthetic
agcaugggcuggcaagcacu

SEQ ID NO: 640500 - RNA, 21 nt, Artificial Sequence
  Synthetic
cagcaugggcuggcaagcacu

SEQ ID NO: 640501 - RNA, 22 nt, Artificial Sequence
  Synthetic
ucagcaugggcuggcaagcacu

SEQ ID NO: 640502 - RNA, 23 nt, Artificial Sequence
  Synthetic
cucagcaugggcuggcaagcacu

SEQ ID NO: 640503 - RNA, 24 nt, Artificial Sequence
  Synthetic
acucagcaugggcuggcaagcacu

SEQ ID NO: 640504 - RNA, 18 nt, Artificial Sequence
  Synthetic
auuauuucuggaagcacu

SEQ ID NO: 640505 - RNA, 19 nt, Artificial Sequence
  Synthetic
gauuauuucuggaagcacu

SEQ ID NO: 640506 - RNA, 20 nt, Artificial Sequence
  Synthetic
agauuauuucuggaagcacu

SEQ ID NO: 640507 - RNA, 21 nt, Artificial Sequence
  Synthetic
gagauuauuucuggaagcacu

SEQ ID NO: 640508 - RNA, 22 nt, Artificial Sequence
  Synthetic
ggagauuauuucuggaagcacu

SEQ ID NO: 640509 - RNA, 23 nt, Artificial Sequence
  Synthetic
uggagauuauuucuggaagcacu

SEQ ID NO: 640510 - RNA, 24 nt, Artificial Sequence
  Synthetic
auggagauuauuucuggaagcacu

SEQ ID NO: 640511 - RNA, 18 nt, Artificial Sequence
  Synthetic
guuuucauucuaagcacu

SEQ ID NO: 640512 - RNA, 19 nt, Artificial Sequence
  Synthetic
aguuuucauucuaagcacu

SEQ ID NO: 640513 - RNA, 20 nt, Artificial Sequence
  Synthetic
aaguuuucauucuaagcacu

SEQ ID NO: 640514 - RNA, 21 nt, Artificial Sequence
  Synthetic
caaguuuucauucuaagcacu

SEQ ID NO: 640515 - RNA, 22 nt, Artificial Sequence
  Synthetic
gcaaguuuucauucuaagcacu

SEQ ID NO: 640516 - RNA, 23 nt, Artificial Sequence
  Synthetic
ugcaaguuuucauucuaagcacu

SEQ ID NO: 640517 - RNA, 24 nt, Artificial Sequence
  Synthetic
uugcaaguuuucauucuaagcacu

SEQ ID NO: 640518 - RNA, 18 nt, Artificial Sequence
  Synthetic
guaacauuacacagcacu

SEQ ID NO: 640519 - RNA, 19 nt, Artificial Sequence
  Synthetic
uguaacauuacacagcacu

SEQ ID NO: 640520 - RNA, 20 nt, Artificial Sequence
  Synthetic
auguaacauuacacagcacu

SEQ ID NO: 640521 - RNA, 21 nt, Artificial Sequence
  Synthetic
uauguaacauuacacagcacu

SEQ ID NO: 640522 - RNA, 22 nt, Artificial Sequence
  Synthetic
cuauguaacauuacacagcacu

SEQ ID NO: 640523 - RNA, 23 nt, Artificial Sequence
  Synthetic
ccuauguaacauuacacagcacu

SEQ ID NO: 640524 - RNA, 24 nt, Artificial Sequence
  Synthetic
gccuauguaacauuacacagcacu

SEQ ID NO: 640525 - RNA, 18 nt, Artificial Sequence
  Synthetic
cccaagucugacagcacu

SEQ ID NO: 640526 - RNA, 19 nt, Artificial Sequence
  Synthetic
ucccaagucugacagcacu

SEQ ID NO: 640527 - RNA, 20 nt, Artificial Sequence
  Synthetic
cucccaagucugacagcacu

SEQ ID NO: 640528 - RNA, 21 nt, Artificial Sequence
  Synthetic
ucucccaagucugacagcacu

SEQ ID NO: 640529 - RNA, 22 nt, Artificial Sequence
  Synthetic
cucucccaagucugacagcacu

SEQ ID NO: 640530 - RNA, 23 nt, Artificial Sequence
  Synthetic
acucucccaagucugacagcacu

SEQ ID NO: 640531 - RNA, 24 nt, Artificial Sequence
  Synthetic
aacucucccaagucugacagcacu

SEQ ID NO: 640532 - RNA, 18 nt, Artificial Sequence
  Synthetic
gccuguaauaccagcacu

SEQ ID NO: 640533 - RNA, 19 nt, Artificial Sequence
  Synthetic
ugccuguaauaccagcacu

SEQ ID NO: 640534 - RNA, 20 nt, Artificial Sequence
  Synthetic
augccuguaauaccagcacu

SEQ ID NO: 640535 - RNA, 21 nt, Artificial Sequence
  Synthetic
caugccuguaauaccagcacu

SEQ ID NO: 640536 - RNA, 22 nt, Artificial Sequence
  Synthetic
ucaugccuguaauaccagcacu

SEQ ID NO: 640537 - RNA, 23 nt, Artificial Sequence
  Synthetic
cucaugccuguaauaccagcacu

SEQ ID NO: 640538 - RNA, 24 nt, Artificial Sequence
  Synthetic
gcucaugccuguaauaccagcacu

SEQ ID NO: 640539 - RNA, 18 nt, Artificial Sequence
  Synthetic
gccuguaaacccagcacu

SEQ ID NO: 640540 - RNA, 19 nt, Artificial Sequence
  Synthetic
cgccuguaaacccagcacu

SEQ ID NO: 640541 - RNA, 20 nt, Artificial Sequence
  Synthetic
acgccuguaaacccagcacu

SEQ ID NO: 640542 - RNA, 21 nt, Artificial Sequence
  Synthetic
cacgccuguaaacccagcacu

SEQ ID NO: 640543 - RNA, 22 nt, Artificial Sequence
  Synthetic
ucacgccuguaaacccagcacu

SEQ ID NO: 640544 - RNA, 23 nt, Artificial Sequence
  Synthetic
cucacgccuguaaacccagcacu

SEQ ID NO: 640545 - RNA, 24 nt, Artificial Sequence
  Synthetic
gcucacgccuguaaacccagcacu

SEQ ID NO: 640546 - RNA, 18 nt, Artificial Sequence
  Synthetic
ccuguaaaucccagcacu

SEQ ID NO: 640547 - RNA, 19 nt, Artificial Sequence
  Synthetic
gccuguaaaucccagcacu

SEQ ID NO: 640548 - RNA, 20 nt, Artificial Sequence
  Synthetic
cgccuguaaaucccagcacu

SEQ ID NO: 640549 - RNA, 21 nt, Artificial Sequence
  Synthetic
acgccuguaaaucccagcacu

SEQ ID NO: 640550 - RNA, 22 nt, Artificial Sequence
  Synthetic
cacgccuguaaaucccagcacu

SEQ ID NO: 640551 - RNA, 23 nt, Artificial Sequence
  Synthetic
ucacgccuguaaaucccagcacu

SEQ ID NO: 640552 - RNA, 24 nt, Artificial Sequence
  Synthetic
gucacgccuguaaaucccagcacu

SEQ ID NO: 640553 - RNA, 18 nt, Artificial Sequence
  Synthetic
gucugcaaucccagcacu

SEQ ID NO: 640554 - RNA, 19 nt, Artificial Sequence
  Synthetic
cgucugcaaucccagcacu

SEQ ID NO: 640555 - RNA, 20 nt, Artificial Sequence
  Synthetic
acgucugcaaucccagcacu

SEQ ID NO: 640556 - RNA, 21 nt, Artificial Sequence
  Synthetic
cacgucugcaaucccagcacu

SEQ ID NO: 640557 - RNA, 22 nt, Artificial Sequence
  Synthetic
ucacgucugcaaucccagcacu

SEQ ID NO: 640558 - RNA, 23 nt, Artificial Sequence
  Synthetic
cucacgucugcaaucccagcacu

SEQ ID NO: 640559 - RNA, 24 nt, Artificial Sequence
  Synthetic
gcucacgucugcaaucccagcacu

SEQ ID NO: 640560 - RNA, 18 nt, Artificial Sequence
  Synthetic
accaguaaucccagcacu

SEQ ID NO: 640561 - RNA, 19 nt, Artificial Sequence
  Synthetic
caccaguaaucccagcacu

SEQ ID NO: 640562 - RNA, 20 nt, Artificial Sequence
  Synthetic
acaccaguaaucccagcacu

SEQ ID NO: 640563 - RNA, 21 nt, Artificial Sequence
  Synthetic
cacaccaguaaucccagcacu

SEQ ID NO: 640564 - RNA, 22 nt, Artificial Sequence
  Synthetic
ucacaccaguaaucccagcacu

SEQ ID NO: 640565 - RNA, 23 nt, Artificial Sequence
  Synthetic
cucacaccaguaaucccagcacu

SEQ ID NO: 640566 - RNA, 24 nt, Artificial Sequence
  Synthetic
gcucacaccaguaaucccagcacu

SEQ ID NO: 640567 - RNA, 18 nt, Artificial Sequence
  Synthetic
gcccguaaucccagcacu

SEQ ID NO: 640568 - RNA, 19 nt, Artificial Sequence
  Synthetic
ugcccguaaucccagcacu

SEQ ID NO: 640569 - RNA, 20 nt, Artificial Sequence
  Synthetic
augcccguaaucccagcacu

SEQ ID NO: 640570 - RNA, 21 nt, Artificial Sequence
  Synthetic
caugcccguaaucccagcacu

SEQ ID NO: 640571 - RNA, 22 nt, Artificial Sequence
  Synthetic
ucaugcccguaaucccagcacu

SEQ ID NO: 640572 - RNA, 23 nt, Artificial Sequence
  Synthetic
cucaugcccguaaucccagcacu

SEQ ID NO: 640573 - RNA, 24 nt, Artificial Sequence
  Synthetic
gcucaugcccguaaucccagcacu

SEQ ID NO: 640574 - RNA, 18 nt, Artificial Sequence
  Synthetic
gcauguaaucccagcacu

SEQ ID NO: 640575 - RNA, 19 nt, Artificial Sequence
  Synthetic
ugcauguaaucccagcacu

SEQ ID NO: 640576 - RNA, 20 nt, Artificial Sequence
  Synthetic
augcauguaaucccagcacu

SEQ ID NO: 640577 - RNA, 21 nt, Artificial Sequence
  Synthetic
caugcauguaaucccagcacu

SEQ ID NO: 640578 - RNA, 22 nt, Artificial Sequence
  Synthetic
ucaugcauguaaucccagcacu

SEQ ID NO: 640579 - RNA, 23 nt, Artificial Sequence
  Synthetic
cucaugcauguaaucccagcacu

SEQ ID NO: 640580 - RNA, 24 nt, Artificial Sequence
  Synthetic
gcucaugcauguaaucccagcacu

SEQ ID NO: 640581 - RNA, 18 nt, Artificial Sequence
  Synthetic
gacuguaaucccagcacu

SEQ ID NO: 640582 - RNA, 19 nt, Artificial Sequence
  Synthetic
agacuguaaucccagcacu

SEQ ID NO: 640583 - RNA, 20 nt, Artificial Sequence
  Synthetic
aagacuguaaucccagcacu

SEQ ID NO: 640584 - RNA, 21 nt, Artificial Sequence
  Synthetic
caagacuguaaucccagcacu

SEQ ID NO: 640585 - RNA, 22 nt, Artificial Sequence
  Synthetic
ucaagacuguaaucccagcacu

SEQ ID NO: 640586 - RNA, 23 nt, Artificial Sequence
  Synthetic
cucaagacuguaaucccagcacu

SEQ ID NO: 640587 - RNA, 24 nt, Artificial Sequence
  Synthetic
gcucaagacuguaaucccagcacu

SEQ ID NO: 640588 - RNA, 21 nt, Artificial Sequence
  Synthetic
cacaccuguaaucccagcacu

SEQ ID NO: 640589 - RNA, 22 nt, Artificial Sequence
  Synthetic
ucacaccuguaaucccagcacu

SEQ ID NO: 640590 - RNA, 23 nt, Artificial Sequence
  Synthetic
cucacaccuguaaucccagcacu

SEQ ID NO: 640591 - RNA, 24 nt, Artificial Sequence
  Synthetic
gcucacaccuguaaucccagcacu

SEQ ID NO: 640592 - RNA, 18 nt, Artificial Sequence
  Synthetic
gccuguaaucccagcacu

SEQ ID NO: 640593 - RNA, 19 nt, Artificial Sequence
  Synthetic
ugccuguaaucccagcacu

SEQ ID NO: 640594 - RNA, 22 nt, Artificial Sequence
  Synthetic
acaugccuguaaucccagcacu

SEQ ID NO: 640595 - RNA, 23 nt, Artificial Sequence
  Synthetic
cacaugccuguaaucccagcacu

SEQ ID NO: 640596 - RNA, 24 nt, Artificial Sequence
  Synthetic
gcacaugccuguaaucccagcacu

SEQ ID NO: 640597 - RNA, 20 nt, Artificial Sequence
  Synthetic
uugccuguaaucccagcacu

SEQ ID NO: 640598 - RNA, 21 nt, Artificial Sequence
  Synthetic
cuugccuguaaucccagcacu

SEQ ID NO: 640599 - RNA, 22 nt, Artificial Sequence
  Synthetic
ucuugccuguaaucccagcacu

SEQ ID NO: 640600 - RNA, 23 nt, Artificial Sequence
  Synthetic
cucuugccuguaaucccagcacu

SEQ ID NO: 640601 - RNA, 24 nt, Artificial Sequence
  Synthetic
gcucuugccuguaaucccagcacu

SEQ ID NO: 640602 - RNA, 18 nt, Artificial Sequence
  Synthetic
gucuguaaucccagcacu

SEQ ID NO: 640603 - RNA, 19 nt, Artificial Sequence
  Synthetic
ggucuguaaucccagcacu

SEQ ID NO: 640604 - RNA, 20 nt, Artificial Sequence
  Synthetic
aggucuguaaucccagcacu

SEQ ID NO: 640605 - RNA, 21 nt, Artificial Sequence
  Synthetic
caggucuguaaucccagcacu

SEQ ID NO: 640606 - RNA, 22 nt, Artificial Sequence
  Synthetic
ucaggucuguaaucccagcacu

SEQ ID NO: 640607 - RNA, 23 nt, Artificial Sequence
  Synthetic
cucaggucuguaaucccagcacu

SEQ ID NO: 640608 - RNA, 24 nt, Artificial Sequence
  Synthetic
gcucaggucuguaaucccagcacu

SEQ ID NO: 640609 - RNA, 18 nt, Artificial Sequence
  Synthetic
cgccuguaucccagcacu

SEQ ID NO: 640610 - RNA, 19 nt, Artificial Sequence
  Synthetic
acgccuguaucccagcacu

SEQ ID NO: 640611 - RNA, 20 nt, Artificial Sequence
  Synthetic
cacgccuguaucccagcacu

SEQ ID NO: 640612 - RNA, 21 nt, Artificial Sequence
  Synthetic
ucacgccuguaucccagcacu

SEQ ID NO: 640613 - RNA, 22 nt, Artificial Sequence
  Synthetic
cucacgccuguaucccagcacu

SEQ ID NO: 640614 - RNA, 23 nt, Artificial Sequence
  Synthetic
gcucacgccuguaucccagcacu

SEQ ID NO: 640615 - RNA, 24 nt, Artificial Sequence
  Synthetic
ggcucacgccuguaucccagcacu

SEQ ID NO: 640616 - RNA, 18 nt, Artificial Sequence
  Synthetic
uguaucauuuccagcacu

SEQ ID NO: 640617 - RNA, 19 nt, Artificial Sequence
  Synthetic
cuguaucauuuccagcacu

SEQ ID NO: 640618 - RNA, 20 nt, Artificial Sequence
  Synthetic
ucuguaucauuuccagcacu

SEQ ID NO: 640619 - RNA, 21 nt, Artificial Sequence
  Synthetic
gucuguaucauuuccagcacu

SEQ ID NO: 640620 - RNA, 22 nt, Artificial Sequence
  Synthetic
ugucuguaucauuuccagcacu

SEQ ID NO: 640621 - RNA, 23 nt, Artificial Sequence
  Synthetic
cugucuguaucauuuccagcacu

SEQ ID NO: 640622 - RNA, 24 nt, Artificial Sequence
  Synthetic
gcugucuguaucauuuccagcacu

SEQ ID NO: 640623 - RNA, 18 nt, Artificial Sequence
  Synthetic
uguucucucaucagcacu

SEQ ID NO: 640624 - RNA, 19 nt, Artificial Sequence
  Synthetic
cuguucucucaucagcacu

SEQ ID NO: 640625 - RNA, 20 nt, Artificial Sequence
  Synthetic
acuguucucucaucagcacu

SEQ ID NO: 640626 - RNA, 21 nt, Artificial Sequence
  Synthetic
aacuguucucucaucagcacu

SEQ ID NO: 640627 - RNA, 22 nt, Artificial Sequence
  Synthetic
aaacuguucucucaucagcacu

SEQ ID NO: 640628 - RNA, 23 nt, Artificial Sequence
  Synthetic
uaaacuguucucucaucagcacu

SEQ ID NO: 640629 - RNA, 24 nt, Artificial Sequence
  Synthetic
cuaaacuguucucucaucagcacu

SEQ ID NO: 640630 - RNA, 18 nt, Artificial Sequence
  Synthetic
gugcgguggcucagcacu

SEQ ID NO: 640631 - RNA, 19 nt, Artificial Sequence
  Synthetic
ggugcgguggcucagcacu

SEQ ID NO: 640632 - RNA, 20 nt, Artificial Sequence
  Synthetic
gggugcgguggcucagcacu

SEQ ID NO: 640633 - RNA, 21 nt, Artificial Sequence
  Synthetic
ugggugcgguggcucagcacu

SEQ ID NO: 640634 - RNA, 22 nt, Artificial Sequence
  Synthetic
cugggugcgguggcucagcacu

SEQ ID NO: 640635 - RNA, 23 nt, Artificial Sequence
  Synthetic
gcugggugcgguggcucagcacu

SEQ ID NO: 640636 - RNA, 24 nt, Artificial Sequence
  Synthetic
ggcugggugcgguggcucagcacu

SEQ ID NO: 640637 - RNA, 19 nt, Artificial Sequence
  Synthetic
cgccuguaaucucagcacu

SEQ ID NO: 640638 - RNA, 20 nt, Artificial Sequence
  Synthetic
acgccuguaaucucagcacu

SEQ ID NO: 640639 - RNA, 21 nt, Artificial Sequence
  Synthetic
gacgccuguaaucucagcacu

SEQ ID NO: 640640 - RNA, 22 nt, Artificial Sequence
  Synthetic
ugacgccuguaaucucagcacu

SEQ ID NO: 640641 - RNA, 23 nt, Artificial Sequence
  Synthetic
cugacgccuguaaucucagcacu

SEQ ID NO: 640642 - RNA, 24 nt, Artificial Sequence
  Synthetic
gcugacgccuguaaucucagcacu

SEQ ID NO: 640643 - RNA, 18 nt, Artificial Sequence
  Synthetic
cuaacucaucucagcacu

SEQ ID NO: 640644 - RNA, 19 nt, Artificial Sequence
  Synthetic
acuaacucaucucagcacu

SEQ ID NO: 640645 - RNA, 20 nt, Artificial Sequence
  Synthetic
cacuaacucaucucagcacu

SEQ ID NO: 640646 - RNA, 21 nt, Artificial Sequence
  Synthetic
ucacuaacucaucucagcacu

SEQ ID NO: 640647 - RNA, 22 nt, Artificial Sequence
  Synthetic
cucacuaacucaucucagcacu

SEQ ID NO: 640648 - RNA, 23 nt, Artificial Sequence
  Synthetic
ucucacuaacucaucucagcacu

SEQ ID NO: 640649 - RNA, 24 nt, Artificial Sequence
  Synthetic
uucucacuaacucaucucagcacu

SEQ ID NO: 640650 - RNA, 18 nt, Artificial Sequence
  Synthetic
cucucugcugucagcacu

SEQ ID NO: 640651 - RNA, 19 nt, Artificial Sequence
  Synthetic
ccucucugcugucagcacu

SEQ ID NO: 640652 - RNA, 20 nt, Artificial Sequence
  Synthetic
accucucugcugucagcacu

SEQ ID NO: 640653 - RNA, 21 nt, Artificial Sequence
  Synthetic
uaccucucugcugucagcacu

SEQ ID NO: 640654 - RNA, 22 nt, Artificial Sequence
  Synthetic
uuaccucucugcugucagcacu

SEQ ID NO: 640655 - RNA, 23 nt, Artificial Sequence
  Synthetic
cuuaccucucugcugucagcacu

SEQ ID NO: 640656 - RNA, 24 nt, Artificial Sequence
  Synthetic
acuuaccucucugcugucagcacu

SEQ ID NO: 640657 - RNA, 18 nt, Artificial Sequence
  Synthetic
ucuuuuuccaagagcacu

SEQ ID NO: 640658 - RNA, 19 nt, Artificial Sequence
  Synthetic
gucuuuuuccaagagcacu

SEQ ID NO: 640659 - RNA, 20 nt, Artificial Sequence
  Synthetic
ggucuuuuuccaagagcacu

SEQ ID NO: 640660 - RNA, 21 nt, Artificial Sequence
  Synthetic
uggucuuuuuccaagagcacu

SEQ ID NO: 640661 - RNA, 22 nt, Artificial Sequence
  Synthetic
uuggucuuuuuccaagagcacu

SEQ ID NO: 640662 - RNA, 23 nt, Artificial Sequence
  Synthetic
uuuggucuuuuuccaagagcacu

SEQ ID NO: 640663 - RNA, 24 nt, Artificial Sequence
  Synthetic
uuuuggucuuuuuccaagagcacu

SEQ ID NO: 640664 - RNA, 18 nt, Artificial Sequence
  Synthetic
gcagacugacauagcacu

SEQ ID NO: 640665 - RNA, 19 nt, Artificial Sequence
  Synthetic
agcagacugacauagcacu

SEQ ID NO: 640666 - RNA, 20 nt, Artificial Sequence
  Synthetic
cagcagacugacauagcacu

SEQ ID NO: 640667 - RNA, 21 nt, Artificial Sequence
  Synthetic
acagcagacugacauagcacu

SEQ ID NO: 640668 - RNA, 22 nt, Artificial Sequence
  Synthetic
uacagcagacugacauagcacu

SEQ ID NO: 640669 - RNA, 23 nt, Artificial Sequence
  Synthetic
auacagcagacugacauagcacu

SEQ ID NO: 640670 - RNA, 24 nt, Artificial Sequence
  Synthetic
cauacagcagacugacauagcacu

SEQ ID NO: 640671 - RNA, 18 nt, Artificial Sequence
  Synthetic
gccuauaauccuagcacu

SEQ ID NO: 640672 - RNA, 19 nt, Artificial Sequence
  Synthetic
ugccuauaauccuagcacu

SEQ ID NO: 640673 - RNA, 20 nt, Artificial Sequence
  Synthetic
cugccuauaauccuagcacu

SEQ ID NO: 640674 - RNA, 21 nt, Artificial Sequence
  Synthetic
ccugccuauaauccuagcacu

SEQ ID NO: 640675 - RNA, 22 nt, Artificial Sequence
  Synthetic
gccugccuauaauccuagcacu

SEQ ID NO: 640676 - RNA, 23 nt, Artificial Sequence
  Synthetic
ugccugccuauaauccuagcacu

SEQ ID NO: 640677 - RNA, 24 nt, Artificial Sequence
  Synthetic
gugccugccuauaauccuagcacu

SEQ ID NO: 640678 - RNA, 18 nt, Artificial Sequence
  Synthetic
gccuguaauccuagcacu

SEQ ID NO: 640679 - RNA, 19 nt, Artificial Sequence
  Synthetic
cgccuguaauccuagcacu

SEQ ID NO: 640680 - RNA, 20 nt, Artificial Sequence
  Synthetic
acgccuguaauccuagcacu

SEQ ID NO: 640681 - RNA, 21 nt, Artificial Sequence
  Synthetic
cacgccuguaauccuagcacu

SEQ ID NO: 640682 - RNA, 22 nt, Artificial Sequence
  Synthetic
ucacgccuguaauccuagcacu

SEQ ID NO: 640683 - RNA, 23 nt, Artificial Sequence
  Synthetic
cucacgccuguaauccuagcacu

SEQ ID NO: 640684 - RNA, 24 nt, Artificial Sequence
  Synthetic
gcucacgccuguaauccuagcacu

SEQ ID NO: 640685 - RNA, 18 nt, Artificial Sequence
  Synthetic
gucugugauuuuagcacu

SEQ ID NO: 640686 - RNA, 19 nt, Artificial Sequence
  Synthetic
cgucugugauuuuagcacu

SEQ ID NO: 640687 - RNA, 20 nt, Artificial Sequence
  Synthetic
acgucugugauuuuagcacu

SEQ ID NO: 640688 - RNA, 21 nt, Artificial Sequence
  Synthetic
cacgucugugauuuuagcacu

SEQ ID NO: 640689 - RNA, 22 nt, Artificial Sequence
  Synthetic
ucacgucugugauuuuagcacu

SEQ ID NO: 640690 - RNA, 23 nt, Artificial Sequence
  Synthetic
cucacgucugugauuuuagcacu

SEQ ID NO: 640691 - RNA, 24 nt, Artificial Sequence
  Synthetic
gcucacgucugugauuuuagcacu

SEQ ID NO: 640692 - RNA, 18 nt, Artificial Sequence
  Synthetic
uugucuaguuuuagcacu

SEQ ID NO: 640693 - RNA, 19 nt, Artificial Sequence
  Synthetic
auugucuaguuuuagcacu

SEQ ID NO: 640694 - RNA, 20 nt, Artificial Sequence
  Synthetic
uauugucuaguuuuagcacu

SEQ ID NO: 640695 - RNA, 21 nt, Artificial Sequence
  Synthetic
uuauugucuaguuuuagcacu

SEQ ID NO: 640696 - RNA, 22 nt, Artificial Sequence
  Synthetic
uuuauugucuaguuuuagcacu

SEQ ID NO: 640697 - RNA, 23 nt, Artificial Sequence
  Synthetic
auuuauugucuaguuuuagcacu

SEQ ID NO: 640698 - RNA, 24 nt, Artificial Sequence
  Synthetic
gauuuauugucuaguuuuagcacu

SEQ ID NO: 640699 - RNA, 18 nt, Artificial Sequence
  Synthetic
gcccuuuaauuacgcacu

SEQ ID NO: 640700 - RNA, 19 nt, Artificial Sequence
  Synthetic
ggcccuuuaauuacgcacu

SEQ ID NO: 640701 - RNA, 20 nt, Artificial Sequence
  Synthetic
aggcccuuuaauuacgcacu

SEQ ID NO: 640702 - RNA, 21 nt, Artificial Sequence
  Synthetic
uaggcccuuuaauuacgcacu

SEQ ID NO: 640703 - RNA, 22 nt, Artificial Sequence
  Synthetic
auaggcccuuuaauuacgcacu

SEQ ID NO: 640704 - RNA, 23 nt, Artificial Sequence
  Synthetic
cauaggcccuuuaauuacgcacu

SEQ ID NO: 640705 - RNA, 24 nt, Artificial Sequence
  Synthetic
ucauaggcccuuuaauuacgcacu

SEQ ID NO: 640706 - RNA, 18 nt, Artificial Sequence
  Synthetic
gccuguaauccccgcacu

SEQ ID NO: 640707 - RNA, 19 nt, Artificial Sequence
  Synthetic
cgccuguaauccccgcacu

SEQ ID NO: 640708 - RNA, 20 nt, Artificial Sequence
  Synthetic
acgccuguaauccccgcacu

SEQ ID NO: 640709 - RNA, 21 nt, Artificial Sequence
  Synthetic
cacgccuguaauccccgcacu

SEQ ID NO: 640710 - RNA, 22 nt, Artificial Sequence
  Synthetic
ucacgccuguaauccccgcacu

SEQ ID NO: 640711 - RNA, 23 nt, Artificial Sequence
  Synthetic
cucacgccuguaauccccgcacu

SEQ ID NO: 640712 - RNA, 24 nt, Artificial Sequence
  Synthetic
gcucacgccuguaauccccgcacu

SEQ ID NO: 640713 - RNA, 19 nt, Artificial Sequence
  Synthetic
ugccuguaauccccgcacu

SEQ ID NO: 640714 - RNA, 20 nt, Artificial Sequence
  Synthetic
augccuguaauccccgcacu

SEQ ID NO: 640715 - RNA, 21 nt, Artificial Sequence
  Synthetic
caugccuguaauccccgcacu

SEQ ID NO: 640716 - RNA, 22 nt, Artificial Sequence
  Synthetic
ucaugccuguaauccccgcacu

SEQ ID NO: 640717 - RNA, 23 nt, Artificial Sequence
  Synthetic
cucaugccuguaauccccgcacu

SEQ ID NO: 640718 - RNA, 24 nt, Artificial Sequence
  Synthetic
gcucaugccuguaauccccgcacu

SEQ ID NO: 640719 - RNA, 18 nt, Artificial Sequence
  Synthetic
guugaggacaggcgcacu

SEQ ID NO: 640720 - RNA, 19 nt, Artificial Sequence
  Synthetic
aguugaggacaggcgcacu

SEQ ID NO: 640721 - RNA, 20 nt, Artificial Sequence
  Synthetic
aaguugaggacaggcgcacu

SEQ ID NO: 640722 - RNA, 21 nt, Artificial Sequence
  Synthetic
aaaguugaggacaggcgcacu

SEQ ID NO: 640723 - RNA, 22 nt, Artificial Sequence
  Synthetic
caaaguugaggacaggcgcacu

SEQ ID NO: 640724 - RNA, 23 nt, Artificial Sequence
  Synthetic
gcaaaguugaggacaggcgcacu

SEQ ID NO: 640725 - RNA, 24 nt, Artificial Sequence
  Synthetic
ggcaaaguugaggacaggcgcacu

SEQ ID NO: 640726 - RNA, 18 nt, Artificial Sequence
  Synthetic
ggcucccgcgugcgcacu

SEQ ID NO: 640727 - RNA, 19 nt, Artificial Sequence
  Synthetic
gggcucccgcgugcgcacu

SEQ ID NO: 640728 - RNA, 20 nt, Artificial Sequence
  Synthetic
ugggcucccgcgugcgcacu

SEQ ID NO: 640729 - RNA, 21 nt, Artificial Sequence
  Synthetic
augggcucccgcgugcgcacu

SEQ ID NO: 640730 - RNA, 22 nt, Artificial Sequence
  Synthetic
aaugggcucccgcgugcgcacu

SEQ ID NO: 640731 - RNA, 23 nt, Artificial Sequence
  Synthetic
aaaugggcucccgcgugcgcacu

SEQ ID NO: 640732 - RNA, 24 nt, Artificial Sequence
  Synthetic
caaaugggcucccgcgugcgcacu

SEQ ID NO: 640733 - RNA, 18 nt, Artificial Sequence
  Synthetic
uaauguacacaaggcacu

SEQ ID NO: 640734 - RNA, 19 nt, Artificial Sequence
  Synthetic
auaauguacacaaggcacu

SEQ ID NO: 640735 - RNA, 20 nt, Artificial Sequence
  Synthetic
aauaauguacacaaggcacu

SEQ ID NO: 640736 - RNA, 21 nt, Artificial Sequence
  Synthetic
aaauaauguacacaaggcacu

SEQ ID NO: 640737 - RNA, 22 nt, Artificial Sequence
  Synthetic
gaaauaauguacacaaggcacu

SEQ ID NO: 640738 - RNA, 23 nt, Artificial Sequence
  Synthetic
ggaaauaauguacacaaggcacu

SEQ ID NO: 640739 - RNA, 24 nt, Artificial Sequence
  Synthetic
aggaaauaauguacacaaggcacu

SEQ ID NO: 640740 - RNA, 18 nt, Artificial Sequence
  Synthetic
ugaggaacuagaggcacu

SEQ ID NO: 640741 - RNA, 19 nt, Artificial Sequence
  Synthetic
augaggaacuagaggcacu

SEQ ID NO: 640742 - RNA, 20 nt, Artificial Sequence
  Synthetic
aaugaggaacuagaggcacu

SEQ ID NO: 640743 - RNA, 21 nt, Artificial Sequence
  Synthetic
aaaugaggaacuagaggcacu

SEQ ID NO: 640744 - RNA, 22 nt, Artificial Sequence
  Synthetic
caaaugaggaacuagaggcacu

SEQ ID NO: 640745 - RNA, 23 nt, Artificial Sequence
  Synthetic
acaaaugaggaacuagaggcacu

SEQ ID NO: 640746 - RNA, 24 nt, Artificial Sequence
  Synthetic
gacaaaugaggaacuagaggcacu

SEQ ID NO: 640747 - RNA, 18 nt, Artificial Sequence
  Synthetic
uacuguauacuaggcacu

SEQ ID NO: 640748 - RNA, 19 nt, Artificial Sequence
  Synthetic
cuacuguauacuaggcacu

SEQ ID NO: 640749 - RNA, 20 nt, Artificial Sequence
  Synthetic
ucuacuguauacuaggcacu

SEQ ID NO: 640750 - RNA, 21 nt, Artificial Sequence
  Synthetic
gucuacuguauacuaggcacu

SEQ ID NO: 640751 - RNA, 22 nt, Artificial Sequence
  Synthetic
ugucuacuguauacuaggcacu

SEQ ID NO: 640752 - RNA, 23 nt, Artificial Sequence
  Synthetic
gugucuacuguauacuaggcacu

SEQ ID NO: 640753 - RNA, 24 nt, Artificial Sequence
  Synthetic
agugucuacuguauacuaggcacu

SEQ ID NO: 640754 - RNA, 18 nt, Artificial Sequence
  Synthetic
ugaccacaacauggcacu

SEQ ID NO: 640755 - RNA, 19 nt, Artificial Sequence
  Synthetic
gugaccacaacauggcacu

SEQ ID NO: 640756 - RNA, 20 nt, Artificial Sequence
  Synthetic
ggugaccacaacauggcacu

SEQ ID NO: 640757 - RNA, 21 nt, Artificial Sequence
  Synthetic
gggugaccacaacauggcacu

SEQ ID NO: 640758 - RNA, 22 nt, Artificial Sequence
  Synthetic
agggugaccacaacauggcacu

SEQ ID NO: 640759 - RNA, 23 nt, Artificial Sequence
  Synthetic
uagggugaccacaacauggcacu

SEQ ID NO: 640760 - RNA, 24 nt, Artificial Sequence
  Synthetic
auagggugaccacaacauggcacu

SEQ ID NO: 640761 - RNA, 18 nt, Artificial Sequence
  Synthetic
uuuguguugucuggcacu

SEQ ID NO: 640762 - RNA, 19 nt, Artificial Sequence
  Synthetic
uuuuguguugucuggcacu

SEQ ID NO: 640763 - RNA, 20 nt, Artificial Sequence
  Synthetic
guuuuguguugucuggcacu

SEQ ID NO: 640764 - RNA, 21 nt, Artificial Sequence
  Synthetic
cguuuuguguugucuggcacu

SEQ ID NO: 640765 - RNA, 22 nt, Artificial Sequence
  Synthetic
acguuuuguguugucuggcacu

SEQ ID NO: 640766 - RNA, 23 nt, Artificial Sequence
  Synthetic
uacguuuuguguugucuggcacu

SEQ ID NO: 640767 - RNA, 24 nt, Artificial Sequence
  Synthetic
uuacguuuuguguugucuggcacu

SEQ ID NO: 640768 - RNA, 18 nt, Artificial Sequence
  Synthetic
acacaaauacaaugcacu

SEQ ID NO: 640769 - RNA, 19 nt, Artificial Sequence
  Synthetic
uacacaaauacaaugcacu

SEQ ID NO: 640770 - RNA, 20 nt, Artificial Sequence
  Synthetic
auacacaaauacaaugcacu

SEQ ID NO: 640771 - RNA, 21 nt, Artificial Sequence
  Synthetic
gauacacaaauacaaugcacu

SEQ ID NO: 640772 - RNA, 22 nt, Artificial Sequence
  Synthetic
ugauacacaaauacaaugcacu

SEQ ID NO: 640773 - RNA, 23 nt, Artificial Sequence
  Synthetic
cugauacacaaauacaaugcacu

SEQ ID NO: 640774 - RNA, 24 nt, Artificial Sequence
  Synthetic
gcugauacacaaauacaaugcacu

SEQ ID NO: 640775 - RNA, 18 nt, Artificial Sequence
  Synthetic
uccuuuuguguaugcacu

SEQ ID NO: 640776 - RNA, 19 nt, Artificial Sequence
  Synthetic
uuccuuuuguguaugcacu

SEQ ID NO: 640777 - RNA, 20 nt, Artificial Sequence
  Synthetic
uuuccuuuuguguaugcacu

SEQ ID NO: 640778 - RNA, 21 nt, Artificial Sequence
  Synthetic
cuuuccuuuuguguaugcacu

SEQ ID NO: 640779 - RNA, 22 nt, Artificial Sequence
  Synthetic
acuuuccuuuuguguaugcacu

SEQ ID NO: 640780 - RNA, 23 nt, Artificial Sequence
  Synthetic
uacuuuccuuuuguguaugcacu

SEQ ID NO: 640781 - RNA, 24 nt, Artificial Sequence
  Synthetic
guacuuuccuuuuguguaugcacu

SEQ ID NO: 640782 - RNA, 18 nt, Artificial Sequence
  Synthetic
ccuagaggguggugcacu

SEQ ID NO: 640783 - RNA, 19 nt, Artificial Sequence
  Synthetic
uccuagaggguggugcacu

SEQ ID NO: 640784 - RNA, 20 nt, Artificial Sequence
  Synthetic
uuccuagaggguggugcacu

SEQ ID NO: 640785 - RNA, 21 nt, Artificial Sequence
  Synthetic
auuccuagaggguggugcacu

SEQ ID NO: 640786 - RNA, 22 nt, Artificial Sequence
  Synthetic
gauuccuagaggguggugcacu

SEQ ID NO: 640787 - RNA, 23 nt, Artificial Sequence
  Synthetic
ggauuccuagaggguggugcacu

SEQ ID NO: 640788 - RNA, 24 nt, Artificial Sequence
  Synthetic
gggauuccuagaggguggugcacu

SEQ ID NO: 640789 - RNA, 18 nt, Artificial Sequence
  Synthetic
uucuugcucuguugcacu

SEQ ID NO: 640790 - RNA, 19 nt, Artificial Sequence
  Synthetic
cuucuugcucuguugcacu

SEQ ID NO: 640791 - RNA, 20 nt, Artificial Sequence
  Synthetic
gcuucuugcucuguugcacu

SEQ ID NO: 640792 - RNA, 21 nt, Artificial Sequence
  Synthetic
agcuucuugcucuguugcacu

SEQ ID NO: 640793 - RNA, 22 nt, Artificial Sequence
  Synthetic
aagcuucuugcucuguugcacu

SEQ ID NO: 640794 - RNA, 23 nt, Artificial Sequence
  Synthetic
aaagcuucuugcucuguugcacu

SEQ ID NO: 640795 - RNA, 24 nt, Artificial Sequence
  Synthetic
gaaagcuucuugcucuguugcacu

SEQ ID NO: 640796 - RNA, 18 nt, Artificial Sequence
  Synthetic
uuuuaaugaguuugcacu

SEQ ID NO: 640797 - RNA, 19 nt, Artificial Sequence
  Synthetic
uuuuuaaugaguuugcacu

SEQ ID NO: 640798 - RNA, 20 nt, Artificial Sequence
  Synthetic
auuuuuaaugaguuugcacu

SEQ ID NO: 640799 - RNA, 21 nt, Artificial Sequence
  Synthetic
aauuuuuaaugaguuugcacu

SEQ ID NO: 640800 - RNA, 22 nt, Artificial Sequence
  Synthetic
aaauuuuuaaugaguuugcacu

SEQ ID NO: 640801 - RNA, 23 nt, Artificial Sequence
  Synthetic
aaaauuuuuaaugaguuugcacu

SEQ ID NO: 640802 - RNA, 24 nt, Artificial Sequence
  Synthetic
gaaaauuuuuaaugaguuugcacu

SEQ ID NO: 640803 - RNA, 18 nt, Artificial Sequence
  Synthetic
uuccauggagaaaucacu

SEQ ID NO: 640804 - RNA, 19 nt, Artificial Sequence
  Synthetic
uuuccauggagaaaucacu

SEQ ID NO: 640805 - RNA, 20 nt, Artificial Sequence
  Synthetic
guuuccauggagaaaucacu

SEQ ID NO: 640806 - RNA, 21 nt, Artificial Sequence
  Synthetic
gguuuccauggagaaaucacu

SEQ ID NO: 640807 - RNA, 22 nt, Artificial Sequence
  Synthetic
ugguuuccauggagaaaucacu

SEQ ID NO: 640808 - RNA, 23 nt, Artificial Sequence
  Synthetic
augguuuccauggagaaaucacu

SEQ ID NO: 640809 - RNA, 24 nt, Artificial Sequence
  Synthetic
aaugguuuccauggagaaaucacu

SEQ ID NO: 640810 - RNA, 18 nt, Artificial Sequence
  Synthetic
cugcuuccaacaaucacu

SEQ ID NO: 640811 - RNA, 19 nt, Artificial Sequence
  Synthetic
gcugcuuccaacaaucacu

SEQ ID NO: 640812 - RNA, 20 nt, Artificial Sequence
  Synthetic
ggcugcuuccaacaaucacu

SEQ ID NO: 640813 - RNA, 21 nt, Artificial Sequence
  Synthetic
gggcugcuuccaacaaucacu

SEQ ID NO: 640814 - RNA, 22 nt, Artificial Sequence
  Synthetic
ugggcugcuuccaacaaucacu

SEQ ID NO: 640815 - RNA, 23 nt, Artificial Sequence
  Synthetic
cugggcugcuuccaacaaucacu

SEQ ID NO: 640816 - RNA, 24 nt, Artificial Sequence
  Synthetic
gcugggcugcuuccaacaaucacu

SEQ ID NO: 640817 - RNA, 18 nt, Artificial Sequence
  Synthetic
acaugaauaagaaucacu

SEQ ID NO: 640818 - RNA, 19 nt, Artificial Sequence
  Synthetic
gacaugaauaagaaucacu

SEQ ID NO: 640819 - RNA, 20 nt, Artificial Sequence
  Synthetic
ugacaugaauaagaaucacu

SEQ ID NO: 640820 - RNA, 21 nt, Artificial Sequence
  Synthetic
uugacaugaauaagaaucacu

SEQ ID NO: 640821 - RNA, 22 nt, Artificial Sequence
  Synthetic
uuugacaugaauaagaaucacu

SEQ ID NO: 640822 - RNA, 23 nt, Artificial Sequence
  Synthetic
uuuugacaugaauaagaaucacu

SEQ ID NO: 640823 - RNA, 24 nt, Artificial Sequence
  Synthetic
auuuugacaugaauaagaaucacu

SEQ ID NO: 640824 - RNA, 18 nt, Artificial Sequence
  Synthetic
uggcacacuagaaucacu

SEQ ID NO: 640825 - RNA, 19 nt, Artificial Sequence
  Synthetic
guggcacacuagaaucacu

SEQ ID NO: 640826 - RNA, 20 nt, Artificial Sequence
  Synthetic
gguggcacacuagaaucacu

SEQ ID NO: 640827 - RNA, 21 nt, Artificial Sequence
  Synthetic
agguggcacacuagaaucacu

SEQ ID NO: 640828 - RNA, 22 nt, Artificial Sequence
  Synthetic
uagguggcacacuagaaucacu

SEQ ID NO: 640829 - RNA, 23 nt, Artificial Sequence
  Synthetic
cuagguggcacacuagaaucacu

SEQ ID NO: 640830 - RNA, 24 nt, Artificial Sequence
  Synthetic
ccuagguggcacacuagaaucacu

SEQ ID NO: 640831 - RNA, 18 nt, Artificial Sequence
  Synthetic
augugcccaugaaucacu

SEQ ID NO: 640832 - RNA, 19 nt, Artificial Sequence
  Synthetic
aaugugcccaugaaucacu

SEQ ID NO: 640833 - RNA, 20 nt, Artificial Sequence
  Synthetic
uaaugugcccaugaaucacu

SEQ ID NO: 640834 - RNA, 21 nt, Artificial Sequence
  Synthetic
uuaaugugcccaugaaucacu

SEQ ID NO: 640835 - RNA, 22 nt, Artificial Sequence
  Synthetic
uuuaaugugcccaugaaucacu

SEQ ID NO: 640836 - RNA, 23 nt, Artificial Sequence
  Synthetic
cuuuaaugugcccaugaaucacu

SEQ ID NO: 640837 - RNA, 24 nt, Artificial Sequence
  Synthetic
acuuuaaugugcccaugaaucacu

SEQ ID NO: 640838 - RNA, 18 nt, Artificial Sequence
  Synthetic
aggguuaugaagaucacu

SEQ ID NO: 640839 - RNA, 19 nt, Artificial Sequence
  Synthetic
aaggguuaugaagaucacu

SEQ ID NO: 640840 - RNA, 20 nt, Artificial Sequence
  Synthetic
aaaggguuaugaagaucacu

SEQ ID NO: 640841 - RNA, 21 nt, Artificial Sequence
  Synthetic
gaaaggguuaugaagaucacu

SEQ ID NO: 640842 - RNA, 22 nt, Artificial Sequence
  Synthetic
ggaaaggguuaugaagaucacu

SEQ ID NO: 640843 - RNA, 23 nt, Artificial Sequence
  Synthetic
gggaaaggguuaugaagaucacu

SEQ ID NO: 640844 - RNA, 24 nt, Artificial Sequence
  Synthetic
ugggaaaggguuaugaagaucacu

SEQ ID NO: 640845 - RNA, 18 nt, Artificial Sequence
  Synthetic
caaccaacaaggaucacu

SEQ ID NO: 640846 - RNA, 19 nt, Artificial Sequence
  Synthetic
ucaaccaacaaggaucacu

SEQ ID NO: 640847 - RNA, 20 nt, Artificial Sequence
  Synthetic
aucaaccaacaaggaucacu

SEQ ID NO: 640848 - RNA, 21 nt, Artificial Sequence
  Synthetic
aaucaaccaacaaggaucacu

SEQ ID NO: 640849 - RNA, 22 nt, Artificial Sequence
  Synthetic
caaucaaccaacaaggaucacu

SEQ ID NO: 640850 - RNA, 23 nt, Artificial Sequence
  Synthetic
ccaaucaaccaacaaggaucacu

SEQ ID NO: 640851 - RNA, 24 nt, Artificial Sequence
  Synthetic
accaaucaaccaacaaggaucacu

SEQ ID NO: 640852 - RNA, 18 nt, Artificial Sequence
  Synthetic
uuagucauuaugaucacu

SEQ ID NO: 640853 - RNA, 19 nt, Artificial Sequence
  Synthetic
auuagucauuaugaucacu

SEQ ID NO: 640854 - RNA, 20 nt, Artificial Sequence
  Synthetic
uauuagucauuaugaucacu

SEQ ID NO: 640855 - RNA, 21 nt, Artificial Sequence
  Synthetic
uuauuagucauuaugaucacu

SEQ ID NO: 640856 - RNA, 22 nt, Artificial Sequence
  Synthetic
auuauuagucauuaugaucacu

SEQ ID NO: 640857 - RNA, 23 nt, Artificial Sequence
  Synthetic
aauuauuagucauuaugaucacu

SEQ ID NO: 640858 - RNA, 24 nt, Artificial Sequence
  Synthetic
uaauuauuagucauuaugaucacu

SEQ ID NO: 640859 - RNA, 18 nt, Artificial Sequence
  Synthetic
aauaacuaugcuaucacu

SEQ ID NO: 640860 - RNA, 19 nt, Artificial Sequence
  Synthetic
uaauaacuaugcuaucacu

SEQ ID NO: 640861 - RNA, 20 nt, Artificial Sequence
  Synthetic
auaauaacuaugcuaucacu

SEQ ID NO: 640862 - RNA, 21 nt, Artificial Sequence
  Synthetic
uauaauaacuaugcuaucacu

SEQ ID NO: 640863 - RNA, 22 nt, Artificial Sequence
  Synthetic
guauaauaacuaugcuaucacu

SEQ ID NO: 640864 - RNA, 23 nt, Artificial Sequence
  Synthetic
uguauaauaacuaugcuaucacu

SEQ ID NO: 640865 - RNA, 24 nt, Artificial Sequence
  Synthetic
cuguauaauaacuaugcuaucacu

SEQ ID NO: 640866 - RNA, 18 nt, Artificial Sequence
  Synthetic
ucucccaauucuaucacu

SEQ ID NO: 640867 - RNA, 19 nt, Artificial Sequence
  Synthetic
uucucccaauucuaucacu

SEQ ID NO: 640868 - RNA, 20 nt, Artificial Sequence
  Synthetic
cuucucccaauucuaucacu

SEQ ID NO: 640869 - RNA, 21 nt, Artificial Sequence
  Synthetic
ccuucucccaauucuaucacu

SEQ ID NO: 640870 - RNA, 22 nt, Artificial Sequence
  Synthetic
cccuucucccaauucuaucacu

SEQ ID NO: 640871 - RNA, 23 nt, Artificial Sequence
  Synthetic
acccuucucccaauucuaucacu

SEQ ID NO: 640872 - RNA, 24 nt, Artificial Sequence
  Synthetic
uacccuucucccaauucuaucacu

SEQ ID NO: 640873 - RNA, 18 nt, Artificial Sequence
  Synthetic
aauggcaacuguaucacu

SEQ ID NO: 640874 - RNA, 19 nt, Artificial Sequence
  Synthetic
aaauggcaacuguaucacu

SEQ ID NO: 640875 - RNA, 20 nt, Artificial Sequence
  Synthetic
aaaauggcaacuguaucacu

SEQ ID NO: 640876 - RNA, 21 nt, Artificial Sequence
  Synthetic
aaaaauggcaacuguaucacu

SEQ ID NO: 640877 - RNA, 22 nt, Artificial Sequence
  Synthetic
uaaaaauggcaacuguaucacu

SEQ ID NO: 640878 - RNA, 23 nt, Artificial Sequence
  Synthetic
guaaaaauggcaacuguaucacu

SEQ ID NO: 640879 - RNA, 24 nt, Artificial Sequence
  Synthetic
uguaaaaauggcaacuguaucacu

SEQ ID NO: 640880 - RNA, 18 nt, Artificial Sequence
  Synthetic
auauauugaauuaucacu

SEQ ID NO: 640881 - RNA, 19 nt, Artificial Sequence
  Synthetic
gauauauugaauuaucacu

SEQ ID NO: 640882 - RNA, 20 nt, Artificial Sequence
  Synthetic
ugauauauugaauuaucacu

SEQ ID NO: 640883 - RNA, 21 nt, Artificial Sequence
  Synthetic
uugauauauugaauuaucacu

SEQ ID NO: 640884 - RNA, 22 nt, Artificial Sequence
  Synthetic
guugauauauugaauuaucacu

SEQ ID NO: 640885 - RNA, 23 nt, Artificial Sequence
  Synthetic
aguugauauauugaauuaucacu

SEQ ID NO: 640886 - RNA, 24 nt, Artificial Sequence
  Synthetic
gaguugauauauugaauuaucacu

SEQ ID NO: 640887 - RNA, 18 nt, Artificial Sequence
  Synthetic
uuaaaucuaguuaucacu

SEQ ID NO: 640888 - RNA, 19 nt, Artificial Sequence
  Synthetic
cuuaaaucuaguuaucacu

SEQ ID NO: 640889 - RNA, 20 nt, Artificial Sequence
  Synthetic
acuuaaaucuaguuaucacu

SEQ ID NO: 640890 - RNA, 21 nt, Artificial Sequence
  Synthetic
uacuuaaaucuaguuaucacu

SEQ ID NO: 640891 - RNA, 22 nt, Artificial Sequence
  Synthetic
uuacuuaaaucuaguuaucacu

SEQ ID NO: 640892 - RNA, 23 nt, Artificial Sequence
  Synthetic
cuuacuuaaaucuaguuaucacu

SEQ ID NO: 640893 - RNA, 24 nt, Artificial Sequence
  Synthetic
ucuuacuuaaaucuaguuaucacu

SEQ ID NO: 640894 - RNA, 18 nt, Artificial Sequence
  Synthetic
uaaauguaguuuaucacu

SEQ ID NO: 640895 - RNA, 19 nt, Artificial Sequence
  Synthetic
auaaauguaguuuaucacu

SEQ ID NO: 640896 - RNA, 20 nt, Artificial Sequence
  Synthetic
aauaaauguaguuuaucacu

SEQ ID NO: 640897 - RNA, 21 nt, Artificial Sequence
  Synthetic
gaauaaauguaguuuaucacu

SEQ ID NO: 640898 - RNA, 22 nt, Artificial Sequence
  Synthetic
agaauaaauguaguuuaucacu

SEQ ID NO: 640899 - RNA, 23 nt, Artificial Sequence
  Synthetic
gagaauaaauguaguuuaucacu

SEQ ID NO: 640900 - RNA, 24 nt, Artificial Sequence
  Synthetic
ugagaauaaauguaguuuaucacu

SEQ ID NO: 640901 - RNA, 18 nt, Artificial Sequence
  Synthetic
cuauacaaguaacucacu

SEQ ID NO: 640902 - RNA, 19 nt, Artificial Sequence
  Synthetic
gcuauacaaguaacucacu

SEQ ID NO: 640903 - RNA, 20 nt, Artificial Sequence
  Synthetic
agcuauacaaguaacucacu

SEQ ID NO: 640904 - RNA, 21 nt, Artificial Sequence
  Synthetic
aagcuauacaaguaacucacu

SEQ ID NO: 640905 - RNA, 22 nt, Artificial Sequence
  Synthetic
caagcuauacaaguaacucacu

SEQ ID NO: 640906 - RNA, 23 nt, Artificial Sequence
  Synthetic
acaagcuauacaaguaacucacu

SEQ ID NO: 640907 - RNA, 24 nt, Artificial Sequence
  Synthetic
cacaagcuauacaaguaacucacu

SEQ ID NO: 640908 - RNA, 18 nt, Artificial Sequence
  Synthetic
uucuuaaaagcacucacu

SEQ ID NO: 640909 - RNA, 19 nt, Artificial Sequence
  Synthetic
uuucuuaaaagcacucacu

SEQ ID NO: 640910 - RNA, 20 nt, Artificial Sequence
  Synthetic
uuuucuuaaaagcacucacu

SEQ ID NO: 640911 - RNA, 21 nt, Artificial Sequence
  Synthetic
uuuuucuuaaaagcacucacu

SEQ ID NO: 640912 - RNA, 22 nt, Artificial Sequence
  Synthetic
auuuuucuuaaaagcacucacu

SEQ ID NO: 640913 - RNA, 23 nt, Artificial Sequence
  Synthetic
cauuuuucuuaaaagcacucacu

SEQ ID NO: 640914 - RNA, 24 nt, Artificial Sequence
  Synthetic
gcauuuuucuuaaaagcacucacu

SEQ ID NO: 640915 - RNA, 18 nt, Artificial Sequence
  Synthetic
gguaaaauaucccucacu

SEQ ID NO: 640916 - RNA, 19 nt, Artificial Sequence
  Synthetic
ugguaaaauaucccucacu

SEQ ID NO: 640917 - RNA, 20 nt, Artificial Sequence
  Synthetic
gugguaaaauaucccucacu

SEQ ID NO: 640918 - RNA, 21 nt, Artificial Sequence
  Synthetic
cgugguaaaauaucccucacu

SEQ ID NO: 640919 - RNA, 22 nt, Artificial Sequence
  Synthetic
ucgugguaaaauaucccucacu

SEQ ID NO: 640920 - RNA, 23 nt, Artificial Sequence
  Synthetic
cucgugguaaaauaucccucacu

SEQ ID NO: 640921 - RNA, 24 nt, Artificial Sequence
  Synthetic
ucucgugguaaaauaucccucacu

SEQ ID NO: 640922 - RNA, 18 nt, Artificial Sequence
  Synthetic
gggacaaauucccucacu

SEQ ID NO: 640923 - RNA, 19 nt, Artificial Sequence
  Synthetic
agggacaaauucccucacu

SEQ ID NO: 640924 - RNA, 20 nt, Artificial Sequence
  Synthetic
aagggacaaauucccucacu

SEQ ID NO: 640925 - RNA, 21 nt, Artificial Sequence
  Synthetic
uaagggacaaauucccucacu

SEQ ID NO: 640926 - RNA, 22 nt, Artificial Sequence
  Synthetic
cuaagggacaaauucccucacu

SEQ ID NO: 640927 - RNA, 23 nt, Artificial Sequence
  Synthetic
ucuaagggacaaauucccucacu

SEQ ID NO: 640928 - RNA, 24 nt, Artificial Sequence
  Synthetic
uucuaagggacaaauucccucacu

SEQ ID NO: 640929 - RNA, 18 nt, Artificial Sequence
  Synthetic
cuuuguccaguccucacu

SEQ ID NO: 640930 - RNA, 19 nt, Artificial Sequence
  Synthetic
ccuuuguccaguccucacu

SEQ ID NO: 640931 - RNA, 20 nt, Artificial Sequence
  Synthetic
accuuuguccaguccucacu

SEQ ID NO: 640932 - RNA, 21 nt, Artificial Sequence
  Synthetic
aaccuuuguccaguccucacu

SEQ ID NO: 640933 - RNA, 22 nt, Artificial Sequence
  Synthetic
aaaccuuuguccaguccucacu

SEQ ID NO: 640934 - RNA, 23 nt, Artificial Sequence
  Synthetic
aaaaccuuuguccaguccucacu

SEQ ID NO: 640935 - RNA, 24 nt, Artificial Sequence
  Synthetic
uaaaaccuuuguccaguccucacu

SEQ ID NO: 640936 - RNA, 18 nt, Artificial Sequence
  Synthetic
uucuggauaguccucacu

SEQ ID NO: 640937 - RNA, 19 nt, Artificial Sequence
  Synthetic
cuucuggauaguccucacu

SEQ ID NO: 640938 - RNA, 20 nt, Artificial Sequence
  Synthetic
ucuucuggauaguccucacu

SEQ ID NO: 640939 - RNA, 21 nt, Artificial Sequence
  Synthetic
gucuucuggauaguccucacu

SEQ ID NO: 640940 - RNA, 22 nt, Artificial Sequence
  Synthetic
ggucuucuggauaguccucacu

SEQ ID NO: 640941 - RNA, 23 nt, Artificial Sequence
  Synthetic
uggucuucuggauaguccucacu

SEQ ID NO: 640942 - RNA, 24 nt, Artificial Sequence
  Synthetic
uuggucuucuggauaguccucacu

SEQ ID NO: 640943 - RNA, 18 nt, Artificial Sequence
  Synthetic
auucagcagaagcucacu

SEQ ID NO: 640944 - RNA, 19 nt, Artificial Sequence
  Synthetic
aauucagcagaagcucacu

SEQ ID NO: 640945 - RNA, 20 nt, Artificial Sequence
  Synthetic
caauucagcagaagcucacu

SEQ ID NO: 640946 - RNA, 21 nt, Artificial Sequence
  Synthetic
gcaauucagcagaagcucacu

SEQ ID NO: 640947 - RNA, 22 nt, Artificial Sequence
  Synthetic
ggcaauucagcagaagcucacu

SEQ ID NO: 640948 - RNA, 23 nt, Artificial Sequence
  Synthetic
aggcaauucagcagaagcucacu

SEQ ID NO: 640949 - RNA, 24 nt, Artificial Sequence
  Synthetic
caggcaauucagcagaagcucacu

SEQ ID NO: 640950 - RNA, 18 nt, Artificial Sequence
  Synthetic
uuuuaccaaaugcucacu

SEQ ID NO: 640951 - RNA, 19 nt, Artificial Sequence
  Synthetic
auuuuaccaaaugcucacu

SEQ ID NO: 640952 - RNA, 20 nt, Artificial Sequence
  Synthetic
uauuuuaccaaaugcucacu

SEQ ID NO: 640953 - RNA, 21 nt, Artificial Sequence
  Synthetic
auauuuuaccaaaugcucacu

SEQ ID NO: 640954 - RNA, 22 nt, Artificial Sequence
  Synthetic
aauauuuuaccaaaugcucacu

SEQ ID NO: 640955 - RNA, 23 nt, Artificial Sequence
  Synthetic
gaauauuuuaccaaaugcucacu

SEQ ID NO: 640956 - RNA, 24 nt, Artificial Sequence
  Synthetic
agaauauuuuaccaaaugcucacu

SEQ ID NO: 640957 - RNA, 18 nt, Artificial Sequence
  Synthetic
uucuguguugaucucacu

SEQ ID NO: 640958 - RNA, 19 nt, Artificial Sequence
  Synthetic
cuucuguguugaucucacu

SEQ ID NO: 640959 - RNA, 20 nt, Artificial Sequence
  Synthetic
ccuucuguguugaucucacu

SEQ ID NO: 640960 - RNA, 21 nt, Artificial Sequence
  Synthetic
accuucuguguugaucucacu

SEQ ID NO: 640961 - RNA, 22 nt, Artificial Sequence
  Synthetic
caccuucuguguugaucucacu

SEQ ID NO: 640962 - RNA, 23 nt, Artificial Sequence
  Synthetic
ccaccuucuguguugaucucacu

SEQ ID NO: 640963 - RNA, 24 nt, Artificial Sequence
  Synthetic
cccaccuucuguguugaucucacu

SEQ ID NO: 640964 - RNA, 18 nt, Artificial Sequence
  Synthetic
acagugacuagucucacu

SEQ ID NO: 640965 - RNA, 19 nt, Artificial Sequence
  Synthetic
uacagugacuagucucacu

SEQ ID NO: 640966 - RNA, 20 nt, Artificial Sequence
  Synthetic
auacagugacuagucucacu

SEQ ID NO: 640967 - RNA, 21 nt, Artificial Sequence
  Synthetic
aauacagugacuagucucacu

SEQ ID NO: 640968 - RNA, 22 nt, Artificial Sequence
  Synthetic
gaauacagugacuagucucacu

SEQ ID NO: 640969 - RNA, 23 nt, Artificial Sequence
  Synthetic
ugaauacagugacuagucucacu

SEQ ID NO: 640970 - RNA, 24 nt, Artificial Sequence
  Synthetic
augaauacagugacuagucucacu

SEQ ID NO: 640971 - RNA, 18 nt, Artificial Sequence
  Synthetic
acgcuagcgggucucacu

SEQ ID NO: 640972 - RNA, 19 nt, Artificial Sequence
  Synthetic
gacgcuagcgggucucacu

SEQ ID NO: 640973 - RNA, 20 nt, Artificial Sequence
  Synthetic
agacgcuagcgggucucacu

SEQ ID NO: 640974 - RNA, 21 nt, Artificial Sequence
  Synthetic
aagacgcuagcgggucucacu

SEQ ID NO: 640975 - RNA, 22 nt, Artificial Sequence
  Synthetic
gaagacgcuagcgggucucacu

SEQ ID NO: 640976 - RNA, 23 nt, Artificial Sequence
  Synthetic
ggaagacgcuagcgggucucacu

SEQ ID NO: 640977 - RNA, 24 nt, Artificial Sequence
  Synthetic
gggaagacgcuagcgggucucacu

SEQ ID NO: 640978 - RNA, 18 nt, Artificial Sequence
  Synthetic
gcauuaauaaaagucacu

SEQ ID NO: 640979 - RNA, 19 nt, Artificial Sequence
  Synthetic
ugcauuaauaaaagucacu

SEQ ID NO: 640980 - RNA, 20 nt, Artificial Sequence
  Synthetic
uugcauuaauaaaagucacu

SEQ ID NO: 640981 - RNA, 21 nt, Artificial Sequence
  Synthetic
uuugcauuaauaaaagucacu

SEQ ID NO: 640982 - RNA, 22 nt, Artificial Sequence
  Synthetic
auuugcauuaauaaaagucacu

SEQ ID NO: 640983 - RNA, 23 nt, Artificial Sequence
  Synthetic
uauuugcauuaauaaaagucacu

SEQ ID NO: 640984 - RNA, 24 nt, Artificial Sequence
  Synthetic
auauuugcauuaauaaaagucacu

SEQ ID NO: 640985 - RNA, 18 nt, Artificial Sequence
  Synthetic
cuaauacucagagucacu

SEQ ID NO: 640986 - RNA, 19 nt, Artificial Sequence
  Synthetic
gcuaauacucagagucacu

SEQ ID NO: 640987 - RNA, 20 nt, Artificial Sequence
  Synthetic
agcuaauacucagagucacu

SEQ ID NO: 640988 - RNA, 21 nt, Artificial Sequence
  Synthetic
cagcuaauacucagagucacu

SEQ ID NO: 640989 - RNA, 22 nt, Artificial Sequence
  Synthetic
gcagcuaauacucagagucacu

SEQ ID NO: 640990 - RNA, 23 nt, Artificial Sequence
  Synthetic
agcagcuaauacucagagucacu

SEQ ID NO: 640991 - RNA, 24 nt, Artificial Sequence
  Synthetic
uagcagcuaauacucagagucacu

SEQ ID NO: 640992 - RNA, 18 nt, Artificial Sequence
  Synthetic
uuaggucccugagucacu

SEQ ID NO: 640993 - RNA, 19 nt, Artificial Sequence
  Synthetic
uuuaggucccugagucacu

SEQ ID NO: 640994 - RNA, 20 nt, Artificial Sequence
  Synthetic
auuuaggucccugagucacu

SEQ ID NO: 640995 - RNA, 21 nt, Artificial Sequence
  Synthetic
aauuuaggucccugagucacu

SEQ ID NO: 640996 - RNA, 22 nt, Artificial Sequence
  Synthetic
caauuuaggucccugagucacu

SEQ ID NO: 640997 - RNA, 23 nt, Artificial Sequence
  Synthetic
gcaauuuaggucccugagucacu

SEQ ID NO: 640998 - RNA, 24 nt, Artificial Sequence
  Synthetic
agcaauuuaggucccugagucacu

SEQ ID NO: 640999 - RNA, 18 nt, Artificial Sequence
  Synthetic
gugggacuauuagucacu

SEQ ID NO: 641000 - RNA, 19 nt, Artificial Sequence
  Synthetic
ggugggacuauuagucacu

SEQ ID NO: 641001 - RNA, 20 nt, Artificial Sequence
  Synthetic
aggugggacuauuagucacu

SEQ ID NO: 641002 - RNA, 21 nt, Artificial Sequence
  Synthetic
aaggugggacuauuagucacu

SEQ ID NO: 641003 - RNA, 22 nt, Artificial Sequence
  Synthetic
aaaggugggacuauuagucacu

SEQ ID NO: 641004 - RNA, 23 nt, Artificial Sequence
  Synthetic
gaaaggugggacuauuagucacu

SEQ ID NO: 641005 - RNA, 24 nt, Artificial Sequence
  Synthetic
ugaaaggugggacuauuagucacu

SEQ ID NO: 641006 - RNA, 18 nt, Artificial Sequence
  Synthetic
augggucccacugucacu

SEQ ID NO: 641007 - RNA, 19 nt, Artificial Sequence
  Synthetic
caugggucccacugucacu

SEQ ID NO: 641008 - RNA, 20 nt, Artificial Sequence
  Synthetic
ccaugggucccacugucacu

SEQ ID NO: 641009 - RNA, 21 nt, Artificial Sequence
  Synthetic
gccaugggucccacugucacu

SEQ ID NO: 641010 - RNA, 22 nt, Artificial Sequence
  Synthetic
ugccaugggucccacugucacu

SEQ ID NO: 641011 - RNA, 23 nt, Artificial Sequence
  Synthetic
uugccaugggucccacugucacu

SEQ ID NO: 641012 - RNA, 24 nt, Artificial Sequence
  Synthetic
uuugccaugggucccacugucacu

SEQ ID NO: 641013 - RNA, 18 nt, Artificial Sequence
  Synthetic
uguuaauacccugucacu

SEQ ID NO: 641014 - RNA, 19 nt, Artificial Sequence
  Synthetic
cuguuaauacccugucacu

SEQ ID NO: 641015 - RNA, 20 nt, Artificial Sequence
  Synthetic
ccuguuaauacccugucacu

SEQ ID NO: 641016 - RNA, 21 nt, Artificial Sequence
  Synthetic
uccuguuaauacccugucacu

SEQ ID NO: 641017 - RNA, 22 nt, Artificial Sequence
  Synthetic
cuccuguuaauacccugucacu

SEQ ID NO: 641018 - RNA, 23 nt, Artificial Sequence
  Synthetic
gcuccuguuaauacccugucacu

SEQ ID NO: 641019 - RNA, 24 nt, Artificial Sequence
  Synthetic
ugcuccuguuaauacccugucacu

SEQ ID NO: 641020 - RNA, 18 nt, Artificial Sequence
  Synthetic
ggaaacaguaaauucacu

SEQ ID NO: 641021 - RNA, 19 nt, Artificial Sequence
  Synthetic
aggaaacaguaaauucacu

SEQ ID NO: 641022 - RNA, 20 nt, Artificial Sequence
  Synthetic
caggaaacaguaaauucacu

SEQ ID NO: 641023 - RNA, 21 nt, Artificial Sequence
  Synthetic
ucaggaaacaguaaauucacu

SEQ ID NO: 641024 - RNA, 22 nt, Artificial Sequence
  Synthetic
uucaggaaacaguaaauucacu

SEQ ID NO: 641025 - RNA, 23 nt, Artificial Sequence
  Synthetic
auucaggaaacaguaaauucacu

SEQ ID NO: 641026 - RNA, 24 nt, Artificial Sequence
  Synthetic
aauucaggaaacaguaaauucacu

SEQ ID NO: 641027 - RNA, 18 nt, Artificial Sequence
  Synthetic
uuuaaccugccauucacu

SEQ ID NO: 641028 - RNA, 19 nt, Artificial Sequence
  Synthetic
uuuuaaccugccauucacu

SEQ ID NO: 641029 - RNA, 20 nt, Artificial Sequence
  Synthetic
auuuuaaccugccauucacu

SEQ ID NO: 641030 - RNA, 21 nt, Artificial Sequence
  Synthetic
cauuuuaaccugccauucacu

SEQ ID NO: 641031 - RNA, 22 nt, Artificial Sequence
  Synthetic
ccauuuuaaccugccauucacu

SEQ ID NO: 641032 - RNA, 23 nt, Artificial Sequence
  Synthetic
cccauuuuaaccugccauucacu

SEQ ID NO: 641033 - RNA, 24 nt, Artificial Sequence
  Synthetic
ucccauuuuaaccugccauucacu

SEQ ID NO: 641034 - RNA, 18 nt, Artificial Sequence
  Synthetic
uaagaaaauucauucacu

SEQ ID NO: 641035 - RNA, 19 nt, Artificial Sequence
  Synthetic
uuaagaaaauucauucacu

SEQ ID NO: 641036 - RNA, 20 nt, Artificial Sequence
  Synthetic
uuuaagaaaauucauucacu

SEQ ID NO: 641037 - RNA, 21 nt, Artificial Sequence
  Synthetic
auuuaagaaaauucauucacu

SEQ ID NO: 641038 - RNA, 22 nt, Artificial Sequence
  Synthetic
aauuuaagaaaauucauucacu

SEQ ID NO: 641039 - RNA, 23 nt, Artificial Sequence
  Synthetic
uaauuuaagaaaauucauucacu

SEQ ID NO: 641040 - RNA, 24 nt, Artificial Sequence
  Synthetic
auaauuuaagaaaauucauucacu

SEQ ID NO: 641041 - RNA, 18 nt, Artificial Sequence
  Synthetic
auaaaaauuagauucacu

SEQ ID NO: 641042 - RNA, 19 nt, Artificial Sequence
  Synthetic
aauaaaaauuagauucacu

SEQ ID NO: 641043 - RNA, 20 nt, Artificial Sequence
  Synthetic
aaauaaaaauuagauucacu

SEQ ID NO: 641044 - RNA, 21 nt, Artificial Sequence
  Synthetic
aaaauaaaaauuagauucacu

SEQ ID NO: 641045 - RNA, 22 nt, Artificial Sequence
  Synthetic
uaaaauaaaaauuagauucacu

SEQ ID NO: 641046 - RNA, 23 nt, Artificial Sequence
  Synthetic
auaaaauaaaaauuagauucacu

SEQ ID NO: 641047 - RNA, 24 nt, Artificial Sequence
  Synthetic
gauaaaauaaaaauuagauucacu

SEQ ID NO: 641048 - RNA, 18 nt, Artificial Sequence
  Synthetic
cagugcuaaggauucacu

SEQ ID NO: 641049 - RNA, 19 nt, Artificial Sequence
  Synthetic
ccagugcuaaggauucacu

SEQ ID NO: 641050 - RNA, 20 nt, Artificial Sequence
  Synthetic
cccagugcuaaggauucacu

SEQ ID NO: 641051 - RNA, 21 nt, Artificial Sequence
  Synthetic
gcccagugcuaaggauucacu

SEQ ID NO: 641052 - RNA, 22 nt, Artificial Sequence
  Synthetic
agcccagugcuaaggauucacu

SEQ ID NO: 641053 - RNA, 23 nt, Artificial Sequence
  Synthetic
gagcccagugcuaaggauucacu

SEQ ID NO: 641054 - RNA, 24 nt, Artificial Sequence
  Synthetic
agagcccagugcuaaggauucacu

SEQ ID NO: 641055 - RNA, 18 nt, Artificial Sequence
  Synthetic
guuuuggaccuauucacu

SEQ ID NO: 641056 - RNA, 19 nt, Artificial Sequence
  Synthetic
aguuuuggaccuauucacu

SEQ ID NO: 641057 - RNA, 20 nt, Artificial Sequence
  Synthetic
caguuuuggaccuauucacu

SEQ ID NO: 641058 - RNA, 21 nt, Artificial Sequence
  Synthetic
ucaguuuuggaccuauucacu

SEQ ID NO: 641059 - RNA, 22 nt, Artificial Sequence
  Synthetic
uucaguuuuggaccuauucacu

SEQ ID NO: 641060 - RNA, 23 nt, Artificial Sequence
  Synthetic
guucaguuuuggaccuauucacu

SEQ ID NO: 641061 - RNA, 24 nt, Artificial Sequence
  Synthetic
aguucaguuuuggaccuauucacu

SEQ ID NO: 641062 - RNA, 18 nt, Artificial Sequence
  Synthetic
ucauuauuuuuauucacu

SEQ ID NO: 641063 - RNA, 19 nt, Artificial Sequence
  Synthetic
gucauuauuuuuauucacu

SEQ ID NO: 641064 - RNA, 20 nt, Artificial Sequence
  Synthetic
agucauuauuuuuauucacu

SEQ ID NO: 641065 - RNA, 21 nt, Artificial Sequence
  Synthetic
gagucauuauuuuuauucacu

SEQ ID NO: 641066 - RNA, 22 nt, Artificial Sequence
  Synthetic
ggagucauuauuuuuauucacu

SEQ ID NO: 641067 - RNA, 23 nt, Artificial Sequence
  Synthetic
aggagucauuauuuuuauucacu

SEQ ID NO: 641068 - RNA, 24 nt, Artificial Sequence
  Synthetic
caggagucauuauuuuuauucacu

SEQ ID NO: 641069 - RNA, 18 nt, Artificial Sequence
  Synthetic
aaauuguuugacuucacu

SEQ ID NO: 641070 - RNA, 19 nt, Artificial Sequence
  Synthetic
aaaauuguuugacuucacu

SEQ ID NO: 641071 - RNA, 20 nt, Artificial Sequence
  Synthetic
uaaaauuguuugacuucacu

SEQ ID NO: 641072 - RNA, 21 nt, Artificial Sequence
  Synthetic
uuaaaauuguuugacuucacu

SEQ ID NO: 641073 - RNA, 22 nt, Artificial Sequence
  Synthetic
auuaaaauuguuugacuucacu

SEQ ID NO: 641074 - RNA, 23 nt, Artificial Sequence
  Synthetic
uauuaaaauuguuugacuucacu

SEQ ID NO: 641075 - RNA, 24 nt, Artificial Sequence
  Synthetic
cuauuaaaauuguuugacuucacu

SEQ ID NO: 641076 - RNA, 18 nt, Artificial Sequence
  Synthetic
uaaauauagaaguucacu

SEQ ID NO: 641077 - RNA, 19 nt, Artificial Sequence
  Synthetic
cuaaauauagaaguucacu

SEQ ID NO: 641078 - RNA, 20 nt, Artificial Sequence
  Synthetic
ucuaaauauagaaguucacu

SEQ ID NO: 641079 - RNA, 21 nt, Artificial Sequence
  Synthetic
gucuaaauauagaaguucacu

SEQ ID NO: 641080 - RNA, 22 nt, Artificial Sequence
  Synthetic
ggucuaaauauagaaguucacu

SEQ ID NO: 641081 - RNA, 23 nt, Artificial Sequence
  Synthetic
uggucuaaauauagaaguucacu

SEQ ID NO: 641082 - RNA, 24 nt, Artificial Sequence
  Synthetic
guggucuaaauauagaaguucacu

SEQ ID NO: 641083 - RNA, 18 nt, Artificial Sequence
  Synthetic
ugggggcaaagguucacu

SEQ ID NO: 641084 - RNA, 19 nt, Artificial Sequence
  Synthetic
cugggggcaaagguucacu

SEQ ID NO: 641085 - RNA, 20 nt, Artificial Sequence
  Synthetic
acugggggcaaagguucacu

SEQ ID NO: 641086 - RNA, 21 nt, Artificial Sequence
  Synthetic
aacugggggcaaagguucacu

SEQ ID NO: 641087 - RNA, 22 nt, Artificial Sequence
  Synthetic
uaacugggggcaaagguucacu

SEQ ID NO: 641088 - RNA, 23 nt, Artificial Sequence
  Synthetic
auaacugggggcaaagguucacu

SEQ ID NO: 641089 - RNA, 24 nt, Artificial Sequence
  Synthetic
gauaacugggggcaaagguucacu

SEQ ID NO: 641090 - RNA, 18 nt, Artificial Sequence
  Synthetic
ucucuguauaauuucacu

SEQ ID NO: 641091 - RNA, 19 nt, Artificial Sequence
  Synthetic
gucucuguauaauuucacu

SEQ ID NO: 641092 - RNA, 20 nt, Artificial Sequence
  Synthetic
ugucucuguauaauuucacu

SEQ ID NO: 641093 - RNA, 21 nt, Artificial Sequence
  Synthetic
cugucucuguauaauuucacu

SEQ ID NO: 641094 - RNA, 22 nt, Artificial Sequence
  Synthetic
acugucucuguauaauuucacu

SEQ ID NO: 641095 - RNA, 23 nt, Artificial Sequence
  Synthetic
aacugucucuguauaauuucacu

SEQ ID NO: 641096 - RNA, 24 nt, Artificial Sequence
  Synthetic
aaacugucucuguauaauuucacu

SEQ ID NO: 641097 - RNA, 18 nt, Artificial Sequence
  Synthetic
aagcccuguucuuucacu

SEQ ID NO: 641098 - RNA, 19 nt, Artificial Sequence
  Synthetic
uaagcccuguucuuucacu

SEQ ID NO: 641099 - RNA, 20 nt, Artificial Sequence
  Synthetic
uuaagcccuguucuuucacu

SEQ ID NO: 641100 - RNA, 21 nt, Artificial Sequence
  Synthetic
uuuaagcccuguucuuucacu

SEQ ID NO: 641101 - RNA, 22 nt, Artificial Sequence
  Synthetic
auuuaagcccuguucuuucacu

SEQ ID NO: 641102 - RNA, 23 nt, Artificial Sequence
  Synthetic
aauuuaagcccuguucuuucacu

SEQ ID NO: 641103 - RNA, 24 nt, Artificial Sequence
  Synthetic
gaauuuaagcccuguucuuucacu

SEQ ID NO: 641104 - RNA, 18 nt, Artificial Sequence
  Synthetic
caacaaugaaguuucacu

SEQ ID NO: 641105 - RNA, 19 nt, Artificial Sequence
  Synthetic
gcaacaaugaaguuucacu

SEQ ID NO: 641106 - RNA, 20 nt, Artificial Sequence
  Synthetic
ggcaacaaugaaguuucacu

SEQ ID NO: 641107 - RNA, 21 nt, Artificial Sequence
  Synthetic
uggcaacaaugaaguuucacu

SEQ ID NO: 641108 - RNA, 22 nt, Artificial Sequence
  Synthetic
guggcaacaaugaaguuucacu

SEQ ID NO: 641109 - RNA, 23 nt, Artificial Sequence
  Synthetic
aguggcaacaaugaaguuucacu

SEQ ID NO: 641110 - RNA, 24 nt, Artificial Sequence
  Synthetic
uaguggcaacaaugaaguuucacu

SEQ ID NO: 641111 - RNA, 18 nt, Artificial Sequence
  Synthetic
uauguuuucuguuucacu

SEQ ID NO: 641112 - RNA, 19 nt, Artificial Sequence
  Synthetic
auauguuuucuguuucacu

SEQ ID NO: 641113 - RNA, 20 nt, Artificial Sequence
  Synthetic
gauauguuuucuguuucacu

SEQ ID NO: 641114 - RNA, 21 nt, Artificial Sequence
  Synthetic
agauauguuuucuguuucacu

SEQ ID NO: 641115 - RNA, 22 nt, Artificial Sequence
  Synthetic
uagauauguuuucuguuucacu

SEQ ID NO: 641116 - RNA, 23 nt, Artificial Sequence
  Synthetic
guagauauguuuucuguuucacu

SEQ ID NO: 641117 - RNA, 24 nt, Artificial Sequence
  Synthetic
cguagauauguuuucuguuucacu

SEQ ID NO: 641118 - RNA, 18 nt, Artificial Sequence
  Synthetic
gugcacauuauuuucacu

SEQ ID NO: 641119 - RNA, 19 nt, Artificial Sequence
  Synthetic
ugugcacauuauuuucacu

SEQ ID NO: 641120 - RNA, 20 nt, Artificial Sequence
  Synthetic
cugugcacauuauuuucacu

SEQ ID NO: 641121 - RNA, 21 nt, Artificial Sequence
  Synthetic
ccugugcacauuauuuucacu

SEQ ID NO: 641122 - RNA, 22 nt, Artificial Sequence
  Synthetic
accugugcacauuauuuucacu

SEQ ID NO: 641123 - RNA, 23 nt, Artificial Sequence
  Synthetic
gaccugugcacauuauuuucacu

SEQ ID NO: 641124 - RNA, 24 nt, Artificial Sequence
  Synthetic
ugaccugugcacauuauuuucacu

SEQ ID NO: 641125 - RNA, 18 nt, Artificial Sequence
  Synthetic
cuccccaguguuuucacu

SEQ ID NO: 641126 - RNA, 19 nt, Artificial Sequence
  Synthetic
ccuccccaguguuuucacu

SEQ ID NO: 641127 - RNA, 20 nt, Artificial Sequence
  Synthetic
gccuccccaguguuuucacu

SEQ ID NO: 641128 - RNA, 21 nt, Artificial Sequence
  Synthetic
ugccuccccaguguuuucacu

SEQ ID NO: 641129 - RNA, 22 nt, Artificial Sequence
  Synthetic
cugccuccccaguguuuucacu

SEQ ID NO: 641130 - RNA, 23 nt, Artificial Sequence
  Synthetic
ucugccuccccaguguuuucacu

SEQ ID NO: 641131 - RNA, 24 nt, Artificial Sequence
  Synthetic
uucugccuccccaguguuuucacu

SEQ ID NO: 641132 - RNA, 18 nt, Artificial Sequence
  Synthetic
cacacuauauuuuucacu

SEQ ID NO: 641133 - RNA, 19 nt, Artificial Sequence
  Synthetic
ccacacuauauuuuucacu

SEQ ID NO: 641134 - RNA, 20 nt, Artificial Sequence
  Synthetic
accacacuauauuuuucacu

SEQ ID NO: 641135 - RNA, 21 nt, Artificial Sequence
  Synthetic
uaccacacuauauuuuucacu

SEQ ID NO: 641136 - RNA, 22 nt, Artificial Sequence
  Synthetic
uuaccacacuauauuuuucacu

SEQ ID NO: 641137 - RNA, 23 nt, Artificial Sequence
  Synthetic
auuaccacacuauauuuuucacu

SEQ ID NO: 641138 - RNA, 24 nt, Artificial Sequence
  Synthetic
aauuaccacacuauauuuuucacu

SEQ ID NO: 641139 - RNA, 18 nt, Artificial Sequence
  Synthetic
aucucugccuuuuucacu

SEQ ID NO: 641140 - RNA, 19 nt, Artificial Sequence
  Synthetic
aaucucugccuuuuucacu

SEQ ID NO: 641141 - RNA, 20 nt, Artificial Sequence
  Synthetic
aaaucucugccuuuuucacu

SEQ ID NO: 641142 - RNA, 21 nt, Artificial Sequence
  Synthetic
aaaaucucugccuuuuucacu

SEQ ID NO: 641143 - RNA, 22 nt, Artificial Sequence
  Synthetic
caaaaucucugccuuuuucacu

SEQ ID NO: 641144 - RNA, 23 nt, Artificial Sequence
  Synthetic
acaaaaucucugccuuuuucacu

SEQ ID NO: 641145 - RNA, 24 nt, Artificial Sequence
  Synthetic
gacaaaaucucugccuuuuucacu

SEQ ID NO: 641146 - RNA, 18 nt, Artificial Sequence
  Synthetic
cacucucuuuuuuucacu

SEQ ID NO: 641147 - RNA, 19 nt, Artificial Sequence
  Synthetic
ucacucucuuuuuuucacu

SEQ ID NO: 641148 - RNA, 20 nt, Artificial Sequence
  Synthetic
uucacucucuuuuuuucacu

SEQ ID NO: 641149 - RNA, 21 nt, Artificial Sequence
  Synthetic
uuucacucucuuuuuuucacu

SEQ ID NO: 641150 - RNA, 22 nt, Artificial Sequence
  Synthetic
guuucacucucuuuuuuucacu

SEQ ID NO: 641151 - RNA, 23 nt, Artificial Sequence
  Synthetic
aguuucacucucuuuuuuucacu

SEQ ID NO: 641152 - RNA, 24 nt, Artificial Sequence
  Synthetic
uaguuucacucucuuuuuuucacu

SEQ ID NO: 641153 - RNA, 18 nt, Artificial Sequence
  Synthetic
auuuuucacaaaaagacu

SEQ ID NO: 641154 - RNA, 19 nt, Artificial Sequence
  Synthetic
aauuuuucacaaaaagacu

SEQ ID NO: 641155 - RNA, 20 nt, Artificial Sequence
  Synthetic
aaauuuuucacaaaaagacu

SEQ ID NO: 641156 - RNA, 21 nt, Artificial Sequence
  Synthetic
gaaauuuuucacaaaaagacu

SEQ ID NO: 641157 - RNA, 22 nt, Artificial Sequence
  Synthetic
ugaaauuuuucacaaaaagacu

SEQ ID NO: 641158 - RNA, 23 nt, Artificial Sequence
  Synthetic
uugaaauuuuucacaaaaagacu

SEQ ID NO: 641159 - RNA, 24 nt, Artificial Sequence
  Synthetic
uuugaaauuuuucacaaaaagacu

SEQ ID NO: 641160 - RNA, 18 nt, Artificial Sequence
  Synthetic
caugauaucaaaaagacu

SEQ ID NO: 641161 - RNA, 19 nt, Artificial Sequence
  Synthetic
ucaugauaucaaaaagacu

SEQ ID NO: 641162 - RNA, 20 nt, Artificial Sequence
  Synthetic
aucaugauaucaaaaagacu

SEQ ID NO: 641163 - RNA, 21 nt, Artificial Sequence
  Synthetic
caucaugauaucaaaaagacu

SEQ ID NO: 641164 - RNA, 22 nt, Artificial Sequence
  Synthetic
ucaucaugauaucaaaaagacu

SEQ ID NO: 641165 - RNA, 23 nt, Artificial Sequence
  Synthetic
uucaucaugauaucaaaaagacu

SEQ ID NO: 641166 - RNA, 24 nt, Artificial Sequence
  Synthetic
guucaucaugauaucaaaaagacu

SEQ ID NO: 641167 - RNA, 18 nt, Artificial Sequence
  Synthetic
caugucuaagaaaagacu

SEQ ID NO: 641168 - RNA, 19 nt, Artificial Sequence
  Synthetic
acaugucuaagaaaagacu

SEQ ID NO: 641169 - RNA, 20 nt, Artificial Sequence
  Synthetic
uacaugucuaagaaaagacu

SEQ ID NO: 641170 - RNA, 21 nt, Artificial Sequence
  Synthetic
uuacaugucuaagaaaagacu

SEQ ID NO: 641171 - RNA, 22 nt, Artificial Sequence
  Synthetic
uuuacaugucuaagaaaagacu

SEQ ID NO: 641172 - RNA, 23 nt, Artificial Sequence
  Synthetic
auuuacaugucuaagaaaagacu

SEQ ID NO: 641173 - RNA, 24 nt, Artificial Sequence
  Synthetic
uauuuacaugucuaagaaaagacu

SEQ ID NO: 641174 - RNA, 18 nt, Artificial Sequence
  Synthetic
auuguggaagcaaagacu

SEQ ID NO: 641175 - RNA, 19 nt, Artificial Sequence
  Synthetic
cauuguggaagcaaagacu

SEQ ID NO: 641176 - RNA, 20 nt, Artificial Sequence
  Synthetic
ucauuguggaagcaaagacu

SEQ ID NO: 641177 - RNA, 21 nt, Artificial Sequence
  Synthetic
cucauuguggaagcaaagacu

SEQ ID NO: 641178 - RNA, 22 nt, Artificial Sequence
  Synthetic
ccucauuguggaagcaaagacu

SEQ ID NO: 641179 - RNA, 23 nt, Artificial Sequence
  Synthetic
accucauuguggaagcaaagacu

SEQ ID NO: 641180 - RNA, 24 nt, Artificial Sequence
  Synthetic
uaccucauuguggaagcaaagacu

SEQ ID NO: 641181 - RNA, 21 nt, Artificial Sequence
  Synthetic
cuauucacaauagcaaagacu

SEQ ID NO: 641182 - RNA, 22 nt, Artificial Sequence
  Synthetic
ucuauucacaauagcaaagacu

SEQ ID NO: 641183 - RNA, 23 nt, Artificial Sequence
  Synthetic
cucuauucacaauagcaaagacu

SEQ ID NO: 641184 - RNA, 24 nt, Artificial Sequence
  Synthetic
gcucuauucacaauagcaaagacu

SEQ ID NO: 641185 - RNA, 21 nt, Artificial Sequence
  Synthetic
cuauuuacaauagcaaagacu

SEQ ID NO: 641186 - RNA, 22 nt, Artificial Sequence
  Synthetic
acuauuuacaauagcaaagacu

SEQ ID NO: 641187 - RNA, 23 nt, Artificial Sequence
  Synthetic
cacuauuuacaauagcaaagacu

SEQ ID NO: 641188 - RNA, 24 nt, Artificial Sequence
  Synthetic
gcacuauuuacaauagcaaagacu

SEQ ID NO: 641189 - RNA, 18 nt, Artificial Sequence
  Synthetic
uuuucuuccucaaagacu

SEQ ID NO: 641190 - RNA, 19 nt, Artificial Sequence
  Synthetic
auuuucuuccucaaagacu

SEQ ID NO: 641191 - RNA, 20 nt, Artificial Sequence
  Synthetic
cauuuucuuccucaaagacu

SEQ ID NO: 641192 - RNA, 21 nt, Artificial Sequence
  Synthetic
ccauuuucuuccucaaagacu

SEQ ID NO: 641193 - RNA, 22 nt, Artificial Sequence
  Synthetic
gccauuuucuuccucaaagacu

SEQ ID NO: 641194 - RNA, 23 nt, Artificial Sequence
  Synthetic
ugccauuuucuuccucaaagacu

SEQ ID NO: 641195 - RNA, 24 nt, Artificial Sequence
  Synthetic
uugccauuuucuuccucaaagacu

SEQ ID NO: 641196 - RNA, 18 nt, Artificial Sequence
  Synthetic
uaaugugcuucaaagacu

SEQ ID NO: 641197 - RNA, 19 nt, Artificial Sequence
  Synthetic
auaaugugcuucaaagacu

SEQ ID NO: 641198 - RNA, 20 nt, Artificial Sequence
  Synthetic
gauaaugugcuucaaagacu

SEQ ID NO: 641199 - RNA, 21 nt, Artificial Sequence
  Synthetic
agauaaugugcuucaaagacu

SEQ ID NO: 641200 - RNA, 22 nt, Artificial Sequence
  Synthetic
gagauaaugugcuucaaagacu

SEQ ID NO: 641201 - RNA, 23 nt, Artificial Sequence
  Synthetic
ugagauaaugugcuucaaagacu

SEQ ID NO: 641202 - RNA, 24 nt, Artificial Sequence
  Synthetic
augagauaaugugcuucaaagacu

SEQ ID NO: 641203 - RNA, 18 nt, Artificial Sequence
  Synthetic
cuuucuugaugaaagacu

SEQ ID NO: 641204 - RNA, 19 nt, Artificial Sequence
  Synthetic
ucuuucuugaugaaagacu

SEQ ID NO: 641205 - RNA, 20 nt, Artificial Sequence
  Synthetic
cucuuucuugaugaaagacu

SEQ ID NO: 641206 - RNA, 21 nt, Artificial Sequence
  Synthetic
ccucuuucuugaugaaagacu

SEQ ID NO: 641207 - RNA, 22 nt, Artificial Sequence
  Synthetic
gccucuuucuugaugaaagacu

SEQ ID NO: 641208 - RNA, 23 nt, Artificial Sequence
  Synthetic
ugccucuuucuugaugaaagacu

SEQ ID NO: 641209 - RNA, 24 nt, Artificial Sequence
  Synthetic
augccucuuucuugaugaaagacu

SEQ ID NO: 641210 - RNA, 18 nt, Artificial Sequence
  Synthetic
agguagcugguaaagacu

SEQ ID NO: 641211 - RNA, 19 nt, Artificial Sequence
  Synthetic
aagguagcugguaaagacu

SEQ ID NO: 641212 - RNA, 20 nt, Artificial Sequence
  Synthetic
aaagguagcugguaaagacu

SEQ ID NO: 641213 - RNA, 21 nt, Artificial Sequence
  Synthetic
uaaagguagcugguaaagacu

SEQ ID NO: 641214 - RNA, 22 nt, Artificial Sequence
  Synthetic
auaaagguagcugguaaagacu

SEQ ID NO: 641215 - RNA, 23 nt, Artificial Sequence
  Synthetic
cauaaagguagcugguaaagacu

SEQ ID NO: 641216 - RNA, 24 nt, Artificial Sequence
  Synthetic
ucauaaagguagcugguaaagacu

SEQ ID NO: 641217 - RNA, 18 nt, Artificial Sequence
  Synthetic
ccuuuucucuccaagacu

SEQ ID NO: 641218 - RNA, 19 nt, Artificial Sequence
  Synthetic
gccuuuucucuccaagacu

SEQ ID NO: 641219 - RNA, 20 nt, Artificial Sequence
  Synthetic
ugccuuuucucuccaagacu

SEQ ID NO: 641220 - RNA, 21 nt, Artificial Sequence
  Synthetic
gugccuuuucucuccaagacu

SEQ ID NO: 641221 - RNA, 22 nt, Artificial Sequence
  Synthetic
ugugccuuuucucuccaagacu

SEQ ID NO: 641222 - RNA, 23 nt, Artificial Sequence
  Synthetic
uugugccuuuucucuccaagacu

SEQ ID NO: 641223 - RNA, 24 nt, Artificial Sequence
  Synthetic
guugugccuuuucucuccaagacu

SEQ ID NO: 641224 - RNA, 18 nt, Artificial Sequence
  Synthetic
gggcaacagagcaagacu

SEQ ID NO: 641225 - RNA, 19 nt, Artificial Sequence
  Synthetic
ugggcaacagagcaagacu

SEQ ID NO: 641226 - RNA, 20 nt, Artificial Sequence
  Synthetic
cugggcaacagagcaagacu

SEQ ID NO: 641227 - RNA, 21 nt, Artificial Sequence
  Synthetic
ccugggcaacagagcaagacu

SEQ ID NO: 641228 - RNA, 22 nt, Artificial Sequence
  Synthetic
gccugggcaacagagcaagacu

SEQ ID NO: 641229 - RNA, 23 nt, Artificial Sequence
  Synthetic
agccugggcaacagagcaagacu

SEQ ID NO: 641230 - RNA, 24 nt, Artificial Sequence
  Synthetic
cagccugggcaacagagcaagacu

SEQ ID NO: 641231 - RNA, 18 nt, Artificial Sequence
  Synthetic
ugguuacucaugaagacu

SEQ ID NO: 641232 - RNA, 19 nt, Artificial Sequence
  Synthetic
gugguuacucaugaagacu

SEQ ID NO: 641233 - RNA, 20 nt, Artificial Sequence
  Synthetic
ugugguuacucaugaagacu

SEQ ID NO: 641234 - RNA, 21 nt, Artificial Sequence
  Synthetic
uugugguuacucaugaagacu

SEQ ID NO: 641235 - RNA, 22 nt, Artificial Sequence
  Synthetic
auugugguuacucaugaagacu

SEQ ID NO: 641236 - RNA, 23 nt, Artificial Sequence
  Synthetic
cauugugguuacucaugaagacu

SEQ ID NO: 641237 - RNA, 24 nt, Artificial Sequence
  Synthetic
ccauugugguuacucaugaagacu

SEQ ID NO: 641238 - RNA, 18 nt, Artificial Sequence
  Synthetic
gggaggauggugaagacu

SEQ ID NO: 641239 - RNA, 19 nt, Artificial Sequence
  Synthetic
ugggaggauggugaagacu

SEQ ID NO: 641240 - RNA, 20 nt, Artificial Sequence
  Synthetic
gugggaggauggugaagacu

SEQ ID NO: 641241 - RNA, 21 nt, Artificial Sequence
  Synthetic
ggugggaggauggugaagacu

SEQ ID NO: 641242 - RNA, 22 nt, Artificial Sequence
  Synthetic
gggugggaggauggugaagacu

SEQ ID NO: 641243 - RNA, 23 nt, Artificial Sequence
  Synthetic
agggugggaggauggugaagacu

SEQ ID NO: 641244 - RNA, 24 nt, Artificial Sequence
  Synthetic
gagggugggaggauggugaagacu

SEQ ID NO: 641245 - RNA, 18 nt, Artificial Sequence
  Synthetic
uaaauaaugaaacagacu

SEQ ID NO: 641246 - RNA, 19 nt, Artificial Sequence
  Synthetic
auaaauaaugaaacagacu

SEQ ID NO: 641247 - RNA, 20 nt, Artificial Sequence
  Synthetic
uauaaauaaugaaacagacu

SEQ ID NO: 641248 - RNA, 21 nt, Artificial Sequence
  Synthetic
auauaaauaaugaaacagacu

SEQ ID NO: 641249 - RNA, 22 nt, Artificial Sequence
  Synthetic
aauauaaauaaugaaacagacu

SEQ ID NO: 641250 - RNA, 23 nt, Artificial Sequence
  Synthetic
caauauaaauaaugaaacagacu

SEQ ID NO: 641251 - RNA, 24 nt, Artificial Sequence
  Synthetic
acaauauaaauaaugaaacagacu

SEQ ID NO: 641252 - RNA, 18 nt, Artificial Sequence
  Synthetic
aucuuaggcacacagacu

SEQ ID NO: 641253 - RNA, 19 nt, Artificial Sequence
  Synthetic
aaucuuaggcacacagacu

SEQ ID NO: 641254 - RNA, 20 nt, Artificial Sequence
  Synthetic
uaaucuuaggcacacagacu

SEQ ID NO: 641255 - RNA, 21 nt, Artificial Sequence
  Synthetic
uuaaucuuaggcacacagacu

SEQ ID NO: 641256 - RNA, 22 nt, Artificial Sequence
  Synthetic
guuaaucuuaggcacacagacu

SEQ ID NO: 641257 - RNA, 23 nt, Artificial Sequence
  Synthetic
uguuaaucuuaggcacacagacu

SEQ ID NO: 641258 - RNA, 24 nt, Artificial Sequence
  Synthetic
uuguuaaucuuaggcacacagacu

SEQ ID NO: 641259 - RNA, 18 nt, Artificial Sequence
  Synthetic
caaggacaaccacagacu

SEQ ID NO: 641260 - RNA, 19 nt, Artificial Sequence
  Synthetic
ucaaggacaaccacagacu

SEQ ID NO: 641261 - RNA, 20 nt, Artificial Sequence
  Synthetic
cucaaggacaaccacagacu

SEQ ID NO: 641262 - RNA, 21 nt, Artificial Sequence
  Synthetic
ucucaaggacaaccacagacu

SEQ ID NO: 641263 - RNA, 22 nt, Artificial Sequence
  Synthetic
cucucaaggacaaccacagacu

SEQ ID NO: 641264 - RNA, 23 nt, Artificial Sequence
  Synthetic
ccucucaaggacaaccacagacu

SEQ ID NO: 641265 - RNA, 24 nt, Artificial Sequence
  Synthetic
accucucaaggacaaccacagacu

SEQ ID NO: 641266 - RNA, 18 nt, Artificial Sequence
  Synthetic
ucugcuuuaagacagacu

SEQ ID NO: 641267 - RNA, 19 nt, Artificial Sequence
  Synthetic
aucugcuuuaagacagacu

SEQ ID NO: 641268 - RNA, 20 nt, Artificial Sequence
  Synthetic
aaucugcuuuaagacagacu

SEQ ID NO: 641269 - RNA, 21 nt, Artificial Sequence
  Synthetic
aaaucugcuuuaagacagacu

SEQ ID NO: 641270 - RNA, 22 nt, Artificial Sequence
  Synthetic
aaaaucugcuuuaagacagacu

SEQ ID NO: 641271 - RNA, 23 nt, Artificial Sequence
  Synthetic
aaaaaucugcuuuaagacagacu

SEQ ID NO: 641272 - RNA, 24 nt, Artificial Sequence
  Synthetic
gaaaaaucugcuuuaagacagacu

SEQ ID NO: 641273 - RNA, 18 nt, Artificial Sequence
  Synthetic
acuaaauguuuccagacu

SEQ ID NO: 641274 - RNA, 19 nt, Artificial Sequence
  Synthetic
aacuaaauguuuccagacu

SEQ ID NO: 641275 - RNA, 20 nt, Artificial Sequence
  Synthetic
caacuaaauguuuccagacu

SEQ ID NO: 641276 - RNA, 21 nt, Artificial Sequence
  Synthetic
gcaacuaaauguuuccagacu

SEQ ID NO: 641277 - RNA, 22 nt, Artificial Sequence
  Synthetic
agcaacuaaauguuuccagacu

SEQ ID NO: 641278 - RNA, 23 nt, Artificial Sequence
  Synthetic
uagcaacuaaauguuuccagacu

SEQ ID NO: 641279 - RNA, 24 nt, Artificial Sequence
  Synthetic
auagcaacuaaauguuuccagacu

SEQ ID NO: 641280 - RNA, 18 nt, Artificial Sequence
  Synthetic
ggacuccggaggcagacu

SEQ ID NO: 641281 - RNA, 19 nt, Artificial Sequence
  Synthetic
aggacuccggaggcagacu

SEQ ID NO: 641282 - RNA, 20 nt, Artificial Sequence
  Synthetic
aaggacuccggaggcagacu

SEQ ID NO: 641283 - RNA, 21 nt, Artificial Sequence
  Synthetic
uaaggacuccggaggcagacu

SEQ ID NO: 641284 - RNA, 22 nt, Artificial Sequence
  Synthetic
guaaggacuccggaggcagacu

SEQ ID NO: 641285 - RNA, 23 nt, Artificial Sequence
  Synthetic
aguaaggacuccggaggcagacu

SEQ ID NO: 641286 - RNA, 24 nt, Artificial Sequence
  Synthetic
gaguaaggacuccggaggcagacu

SEQ ID NO: 641287 - RNA, 18 nt, Artificial Sequence
  Synthetic
cacucuggacaucagacu

SEQ ID NO: 641288 - RNA, 19 nt, Artificial Sequence
  Synthetic
ccacucuggacaucagacu

SEQ ID NO: 641289 - RNA, 20 nt, Artificial Sequence
  Synthetic
accacucuggacaucagacu

SEQ ID NO: 641290 - RNA, 21 nt, Artificial Sequence
  Synthetic
caccacucuggacaucagacu

SEQ ID NO: 641291 - RNA, 22 nt, Artificial Sequence
  Synthetic
acaccacucuggacaucagacu

SEQ ID NO: 641292 - RNA, 23 nt, Artificial Sequence
  Synthetic
aacaccacucuggacaucagacu

SEQ ID NO: 641293 - RNA, 24 nt, Artificial Sequence
  Synthetic
aaacaccacucuggacaucagacu

SEQ ID NO: 641294 - RNA, 18 nt, Artificial Sequence
  Synthetic
ugguuaaaaguucagacu

SEQ ID NO: 641295 - RNA, 19 nt, Artificial Sequence
  Synthetic
gugguuaaaaguucagacu

SEQ ID NO: 641296 - RNA, 20 nt, Artificial Sequence
  Synthetic
ggugguuaaaaguucagacu

SEQ ID NO: 641297 - RNA, 21 nt, Artificial Sequence
  Synthetic
uggugguuaaaaguucagacu

SEQ ID NO: 641298 - RNA, 22 nt, Artificial Sequence
  Synthetic
auggugguuaaaaguucagacu

SEQ ID NO: 641299 - RNA, 23 nt, Artificial Sequence
  Synthetic
uauggugguuaaaaguucagacu

SEQ ID NO: 641300 - RNA, 24 nt, Artificial Sequence
  Synthetic
auauggugguuaaaaguucagacu

SEQ ID NO: 641301 - RNA, 18 nt, Artificial Sequence
  Synthetic
gugaaaaaauaagagacu

SEQ ID NO: 641302 - RNA, 19 nt, Artificial Sequence
  Synthetic
agugaaaaaauaagagacu

SEQ ID NO: 641303 - RNA, 20 nt, Artificial Sequence
  Synthetic
uagugaaaaaauaagagacu

SEQ ID NO: 641304 - RNA, 21 nt, Artificial Sequence
  Synthetic
auagugaaaaaauaagagacu

SEQ ID NO: 641305 - RNA, 22 nt, Artificial Sequence
  Synthetic
aauagugaaaaaauaagagacu

SEQ ID NO: 641306 - RNA, 23 nt, Artificial Sequence
  Synthetic
uaauagugaaaaaauaagagacu

SEQ ID NO: 641307 - RNA, 24 nt, Artificial Sequence
  Synthetic
uuaauagugaaaaaauaagagacu

SEQ ID NO: 641308 - RNA, 18 nt, Artificial Sequence
  Synthetic
uuaaucguaauagagacu

SEQ ID NO: 641309 - RNA, 19 nt, Artificial Sequence
  Synthetic
auuaaucguaauagagacu

SEQ ID NO: 641310 - RNA, 20 nt, Artificial Sequence
  Synthetic
aauuaaucguaauagagacu

SEQ ID NO: 641311 - RNA, 21 nt, Artificial Sequence
  Synthetic
gaauuaaucguaauagagacu

SEQ ID NO: 641312 - RNA, 22 nt, Artificial Sequence
  Synthetic
ugaauuaaucguaauagagacu

SEQ ID NO: 641313 - RNA, 23 nt, Artificial Sequence
  Synthetic
uugaauuaaucguaauagagacu

SEQ ID NO: 641314 - RNA, 24 nt, Artificial Sequence
  Synthetic
uuugaauuaaucguaauagagacu

SEQ ID NO: 641315 - RNA, 18 nt, Artificial Sequence
  Synthetic
aagauuggaaacgagacu

SEQ ID NO: 641316 - RNA, 19 nt, Artificial Sequence
  Synthetic
uaagauuggaaacgagacu

SEQ ID NO: 641317 - RNA, 20 nt, Artificial Sequence
  Synthetic
auaagauuggaaacgagacu

SEQ ID NO: 641318 - RNA, 21 nt, Artificial Sequence
  Synthetic
aauaagauuggaaacgagacu

SEQ ID NO: 641319 - RNA, 22 nt, Artificial Sequence
  Synthetic
aaauaagauuggaaacgagacu

SEQ ID NO: 641320 - RNA, 23 nt, Artificial Sequence
  Synthetic
gaaauaagauuggaaacgagacu

SEQ ID NO: 641321 - RNA, 24 nt, Artificial Sequence
  Synthetic
agaaauaagauuggaaacgagacu

SEQ ID NO: 641322 - RNA, 18 nt, Artificial Sequence
  Synthetic
uguaaguucuacgagacu

SEQ ID NO: 641323 - RNA, 19 nt, Artificial Sequence
  Synthetic
guguaaguucuacgagacu

SEQ ID NO: 641324 - RNA, 20 nt, Artificial Sequence
  Synthetic
aguguaaguucuacgagacu

SEQ ID NO: 641325 - RNA, 21 nt, Artificial Sequence
  Synthetic
gaguguaaguucuacgagacu

SEQ ID NO: 641326 - RNA, 22 nt, Artificial Sequence
  Synthetic
agaguguaaguucuacgagacu

SEQ ID NO: 641327 - RNA, 23 nt, Artificial Sequence
  Synthetic
uagaguguaaguucuacgagacu

SEQ ID NO: 641328 - RNA, 24 nt, Artificial Sequence
  Synthetic
cuagaguguaaguucuacgagacu

SEQ ID NO: 641329 - RNA, 18 nt, Artificial Sequence
  Synthetic
guaaagaccaucgagacu

SEQ ID NO: 641330 - RNA, 19 nt, Artificial Sequence
  Synthetic
uguaaagaccaucgagacu

SEQ ID NO: 641331 - RNA, 20 nt, Artificial Sequence
  Synthetic
auguaaagaccaucgagacu

SEQ ID NO: 641332 - RNA, 21 nt, Artificial Sequence
  Synthetic
aauguaaagaccaucgagacu

SEQ ID NO: 641333 - RNA, 22 nt, Artificial Sequence
  Synthetic
aaauguaaagaccaucgagacu

SEQ ID NO: 641334 - RNA, 23 nt, Artificial Sequence
  Synthetic
aaaauguaaagaccaucgagacu

SEQ ID NO: 641335 - RNA, 24 nt, Artificial Sequence
  Synthetic
caaaauguaaagaccaucgagacu

SEQ ID NO: 641336 - RNA, 18 nt, Artificial Sequence
  Synthetic
uaauauuuccaggagacu

SEQ ID NO: 641337 - RNA, 19 nt, Artificial Sequence
  Synthetic
uuaauauuuccaggagacu

SEQ ID NO: 641338 - RNA, 20 nt, Artificial Sequence
  Synthetic
uuuaauauuuccaggagacu

SEQ ID NO: 641339 - RNA, 21 nt, Artificial Sequence
  Synthetic
guuuaauauuuccaggagacu

SEQ ID NO: 641340 - RNA, 22 nt, Artificial Sequence
  Synthetic
uguuuaauauuuccaggagacu

SEQ ID NO: 641341 - RNA, 23 nt, Artificial Sequence
  Synthetic
auguuuaauauuuccaggagacu

SEQ ID NO: 641342 - RNA, 24 nt, Artificial Sequence
  Synthetic
cauguuuaauauuuccaggagacu

SEQ ID NO: 641343 - RNA, 18 nt, Artificial Sequence
  Synthetic
aaagguaauuaggagacu

SEQ ID NO: 641344 - RNA, 19 nt, Artificial Sequence
  Synthetic
aaaagguaauuaggagacu

SEQ ID NO: 641345 - RNA, 20 nt, Artificial Sequence
  Synthetic
aaaaagguaauuaggagacu

SEQ ID NO: 641346 - RNA, 21 nt, Artificial Sequence
  Synthetic
uaaaaagguaauuaggagacu

SEQ ID NO: 641347 - RNA, 22 nt, Artificial Sequence
  Synthetic
auaaaaagguaauuaggagacu

SEQ ID NO: 641348 - RNA, 23 nt, Artificial Sequence
  Synthetic
cauaaaaagguaauuaggagacu

SEQ ID NO: 641349 - RNA, 24 nt, Artificial Sequence
  Synthetic
ccauaaaaagguaauuaggagacu

SEQ ID NO: 641350 - RNA, 18 nt, Artificial Sequence
  Synthetic
cgacagagaggggagacu

SEQ ID NO: 641351 - RNA, 19 nt, Artificial Sequence
  Synthetic
gcgacagagaggggagacu

SEQ ID NO: 641352 - RNA, 20 nt, Artificial Sequence
  Synthetic
agcgacagagaggggagacu

SEQ ID NO: 641353 - RNA, 21 nt, Artificial Sequence
  Synthetic
aagcgacagagaggggagacu

SEQ ID NO: 641354 - RNA, 22 nt, Artificial Sequence
  Synthetic
caagcgacagagaggggagacu

SEQ ID NO: 641355 - RNA, 23 nt, Artificial Sequence
  Synthetic
acaagcgacagagaggggagacu

SEQ ID NO: 641356 - RNA, 24 nt, Artificial Sequence
  Synthetic
aacaagcgacagagaggggagacu

SEQ ID NO: 641357 - RNA, 18 nt, Artificial Sequence
  Synthetic
uaauagacacuggagacu

SEQ ID NO: 641358 - RNA, 19 nt, Artificial Sequence
  Synthetic
auaauagacacuggagacu

SEQ ID NO: 641359 - RNA, 20 nt, Artificial Sequence
  Synthetic
aauaauagacacuggagacu

SEQ ID NO: 641360 - RNA, 21 nt, Artificial Sequence
  Synthetic
gaauaauagacacuggagacu

SEQ ID NO: 641361 - RNA, 22 nt, Artificial Sequence
  Synthetic
ggaauaauagacacuggagacu

SEQ ID NO: 641362 - RNA, 23 nt, Artificial Sequence
  Synthetic
uggaauaauagacacuggagacu

SEQ ID NO: 641363 - RNA, 24 nt, Artificial Sequence
  Synthetic
guggaauaauagacacuggagacu

SEQ ID NO: 641364 - RNA, 18 nt, Artificial Sequence
  Synthetic
caaugggcuuuggagacu

SEQ ID NO: 641365 - RNA, 19 nt, Artificial Sequence
  Synthetic
acaaugggcuuuggagacu

SEQ ID NO: 641366 - RNA, 20 nt, Artificial Sequence
  Synthetic
uacaaugggcuuuggagacu

SEQ ID NO: 641367 - RNA, 21 nt, Artificial Sequence
  Synthetic
auacaaugggcuuuggagacu

SEQ ID NO: 641368 - RNA, 22 nt, Artificial Sequence
  Synthetic
gauacaaugggcuuuggagacu

SEQ ID NO: 641369 - RNA, 23 nt, Artificial Sequence
  Synthetic
ugauacaaugggcuuuggagacu

SEQ ID NO: 641370 - RNA, 24 nt, Artificial Sequence
  Synthetic
augauacaaugggcuuuggagacu

SEQ ID NO: 641371 - RNA, 18 nt, Artificial Sequence
  Synthetic
cguugaacucaugagacu

SEQ ID NO: 641372 - RNA, 19 nt, Artificial Sequence
  Synthetic
acguugaacucaugagacu

SEQ ID NO: 641373 - RNA, 20 nt, Artificial Sequence
  Synthetic
gacguugaacucaugagacu

SEQ ID NO: 641374 - RNA, 21 nt, Artificial Sequence
  Synthetic
agacguugaacucaugagacu

SEQ ID NO: 641375 - RNA, 22 nt, Artificial Sequence
  Synthetic
aagacguugaacucaugagacu

SEQ ID NO: 641376 - RNA, 23 nt, Artificial Sequence
  Synthetic
uaagacguugaacucaugagacu

SEQ ID NO: 641377 - RNA, 24 nt, Artificial Sequence
  Synthetic
uuaagacguugaacucaugagacu

SEQ ID NO: 641378 - RNA, 18 nt, Artificial Sequence
  Synthetic
cuugucucagaugagacu

SEQ ID NO: 641379 - RNA, 19 nt, Artificial Sequence
  Synthetic
ccuugucucagaugagacu

SEQ ID NO: 641380 - RNA, 20 nt, Artificial Sequence
  Synthetic
gccuugucucagaugagacu

SEQ ID NO: 641381 - RNA, 21 nt, Artificial Sequence
  Synthetic
ugccuugucucagaugagacu

SEQ ID NO: 641382 - RNA, 22 nt, Artificial Sequence
  Synthetic
uugccuugucucagaugagacu

SEQ ID NO: 641383 - RNA, 23 nt, Artificial Sequence
  Synthetic
cuugccuugucucagaugagacu

SEQ ID NO: 641384 - RNA, 24 nt, Artificial Sequence
  Synthetic
acuugccuugucucagaugagacu

SEQ ID NO: 641385 - RNA, 18 nt, Artificial Sequence
  Synthetic
aaugagaaaacugagacu

SEQ ID NO: 641386 - RNA, 19 nt, Artificial Sequence
  Synthetic
aaaugagaaaacugagacu

SEQ ID NO: 641387 - RNA, 20 nt, Artificial Sequence
  Synthetic
caaaugagaaaacugagacu

SEQ ID NO: 641388 - RNA, 21 nt, Artificial Sequence
  Synthetic
gcaaaugagaaaacugagacu

SEQ ID NO: 641389 - RNA, 22 nt, Artificial Sequence
  Synthetic
ugcaaaugagaaaacugagacu

SEQ ID NO: 641390 - RNA, 23 nt, Artificial Sequence
  Synthetic
uugcaaaugagaaaacugagacu

SEQ ID NO: 641391 - RNA, 24 nt, Artificial Sequence
  Synthetic
uuugcaaaugagaaaacugagacu

SEQ ID NO: 641392 - RNA, 18 nt, Artificial Sequence
  Synthetic
acacauuugggugagacu

SEQ ID NO: 641393 - RNA, 19 nt, Artificial Sequence
  Synthetic
gacacauuugggugagacu

SEQ ID NO: 641394 - RNA, 20 nt, Artificial Sequence
  Synthetic
agacacauuugggugagacu

SEQ ID NO: 641395 - RNA, 21 nt, Artificial Sequence
  Synthetic
aagacacauuugggugagacu

SEQ ID NO: 641396 - RNA, 22 nt, Artificial Sequence
  Synthetic
gaagacacauuugggugagacu

SEQ ID NO: 641397 - RNA, 23 nt, Artificial Sequence
  Synthetic
ugaagacacauuugggugagacu

SEQ ID NO: 641398 - RNA, 24 nt, Artificial Sequence
  Synthetic
cugaagacacauuugggugagacu

SEQ ID NO: 641399 - RNA, 18 nt, Artificial Sequence
  Synthetic
uuaaagguuauugagacu

SEQ ID NO: 641400 - RNA, 19 nt, Artificial Sequence
  Synthetic
auuaaagguuauugagacu

SEQ ID NO: 641401 - RNA, 20 nt, Artificial Sequence
  Synthetic
aauuaaagguuauugagacu

SEQ ID NO: 641402 - RNA, 21 nt, Artificial Sequence
  Synthetic
gaauuaaagguuauugagacu

SEQ ID NO: 641403 - RNA, 22 nt, Artificial Sequence
  Synthetic
ggaauuaaagguuauugagacu

SEQ ID NO: 641404 - RNA, 23 nt, Artificial Sequence
  Synthetic
gggaauuaaagguuauugagacu

SEQ ID NO: 641405 - RNA, 24 nt, Artificial Sequence
  Synthetic
agggaauuaaagguuauugagacu

SEQ ID NO: 641406 - RNA, 18 nt, Artificial Sequence
  Synthetic
aaagacauacuugagacu

SEQ ID NO: 641407 - RNA, 19 nt, Artificial Sequence
  Synthetic
uaaagacauacuugagacu

SEQ ID NO: 641408 - RNA, 20 nt, Artificial Sequence
  Synthetic
auaaagacauacuugagacu

SEQ ID NO: 641409 - RNA, 21 nt, Artificial Sequence
  Synthetic
gauaaagacauacuugagacu

SEQ ID NO: 641410 - RNA, 22 nt, Artificial Sequence
  Synthetic
ugauaaagacauacuugagacu

SEQ ID NO: 641411 - RNA, 23 nt, Artificial Sequence
  Synthetic
gugauaaagacauacuugagacu

SEQ ID NO: 641412 - RNA, 24 nt, Artificial Sequence
  Synthetic
ugugauaaagacauacuugagacu

SEQ ID NO: 641413 - RNA, 18 nt, Artificial Sequence
  Synthetic
uucccuaauuuugagacu

SEQ ID NO: 641414 - RNA, 19 nt, Artificial Sequence
  Synthetic
uuucccuaauuuugagacu

SEQ ID NO: 641415 - RNA, 20 nt, Artificial Sequence
  Synthetic
cuuucccuaauuuugagacu

SEQ ID NO: 641416 - RNA, 21 nt, Artificial Sequence
  Synthetic
ccuuucccuaauuuugagacu

SEQ ID NO: 641417 - RNA, 22 nt, Artificial Sequence
  Synthetic
gccuuucccuaauuuugagacu

SEQ ID NO: 641418 - RNA, 23 nt, Artificial Sequence
  Synthetic
ugccuuucccuaauuuugagacu

SEQ ID NO: 641419 - RNA, 24 nt, Artificial Sequence
  Synthetic
uugccuuucccuaauuuugagacu

SEQ ID NO: 641420 - RNA, 18 nt, Artificial Sequence
  Synthetic
uuagccuguccauagacu

SEQ ID NO: 641421 - RNA, 19 nt, Artificial Sequence
  Synthetic
cuuagccuguccauagacu

SEQ ID NO: 641422 - RNA, 20 nt, Artificial Sequence
  Synthetic
acuuagccuguccauagacu

SEQ ID NO: 641423 - RNA, 21 nt, Artificial Sequence
  Synthetic
aacuuagccuguccauagacu

SEQ ID NO: 641424 - RNA, 22 nt, Artificial Sequence
  Synthetic
caacuuagccuguccauagacu

SEQ ID NO: 641425 - RNA, 23 nt, Artificial Sequence
  Synthetic
ucaacuuagccuguccauagacu

SEQ ID NO: 641426 - RNA, 24 nt, Artificial Sequence
  Synthetic
uucaacuuagccuguccauagacu

SEQ ID NO: 641427 - RNA, 18 nt, Artificial Sequence
  Synthetic
cauuuccauucauagacu

SEQ ID NO: 641428 - RNA, 19 nt, Artificial Sequence
  Synthetic
acauuuccauucauagacu

SEQ ID NO: 641429 - RNA, 20 nt, Artificial Sequence
  Synthetic
cacauuuccauucauagacu

SEQ ID NO: 641430 - RNA, 21 nt, Artificial Sequence
  Synthetic
acacauuuccauucauagacu

SEQ ID NO: 641431 - RNA, 22 nt, Artificial Sequence
  Synthetic
uacacauuuccauucauagacu

SEQ ID NO: 641432 - RNA, 23 nt, Artificial Sequence
  Synthetic
auacacauuuccauucauagacu

SEQ ID NO: 641433 - RNA, 24 nt, Artificial Sequence
  Synthetic
gauacacauuuccauucauagacu

SEQ ID NO: 641434 - RNA, 18 nt, Artificial Sequence
  Synthetic
ccaaggcuaggauagacu

SEQ ID NO: 641435 - RNA, 19 nt, Artificial Sequence
  Synthetic
uccaaggcuaggauagacu

SEQ ID NO: 641436 - RNA, 20 nt, Artificial Sequence
  Synthetic
uuccaaggcuaggauagacu

SEQ ID NO: 641437 - RNA, 21 nt, Artificial Sequence
  Synthetic
uuuccaaggcuaggauagacu

SEQ ID NO: 641438 - RNA, 22 nt, Artificial Sequence
  Synthetic
guuuccaaggcuaggauagacu

SEQ ID NO: 641439 - RNA, 23 nt, Artificial Sequence
  Synthetic
uguuuccaaggcuaggauagacu

SEQ ID NO: 641440 - RNA, 24 nt, Artificial Sequence
  Synthetic
cuguuuccaaggcuaggauagacu

SEQ ID NO: 641441 - RNA, 18 nt, Artificial Sequence
  Synthetic
ucuaaaugccucuagacu

SEQ ID NO: 641442 - RNA, 19 nt, Artificial Sequence
  Synthetic
aucuaaaugccucuagacu

SEQ ID NO: 641443 - RNA, 20 nt, Artificial Sequence
  Synthetic
caucuaaaugccucuagacu

SEQ ID NO: 641444 - RNA, 21 nt, Artificial Sequence
  Synthetic
acaucuaaaugccucuagacu

SEQ ID NO: 641445 - RNA, 22 nt, Artificial Sequence
  Synthetic
aacaucuaaaugccucuagacu

SEQ ID NO: 641446 - RNA, 23 nt, Artificial Sequence
  Synthetic
caacaucuaaaugccucuagacu

SEQ ID NO: 641447 - RNA, 24 nt, Artificial Sequence
  Synthetic
acaacaucuaaaugccucuagacu

SEQ ID NO: 641448 - RNA, 18 nt, Artificial Sequence
  Synthetic
gaugacugguucuagacu

SEQ ID NO: 641449 - RNA, 19 nt, Artificial Sequence
  Synthetic
ugaugacugguucuagacu

SEQ ID NO: 641450 - RNA, 20 nt, Artificial Sequence
  Synthetic
cugaugacugguucuagacu

SEQ ID NO: 641451 - RNA, 21 nt, Artificial Sequence
  Synthetic
ccugaugacugguucuagacu

SEQ ID NO: 641452 - RNA, 22 nt, Artificial Sequence
  Synthetic
uccugaugacugguucuagacu

SEQ ID NO: 641453 - RNA, 23 nt, Artificial Sequence
  Synthetic
cuccugaugacugguucuagacu

SEQ ID NO: 641454 - RNA, 24 nt, Artificial Sequence
  Synthetic
ucuccugaugacugguucuagacu

SEQ ID NO: 641455 - RNA, 18 nt, Artificial Sequence
  Synthetic
gggaagaaacaguagacu

SEQ ID NO: 641456 - RNA, 19 nt, Artificial Sequence
  Synthetic
agggaagaaacaguagacu

SEQ ID NO: 641457 - RNA, 20 nt, Artificial Sequence
  Synthetic
gagggaagaaacaguagacu

SEQ ID NO: 641458 - RNA, 21 nt, Artificial Sequence
  Synthetic
ggagggaagaaacaguagacu

SEQ ID NO: 641459 - RNA, 22 nt, Artificial Sequence
  Synthetic
uggagggaagaaacaguagacu

SEQ ID NO: 641460 - RNA, 23 nt, Artificial Sequence
  Synthetic
auggagggaagaaacaguagacu

SEQ ID NO: 641461 - RNA, 24 nt, Artificial Sequence
  Synthetic
aauggagggaagaaacaguagacu

SEQ ID NO: 641462 - RNA, 18 nt, Artificial Sequence
  Synthetic
cuauuuuuaauguagacu

SEQ ID NO: 641463 - RNA, 19 nt, Artificial Sequence
  Synthetic
ucuauuuuuaauguagacu

SEQ ID NO: 641464 - RNA, 20 nt, Artificial Sequence
  Synthetic
cucuauuuuuaauguagacu

SEQ ID NO: 641465 - RNA, 21 nt, Artificial Sequence
  Synthetic
ucucuauuuuuaauguagacu

SEQ ID NO: 641466 - RNA, 22 nt, Artificial Sequence
  Synthetic
aucucuauuuuuaauguagacu

SEQ ID NO: 641467 - RNA, 23 nt, Artificial Sequence
  Synthetic
aaucucuauuuuuaauguagacu

SEQ ID NO: 641468 - RNA, 24 nt, Artificial Sequence
  Synthetic
uaaucucuauuuuuaauguagacu

SEQ ID NO: 641469 - RNA, 18 nt, Artificial Sequence
  Synthetic
uuagccauagauuagacu

SEQ ID NO: 641470 - RNA, 19 nt, Artificial Sequence
  Synthetic
auuagccauagauuagacu

SEQ ID NO: 641471 - RNA, 20 nt, Artificial Sequence
  Synthetic
gauuagccauagauuagacu

SEQ ID NO: 641472 - RNA, 21 nt, Artificial Sequence
  Synthetic
ggauuagccauagauuagacu

SEQ ID NO: 641473 - RNA, 22 nt, Artificial Sequence
  Synthetic
gggauuagccauagauuagacu

SEQ ID NO: 641474 - RNA, 23 nt, Artificial Sequence
  Synthetic
ugggauuagccauagauuagacu

SEQ ID NO: 641475 - RNA, 24 nt, Artificial Sequence
  Synthetic
augggauuagccauagauuagacu

SEQ ID NO: 641476 - RNA, 18 nt, Artificial Sequence
  Synthetic
cuccugacguauuagacu

SEQ ID NO: 641477 - RNA, 19 nt, Artificial Sequence
  Synthetic
gcuccugacguauuagacu

SEQ ID NO: 641478 - RNA, 20 nt, Artificial Sequence
  Synthetic
ugcuccugacguauuagacu

SEQ ID NO: 641479 - RNA, 21 nt, Artificial Sequence
  Synthetic
uugcuccugacguauuagacu

SEQ ID NO: 641480 - RNA, 22 nt, Artificial Sequence
  Synthetic
cuugcuccugacguauuagacu

SEQ ID NO: 641481 - RNA, 23 nt, Artificial Sequence
  Synthetic
gcuugcuccugacguauuagacu

SEQ ID NO: 641482 - RNA, 24 nt, Artificial Sequence
  Synthetic
agcuugcuccugacguauuagacu

SEQ ID NO: 641483 - RNA, 18 nt, Artificial Sequence
  Synthetic
augacccaggguuagacu

SEQ ID NO: 641484 - RNA, 19 nt, Artificial Sequence
  Synthetic
uaugacccaggguuagacu

SEQ ID NO: 641485 - RNA, 20 nt, Artificial Sequence
  Synthetic
cuaugacccaggguuagacu

SEQ ID NO: 641486 - RNA, 21 nt, Artificial Sequence
  Synthetic
ccuaugacccaggguuagacu

SEQ ID NO: 641487 - RNA, 22 nt, Artificial Sequence
  Synthetic
uccuaugacccaggguuagacu

SEQ ID NO: 641488 - RNA, 23 nt, Artificial Sequence
  Synthetic
cuccuaugacccaggguuagacu

SEQ ID NO: 641489 - RNA, 24 nt, Artificial Sequence
  Synthetic
acuccuaugacccaggguuagacu

SEQ ID NO: 641490 - RNA, 18 nt, Artificial Sequence
  Synthetic
gaagggcuauuuuagacu

SEQ ID NO: 641491 - RNA, 19 nt, Artificial Sequence
  Synthetic
ggaagggcuauuuuagacu

SEQ ID NO: 641492 - RNA, 20 nt, Artificial Sequence
  Synthetic
uggaagggcuauuuuagacu

SEQ ID NO: 641493 - RNA, 21 nt, Artificial Sequence
  Synthetic
guggaagggcuauuuuagacu

SEQ ID NO: 641494 - RNA, 22 nt, Artificial Sequence
  Synthetic
uguggaagggcuauuuuagacu

SEQ ID NO: 641495 - RNA, 23 nt, Artificial Sequence
  Synthetic
auguggaagggcuauuuuagacu

SEQ ID NO: 641496 - RNA, 24 nt, Artificial Sequence
  Synthetic
aauguggaagggcuauuuuagacu

SEQ ID NO: 641497 - RNA, 18 nt, Artificial Sequence
  Synthetic
uuauguuuauuuuagacu

SEQ ID NO: 641498 - RNA, 19 nt, Artificial Sequence
  Synthetic
uuuauguuuauuuuagacu

SEQ ID NO: 641499 - RNA, 20 nt, Artificial Sequence
  Synthetic
uuuuauguuuauuuuagacu

SEQ ID NO: 641500 - RNA, 21 nt, Artificial Sequence
  Synthetic
auuuuauguuuauuuuagacu

SEQ ID NO: 641501 - RNA, 22 nt, Artificial Sequence
  Synthetic
uauuuuauguuuauuuuagacu

SEQ ID NO: 641502 - RNA, 23 nt, Artificial Sequence
  Synthetic
uuauuuuauguuuauuuuagacu

SEQ ID NO: 641503 - RNA, 24 nt, Artificial Sequence
  Synthetic
uuuauuuuauguuuauuuuagacu

SEQ ID NO: 641504 - RNA, 18 nt, Artificial Sequence
  Synthetic
uuauuuugaaagacgacu

SEQ ID NO: 641505 - RNA, 19 nt, Artificial Sequence
  Synthetic
uuuauuuugaaagacgacu

SEQ ID NO: 641506 - RNA, 20 nt, Artificial Sequence
  Synthetic
auuuauuuugaaagacgacu

SEQ ID NO: 641507 - RNA, 21 nt, Artificial Sequence
  Synthetic
aauuuauuuugaaagacgacu

SEQ ID NO: 641508 - RNA, 22 nt, Artificial Sequence
  Synthetic
gaauuuauuuugaaagacgacu

SEQ ID NO: 641509 - RNA, 23 nt, Artificial Sequence
  Synthetic
ugaauuuauuuugaaagacgacu

SEQ ID NO: 641510 - RNA, 24 nt, Artificial Sequence
  Synthetic
uugaauuuauuuugaaagacgacu

SEQ ID NO: 641511 - RNA, 18 nt, Artificial Sequence
  Synthetic
ucugccugcugaccgacu

SEQ ID NO: 641512 - RNA, 19 nt, Artificial Sequence
  Synthetic
uucugccugcugaccgacu

SEQ ID NO: 641513 - RNA, 20 nt, Artificial Sequence
  Synthetic
uuucugccugcugaccgacu

SEQ ID NO: 641514 - RNA, 21 nt, Artificial Sequence
  Synthetic
uuuucugccugcugaccgacu

SEQ ID NO: 641515 - RNA, 22 nt, Artificial Sequence
  Synthetic
cuuuucugccugcugaccgacu

SEQ ID NO: 641516 - RNA, 23 nt, Artificial Sequence
  Synthetic
ccuuuucugccugcugaccgacu

SEQ ID NO: 641517 - RNA, 24 nt, Artificial Sequence
  Synthetic
uccuuuucugccugcugaccgacu

SEQ ID NO: 641518 - RNA, 18 nt, Artificial Sequence
  Synthetic
gaaaauguggaagcgacu

SEQ ID NO: 641519 - RNA, 19 nt, Artificial Sequence
  Synthetic
cgaaaauguggaagcgacu

SEQ ID NO: 641520 - RNA, 20 nt, Artificial Sequence
  Synthetic
ccgaaaauguggaagcgacu

SEQ ID NO: 641521 - RNA, 21 nt, Artificial Sequence
  Synthetic
cccgaaaauguggaagcgacu

SEQ ID NO: 641522 - RNA, 22 nt, Artificial Sequence
  Synthetic
acccgaaaauguggaagcgacu

SEQ ID NO: 641523 - RNA, 23 nt, Artificial Sequence
  Synthetic
cacccgaaaauguggaagcgacu

SEQ ID NO: 641524 - RNA, 24 nt, Artificial Sequence
  Synthetic
acacccgaaaauguggaagcgacu

SEQ ID NO: 641525 - RNA, 18 nt, Artificial Sequence
  Synthetic
auucacuuaaugucgacu

SEQ ID NO: 641526 - RNA, 19 nt, Artificial Sequence
  Synthetic
uauucacuuaaugucgacu

SEQ ID NO: 641527 - RNA, 20 nt, Artificial Sequence
  Synthetic
auauucacuuaaugucgacu

SEQ ID NO: 641528 - RNA, 21 nt, Artificial Sequence
  Synthetic
aauauucacuuaaugucgacu

SEQ ID NO: 641529 - RNA, 22 nt, Artificial Sequence
  Synthetic
uaauauucacuuaaugucgacu

SEQ ID NO: 641530 - RNA, 23 nt, Artificial Sequence
  Synthetic
auaauauucacuuaaugucgacu

SEQ ID NO: 641531 - RNA, 24 nt, Artificial Sequence
  Synthetic
gauaauauucacuuaaugucgacu

SEQ ID NO: 641532 - RNA, 18 nt, Artificial Sequence
  Synthetic
acaggcagagaaaggacu

SEQ ID NO: 641533 - RNA, 19 nt, Artificial Sequence
  Synthetic
uacaggcagagaaaggacu

SEQ ID NO: 641534 - RNA, 20 nt, Artificial Sequence
  Synthetic
cuacaggcagagaaaggacu

SEQ ID NO: 641535 - RNA, 21 nt, Artificial Sequence
  Synthetic
ccuacaggcagagaaaggacu

SEQ ID NO: 641536 - RNA, 22 nt, Artificial Sequence
  Synthetic
uccuacaggcagagaaaggacu

SEQ ID NO: 641537 - RNA, 23 nt, Artificial Sequence
  Synthetic
cuccuacaggcagagaaaggacu

SEQ ID NO: 641538 - RNA, 24 nt, Artificial Sequence
  Synthetic
acuccuacaggcagagaaaggacu

SEQ ID NO: 641539 - RNA, 18 nt, Artificial Sequence
  Synthetic
ggaaauguugaaaggacu

SEQ ID NO: 641540 - RNA, 19 nt, Artificial Sequence
  Synthetic
uggaaauguugaaaggacu

SEQ ID NO: 641541 - RNA, 20 nt, Artificial Sequence
  Synthetic
cuggaaauguugaaaggacu

SEQ ID NO: 641542 - RNA, 21 nt, Artificial Sequence
  Synthetic
ucuggaaauguugaaaggacu

SEQ ID NO: 641543 - RNA, 22 nt, Artificial Sequence
  Synthetic
aucuggaaauguugaaaggacu

SEQ ID NO: 641544 - RNA, 23 nt, Artificial Sequence
  Synthetic
uaucuggaaauguugaaaggacu

SEQ ID NO: 641545 - RNA, 24 nt, Artificial Sequence
  Synthetic
cuaucuggaaauguugaaaggacu

SEQ ID NO: 641546 - RNA, 18 nt, Artificial Sequence
  Synthetic
acauagaaaccaaggacu

SEQ ID NO: 641547 - RNA, 19 nt, Artificial Sequence
  Synthetic
aacauagaaaccaaggacu

SEQ ID NO: 641548 - RNA, 20 nt, Artificial Sequence
  Synthetic
aaacauagaaaccaaggacu

SEQ ID NO: 641549 - RNA, 21 nt, Artificial Sequence
  Synthetic
uaaacauagaaaccaaggacu

SEQ ID NO: 641550 - RNA, 22 nt, Artificial Sequence
  Synthetic
auaaacauagaaaccaaggacu

SEQ ID NO: 641551 - RNA, 23 nt, Artificial Sequence
  Synthetic
cauaaacauagaaaccaaggacu

SEQ ID NO: 641552 - RNA, 24 nt, Artificial Sequence
  Synthetic
ucauaaacauagaaaccaaggacu

SEQ ID NO: 641553 - RNA, 18 nt, Artificial Sequence
  Synthetic
uaaacuuucucaaggacu

SEQ ID NO: 641554 - RNA, 19 nt, Artificial Sequence
  Synthetic
auaaacuuucucaaggacu

SEQ ID NO: 641555 - RNA, 20 nt, Artificial Sequence
  Synthetic
aauaaacuuucucaaggacu

SEQ ID NO: 641556 - RNA, 21 nt, Artificial Sequence
  Synthetic
gaauaaacuuucucaaggacu

SEQ ID NO: 641557 - RNA, 22 nt, Artificial Sequence
  Synthetic
ggaauaaacuuucucaaggacu

SEQ ID NO: 641558 - RNA, 23 nt, Artificial Sequence
  Synthetic
aggaauaaacuuucucaaggacu

SEQ ID NO: 641559 - RNA, 24 nt, Artificial Sequence
  Synthetic
caggaauaaacuuucucaaggacu

SEQ ID NO: 641560 - RNA, 18 nt, Artificial Sequence
  Synthetic
ugaucuagaguaaggacu

SEQ ID NO: 641561 - RNA, 19 nt, Artificial Sequence
  Synthetic
cugaucuagaguaaggacu

SEQ ID NO: 641562 - RNA, 20 nt, Artificial Sequence
  Synthetic
ucugaucuagaguaaggacu

SEQ ID NO: 641563 - RNA, 21 nt, Artificial Sequence
  Synthetic
aucugaucuagaguaaggacu

SEQ ID NO: 641564 - RNA, 22 nt, Artificial Sequence
  Synthetic
aaucugaucuagaguaaggacu

SEQ ID NO: 641565 - RNA, 23 nt, Artificial Sequence
  Synthetic
aaaucugaucuagaguaaggacu

SEQ ID NO: 641566 - RNA, 24 nt, Artificial Sequence
  Synthetic
aaaaucugaucuagaguaaggacu

SEQ ID NO: 641567 - RNA, 18 nt, Artificial Sequence
  Synthetic
gccuguaaucccaggacu

SEQ ID NO: 641568 - RNA, 19 nt, Artificial Sequence
  Synthetic
cgccuguaaucccaggacu

SEQ ID NO: 641569 - RNA, 20 nt, Artificial Sequence
  Synthetic
acgccuguaaucccaggacu

SEQ ID NO: 641570 - RNA, 21 nt, Artificial Sequence
  Synthetic
cacgccuguaaucccaggacu

SEQ ID NO: 641571 - RNA, 22 nt, Artificial Sequence
  Synthetic
ucacgccuguaaucccaggacu

SEQ ID NO: 641572 - RNA, 23 nt, Artificial Sequence
  Synthetic
cucacgccuguaaucccaggacu

SEQ ID NO: 641573 - RNA, 24 nt, Artificial Sequence
  Synthetic
gcucacgccuguaaucccaggacu

SEQ ID NO: 641574 - RNA, 19 nt, Artificial Sequence
  Synthetic
ugccuguaaucccaggacu

SEQ ID NO: 641575 - RNA, 20 nt, Artificial Sequence
  Synthetic
augccuguaaucccaggacu

SEQ ID NO: 641576 - RNA, 21 nt, Artificial Sequence
  Synthetic
caugccuguaaucccaggacu

SEQ ID NO: 641577 - RNA, 22 nt, Artificial Sequence
  Synthetic
ucaugccuguaaucccaggacu

SEQ ID NO: 641578 - RNA, 23 nt, Artificial Sequence
  Synthetic
cucaugccuguaaucccaggacu

SEQ ID NO: 641579 - RNA, 24 nt, Artificial Sequence
  Synthetic
gcucaugccuguaaucccaggacu

SEQ ID NO: 641580 - RNA, 18 nt, Artificial Sequence
  Synthetic
cgcuguaaucccaggacu

SEQ ID NO: 641581 - RNA, 19 nt, Artificial Sequence
  Synthetic
acgcuguaaucccaggacu

SEQ ID NO: 641582 - RNA, 20 nt, Artificial Sequence
  Synthetic
cacgcuguaaucccaggacu

SEQ ID NO: 641583 - RNA, 21 nt, Artificial Sequence
  Synthetic
ucacgcuguaaucccaggacu

SEQ ID NO: 641584 - RNA, 22 nt, Artificial Sequence
  Synthetic
cucacgcuguaaucccaggacu

SEQ ID NO: 641585 - RNA, 23 nt, Artificial Sequence
  Synthetic
gcucacgcuguaaucccaggacu

SEQ ID NO: 641586 - RNA, 24 nt, Artificial Sequence
  Synthetic
ggcucacgcuguaaucccaggacu

SEQ ID NO: 641587 - RNA, 18 nt, Artificial Sequence
  Synthetic
uaucagaaaaucaggacu

SEQ ID NO: 641588 - RNA, 19 nt, Artificial Sequence
  Synthetic
uuaucagaaaaucaggacu

SEQ ID NO: 641589 - RNA, 20 nt, Artificial Sequence
  Synthetic
auuaucagaaaaucaggacu

SEQ ID NO: 641590 - RNA, 21 nt, Artificial Sequence
  Synthetic
aauuaucagaaaaucaggacu

SEQ ID NO: 641591 - RNA, 22 nt, Artificial Sequence
  Synthetic
gaauuaucagaaaaucaggacu

SEQ ID NO: 641592 - RNA, 23 nt, Artificial Sequence
  Synthetic
ugaauuaucagaaaaucaggacu

SEQ ID NO: 641593 - RNA, 24 nt, Artificial Sequence
  Synthetic
cugaauuaucagaaaaucaggacu

SEQ ID NO: 641594 - RNA, 18 nt, Artificial Sequence
  Synthetic
agcauuuaaaagaggacu

SEQ ID NO: 641595 - RNA, 19 nt, Artificial Sequence
  Synthetic
aagcauuuaaaagaggacu

SEQ ID NO: 641596 - RNA, 20 nt, Artificial Sequence
  Synthetic
gaagcauuuaaaagaggacu

SEQ ID NO: 641597 - RNA, 21 nt, Artificial Sequence
  Synthetic
ugaagcauuuaaaagaggacu

SEQ ID NO: 641598 - RNA, 22 nt, Artificial Sequence
  Synthetic
cugaagcauuuaaaagaggacu

SEQ ID NO: 641599 - RNA, 23 nt, Artificial Sequence
  Synthetic
ucugaagcauuuaaaagaggacu

SEQ ID NO: 641600 - RNA, 24 nt, Artificial Sequence
  Synthetic
uucugaagcauuuaaaagaggacu

SEQ ID NO: 641601 - RNA, 18 nt, Artificial Sequence
  Synthetic
gggucagucaagaggacu

SEQ ID NO: 641602 - RNA, 19 nt, Artificial Sequence
  Synthetic
agggucagucaagaggacu

SEQ ID NO: 641603 - RNA, 20 nt, Artificial Sequence
  Synthetic
gagggucagucaagaggacu

SEQ ID NO: 641604 - RNA, 21 nt, Artificial Sequence
  Synthetic
ugagggucagucaagaggacu

SEQ ID NO: 641605 - RNA, 22 nt, Artificial Sequence
  Synthetic
uugagggucagucaagaggacu

SEQ ID NO: 641606 - RNA, 23 nt, Artificial Sequence
  Synthetic
cuugagggucagucaagaggacu

SEQ ID NO: 641607 - RNA, 24 nt, Artificial Sequence
  Synthetic
ucuugagggucagucaagaggacu

SEQ ID NO: 641608 - RNA, 18 nt, Artificial Sequence
  Synthetic
gagagagagaagaggacu

SEQ ID NO: 641609 - RNA, 19 nt, Artificial Sequence
  Synthetic
agagagagagaagaggacu

SEQ ID NO: 641610 - RNA, 20 nt, Artificial Sequence
  Synthetic
gagagagagagaagaggacu

SEQ ID NO: 641611 - RNA, 21 nt, Artificial Sequence
  Synthetic
agagagagagagaagaggacu

SEQ ID NO: 641612 - RNA, 22 nt, Artificial Sequence
  Synthetic
gagagagagagagaagaggacu

SEQ ID NO: 641613 - RNA, 23 nt, Artificial Sequence
  Synthetic
agagagagagagagaagaggacu

SEQ ID NO: 641614 - RNA, 24 nt, Artificial Sequence
  Synthetic
gagagagagagagagaagaggacu

SEQ ID NO: 641615 - RNA, 18 nt, Artificial Sequence
  Synthetic
gguuuaagggagaggacu

SEQ ID NO: 641616 - RNA, 19 nt, Artificial Sequence
  Synthetic
agguuuaagggagaggacu

SEQ ID NO: 641617 - RNA, 20 nt, Artificial Sequence
  Synthetic
gagguuuaagggagaggacu

SEQ ID NO: 641618 - RNA, 21 nt, Artificial Sequence
  Synthetic
ugagguuuaagggagaggacu

SEQ ID NO: 641619 - RNA, 22 nt, Artificial Sequence
  Synthetic
augagguuuaagggagaggacu

SEQ ID NO: 641620 - RNA, 23 nt, Artificial Sequence
  Synthetic
uaugagguuuaagggagaggacu

SEQ ID NO: 641621 - RNA, 24 nt, Artificial Sequence
  Synthetic
cuaugagguuuaagggagaggacu

SEQ ID NO: 641622 - RNA, 18 nt, Artificial Sequence
  Synthetic
gaaacaguugggaggacu

SEQ ID NO: 641623 - RNA, 19 nt, Artificial Sequence
  Synthetic
ugaaacaguugggaggacu

SEQ ID NO: 641624 - RNA, 20 nt, Artificial Sequence
  Synthetic
uugaaacaguugggaggacu

SEQ ID NO: 641625 - RNA, 21 nt, Artificial Sequence
  Synthetic
guugaaacaguugggaggacu

SEQ ID NO: 641626 - RNA, 22 nt, Artificial Sequence
  Synthetic
gguugaaacaguugggaggacu

SEQ ID NO: 641627 - RNA, 23 nt, Artificial Sequence
  Synthetic
agguugaaacaguugggaggacu

SEQ ID NO: 641628 - RNA, 24 nt, Artificial Sequence
  Synthetic
gagguugaaacaguugggaggacu

SEQ ID NO: 641629 - RNA, 18 nt, Artificial Sequence
  Synthetic
cauccuccuucuaggacu

SEQ ID NO: 641630 - RNA, 19 nt, Artificial Sequence
  Synthetic
ucauccuccuucuaggacu

SEQ ID NO: 641631 - RNA, 20 nt, Artificial Sequence
  Synthetic
gucauccuccuucuaggacu

SEQ ID NO: 641632 - RNA, 21 nt, Artificial Sequence
  Synthetic
ggucauccuccuucuaggacu

SEQ ID NO: 641633 - RNA, 22 nt, Artificial Sequence
  Synthetic
uggucauccuccuucuaggacu

SEQ ID NO: 641634 - RNA, 23 nt, Artificial Sequence
  Synthetic
auggucauccuccuucuaggacu

SEQ ID NO: 641635 - RNA, 24 nt, Artificial Sequence
  Synthetic
cauggucauccuccuucuaggacu

SEQ ID NO: 641636 - RNA, 18 nt, Artificial Sequence
  Synthetic
uuuuggucuuuuaggacu

SEQ ID NO: 641637 - RNA, 19 nt, Artificial Sequence
  Synthetic
cuuuuggucuuuuaggacu

SEQ ID NO: 641638 - RNA, 20 nt, Artificial Sequence
  Synthetic
acuuuuggucuuuuaggacu

SEQ ID NO: 641639 - RNA, 21 nt, Artificial Sequence
  Synthetic
uacuuuuggucuuuuaggacu

SEQ ID NO: 641640 - RNA, 22 nt, Artificial Sequence
  Synthetic
guacuuuuggucuuuuaggacu

SEQ ID NO: 641641 - RNA, 23 nt, Artificial Sequence
  Synthetic
uguacuuuuggucuuuuaggacu

SEQ ID NO: 641642 - RNA, 24 nt, Artificial Sequence
  Synthetic
uuguacuuuuggucuuuuaggacu

SEQ ID NO: 641643 - RNA, 18 nt, Artificial Sequence
  Synthetic
uaucaaccucaagggacu

SEQ ID NO: 641644 - RNA, 19 nt, Artificial Sequence
  Synthetic
auaucaaccucaagggacu

SEQ ID NO: 641645 - RNA, 20 nt, Artificial Sequence
  Synthetic
cauaucaaccucaagggacu

SEQ ID NO: 641646 - RNA, 21 nt, Artificial Sequence
  Synthetic
ucauaucaaccucaagggacu

SEQ ID NO: 641647 - RNA, 22 nt, Artificial Sequence
  Synthetic
gucauaucaaccucaagggacu

SEQ ID NO: 641648 - RNA, 23 nt, Artificial Sequence
  Synthetic
ugucauaucaaccucaagggacu

SEQ ID NO: 641649 - RNA, 24 nt, Artificial Sequence
  Synthetic
cugucauaucaaccucaagggacu

SEQ ID NO: 641650 - RNA, 18 nt, Artificial Sequence
  Synthetic
uauuccaguucagggacu

SEQ ID NO: 641651 - RNA, 19 nt, Artificial Sequence
  Synthetic
guauuccaguucagggacu

SEQ ID NO: 641652 - RNA, 20 nt, Artificial Sequence
  Synthetic
cguauuccaguucagggacu

SEQ ID NO: 641653 - RNA, 21 nt, Artificial Sequence
  Synthetic
acguauuccaguucagggacu

SEQ ID NO: 641654 - RNA, 22 nt, Artificial Sequence
  Synthetic
cacguauuccaguucagggacu

SEQ ID NO: 641655 - RNA, 23 nt, Artificial Sequence
  Synthetic
ccacguauuccaguucagggacu

SEQ ID NO: 641656 - RNA, 24 nt, Artificial Sequence
  Synthetic
gccacguauuccaguucagggacu

SEQ ID NO: 641657 - RNA, 18 nt, Artificial Sequence
  Synthetic
cugggucgaguggggacu

SEQ ID NO: 641658 - RNA, 19 nt, Artificial Sequence
  Synthetic
ucugggucgaguggggacu

SEQ ID NO: 641659 - RNA, 20 nt, Artificial Sequence
  Synthetic
uucugggucgaguggggacu

SEQ ID NO: 641660 - RNA, 21 nt, Artificial Sequence
  Synthetic
uuucugggucgaguggggacu

SEQ ID NO: 641661 - RNA, 22 nt, Artificial Sequence
  Synthetic
cuuucugggucgaguggggacu

SEQ ID NO: 641662 - RNA, 23 nt, Artificial Sequence
  Synthetic
acuuucugggucgaguggggacu

SEQ ID NO: 641663 - RNA, 24 nt, Artificial Sequence
  Synthetic
gacuuucugggucgaguggggacu

SEQ ID NO: 641664 - RNA, 18 nt, Artificial Sequence
  Synthetic
aagcugggaguggggacu

SEQ ID NO: 641665 - RNA, 19 nt, Artificial Sequence
  Synthetic
caagcugggaguggggacu

SEQ ID NO: 641666 - RNA, 20 nt, Artificial Sequence
  Synthetic
ccaagcugggaguggggacu

SEQ ID NO: 641667 - RNA, 21 nt, Artificial Sequence
  Synthetic
accaagcugggaguggggacu

SEQ ID NO: 641668 - RNA, 22 nt, Artificial Sequence
  Synthetic
gaccaagcugggaguggggacu

SEQ ID NO: 641669 - RNA, 23 nt, Artificial Sequence
  Synthetic
ugaccaagcugggaguggggacu

SEQ ID NO: 641670 - RNA, 24 nt, Artificial Sequence
  Synthetic
uugaccaagcugggaguggggacu

SEQ ID NO: 641671 - RNA, 18 nt, Artificial Sequence
  Synthetic
uggaccauuaaugggacu

SEQ ID NO: 641672 - RNA, 19 nt, Artificial Sequence
  Synthetic
cuggaccauuaaugggacu

SEQ ID NO: 641673 - RNA, 20 nt, Artificial Sequence
  Synthetic
ccuggaccauuaaugggacu

SEQ ID NO: 641674 - RNA, 21 nt, Artificial Sequence
  Synthetic
gccuggaccauuaaugggacu

SEQ ID NO: 641675 - RNA, 22 nt, Artificial Sequence
  Synthetic
ggccuggaccauuaaugggacu

SEQ ID NO: 641676 - RNA, 23 nt, Artificial Sequence
  Synthetic
uggccuggaccauuaaugggacu

SEQ ID NO: 641677 - RNA, 24 nt, Artificial Sequence
  Synthetic
auggccuggaccauuaaugggacu

SEQ ID NO: 641678 - RNA, 18 nt, Artificial Sequence
  Synthetic
aagaguaaaauugggacu

SEQ ID NO: 641679 - RNA, 19 nt, Artificial Sequence
  Synthetic
gaagaguaaaauugggacu

SEQ ID NO: 641680 - RNA, 20 nt, Artificial Sequence
  Synthetic
agaagaguaaaauugggacu

SEQ ID NO: 641681 - RNA, 21 nt, Artificial Sequence
  Synthetic
uagaagaguaaaauugggacu

SEQ ID NO: 641682 - RNA, 22 nt, Artificial Sequence
  Synthetic
auagaagaguaaaauugggacu

SEQ ID NO: 641683 - RNA, 23 nt, Artificial Sequence
  Synthetic
uauagaagaguaaaauugggacu

SEQ ID NO: 641684 - RNA, 24 nt, Artificial Sequence
  Synthetic
guauagaagaguaaaauugggacu

SEQ ID NO: 641685 - RNA, 18 nt, Artificial Sequence
  Synthetic
ggagugauacaauggacu

SEQ ID NO: 641686 - RNA, 19 nt, Artificial Sequence
  Synthetic
cggagugauacaauggacu

SEQ ID NO: 641687 - RNA, 20 nt, Artificial Sequence
  Synthetic
acggagugauacaauggacu

SEQ ID NO: 641688 - RNA, 21 nt, Artificial Sequence
  Synthetic
uacggagugauacaauggacu

SEQ ID NO: 641689 - RNA, 22 nt, Artificial Sequence
  Synthetic
auacggagugauacaauggacu

SEQ ID NO: 641690 - RNA, 23 nt, Artificial Sequence
  Synthetic
cauacggagugauacaauggacu

SEQ ID NO: 641691 - RNA, 24 nt, Artificial Sequence
  Synthetic
acauacggagugauacaauggacu

SEQ ID NO: 641692 - RNA, 18 nt, Artificial Sequence
  Synthetic
caguucaguggcuggacu

SEQ ID NO: 641693 - RNA, 19 nt, Artificial Sequence
  Synthetic
ccaguucaguggcuggacu

SEQ ID NO: 641694 - RNA, 20 nt, Artificial Sequence
  Synthetic
cccaguucaguggcuggacu

SEQ ID NO: 641695 - RNA, 21 nt, Artificial Sequence
  Synthetic
gcccaguucaguggcuggacu

SEQ ID NO: 641696 - RNA, 22 nt, Artificial Sequence
  Synthetic
ugcccaguucaguggcuggacu

SEQ ID NO: 641697 - RNA, 23 nt, Artificial Sequence
  Synthetic
augcccaguucaguggcuggacu

SEQ ID NO: 641698 - RNA, 24 nt, Artificial Sequence
  Synthetic
gaugcccaguucaguggcuggacu

SEQ ID NO: 641699 - RNA, 18 nt, Artificial Sequence
  Synthetic
caaauaaaugucuggacu

SEQ ID NO: 641700 - RNA, 19 nt, Artificial Sequence
  Synthetic
ccaaauaaaugucuggacu

SEQ ID NO: 641701 - RNA, 20 nt, Artificial Sequence
  Synthetic
accaaauaaaugucuggacu

SEQ ID NO: 641702 - RNA, 21 nt, Artificial Sequence
  Synthetic
gaccaaauaaaugucuggacu

SEQ ID NO: 641703 - RNA, 22 nt, Artificial Sequence
  Synthetic
ugaccaaauaaaugucuggacu

SEQ ID NO: 641704 - RNA, 23 nt, Artificial Sequence
  Synthetic
gugaccaaauaaaugucuggacu

SEQ ID NO: 641705 - RNA, 24 nt, Artificial Sequence
  Synthetic
agugaccaaauaaaugucuggacu

SEQ ID NO: 641706 - RNA, 18 nt, Artificial Sequence
  Synthetic
aaaaagugauuguggacu

SEQ ID NO: 641707 - RNA, 19 nt, Artificial Sequence
  Synthetic
gaaaaagugauuguggacu

SEQ ID NO: 641708 - RNA, 20 nt, Artificial Sequence
  Synthetic
agaaaaagugauuguggacu

SEQ ID NO: 641709 - RNA, 21 nt, Artificial Sequence
  Synthetic
uagaaaaagugauuguggacu

SEQ ID NO: 641710 - RNA, 22 nt, Artificial Sequence
  Synthetic
guagaaaaagugauuguggacu

SEQ ID NO: 641711 - RNA, 23 nt, Artificial Sequence
  Synthetic
gguagaaaaagugauuguggacu

SEQ ID NO: 641712 - RNA, 24 nt, Artificial Sequence
  Synthetic
agguagaaaaagugauuguggacu

SEQ ID NO: 641713 - RNA, 18 nt, Artificial Sequence
  Synthetic
aauguaauacauuggacu

SEQ ID NO: 641714 - RNA, 19 nt, Artificial Sequence
  Synthetic
uaauguaauacauuggacu

SEQ ID NO: 641715 - RNA, 20 nt, Artificial Sequence
  Synthetic
guaauguaauacauuggacu

SEQ ID NO: 641716 - RNA, 21 nt, Artificial Sequence
  Synthetic
aguaauguaauacauuggacu

SEQ ID NO: 641717 - RNA, 22 nt, Artificial Sequence
  Synthetic
caguaauguaauacauuggacu

SEQ ID NO: 641718 - RNA, 23 nt, Artificial Sequence
  Synthetic
gcaguaauguaauacauuggacu

SEQ ID NO: 641719 - RNA, 24 nt, Artificial Sequence
  Synthetic
ugcaguaauguaauacauuggacu

SEQ ID NO: 641720 - RNA, 18 nt, Artificial Sequence
  Synthetic
aagccaugauguuggacu

SEQ ID NO: 641721 - RNA, 19 nt, Artificial Sequence
  Synthetic
uaagccaugauguuggacu

SEQ ID NO: 641722 - RNA, 20 nt, Artificial Sequence
  Synthetic
uuaagccaugauguuggacu

SEQ ID NO: 641723 - RNA, 21 nt, Artificial Sequence
  Synthetic
cuuaagccaugauguuggacu

SEQ ID NO: 641724 - RNA, 22 nt, Artificial Sequence
  Synthetic
ccuuaagccaugauguuggacu

SEQ ID NO: 641725 - RNA, 23 nt, Artificial Sequence
  Synthetic
gccuuaagccaugauguuggacu

SEQ ID NO: 641726 - RNA, 24 nt, Artificial Sequence
  Synthetic
ugccuuaagccaugauguuggacu

SEQ ID NO: 641727 - RNA, 18 nt, Artificial Sequence
  Synthetic
aaugccaaguguuggacu

SEQ ID NO: 641728 - RNA, 19 nt, Artificial Sequence
  Synthetic
uaaugccaaguguuggacu

SEQ ID NO: 641729 - RNA, 20 nt, Artificial Sequence
  Synthetic
auaaugccaaguguuggacu

SEQ ID NO: 641730 - RNA, 21 nt, Artificial Sequence
  Synthetic
uauaaugccaaguguuggacu

SEQ ID NO: 641731 - RNA, 22 nt, Artificial Sequence
  Synthetic
auauaaugccaaguguuggacu

SEQ ID NO: 641732 - RNA, 23 nt, Artificial Sequence
  Synthetic
aauauaaugccaaguguuggacu

SEQ ID NO: 641733 - RNA, 24 nt, Artificial Sequence
  Synthetic
aaauauaaugccaaguguuggacu

SEQ ID NO: 641734 - RNA, 18 nt, Artificial Sequence
  Synthetic
caacuuuaauuuuggacu

SEQ ID NO: 641735 - RNA, 19 nt, Artificial Sequence
  Synthetic
ucaacuuuaauuuuggacu

SEQ ID NO: 641736 - RNA, 20 nt, Artificial Sequence
  Synthetic
uucaacuuuaauuuuggacu

SEQ ID NO: 641737 - RNA, 21 nt, Artificial Sequence
  Synthetic
uuucaacuuuaauuuuggacu

SEQ ID NO: 641738 - RNA, 22 nt, Artificial Sequence
  Synthetic
uuuucaacuuuaauuuuggacu

SEQ ID NO: 641739 - RNA, 23 nt, Artificial Sequence
  Synthetic
uuuuucaacuuuaauuuuggacu

SEQ ID NO: 641740 - RNA, 24 nt, Artificial Sequence
  Synthetic
uuuuuucaacuuuaauuuuggacu

SEQ ID NO: 641741 - RNA, 18 nt, Artificial Sequence
  Synthetic
uccuaaauuaaaaugacu

SEQ ID NO: 641742 - RNA, 19 nt, Artificial Sequence
  Synthetic
guccuaaauuaaaaugacu

SEQ ID NO: 641743 - RNA, 20 nt, Artificial Sequence
  Synthetic
uguccuaaauuaaaaugacu

SEQ ID NO: 641744 - RNA, 21 nt, Artificial Sequence
  Synthetic
uuguccuaaauuaaaaugacu

SEQ ID NO: 641745 - RNA, 22 nt, Artificial Sequence
  Synthetic
uuuguccuaaauuaaaaugacu

SEQ ID NO: 641746 - RNA, 23 nt, Artificial Sequence
  Synthetic
cuuuguccuaaauuaaaaugacu

SEQ ID NO: 641747 - RNA, 24 nt, Artificial Sequence
  Synthetic
acuuuguccuaaauuaaaaugacu

SEQ ID NO: 641748 - RNA, 18 nt, Artificial Sequence
  Synthetic
uaauguaggccaaugacu

SEQ ID NO: 641749 - RNA, 19 nt, Artificial Sequence
  Synthetic
auaauguaggccaaugacu

SEQ ID NO: 641750 - RNA, 20 nt, Artificial Sequence
  Synthetic
aauaauguaggccaaugacu

SEQ ID NO: 641751 - RNA, 21 nt, Artificial Sequence
  Synthetic
gaauaauguaggccaaugacu

SEQ ID NO: 641752 - RNA, 22 nt, Artificial Sequence
  Synthetic
ugaauaauguaggccaaugacu

SEQ ID NO: 641753 - RNA, 23 nt, Artificial Sequence
  Synthetic
gugaauaauguaggccaaugacu

SEQ ID NO: 641754 - RNA, 24 nt, Artificial Sequence
  Synthetic
ggugaauaauguaggccaaugacu

SEQ ID NO: 641755 - RNA, 18 nt, Artificial Sequence
  Synthetic
accuuccuuucaaugacu

SEQ ID NO: 641756 - RNA, 19 nt, Artificial Sequence
  Synthetic
aaccuuccuuucaaugacu

SEQ ID NO: 641757 - RNA, 20 nt, Artificial Sequence
  Synthetic
uaaccuuccuuucaaugacu

SEQ ID NO: 641758 - RNA, 21 nt, Artificial Sequence
  Synthetic
uuaaccuuccuuucaaugacu

SEQ ID NO: 641759 - RNA, 22 nt, Artificial Sequence
  Synthetic
uuuaaccuuccuuucaaugacu

SEQ ID NO: 641760 - RNA, 23 nt, Artificial Sequence
  Synthetic
uuuuaaccuuccuuucaaugacu

SEQ ID NO: 641761 - RNA, 24 nt, Artificial Sequence
  Synthetic
auuuuaaccuuccuuucaaugacu

SEQ ID NO: 641762 - RNA, 18 nt, Artificial Sequence
  Synthetic
acucccuuucuaaugacu

SEQ ID NO: 641763 - RNA, 19 nt, Artificial Sequence
  Synthetic
cacucccuuucuaaugacu

SEQ ID NO: 641764 - RNA, 20 nt, Artificial Sequence
  Synthetic
ccacucccuuucuaaugacu

SEQ ID NO: 641765 - RNA, 21 nt, Artificial Sequence
  Synthetic
accacucccuuucuaaugacu

SEQ ID NO: 641766 - RNA, 22 nt, Artificial Sequence
  Synthetic
caccacucccuuucuaaugacu

SEQ ID NO: 641767 - RNA, 23 nt, Artificial Sequence
  Synthetic
ccaccacucccuuucuaaugacu

SEQ ID NO: 641768 - RNA, 24 nt, Artificial Sequence
  Synthetic
accaccacucccuuucuaaugacu

SEQ ID NO: 641769 - RNA, 18 nt, Artificial Sequence
  Synthetic
uuauaguuccacaugacu

SEQ ID NO: 641770 - RNA, 19 nt, Artificial Sequence
  Synthetic
cuuauaguuccacaugacu

SEQ ID NO: 641771 - RNA, 20 nt, Artificial Sequence
  Synthetic
acuuauaguuccacaugacu

SEQ ID NO: 641772 - RNA, 21 nt, Artificial Sequence
  Synthetic
aacuuauaguuccacaugacu

SEQ ID NO: 641773 - RNA, 22 nt, Artificial Sequence
  Synthetic
gaacuuauaguuccacaugacu

SEQ ID NO: 641774 - RNA, 23 nt, Artificial Sequence
  Synthetic
ugaacuuauaguuccacaugacu

SEQ ID NO: 641775 - RNA, 24 nt, Artificial Sequence
  Synthetic
uugaacuuauaguuccacaugacu

SEQ ID NO: 641776 - RNA, 18 nt, Artificial Sequence
  Synthetic
ucaauuguggggaugacu

SEQ ID NO: 641777 - RNA, 19 nt, Artificial Sequence
  Synthetic
gucaauuguggggaugacu

SEQ ID NO: 641778 - RNA, 20 nt, Artificial Sequence
  Synthetic
agucaauuguggggaugacu

SEQ ID NO: 641779 - RNA, 21 nt, Artificial Sequence
  Synthetic
aagucaauuguggggaugacu

SEQ ID NO: 641780 - RNA, 22 nt, Artificial Sequence
  Synthetic
gaagucaauuguggggaugacu

SEQ ID NO: 641781 - RNA, 23 nt, Artificial Sequence
  Synthetic
ggaagucaauuguggggaugacu

SEQ ID NO: 641782 - RNA, 24 nt, Artificial Sequence
  Synthetic
aggaagucaauuguggggaugacu

SEQ ID NO: 641783 - RNA, 18 nt, Artificial Sequence
  Synthetic
cccuuuagcuauaugacu

SEQ ID NO: 641784 - RNA, 19 nt, Artificial Sequence
  Synthetic
ucccuuuagcuauaugacu

SEQ ID NO: 641785 - RNA, 20 nt, Artificial Sequence
  Synthetic
uucccuuuagcuauaugacu

SEQ ID NO: 641786 - RNA, 21 nt, Artificial Sequence
  Synthetic
auucccuuuagcuauaugacu

SEQ ID NO: 641787 - RNA, 22 nt, Artificial Sequence
  Synthetic
cauucccuuuagcuauaugacu

SEQ ID NO: 641788 - RNA, 23 nt, Artificial Sequence
  Synthetic
ucauucccuuuagcuauaugacu

SEQ ID NO: 641789 - RNA, 24 nt, Artificial Sequence
  Synthetic
cucauucccuuuagcuauaugacu

SEQ ID NO: 641790 - RNA, 18 nt, Artificial Sequence
  Synthetic
cucagaacuuauaugacu

SEQ ID NO: 641791 - RNA, 19 nt, Artificial Sequence
  Synthetic
ucucagaacuuauaugacu

SEQ ID NO: 641792 - RNA, 20 nt, Artificial Sequence
  Synthetic
uucucagaacuuauaugacu

SEQ ID NO: 641793 - RNA, 21 nt, Artificial Sequence
  Synthetic
cuucucagaacuuauaugacu

SEQ ID NO: 641794 - RNA, 22 nt, Artificial Sequence
  Synthetic
ucuucucagaacuuauaugacu

SEQ ID NO: 641795 - RNA, 23 nt, Artificial Sequence
  Synthetic
uucuucucagaacuuauaugacu

SEQ ID NO: 641796 - RNA, 24 nt, Artificial Sequence
  Synthetic
uuucuucucagaacuuauaugacu

SEQ ID NO: 641797 - RNA, 18 nt, Artificial Sequence
  Synthetic
auaugagcagaacugacu

SEQ ID NO: 641798 - RNA, 19 nt, Artificial Sequence
  Synthetic
uauaugagcagaacugacu

SEQ ID NO: 641799 - RNA, 20 nt, Artificial Sequence
  Synthetic
cuauaugagcagaacugacu

SEQ ID NO: 641800 - RNA, 21 nt, Artificial Sequence
  Synthetic
gcuauaugagcagaacugacu

SEQ ID NO: 641801 - RNA, 22 nt, Artificial Sequence
  Synthetic
ugcuauaugagcagaacugacu

SEQ ID NO: 641802 - RNA, 23 nt, Artificial Sequence
  Synthetic
cugcuauaugagcagaacugacu

SEQ ID NO: 641803 - RNA, 24 nt, Artificial Sequence
  Synthetic
gcugcuauaugagcagaacugacu

SEQ ID NO: 641804 - RNA, 18 nt, Artificial Sequence
  Synthetic
auugggucuuaacugacu

SEQ ID NO: 641805 - RNA, 19 nt, Artificial Sequence
  Synthetic
uauugggucuuaacugacu

SEQ ID NO: 641806 - RNA, 20 nt, Artificial Sequence
  Synthetic
uuauugggucuuaacugacu

SEQ ID NO: 641807 - RNA, 21 nt, Artificial Sequence
  Synthetic
auuauugggucuuaacugacu

SEQ ID NO: 641808 - RNA, 22 nt, Artificial Sequence
  Synthetic
uauuauugggucuuaacugacu

SEQ ID NO: 641809 - RNA, 23 nt, Artificial Sequence
  Synthetic
cuauuauugggucuuaacugacu

SEQ ID NO: 641810 - RNA, 24 nt, Artificial Sequence
  Synthetic
ucuauuauugggucuuaacugacu

SEQ ID NO: 641811 - RNA, 18 nt, Artificial Sequence
  Synthetic
gacauaauaagacugacu

SEQ ID NO: 641812 - RNA, 19 nt, Artificial Sequence
  Synthetic
agacauaauaagacugacu

SEQ ID NO: 641813 - RNA, 20 nt, Artificial Sequence
  Synthetic
cagacauaauaagacugacu

SEQ ID NO: 641814 - RNA, 21 nt, Artificial Sequence
  Synthetic
ccagacauaauaagacugacu

SEQ ID NO: 641815 - RNA, 22 nt, Artificial Sequence
  Synthetic
uccagacauaauaagacugacu

SEQ ID NO: 641816 - RNA, 23 nt, Artificial Sequence
  Synthetic
cuccagacauaauaagacugacu

SEQ ID NO: 641817 - RNA, 24 nt, Artificial Sequence
  Synthetic
ucuccagacauaauaagacugacu

SEQ ID NO: 641818 - RNA, 18 nt, Artificial Sequence
  Synthetic
guuuuggauauacugacu

SEQ ID NO: 641819 - RNA, 19 nt, Artificial Sequence
  Synthetic
aguuuuggauauacugacu

SEQ ID NO: 641820 - RNA, 20 nt, Artificial Sequence
  Synthetic
gaguuuuggauauacugacu

SEQ ID NO: 641821 - RNA, 21 nt, Artificial Sequence
  Synthetic
ugaguuuuggauauacugacu

SEQ ID NO: 641822 - RNA, 22 nt, Artificial Sequence
  Synthetic
uugaguuuuggauauacugacu

SEQ ID NO: 641823 - RNA, 23 nt, Artificial Sequence
  Synthetic
guugaguuuuggauauacugacu

SEQ ID NO: 641824 - RNA, 24 nt, Artificial Sequence
  Synthetic
uguugaguuuuggauauacugacu

SEQ ID NO: 641825 - RNA, 18 nt, Artificial Sequence
  Synthetic
cuucugccuuaucugacu

SEQ ID NO: 641826 - RNA, 19 nt, Artificial Sequence
  Synthetic
acuucugccuuaucugacu

SEQ ID NO: 641827 - RNA, 20 nt, Artificial Sequence
  Synthetic
uacuucugccuuaucugacu

SEQ ID NO: 641828 - RNA, 21 nt, Artificial Sequence
  Synthetic
guacuucugccuuaucugacu

SEQ ID NO: 641829 - RNA, 22 nt, Artificial Sequence
  Synthetic
aguacuucugccuuaucugacu

SEQ ID NO: 641830 - RNA, 23 nt, Artificial Sequence
  Synthetic
aaguacuucugccuuaucugacu

SEQ ID NO: 641831 - RNA, 24 nt, Artificial Sequence
  Synthetic
gaaguacuucugccuuaucugacu

SEQ ID NO: 641832 - RNA, 18 nt, Artificial Sequence
  Synthetic
aagucucuacuucugacu

SEQ ID NO: 641833 - RNA, 19 nt, Artificial Sequence
  Synthetic
gaagucucuacuucugacu

SEQ ID NO: 641834 - RNA, 20 nt, Artificial Sequence
  Synthetic
cgaagucucuacuucugacu

SEQ ID NO: 641835 - RNA, 21 nt, Artificial Sequence
  Synthetic
ucgaagucucuacuucugacu

SEQ ID NO: 641836 - RNA, 22 nt, Artificial Sequence
  Synthetic
cucgaagucucuacuucugacu

SEQ ID NO: 641837 - RNA, 23 nt, Artificial Sequence
  Synthetic
ucucgaagucucuacuucugacu

SEQ ID NO: 641838 - RNA, 24 nt, Artificial Sequence
  Synthetic
cucucgaagucucuacuucugacu

SEQ ID NO: 641839 - RNA, 18 nt, Artificial Sequence
  Synthetic
cccucggugaaagugacu

SEQ ID NO: 641840 - RNA, 19 nt, Artificial Sequence
  Synthetic
ucccucggugaaagugacu

SEQ ID NO: 641841 - RNA, 20 nt, Artificial Sequence
  Synthetic
gucccucggugaaagugacu

SEQ ID NO: 641842 - RNA, 21 nt, Artificial Sequence
  Synthetic
agucccucggugaaagugacu

SEQ ID NO: 641843 - RNA, 22 nt, Artificial Sequence
  Synthetic
cagucccucggugaaagugacu

SEQ ID NO: 641844 - RNA, 23 nt, Artificial Sequence
  Synthetic
ucagucccucggugaaagugacu

SEQ ID NO: 641845 - RNA, 24 nt, Artificial Sequence
  Synthetic
uucagucccucggugaaagugacu

SEQ ID NO: 641846 - RNA, 18 nt, Artificial Sequence
  Synthetic
uagagaaaucaagugacu

SEQ ID NO: 641847 - RNA, 19 nt, Artificial Sequence
  Synthetic
guagagaaaucaagugacu

SEQ ID NO: 641848 - RNA, 20 nt, Artificial Sequence
  Synthetic
uguagagaaaucaagugacu

SEQ ID NO: 641849 - RNA, 21 nt, Artificial Sequence
  Synthetic
auguagagaaaucaagugacu

SEQ ID NO: 641850 - RNA, 22 nt, Artificial Sequence
  Synthetic
uauguagagaaaucaagugacu

SEQ ID NO: 641851 - RNA, 23 nt, Artificial Sequence
  Synthetic
auauguagagaaaucaagugacu

SEQ ID NO: 641852 - RNA, 24 nt, Artificial Sequence
  Synthetic
cauauguagagaaaucaagugacu

SEQ ID NO: 641853 - RNA, 18 nt, Artificial Sequence
  Synthetic
cagauaagauuagugacu

SEQ ID NO: 641854 - RNA, 19 nt, Artificial Sequence
  Synthetic
ucagauaagauuagugacu

SEQ ID NO: 641855 - RNA, 20 nt, Artificial Sequence
  Synthetic
uucagauaagauuagugacu

SEQ ID NO: 641856 - RNA, 21 nt, Artificial Sequence
  Synthetic
auucagauaagauuagugacu

SEQ ID NO: 641857 - RNA, 22 nt, Artificial Sequence
  Synthetic
aauucagauaagauuagugacu

SEQ ID NO: 641858 - RNA, 23 nt, Artificial Sequence
  Synthetic
aaauucagauaagauuagugacu

SEQ ID NO: 641859 - RNA, 24 nt, Artificial Sequence
  Synthetic
uaaauucagauaagauuagugacu

SEQ ID NO: 641860 - RNA, 18 nt, Artificial Sequence
  Synthetic
auuuccucaacugugacu

SEQ ID NO: 641861 - RNA, 19 nt, Artificial Sequence
  Synthetic
aauuuccucaacugugacu

SEQ ID NO: 641862 - RNA, 20 nt, Artificial Sequence
  Synthetic
uaauuuccucaacugugacu

SEQ ID NO: 641863 - RNA, 21 nt, Artificial Sequence
  Synthetic
uuaauuuccucaacugugacu

SEQ ID NO: 641864 - RNA, 22 nt, Artificial Sequence
  Synthetic
cuuaauuuccucaacugugacu

SEQ ID NO: 641865 - RNA, 23 nt, Artificial Sequence
  Synthetic
ccuuaauuuccucaacugugacu

SEQ ID NO: 641866 - RNA, 24 nt, Artificial Sequence
  Synthetic
gccuuaauuuccucaacugugacu

SEQ ID NO: 641867 - RNA, 18 nt, Artificial Sequence
  Synthetic
gugggcuccggugugacu

SEQ ID NO: 641868 - RNA, 19 nt, Artificial Sequence
  Synthetic
agugggcuccggugugacu

SEQ ID NO: 641869 - RNA, 20 nt, Artificial Sequence
  Synthetic
cagugggcuccggugugacu

SEQ ID NO: 641870 - RNA, 21 nt, Artificial Sequence
  Synthetic
acagugggcuccggugugacu

SEQ ID NO: 641871 - RNA, 22 nt, Artificial Sequence
  Synthetic
gacagugggcuccggugugacu

SEQ ID NO: 641872 - RNA, 23 nt, Artificial Sequence
  Synthetic
ggacagugggcuccggugugacu

SEQ ID NO: 641873 - RNA, 24 nt, Artificial Sequence
  Synthetic
gggacagugggcuccggugugacu

SEQ ID NO: 641874 - RNA, 18 nt, Artificial Sequence
  Synthetic
cuucccuucccauugacu

SEQ ID NO: 641875 - RNA, 19 nt, Artificial Sequence
  Synthetic
acuucccuucccauugacu

SEQ ID NO: 641876 - RNA, 20 nt, Artificial Sequence
  Synthetic
uacuucccuucccauugacu

SEQ ID NO: 641877 - RNA, 21 nt, Artificial Sequence
  Synthetic
auacuucccuucccauugacu

SEQ ID NO: 641878 - RNA, 22 nt, Artificial Sequence
  Synthetic
uauacuucccuucccauugacu

SEQ ID NO: 641879 - RNA, 23 nt, Artificial Sequence
  Synthetic
auauacuucccuucccauugacu

SEQ ID NO: 641880 - RNA, 24 nt, Artificial Sequence
  Synthetic
aauauacuucccuucccauugacu

SEQ ID NO: 641881 - RNA, 18 nt, Artificial Sequence
  Synthetic
uuuuccuaccccuugacu

SEQ ID NO: 641882 - RNA, 19 nt, Artificial Sequence
  Synthetic
auuuuccuaccccuugacu

SEQ ID NO: 641883 - RNA, 20 nt, Artificial Sequence
  Synthetic
uauuuuccuaccccuugacu

SEQ ID NO: 641884 - RNA, 21 nt, Artificial Sequence
  Synthetic
guauuuuccuaccccuugacu

SEQ ID NO: 641885 - RNA, 22 nt, Artificial Sequence
  Synthetic
aguauuuuccuaccccuugacu

SEQ ID NO: 641886 - RNA, 23 nt, Artificial Sequence
  Synthetic
aaguauuuuccuaccccuugacu

SEQ ID NO: 641887 - RNA, 24 nt, Artificial Sequence
  Synthetic
aaaguauuuuccuaccccuugacu

SEQ ID NO: 641888 - RNA, 18 nt, Artificial Sequence
  Synthetic
guaugcacaugcuugacu

SEQ ID NO: 641889 - RNA, 19 nt, Artificial Sequence
  Synthetic
uguaugcacaugcuugacu

SEQ ID NO: 641890 - RNA, 20 nt, Artificial Sequence
  Synthetic
uuguaugcacaugcuugacu

SEQ ID NO: 641891 - RNA, 21 nt, Artificial Sequence
  Synthetic
uuuguaugcacaugcuugacu

SEQ ID NO: 641892 - RNA, 22 nt, Artificial Sequence
  Synthetic
auuuguaugcacaugcuugacu

SEQ ID NO: 641893 - RNA, 23 nt, Artificial Sequence
  Synthetic
uauuuguaugcacaugcuugacu

SEQ ID NO: 641894 - RNA, 24 nt, Artificial Sequence
  Synthetic
guauuuguaugcacaugcuugacu

SEQ ID NO: 641895 - RNA, 18 nt, Artificial Sequence
  Synthetic
uaagaaagcugcuugacu

SEQ ID NO: 641896 - RNA, 19 nt, Artificial Sequence
  Synthetic
guaagaaagcugcuugacu

SEQ ID NO: 641897 - RNA, 20 nt, Artificial Sequence
  Synthetic
uguaagaaagcugcuugacu

SEQ ID NO: 641898 - RNA, 21 nt, Artificial Sequence
  Synthetic
auguaagaaagcugcuugacu

SEQ ID NO: 641899 - RNA, 22 nt, Artificial Sequence
  Synthetic
uauguaagaaagcugcuugacu

SEQ ID NO: 641900 - RNA, 23 nt, Artificial Sequence
  Synthetic
auauguaagaaagcugcuugacu

SEQ ID NO: 641901 - RNA, 24 nt, Artificial Sequence
  Synthetic
cauauguaagaaagcugcuugacu

SEQ ID NO: 641902 - RNA, 18 nt, Artificial Sequence
  Synthetic
ccaagcuuacucuugacu

SEQ ID NO: 641903 - RNA, 19 nt, Artificial Sequence
  Synthetic
cccaagcuuacucuugacu

SEQ ID NO: 641904 - RNA, 20 nt, Artificial Sequence
  Synthetic
gcccaagcuuacucuugacu

SEQ ID NO: 641905 - RNA, 21 nt, Artificial Sequence
  Synthetic
ggcccaagcuuacucuugacu

SEQ ID NO: 641906 - RNA, 22 nt, Artificial Sequence
  Synthetic
uggcccaagcuuacucuugacu

SEQ ID NO: 641907 - RNA, 23 nt, Artificial Sequence
  Synthetic
cuggcccaagcuuacucuugacu

SEQ ID NO: 641908 - RNA, 24 nt, Artificial Sequence
  Synthetic
ccuggcccaagcuuacucuugacu

SEQ ID NO: 641909 - RNA, 18 nt, Artificial Sequence
  Synthetic
agcauuucugucuugacu

SEQ ID NO: 641910 - RNA, 19 nt, Artificial Sequence
  Synthetic
cagcauuucugucuugacu

SEQ ID NO: 641911 - RNA, 20 nt, Artificial Sequence
  Synthetic
acagcauuucugucuugacu

SEQ ID NO: 641912 - RNA, 21 nt, Artificial Sequence
  Synthetic
cacagcauuucugucuugacu

SEQ ID NO: 641913 - RNA, 22 nt, Artificial Sequence
  Synthetic
ucacagcauuucugucuugacu

SEQ ID NO: 641914 - RNA, 23 nt, Artificial Sequence
  Synthetic
uucacagcauuucugucuugacu

SEQ ID NO: 641915 - RNA, 24 nt, Artificial Sequence
  Synthetic
auucacagcauuucugucuugacu

SEQ ID NO: 641916 - RNA, 18 nt, Artificial Sequence
  Synthetic
agagugugggaguugacu

SEQ ID NO: 641917 - RNA, 19 nt, Artificial Sequence
  Synthetic
aagagugugggaguugacu

SEQ ID NO: 641918 - RNA, 20 nt, Artificial Sequence
  Synthetic
aaagagugugggaguugacu

SEQ ID NO: 641919 - RNA, 21 nt, Artificial Sequence
  Synthetic
aaaagagugugggaguugacu

SEQ ID NO: 641920 - RNA, 22 nt, Artificial Sequence
  Synthetic
gaaaagagugugggaguugacu

SEQ ID NO: 641921 - RNA, 23 nt, Artificial Sequence
  Synthetic
ugaaaagagugugggaguugacu

SEQ ID NO: 641922 - RNA, 24 nt, Artificial Sequence
  Synthetic
cugaaaagagugugggaguugacu

SEQ ID NO: 641923 - RNA, 18 nt, Artificial Sequence
  Synthetic
gauuaugaggauuugacu

SEQ ID NO: 641924 - RNA, 19 nt, Artificial Sequence
  Synthetic
agauuaugaggauuugacu

SEQ ID NO: 641925 - RNA, 20 nt, Artificial Sequence
  Synthetic
aagauuaugaggauuugacu

SEQ ID NO: 641926 - RNA, 21 nt, Artificial Sequence
  Synthetic
caagauuaugaggauuugacu

SEQ ID NO: 641927 - RNA, 22 nt, Artificial Sequence
  Synthetic
gcaagauuaugaggauuugacu

SEQ ID NO: 641928 - RNA, 23 nt, Artificial Sequence
  Synthetic
ugcaagauuaugaggauuugacu

SEQ ID NO: 641929 - RNA, 24 nt, Artificial Sequence
  Synthetic
gugcaagauuaugaggauuugacu

SEQ ID NO: 641930 - RNA, 18 nt, Artificial Sequence
  Synthetic
gucccauucucuuugacu

SEQ ID NO: 641931 - RNA, 19 nt, Artificial Sequence
  Synthetic
ugucccauucucuuugacu

SEQ ID NO: 641932 - RNA, 20 nt, Artificial Sequence
  Synthetic
gugucccauucucuuugacu

SEQ ID NO: 641933 - RNA, 21 nt, Artificial Sequence
  Synthetic
ugugucccauucucuuugacu

SEQ ID NO: 641934 - RNA, 22 nt, Artificial Sequence
  Synthetic
uugugucccauucucuuugacu

SEQ ID NO: 641935 - RNA, 23 nt, Artificial Sequence
  Synthetic
guugugucccauucucuuugacu

SEQ ID NO: 641936 - RNA, 24 nt, Artificial Sequence
  Synthetic
aguugugucccauucucuuugacu

SEQ ID NO: 641937 - RNA, 18 nt, Artificial Sequence
  Synthetic
cuuuaaccuauuuugacu

SEQ ID NO: 641938 - RNA, 19 nt, Artificial Sequence
  Synthetic
ccuuuaaccuauuuugacu

SEQ ID NO: 641939 - RNA, 20 nt, Artificial Sequence
  Synthetic
cccuuuaaccuauuuugacu

SEQ ID NO: 641940 - RNA, 21 nt, Artificial Sequence
  Synthetic
gcccuuuaaccuauuuugacu

SEQ ID NO: 641941 - RNA, 22 nt, Artificial Sequence
  Synthetic
ggcccuuuaaccuauuuugacu

SEQ ID NO: 641942 - RNA, 23 nt, Artificial Sequence
  Synthetic
aggcccuuuaaccuauuuugacu

SEQ ID NO: 641943 - RNA, 24 nt, Artificial Sequence
  Synthetic
aaggcccuuuaaccuauuuugacu

SEQ ID NO: 641944 - RNA, 18 nt, Artificial Sequence
  Synthetic
gaggagaaaaaaaauacu

SEQ ID NO: 641945 - RNA, 19 nt, Artificial Sequence
  Synthetic
ugaggagaaaaaaaauacu

SEQ ID NO: 641946 - RNA, 20 nt, Artificial Sequence
  Synthetic
uugaggagaaaaaaaauacu

SEQ ID NO: 641947 - RNA, 21 nt, Artificial Sequence
  Synthetic
uuugaggagaaaaaaaauacu

SEQ ID NO: 641948 - RNA, 22 nt, Artificial Sequence
  Synthetic
guuugaggagaaaaaaaauacu

SEQ ID NO: 641949 - RNA, 23 nt, Artificial Sequence
  Synthetic
gguuugaggagaaaaaaaauacu

SEQ ID NO: 641950 - RNA, 24 nt, Artificial Sequence
  Synthetic
agguuugaggagaaaaaaaauacu

SEQ ID NO: 641951 - RNA, 18 nt, Artificial Sequence
  Synthetic
auggguacaaaaaauacu

SEQ ID NO: 641952 - RNA, 19 nt, Artificial Sequence
  Synthetic
aauggguacaaaaaauacu

SEQ ID NO: 641953 - RNA, 20 nt, Artificial Sequence
  Synthetic
uaauggguacaaaaaauacu

SEQ ID NO: 641954 - RNA, 21 nt, Artificial Sequence
  Synthetic
uuaauggguacaaaaaauacu

SEQ ID NO: 641955 - RNA, 22 nt, Artificial Sequence
  Synthetic
guuaauggguacaaaaaauacu

SEQ ID NO: 641956 - RNA, 23 nt, Artificial Sequence
  Synthetic
gguuaauggguacaaaaaauacu

SEQ ID NO: 641957 - RNA, 24 nt, Artificial Sequence
  Synthetic
ugguuaauggguacaaaaaauacu

SEQ ID NO: 641958 - RNA, 18 nt, Artificial Sequence
  Synthetic
ugauacuuaaaaaauacu

SEQ ID NO: 641959 - RNA, 19 nt, Artificial Sequence
  Synthetic
gugauacuuaaaaaauacu

SEQ ID NO: 641960 - RNA, 20 nt, Artificial Sequence
  Synthetic
ggugauacuuaaaaaauacu

SEQ ID NO: 641961 - RNA, 21 nt, Artificial Sequence
  Synthetic
aggugauacuuaaaaaauacu

SEQ ID NO: 641962 - RNA, 22 nt, Artificial Sequence
  Synthetic
gaggugauacuuaaaaaauacu

SEQ ID NO: 641963 - RNA, 23 nt, Artificial Sequence
  Synthetic
ugaggugauacuuaaaaaauacu

SEQ ID NO: 641964 - RNA, 24 nt, Artificial Sequence
  Synthetic
gugaggugauacuuaaaaaauacu

SEQ ID NO: 641965 - RNA, 18 nt, Artificial Sequence
  Synthetic
aaaagugggaaaaauacu

SEQ ID NO: 641966 - RNA, 19 nt, Artificial Sequence
  Synthetic
gaaaagugggaaaaauacu

SEQ ID NO: 641967 - RNA, 20 nt, Artificial Sequence
  Synthetic
agaaaagugggaaaaauacu

SEQ ID NO: 641968 - RNA, 21 nt, Artificial Sequence
  Synthetic
uagaaaagugggaaaaauacu

SEQ ID NO: 641969 - RNA, 22 nt, Artificial Sequence
  Synthetic
cuagaaaagugggaaaaauacu

SEQ ID NO: 641970 - RNA, 23 nt, Artificial Sequence
  Synthetic
ucuagaaaagugggaaaaauacu

SEQ ID NO: 641971 - RNA, 24 nt, Artificial Sequence
  Synthetic
aucuagaaaagugggaaaaauacu

SEQ ID NO: 641972 - RNA, 18 nt, Artificial Sequence
  Synthetic
gagaauuuuaaaaauacu

SEQ ID NO: 641973 - RNA, 19 nt, Artificial Sequence
  Synthetic
agagaauuuuaaaaauacu

SEQ ID NO: 641974 - RNA, 20 nt, Artificial Sequence
  Synthetic
uagagaauuuuaaaaauacu

SEQ ID NO: 641975 - RNA, 21 nt, Artificial Sequence
  Synthetic
cuagagaauuuuaaaaauacu

SEQ ID NO: 641976 - RNA, 22 nt, Artificial Sequence
  Synthetic
ucuagagaauuuuaaaaauacu

SEQ ID NO: 641977 - RNA, 23 nt, Artificial Sequence
  Synthetic
aucuagagaauuuuaaaaauacu

SEQ ID NO: 641978 - RNA, 24 nt, Artificial Sequence
  Synthetic
aaucuagagaauuuuaaaaauacu

SEQ ID NO: 641979 - RNA, 18 nt, Artificial Sequence
  Synthetic
ugugaugcucaaaauacu

SEQ ID NO: 641980 - RNA, 19 nt, Artificial Sequence
  Synthetic
uugugaugcucaaaauacu

SEQ ID NO: 641981 - RNA, 20 nt, Artificial Sequence
  Synthetic
uuugugaugcucaaaauacu

SEQ ID NO: 641982 - RNA, 21 nt, Artificial Sequence
  Synthetic
cuuugugaugcucaaaauacu

SEQ ID NO: 641983 - RNA, 22 nt, Artificial Sequence
  Synthetic
gcuuugugaugcucaaaauacu

SEQ ID NO: 641984 - RNA, 23 nt, Artificial Sequence
  Synthetic
ugcuuugugaugcucaaaauacu

SEQ ID NO: 641985 - RNA, 24 nt, Artificial Sequence
  Synthetic
uugcuuugugaugcucaaaauacu

SEQ ID NO: 641986 - RNA, 18 nt, Artificial Sequence
  Synthetic
acagaaacagaaaauacu

SEQ ID NO: 641987 - RNA, 19 nt, Artificial Sequence
  Synthetic
cacagaaacagaaaauacu

SEQ ID NO: 641988 - RNA, 20 nt, Artificial Sequence
  Synthetic
acacagaaacagaaaauacu

SEQ ID NO: 641989 - RNA, 21 nt, Artificial Sequence
  Synthetic
cacacagaaacagaaaauacu

SEQ ID NO: 641990 - RNA, 22 nt, Artificial Sequence
  Synthetic
acacacagaaacagaaaauacu

SEQ ID NO: 641991 - RNA, 23 nt, Artificial Sequence
  Synthetic
gacacacagaaacagaaaauacu

SEQ ID NO: 641992 - RNA, 24 nt, Artificial Sequence
  Synthetic
agacacacagaaacagaaaauacu

SEQ ID NO: 641993 - RNA, 18 nt, Artificial Sequence
  Synthetic
gaagaaauuuaaaauacu

SEQ ID NO: 641994 - RNA, 19 nt, Artificial Sequence
  Synthetic
ugaagaaauuuaaaauacu

SEQ ID NO: 641995 - RNA, 20 nt, Artificial Sequence
  Synthetic
gugaagaaauuuaaaauacu

SEQ ID NO: 641996 - RNA, 21 nt, Artificial Sequence
  Synthetic
ugugaagaaauuuaaaauacu

SEQ ID NO: 641997 - RNA, 22 nt, Artificial Sequence
  Synthetic
gugugaagaaauuuaaaauacu

SEQ ID NO: 641998 - RNA, 23 nt, Artificial Sequence
  Synthetic
ugugugaagaaauuuaaaauacu

SEQ ID NO: 641999 - RNA, 24 nt, Artificial Sequence
  Synthetic
gugugugaagaaauuuaaaauacu

SEQ ID NO: 642000 - RNA, 18 nt, Artificial Sequence
  Synthetic
auuuuauuuuaaaauacu

SEQ ID NO: 642001 - RNA, 19 nt, Artificial Sequence
  Synthetic
uauuuuauuuuaaaauacu

SEQ ID NO: 642002 - RNA, 20 nt, Artificial Sequence
  Synthetic
uuauuuuauuuuaaaauacu

SEQ ID NO: 642003 - RNA, 21 nt, Artificial Sequence
  Synthetic
uuuauuuuauuuuaaaauacu

SEQ ID NO: 642004 - RNA, 22 nt, Artificial Sequence
  Synthetic
uuuuauuuuauuuuaaaauacu

SEQ ID NO: 642005 - RNA, 23 nt, Artificial Sequence
  Synthetic
guuuuauuuuauuuuaaaauacu

SEQ ID NO: 642006 - RNA, 24 nt, Artificial Sequence
  Synthetic
uguuuuauuuuauuuuaaaauacu

SEQ ID NO: 642007 - RNA, 18 nt, Artificial Sequence
  Synthetic
uuaaacggaacaaauacu

SEQ ID NO: 642008 - RNA, 19 nt, Artificial Sequence
  Synthetic
auuaaacggaacaaauacu

SEQ ID NO: 642009 - RNA, 20 nt, Artificial Sequence
  Synthetic
aauuaaacggaacaaauacu

SEQ ID NO: 642010 - RNA, 21 nt, Artificial Sequence
  Synthetic
gaauuaaacggaacaaauacu

SEQ ID NO: 642011 - RNA, 22 nt, Artificial Sequence
  Synthetic
ggaauuaaacggaacaaauacu

SEQ ID NO: 642012 - RNA, 23 nt, Artificial Sequence
  Synthetic
aggaauuaaacggaacaaauacu

SEQ ID NO: 642013 - RNA, 24 nt, Artificial Sequence
  Synthetic
gaggaauuaaacggaacaaauacu

SEQ ID NO: 642014 - RNA, 18 nt, Artificial Sequence
  Synthetic
auucauucuacaaauacu

SEQ ID NO: 642015 - RNA, 19 nt, Artificial Sequence
  Synthetic
cauucauucuacaaauacu

SEQ ID NO: 642016 - RNA, 20 nt, Artificial Sequence
  Synthetic
ucauucauucuacaaauacu

SEQ ID NO: 642017 - RNA, 21 nt, Artificial Sequence
  Synthetic
uucauucauucuacaaauacu

SEQ ID NO: 642018 - RNA, 22 nt, Artificial Sequence
  Synthetic
cuucauucauucuacaaauacu

SEQ ID NO: 642019 - RNA, 23 nt, Artificial Sequence
  Synthetic
ccuucauucauucuacaaauacu

SEQ ID NO: 642020 - RNA, 24 nt, Artificial Sequence
  Synthetic
cccuucauucauucuacaaauacu

SEQ ID NO: 642021 - RNA, 18 nt, Artificial Sequence
  Synthetic
aaaaccaggccaaauacu

SEQ ID NO: 642022 - RNA, 19 nt, Artificial Sequence
  Synthetic
aaaaaccaggccaaauacu

SEQ ID NO: 642023 - RNA, 20 nt, Artificial Sequence
  Synthetic
uaaaaaccaggccaaauacu

SEQ ID NO: 642024 - RNA, 21 nt, Artificial Sequence
  Synthetic
auaaaaaccaggccaaauacu

SEQ ID NO: 642025 - RNA, 22 nt, Artificial Sequence
  Synthetic
uauaaaaaccaggccaaauacu

SEQ ID NO: 642026 - RNA, 23 nt, Artificial Sequence
  Synthetic
cuauaaaaaccaggccaaauacu

SEQ ID NO: 642027 - RNA, 24 nt, Artificial Sequence
  Synthetic
ucuauaaaaaccaggccaaauacu

SEQ ID NO: 642028 - RNA, 18 nt, Artificial Sequence
  Synthetic
cccaaaaugugaaauacu

SEQ ID NO: 642029 - RNA, 19 nt, Artificial Sequence
  Synthetic
ccccaaaaugugaaauacu

SEQ ID NO: 642030 - RNA, 20 nt, Artificial Sequence
  Synthetic
gccccaaaaugugaaauacu

SEQ ID NO: 642031 - RNA, 21 nt, Artificial Sequence
  Synthetic
ggccccaaaaugugaaauacu

SEQ ID NO: 642032 - RNA, 22 nt, Artificial Sequence
  Synthetic
aggccccaaaaugugaaauacu

SEQ ID NO: 642033 - RNA, 23 nt, Artificial Sequence
  Synthetic
aaggccccaaaaugugaaauacu

SEQ ID NO: 642034 - RNA, 24 nt, Artificial Sequence
  Synthetic
uaaggccccaaaaugugaaauacu

SEQ ID NO: 642035 - RNA, 18 nt, Artificial Sequence
  Synthetic
acuccuaaaauaaauacu

SEQ ID NO: 642036 - RNA, 19 nt, Artificial Sequence
  Synthetic
gacuccuaaaauaaauacu

SEQ ID NO: 642037 - RNA, 20 nt, Artificial Sequence
  Synthetic
agacuccuaaaauaaauacu

SEQ ID NO: 642038 - RNA, 21 nt, Artificial Sequence
  Synthetic
uagacuccuaaaauaaauacu

SEQ ID NO: 642039 - RNA, 22 nt, Artificial Sequence
  Synthetic
cuagacuccuaaaauaaauacu

SEQ ID NO: 642040 - RNA, 23 nt, Artificial Sequence
  Synthetic
gcuagacuccuaaaauaaauacu

SEQ ID NO: 642041 - RNA, 24 nt, Artificial Sequence
  Synthetic
ugcuagacuccuaaaauaaauacu

SEQ ID NO: 642042 - RNA, 18 nt, Artificial Sequence
  Synthetic
cccacugauaacaauacu

SEQ ID NO: 642043 - RNA, 19 nt, Artificial Sequence
  Synthetic
acccacugauaacaauacu

SEQ ID NO: 642044 - RNA, 20 nt, Artificial Sequence
  Synthetic
aacccacugauaacaauacu

SEQ ID NO: 642045 - RNA, 21 nt, Artificial Sequence
  Synthetic
aaacccacugauaacaauacu

SEQ ID NO: 642046 - RNA, 22 nt, Artificial Sequence
  Synthetic
caaacccacugauaacaauacu

SEQ ID NO: 642047 - RNA, 23 nt, Artificial Sequence
  Synthetic
gcaaacccacugauaacaauacu

SEQ ID NO: 642048 - RNA, 24 nt, Artificial Sequence
  Synthetic
agcaaacccacugauaacaauacu

SEQ ID NO: 642049 - RNA, 18 nt, Artificial Sequence
  Synthetic
uuuuguuaaaucaauacu

SEQ ID NO: 642050 - RNA, 19 nt, Artificial Sequence
  Synthetic
guuuuguuaaaucaauacu

SEQ ID NO: 642051 - RNA, 20 nt, Artificial Sequence
  Synthetic
aguuuuguuaaaucaauacu

SEQ ID NO: 642052 - RNA, 21 nt, Artificial Sequence
  Synthetic
aaguuuuguuaaaucaauacu

SEQ ID NO: 642053 - RNA, 22 nt, Artificial Sequence
  Synthetic
aaaguuuuguuaaaucaauacu

SEQ ID NO: 642054 - RNA, 23 nt, Artificial Sequence
  Synthetic
uaaaguuuuguuaaaucaauacu

SEQ ID NO: 642055 - RNA, 24 nt, Artificial Sequence
  Synthetic
auaaaguuuuguuaaaucaauacu

SEQ ID NO: 642056 - RNA, 18 nt, Artificial Sequence
  Synthetic
cguugcuucccgaauacu

SEQ ID NO: 642057 - RNA, 19 nt, Artificial Sequence
  Synthetic
ucguugcuucccgaauacu

SEQ ID NO: 642058 - RNA, 20 nt, Artificial Sequence
  Synthetic
cucguugcuucccgaauacu

SEQ ID NO: 642059 - RNA, 21 nt, Artificial Sequence
  Synthetic
gcucguugcuucccgaauacu

SEQ ID NO: 642060 - RNA, 22 nt, Artificial Sequence
  Synthetic
agcucguugcuucccgaauacu

SEQ ID NO: 642061 - RNA, 23 nt, Artificial Sequence
  Synthetic
aagcucguugcuucccgaauacu

SEQ ID NO: 642062 - RNA, 24 nt, Artificial Sequence
  Synthetic
aaagcucguugcuucccgaauacu

SEQ ID NO: 642063 - RNA, 18 nt, Artificial Sequence
  Synthetic
uguacaccauggaauacu

SEQ ID NO: 642064 - RNA, 19 nt, Artificial Sequence
  Synthetic
auguacaccauggaauacu

SEQ ID NO: 642065 - RNA, 20 nt, Artificial Sequence
  Synthetic
cauguacaccauggaauacu

SEQ ID NO: 642066 - RNA, 21 nt, Artificial Sequence
  Synthetic
acauguacaccauggaauacu

SEQ ID NO: 642067 - RNA, 22 nt, Artificial Sequence
  Synthetic
cacauguacaccauggaauacu

SEQ ID NO: 642068 - RNA, 23 nt, Artificial Sequence
  Synthetic
gcacauguacaccauggaauacu

SEQ ID NO: 642069 - RNA, 24 nt, Artificial Sequence
  Synthetic
ggcacauguacaccauggaauacu

SEQ ID NO: 642070 - RNA, 18 nt, Artificial Sequence
  Synthetic
aggauggaauguaauacu

SEQ ID NO: 642071 - RNA, 19 nt, Artificial Sequence
  Synthetic
gaggauggaauguaauacu

SEQ ID NO: 642072 - RNA, 20 nt, Artificial Sequence
  Synthetic
ugaggauggaauguaauacu

SEQ ID NO: 642073 - RNA, 21 nt, Artificial Sequence
  Synthetic
gugaggauggaauguaauacu

SEQ ID NO: 642074 - RNA, 22 nt, Artificial Sequence
  Synthetic
ugugaggauggaauguaauacu

SEQ ID NO: 642075 - RNA, 23 nt, Artificial Sequence
  Synthetic
uugugaggauggaauguaauacu

SEQ ID NO: 642076 - RNA, 24 nt, Artificial Sequence
  Synthetic
guugugaggauggaauguaauacu

SEQ ID NO: 642077 - RNA, 18 nt, Artificial Sequence
  Synthetic
acguuaaaaauuaauacu

SEQ ID NO: 642078 - RNA, 19 nt, Artificial Sequence
  Synthetic
aacguuaaaaauuaauacu

SEQ ID NO: 642079 - RNA, 20 nt, Artificial Sequence
  Synthetic
uaacguuaaaaauuaauacu

SEQ ID NO: 642080 - RNA, 21 nt, Artificial Sequence
  Synthetic
uuaacguuaaaaauuaauacu

SEQ ID NO: 642081 - RNA, 22 nt, Artificial Sequence
  Synthetic
uuuaacguuaaaaauuaauacu

SEQ ID NO: 642082 - RNA, 23 nt, Artificial Sequence
  Synthetic
uuuuaacguuaaaaauuaauacu

SEQ ID NO: 642083 - RNA, 24 nt, Artificial Sequence
  Synthetic
uuuuuaacguuaaaaauuaauacu

SEQ ID NO: 642084 - RNA, 18 nt, Artificial Sequence
  Synthetic
cugaaaugaauuaauacu

SEQ ID NO: 642085 - RNA, 19 nt, Artificial Sequence
  Synthetic
gcugaaaugaauuaauacu

SEQ ID NO: 642086 - RNA, 20 nt, Artificial Sequence
  Synthetic
ugcugaaaugaauuaauacu

SEQ ID NO: 642087 - RNA, 21 nt, Artificial Sequence
  Synthetic
augcugaaaugaauuaauacu

SEQ ID NO: 642088 - RNA, 22 nt, Artificial Sequence
  Synthetic
aaugcugaaaugaauuaauacu

SEQ ID NO: 642089 - RNA, 23 nt, Artificial Sequence
  Synthetic
uaaugcugaaaugaauuaauacu

SEQ ID NO: 642090 - RNA, 24 nt, Artificial Sequence
  Synthetic
uuaaugcugaaaugaauuaauacu

SEQ ID NO: 642091 - RNA, 18 nt, Artificial Sequence
  Synthetic
ucuacuuugguuaauacu

SEQ ID NO: 642092 - RNA, 19 nt, Artificial Sequence
  Synthetic
aucuacuuugguuaauacu

SEQ ID NO: 642093 - RNA, 20 nt, Artificial Sequence
  Synthetic
aaucuacuuugguuaauacu

SEQ ID NO: 642094 - RNA, 21 nt, Artificial Sequence
  Synthetic
caaucuacuuugguuaauacu

SEQ ID NO: 642095 - RNA, 22 nt, Artificial Sequence
  Synthetic
gcaaucuacuuugguuaauacu

SEQ ID NO: 642096 - RNA, 23 nt, Artificial Sequence
  Synthetic
ggcaaucuacuuugguuaauacu

SEQ ID NO: 642097 - RNA, 24 nt, Artificial Sequence
  Synthetic
aggcaaucuacuuugguuaauacu

SEQ ID NO: 642098 - RNA, 18 nt, Artificial Sequence
  Synthetic
gcauuacuauuuaauacu

SEQ ID NO: 642099 - RNA, 19 nt, Artificial Sequence
  Synthetic
ugcauuacuauuuaauacu

SEQ ID NO: 642100 - RNA, 20 nt, Artificial Sequence
  Synthetic
uugcauuacuauuuaauacu

SEQ ID NO: 642101 - RNA, 21 nt, Artificial Sequence
  Synthetic
auugcauuacuauuuaauacu

SEQ ID NO: 642102 - RNA, 22 nt, Artificial Sequence
  Synthetic
aauugcauuacuauuuaauacu

SEQ ID NO: 642103 - RNA, 23 nt, Artificial Sequence
  Synthetic
aaauugcauuacuauuuaauacu

SEQ ID NO: 642104 - RNA, 24 nt, Artificial Sequence
  Synthetic
caaauugcauuacuauuuaauacu

SEQ ID NO: 642105 - RNA, 18 nt, Artificial Sequence
  Synthetic
uuaagccugacacauacu

SEQ ID NO: 642106 - RNA, 19 nt, Artificial Sequence
  Synthetic
guuaagccugacacauacu

SEQ ID NO: 642107 - RNA, 20 nt, Artificial Sequence
  Synthetic
aguuaagccugacacauacu

SEQ ID NO: 642108 - RNA, 21 nt, Artificial Sequence
  Synthetic
uaguuaagccugacacauacu

SEQ ID NO: 642109 - RNA, 22 nt, Artificial Sequence
  Synthetic
guaguuaagccugacacauacu

SEQ ID NO: 642110 - RNA, 23 nt, Artificial Sequence
  Synthetic
gguaguuaagccugacacauacu

SEQ ID NO: 642111 - RNA, 24 nt, Artificial Sequence
  Synthetic
agguaguuaagccugacacauacu

SEQ ID NO: 642112 - RNA, 18 nt, Artificial Sequence
  Synthetic
uacuuuaguacacauacu

SEQ ID NO: 642113 - RNA, 19 nt, Artificial Sequence
  Synthetic
cuacuuuaguacacauacu

SEQ ID NO: 642114 - RNA, 20 nt, Artificial Sequence
  Synthetic
gcuacuuuaguacacauacu

SEQ ID NO: 642115 - RNA, 21 nt, Artificial Sequence
  Synthetic
ggcuacuuuaguacacauacu

SEQ ID NO: 642116 - RNA, 22 nt, Artificial Sequence
  Synthetic
aggcuacuuuaguacacauacu

SEQ ID NO: 642117 - RNA, 23 nt, Artificial Sequence
  Synthetic
caggcuacuuuaguacacauacu

SEQ ID NO: 642118 - RNA, 24 nt, Artificial Sequence
  Synthetic
gcaggcuacuuuaguacacauacu

SEQ ID NO: 642119 - RNA, 18 nt, Artificial Sequence
  Synthetic
caaaauugaccacauacu

SEQ ID NO: 642120 - RNA, 19 nt, Artificial Sequence
  Synthetic
ccaaaauugaccacauacu

SEQ ID NO: 642121 - RNA, 20 nt, Artificial Sequence
  Synthetic
uccaaaauugaccacauacu

SEQ ID NO: 642122 - RNA, 21 nt, Artificial Sequence
  Synthetic
uuccaaaauugaccacauacu

SEQ ID NO: 642123 - RNA, 22 nt, Artificial Sequence
  Synthetic
auuccaaaauugaccacauacu

SEQ ID NO: 642124 - RNA, 23 nt, Artificial Sequence
  Synthetic
uauuccaaaauugaccacauacu

SEQ ID NO: 642125 - RNA, 24 nt, Artificial Sequence
  Synthetic
cuauuccaaaauugaccacauacu

SEQ ID NO: 642126 - RNA, 18 nt, Artificial Sequence
  Synthetic
aauggcuuuagacauacu

SEQ ID NO: 642127 - RNA, 19 nt, Artificial Sequence
  Synthetic
uaauggcuuuagacauacu

SEQ ID NO: 642128 - RNA, 20 nt, Artificial Sequence
  Synthetic
cuaauggcuuuagacauacu

SEQ ID NO: 642129 - RNA, 21 nt, Artificial Sequence
  Synthetic
ccuaauggcuuuagacauacu

SEQ ID NO: 642130 - RNA, 22 nt, Artificial Sequence
  Synthetic
cccuaauggcuuuagacauacu

SEQ ID NO: 642131 - RNA, 23 nt, Artificial Sequence
  Synthetic
ucccuaauggcuuuagacauacu

SEQ ID NO: 642132 - RNA, 24 nt, Artificial Sequence
  Synthetic
uucccuaauggcuuuagacauacu

SEQ ID NO: 642133 - RNA, 18 nt, Artificial Sequence
  Synthetic
uagugugugguacauacu

SEQ ID NO: 642134 - RNA, 19 nt, Artificial Sequence
  Synthetic
auagugugugguacauacu

SEQ ID NO: 642135 - RNA, 20 nt, Artificial Sequence
  Synthetic
aauagugugugguacauacu

SEQ ID NO: 642136 - RNA, 21 nt, Artificial Sequence
  Synthetic
gaauagugugugguacauacu

SEQ ID NO: 642137 - RNA, 22 nt, Artificial Sequence
  Synthetic
agaauagugugugguacauacu

SEQ ID NO: 642138 - RNA, 23 nt, Artificial Sequence
  Synthetic
uagaauagugugugguacauacu

SEQ ID NO: 642139 - RNA, 24 nt, Artificial Sequence
  Synthetic
uuagaauagugugugguacauacu

SEQ ID NO: 642140 - RNA, 18 nt, Artificial Sequence
  Synthetic
caaguaucuagccauacu

SEQ ID NO: 642141 - RNA, 19 nt, Artificial Sequence
  Synthetic
acaaguaucuagccauacu

SEQ ID NO: 642142 - RNA, 20 nt, Artificial Sequence
  Synthetic
uacaaguaucuagccauacu

SEQ ID NO: 642143 - RNA, 21 nt, Artificial Sequence
  Synthetic
cuacaaguaucuagccauacu

SEQ ID NO: 642144 - RNA, 22 nt, Artificial Sequence
  Synthetic
ccuacaaguaucuagccauacu

SEQ ID NO: 642145 - RNA, 23 nt, Artificial Sequence
  Synthetic
uccuacaaguaucuagccauacu

SEQ ID NO: 642146 - RNA, 24 nt, Artificial Sequence
  Synthetic
uuccuacaaguaucuagccauacu

SEQ ID NO: 642147 - RNA, 18 nt, Artificial Sequence
  Synthetic
uaauuuugguaucauacu

SEQ ID NO: 642148 - RNA, 19 nt, Artificial Sequence
  Synthetic
uuaauuuugguaucauacu

SEQ ID NO: 642149 - RNA, 20 nt, Artificial Sequence
  Synthetic
uuuaauuuugguaucauacu

SEQ ID NO: 642150 - RNA, 21 nt, Artificial Sequence
  Synthetic
cuuuaauuuugguaucauacu

SEQ ID NO: 642151 - RNA, 22 nt, Artificial Sequence
  Synthetic
ucuuuaauuuugguaucauacu

SEQ ID NO: 642152 - RNA, 23 nt, Artificial Sequence
  Synthetic
cucuuuaauuuugguaucauacu

SEQ ID NO: 642153 - RNA, 24 nt, Artificial Sequence
  Synthetic
ucucuuuaauuuugguaucauacu

SEQ ID NO: 642154 - RNA, 18 nt, Artificial Sequence
  Synthetic
ccuguaaucccagauacu

SEQ ID NO: 642155 - RNA, 19 nt, Artificial Sequence
  Synthetic
gccuguaaucccagauacu

SEQ ID NO: 642156 - RNA, 20 nt, Artificial Sequence
  Synthetic
ugccuguaaucccagauacu

SEQ ID NO: 642157 - RNA, 21 nt, Artificial Sequence
  Synthetic
uugccuguaaucccagauacu

SEQ ID NO: 642158 - RNA, 22 nt, Artificial Sequence
  Synthetic
cuugccuguaaucccagauacu

SEQ ID NO: 642159 - RNA, 23 nt, Artificial Sequence
  Synthetic
acuugccuguaaucccagauacu

SEQ ID NO: 642160 - RNA, 24 nt, Artificial Sequence
  Synthetic
uacuugccuguaaucccagauacu

SEQ ID NO: 642161 - RNA, 18 nt, Artificial Sequence
  Synthetic
uuaaaagaccuagauacu

SEQ ID NO: 642162 - RNA, 19 nt, Artificial Sequence
  Synthetic
uuuaaaagaccuagauacu

SEQ ID NO: 642163 - RNA, 20 nt, Artificial Sequence
  Synthetic
auuuaaaagaccuagauacu

SEQ ID NO: 642164 - RNA, 21 nt, Artificial Sequence
  Synthetic
cauuuaaaagaccuagauacu

SEQ ID NO: 642165 - RNA, 22 nt, Artificial Sequence
  Synthetic
gcauuuaaaagaccuagauacu

SEQ ID NO: 642166 - RNA, 23 nt, Artificial Sequence
  Synthetic
ugcauuuaaaagaccuagauacu

SEQ ID NO: 642167 - RNA, 24 nt, Artificial Sequence
  Synthetic
uugcauuuaaaagaccuagauacu

SEQ ID NO: 642168 - RNA, 18 nt, Artificial Sequence
  Synthetic
aucgugcuuuucgauacu

SEQ ID NO: 642169 - RNA, 19 nt, Artificial Sequence
  Synthetic
aaucgugcuuuucgauacu

SEQ ID NO: 642170 - RNA, 20 nt, Artificial Sequence
  Synthetic
aaaucgugcuuuucgauacu

SEQ ID NO: 642171 - RNA, 21 nt, Artificial Sequence
  Synthetic
aaaaucgugcuuuucgauacu

SEQ ID NO: 642172 - RNA, 22 nt, Artificial Sequence
  Synthetic
aaaaaucgugcuuuucgauacu

SEQ ID NO: 642173 - RNA, 23 nt, Artificial Sequence
  Synthetic
gaaaaaucgugcuuuucgauacu

SEQ ID NO: 642174 - RNA, 24 nt, Artificial Sequence
  Synthetic
ugaaaaaucgugcuuuucgauacu

SEQ ID NO: 642175 - RNA, 18 nt, Artificial Sequence
  Synthetic
gagggguggagggauacu

SEQ ID NO: 642176 - RNA, 19 nt, Artificial Sequence
  Synthetic
ggagggguggagggauacu

SEQ ID NO: 642177 - RNA, 20 nt, Artificial Sequence
  Synthetic
uggagggguggagggauacu

SEQ ID NO: 642178 - RNA, 21 nt, Artificial Sequence
  Synthetic
auggagggguggagggauacu

SEQ ID NO: 642179 - RNA, 22 nt, Artificial Sequence
  Synthetic
cauggagggguggagggauacu

SEQ ID NO: 642180 - RNA, 23 nt, Artificial Sequence
  Synthetic
acauggagggguggagggauacu

SEQ ID NO: 642181 - RNA, 24 nt, Artificial Sequence
  Synthetic
cacauggagggguggagggauacu

SEQ ID NO: 642182 - RNA, 18 nt, Artificial Sequence
  Synthetic
agccuggcuuuggauacu

SEQ ID NO: 642183 - RNA, 19 nt, Artificial Sequence
  Synthetic
aagccuggcuuuggauacu

SEQ ID NO: 642184 - RNA, 20 nt, Artificial Sequence
  Synthetic
caagccuggcuuuggauacu

SEQ ID NO: 642185 - RNA, 21 nt, Artificial Sequence
  Synthetic
ucaagccuggcuuuggauacu

SEQ ID NO: 642186 - RNA, 22 nt, Artificial Sequence
  Synthetic
aucaagccuggcuuuggauacu

SEQ ID NO: 642187 - RNA, 23 nt, Artificial Sequence
  Synthetic
uaucaagccuggcuuuggauacu

SEQ ID NO: 642188 - RNA, 24 nt, Artificial Sequence
  Synthetic
uuaucaagccuggcuuuggauacu

SEQ ID NO: 642189 - RNA, 18 nt, Artificial Sequence
  Synthetic
aaaugaguuaaugauacu

SEQ ID NO: 642190 - RNA, 19 nt, Artificial Sequence
  Synthetic
aaaaugaguuaaugauacu

SEQ ID NO: 642191 - RNA, 20 nt, Artificial Sequence
  Synthetic
aaaaaugaguuaaugauacu

SEQ ID NO: 642192 - RNA, 21 nt, Artificial Sequence
  Synthetic
gaaaaaugaguuaaugauacu

SEQ ID NO: 642193 - RNA, 22 nt, Artificial Sequence
  Synthetic
agaaaaaugaguuaaugauacu

SEQ ID NO: 642194 - RNA, 23 nt, Artificial Sequence
  Synthetic
cagaaaaaugaguuaaugauacu

SEQ ID NO: 642195 - RNA, 24 nt, Artificial Sequence
  Synthetic
acagaaaaaugaguuaaugauacu

SEQ ID NO: 642196 - RNA, 18 nt, Artificial Sequence
  Synthetic
ucacaguaucaugauacu

SEQ ID NO: 642197 - RNA, 19 nt, Artificial Sequence
  Synthetic
aucacaguaucaugauacu

SEQ ID NO: 642198 - RNA, 20 nt, Artificial Sequence
  Synthetic
aaucacaguaucaugauacu

SEQ ID NO: 642199 - RNA, 21 nt, Artificial Sequence
  Synthetic
aaaucacaguaucaugauacu

SEQ ID NO: 642200 - RNA, 22 nt, Artificial Sequence
  Synthetic
aaaaucacaguaucaugauacu

SEQ ID NO: 642201 - RNA, 23 nt, Artificial Sequence
  Synthetic
uaaaaucacaguaucaugauacu

SEQ ID NO: 642202 - RNA, 24 nt, Artificial Sequence
  Synthetic
auaaaaucacaguaucaugauacu

SEQ ID NO: 642203 - RNA, 18 nt, Artificial Sequence
  Synthetic
caggacauugcugauacu

SEQ ID NO: 642204 - RNA, 19 nt, Artificial Sequence
  Synthetic
acaggacauugcugauacu

SEQ ID NO: 642205 - RNA, 20 nt, Artificial Sequence
  Synthetic
uacaggacauugcugauacu

SEQ ID NO: 642206 - RNA, 21 nt, Artificial Sequence
  Synthetic
auacaggacauugcugauacu

SEQ ID NO: 642207 - RNA, 22 nt, Artificial Sequence
  Synthetic
cauacaggacauugcugauacu

SEQ ID NO: 642208 - RNA, 23 nt, Artificial Sequence
  Synthetic
ccauacaggacauugcugauacu

SEQ ID NO: 642209 - RNA, 24 nt, Artificial Sequence
  Synthetic
accauacaggacauugcugauacu

SEQ ID NO: 642210 - RNA, 18 nt, Artificial Sequence
  Synthetic
aaggcacuaagugauacu

SEQ ID NO: 642211 - RNA, 19 nt, Artificial Sequence
  Synthetic
aaaggcacuaagugauacu

SEQ ID NO: 642212 - RNA, 20 nt, Artificial Sequence
  Synthetic
aaaaggcacuaagugauacu

SEQ ID NO: 642213 - RNA, 21 nt, Artificial Sequence
  Synthetic
gaaaaggcacuaagugauacu

SEQ ID NO: 642214 - RNA, 22 nt, Artificial Sequence
  Synthetic
agaaaaggcacuaagugauacu

SEQ ID NO: 642215 - RNA, 23 nt, Artificial Sequence
  Synthetic
gagaaaaggcacuaagugauacu

SEQ ID NO: 642216 - RNA, 24 nt, Artificial Sequence
  Synthetic
agagaaaaggcacuaagugauacu

SEQ ID NO: 642217 - RNA, 18 nt, Artificial Sequence
  Synthetic
uugcaggucugugauacu

SEQ ID NO: 642218 - RNA, 19 nt, Artificial Sequence
  Synthetic
cuugcaggucugugauacu

SEQ ID NO: 642219 - RNA, 20 nt, Artificial Sequence
  Synthetic
gcuugcaggucugugauacu

SEQ ID NO: 642220 - RNA, 21 nt, Artificial Sequence
  Synthetic
ugcuugcaggucugugauacu

SEQ ID NO: 642221 - RNA, 22 nt, Artificial Sequence
  Synthetic
cugcuugcaggucugugauacu

SEQ ID NO: 642222 - RNA, 23 nt, Artificial Sequence
  Synthetic
ccugcuugcaggucugugauacu

SEQ ID NO: 642223 - RNA, 24 nt, Artificial Sequence
  Synthetic
gccugcuugcaggucugugauacu

SEQ ID NO: 642224 - RNA, 18 nt, Artificial Sequence
  Synthetic
augcauagaauugauacu

SEQ ID NO: 642225 - RNA, 19 nt, Artificial Sequence
  Synthetic
aaugcauagaauugauacu

SEQ ID NO: 642226 - RNA, 20 nt, Artificial Sequence
  Synthetic
gaaugcauagaauugauacu

SEQ ID NO: 642227 - RNA, 21 nt, Artificial Sequence
  Synthetic
agaaugcauagaauugauacu

SEQ ID NO: 642228 - RNA, 22 nt, Artificial Sequence
  Synthetic
aagaaugcauagaauugauacu

SEQ ID NO: 642229 - RNA, 23 nt, Artificial Sequence
  Synthetic
aaagaaugcauagaauugauacu

SEQ ID NO: 642230 - RNA, 24 nt, Artificial Sequence
  Synthetic
aaaagaaugcauagaauugauacu

SEQ ID NO: 642231 - RNA, 18 nt, Artificial Sequence
  Synthetic
uaauugaaaaaauauacu

SEQ ID NO: 642232 - RNA, 19 nt, Artificial Sequence
  Synthetic
guaauugaaaaaauauacu

SEQ ID NO: 642233 - RNA, 20 nt, Artificial Sequence
  Synthetic
uguaauugaaaaaauauacu

SEQ ID NO: 642234 - RNA, 21 nt, Artificial Sequence
  Synthetic
auguaauugaaaaaauauacu

SEQ ID NO: 642235 - RNA, 22 nt, Artificial Sequence
  Synthetic
gauguaauugaaaaaauauacu

SEQ ID NO: 642236 - RNA, 23 nt, Artificial Sequence
  Synthetic
ggauguaauugaaaaaauauacu

SEQ ID NO: 642237 - RNA, 24 nt, Artificial Sequence
  Synthetic
aggauguaauugaaaaaauauacu

SEQ ID NO: 642238 - RNA, 18 nt, Artificial Sequence
  Synthetic
cugaucaccagauauacu

SEQ ID NO: 642239 - RNA, 19 nt, Artificial Sequence
  Synthetic
ccugaucaccagauauacu

SEQ ID NO: 642240 - RNA, 20 nt, Artificial Sequence
  Synthetic
uccugaucaccagauauacu

SEQ ID NO: 642241 - RNA, 21 nt, Artificial Sequence
  Synthetic
auccugaucaccagauauacu

SEQ ID NO: 642242 - RNA, 22 nt, Artificial Sequence
  Synthetic
aauccugaucaccagauauacu

SEQ ID NO: 642243 - RNA, 23 nt, Artificial Sequence
  Synthetic
aaauccugaucaccagauauacu

SEQ ID NO: 642244 - RNA, 24 nt, Artificial Sequence
  Synthetic
aaaauccugaucaccagauauacu

SEQ ID NO: 642245 - RNA, 18 nt, Artificial Sequence
  Synthetic
uacuuuccaagcuauacu

SEQ ID NO: 642246 - RNA, 19 nt, Artificial Sequence
  Synthetic
uuacuuuccaagcuauacu

SEQ ID NO: 642247 - RNA, 20 nt, Artificial Sequence
  Synthetic
auuacuuuccaagcuauacu

SEQ ID NO: 642248 - RNA, 21 nt, Artificial Sequence
  Synthetic
aauuacuuuccaagcuauacu

SEQ ID NO: 642249 - RNA, 22 nt, Artificial Sequence
  Synthetic
uaauuacuuuccaagcuauacu

SEQ ID NO: 642250 - RNA, 23 nt, Artificial Sequence
  Synthetic
auaauuacuuuccaagcuauacu

SEQ ID NO: 642251 - RNA, 24 nt, Artificial Sequence
  Synthetic
cauaauuacuuuccaagcuauacu

SEQ ID NO: 642252 - RNA, 18 nt, Artificial Sequence
  Synthetic
uagcaagaacucuauacu

SEQ ID NO: 642253 - RNA, 19 nt, Artificial Sequence
  Synthetic
cuagcaagaacucuauacu

SEQ ID NO: 642254 - RNA, 20 nt, Artificial Sequence
  Synthetic
ccuagcaagaacucuauacu

SEQ ID NO: 642255 - RNA, 21 nt, Artificial Sequence
  Synthetic
uccuagcaagaacucuauacu

SEQ ID NO: 642256 - RNA, 22 nt, Artificial Sequence
  Synthetic
auccuagcaagaacucuauacu

SEQ ID NO: 642257 - RNA, 23 nt, Artificial Sequence
  Synthetic
gauccuagcaagaacucuauacu

SEQ ID NO: 642258 - RNA, 24 nt, Artificial Sequence
  Synthetic
ggauccuagcaagaacucuauacu

SEQ ID NO: 642259 - RNA, 18 nt, Artificial Sequence
  Synthetic
aaauguccccaguauacu

SEQ ID NO: 642260 - RNA, 19 nt, Artificial Sequence
  Synthetic
aaaauguccccaguauacu

SEQ ID NO: 642261 - RNA, 20 nt, Artificial Sequence
  Synthetic
caaaauguccccaguauacu

SEQ ID NO: 642262 - RNA, 21 nt, Artificial Sequence
  Synthetic
ucaaaauguccccaguauacu

SEQ ID NO: 642263 - RNA, 22 nt, Artificial Sequence
  Synthetic
uucaaaauguccccaguauacu

SEQ ID NO: 642264 - RNA, 23 nt, Artificial Sequence
  Synthetic
auucaaaauguccccaguauacu

SEQ ID NO: 642265 - RNA, 24 nt, Artificial Sequence
  Synthetic
uauucaaaauguccccaguauacu

SEQ ID NO: 642266 - RNA, 18 nt, Artificial Sequence
  Synthetic
guaacaauaacguauacu

SEQ ID NO: 642267 - RNA, 19 nt, Artificial Sequence
  Synthetic
aguaacaauaacguauacu

SEQ ID NO: 642268 - RNA, 20 nt, Artificial Sequence
  Synthetic
uaguaacaauaacguauacu

SEQ ID NO: 642269 - RNA, 21 nt, Artificial Sequence
  Synthetic
uuaguaacaauaacguauacu

SEQ ID NO: 642270 - RNA, 22 nt, Artificial Sequence
  Synthetic
guuaguaacaauaacguauacu

SEQ ID NO: 642271 - RNA, 23 nt, Artificial Sequence
  Synthetic
uguuaguaacaauaacguauacu

SEQ ID NO: 642272 - RNA, 24 nt, Artificial Sequence
  Synthetic
cuguuaguaacaauaacguauacu

SEQ ID NO: 642273 - RNA, 18 nt, Artificial Sequence
  Synthetic
ugauaaaugagguauacu

SEQ ID NO: 642274 - RNA, 19 nt, Artificial Sequence
  Synthetic
uugauaaaugagguauacu

SEQ ID NO: 642275 - RNA, 20 nt, Artificial Sequence
  Synthetic
cuugauaaaugagguauacu

SEQ ID NO: 642276 - RNA, 21 nt, Artificial Sequence
  Synthetic
ucuugauaaaugagguauacu

SEQ ID NO: 642277 - RNA, 22 nt, Artificial Sequence
  Synthetic
uucuugauaaaugagguauacu

SEQ ID NO: 642278 - RNA, 23 nt, Artificial Sequence
  Synthetic
auucuugauaaaugagguauacu

SEQ ID NO: 642279 - RNA, 24 nt, Artificial Sequence
  Synthetic
aauucuugauaaaugagguauacu

SEQ ID NO: 642280 - RNA, 18 nt, Artificial Sequence
  Synthetic
uaauuucccugguauacu

SEQ ID NO: 642281 - RNA, 19 nt, Artificial Sequence
  Synthetic
cuaauuucccugguauacu

SEQ ID NO: 642282 - RNA, 20 nt, Artificial Sequence
  Synthetic
gcuaauuucccugguauacu

SEQ ID NO: 642283 - RNA, 21 nt, Artificial Sequence
  Synthetic
ggcuaauuucccugguauacu

SEQ ID NO: 642284 - RNA, 22 nt, Artificial Sequence
  Synthetic
uggcuaauuucccugguauacu

SEQ ID NO: 642285 - RNA, 23 nt, Artificial Sequence
  Synthetic
auggcuaauuucccugguauacu

SEQ ID NO: 642286 - RNA, 24 nt, Artificial Sequence
  Synthetic
aauggcuaauuucccugguauacu

SEQ ID NO: 642287 - RNA, 18 nt, Artificial Sequence
  Synthetic
uuaucggugcauuauacu

SEQ ID NO: 642288 - RNA, 19 nt, Artificial Sequence
  Synthetic
uuuaucggugcauuauacu

SEQ ID NO: 642289 - RNA, 20 nt, Artificial Sequence
  Synthetic
cuuuaucggugcauuauacu

SEQ ID NO: 642290 - RNA, 21 nt, Artificial Sequence
  Synthetic
acuuuaucggugcauuauacu

SEQ ID NO: 642291 - RNA, 22 nt, Artificial Sequence
  Synthetic
uacuuuaucggugcauuauacu

SEQ ID NO: 642292 - RNA, 23 nt, Artificial Sequence
  Synthetic
auacuuuaucggugcauuauacu

SEQ ID NO: 642293 - RNA, 24 nt, Artificial Sequence
  Synthetic
aauacuuuaucggugcauuauacu

SEQ ID NO: 642294 - RNA, 18 nt, Artificial Sequence
  Synthetic
auuauuguuauuuauacu

SEQ ID NO: 642295 - RNA, 19 nt, Artificial Sequence
  Synthetic
cauuauuguuauuuauacu

SEQ ID NO: 642296 - RNA, 20 nt, Artificial Sequence
  Synthetic
gcauuauuguuauuuauacu

SEQ ID NO: 642297 - RNA, 21 nt, Artificial Sequence
  Synthetic
ugcauuauuguuauuuauacu

SEQ ID NO: 642298 - RNA, 22 nt, Artificial Sequence
  Synthetic
augcauuauuguuauuuauacu

SEQ ID NO: 642299 - RNA, 23 nt, Artificial Sequence
  Synthetic
gaugcauuauuguuauuuauacu

SEQ ID NO: 642300 - RNA, 24 nt, Artificial Sequence
  Synthetic
ugaugcauuauuguuauuuauacu

SEQ ID NO: 642301 - RNA, 18 nt, Artificial Sequence
  Synthetic
agcucuguauuuuauacu

SEQ ID NO: 642302 - RNA, 19 nt, Artificial Sequence
  Synthetic
uagcucuguauuuuauacu

SEQ ID NO: 642303 - RNA, 20 nt, Artificial Sequence
  Synthetic
uuagcucuguauuuuauacu

SEQ ID NO: 642304 - RNA, 21 nt, Artificial Sequence
  Synthetic
cuuagcucuguauuuuauacu

SEQ ID NO: 642305 - RNA, 22 nt, Artificial Sequence
  Synthetic
ucuuagcucuguauuuuauacu

SEQ ID NO: 642306 - RNA, 23 nt, Artificial Sequence
  Synthetic
gucuuagcucuguauuuuauacu

SEQ ID NO: 642307 - RNA, 24 nt, Artificial Sequence
  Synthetic
ugucuuagcucuguauuuuauacu

SEQ ID NO: 642308 - RNA, 18 nt, Artificial Sequence
  Synthetic
cuagauuuuuuuuauacu

SEQ ID NO: 642309 - RNA, 19 nt, Artificial Sequence
  Synthetic
ucuagauuuuuuuuauacu

SEQ ID NO: 642310 - RNA, 20 nt, Artificial Sequence
  Synthetic
aucuagauuuuuuuuauacu

SEQ ID NO: 642311 - RNA, 21 nt, Artificial Sequence
  Synthetic
uaucuagauuuuuuuuauacu

SEQ ID NO: 642312 - RNA, 22 nt, Artificial Sequence
  Synthetic
uuaucuagauuuuuuuuauacu

SEQ ID NO: 642313 - RNA, 23 nt, Artificial Sequence
  Synthetic
cuuaucuagauuuuuuuuauacu

SEQ ID NO: 642314 - RNA, 24 nt, Artificial Sequence
  Synthetic
ucuuaucuagauuuuuuuuauacu

SEQ ID NO: 642315 - RNA, 18 nt, Artificial Sequence
  Synthetic
agaauagauaccacuacu

SEQ ID NO: 642316 - RNA, 19 nt, Artificial Sequence
  Synthetic
aagaauagauaccacuacu

SEQ ID NO: 642317 - RNA, 20 nt, Artificial Sequence
  Synthetic
gaagaauagauaccacuacu

SEQ ID NO: 642318 - RNA, 21 nt, Artificial Sequence
  Synthetic
ugaagaauagauaccacuacu

SEQ ID NO: 642319 - RNA, 22 nt, Artificial Sequence
  Synthetic
augaagaauagauaccacuacu

SEQ ID NO: 642320 - RNA, 23 nt, Artificial Sequence
  Synthetic
caugaagaauagauaccacuacu

SEQ ID NO: 642321 - RNA, 24 nt, Artificial Sequence
  Synthetic
ucaugaagaauagauaccacuacu

SEQ ID NO: 642322 - RNA, 18 nt, Artificial Sequence
  Synthetic
uccaucauucccacuacu

SEQ ID NO: 642323 - RNA, 19 nt, Artificial Sequence
  Synthetic
cuccaucauucccacuacu

SEQ ID NO: 642324 - RNA, 20 nt, Artificial Sequence
  Synthetic
acuccaucauucccacuacu

SEQ ID NO: 642325 - RNA, 21 nt, Artificial Sequence
  Synthetic
uacuccaucauucccacuacu

SEQ ID NO: 642326 - RNA, 22 nt, Artificial Sequence
  Synthetic
auacuccaucauucccacuacu

SEQ ID NO: 642327 - RNA, 23 nt, Artificial Sequence
  Synthetic
uauacuccaucauucccacuacu

SEQ ID NO: 642328 - RNA, 24 nt, Artificial Sequence
  Synthetic
guauacuccaucauucccacuacu

SEQ ID NO: 642329 - RNA, 18 nt, Artificial Sequence
  Synthetic
augcucccugccacuacu

SEQ ID NO: 642330 - RNA, 19 nt, Artificial Sequence
  Synthetic
uaugcucccugccacuacu

SEQ ID NO: 642331 - RNA, 20 nt, Artificial Sequence
  Synthetic
uuaugcucccugccacuacu

SEQ ID NO: 642332 - RNA, 21 nt, Artificial Sequence
  Synthetic
guuaugcucccugccacuacu

SEQ ID NO: 642333 - RNA, 22 nt, Artificial Sequence
  Synthetic
cguuaugcucccugccacuacu

SEQ ID NO: 642334 - RNA, 23 nt, Artificial Sequence
  Synthetic
gcguuaugcucccugccacuacu

SEQ ID NO: 642335 - RNA, 24 nt, Artificial Sequence
  Synthetic
agcguuaugcucccugccacuacu

SEQ ID NO: 642336 - RNA, 18 nt, Artificial Sequence
  Synthetic
uacagcaauuccacuacu

SEQ ID NO: 642337 - RNA, 19 nt, Artificial Sequence
  Synthetic
auacagcaauuccacuacu

SEQ ID NO: 642338 - RNA, 20 nt, Artificial Sequence
  Synthetic
gauacagcaauuccacuacu

SEQ ID NO: 642339 - RNA, 21 nt, Artificial Sequence
  Synthetic
cgauacagcaauuccacuacu

SEQ ID NO: 642340 - RNA, 22 nt, Artificial Sequence
  Synthetic
acgauacagcaauuccacuacu

SEQ ID NO: 642341 - RNA, 23 nt, Artificial Sequence
  Synthetic
uacgauacagcaauuccacuacu

SEQ ID NO: 642342 - RNA, 24 nt, Artificial Sequence
  Synthetic
auacgauacagcaauuccacuacu

SEQ ID NO: 642343 - RNA, 18 nt, Artificial Sequence
  Synthetic
acuguucucaggacuacu

SEQ ID NO: 642344 - RNA, 19 nt, Artificial Sequence
  Synthetic
cacuguucucaggacuacu

SEQ ID NO: 642345 - RNA, 20 nt, Artificial Sequence
  Synthetic
ucacuguucucaggacuacu

SEQ ID NO: 642346 - RNA, 21 nt, Artificial Sequence
  Synthetic
cucacuguucucaggacuacu

SEQ ID NO: 642347 - RNA, 22 nt, Artificial Sequence
  Synthetic
gcucacuguucucaggacuacu

SEQ ID NO: 642348 - RNA, 23 nt, Artificial Sequence
  Synthetic
ggcucacuguucucaggacuacu

SEQ ID NO: 642349 - RNA, 24 nt, Artificial Sequence
  Synthetic
aggcucacuguucucaggacuacu

SEQ ID NO: 642350 - RNA, 18 nt, Artificial Sequence
  Synthetic
agagccauguggacuacu

SEQ ID NO: 642351 - RNA, 19 nt, Artificial Sequence
  Synthetic
aagagccauguggacuacu

SEQ ID NO: 642352 - RNA, 20 nt, Artificial Sequence
  Synthetic
caagagccauguggacuacu

SEQ ID NO: 642353 - RNA, 21 nt, Artificial Sequence
  Synthetic
acaagagccauguggacuacu

SEQ ID NO: 642354 - RNA, 22 nt, Artificial Sequence
  Synthetic
uacaagagccauguggacuacu

SEQ ID NO: 642355 - RNA, 23 nt, Artificial Sequence
  Synthetic
cuacaagagccauguggacuacu

SEQ ID NO: 642356 - RNA, 24 nt, Artificial Sequence
  Synthetic
ucuacaagagccauguggacuacu

SEQ ID NO: 642357 - RNA, 18 nt, Artificial Sequence
  Synthetic
caaagcuaucugacuacu

SEQ ID NO: 642358 - RNA, 19 nt, Artificial Sequence
  Synthetic
ucaaagcuaucugacuacu

SEQ ID NO: 642359 - RNA, 20 nt, Artificial Sequence
  Synthetic
cucaaagcuaucugacuacu

SEQ ID NO: 642360 - RNA, 21 nt, Artificial Sequence
  Synthetic
ucucaaagcuaucugacuacu

SEQ ID NO: 642361 - RNA, 22 nt, Artificial Sequence
  Synthetic
uucucaaagcuaucugacuacu

SEQ ID NO: 642362 - RNA, 23 nt, Artificial Sequence
  Synthetic
uuucucaaagcuaucugacuacu

SEQ ID NO: 642363 - RNA, 24 nt, Artificial Sequence
  Synthetic
guuucucaaagcuaucugacuacu

SEQ ID NO: 642364 - RNA, 18 nt, Artificial Sequence
  Synthetic
uaagaagaagauacuacu

SEQ ID NO: 642365 - RNA, 19 nt, Artificial Sequence
  Synthetic
auaagaagaagauacuacu

SEQ ID NO: 642366 - RNA, 20 nt, Artificial Sequence
  Synthetic
gauaagaagaagauacuacu

SEQ ID NO: 642367 - RNA, 21 nt, Artificial Sequence
  Synthetic
agauaagaagaagauacuacu

SEQ ID NO: 642368 - RNA, 22 nt, Artificial Sequence
  Synthetic
uagauaagaagaagauacuacu

SEQ ID NO: 642369 - RNA, 23 nt, Artificial Sequence
  Synthetic
guagauaagaagaagauacuacu

SEQ ID NO: 642370 - RNA, 24 nt, Artificial Sequence
  Synthetic
aguagauaagaagaagauacuacu

SEQ ID NO: 642371 - RNA, 18 nt, Artificial Sequence
  Synthetic
agaucauucacuacuacu

SEQ ID NO: 642372 - RNA, 19 nt, Artificial Sequence
  Synthetic
aagaucauucacuacuacu

SEQ ID NO: 642373 - RNA, 20 nt, Artificial Sequence
  Synthetic
aaagaucauucacuacuacu

SEQ ID NO: 642374 - RNA, 21 nt, Artificial Sequence
  Synthetic
aaaagaucauucacuacuacu

SEQ ID NO: 642375 - RNA, 22 nt, Artificial Sequence
  Synthetic
caaaagaucauucacuacuacu

SEQ ID NO: 642376 - RNA, 23 nt, Artificial Sequence
  Synthetic
acaaaagaucauucacuacuacu

SEQ ID NO: 642377 - RNA, 24 nt, Artificial Sequence
  Synthetic
uacaaaagaucauucacuacuacu

SEQ ID NO: 642378 - RNA, 18 nt, Artificial Sequence
  Synthetic
uuccuaucccuuacuacu

SEQ ID NO: 642379 - RNA, 19 nt, Artificial Sequence
  Synthetic
uuuccuaucccuuacuacu

SEQ ID NO: 642380 - RNA, 20 nt, Artificial Sequence
  Synthetic
uuuuccuaucccuuacuacu

SEQ ID NO: 642381 - RNA, 21 nt, Artificial Sequence
  Synthetic
auuuuccuaucccuuacuacu

SEQ ID NO: 642382 - RNA, 22 nt, Artificial Sequence
  Synthetic
uauuuuccuaucccuuacuacu

SEQ ID NO: 642383 - RNA, 23 nt, Artificial Sequence
  Synthetic
uuauuuuccuaucccuuacuacu

SEQ ID NO: 642384 - RNA, 24 nt, Artificial Sequence
  Synthetic
uuuauuuuccuaucccuuacuacu

SEQ ID NO: 642385 - RNA, 18 nt, Artificial Sequence
  Synthetic
uaggguuaguuuacuacu

SEQ ID NO: 642386 - RNA, 19 nt, Artificial Sequence
  Synthetic
guaggguuaguuuacuacu

SEQ ID NO: 642387 - RNA, 20 nt, Artificial Sequence
  Synthetic
aguaggguuaguuuacuacu

SEQ ID NO: 642388 - RNA, 21 nt, Artificial Sequence
  Synthetic
aaguaggguuaguuuacuacu

SEQ ID NO: 642389 - RNA, 22 nt, Artificial Sequence
  Synthetic
aaaguaggguuaguuuacuacu

SEQ ID NO: 642390 - RNA, 23 nt, Artificial Sequence
  Synthetic
gaaaguaggguuaguuuacuacu

SEQ ID NO: 642391 - RNA, 24 nt, Artificial Sequence
  Synthetic
agaaaguaggguuaguuuacuacu

SEQ ID NO: 642392 - RNA, 18 nt, Artificial Sequence
  Synthetic
aucuuuuuucauccuacu

SEQ ID NO: 642393 - RNA, 19 nt, Artificial Sequence
  Synthetic
caucuuuuuucauccuacu

SEQ ID NO: 642394 - RNA, 20 nt, Artificial Sequence
  Synthetic
acaucuuuuuucauccuacu

SEQ ID NO: 642395 - RNA, 21 nt, Artificial Sequence
  Synthetic
aacaucuuuuuucauccuacu

SEQ ID NO: 642396 - RNA, 22 nt, Artificial Sequence
  Synthetic
caacaucuuuuuucauccuacu

SEQ ID NO: 642397 - RNA, 23 nt, Artificial Sequence
  Synthetic
acaacaucuuuuuucauccuacu

SEQ ID NO: 642398 - RNA, 24 nt, Artificial Sequence
  Synthetic
cacaacaucuuuuuucauccuacu

SEQ ID NO: 642399 - RNA, 18 nt, Artificial Sequence
  Synthetic
uuugacuucaaagcuacu

SEQ ID NO: 642400 - RNA, 19 nt, Artificial Sequence
  Synthetic
uuuugacuucaaagcuacu

SEQ ID NO: 642401 - RNA, 20 nt, Artificial Sequence
  Synthetic
auuuugacuucaaagcuacu

SEQ ID NO: 642402 - RNA, 21 nt, Artificial Sequence
  Synthetic
cauuuugacuucaaagcuacu

SEQ ID NO: 642403 - RNA, 22 nt, Artificial Sequence
  Synthetic
ccauuuugacuucaaagcuacu

SEQ ID NO: 642404 - RNA, 23 nt, Artificial Sequence
  Synthetic
cccauuuugacuucaaagcuacu

SEQ ID NO: 642405 - RNA, 24 nt, Artificial Sequence
  Synthetic
ucccauuuugacuucaaagcuacu

SEQ ID NO: 642406 - RNA, 18 nt, Artificial Sequence
  Synthetic
gaguaagucuaagcuacu

SEQ ID NO: 642407 - RNA, 19 nt, Artificial Sequence
  Synthetic
ugaguaagucuaagcuacu

SEQ ID NO: 642408 - RNA, 20 nt, Artificial Sequence
  Synthetic
cugaguaagucuaagcuacu

SEQ ID NO: 642409 - RNA, 21 nt, Artificial Sequence
  Synthetic
ucugaguaagucuaagcuacu

SEQ ID NO: 642410 - RNA, 22 nt, Artificial Sequence
  Synthetic
gucugaguaagucuaagcuacu

SEQ ID NO: 642411 - RNA, 23 nt, Artificial Sequence
  Synthetic
ugucugaguaagucuaagcuacu

SEQ ID NO: 642412 - RNA, 24 nt, Artificial Sequence
  Synthetic
uugucugaguaagucuaagcuacu

SEQ ID NO: 642413 - RNA, 18 nt, Artificial Sequence
  Synthetic
agggacaguacagcuacu

SEQ ID NO: 642414 - RNA, 19 nt, Artificial Sequence
  Synthetic
aagggacaguacagcuacu

SEQ ID NO: 642415 - RNA, 20 nt, Artificial Sequence
  Synthetic
gaagggacaguacagcuacu

SEQ ID NO: 642416 - RNA, 21 nt, Artificial Sequence
  Synthetic
ggaagggacaguacagcuacu

SEQ ID NO: 642417 - RNA, 22 nt, Artificial Sequence
  Synthetic
uggaagggacaguacagcuacu

SEQ ID NO: 642418 - RNA, 23 nt, Artificial Sequence
  Synthetic
uuggaagggacaguacagcuacu

SEQ ID NO: 642419 - RNA, 24 nt, Artificial Sequence
  Synthetic
uuuggaagggacaguacagcuacu

SEQ ID NO: 642420 - RNA, 18 nt, Artificial Sequence
  Synthetic
ccuguaguaccagcuacu

SEQ ID NO: 642421 - RNA, 19 nt, Artificial Sequence
  Synthetic
gccuguaguaccagcuacu

SEQ ID NO: 642422 - RNA, 20 nt, Artificial Sequence
  Synthetic
cgccuguaguaccagcuacu

SEQ ID NO: 642423 - RNA, 21 nt, Artificial Sequence
  Synthetic
gcgccuguaguaccagcuacu

SEQ ID NO: 642424 - RNA, 22 nt, Artificial Sequence
  Synthetic
agcgccuguaguaccagcuacu

SEQ ID NO: 642425 - RNA, 23 nt, Artificial Sequence
  Synthetic
cagcgccuguaguaccagcuacu

SEQ ID NO: 642426 - RNA, 24 nt, Artificial Sequence
  Synthetic
ccagcgccuguaguaccagcuacu

SEQ ID NO: 642427 - RNA, 20 nt, Artificial Sequence
  Synthetic
ugccuguaguaccagcuacu

SEQ ID NO: 642428 - RNA, 21 nt, Artificial Sequence
  Synthetic
augccuguaguaccagcuacu

SEQ ID NO: 642429 - RNA, 22 nt, Artificial Sequence
  Synthetic
caugccuguaguaccagcuacu

SEQ ID NO: 642430 - RNA, 23 nt, Artificial Sequence
  Synthetic
acaugccuguaguaccagcuacu

SEQ ID NO: 642431 - RNA, 24 nt, Artificial Sequence
  Synthetic
cacaugccuguaguaccagcuacu

SEQ ID NO: 642432 - RNA, 18 nt, Artificial Sequence
  Synthetic
ccucuaaucccagcuacu

SEQ ID NO: 642433 - RNA, 19 nt, Artificial Sequence
  Synthetic
gccucuaaucccagcuacu

SEQ ID NO: 642434 - RNA, 20 nt, Artificial Sequence
  Synthetic
cgccucuaaucccagcuacu

SEQ ID NO: 642435 - RNA, 21 nt, Artificial Sequence
  Synthetic
gcgccucuaaucccagcuacu

SEQ ID NO: 642436 - RNA, 22 nt, Artificial Sequence
  Synthetic
ggcgccucuaaucccagcuacu

SEQ ID NO: 642437 - RNA, 23 nt, Artificial Sequence
  Synthetic
aggcgccucuaaucccagcuacu

SEQ ID NO: 642438 - RNA, 24 nt, Artificial Sequence
  Synthetic
aaggcgccucuaaucccagcuacu

SEQ ID NO: 642439 - RNA, 18 nt, Artificial Sequence
  Synthetic
cccguaaucccagcuacu

SEQ ID NO: 642440 - RNA, 19 nt, Artificial Sequence
  Synthetic
ucccguaaucccagcuacu

SEQ ID NO: 642441 - RNA, 20 nt, Artificial Sequence
  Synthetic
uucccguaaucccagcuacu

SEQ ID NO: 642442 - RNA, 21 nt, Artificial Sequence
  Synthetic
guucccguaaucccagcuacu

SEQ ID NO: 642443 - RNA, 22 nt, Artificial Sequence
  Synthetic
cguucccguaaucccagcuacu

SEQ ID NO: 642444 - RNA, 23 nt, Artificial Sequence
  Synthetic
gcguucccguaaucccagcuacu

SEQ ID NO: 642445 - RNA, 24 nt, Artificial Sequence
  Synthetic
ugcguucccguaaucccagcuacu

SEQ ID NO: 642446 - RNA, 21 nt, Artificial Sequence
  Synthetic
gcaccuguaaucccagcuacu

SEQ ID NO: 642447 - RNA, 22 nt, Artificial Sequence
  Synthetic
agcaccuguaaucccagcuacu

SEQ ID NO: 642448 - RNA, 23 nt, Artificial Sequence
  Synthetic
gagcaccuguaaucccagcuacu

SEQ ID NO: 642449 - RNA, 24 nt, Artificial Sequence
  Synthetic
agagcaccuguaaucccagcuacu

SEQ ID NO: 642450 - RNA, 22 nt, Artificial Sequence
  Synthetic
ggcaccuguaaucccagcuacu

SEQ ID NO: 642451 - RNA, 23 nt, Artificial Sequence
  Synthetic
aggcaccuguaaucccagcuacu

SEQ ID NO: 642452 - RNA, 24 nt, Artificial Sequence
  Synthetic
caggcaccuguaaucccagcuacu

SEQ ID NO: 642453 - RNA, 21 nt, Artificial Sequence
  Synthetic
acgccuguaaucccagcuacu

SEQ ID NO: 642454 - RNA, 22 nt, Artificial Sequence
  Synthetic
cacgccuguaaucccagcuacu

SEQ ID NO: 642455 - RNA, 23 nt, Artificial Sequence
  Synthetic
acacgccuguaaucccagcuacu

SEQ ID NO: 642456 - RNA, 24 nt, Artificial Sequence
  Synthetic
cacacgccuguaaucccagcuacu

SEQ ID NO: 642457 - RNA, 24 nt, Artificial Sequence
  Synthetic
caggcgccuguaaucccagcuacu

SEQ ID NO: 642458 - RNA, 21 nt, Artificial Sequence
  Synthetic
gugccuguaaucccagcuacu

SEQ ID NO: 642459 - RNA, 22 nt, Artificial Sequence
  Synthetic
agugccuguaaucccagcuacu

SEQ ID NO: 642460 - RNA, 23 nt, Artificial Sequence
  Synthetic
gagugccuguaaucccagcuacu

SEQ ID NO: 642461 - RNA, 24 nt, Artificial Sequence
  Synthetic
ugagugccuguaaucccagcuacu

SEQ ID NO: 642462 - RNA, 22 nt, Artificial Sequence
  Synthetic
ggugccuguaaucccagcuacu

SEQ ID NO: 642463 - RNA, 23 nt, Artificial Sequence
  Synthetic
aggugccuguaaucccagcuacu

SEQ ID NO: 642464 - RNA, 24 nt, Artificial Sequence
  Synthetic
caggugccuguaaucccagcuacu

SEQ ID NO: 642465 - RNA, 19 nt, Artificial Sequence
  Synthetic
uccuguaaucccagcuacu

SEQ ID NO: 642466 - RNA, 20 nt, Artificial Sequence
  Synthetic
cuccuguaaucccagcuacu

SEQ ID NO: 642467 - RNA, 21 nt, Artificial Sequence
  Synthetic
gcuccuguaaucccagcuacu

SEQ ID NO: 642468 - RNA, 22 nt, Artificial Sequence
  Synthetic
ggcuccuguaaucccagcuacu

SEQ ID NO: 642469 - RNA, 23 nt, Artificial Sequence
  Synthetic
aggcuccuguaaucccagcuacu

SEQ ID NO: 642470 - RNA, 24 nt, Artificial Sequence
  Synthetic
uaggcuccuguaaucccagcuacu

SEQ ID NO: 642471 - RNA, 18 nt, Artificial Sequence
  Synthetic
gcuguaaucccagcuacu

SEQ ID NO: 642472 - RNA, 19 nt, Artificial Sequence
  Synthetic
ggcuguaaucccagcuacu

SEQ ID NO: 642473 - RNA, 20 nt, Artificial Sequence
  Synthetic
uggcuguaaucccagcuacu

SEQ ID NO: 642474 - RNA, 21 nt, Artificial Sequence
  Synthetic
auggcuguaaucccagcuacu

SEQ ID NO: 642475 - RNA, 22 nt, Artificial Sequence
  Synthetic
cauggcuguaaucccagcuacu

SEQ ID NO: 642476 - RNA, 23 nt, Artificial Sequence
  Synthetic
gcauggcuguaaucccagcuacu

SEQ ID NO: 642477 - RNA, 24 nt, Artificial Sequence
  Synthetic
ugcauggcuguaaucccagcuacu

SEQ ID NO: 642478 - RNA, 18 nt, Artificial Sequence
  Synthetic
ucuguaaucccagcuacu

SEQ ID NO: 642479 - RNA, 19 nt, Artificial Sequence
  Synthetic
aucuguaaucccagcuacu

SEQ ID NO: 642480 - RNA, 20 nt, Artificial Sequence
  Synthetic
caucuguaaucccagcuacu

SEQ ID NO: 642481 - RNA, 21 nt, Artificial Sequence
  Synthetic
acaucuguaaucccagcuacu

SEQ ID NO: 642482 - RNA, 22 nt, Artificial Sequence
  Synthetic
cacaucuguaaucccagcuacu

SEQ ID NO: 642483 - RNA, 23 nt, Artificial Sequence
  Synthetic
gcacaucuguaaucccagcuacu

SEQ ID NO: 642484 - RNA, 24 nt, Artificial Sequence
  Synthetic
ugcacaucuguaaucccagcuacu

SEQ ID NO: 642485 - RNA, 19 nt, Artificial Sequence
  Synthetic
gucuguaaucccagcuacu

SEQ ID NO: 642486 - RNA, 20 nt, Artificial Sequence
  Synthetic
ugucuguaaucccagcuacu

SEQ ID NO: 642487 - RNA, 21 nt, Artificial Sequence
  Synthetic
augucuguaaucccagcuacu

SEQ ID NO: 642488 - RNA, 22 nt, Artificial Sequence
  Synthetic
caugucuguaaucccagcuacu

SEQ ID NO: 642489 - RNA, 23 nt, Artificial Sequence
  Synthetic
acaugucuguaaucccagcuacu

SEQ ID NO: 642490 - RNA, 24 nt, Artificial Sequence
  Synthetic
cacaugucuguaaucccagcuacu

SEQ ID NO: 642491 - RNA, 18 nt, Artificial Sequence
  Synthetic
ucugugaucccagcuacu

SEQ ID NO: 642492 - RNA, 19 nt, Artificial Sequence
  Synthetic
aucugugaucccagcuacu

SEQ ID NO: 642493 - RNA, 20 nt, Artificial Sequence
  Synthetic
caucugugaucccagcuacu

SEQ ID NO: 642494 - RNA, 21 nt, Artificial Sequence
  Synthetic
acaucugugaucccagcuacu

SEQ ID NO: 642495 - RNA, 22 nt, Artificial Sequence
  Synthetic
cacaucugugaucccagcuacu

SEQ ID NO: 642496 - RNA, 23 nt, Artificial Sequence
  Synthetic
ucacaucugugaucccagcuacu

SEQ ID NO: 642497 - RNA, 24 nt, Artificial Sequence
  Synthetic
cucacaucugugaucccagcuacu

SEQ ID NO: 642498 - RNA, 18 nt, Artificial Sequence
  Synthetic
accuguaucccagcuacu

SEQ ID NO: 642499 - RNA, 19 nt, Artificial Sequence
  Synthetic
caccuguaucccagcuacu

SEQ ID NO: 642500 - RNA, 20 nt, Artificial Sequence
  Synthetic
gcaccuguaucccagcuacu

SEQ ID NO: 642501 - RNA, 21 nt, Artificial Sequence
  Synthetic
cgcaccuguaucccagcuacu

SEQ ID NO: 642502 - RNA, 22 nt, Artificial Sequence
  Synthetic
gcgcaccuguaucccagcuacu

SEQ ID NO: 642503 - RNA, 23 nt, Artificial Sequence
  Synthetic
ugcgcaccuguaucccagcuacu

SEQ ID NO: 642504 - RNA, 24 nt, Artificial Sequence
  Synthetic
gugcgcaccuguaucccagcuacu

SEQ ID NO: 642505 - RNA, 18 nt, Artificial Sequence
  Synthetic
cuaguagucccagcuacu

SEQ ID NO: 642506 - RNA, 19 nt, Artificial Sequence
  Synthetic
gcuaguagucccagcuacu

SEQ ID NO: 642507 - RNA, 20 nt, Artificial Sequence
  Synthetic
ggcuaguagucccagcuacu

SEQ ID NO: 642508 - RNA, 21 nt, Artificial Sequence
  Synthetic
uggcuaguagucccagcuacu

SEQ ID NO: 642509 - RNA, 22 nt, Artificial Sequence
  Synthetic
cuggcuaguagucccagcuacu

SEQ ID NO: 642510 - RNA, 23 nt, Artificial Sequence
  Synthetic
ccuggcuaguagucccagcuacu

SEQ ID NO: 642511 - RNA, 24 nt, Artificial Sequence
  Synthetic
gccuggcuaguagucccagcuacu

SEQ ID NO: 642512 - RNA, 23 nt, Artificial Sequence
  Synthetic
gggcaccuguagucccagcuacu

SEQ ID NO: 642513 - RNA, 24 nt, Artificial Sequence
  Synthetic
ugggcaccuguagucccagcuacu

SEQ ID NO: 642514 - RNA, 21 nt, Artificial Sequence
  Synthetic
ccgccuguagucccagcuacu

SEQ ID NO: 642515 - RNA, 22 nt, Artificial Sequence
  Synthetic
gccgccuguagucccagcuacu

SEQ ID NO: 642516 - RNA, 23 nt, Artificial Sequence
  Synthetic
ggccgccuguagucccagcuacu

SEQ ID NO: 642517 - RNA, 24 nt, Artificial Sequence
  Synthetic
cggccgccuguagucccagcuacu

SEQ ID NO: 642518 - RNA, 21 nt, Artificial Sequence
  Synthetic
gcgccuguagucccagcuacu

SEQ ID NO: 642519 - RNA, 22 nt, Artificial Sequence
  Synthetic
cgcgccuguagucccagcuacu

SEQ ID NO: 642520 - RNA, 23 nt, Artificial Sequence
  Synthetic
gcgcgccuguagucccagcuacu

SEQ ID NO: 642521 - RNA, 24 nt, Artificial Sequence
  Synthetic
ugcgcgccuguagucccagcuacu

SEQ ID NO: 642522 - RNA, 22 nt, Artificial Sequence
  Synthetic
cgugccuguagucccagcuacu

SEQ ID NO: 642523 - RNA, 23 nt, Artificial Sequence
  Synthetic
gcgugccuguagucccagcuacu

SEQ ID NO: 642524 - RNA, 24 nt, Artificial Sequence
  Synthetic
cgcgugccuguagucccagcuacu

SEQ ID NO: 642525 - RNA, 18 nt, Artificial Sequence
  Synthetic
ucuguggucccagcuacu

SEQ ID NO: 642526 - RNA, 19 nt, Artificial Sequence
  Synthetic
gucuguggucccagcuacu

SEQ ID NO: 642527 - RNA, 20 nt, Artificial Sequence
  Synthetic
ugucuguggucccagcuacu

SEQ ID NO: 642528 - RNA, 21 nt, Artificial Sequence
  Synthetic
gugucuguggucccagcuacu

SEQ ID NO: 642529 - RNA, 22 nt, Artificial Sequence
  Synthetic
cgugucuguggucccagcuacu

SEQ ID NO: 642530 - RNA, 23 nt, Artificial Sequence
  Synthetic
ccgugucuguggucccagcuacu

SEQ ID NO: 642531 - RNA, 24 nt, Artificial Sequence
  Synthetic
cccgugucuguggucccagcuacu

SEQ ID NO: 642532 - RNA, 21 nt, Artificial Sequence
  Synthetic
acaccuguaaucucagcuacu

SEQ ID NO: 642533 - RNA, 22 nt, Artificial Sequence
  Synthetic
cacaccuguaaucucagcuacu

SEQ ID NO: 642534 - RNA, 23 nt, Artificial Sequence
  Synthetic
gcacaccuguaaucucagcuacu

SEQ ID NO: 642535 - RNA, 24 nt, Artificial Sequence
  Synthetic
cgcacaccuguaaucucagcuacu

SEQ ID NO: 642536 - RNA, 22 nt, Artificial Sequence
  Synthetic
ggcaccuguaaucucagcuacu

SEQ ID NO: 642537 - RNA, 23 nt, Artificial Sequence
  Synthetic
gggcaccuguaaucucagcuacu

SEQ ID NO: 642538 - RNA, 24 nt, Artificial Sequence
  Synthetic
ugggcaccuguaaucucagcuacu

SEQ ID NO: 642539 - RNA, 18 nt, Artificial Sequence
  Synthetic
ucuguagucucagcuacu

SEQ ID NO: 642540 - RNA, 19 nt, Artificial Sequence
  Synthetic
gucuguagucucagcuacu

SEQ ID NO: 642541 - RNA, 20 nt, Artificial Sequence
  Synthetic
ugucuguagucucagcuacu

SEQ ID NO: 642542 - RNA, 21 nt, Artificial Sequence
  Synthetic
augucuguagucucagcuacu

SEQ ID NO: 642543 - RNA, 22 nt, Artificial Sequence
  Synthetic
caugucuguagucucagcuacu

SEQ ID NO: 642544 - RNA, 23 nt, Artificial Sequence
  Synthetic
acaugucuguagucucagcuacu

SEQ ID NO: 642545 - RNA, 24 nt, Artificial Sequence
  Synthetic
uacaugucuguagucucagcuacu

SEQ ID NO: 642546 - RNA, 18 nt, Artificial Sequence
  Synthetic
ccuauaauccuagcuacu

SEQ ID NO: 642547 - RNA, 19 nt, Artificial Sequence
  Synthetic
gccuauaauccuagcuacu

SEQ ID NO: 642548 - RNA, 20 nt, Artificial Sequence
  Synthetic
ugccuauaauccuagcuacu

SEQ ID NO: 642549 - RNA, 21 nt, Artificial Sequence
  Synthetic
gugccuauaauccuagcuacu

SEQ ID NO: 642550 - RNA, 22 nt, Artificial Sequence
  Synthetic
ggugccuauaauccuagcuacu

SEQ ID NO: 642551 - RNA, 23 nt, Artificial Sequence
  Synthetic
gggugccuauaauccuagcuacu

SEQ ID NO: 642552 - RNA, 24 nt, Artificial Sequence
  Synthetic
cgggugccuauaauccuagcuacu

SEQ ID NO: 642553 - RNA, 18 nt, Artificial Sequence
  Synthetic
auauauauauuagcuacu

SEQ ID NO: 642554 - RNA, 19 nt, Artificial Sequence
  Synthetic
uauauauauauuagcuacu

SEQ ID NO: 642555 - RNA, 20 nt, Artificial Sequence
  Synthetic
auauauauauauuagcuacu

SEQ ID NO: 642556 - RNA, 21 nt, Artificial Sequence
  Synthetic
uauauauauauauuagcuacu

SEQ ID NO: 642557 - RNA, 22 nt, Artificial Sequence
  Synthetic
auauauauauauauuagcuacu

SEQ ID NO: 642558 - RNA, 23 nt, Artificial Sequence
  Synthetic
uauauauauauauauuagcuacu

SEQ ID NO: 642559 - RNA, 24 nt, Artificial Sequence
  Synthetic
guauauauauauauauuagcuacu

SEQ ID NO: 642560 - RNA, 18 nt, Artificial Sequence
  Synthetic
ccaacacuuuuagcuacu

SEQ ID NO: 642561 - RNA, 19 nt, Artificial Sequence
  Synthetic
gccaacacuuuuagcuacu

SEQ ID NO: 642562 - RNA, 20 nt, Artificial Sequence
  Synthetic
ugccaacacuuuuagcuacu

SEQ ID NO: 642563 - RNA, 21 nt, Artificial Sequence
  Synthetic
uugccaacacuuuuagcuacu

SEQ ID NO: 642564 - RNA, 22 nt, Artificial Sequence
  Synthetic
uuugccaacacuuuuagcuacu

SEQ ID NO: 642565 - RNA, 23 nt, Artificial Sequence
  Synthetic
uuuugccaacacuuuuagcuacu

SEQ ID NO: 642566 - RNA, 24 nt, Artificial Sequence
  Synthetic
cuuuugccaacacuuuuagcuacu

SEQ ID NO: 642567 - RNA, 18 nt, Artificial Sequence
  Synthetic
cugauuuucaaggcuacu

SEQ ID NO: 642568 - RNA, 19 nt, Artificial Sequence
  Synthetic
acugauuuucaaggcuacu

SEQ ID NO: 642569 - RNA, 20 nt, Artificial Sequence
  Synthetic
uacugauuuucaaggcuacu

SEQ ID NO: 642570 - RNA, 21 nt, Artificial Sequence
  Synthetic
cuacugauuuucaaggcuacu

SEQ ID NO: 642571 - RNA, 22 nt, Artificial Sequence
  Synthetic
gcuacugauuuucaaggcuacu

SEQ ID NO: 642572 - RNA, 23 nt, Artificial Sequence
  Synthetic
ggcuacugauuuucaaggcuacu

SEQ ID NO: 642573 - RNA, 24 nt, Artificial Sequence
  Synthetic
aggcuacugauuuucaaggcuacu

SEQ ID NO: 642574 - RNA, 18 nt, Artificial Sequence
  Synthetic
uuaacuggcauggcuacu

SEQ ID NO: 642575 - RNA, 19 nt, Artificial Sequence
  Synthetic
guuaacuggcauggcuacu

SEQ ID NO: 642576 - RNA, 20 nt, Artificial Sequence
  Synthetic
uguuaacuggcauggcuacu

SEQ ID NO: 642577 - RNA, 21 nt, Artificial Sequence
  Synthetic
auguuaacuggcauggcuacu

SEQ ID NO: 642578 - RNA, 22 nt, Artificial Sequence
  Synthetic
uauguuaacuggcauggcuacu

SEQ ID NO: 642579 - RNA, 23 nt, Artificial Sequence
  Synthetic
auauguuaacuggcauggcuacu

SEQ ID NO: 642580 - RNA, 24 nt, Artificial Sequence
  Synthetic
uauauguuaacuggcauggcuacu

SEQ ID NO: 642581 - RNA, 18 nt, Artificial Sequence
  Synthetic
ccuguagaccuggcuacu

SEQ ID NO: 642582 - RNA, 19 nt, Artificial Sequence
  Synthetic
gccuguagaccuggcuacu

SEQ ID NO: 642583 - RNA, 20 nt, Artificial Sequence
  Synthetic
ugccuguagaccuggcuacu

SEQ ID NO: 642584 - RNA, 21 nt, Artificial Sequence
  Synthetic
augccuguagaccuggcuacu

SEQ ID NO: 642585 - RNA, 22 nt, Artificial Sequence
  Synthetic
caugccuguagaccuggcuacu

SEQ ID NO: 642586 - RNA, 23 nt, Artificial Sequence
  Synthetic
acaugccuguagaccuggcuacu

SEQ ID NO: 642587 - RNA, 24 nt, Artificial Sequence
  Synthetic
uacaugccuguagaccuggcuacu

SEQ ID NO: 642588 - RNA, 18 nt, Artificial Sequence
  Synthetic
ggcucauuaguggcuacu

SEQ ID NO: 642589 - RNA, 19 nt, Artificial Sequence
  Synthetic
aggcucauuaguggcuacu

SEQ ID NO: 642590 - RNA, 20 nt, Artificial Sequence
  Synthetic
aaggcucauuaguggcuacu

SEQ ID NO: 642591 - RNA, 21 nt, Artificial Sequence
  Synthetic
aaaggcucauuaguggcuacu

SEQ ID NO: 642592 - RNA, 22 nt, Artificial Sequence
  Synthetic
caaaggcucauuaguggcuacu

SEQ ID NO: 642593 - RNA, 23 nt, Artificial Sequence
  Synthetic
ucaaaggcucauuaguggcuacu

SEQ ID NO: 642594 - RNA, 24 nt, Artificial Sequence
  Synthetic
uucaaaggcucauuaguggcuacu

SEQ ID NO: 642595 - RNA, 18 nt, Artificial Sequence
  Synthetic
aaggacgaugaugcuacu

SEQ ID NO: 642596 - RNA, 19 nt, Artificial Sequence
  Synthetic
caaggacgaugaugcuacu

SEQ ID NO: 642597 - RNA, 20 nt, Artificial Sequence
  Synthetic
acaaggacgaugaugcuacu

SEQ ID NO: 642598 - RNA, 21 nt, Artificial Sequence
  Synthetic
gacaaggacgaugaugcuacu

SEQ ID NO: 642599 - RNA, 22 nt, Artificial Sequence
  Synthetic
ugacaaggacgaugaugcuacu

SEQ ID NO: 642600 - RNA, 23 nt, Artificial Sequence
  Synthetic
augacaaggacgaugaugcuacu

SEQ ID NO: 642601 - RNA, 24 nt, Artificial Sequence
  Synthetic
gaugacaaggacgaugaugcuacu

SEQ ID NO: 642602 - RNA, 18 nt, Artificial Sequence
  Synthetic
acacgggaauaugcuacu

SEQ ID NO: 642603 - RNA, 19 nt, Artificial Sequence
  Synthetic
gacacgggaauaugcuacu

SEQ ID NO: 642604 - RNA, 20 nt, Artificial Sequence
  Synthetic
ggacacgggaauaugcuacu

SEQ ID NO: 642605 - RNA, 21 nt, Artificial Sequence
  Synthetic
uggacacgggaauaugcuacu

SEQ ID NO: 642606 - RNA, 22 nt, Artificial Sequence
  Synthetic
guggacacgggaauaugcuacu

SEQ ID NO: 642607 - RNA, 23 nt, Artificial Sequence
  Synthetic
aguggacacgggaauaugcuacu

SEQ ID NO: 642608 - RNA, 24 nt, Artificial Sequence
  Synthetic
caguggacacgggaauaugcuacu

SEQ ID NO: 642609 - RNA, 18 nt, Artificial Sequence
  Synthetic
gggaaaccuccugcuacu

SEQ ID NO: 642610 - RNA, 19 nt, Artificial Sequence
  Synthetic
ggggaaaccuccugcuacu

SEQ ID NO: 642611 - RNA, 20 nt, Artificial Sequence
  Synthetic
aggggaaaccuccugcuacu

SEQ ID NO: 642612 - RNA, 21 nt, Artificial Sequence
  Synthetic
aaggggaaaccuccugcuacu

SEQ ID NO: 642613 - RNA, 22 nt, Artificial Sequence
  Synthetic
gaaggggaaaccuccugcuacu

SEQ ID NO: 642614 - RNA, 23 nt, Artificial Sequence
  Synthetic
ggaaggggaaaccuccugcuacu

SEQ ID NO: 642615 - RNA, 24 nt, Artificial Sequence
  Synthetic
uggaaggggaaaccuccugcuacu

SEQ ID NO: 642616 - RNA, 18 nt, Artificial Sequence
  Synthetic
ccuguagucucugcuacu

SEQ ID NO: 642617 - RNA, 19 nt, Artificial Sequence
  Synthetic
gccuguagucucugcuacu

SEQ ID NO: 642618 - RNA, 20 nt, Artificial Sequence
  Synthetic
ugccuguagucucugcuacu

SEQ ID NO: 642619 - RNA, 21 nt, Artificial Sequence
  Synthetic
uugccuguagucucugcuacu

SEQ ID NO: 642620 - RNA, 22 nt, Artificial Sequence
  Synthetic
cuugccuguagucucugcuacu

SEQ ID NO: 642621 - RNA, 23 nt, Artificial Sequence
  Synthetic
acuugccuguagucucugcuacu

SEQ ID NO: 642622 - RNA, 24 nt, Artificial Sequence
  Synthetic
cacuugccuguagucucugcuacu

SEQ ID NO: 642623 - RNA, 18 nt, Artificial Sequence
  Synthetic
cuacucuuuaaaucuacu

SEQ ID NO: 642624 - RNA, 19 nt, Artificial Sequence
  Synthetic
gcuacucuuuaaaucuacu

SEQ ID NO: 642625 - RNA, 20 nt, Artificial Sequence
  Synthetic
agcuacucuuuaaaucuacu

SEQ ID NO: 642626 - RNA, 21 nt, Artificial Sequence
  Synthetic
uagcuacucuuuaaaucuacu

SEQ ID NO: 642627 - RNA, 22 nt, Artificial Sequence
  Synthetic
auagcuacucuuuaaaucuacu

SEQ ID NO: 642628 - RNA, 23 nt, Artificial Sequence
  Synthetic
aauagcuacucuuuaaaucuacu

SEQ ID NO: 642629 - RNA, 24 nt, Artificial Sequence
  Synthetic
caauagcuacucuuuaaaucuacu

SEQ ID NO: 642630 - RNA, 18 nt, Artificial Sequence
  Synthetic
ccuucuuagacaucuacu

SEQ ID NO: 642631 - RNA, 19 nt, Artificial Sequence
  Synthetic
uccuucuuagacaucuacu

SEQ ID NO: 642632 - RNA, 20 nt, Artificial Sequence
  Synthetic
cuccuucuuagacaucuacu

SEQ ID NO: 642633 - RNA, 21 nt, Artificial Sequence
  Synthetic
ucuccuucuuagacaucuacu

SEQ ID NO: 642634 - RNA, 22 nt, Artificial Sequence
  Synthetic
aucuccuucuuagacaucuacu

SEQ ID NO: 642635 - RNA, 23 nt, Artificial Sequence
  Synthetic
aaucuccuucuuagacaucuacu

SEQ ID NO: 642636 - RNA, 24 nt, Artificial Sequence
  Synthetic
aaaucuccuucuuagacaucuacu

SEQ ID NO: 642637 - RNA, 18 nt, Artificial Sequence
  Synthetic
gagaucuauacaucuacu

SEQ ID NO: 642638 - RNA, 19 nt, Artificial Sequence
  Synthetic
ggagaucuauacaucuacu

SEQ ID NO: 642639 - RNA, 20 nt, Artificial Sequence
  Synthetic
uggagaucuauacaucuacu

SEQ ID NO: 642640 - RNA, 21 nt, Artificial Sequence
  Synthetic
auggagaucuauacaucuacu

SEQ ID NO: 642641 - RNA, 22 nt, Artificial Sequence
  Synthetic
uauggagaucuauacaucuacu

SEQ ID NO: 642642 - RNA, 23 nt, Artificial Sequence
  Synthetic
uuauggagaucuauacaucuacu

SEQ ID NO: 642643 - RNA, 24 nt, Artificial Sequence
  Synthetic
cuuauggagaucuauacaucuacu

SEQ ID NO: 642644 - RNA, 18 nt, Artificial Sequence
  Synthetic
uaaacugaaagaucuacu

SEQ ID NO: 642645 - RNA, 19 nt, Artificial Sequence
  Synthetic
uuaaacugaaagaucuacu

SEQ ID NO: 642646 - RNA, 20 nt, Artificial Sequence
  Synthetic
guuaaacugaaagaucuacu

SEQ ID NO: 642647 - RNA, 21 nt, Artificial Sequence
  Synthetic
aguuaaacugaaagaucuacu

SEQ ID NO: 642648 - RNA, 22 nt, Artificial Sequence
  Synthetic
caguuaaacugaaagaucuacu

SEQ ID NO: 642649 - RNA, 23 nt, Artificial Sequence
  Synthetic
ucaguuaaacugaaagaucuacu

SEQ ID NO: 642650 - RNA, 24 nt, Artificial Sequence
  Synthetic
aucaguuaaacugaaagaucuacu

SEQ ID NO: 642651 - RNA, 18 nt, Artificial Sequence
  Synthetic
guucaagaguagucuacu

SEQ ID NO: 642652 - RNA, 19 nt, Artificial Sequence
  Synthetic
gguucaagaguagucuacu

SEQ ID NO: 642653 - RNA, 20 nt, Artificial Sequence
  Synthetic
ggguucaagaguagucuacu

SEQ ID NO: 642654 - RNA, 21 nt, Artificial Sequence
  Synthetic
aggguucaagaguagucuacu

SEQ ID NO: 642655 - RNA, 22 nt, Artificial Sequence
  Synthetic
aaggguucaagaguagucuacu

SEQ ID NO: 642656 - RNA, 23 nt, Artificial Sequence
  Synthetic
caaggguucaagaguagucuacu

SEQ ID NO: 642657 - RNA, 24 nt, Artificial Sequence
  Synthetic
ucaaggguucaagaguagucuacu

SEQ ID NO: 642658 - RNA, 18 nt, Artificial Sequence
  Synthetic
uacuauauagauucuacu

SEQ ID NO: 642659 - RNA, 19 nt, Artificial Sequence
  Synthetic
guacuauauagauucuacu

SEQ ID NO: 642660 - RNA, 20 nt, Artificial Sequence
  Synthetic
gguacuauauagauucuacu

SEQ ID NO: 642661 - RNA, 21 nt, Artificial Sequence
  Synthetic
agguacuauauagauucuacu

SEQ ID NO: 642662 - RNA, 22 nt, Artificial Sequence
  Synthetic
gagguacuauauagauucuacu

SEQ ID NO: 642663 - RNA, 23 nt, Artificial Sequence
  Synthetic
ggagguacuauauagauucuacu

SEQ ID NO: 642664 - RNA, 24 nt, Artificial Sequence
  Synthetic
gggagguacuauauagauucuacu

SEQ ID NO: 642665 - RNA, 18 nt, Artificial Sequence
  Synthetic
acaggauagaaaaguacu

SEQ ID NO: 642666 - RNA, 19 nt, Artificial Sequence
  Synthetic
gacaggauagaaaaguacu

SEQ ID NO: 642667 - RNA, 20 nt, Artificial Sequence
  Synthetic
agacaggauagaaaaguacu

SEQ ID NO: 642668 - RNA, 21 nt, Artificial Sequence
  Synthetic
aagacaggauagaaaaguacu

SEQ ID NO: 642669 - RNA, 22 nt, Artificial Sequence
  Synthetic
caagacaggauagaaaaguacu

SEQ ID NO: 642670 - RNA, 23 nt, Artificial Sequence
  Synthetic
ccaagacaggauagaaaaguacu

SEQ ID NO: 642671 - RNA, 24 nt, Artificial Sequence
  Synthetic
accaagacaggauagaaaaguacu

SEQ ID NO: 642672 - RNA, 18 nt, Artificial Sequence
  Synthetic
gcuccuuuaucaaguacu

SEQ ID NO: 642673 - RNA, 19 nt, Artificial Sequence
  Synthetic
ugcuccuuuaucaaguacu

SEQ ID NO: 642674 - RNA, 20 nt, Artificial Sequence
  Synthetic
uugcuccuuuaucaaguacu

SEQ ID NO: 642675 - RNA, 21 nt, Artificial Sequence
  Synthetic
auugcuccuuuaucaaguacu

SEQ ID NO: 642676 - RNA, 22 nt, Artificial Sequence
  Synthetic
cauugcuccuuuaucaaguacu

SEQ ID NO: 642677 - RNA, 23 nt, Artificial Sequence
  Synthetic
ccauugcuccuuuaucaaguacu

SEQ ID NO: 642678 - RNA, 24 nt, Artificial Sequence
  Synthetic
cccauugcuccuuuaucaaguacu

SEQ ID NO: 642679 - RNA, 18 nt, Artificial Sequence
  Synthetic
caaaucuguuccaguacu

SEQ ID NO: 642680 - RNA, 19 nt, Artificial Sequence
  Synthetic
acaaaucuguuccaguacu

SEQ ID NO: 642681 - RNA, 20 nt, Artificial Sequence
  Synthetic
cacaaaucuguuccaguacu

SEQ ID NO: 642682 - RNA, 21 nt, Artificial Sequence
  Synthetic
gcacaaaucuguuccaguacu

SEQ ID NO: 642683 - RNA, 22 nt, Artificial Sequence
  Synthetic
agcacaaaucuguuccaguacu

SEQ ID NO: 642684 - RNA, 23 nt, Artificial Sequence
  Synthetic
cagcacaaaucuguuccaguacu

SEQ ID NO: 642685 - RNA, 24 nt, Artificial Sequence
  Synthetic
acagcacaaaucuguuccaguacu

SEQ ID NO: 642686 - RNA, 18 nt, Artificial Sequence
  Synthetic
gacaucagagagaguacu

SEQ ID NO: 642687 - RNA, 19 nt, Artificial Sequence
  Synthetic
ggacaucagagagaguacu

SEQ ID NO: 642688 - RNA, 20 nt, Artificial Sequence
  Synthetic
aggacaucagagagaguacu

SEQ ID NO: 642689 - RNA, 21 nt, Artificial Sequence
  Synthetic
caggacaucagagagaguacu

SEQ ID NO: 642690 - RNA, 22 nt, Artificial Sequence
  Synthetic
acaggacaucagagagaguacu

SEQ ID NO: 642691 - RNA, 23 nt, Artificial Sequence
  Synthetic
cacaggacaucagagagaguacu

SEQ ID NO: 642692 - RNA, 24 nt, Artificial Sequence
  Synthetic
ucacaggacaucagagagaguacu

SEQ ID NO: 642693 - RNA, 18 nt, Artificial Sequence
  Synthetic
gucaacaaucugaguacu

SEQ ID NO: 642694 - RNA, 19 nt, Artificial Sequence
  Synthetic
ggucaacaaucugaguacu

SEQ ID NO: 642695 - RNA, 20 nt, Artificial Sequence
  Synthetic
uggucaacaaucugaguacu

SEQ ID NO: 642696 - RNA, 21 nt, Artificial Sequence
  Synthetic
uuggucaacaaucugaguacu

SEQ ID NO: 642697 - RNA, 22 nt, Artificial Sequence
  Synthetic
auuggucaacaaucugaguacu

SEQ ID NO: 642698 - RNA, 23 nt, Artificial Sequence
  Synthetic
gauuggucaacaaucugaguacu

SEQ ID NO: 642699 - RNA, 24 nt, Artificial Sequence
  Synthetic
agauuggucaacaaucugaguacu

SEQ ID NO: 642700 - RNA, 18 nt, Artificial Sequence
  Synthetic
gguacaguauauaguacu

SEQ ID NO: 642701 - RNA, 19 nt, Artificial Sequence
  Synthetic
ggguacaguauauaguacu

SEQ ID NO: 642702 - RNA, 20 nt, Artificial Sequence
  Synthetic
uggguacaguauauaguacu

SEQ ID NO: 642703 - RNA, 21 nt, Artificial Sequence
  Synthetic
uuggguacaguauauaguacu

SEQ ID NO: 642704 - RNA, 22 nt, Artificial Sequence
  Synthetic
auuggguacaguauauaguacu

SEQ ID NO: 642705 - RNA, 23 nt, Artificial Sequence
  Synthetic
uauuggguacaguauauaguacu

SEQ ID NO: 642706 - RNA, 24 nt, Artificial Sequence
  Synthetic
uuauuggguacaguauauaguacu

SEQ ID NO: 642707 - RNA, 18 nt, Artificial Sequence
  Synthetic
uacagcaaaacuaguacu

SEQ ID NO: 642708 - RNA, 19 nt, Artificial Sequence
  Synthetic
auacagcaaaacuaguacu

SEQ ID NO: 642709 - RNA, 20 nt, Artificial Sequence
  Synthetic
gauacagcaaaacuaguacu

SEQ ID NO: 642710 - RNA, 21 nt, Artificial Sequence
  Synthetic
ggauacagcaaaacuaguacu

SEQ ID NO: 642711 - RNA, 22 nt, Artificial Sequence
  Synthetic
gggauacagcaaaacuaguacu

SEQ ID NO: 642712 - RNA, 23 nt, Artificial Sequence
  Synthetic
ugggauacagcaaaacuaguacu

SEQ ID NO: 642713 - RNA, 24 nt, Artificial Sequence
  Synthetic
augggauacagcaaaacuaguacu

SEQ ID NO: 642714 - RNA, 18 nt, Artificial Sequence
  Synthetic
ggguuuuaugguaguacu

SEQ ID NO: 642715 - RNA, 19 nt, Artificial Sequence
  Synthetic
aggguuuuaugguaguacu

SEQ ID NO: 642716 - RNA, 20 nt, Artificial Sequence
  Synthetic
caggguuuuaugguaguacu

SEQ ID NO: 642717 - RNA, 21 nt, Artificial Sequence
  Synthetic
ccaggguuuuaugguaguacu

SEQ ID NO: 642718 - RNA, 22 nt, Artificial Sequence
  Synthetic
cccaggguuuuaugguaguacu

SEQ ID NO: 642719 - RNA, 23 nt, Artificial Sequence
  Synthetic
acccaggguuuuaugguaguacu

SEQ ID NO: 642720 - RNA, 24 nt, Artificial Sequence
  Synthetic
uacccaggguuuuaugguaguacu

SEQ ID NO: 642721 - RNA, 18 nt, Artificial Sequence
  Synthetic
aguacuacgacagguacu

SEQ ID NO: 642722 - RNA, 19 nt, Artificial Sequence
  Synthetic
aaguacuacgacagguacu

SEQ ID NO: 642723 - RNA, 20 nt, Artificial Sequence
  Synthetic
gaaguacuacgacagguacu

SEQ ID NO: 642724 - RNA, 21 nt, Artificial Sequence
  Synthetic
ggaaguacuacgacagguacu

SEQ ID NO: 642725 - RNA, 22 nt, Artificial Sequence
  Synthetic
aggaaguacuacgacagguacu

SEQ ID NO: 642726 - RNA, 23 nt, Artificial Sequence
  Synthetic
uaggaaguacuacgacagguacu

SEQ ID NO: 642727 - RNA, 24 nt, Artificial Sequence
  Synthetic
auaggaaguacuacgacagguacu

SEQ ID NO: 642728 - RNA, 18 nt, Artificial Sequence
  Synthetic
ccuauuaucccagguacu

SEQ ID NO: 642729 - RNA, 19 nt, Artificial Sequence
  Synthetic
accuauuaucccagguacu

SEQ ID NO: 642730 - RNA, 20 nt, Artificial Sequence
  Synthetic
caccuauuaucccagguacu

SEQ ID NO: 642731 - RNA, 21 nt, Artificial Sequence
  Synthetic
gcaccuauuaucccagguacu

SEQ ID NO: 642732 - RNA, 22 nt, Artificial Sequence
  Synthetic
ggcaccuauuaucccagguacu

SEQ ID NO: 642733 - RNA, 23 nt, Artificial Sequence
  Synthetic
gggcaccuauuaucccagguacu

SEQ ID NO: 642734 - RNA, 24 nt, Artificial Sequence
  Synthetic
ugggcaccuauuaucccagguacu

SEQ ID NO: 642735 - RNA, 18 nt, Artificial Sequence
  Synthetic
ggaaaaaaaagagguacu

SEQ ID NO: 642736 - RNA, 19 nt, Artificial Sequence
  Synthetic
uggaaaaaaaagagguacu

SEQ ID NO: 642737 - RNA, 20 nt, Artificial Sequence
  Synthetic
uuggaaaaaaaagagguacu

SEQ ID NO: 642738 - RNA, 21 nt, Artificial Sequence
  Synthetic
cuuggaaaaaaaagagguacu

SEQ ID NO: 642739 - RNA, 22 nt, Artificial Sequence
  Synthetic
acuuggaaaaaaaagagguacu

SEQ ID NO: 642740 - RNA, 23 nt, Artificial Sequence
  Synthetic
aacuuggaaaaaaaagagguacu

SEQ ID NO: 642741 - RNA, 24 nt, Artificial Sequence
  Synthetic
gaacuuggaaaaaaaagagguacu

SEQ ID NO: 642742 - RNA, 18 nt, Artificial Sequence
  Synthetic
ccuuagaauguagguacu

SEQ ID NO: 642743 - RNA, 19 nt, Artificial Sequence
  Synthetic
uccuuagaauguagguacu

SEQ ID NO: 642744 - RNA, 20 nt, Artificial Sequence
  Synthetic
guccuuagaauguagguacu

SEQ ID NO: 642745 - RNA, 21 nt, Artificial Sequence
  Synthetic
aguccuuagaauguagguacu

SEQ ID NO: 642746 - RNA, 22 nt, Artificial Sequence
  Synthetic
uaguccuuagaauguagguacu

SEQ ID NO: 642747 - RNA, 23 nt, Artificial Sequence
  Synthetic
auaguccuuagaauguagguacu

SEQ ID NO: 642748 - RNA, 24 nt, Artificial Sequence
  Synthetic
cauaguccuuagaauguagguacu

SEQ ID NO: 642749 - RNA, 18 nt, Artificial Sequence
  Synthetic
agggaguaauucgguacu

SEQ ID NO: 642750 - RNA, 19 nt, Artificial Sequence
  Synthetic
uagggaguaauucgguacu

SEQ ID NO: 642751 - RNA, 20 nt, Artificial Sequence
  Synthetic
uuagggaguaauucgguacu

SEQ ID NO: 642752 - RNA, 21 nt, Artificial Sequence
  Synthetic
uuuagggaguaauucgguacu

SEQ ID NO: 642753 - RNA, 22 nt, Artificial Sequence
  Synthetic
auuuagggaguaauucgguacu

SEQ ID NO: 642754 - RNA, 23 nt, Artificial Sequence
  Synthetic
cauuuagggaguaauucgguacu

SEQ ID NO: 642755 - RNA, 24 nt, Artificial Sequence
  Synthetic
acauuuagggaguaauucgguacu

SEQ ID NO: 642756 - RNA, 18 nt, Artificial Sequence
  Synthetic
ugaucucucagggguacu

SEQ ID NO: 642757 - RNA, 19 nt, Artificial Sequence
  Synthetic
augaucucucagggguacu

SEQ ID NO: 642758 - RNA, 20 nt, Artificial Sequence
  Synthetic
aaugaucucucagggguacu

SEQ ID NO: 642759 - RNA, 21 nt, Artificial Sequence
  Synthetic
caaugaucucucagggguacu

SEQ ID NO: 642760 - RNA, 22 nt, Artificial Sequence
  Synthetic
acaaugaucucucagggguacu

SEQ ID NO: 642761 - RNA, 23 nt, Artificial Sequence
  Synthetic
uacaaugaucucucagggguacu

SEQ ID NO: 642762 - RNA, 24 nt, Artificial Sequence
  Synthetic
uuacaaugaucucucagggguacu

SEQ ID NO: 642763 - RNA, 18 nt, Artificial Sequence
  Synthetic
ucugucaagguugguacu

SEQ ID NO: 642764 - RNA, 19 nt, Artificial Sequence
  Synthetic
uucugucaagguugguacu

SEQ ID NO: 642765 - RNA, 20 nt, Artificial Sequence
  Synthetic
uuucugucaagguugguacu

SEQ ID NO: 642766 - RNA, 21 nt, Artificial Sequence
  Synthetic
auuucugucaagguugguacu

SEQ ID NO: 642767 - RNA, 22 nt, Artificial Sequence
  Synthetic
aauuucugucaagguugguacu

SEQ ID NO: 642768 - RNA, 23 nt, Artificial Sequence
  Synthetic
gaauuucugucaagguugguacu

SEQ ID NO: 642769 - RNA, 24 nt, Artificial Sequence
  Synthetic
ugaauuucugucaagguugguacu

SEQ ID NO: 642770 - RNA, 18 nt, Artificial Sequence
  Synthetic
aaugaaaaauaauguacu

SEQ ID NO: 642771 - RNA, 19 nt, Artificial Sequence
  Synthetic
aaaugaaaaauaauguacu

SEQ ID NO: 642772 - RNA, 20 nt, Artificial Sequence
  Synthetic
caaaugaaaaauaauguacu

SEQ ID NO: 642773 - RNA, 21 nt, Artificial Sequence
  Synthetic
acaaaugaaaaauaauguacu

SEQ ID NO: 642774 - RNA, 22 nt, Artificial Sequence
  Synthetic
uacaaaugaaaaauaauguacu

SEQ ID NO: 642775 - RNA, 23 nt, Artificial Sequence
  Synthetic
auacaaaugaaaaauaauguacu

SEQ ID NO: 642776 - RNA, 24 nt, Artificial Sequence
  Synthetic
aauacaaaugaaaaauaauguacu

SEQ ID NO: 642777 - RNA, 18 nt, Artificial Sequence
  Synthetic
uuggagauacuauguacu

SEQ ID NO: 642778 - RNA, 19 nt, Artificial Sequence
  Synthetic
uuuggagauacuauguacu

SEQ ID NO: 642779 - RNA, 20 nt, Artificial Sequence
  Synthetic
guuuggagauacuauguacu

SEQ ID NO: 642780 - RNA, 21 nt, Artificial Sequence
  Synthetic
uguuuggagauacuauguacu

SEQ ID NO: 642781 - RNA, 22 nt, Artificial Sequence
  Synthetic
auguuuggagauacuauguacu

SEQ ID NO: 642782 - RNA, 23 nt, Artificial Sequence
  Synthetic
uauguuuggagauacuauguacu

SEQ ID NO: 642783 - RNA, 24 nt, Artificial Sequence
  Synthetic
auauguuuggagauacuauguacu

SEQ ID NO: 642784 - RNA, 18 nt, Artificial Sequence
  Synthetic
uguugacgaaccuguacu

SEQ ID NO: 642785 - RNA, 19 nt, Artificial Sequence
  Synthetic
guguugacgaaccuguacu

SEQ ID NO: 642786 - RNA, 20 nt, Artificial Sequence
  Synthetic
aguguugacgaaccuguacu

SEQ ID NO: 642787 - RNA, 21 nt, Artificial Sequence
  Synthetic
gaguguugacgaaccuguacu

SEQ ID NO: 642788 - RNA, 22 nt, Artificial Sequence
  Synthetic
agaguguugacgaaccuguacu

SEQ ID NO: 642789 - RNA, 23 nt, Artificial Sequence
  Synthetic
gagaguguugacgaaccuguacu

SEQ ID NO: 642790 - RNA, 24 nt, Artificial Sequence
  Synthetic
ggagaguguugacgaaccuguacu

SEQ ID NO: 642791 - RNA, 18 nt, Artificial Sequence
  Synthetic
gaaugggggcccuguacu

SEQ ID NO: 642792 - RNA, 19 nt, Artificial Sequence
  Synthetic
agaaugggggcccuguacu

SEQ ID NO: 642793 - RNA, 20 nt, Artificial Sequence
  Synthetic
aagaaugggggcccuguacu

SEQ ID NO: 642794 - RNA, 21 nt, Artificial Sequence
  Synthetic
aaagaaugggggcccuguacu

SEQ ID NO: 642795 - RNA, 22 nt, Artificial Sequence
  Synthetic
caaagaaugggggcccuguacu

SEQ ID NO: 642796 - RNA, 23 nt, Artificial Sequence
  Synthetic
ucaaagaaugggggcccuguacu

SEQ ID NO: 642797 - RNA, 24 nt, Artificial Sequence
  Synthetic
uucaaagaaugggggcccuguacu

SEQ ID NO: 642798 - RNA, 18 nt, Artificial Sequence
  Synthetic
gauuuuaugcucuguacu

SEQ ID NO: 642799 - RNA, 19 nt, Artificial Sequence
  Synthetic
ggauuuuaugcucuguacu

SEQ ID NO: 642800 - RNA, 20 nt, Artificial Sequence
  Synthetic
gggauuuuaugcucuguacu

SEQ ID NO: 642801 - RNA, 21 nt, Artificial Sequence
  Synthetic
ugggauuuuaugcucuguacu

SEQ ID NO: 642802 - RNA, 22 nt, Artificial Sequence
  Synthetic
augggauuuuaugcucuguacu

SEQ ID NO: 642803 - RNA, 23 nt, Artificial Sequence
  Synthetic
uaugggauuuuaugcucuguacu

SEQ ID NO: 642804 - RNA, 24 nt, Artificial Sequence
  Synthetic
guaugggauuuuaugcucuguacu

SEQ ID NO: 642805 - RNA, 18 nt, Artificial Sequence
  Synthetic
uaaugguuaauguguacu

SEQ ID NO: 642806 - RNA, 19 nt, Artificial Sequence
  Synthetic
uuaaugguuaauguguacu

SEQ ID NO: 642807 - RNA, 20 nt, Artificial Sequence
  Synthetic
cuuaaugguuaauguguacu

SEQ ID NO: 642808 - RNA, 21 nt, Artificial Sequence
  Synthetic
gcuuaaugguuaauguguacu

SEQ ID NO: 642809 - RNA, 22 nt, Artificial Sequence
  Synthetic
ugcuuaaugguuaauguguacu

SEQ ID NO: 642810 - RNA, 23 nt, Artificial Sequence
  Synthetic
gugcuuaaugguuaauguguacu

SEQ ID NO: 642811 - RNA, 24 nt, Artificial Sequence
  Synthetic
agugcuuaaugguuaauguguacu

SEQ ID NO: 642812 - RNA, 18 nt, Artificial Sequence
  Synthetic
ccuugcuuuaauuguacu

SEQ ID NO: 642813 - RNA, 19 nt, Artificial Sequence
  Synthetic
uccuugcuuuaauuguacu

SEQ ID NO: 642814 - RNA, 20 nt, Artificial Sequence
  Synthetic
auccuugcuuuaauuguacu

SEQ ID NO: 642815 - RNA, 21 nt, Artificial Sequence
  Synthetic
gauccuugcuuuaauuguacu

SEQ ID NO: 642816 - RNA, 22 nt, Artificial Sequence
  Synthetic
ugauccuugcuuuaauuguacu

SEQ ID NO: 642817 - RNA, 23 nt, Artificial Sequence
  Synthetic
cugauccuugcuuuaauuguacu

SEQ ID NO: 642818 - RNA, 24 nt, Artificial Sequence
  Synthetic
ucugauccuugcuuuaauuguacu

SEQ ID NO: 642819 - RNA, 18 nt, Artificial Sequence
  Synthetic
gaugaaugagaaauuacu

SEQ ID NO: 642820 - RNA, 19 nt, Artificial Sequence
  Synthetic
ugaugaaugagaaauuacu

SEQ ID NO: 642821 - RNA, 20 nt, Artificial Sequence
  Synthetic
uugaugaaugagaaauuacu

SEQ ID NO: 642822 - RNA, 21 nt, Artificial Sequence
  Synthetic
guugaugaaugagaaauuacu

SEQ ID NO: 642823 - RNA, 22 nt, Artificial Sequence
  Synthetic
aguugaugaaugagaaauuacu

SEQ ID NO: 642824 - RNA, 23 nt, Artificial Sequence
  Synthetic
aaguugaugaaugagaaauuacu

SEQ ID NO: 642825 - RNA, 24 nt, Artificial Sequence
  Synthetic
aaaguugaugaaugagaaauuacu

SEQ ID NO: 642826 - RNA, 22 nt, Artificial Sequence
  Synthetic
ugcauugaaucuauaaauuacu

SEQ ID NO: 642827 - RNA, 23 nt, Artificial Sequence
  Synthetic
cugcauugaaucuauaaauuacu

SEQ ID NO: 642828 - RNA, 24 nt, Artificial Sequence
  Synthetic
acugcauugaaucuauaaauuacu

SEQ ID NO: 642829 - RNA, 18 nt, Artificial Sequence
  Synthetic
caaaaauguucaauuacu

SEQ ID NO: 642830 - RNA, 19 nt, Artificial Sequence
  Synthetic
acaaaaauguucaauuacu

SEQ ID NO: 642831 - RNA, 20 nt, Artificial Sequence
  Synthetic
aacaaaaauguucaauuacu

SEQ ID NO: 642832 - RNA, 21 nt, Artificial Sequence
  Synthetic
aaacaaaaauguucaauuacu

SEQ ID NO: 642833 - RNA, 22 nt, Artificial Sequence
  Synthetic
gaaacaaaaauguucaauuacu

SEQ ID NO: 642834 - RNA, 23 nt, Artificial Sequence
  Synthetic
ggaaacaaaaauguucaauuacu

SEQ ID NO: 642835 - RNA, 24 nt, Artificial Sequence
  Synthetic
gggaaacaaaaauguucaauuacu

SEQ ID NO: 642836 - RNA, 18 nt, Artificial Sequence
  Synthetic
cuuuguuguagaauuacu

SEQ ID NO: 642837 - RNA, 19 nt, Artificial Sequence
  Synthetic
ucuuuguuguagaauuacu

SEQ ID NO: 642838 - RNA, 20 nt, Artificial Sequence
  Synthetic
aucuuuguuguagaauuacu

SEQ ID NO: 642839 - RNA, 21 nt, Artificial Sequence
  Synthetic
uaucuuuguuguagaauuacu

SEQ ID NO: 642840 - RNA, 22 nt, Artificial Sequence
  Synthetic
auaucuuuguuguagaauuacu

SEQ ID NO: 642841 - RNA, 23 nt, Artificial Sequence
  Synthetic
aauaucuuuguuguagaauuacu

SEQ ID NO: 642842 - RNA, 24 nt, Artificial Sequence
  Synthetic
uaauaucuuuguuguagaauuacu

SEQ ID NO: 642843 - RNA, 18 nt, Artificial Sequence
  Synthetic
auaauaauacuaauuacu

SEQ ID NO: 642844 - RNA, 19 nt, Artificial Sequence
  Synthetic
aauaauaauacuaauuacu

SEQ ID NO: 642845 - RNA, 20 nt, Artificial Sequence
  Synthetic
uaauaauaauacuaauuacu

SEQ ID NO: 642846 - RNA, 21 nt, Artificial Sequence
  Synthetic
auaauaauaauacuaauuacu

SEQ ID NO: 642847 - RNA, 22 nt, Artificial Sequence
  Synthetic
aauaauaauaauacuaauuacu

SEQ ID NO: 642848 - RNA, 23 nt, Artificial Sequence
  Synthetic
uaauaauaauaauacuaauuacu

SEQ ID NO: 642849 - RNA, 24 nt, Artificial Sequence
  Synthetic
uuaauaauaauaauacuaauuacu

SEQ ID NO: 642850 - RNA, 18 nt, Artificial Sequence
  Synthetic
ggucacuccuacauuacu

SEQ ID NO: 642851 - RNA, 19 nt, Artificial Sequence
  Synthetic
gggucacuccuacauuacu

SEQ ID NO: 642852 - RNA, 20 nt, Artificial Sequence
  Synthetic
ugggucacuccuacauuacu

SEQ ID NO: 642853 - RNA, 21 nt, Artificial Sequence
  Synthetic
uugggucacuccuacauuacu

SEQ ID NO: 642854 - RNA, 22 nt, Artificial Sequence
  Synthetic
cuugggucacuccuacauuacu

SEQ ID NO: 642855 - RNA, 23 nt, Artificial Sequence
  Synthetic
ccuugggucacuccuacauuacu

SEQ ID NO: 642856 - RNA, 24 nt, Artificial Sequence
  Synthetic
accuugggucacuccuacauuacu

SEQ ID NO: 642857 - RNA, 18 nt, Artificial Sequence
  Synthetic
ugacacucaggcauuacu

SEQ ID NO: 642858 - RNA, 19 nt, Artificial Sequence
  Synthetic
gugacacucaggcauuacu

SEQ ID NO: 642859 - RNA, 20 nt, Artificial Sequence
  Synthetic
ugugacacucaggcauuacu

SEQ ID NO: 642860 - RNA, 21 nt, Artificial Sequence
  Synthetic
uugugacacucaggcauuacu

SEQ ID NO: 642861 - RNA, 22 nt, Artificial Sequence
  Synthetic
uuugugacacucaggcauuacu

SEQ ID NO: 642862 - RNA, 23 nt, Artificial Sequence
  Synthetic
uuuugugacacucaggcauuacu

SEQ ID NO: 642863 - RNA, 24 nt, Artificial Sequence
  Synthetic
uuuuugugacacucaggcauuacu

SEQ ID NO: 642864 - RNA, 18 nt, Artificial Sequence
  Synthetic
aagcuuuuugagauuacu

SEQ ID NO: 642865 - RNA, 19 nt, Artificial Sequence
  Synthetic
aaagcuuuuugagauuacu

SEQ ID NO: 642866 - RNA, 20 nt, Artificial Sequence
  Synthetic
uaaagcuuuuugagauuacu

SEQ ID NO: 642867 - RNA, 21 nt, Artificial Sequence
  Synthetic
cuaaagcuuuuugagauuacu

SEQ ID NO: 642868 - RNA, 22 nt, Artificial Sequence
  Synthetic
ucuaaagcuuuuugagauuacu

SEQ ID NO: 642869 - RNA, 23 nt, Artificial Sequence
  Synthetic
uucuaaagcuuuuugagauuacu

SEQ ID NO: 642870 - RNA, 24 nt, Artificial Sequence
  Synthetic
uuucuaaagcuuuuugagauuacu

SEQ ID NO: 642871 - RNA, 18 nt, Artificial Sequence
  Synthetic
gcucaauuuaggauuacu

SEQ ID NO: 642872 - RNA, 19 nt, Artificial Sequence
  Synthetic
agcucaauuuaggauuacu

SEQ ID NO: 642873 - RNA, 20 nt, Artificial Sequence
  Synthetic
cagcucaauuuaggauuacu

SEQ ID NO: 642874 - RNA, 21 nt, Artificial Sequence
  Synthetic
ccagcucaauuuaggauuacu

SEQ ID NO: 642875 - RNA, 22 nt, Artificial Sequence
  Synthetic
uccagcucaauuuaggauuacu

SEQ ID NO: 642876 - RNA, 23 nt, Artificial Sequence
  Synthetic
cuccagcucaauuuaggauuacu

SEQ ID NO: 642877 - RNA, 24 nt, Artificial Sequence
  Synthetic
ucuccagcucaauuuaggauuacu

SEQ ID NO: 642878 - RNA, 18 nt, Artificial Sequence
  Synthetic
gggacuaauuggauuacu

SEQ ID NO: 642879 - RNA, 19 nt, Artificial Sequence
  Synthetic
agggacuaauuggauuacu

SEQ ID NO: 642880 - RNA, 20 nt, Artificial Sequence
  Synthetic
uagggacuaauuggauuacu

SEQ ID NO: 642881 - RNA, 21 nt, Artificial Sequence
  Synthetic
cuagggacuaauuggauuacu

SEQ ID NO: 642882 - RNA, 22 nt, Artificial Sequence
  Synthetic
ccuagggacuaauuggauuacu

SEQ ID NO: 642883 - RNA, 23 nt, Artificial Sequence
  Synthetic
gccuagggacuaauuggauuacu

SEQ ID NO: 642884 - RNA, 24 nt, Artificial Sequence
  Synthetic
ugccuagggacuaauuggauuacu

SEQ ID NO: 642885 - RNA, 18 nt, Artificial Sequence
  Synthetic
aguaguccaaguauuacu

SEQ ID NO: 642886 - RNA, 19 nt, Artificial Sequence
  Synthetic
gaguaguccaaguauuacu

SEQ ID NO: 642887 - RNA, 20 nt, Artificial Sequence
  Synthetic
ugaguaguccaaguauuacu

SEQ ID NO: 642888 - RNA, 21 nt, Artificial Sequence
  Synthetic
uugaguaguccaaguauuacu

SEQ ID NO: 642889 - RNA, 22 nt, Artificial Sequence
  Synthetic
uuugaguaguccaaguauuacu

SEQ ID NO: 642890 - RNA, 23 nt, Artificial Sequence
  Synthetic
auuugaguaguccaaguauuacu

SEQ ID NO: 642891 - RNA, 24 nt, Artificial Sequence
  Synthetic
cauuugaguaguccaaguauuacu

SEQ ID NO: 642892 - RNA, 18 nt, Artificial Sequence
  Synthetic
ucugguuauaguauuacu

SEQ ID NO: 642893 - RNA, 19 nt, Artificial Sequence
  Synthetic
aucugguuauaguauuacu

SEQ ID NO: 642894 - RNA, 20 nt, Artificial Sequence
  Synthetic
caucugguuauaguauuacu

SEQ ID NO: 642895 - RNA, 21 nt, Artificial Sequence
  Synthetic
ucaucugguuauaguauuacu

SEQ ID NO: 642896 - RNA, 22 nt, Artificial Sequence
  Synthetic
gucaucugguuauaguauuacu

SEQ ID NO: 642897 - RNA, 23 nt, Artificial Sequence
  Synthetic
ggucaucugguuauaguauuacu

SEQ ID NO: 642898 - RNA, 24 nt, Artificial Sequence
  Synthetic
uggucaucugguuauaguauuacu

SEQ ID NO: 642899 - RNA, 18 nt, Artificial Sequence
  Synthetic
ugcaagguaguuauuacu

SEQ ID NO: 642900 - RNA, 19 nt, Artificial Sequence
  Synthetic
cugcaagguaguuauuacu

SEQ ID NO: 642901 - RNA, 20 nt, Artificial Sequence
  Synthetic
ucugcaagguaguuauuacu

SEQ ID NO: 642902 - RNA, 21 nt, Artificial Sequence
  Synthetic
cucugcaagguaguuauuacu

SEQ ID NO: 642903 - RNA, 22 nt, Artificial Sequence
  Synthetic
acucugcaagguaguuauuacu

SEQ ID NO: 642904 - RNA, 23 nt, Artificial Sequence
  Synthetic
aacucugcaagguaguuauuacu

SEQ ID NO: 642905 - RNA, 24 nt, Artificial Sequence
  Synthetic
uaacucugcaagguaguuauuacu

SEQ ID NO: 642906 - RNA, 18 nt, Artificial Sequence
  Synthetic
uaugaauaguuuauuacu

SEQ ID NO: 642907 - RNA, 19 nt, Artificial Sequence
  Synthetic
uuaugaauaguuuauuacu

SEQ ID NO: 642908 - RNA, 20 nt, Artificial Sequence
  Synthetic
cuuaugaauaguuuauuacu

SEQ ID NO: 642909 - RNA, 21 nt, Artificial Sequence
  Synthetic
acuuaugaauaguuuauuacu

SEQ ID NO: 642910 - RNA, 22 nt, Artificial Sequence
  Synthetic
uacuuaugaauaguuuauuacu

SEQ ID NO: 642911 - RNA, 23 nt, Artificial Sequence
  Synthetic
auacuuaugaauaguuuauuacu

SEQ ID NO: 642912 - RNA, 24 nt, Artificial Sequence
  Synthetic
uauacuuaugaauaguuuauuacu

SEQ ID NO: 642913 - RNA, 18 nt, Artificial Sequence
  Synthetic
cauccuguacaacuuacu

SEQ ID NO: 642914 - RNA, 19 nt, Artificial Sequence
  Synthetic
ucauccuguacaacuuacu

SEQ ID NO: 642915 - RNA, 20 nt, Artificial Sequence
  Synthetic
uucauccuguacaacuuacu

SEQ ID NO: 642916 - RNA, 21 nt, Artificial Sequence
  Synthetic
guucauccuguacaacuuacu

SEQ ID NO: 642917 - RNA, 22 nt, Artificial Sequence
  Synthetic
uguucauccuguacaacuuacu

SEQ ID NO: 642918 - RNA, 23 nt, Artificial Sequence
  Synthetic
guguucauccuguacaacuuacu

SEQ ID NO: 642919 - RNA, 24 nt, Artificial Sequence
  Synthetic
cguguucauccuguacaacuuacu

SEQ ID NO: 642920 - RNA, 18 nt, Artificial Sequence
  Synthetic
aaaucuuuacaacuuacu

SEQ ID NO: 642921 - RNA, 19 nt, Artificial Sequence
  Synthetic
caaaucuuuacaacuuacu

SEQ ID NO: 642922 - RNA, 20 nt, Artificial Sequence
  Synthetic
gcaaaucuuuacaacuuacu

SEQ ID NO: 642923 - RNA, 21 nt, Artificial Sequence
  Synthetic
ggcaaaucuuuacaacuuacu

SEQ ID NO: 642924 - RNA, 22 nt, Artificial Sequence
  Synthetic
cggcaaaucuuuacaacuuacu

SEQ ID NO: 642925 - RNA, 23 nt, Artificial Sequence
  Synthetic
acggcaaaucuuuacaacuuacu

SEQ ID NO: 642926 - RNA, 24 nt, Artificial Sequence
  Synthetic
uacggcaaaucuuuacaacuuacu

SEQ ID NO: 642927 - RNA, 18 nt, Artificial Sequence
  Synthetic
cgaugucaccaacuuacu

SEQ ID NO: 642928 - RNA, 19 nt, Artificial Sequence
  Synthetic
ccgaugucaccaacuuacu

SEQ ID NO: 642929 - RNA, 20 nt, Artificial Sequence
  Synthetic
accgaugucaccaacuuacu

SEQ ID NO: 642930 - RNA, 21 nt, Artificial Sequence
  Synthetic
aaccgaugucaccaacuuacu

SEQ ID NO: 642931 - RNA, 22 nt, Artificial Sequence
  Synthetic
gaaccgaugucaccaacuuacu

SEQ ID NO: 642932 - RNA, 23 nt, Artificial Sequence
  Synthetic
ggaaccgaugucaccaacuuacu

SEQ ID NO: 642933 - RNA, 24 nt, Artificial Sequence
  Synthetic
gggaaccgaugucaccaacuuacu

SEQ ID NO: 642934 - RNA, 18 nt, Artificial Sequence
  Synthetic
cuuuucagugaccuuacu

SEQ ID NO: 642935 - RNA, 19 nt, Artificial Sequence
  Synthetic
acuuuucagugaccuuacu

SEQ ID NO: 642936 - RNA, 20 nt, Artificial Sequence
  Synthetic
gacuuuucagugaccuuacu

SEQ ID NO: 642937 - RNA, 21 nt, Artificial Sequence
  Synthetic
agacuuuucagugaccuuacu

SEQ ID NO: 642938 - RNA, 22 nt, Artificial Sequence
  Synthetic
aagacuuuucagugaccuuacu

SEQ ID NO: 642939 - RNA, 23 nt, Artificial Sequence
  Synthetic
aaagacuuuucagugaccuuacu

SEQ ID NO: 642940 - RNA, 24 nt, Artificial Sequence
  Synthetic
aaaagacuuuucagugaccuuacu

SEQ ID NO: 642941 - RNA, 18 nt, Artificial Sequence
  Synthetic
acaaccaccgcccuuacu

SEQ ID NO: 642942 - RNA, 19 nt, Artificial Sequence
  Synthetic
cacaaccaccgcccuuacu

SEQ ID NO: 642943 - RNA, 20 nt, Artificial Sequence
  Synthetic
ccacaaccaccgcccuuacu

SEQ ID NO: 642944 - RNA, 21 nt, Artificial Sequence
  Synthetic
accacaaccaccgcccuuacu

SEQ ID NO: 642945 - RNA, 22 nt, Artificial Sequence
  Synthetic
aaccacaaccaccgcccuuacu

SEQ ID NO: 642946 - RNA, 23 nt, Artificial Sequence
  Synthetic
uaaccacaaccaccgcccuuacu

SEQ ID NO: 642947 - RNA, 24 nt, Artificial Sequence
  Synthetic
uuaaccacaaccaccgcccuuacu

SEQ ID NO: 642948 - RNA, 18 nt, Artificial Sequence
  Synthetic
ugaucugauagucuuacu

SEQ ID NO: 642949 - RNA, 19 nt, Artificial Sequence
  Synthetic
augaucugauagucuuacu

SEQ ID NO: 642950 - RNA, 20 nt, Artificial Sequence
  Synthetic
uaugaucugauagucuuacu

SEQ ID NO: 642951 - RNA, 21 nt, Artificial Sequence
  Synthetic
auaugaucugauagucuuacu

SEQ ID NO: 642952 - RNA, 22 nt, Artificial Sequence
  Synthetic
uauaugaucugauagucuuacu

SEQ ID NO: 642953 - RNA, 23 nt, Artificial Sequence
  Synthetic
uuauaugaucugauagucuuacu

SEQ ID NO: 642954 - RNA, 24 nt, Artificial Sequence
  Synthetic
uuuauaugaucugauagucuuacu

SEQ ID NO: 642955 - RNA, 18 nt, Artificial Sequence
  Synthetic
ccgcauaaaugucuuacu

SEQ ID NO: 642956 - RNA, 19 nt, Artificial Sequence
  Synthetic
gccgcauaaaugucuuacu

SEQ ID NO: 642957 - RNA, 20 nt, Artificial Sequence
  Synthetic
ggccgcauaaaugucuuacu

SEQ ID NO: 642958 - RNA, 21 nt, Artificial Sequence
  Synthetic
uggccgcauaaaugucuuacu

SEQ ID NO: 642959 - RNA, 22 nt, Artificial Sequence
  Synthetic
uuggccgcauaaaugucuuacu

SEQ ID NO: 642960 - RNA, 23 nt, Artificial Sequence
  Synthetic
guuggccgcauaaaugucuuacu

SEQ ID NO: 642961 - RNA, 24 nt, Artificial Sequence
  Synthetic
uguuggccgcauaaaugucuuacu

SEQ ID NO: 642962 - RNA, 18 nt, Artificial Sequence
  Synthetic
ccuguaaucccaguuacu

SEQ ID NO: 642963 - RNA, 19 nt, Artificial Sequence
  Synthetic
gccuguaaucccaguuacu

SEQ ID NO: 642964 - RNA, 20 nt, Artificial Sequence
  Synthetic
ugccuguaaucccaguuacu

SEQ ID NO: 642965 - RNA, 21 nt, Artificial Sequence
  Synthetic
gugccuguaaucccaguuacu

SEQ ID NO: 642966 - RNA, 22 nt, Artificial Sequence
  Synthetic
ugugccuguaaucccaguuacu

SEQ ID NO: 642967 - RNA, 23 nt, Artificial Sequence
  Synthetic
augugccuguaaucccaguuacu

SEQ ID NO: 642968 - RNA, 24 nt, Artificial Sequence
  Synthetic
caugugccuguaaucccaguuacu

SEQ ID NO: 642969 - RNA, 18 nt, Artificial Sequence
  Synthetic
ugagaaaaaguaguuacu

SEQ ID NO: 642970 - RNA, 19 nt, Artificial Sequence
  Synthetic
uugagaaaaaguaguuacu

SEQ ID NO: 642971 - RNA, 20 nt, Artificial Sequence
  Synthetic
auugagaaaaaguaguuacu

SEQ ID NO: 642972 - RNA, 21 nt, Artificial Sequence
  Synthetic
cauugagaaaaaguaguuacu

SEQ ID NO: 642973 - RNA, 22 nt, Artificial Sequence
  Synthetic
ccauugagaaaaaguaguuacu

SEQ ID NO: 642974 - RNA, 23 nt, Artificial Sequence
  Synthetic
gccauugagaaaaaguaguuacu

SEQ ID NO: 642975 - RNA, 24 nt, Artificial Sequence
  Synthetic
ugccauugagaaaaaguaguuacu

SEQ ID NO: 642976 - RNA, 18 nt, Artificial Sequence
  Synthetic
guaaggauuuuaguuacu

SEQ ID NO: 642977 - RNA, 19 nt, Artificial Sequence
  Synthetic
aguaaggauuuuaguuacu

SEQ ID NO: 642978 - RNA, 20 nt, Artificial Sequence
  Synthetic
uaguaaggauuuuaguuacu

SEQ ID NO: 642979 - RNA, 21 nt, Artificial Sequence
  Synthetic
auaguaaggauuuuaguuacu

SEQ ID NO: 642980 - RNA, 22 nt, Artificial Sequence
  Synthetic
uauaguaaggauuuuaguuacu

SEQ ID NO: 642981 - RNA, 23 nt, Artificial Sequence
  Synthetic
auauaguaaggauuuuaguuacu

SEQ ID NO: 642982 - RNA, 24 nt, Artificial Sequence
  Synthetic
aauauaguaaggauuuuaguuacu

SEQ ID NO: 642983 - RNA, 18 nt, Artificial Sequence
  Synthetic
cuuuaugaaccauuuacu

SEQ ID NO: 642984 - RNA, 19 nt, Artificial Sequence
  Synthetic
ccuuuaugaaccauuuacu

SEQ ID NO: 642985 - RNA, 20 nt, Artificial Sequence
  Synthetic
uccuuuaugaaccauuuacu

SEQ ID NO: 642986 - RNA, 21 nt, Artificial Sequence
  Synthetic
uuccuuuaugaaccauuuacu

SEQ ID NO: 642987 - RNA, 22 nt, Artificial Sequence
  Synthetic
cuuccuuuaugaaccauuuacu

SEQ ID NO: 642988 - RNA, 23 nt, Artificial Sequence
  Synthetic
ccuuccuuuaugaaccauuuacu

SEQ ID NO: 642989 - RNA, 24 nt, Artificial Sequence
  Synthetic
gccuuccuuuaugaaccauuuacu

SEQ ID NO: 642990 - RNA, 18 nt, Artificial Sequence
  Synthetic
uuaaagggcauauuuacu

SEQ ID NO: 642991 - RNA, 19 nt, Artificial Sequence
  Synthetic
auuaaagggcauauuuacu

SEQ ID NO: 642992 - RNA, 20 nt, Artificial Sequence
  Synthetic
uauuaaagggcauauuuacu

SEQ ID NO: 642993 - RNA, 21 nt, Artificial Sequence
  Synthetic
auauuaaagggcauauuuacu

SEQ ID NO: 642994 - RNA, 22 nt, Artificial Sequence
  Synthetic
aauauuaaagggcauauuuacu

SEQ ID NO: 642995 - RNA, 23 nt, Artificial Sequence
  Synthetic
uaauauuaaagggcauauuuacu

SEQ ID NO: 642996 - RNA, 24 nt, Artificial Sequence
  Synthetic
uuaauauuaaagggcauauuuacu

SEQ ID NO: 642997 - RNA, 18 nt, Artificial Sequence
  Synthetic
cauauucuccuauuuacu

SEQ ID NO: 642998 - RNA, 19 nt, Artificial Sequence
  Synthetic
gcauauucuccuauuuacu

SEQ ID NO: 642999 - RNA, 20 nt, Artificial Sequence
  Synthetic
agcauauucuccuauuuacu

SEQ ID NO: 643000 - RNA, 21 nt, Artificial Sequence
  Synthetic
aagcauauucuccuauuuacu

SEQ ID NO: 643001 - RNA, 22 nt, Artificial Sequence
  Synthetic
aaagcauauucuccuauuuacu

SEQ ID NO: 643002 - RNA, 23 nt, Artificial Sequence
  Synthetic
aaaagcauauucuccuauuuacu

SEQ ID NO: 643003 - RNA, 24 nt, Artificial Sequence
  Synthetic
aaaaagcauauucuccuauuuacu

SEQ ID NO: 643004 - RNA, 18 nt, Artificial Sequence
  Synthetic
uucauuauucuauuuacu

SEQ ID NO: 643005 - RNA, 19 nt, Artificial Sequence
  Synthetic
cuucauuauucuauuuacu

SEQ ID NO: 643006 - RNA, 20 nt, Artificial Sequence
  Synthetic
ucuucauuauucuauuuacu

SEQ ID NO: 643007 - RNA, 21 nt, Artificial Sequence
  Synthetic
cucuucauuauucuauuuacu

SEQ ID NO: 643008 - RNA, 22 nt, Artificial Sequence
  Synthetic
ccucuucauuauucuauuuacu

SEQ ID NO: 643009 - RNA, 23 nt, Artificial Sequence
  Synthetic
gccucuucauuauucuauuuacu

SEQ ID NO: 643010 - RNA, 24 nt, Artificial Sequence
  Synthetic
agccucuucauuauucuauuuacu

SEQ ID NO: 643011 - RNA, 18 nt, Artificial Sequence
  Synthetic
ccuuaauaaaacuuuacu

SEQ ID NO: 643012 - RNA, 19 nt, Artificial Sequence
  Synthetic
uccuuaauaaaacuuuacu

SEQ ID NO: 643013 - RNA, 20 nt, Artificial Sequence
  Synthetic
auccuuaauaaaacuuuacu

SEQ ID NO: 643014 - RNA, 21 nt, Artificial Sequence
  Synthetic
aauccuuaauaaaacuuuacu

SEQ ID NO: 643015 - RNA, 22 nt, Artificial Sequence
  Synthetic
aaauccuuaauaaaacuuuacu

SEQ ID NO: 643016 - RNA, 23 nt, Artificial Sequence
  Synthetic
gaaauccuuaauaaaacuuuacu

SEQ ID NO: 643017 - RNA, 24 nt, Artificial Sequence
  Synthetic
ugaaauccuuaauaaaacuuuacu

SEQ ID NO: 643018 - RNA, 18 nt, Artificial Sequence
  Synthetic
ucaucuacgaacuuuacu

SEQ ID NO: 643019 - RNA, 19 nt, Artificial Sequence
  Synthetic
cucaucuacgaacuuuacu

SEQ ID NO: 643020 - RNA, 20 nt, Artificial Sequence
  Synthetic
ucucaucuacgaacuuuacu

SEQ ID NO: 643021 - RNA, 21 nt, Artificial Sequence
  Synthetic
uucucaucuacgaacuuuacu

SEQ ID NO: 643022 - RNA, 22 nt, Artificial Sequence
  Synthetic
cuucucaucuacgaacuuuacu

SEQ ID NO: 643023 - RNA, 23 nt, Artificial Sequence
  Synthetic
ucuucucaucuacgaacuuuacu

SEQ ID NO: 643024 - RNA, 24 nt, Artificial Sequence
  Synthetic
cucuucucaucuacgaacuuuacu

SEQ ID NO: 643025 - RNA, 18 nt, Artificial Sequence
  Synthetic
uucuaaaauaacuuuacu

SEQ ID NO: 643026 - RNA, 19 nt, Artificial Sequence
  Synthetic
uuucuaaaauaacuuuacu

SEQ ID NO: 643027 - RNA, 20 nt, Artificial Sequence
  Synthetic
uuuucuaaaauaacuuuacu

SEQ ID NO: 643028 - RNA, 21 nt, Artificial Sequence
  Synthetic
auuuucuaaaauaacuuuacu

SEQ ID NO: 643029 - RNA, 22 nt, Artificial Sequence
  Synthetic
uauuuucuaaaauaacuuuacu

SEQ ID NO: 643030 - RNA, 23 nt, Artificial Sequence
  Synthetic
auauuuucuaaaauaacuuuacu

SEQ ID NO: 643031 - RNA, 24 nt, Artificial Sequence
  Synthetic
gauauuuucuaaaauaacuuuacu

SEQ ID NO: 643032 - RNA, 18 nt, Artificial Sequence
  Synthetic
cagacuaacagcuuuacu

SEQ ID NO: 643033 - RNA, 19 nt, Artificial Sequence
  Synthetic
ucagacuaacagcuuuacu

SEQ ID NO: 643034 - RNA, 20 nt, Artificial Sequence
  Synthetic
gucagacuaacagcuuuacu

SEQ ID NO: 643035 - RNA, 21 nt, Artificial Sequence
  Synthetic
agucagacuaacagcuuuacu

SEQ ID NO: 643036 - RNA, 22 nt, Artificial Sequence
  Synthetic
uagucagacuaacagcuuuacu

SEQ ID NO: 643037 - RNA, 23 nt, Artificial Sequence
  Synthetic
uuagucagacuaacagcuuuacu

SEQ ID NO: 643038 - RNA, 24 nt, Artificial Sequence
  Synthetic
auuagucagacuaacagcuuuacu

SEQ ID NO: 643039 - RNA, 18 nt, Artificial Sequence
  Synthetic
auacacaguagcuuuacu

SEQ ID NO: 643040 - RNA, 19 nt, Artificial Sequence
  Synthetic
cauacacaguagcuuuacu

SEQ ID NO: 643041 - RNA, 20 nt, Artificial Sequence
  Synthetic
acauacacaguagcuuuacu

SEQ ID NO: 643042 - RNA, 21 nt, Artificial Sequence
  Synthetic
uacauacacaguagcuuuacu

SEQ ID NO: 643043 - RNA, 22 nt, Artificial Sequence
  Synthetic
guacauacacaguagcuuuacu

SEQ ID NO: 643044 - RNA, 23 nt, Artificial Sequence
  Synthetic
gguacauacacaguagcuuuacu

SEQ ID NO: 643045 - RNA, 24 nt, Artificial Sequence
  Synthetic
agguacauacacaguagcuuuacu

SEQ ID NO: 643046 - RNA, 18 nt, Artificial Sequence
  Synthetic
gaaaaccaaaucuuuacu

SEQ ID NO: 643047 - RNA, 19 nt, Artificial Sequence
  Synthetic
ugaaaaccaaaucuuuacu

SEQ ID NO: 643048 - RNA, 20 nt, Artificial Sequence
  Synthetic
cugaaaaccaaaucuuuacu

SEQ ID NO: 643049 - RNA, 21 nt, Artificial Sequence
  Synthetic
ccugaaaaccaaaucuuuacu

SEQ ID NO: 643050 - RNA, 22 nt, Artificial Sequence
  Synthetic
uccugaaaaccaaaucuuuacu

SEQ ID NO: 643051 - RNA, 23 nt, Artificial Sequence
  Synthetic
uuccugaaaaccaaaucuuuacu

SEQ ID NO: 643052 - RNA, 24 nt, Artificial Sequence
  Synthetic
uuuccugaaaaccaaaucuuuacu

SEQ ID NO: 643053 - RNA, 18 nt, Artificial Sequence
  Synthetic
uucuugcgacaguuuacu

SEQ ID NO: 643054 - RNA, 19 nt, Artificial Sequence
  Synthetic
guucuugcgacaguuuacu

SEQ ID NO: 643055 - RNA, 20 nt, Artificial Sequence
  Synthetic
uguucuugcgacaguuuacu

SEQ ID NO: 643056 - RNA, 21 nt, Artificial Sequence
  Synthetic
uuguucuugcgacaguuuacu

SEQ ID NO: 643057 - RNA, 22 nt, Artificial Sequence
  Synthetic
uuuguucuugcgacaguuuacu

SEQ ID NO: 643058 - RNA, 23 nt, Artificial Sequence
  Synthetic
uuuuguucuugcgacaguuuacu

SEQ ID NO: 643059 - RNA, 24 nt, Artificial Sequence
  Synthetic
uuuuuguucuugcgacaguuuacu

SEQ ID NO: 643060 - RNA, 18 nt, Artificial Sequence
  Synthetic
uccccaaaugaguuuacu

SEQ ID NO: 643061 - RNA, 19 nt, Artificial Sequence
  Synthetic
uuccccaaaugaguuuacu

SEQ ID NO: 643062 - RNA, 20 nt, Artificial Sequence
  Synthetic
uuuccccaaaugaguuuacu

SEQ ID NO: 643063 - RNA, 21 nt, Artificial Sequence
  Synthetic
cuuuccccaaaugaguuuacu

SEQ ID NO: 643064 - RNA, 22 nt, Artificial Sequence
  Synthetic
ucuuuccccaaaugaguuuacu

SEQ ID NO: 643065 - RNA, 23 nt, Artificial Sequence
  Synthetic
uucuuuccccaaaugaguuuacu

SEQ ID NO: 643066 - RNA, 24 nt, Artificial Sequence
  Synthetic
uuucuuuccccaaaugaguuuacu

SEQ ID NO: 643067 - RNA, 18 nt, Artificial Sequence
  Synthetic
aggacuucccuguuuacu

SEQ ID NO: 643068 - RNA, 19 nt, Artificial Sequence
  Synthetic
aaggacuucccuguuuacu

SEQ ID NO: 643069 - RNA, 20 nt, Artificial Sequence
  Synthetic
uaaggacuucccuguuuacu

SEQ ID NO: 643070 - RNA, 21 nt, Artificial Sequence
  Synthetic
auaaggacuucccuguuuacu

SEQ ID NO: 643071 - RNA, 22 nt, Artificial Sequence
  Synthetic
cauaaggacuucccuguuuacu

SEQ ID NO: 643072 - RNA, 23 nt, Artificial Sequence
  Synthetic
acauaaggacuucccuguuuacu

SEQ ID NO: 643073 - RNA, 24 nt, Artificial Sequence
  Synthetic
aacauaaggacuucccuguuuacu

SEQ ID NO: 643074 - RNA, 18 nt, Artificial Sequence
  Synthetic
auaucuuuagauuuuacu

SEQ ID NO: 643075 - RNA, 19 nt, Artificial Sequence
  Synthetic
gauaucuuuagauuuuacu

SEQ ID NO: 643076 - RNA, 20 nt, Artificial Sequence
  Synthetic
agauaucuuuagauuuuacu

SEQ ID NO: 643077 - RNA, 21 nt, Artificial Sequence
  Synthetic
aagauaucuuuagauuuuacu

SEQ ID NO: 643078 - RNA, 22 nt, Artificial Sequence
  Synthetic
aaagauaucuuuagauuuuacu

SEQ ID NO: 643079 - RNA, 23 nt, Artificial Sequence
  Synthetic
caaagauaucuuuagauuuuacu

SEQ ID NO: 643080 - RNA, 24 nt, Artificial Sequence
  Synthetic
ucaaagauaucuuuagauuuuacu

SEQ ID NO: 643081 - RNA, 18 nt, Artificial Sequence
  Synthetic
acugcaauaccuuuuacu

SEQ ID NO: 643082 - RNA, 19 nt, Artificial Sequence
  Synthetic
aacugcaauaccuuuuacu

SEQ ID NO: 643083 - RNA, 20 nt, Artificial Sequence
  Synthetic
uaacugcaauaccuuuuacu

SEQ ID NO: 643084 - RNA, 21 nt, Artificial Sequence
  Synthetic
auaacugcaauaccuuuuacu

SEQ ID NO: 643085 - RNA, 22 nt, Artificial Sequence
  Synthetic
gauaacugcaauaccuuuuacu

SEQ ID NO: 643086 - RNA, 23 nt, Artificial Sequence
  Synthetic
ggauaacugcaauaccuuuuacu

SEQ ID NO: 643087 - RNA, 24 nt, Artificial Sequence
  Synthetic
aggauaacugcaauaccuuuuacu

SEQ ID NO: 643088 - RNA, 18 nt, Artificial Sequence
  Synthetic
caaaucucuucuuuuacu

SEQ ID NO: 643089 - RNA, 19 nt, Artificial Sequence
  Synthetic
gcaaaucucuucuuuuacu

SEQ ID NO: 643090 - RNA, 20 nt, Artificial Sequence
  Synthetic
ugcaaaucucuucuuuuacu

SEQ ID NO: 643091 - RNA, 21 nt, Artificial Sequence
  Synthetic
uugcaaaucucuucuuuuacu

SEQ ID NO: 643092 - RNA, 22 nt, Artificial Sequence
  Synthetic
auugcaaaucucuucuuuuacu

SEQ ID NO: 643093 - RNA, 23 nt, Artificial Sequence
  Synthetic
cauugcaaaucucuucuuuuacu

SEQ ID NO: 643094 - RNA, 24 nt, Artificial Sequence
  Synthetic
gcauugcaaaucucuucuuuuacu

SEQ ID NO: 643095 - RNA, 18 nt, Artificial Sequence
  Synthetic
cauuaaaggauuuuuacu

SEQ ID NO: 643096 - RNA, 19 nt, Artificial Sequence
  Synthetic
ccauuaaaggauuuuuacu

SEQ ID NO: 643097 - RNA, 20 nt, Artificial Sequence
  Synthetic
accauuaaaggauuuuuacu

SEQ ID NO: 643098 - RNA, 21 nt, Artificial Sequence
  Synthetic
aaccauuaaaggauuuuuacu

SEQ ID NO: 643099 - RNA, 22 nt, Artificial Sequence
  Synthetic
caaccauuaaaggauuuuuacu

SEQ ID NO: 643100 - RNA, 23 nt, Artificial Sequence
  Synthetic
ccaaccauuaaaggauuuuuacu

SEQ ID NO: 643101 - RNA, 24 nt, Artificial Sequence
  Synthetic
uccaaccauuaaaggauuuuuacu

SEQ ID NO: 643102 - RNA, 18 nt, Artificial Sequence
  Synthetic
uuacuuauccuuuuuacu

SEQ ID NO: 643103 - RNA, 19 nt, Artificial Sequence
  Synthetic
guuacuuauccuuuuuacu

SEQ ID NO: 643104 - RNA, 20 nt, Artificial Sequence
  Synthetic
uguuacuuauccuuuuuacu

SEQ ID NO: 643105 - RNA, 21 nt, Artificial Sequence
  Synthetic
auguuacuuauccuuuuuacu

SEQ ID NO: 643106 - RNA, 22 nt, Artificial Sequence
  Synthetic
aauguuacuuauccuuuuuacu

SEQ ID NO: 643107 - RNA, 23 nt, Artificial Sequence
  Synthetic
aaauguuacuuauccuuuuuacu

SEQ ID NO: 643108 - RNA, 24 nt, Artificial Sequence
  Synthetic
aaaauguuacuuauccuuuuuacu

SEQ ID NO: 643109 - RNA, 18 nt, Artificial Sequence
  Synthetic
caaaauuccuuuuuuacu

SEQ ID NO: 643110 - RNA, 19 nt, Artificial Sequence
  Synthetic
ccaaaauuccuuuuuuacu

SEQ ID NO: 643111 - RNA, 20 nt, Artificial Sequence
  Synthetic
accaaaauuccuuuuuuacu

SEQ ID NO: 643112 - RNA, 21 nt, Artificial Sequence
  Synthetic
aaccaaaauuccuuuuuuacu

SEQ ID NO: 643113 - RNA, 22 nt, Artificial Sequence
  Synthetic
caaccaaaauuccuuuuuuacu

SEQ ID NO: 643114 - RNA, 23 nt, Artificial Sequence
  Synthetic
acaaccaaaauuccuuuuuuacu

SEQ ID NO: 643115 - RNA, 24 nt, Artificial Sequence
  Synthetic
aacaaccaaaauuccuuuuuuacu

SEQ ID NO: 643116 - RNA, 18 nt, Artificial Sequence
  Synthetic
uuucccaaacaaaaaccu

SEQ ID NO: 643117 - RNA, 19 nt, Artificial Sequence
  Synthetic
uuuucccaaacaaaaaccu

SEQ ID NO: 643118 - RNA, 20 nt, Artificial Sequence
  Synthetic
uuuuucccaaacaaaaaccu

SEQ ID NO: 643119 - RNA, 21 nt, Artificial Sequence
  Synthetic
cuuuuucccaaacaaaaaccu

SEQ ID NO: 643120 - RNA, 22 nt, Artificial Sequence
  Synthetic
ucuuuuucccaaacaaaaaccu

SEQ ID NO: 643121 - RNA, 23 nt, Artificial Sequence
  Synthetic
uucuuuuucccaaacaaaaaccu

SEQ ID NO: 643122 - RNA, 24 nt, Artificial Sequence
  Synthetic
uuucuuuuucccaaacaaaaaccu

SEQ ID NO: 643123 - RNA, 18 nt, Artificial Sequence
  Synthetic
acaguauacuaaaaaccu

SEQ ID NO: 643124 - RNA, 19 nt, Artificial Sequence
  Synthetic
uacaguauacuaaaaaccu

SEQ ID NO: 643125 - RNA, 20 nt, Artificial Sequence
  Synthetic
auacaguauacuaaaaaccu

SEQ ID NO: 643126 - RNA, 21 nt, Artificial Sequence
  Synthetic
aauacaguauacuaaaaaccu

SEQ ID NO: 643127 - RNA, 22 nt, Artificial Sequence
  Synthetic
uaauacaguauacuaaaaaccu

SEQ ID NO: 643128 - RNA, 23 nt, Artificial Sequence
  Synthetic
guaauacaguauacuaaaaaccu

SEQ ID NO: 643129 - RNA, 24 nt, Artificial Sequence
  Synthetic
uguaauacaguauacuaaaaaccu

SEQ ID NO: 643130 - RNA, 18 nt, Artificial Sequence
  Synthetic
aaaaaauuuuaaaaaccu

SEQ ID NO: 643131 - RNA, 19 nt, Artificial Sequence
  Synthetic
aaaaaaauuuuaaaaaccu

SEQ ID NO: 643132 - RNA, 20 nt, Artificial Sequence
  Synthetic
aaaaaaaauuuuaaaaaccu

SEQ ID NO: 643133 - RNA, 21 nt, Artificial Sequence
  Synthetic
aaaaaaaaauuuuaaaaaccu

SEQ ID NO: 643134 - RNA, 22 nt, Artificial Sequence
  Synthetic
aaaaaaaaaauuuuaaaaaccu

SEQ ID NO: 643135 - RNA, 23 nt, Artificial Sequence
  Synthetic
uaaaaaaaaaauuuuaaaaaccu

SEQ ID NO: 643136 - RNA, 24 nt, Artificial Sequence
  Synthetic
auaaaaaaaaaauuuuaaaaaccu

SEQ ID NO: 643137 - RNA, 18 nt, Artificial Sequence
  Synthetic
aaccacauaccaaaaccu

SEQ ID NO: 643138 - RNA, 19 nt, Artificial Sequence
  Synthetic
aaaccacauaccaaaaccu

SEQ ID NO: 643139 - RNA, 20 nt, Artificial Sequence
  Synthetic
aaaaccacauaccaaaaccu

SEQ ID NO: 643140 - RNA, 21 nt, Artificial Sequence
  Synthetic
aaaaaccacauaccaaaaccu

SEQ ID NO: 643141 - RNA, 22 nt, Artificial Sequence
  Synthetic
gaaaaaccacauaccaaaaccu

SEQ ID NO: 643142 - RNA, 23 nt, Artificial Sequence
  Synthetic
agaaaaaccacauaccaaaaccu

SEQ ID NO: 643143 - RNA, 24 nt, Artificial Sequence
  Synthetic
aagaaaaaccacauaccaaaaccu

SEQ ID NO: 643144 - RNA, 18 nt, Artificial Sequence
  Synthetic
cacaauuuaucaaaaccu

SEQ ID NO: 643145 - RNA, 19 nt, Artificial Sequence
  Synthetic
acacaauuuaucaaaaccu

SEQ ID NO: 643146 - RNA, 20 nt, Artificial Sequence
  Synthetic
gacacaauuuaucaaaaccu

SEQ ID NO: 643147 - RNA, 21 nt, Artificial Sequence
  Synthetic
ugacacaauuuaucaaaaccu

SEQ ID NO: 643148 - RNA, 22 nt, Artificial Sequence
  Synthetic
gugacacaauuuaucaaaaccu

SEQ ID NO: 643149 - RNA, 23 nt, Artificial Sequence
  Synthetic
agugacacaauuuaucaaaaccu

SEQ ID NO: 643150 - RNA, 24 nt, Artificial Sequence
  Synthetic
uagugacacaauuuaucaaaaccu

SEQ ID NO: 643151 - RNA, 18 nt, Artificial Sequence
  Synthetic
aaaaucuauucaaaaccu

SEQ ID NO: 643152 - RNA, 19 nt, Artificial Sequence
  Synthetic
caaaaucuauucaaaaccu

SEQ ID NO: 643153 - RNA, 20 nt, Artificial Sequence
  Synthetic
acaaaaucuauucaaaaccu

SEQ ID NO: 643154 - RNA, 21 nt, Artificial Sequence
  Synthetic
aacaaaaucuauucaaaaccu

SEQ ID NO: 643155 - RNA, 22 nt, Artificial Sequence
  Synthetic
caacaaaaucuauucaaaaccu

SEQ ID NO: 643156 - RNA, 23 nt, Artificial Sequence
  Synthetic
acaacaaaaucuauucaaaaccu

SEQ ID NO: 643157 - RNA, 24 nt, Artificial Sequence
  Synthetic
cacaacaaaaucuauucaaaaccu

SEQ ID NO: 643158 - RNA, 18 nt, Artificial Sequence
  Synthetic
aauuccuuaggaaaaccu

SEQ ID NO: 643159 - RNA, 19 nt, Artificial Sequence
  Synthetic
uaauuccuuaggaaaaccu

SEQ ID NO: 643160 - RNA, 20 nt, Artificial Sequence
  Synthetic
uuaauuccuuaggaaaaccu

SEQ ID NO: 643161 - RNA, 21 nt, Artificial Sequence
  Synthetic
uuuaauuccuuaggaaaaccu

SEQ ID NO: 643162 - RNA, 22 nt, Artificial Sequence
  Synthetic
cuuuaauuccuuaggaaaaccu

SEQ ID NO: 643163 - RNA, 23 nt, Artificial Sequence
  Synthetic
ccuuuaauuccuuaggaaaaccu

SEQ ID NO: 643164 - RNA, 24 nt, Artificial Sequence
  Synthetic
cccuuuaauuccuuaggaaaaccu

SEQ ID NO: 643165 - RNA, 18 nt, Artificial Sequence
  Synthetic
cuaccuacaugaaaaccu

SEQ ID NO: 643166 - RNA, 19 nt, Artificial Sequence
  Synthetic
ucuaccuacaugaaaaccu

SEQ ID NO: 643167 - RNA, 20 nt, Artificial Sequence
  Synthetic
uucuaccuacaugaaaaccu

SEQ ID NO: 643168 - RNA, 21 nt, Artificial Sequence
  Synthetic
cuucuaccuacaugaaaaccu

SEQ ID NO: 643169 - RNA, 22 nt, Artificial Sequence
  Synthetic
ucuucuaccuacaugaaaaccu

SEQ ID NO: 643170 - RNA, 23 nt, Artificial Sequence
  Synthetic
uucuucuaccuacaugaaaaccu

SEQ ID NO: 643171 - RNA, 24 nt, Artificial Sequence
  Synthetic
uuucuucuaccuacaugaaaaccu

SEQ ID NO: 643172 - RNA, 18 nt, Artificial Sequence
  Synthetic
caggucaggugaaaaccu

SEQ ID NO: 643173 - RNA, 19 nt, Artificial Sequence
  Synthetic
acaggucaggugaaaaccu

SEQ ID NO: 643174 - RNA, 20 nt, Artificial Sequence
  Synthetic
gacaggucaggugaaaaccu

SEQ ID NO: 643175 - RNA, 21 nt, Artificial Sequence
  Synthetic
agacaggucaggugaaaaccu

SEQ ID NO: 643176 - RNA, 22 nt, Artificial Sequence
  Synthetic
gagacaggucaggugaaaaccu

SEQ ID NO: 643177 - RNA, 23 nt, Artificial Sequence
  Synthetic
ggagacaggucaggugaaaaccu

SEQ ID NO: 643178 - RNA, 24 nt, Artificial Sequence
  Synthetic
uggagacaggucaggugaaaaccu

SEQ ID NO: 643179 - RNA, 18 nt, Artificial Sequence
  Synthetic
aagcaaguauuaaaaccu

SEQ ID NO: 643180 - RNA, 19 nt, Artificial Sequence
  Synthetic
aaagcaaguauuaaaaccu

SEQ ID NO: 643181 - RNA, 20 nt, Artificial Sequence
  Synthetic
uaaagcaaguauuaaaaccu

SEQ ID NO: 643182 - RNA, 21 nt, Artificial Sequence
  Synthetic
guaaagcaaguauuaaaaccu

SEQ ID NO: 643183 - RNA, 22 nt, Artificial Sequence
  Synthetic
gguaaagcaaguauuaaaaccu

SEQ ID NO: 643184 - RNA, 23 nt, Artificial Sequence
  Synthetic
ugguaaagcaaguauuaaaaccu

SEQ ID NO: 643185 - RNA, 24 nt, Artificial Sequence
  Synthetic
cugguaaagcaaguauuaaaaccu

SEQ ID NO: 643186 - RNA, 21 nt, Artificial Sequence
  Synthetic
uaucugaucuuugacaaaccu

SEQ ID NO: 643187 - RNA, 22 nt, Artificial Sequence
  Synthetic
cuaucugaucuuugacaaaccu

SEQ ID NO: 643188 - RNA, 23 nt, Artificial Sequence
  Synthetic
acuaucugaucuuugacaaaccu

SEQ ID NO: 643189 - RNA, 24 nt, Artificial Sequence
  Synthetic
aacuaucugaucuuugacaaaccu

SEQ ID NO: 643190 - RNA, 18 nt, Artificial Sequence
  Synthetic
uugcccuacugcaaaccu

SEQ ID NO: 643191 - RNA, 19 nt, Artificial Sequence
  Synthetic
uuugcccuacugcaaaccu

SEQ ID NO: 643192 - RNA, 20 nt, Artificial Sequence
  Synthetic
auuugcccuacugcaaaccu

SEQ ID NO: 643193 - RNA, 21 nt, Artificial Sequence
  Synthetic
cauuugcccuacugcaaaccu

SEQ ID NO: 643194 - RNA, 22 nt, Artificial Sequence
  Synthetic
gcauuugcccuacugcaaaccu

SEQ ID NO: 643195 - RNA, 23 nt, Artificial Sequence
  Synthetic
agcauuugcccuacugcaaaccu

SEQ ID NO: 643196 - RNA, 24 nt, Artificial Sequence
  Synthetic
aagcauuugcccuacugcaaaccu

SEQ ID NO: 643197 - RNA, 18 nt, Artificial Sequence
  Synthetic
caaugaccccagaaaccu

SEQ ID NO: 643198 - RNA, 19 nt, Artificial Sequence
  Synthetic
acaaugaccccagaaaccu

SEQ ID NO: 643199 - RNA, 20 nt, Artificial Sequence
  Synthetic
aacaaugaccccagaaaccu

SEQ ID NO: 643200 - RNA, 21 nt, Artificial Sequence
  Synthetic
caacaaugaccccagaaaccu

SEQ ID NO: 643201 - RNA, 22 nt, Artificial Sequence
  Synthetic
ucaacaaugaccccagaaaccu

SEQ ID NO: 643202 - RNA, 23 nt, Artificial Sequence
  Synthetic
uucaacaaugaccccagaaaccu

SEQ ID NO: 643203 - RNA, 24 nt, Artificial Sequence
  Synthetic
cuucaacaaugaccccagaaaccu

SEQ ID NO: 643204 - RNA, 18 nt, Artificial Sequence
  Synthetic
auuccuuaauagaaaccu

SEQ ID NO: 643205 - RNA, 19 nt, Artificial Sequence
  Synthetic
aauuccuuaauagaaaccu

SEQ ID NO: 643206 - RNA, 20 nt, Artificial Sequence
  Synthetic
uaauuccuuaauagaaaccu

SEQ ID NO: 643207 - RNA, 21 nt, Artificial Sequence
  Synthetic
guaauuccuuaauagaaaccu

SEQ ID NO: 643208 - RNA, 22 nt, Artificial Sequence
  Synthetic
aguaauuccuuaauagaaaccu

SEQ ID NO: 643209 - RNA, 23 nt, Artificial Sequence
  Synthetic
uaguaauuccuuaauagaaaccu

SEQ ID NO: 643210 - RNA, 24 nt, Artificial Sequence
  Synthetic
cuaguaauuccuuaauagaaaccu

SEQ ID NO: 643211 - RNA, 18 nt, Artificial Sequence
  Synthetic
caugcaacugcuaaaccu

SEQ ID NO: 643212 - RNA, 19 nt, Artificial Sequence
  Synthetic
gcaugcaacugcuaaaccu

SEQ ID NO: 643213 - RNA, 20 nt, Artificial Sequence
  Synthetic
agcaugcaacugcuaaaccu

SEQ ID NO: 643214 - RNA, 21 nt, Artificial Sequence
  Synthetic
cagcaugcaacugcuaaaccu

SEQ ID NO: 643215 - RNA, 22 nt, Artificial Sequence
  Synthetic
acagcaugcaacugcuaaaccu

SEQ ID NO: 643216 - RNA, 23 nt, Artificial Sequence
  Synthetic
uacagcaugcaacugcuaaaccu

SEQ ID NO: 643217 - RNA, 24 nt, Artificial Sequence
  Synthetic
uuacagcaugcaacugcuaaaccu

SEQ ID NO: 643218 - RNA, 18 nt, Artificial Sequence
  Synthetic
ggagucccagguaaaccu

SEQ ID NO: 643219 - RNA, 19 nt, Artificial Sequence
  Synthetic
uggagucccagguaaaccu

SEQ ID NO: 643220 - RNA, 20 nt, Artificial Sequence
  Synthetic
cuggagucccagguaaaccu

SEQ ID NO: 643221 - RNA, 21 nt, Artificial Sequence
  Synthetic
ucuggagucccagguaaaccu

SEQ ID NO: 643222 - RNA, 22 nt, Artificial Sequence
  Synthetic
cucuggagucccagguaaaccu

SEQ ID NO: 643223 - RNA, 23 nt, Artificial Sequence
  Synthetic
gcucuggagucccagguaaaccu

SEQ ID NO: 643224 - RNA, 24 nt, Artificial Sequence
  Synthetic
ugcucuggagucccagguaaaccu

SEQ ID NO: 643225 - RNA, 18 nt, Artificial Sequence
  Synthetic
cucagcucacuuaaaccu

SEQ ID NO: 643226 - RNA, 19 nt, Artificial Sequence
  Synthetic
ucucagcucacuuaaaccu

SEQ ID NO: 643227 - RNA, 20 nt, Artificial Sequence
  Synthetic
aucucagcucacuuaaaccu

SEQ ID NO: 643228 - RNA, 21 nt, Artificial Sequence
  Synthetic
aaucucagcucacuuaaaccu

SEQ ID NO: 643229 - RNA, 22 nt, Artificial Sequence
  Synthetic
caaucucagcucacuuaaaccu

SEQ ID NO: 643230 - RNA, 23 nt, Artificial Sequence
  Synthetic
acaaucucagcucacuuaaaccu

SEQ ID NO: 643231 - RNA, 24 nt, Artificial Sequence
  Synthetic
cacaaucucagcucacuuaaaccu

SEQ ID NO: 643232 - RNA, 18 nt, Artificial Sequence
  Synthetic
gaauuuucaccacaaccu

SEQ ID NO: 643233 - RNA, 19 nt, Artificial Sequence
  Synthetic
ugaauuuucaccacaaccu

SEQ ID NO: 643234 - RNA, 20 nt, Artificial Sequence
  Synthetic
uugaauuuucaccacaaccu

SEQ ID NO: 643235 - RNA, 21 nt, Artificial Sequence
  Synthetic
auugaauuuucaccacaaccu

SEQ ID NO: 643236 - RNA, 22 nt, Artificial Sequence
  Synthetic
cauugaauuuucaccacaaccu

SEQ ID NO: 643237 - RNA, 23 nt, Artificial Sequence
  Synthetic
ucauugaauuuucaccacaaccu

SEQ ID NO: 643238 - RNA, 24 nt, Artificial Sequence
  Synthetic
cucauugaauuuucaccacaaccu

SEQ ID NO: 643239 - RNA, 18 nt, Artificial Sequence
  Synthetic
ccauuaagaaggcaaccu

SEQ ID NO: 643240 - RNA, 19 nt, Artificial Sequence
  Synthetic
cccauuaagaaggcaaccu

SEQ ID NO: 643241 - RNA, 20 nt, Artificial Sequence
  Synthetic
acccauuaagaaggcaaccu

SEQ ID NO: 643242 - RNA, 21 nt, Artificial Sequence
  Synthetic
aacccauuaagaaggcaaccu

SEQ ID NO: 643243 - RNA, 22 nt, Artificial Sequence
  Synthetic
aaacccauuaagaaggcaaccu

SEQ ID NO: 643244 - RNA, 23 nt, Artificial Sequence
  Synthetic
aaaacccauuaagaaggcaaccu

SEQ ID NO: 643245 - RNA, 24 nt, Artificial Sequence
  Synthetic
uaaaacccauuaagaaggcaaccu

SEQ ID NO: 643246 - RNA, 18 nt, Artificial Sequence
  Synthetic
aacuuaugacuucaaccu

SEQ ID NO: 643247 - RNA, 19 nt, Artificial Sequence
  Synthetic
aaacuuaugacuucaaccu

SEQ ID NO: 643248 - RNA, 20 nt, Artificial Sequence
  Synthetic
caaacuuaugacuucaaccu

SEQ ID NO: 643249 - RNA, 21 nt, Artificial Sequence
  Synthetic
gcaaacuuaugacuucaaccu

SEQ ID NO: 643250 - RNA, 22 nt, Artificial Sequence
  Synthetic
ggcaaacuuaugacuucaaccu

SEQ ID NO: 643251 - RNA, 23 nt, Artificial Sequence
  Synthetic
uggcaaacuuaugacuucaaccu

SEQ ID NO: 643252 - RNA, 24 nt, Artificial Sequence
  Synthetic
auggcaaacuuaugacuucaaccu

SEQ ID NO: 643253 - RNA, 18 nt, Artificial Sequence
  Synthetic
uacuuaauuguucaaccu

SEQ ID NO: 643254 - RNA, 19 nt, Artificial Sequence
  Synthetic
guacuuaauuguucaaccu

SEQ ID NO: 643255 - RNA, 20 nt, Artificial Sequence
  Synthetic
cguacuuaauuguucaaccu

SEQ ID NO: 643256 - RNA, 21 nt, Artificial Sequence
  Synthetic
gcguacuuaauuguucaaccu

SEQ ID NO: 643257 - RNA, 22 nt, Artificial Sequence
  Synthetic
agcguacuuaauuguucaaccu

SEQ ID NO: 643258 - RNA, 23 nt, Artificial Sequence
  Synthetic
aagcguacuuaauuguucaaccu

SEQ ID NO: 643259 - RNA, 24 nt, Artificial Sequence
  Synthetic
aaagcguacuuaauuguucaaccu

SEQ ID NO: 643260 - RNA, 18 nt, Artificial Sequence
  Synthetic
uucacaaucuuucaaccu

SEQ ID NO: 643261 - RNA, 19 nt, Artificial Sequence
  Synthetic
cuucacaaucuuucaaccu

SEQ ID NO: 643262 - RNA, 20 nt, Artificial Sequence
  Synthetic
ucuucacaaucuuucaaccu

SEQ ID NO: 643263 - RNA, 21 nt, Artificial Sequence
  Synthetic
uucuucacaaucuuucaaccu

SEQ ID NO: 643264 - RNA, 22 nt, Artificial Sequence
  Synthetic
guucuucacaaucuuucaaccu

SEQ ID NO: 643265 - RNA, 23 nt, Artificial Sequence
  Synthetic
aguucuucacaaucuuucaaccu

SEQ ID NO: 643266 - RNA, 24 nt, Artificial Sequence
  Synthetic
caguucuucacaaucuuucaaccu

SEQ ID NO: 643267 - RNA, 18 nt, Artificial Sequence
  Synthetic
aacuaauccugagaaccu

SEQ ID NO: 643268 - RNA, 19 nt, Artificial Sequence
  Synthetic
caacuaauccugagaaccu

SEQ ID NO: 643269 - RNA, 20 nt, Artificial Sequence
  Synthetic
ucaacuaauccugagaaccu

SEQ ID NO: 643270 - RNA, 21 nt, Artificial Sequence
  Synthetic
cucaacuaauccugagaaccu

SEQ ID NO: 643271 - RNA, 22 nt, Artificial Sequence
  Synthetic
acucaacuaauccugagaaccu

SEQ ID NO: 643272 - RNA, 23 nt, Artificial Sequence
  Synthetic
cacucaacuaauccugagaaccu

SEQ ID NO: 643273 - RNA, 24 nt, Artificial Sequence
  Synthetic
ucacucaacuaauccugagaaccu

SEQ ID NO: 643274 - RNA, 18 nt, Artificial Sequence
  Synthetic
uuaacuaaauacgaaccu

SEQ ID NO: 643275 - RNA, 19 nt, Artificial Sequence
  Synthetic
auuaacuaaauacgaaccu

SEQ ID NO: 643276 - RNA, 20 nt, Artificial Sequence
  Synthetic
uauuaacuaaauacgaaccu

SEQ ID NO: 643277 - RNA, 21 nt, Artificial Sequence
  Synthetic
auauuaacuaaauacgaaccu

SEQ ID NO: 643278 - RNA, 22 nt, Artificial Sequence
  Synthetic
cauauuaacuaaauacgaaccu

SEQ ID NO: 643279 - RNA, 23 nt, Artificial Sequence
  Synthetic
acauauuaacuaaauacgaaccu

SEQ ID NO: 643280 - RNA, 24 nt, Artificial Sequence
  Synthetic
aacauauuaacuaaauacgaaccu

SEQ ID NO: 643281 - RNA, 18 nt, Artificial Sequence
  Synthetic
ugggguuggaaggaaccu

SEQ ID NO: 643282 - RNA, 19 nt, Artificial Sequence
  Synthetic
uugggguuggaaggaaccu

SEQ ID NO: 643283 - RNA, 20 nt, Artificial Sequence
  Synthetic
guugggguuggaaggaaccu

SEQ ID NO: 643284 - RNA, 21 nt, Artificial Sequence
  Synthetic
uguugggguuggaaggaaccu

SEQ ID NO: 643285 - RNA, 22 nt, Artificial Sequence
  Synthetic
cuguugggguuggaaggaaccu

SEQ ID NO: 643286 - RNA, 23 nt, Artificial Sequence
  Synthetic
gcuguugggguuggaaggaaccu

SEQ ID NO: 643287 - RNA, 24 nt, Artificial Sequence
  Synthetic
ggcuguugggguuggaaggaaccu

SEQ ID NO: 643288 - RNA, 18 nt, Artificial Sequence
  Synthetic
gaagguaaucaggaaccu

SEQ ID NO: 643289 - RNA, 19 nt, Artificial Sequence
  Synthetic
ugaagguaaucaggaaccu

SEQ ID NO: 643290 - RNA, 20 nt, Artificial Sequence
  Synthetic
uugaagguaaucaggaaccu

SEQ ID NO: 643291 - RNA, 21 nt, Artificial Sequence
  Synthetic
cuugaagguaaucaggaaccu

SEQ ID NO: 643292 - RNA, 22 nt, Artificial Sequence
  Synthetic
ccuugaagguaaucaggaaccu

SEQ ID NO: 643293 - RNA, 23 nt, Artificial Sequence
  Synthetic
gccuugaagguaaucaggaaccu

SEQ ID NO: 643294 - RNA, 24 nt, Artificial Sequence
  Synthetic
ugccuugaagguaaucaggaaccu

SEQ ID NO: 643295 - RNA, 18 nt, Artificial Sequence
  Synthetic
aagcaacauuaggaaccu

SEQ ID NO: 643296 - RNA, 19 nt, Artificial Sequence
  Synthetic
uaagcaacauuaggaaccu

SEQ ID NO: 643297 - RNA, 20 nt, Artificial Sequence
  Synthetic
uuaagcaacauuaggaaccu

SEQ ID NO: 643298 - RNA, 21 nt, Artificial Sequence
  Synthetic
auuaagcaacauuaggaaccu

SEQ ID NO: 643299 - RNA, 22 nt, Artificial Sequence
  Synthetic
aauuaagcaacauuaggaaccu

SEQ ID NO: 643300 - RNA, 23 nt, Artificial Sequence
  Synthetic
aaauuaagcaacauuaggaaccu

SEQ ID NO: 643301 - RNA, 24 nt, Artificial Sequence
  Synthetic
aaaauuaagcaacauuaggaaccu

SEQ ID NO: 643302 - RNA, 18 nt, Artificial Sequence
  Synthetic
aguccauaaacggaaccu

SEQ ID NO: 643303 - RNA, 19 nt, Artificial Sequence
  Synthetic
uaguccauaaacggaaccu

SEQ ID NO: 643304 - RNA, 20 nt, Artificial Sequence
  Synthetic
uuaguccauaaacggaaccu

SEQ ID NO: 643305 - RNA, 21 nt, Artificial Sequence
  Synthetic
cuuaguccauaaacggaaccu

SEQ ID NO: 643306 - RNA, 22 nt, Artificial Sequence
  Synthetic
gcuuaguccauaaacggaaccu

SEQ ID NO: 643307 - RNA, 23 nt, Artificial Sequence
  Synthetic
ugcuuaguccauaaacggaaccu

SEQ ID NO: 643308 - RNA, 24 nt, Artificial Sequence
  Synthetic
cugcuuaguccauaaacggaaccu

SEQ ID NO: 643309 - RNA, 18 nt, Artificial Sequence
  Synthetic
aaguggguuagggaaccu

SEQ ID NO: 643310 - RNA, 19 nt, Artificial Sequence
  Synthetic
caaguggguuagggaaccu

SEQ ID NO: 643311 - RNA, 20 nt, Artificial Sequence
  Synthetic
ucaaguggguuagggaaccu

SEQ ID NO: 643312 - RNA, 21 nt, Artificial Sequence
  Synthetic
uucaaguggguuagggaaccu

SEQ ID NO: 643313 - RNA, 22 nt, Artificial Sequence
  Synthetic
auucaaguggguuagggaaccu

SEQ ID NO: 643314 - RNA, 23 nt, Artificial Sequence
  Synthetic
uauucaaguggguuagggaaccu

SEQ ID NO: 643315 - RNA, 24 nt, Artificial Sequence
  Synthetic
guauucaaguggguuagggaaccu

SEQ ID NO: 643316 - RNA, 18 nt, Artificial Sequence
  Synthetic
cccccaaguaaugaaccu

SEQ ID NO: 643317 - RNA, 19 nt, Artificial Sequence
  Synthetic
ccccccaaguaaugaaccu

SEQ ID NO: 643318 - RNA, 20 nt, Artificial Sequence
  Synthetic
gccccccaaguaaugaaccu

SEQ ID NO: 643319 - RNA, 21 nt, Artificial Sequence
  Synthetic
agccccccaaguaaugaaccu

SEQ ID NO: 643320 - RNA, 22 nt, Artificial Sequence
  Synthetic
cagccccccaaguaaugaaccu

SEQ ID NO: 643321 - RNA, 23 nt, Artificial Sequence
  Synthetic
gcagccccccaaguaaugaaccu

SEQ ID NO: 643322 - RNA, 24 nt, Artificial Sequence
  Synthetic
ugcagccccccaaguaaugaaccu

SEQ ID NO: 643323 - RNA, 18 nt, Artificial Sequence
  Synthetic
ccaaauguccaugaaccu

SEQ ID NO: 643324 - RNA, 19 nt, Artificial Sequence
  Synthetic
accaaauguccaugaaccu

SEQ ID NO: 643325 - RNA, 20 nt, Artificial Sequence
  Synthetic
aaccaaauguccaugaaccu

SEQ ID NO: 643326 - RNA, 21 nt, Artificial Sequence
  Synthetic
gaaccaaauguccaugaaccu

SEQ ID NO: 643327 - RNA, 22 nt, Artificial Sequence
  Synthetic
ugaaccaaauguccaugaaccu

SEQ ID NO: 643328 - RNA, 23 nt, Artificial Sequence
  Synthetic
cugaaccaaauguccaugaaccu

SEQ ID NO: 643329 - RNA, 24 nt, Artificial Sequence
  Synthetic
ccugaaccaaauguccaugaaccu

SEQ ID NO: 643330 - RNA, 18 nt, Artificial Sequence
  Synthetic
ggagaaccacuugaaccu

SEQ ID NO: 643331 - RNA, 19 nt, Artificial Sequence
  Synthetic
aggagaaccacuugaaccu

SEQ ID NO: 643332 - RNA, 20 nt, Artificial Sequence
  Synthetic
caggagaaccacuugaaccu

SEQ ID NO: 643333 - RNA, 21 nt, Artificial Sequence
  Synthetic
gcaggagaaccacuugaaccu

SEQ ID NO: 643334 - RNA, 22 nt, Artificial Sequence
  Synthetic
ggcaggagaaccacuugaaccu

SEQ ID NO: 643335 - RNA, 23 nt, Artificial Sequence
  Synthetic
aggcaggagaaccacuugaaccu

SEQ ID NO: 643336 - RNA, 24 nt, Artificial Sequence
  Synthetic
gaggcaggagaaccacuugaaccu

SEQ ID NO: 643337 - RNA, 24 nt, Artificial Sequence
  Synthetic
gaggcaggagaaucacuugaaccu

SEQ ID NO: 643338 - RNA, 18 nt, Artificial Sequence
  Synthetic
ugagaagcgcuugaaccu

SEQ ID NO: 643339 - RNA, 19 nt, Artificial Sequence
  Synthetic
augagaagcgcuugaaccu

SEQ ID NO: 643340 - RNA, 20 nt, Artificial Sequence
  Synthetic
caugagaagcgcuugaaccu

SEQ ID NO: 643341 - RNA, 21 nt, Artificial Sequence
  Synthetic
gcaugagaagcgcuugaaccu

SEQ ID NO: 643342 - RNA, 22 nt, Artificial Sequence
  Synthetic
ggcaugagaagcgcuugaaccu

SEQ ID NO: 643343 - RNA, 23 nt, Artificial Sequence
  Synthetic
aggcaugagaagcgcuugaaccu

SEQ ID NO: 643344 - RNA, 24 nt, Artificial Sequence
  Synthetic
gaggcaugagaagcgcuugaaccu

SEQ ID NO: 643345 - RNA, 18 nt, Artificial Sequence
  Synthetic
ggagaaucgcuugaaccu

SEQ ID NO: 643346 - RNA, 19 nt, Artificial Sequence
  Synthetic
aggagaaucgcuugaaccu

SEQ ID NO: 643347 - RNA, 20 nt, Artificial Sequence
  Synthetic
caggagaaucgcuugaaccu

SEQ ID NO: 643348 - RNA, 21 nt, Artificial Sequence
  Synthetic
gcaggagaaucgcuugaaccu

SEQ ID NO: 643349 - RNA, 22 nt, Artificial Sequence
  Synthetic
ggcaggagaaucgcuugaaccu

SEQ ID NO: 643350 - RNA, 23 nt, Artificial Sequence
  Synthetic
aggcaggagaaucgcuugaaccu

SEQ ID NO: 643351 - RNA, 24 nt, Artificial Sequence
  Synthetic
gaggcaggagaaucgcuugaaccu

SEQ ID NO: 643352 - RNA, 18 nt, Artificial Sequence
  Synthetic
ggaggaucgcuugaaccu

SEQ ID NO: 643353 - RNA, 19 nt, Artificial Sequence
  Synthetic
uggaggaucgcuugaaccu

SEQ ID NO: 643354 - RNA, 20 nt, Artificial Sequence
  Synthetic
uuggaggaucgcuugaaccu

SEQ ID NO: 643355 - RNA, 21 nt, Artificial Sequence
  Synthetic
guuggaggaucgcuugaaccu

SEQ ID NO: 643356 - RNA, 22 nt, Artificial Sequence
  Synthetic
gguuggaggaucgcuugaaccu

SEQ ID NO: 643357 - RNA, 23 nt, Artificial Sequence
  Synthetic
agguuggaggaucgcuugaaccu

SEQ ID NO: 643358 - RNA, 24 nt, Artificial Sequence
  Synthetic
gagguuggaggaucgcuugaaccu

SEQ ID NO: 643359 - RNA, 18 nt, Artificial Sequence
  Synthetic
auccacuaguuugaaccu

SEQ ID NO: 643360 - RNA, 19 nt, Artificial Sequence
  Synthetic
uauccacuaguuugaaccu

SEQ ID NO: 643361 - RNA, 20 nt, Artificial Sequence
  Synthetic
uuauccacuaguuugaaccu

SEQ ID NO: 643362 - RNA, 21 nt, Artificial Sequence
  Synthetic
auuauccacuaguuugaaccu

SEQ ID NO: 643363 - RNA, 22 nt, Artificial Sequence
  Synthetic
cauuauccacuaguuugaaccu

SEQ ID NO: 643364 - RNA, 23 nt, Artificial Sequence
  Synthetic
ucauuauccacuaguuugaaccu

SEQ ID NO: 643365 - RNA, 24 nt, Artificial Sequence
  Synthetic
cucauuauccacuaguuugaaccu

SEQ ID NO: 643366 - RNA, 18 nt, Artificial Sequence
  Synthetic
aagcaaguuaaauaaccu

SEQ ID NO: 643367 - RNA, 19 nt, Artificial Sequence
  Synthetic
caagcaaguuaaauaaccu

SEQ ID NO: 643368 - RNA, 20 nt, Artificial Sequence
  Synthetic
ucaagcaaguuaaauaaccu

SEQ ID NO: 643369 - RNA, 21 nt, Artificial Sequence
  Synthetic
cucaagcaaguuaaauaaccu

SEQ ID NO: 643370 - RNA, 22 nt, Artificial Sequence
  Synthetic
acucaagcaaguuaaauaaccu

SEQ ID NO: 643371 - RNA, 23 nt, Artificial Sequence
  Synthetic
uacucaagcaaguuaaauaaccu

SEQ ID NO: 643372 - RNA, 24 nt, Artificial Sequence
  Synthetic
uuacucaagcaaguuaaauaaccu

SEQ ID NO: 643373 - RNA, 18 nt, Artificial Sequence
  Synthetic
ccagcaucagcauaaccu

SEQ ID NO: 643374 - RNA, 19 nt, Artificial Sequence
  Synthetic
gccagcaucagcauaaccu

SEQ ID NO: 643375 - RNA, 20 nt, Artificial Sequence
  Synthetic
ggccagcaucagcauaaccu

SEQ ID NO: 643376 - RNA, 21 nt, Artificial Sequence
  Synthetic
aggccagcaucagcauaaccu

SEQ ID NO: 643377 - RNA, 22 nt, Artificial Sequence
  Synthetic
uaggccagcaucagcauaaccu

SEQ ID NO: 643378 - RNA, 23 nt, Artificial Sequence
  Synthetic
auaggccagcaucagcauaaccu

SEQ ID NO: 643379 - RNA, 24 nt, Artificial Sequence
  Synthetic
cauaggccagcaucagcauaaccu

SEQ ID NO: 643380 - RNA, 18 nt, Artificial Sequence
  Synthetic
gacaugugcugauaaccu

SEQ ID NO: 643381 - RNA, 19 nt, Artificial Sequence
  Synthetic
agacaugugcugauaaccu

SEQ ID NO: 643382 - RNA, 20 nt, Artificial Sequence
  Synthetic
aagacaugugcugauaaccu

SEQ ID NO: 643383 - RNA, 21 nt, Artificial Sequence
  Synthetic
uaagacaugugcugauaaccu

SEQ ID NO: 643384 - RNA, 22 nt, Artificial Sequence
  Synthetic
cuaagacaugugcugauaaccu

SEQ ID NO: 643385 - RNA, 23 nt, Artificial Sequence
  Synthetic
gcuaagacaugugcugauaaccu

SEQ ID NO: 643386 - RNA, 24 nt, Artificial Sequence
  Synthetic
ggcuaagacaugugcugauaaccu

SEQ ID NO: 643387 - RNA, 18 nt, Artificial Sequence
  Synthetic
cuuccuaacuaguaaccu

SEQ ID NO: 643388 - RNA, 19 nt, Artificial Sequence
  Synthetic
ucuuccuaacuaguaaccu

SEQ ID NO: 643389 - RNA, 20 nt, Artificial Sequence
  Synthetic
gucuuccuaacuaguaaccu

SEQ ID NO: 643390 - RNA, 21 nt, Artificial Sequence
  Synthetic
agucuuccuaacuaguaaccu

SEQ ID NO: 643391 - RNA, 22 nt, Artificial Sequence
  Synthetic
cagucuuccuaacuaguaaccu

SEQ ID NO: 643392 - RNA, 23 nt, Artificial Sequence
  Synthetic
acagucuuccuaacuaguaaccu

SEQ ID NO: 643393 - RNA, 24 nt, Artificial Sequence
  Synthetic
gacagucuuccuaacuaguaaccu

SEQ ID NO: 643394 - RNA, 18 nt, Artificial Sequence
  Synthetic
uggagccagcuuuaaccu

SEQ ID NO: 643395 - RNA, 19 nt, Artificial Sequence
  Synthetic
cuggagccagcuuuaaccu

SEQ ID NO: 643396 - RNA, 20 nt, Artificial Sequence
  Synthetic
ucuggagccagcuuuaaccu

SEQ ID NO: 643397 - RNA, 21 nt, Artificial Sequence
  Synthetic
aucuggagccagcuuuaaccu

SEQ ID NO: 643398 - RNA, 22 nt, Artificial Sequence
  Synthetic
caucuggagccagcuuuaaccu

SEQ ID NO: 643399 - RNA, 23 nt, Artificial Sequence
  Synthetic
ucaucuggagccagcuuuaaccu

SEQ ID NO: 643400 - RNA, 24 nt, Artificial Sequence
  Synthetic
uucaucuggagccagcuuuaaccu

SEQ ID NO: 643401 - RNA, 18 nt, Artificial Sequence
  Synthetic
uaucuuauacaaacaccu

SEQ ID NO: 643402 - RNA, 19 nt, Artificial Sequence
  Synthetic
uuaucuuauacaaacaccu

SEQ ID NO: 643403 - RNA, 20 nt, Artificial Sequence
  Synthetic
guuaucuuauacaaacaccu

SEQ ID NO: 643404 - RNA, 21 nt, Artificial Sequence
  Synthetic
uguuaucuuauacaaacaccu

SEQ ID NO: 643405 - RNA, 22 nt, Artificial Sequence
  Synthetic
auguuaucuuauacaaacaccu

SEQ ID NO: 643406 - RNA, 23 nt, Artificial Sequence
  Synthetic
aauguuaucuuauacaaacaccu

SEQ ID NO: 643407 - RNA, 24 nt, Artificial Sequence
  Synthetic
aaauguuaucuuauacaaacaccu

SEQ ID NO: 643408 - RNA, 18 nt, Artificial Sequence
  Synthetic
augccauuuuaaacaccu

SEQ ID NO: 643409 - RNA, 19 nt, Artificial Sequence
  Synthetic
aaugccauuuuaaacaccu

SEQ ID NO: 643410 - RNA, 20 nt, Artificial Sequence
  Synthetic
caaugccauuuuaaacaccu

SEQ ID NO: 643411 - RNA, 21 nt, Artificial Sequence
  Synthetic
acaaugccauuuuaaacaccu

SEQ ID NO: 643412 - RNA, 22 nt, Artificial Sequence
  Synthetic
uacaaugccauuuuaaacaccu

SEQ ID NO: 643413 - RNA, 23 nt, Artificial Sequence
  Synthetic
auacaaugccauuuuaaacaccu

SEQ ID NO: 643414 - RNA, 24 nt, Artificial Sequence
  Synthetic
uauacaaugccauuuuaaacaccu

SEQ ID NO: 643415 - RNA, 18 nt, Artificial Sequence
  Synthetic
aagaauacacgaacaccu

SEQ ID NO: 643416 - RNA, 19 nt, Artificial Sequence
  Synthetic
gaagaauacacgaacaccu

SEQ ID NO: 643417 - RNA, 20 nt, Artificial Sequence
  Synthetic
ggaagaauacacgaacaccu

SEQ ID NO: 643418 - RNA, 21 nt, Artificial Sequence
  Synthetic
uggaagaauacacgaacaccu

SEQ ID NO: 643419 - RNA, 22 nt, Artificial Sequence
  Synthetic
auggaagaauacacgaacaccu

SEQ ID NO: 643420 - RNA, 23 nt, Artificial Sequence
  Synthetic
gauggaagaauacacgaacaccu

SEQ ID NO: 643421 - RNA, 24 nt, Artificial Sequence
  Synthetic
ugauggaagaauacacgaacaccu

SEQ ID NO: 643422 - RNA, 18 nt, Artificial Sequence
  Synthetic
gcagcaucaugaacaccu

SEQ ID NO: 643423 - RNA, 19 nt, Artificial Sequence
  Synthetic
agcagcaucaugaacaccu

SEQ ID NO: 643424 - RNA, 20 nt, Artificial Sequence
  Synthetic
cagcagcaucaugaacaccu

SEQ ID NO: 643425 - RNA, 21 nt, Artificial Sequence
  Synthetic
ccagcagcaucaugaacaccu

SEQ ID NO: 643426 - RNA, 22 nt, Artificial Sequence
  Synthetic
accagcagcaucaugaacaccu

SEQ ID NO: 643427 - RNA, 23 nt, Artificial Sequence
  Synthetic
aaccagcagcaucaugaacaccu

SEQ ID NO: 643428 - RNA, 24 nt, Artificial Sequence
  Synthetic
gaaccagcagcaucaugaacaccu

SEQ ID NO: 643429 - RNA, 18 nt, Artificial Sequence
  Synthetic
acacacacacacacaccu

SEQ ID NO: 643430 - RNA, 19 nt, Artificial Sequence
  Synthetic
cacacacacacacacaccu

SEQ ID NO: 643431 - RNA, 20 nt, Artificial Sequence
  Synthetic
acacacacacacacacaccu

SEQ ID NO: 643432 - RNA, 21 nt, Artificial Sequence
  Synthetic
cacacacacacacacacaccu

SEQ ID NO: 643433 - RNA, 22 nt, Artificial Sequence
  Synthetic
acacacacacacacacacaccu

SEQ ID NO: 643434 - RNA, 23 nt, Artificial Sequence
  Synthetic
cacacacacacacacacacaccu

SEQ ID NO: 643435 - RNA, 24 nt, Artificial Sequence
  Synthetic
acacacacacacacacacacaccu

SEQ ID NO: 643436 - RNA, 18 nt, Artificial Sequence
  Synthetic
gauuucaacaagacaccu

SEQ ID NO: 643437 - RNA, 19 nt, Artificial Sequence
  Synthetic
ugauuucaacaagacaccu

SEQ ID NO: 643438 - RNA, 20 nt, Artificial Sequence
  Synthetic
augauuucaacaagacaccu

SEQ ID NO: 643439 - RNA, 21 nt, Artificial Sequence
  Synthetic
aaugauuucaacaagacaccu

SEQ ID NO: 643440 - RNA, 22 nt, Artificial Sequence
  Synthetic
uaaugauuucaacaagacaccu

SEQ ID NO: 643441 - RNA, 23 nt, Artificial Sequence
  Synthetic
auaaugauuucaacaagacaccu

SEQ ID NO: 643442 - RNA, 24 nt, Artificial Sequence
  Synthetic
aauaaugauuucaacaagacaccu

SEQ ID NO: 643443 - RNA, 18 nt, Artificial Sequence
  Synthetic
cagccucucuaaccaccu

SEQ ID NO: 643444 - RNA, 19 nt, Artificial Sequence
  Synthetic
ucagccucucuaaccaccu

SEQ ID NO: 643445 - RNA, 20 nt, Artificial Sequence
  Synthetic
cucagccucucuaaccaccu

SEQ ID NO: 643446 - RNA, 21 nt, Artificial Sequence
  Synthetic
ucucagccucucuaaccaccu

SEQ ID NO: 643447 - RNA, 22 nt, Artificial Sequence
  Synthetic
aucucagccucucuaaccaccu

SEQ ID NO: 643448 - RNA, 23 nt, Artificial Sequence
  Synthetic
gaucucagccucucuaaccaccu

SEQ ID NO: 643449 - RNA, 24 nt, Artificial Sequence
  Synthetic
agaucucagccucucuaaccaccu

SEQ ID NO: 643450 - RNA, 18 nt, Artificial Sequence
  Synthetic
gggcauccuggaccaccu

SEQ ID NO: 643451 - RNA, 19 nt, Artificial Sequence
  Synthetic
ugggcauccuggaccaccu

SEQ ID NO: 643452 - RNA, 20 nt, Artificial Sequence
  Synthetic
uugggcauccuggaccaccu

SEQ ID NO: 643453 - RNA, 21 nt, Artificial Sequence
  Synthetic
auugggcauccuggaccaccu

SEQ ID NO: 643454 - RNA, 22 nt, Artificial Sequence
  Synthetic
cauugggcauccuggaccaccu

SEQ ID NO: 643455 - RNA, 23 nt, Artificial Sequence
  Synthetic
gcauugggcauccuggaccaccu

SEQ ID NO: 643456 - RNA, 24 nt, Artificial Sequence
  Synthetic
agcauugggcauccuggaccaccu

SEQ ID NO: 643457 - RNA, 18 nt, Artificial Sequence
  Synthetic
ccaggauucaucccaccu

SEQ ID NO: 643458 - RNA, 19 nt, Artificial Sequence
  Synthetic
accaggauucaucccaccu

SEQ ID NO: 643459 - RNA, 20 nt, Artificial Sequence
  Synthetic
caccaggauucaucccaccu

SEQ ID NO: 643460 - RNA, 21 nt, Artificial Sequence
  Synthetic
acaccaggauucaucccaccu

SEQ ID NO: 643461 - RNA, 22 nt, Artificial Sequence
  Synthetic
cacaccaggauucaucccaccu

SEQ ID NO: 643462 - RNA, 23 nt, Artificial Sequence
  Synthetic
acacaccaggauucaucccaccu

SEQ ID NO: 643463 - RNA, 24 nt, Artificial Sequence
  Synthetic
uacacaccaggauucaucccaccu

SEQ ID NO: 643464 - RNA, 18 nt, Artificial Sequence
  Synthetic
gucgaaggcaggccaccu

SEQ ID NO: 643465 - RNA, 19 nt, Artificial Sequence
  Synthetic
ugucgaaggcaggccaccu

SEQ ID NO: 643466 - RNA, 20 nt, Artificial Sequence
  Synthetic
uugucgaaggcaggccaccu

SEQ ID NO: 643467 - RNA, 21 nt, Artificial Sequence
  Synthetic
guugucgaaggcaggccaccu

SEQ ID NO: 643468 - RNA, 22 nt, Artificial Sequence
  Synthetic
gguugucgaaggcaggccaccu

SEQ ID NO: 643469 - RNA, 23 nt, Artificial Sequence
  Synthetic
agguugucgaaggcaggccaccu

SEQ ID NO: 643470 - RNA, 24 nt, Artificial Sequence
  Synthetic
uagguugucgaaggcaggccaccu

SEQ ID NO: 643471 - RNA, 18 nt, Artificial Sequence
  Synthetic
uggagcaagacuccaccu

SEQ ID NO: 643472 - RNA, 19 nt, Artificial Sequence
  Synthetic
auggagcaagacuccaccu

SEQ ID NO: 643473 - RNA, 20 nt, Artificial Sequence
  Synthetic
gauggagcaagacuccaccu

SEQ ID NO: 643474 - RNA, 21 nt, Artificial Sequence
  Synthetic
ugauggagcaagacuccaccu

SEQ ID NO: 643475 - RNA, 22 nt, Artificial Sequence
  Synthetic
gugauggagcaagacuccaccu

SEQ ID NO: 643476 - RNA, 23 nt, Artificial Sequence
  Synthetic
ggugauggagcaagacuccaccu

SEQ ID NO: 643477 - RNA, 24 nt, Artificial Sequence
  Synthetic
gggugauggagcaagacuccaccu

SEQ ID NO: 643478 - RNA, 18 nt, Artificial Sequence
  Synthetic
uggaacuagucuccaccu

SEQ ID NO: 643479 - RNA, 19 nt, Artificial Sequence
  Synthetic
auggaacuagucuccaccu

SEQ ID NO: 643480 - RNA, 20 nt, Artificial Sequence
  Synthetic
cauggaacuagucuccaccu

SEQ ID NO: 643481 - RNA, 21 nt, Artificial Sequence
  Synthetic
acauggaacuagucuccaccu

SEQ ID NO: 643482 - RNA, 22 nt, Artificial Sequence
  Synthetic
uacauggaacuagucuccaccu

SEQ ID NO: 643483 - RNA, 23 nt, Artificial Sequence
  Synthetic
auacauggaacuagucuccaccu

SEQ ID NO: 643484 - RNA, 24 nt, Artificial Sequence
  Synthetic
uauacauggaacuagucuccaccu

SEQ ID NO: 643485 - RNA, 18 nt, Artificial Sequence
  Synthetic
uuuaagcuugaagcaccu

SEQ ID NO: 643486 - RNA, 19 nt, Artificial Sequence
  Synthetic
uuuuaagcuugaagcaccu

SEQ ID NO: 643487 - RNA, 20 nt, Artificial Sequence
  Synthetic
auuuuaagcuugaagcaccu

SEQ ID NO: 643488 - RNA, 21 nt, Artificial Sequence
  Synthetic
uauuuuaagcuugaagcaccu

SEQ ID NO: 643489 - RNA, 22 nt, Artificial Sequence
  Synthetic
guauuuuaagcuugaagcaccu

SEQ ID NO: 643490 - RNA, 23 nt, Artificial Sequence
  Synthetic
aguauuuuaagcuugaagcaccu

SEQ ID NO: 643491 - RNA, 24 nt, Artificial Sequence
  Synthetic
gaguauuuuaagcuugaagcaccu

SEQ ID NO: 643492 - RNA, 18 nt, Artificial Sequence
  Synthetic
caugcuuuguaagcaccu

SEQ ID NO: 643493 - RNA, 19 nt, Artificial Sequence
  Synthetic
acaugcuuuguaagcaccu

SEQ ID NO: 643494 - RNA, 20 nt, Artificial Sequence
  Synthetic
cacaugcuuuguaagcaccu

SEQ ID NO: 643495 - RNA, 21 nt, Artificial Sequence
  Synthetic
acacaugcuuuguaagcaccu

SEQ ID NO: 643496 - RNA, 22 nt, Artificial Sequence
  Synthetic
gacacaugcuuuguaagcaccu

SEQ ID NO: 643497 - RNA, 23 nt, Artificial Sequence
  Synthetic
agacacaugcuuuguaagcaccu

SEQ ID NO: 643498 - RNA, 24 nt, Artificial Sequence
  Synthetic
cagacacaugcuuuguaagcaccu

SEQ ID NO: 643499 - RNA, 18 nt, Artificial Sequence
  Synthetic
ccuguaauuccagcaccu

SEQ ID NO: 643500 - RNA, 19 nt, Artificial Sequence
  Synthetic
gccuguaauuccagcaccu

SEQ ID NO: 643501 - RNA, 20 nt, Artificial Sequence
  Synthetic
ugccuguaauuccagcaccu

SEQ ID NO: 643502 - RNA, 21 nt, Artificial Sequence
  Synthetic
augccuguaauuccagcaccu

SEQ ID NO: 643503 - RNA, 22 nt, Artificial Sequence
  Synthetic
caugccuguaauuccagcaccu

SEQ ID NO: 643504 - RNA, 23 nt, Artificial Sequence
  Synthetic
ucaugccuguaauuccagcaccu

SEQ ID NO: 643505 - RNA, 24 nt, Artificial Sequence
  Synthetic
uucaugccuguaauuccagcaccu

SEQ ID NO: 643506 - RNA, 18 nt, Artificial Sequence
  Synthetic
caauucaaaaaggcaccu

SEQ ID NO: 643507 - RNA, 19 nt, Artificial Sequence
  Synthetic
ucaauucaaaaaggcaccu

SEQ ID NO: 643508 - RNA, 20 nt, Artificial Sequence
  Synthetic
cucaauucaaaaaggcaccu

SEQ ID NO: 643509 - RNA, 21 nt, Artificial Sequence
  Synthetic
gcucaauucaaaaaggcaccu

SEQ ID NO: 643510 - RNA, 22 nt, Artificial Sequence
  Synthetic
agcucaauucaaaaaggcaccu

SEQ ID NO: 643511 - RNA, 23 nt, Artificial Sequence
  Synthetic
aagcucaauucaaaaaggcaccu

SEQ ID NO: 643512 - RNA, 24 nt, Artificial Sequence
  Synthetic
aaagcucaauucaaaaaggcaccu

SEQ ID NO: 643513 - RNA, 18 nt, Artificial Sequence
  Synthetic
ugaucucugacugcaccu

SEQ ID NO: 643514 - RNA, 19 nt, Artificial Sequence
  Synthetic
gugaucucugacugcaccu

SEQ ID NO: 643515 - RNA, 20 nt, Artificial Sequence
  Synthetic
agugaucucugacugcaccu

SEQ ID NO: 643516 - RNA, 21 nt, Artificial Sequence
  Synthetic
cagugaucucugacugcaccu

SEQ ID NO: 643517 - RNA, 22 nt, Artificial Sequence
  Synthetic
ccagugaucucugacugcaccu

SEQ ID NO: 643518 - RNA, 23 nt, Artificial Sequence
  Synthetic
gccagugaucucugacugcaccu

SEQ ID NO: 643519 - RNA, 24 nt, Artificial Sequence
  Synthetic
ugccagugaucucugacugcaccu

SEQ ID NO: 643520 - RNA, 18 nt, Artificial Sequence
  Synthetic
uagugguuugcugcaccu

SEQ ID NO: 643521 - RNA, 19 nt, Artificial Sequence
  Synthetic
auagugguuugcugcaccu

SEQ ID NO: 643522 - RNA, 20 nt, Artificial Sequence
  Synthetic
cauagugguuugcugcaccu

SEQ ID NO: 643523 - RNA, 21 nt, Artificial Sequence
  Synthetic
ccauagugguuugcugcaccu

SEQ ID NO: 643524 - RNA, 22 nt, Artificial Sequence
  Synthetic
gccauagugguuugcugcaccu

SEQ ID NO: 643525 - RNA, 23 nt, Artificial Sequence
  Synthetic
ugccauagugguuugcugcaccu

SEQ ID NO: 643526 - RNA, 24 nt, Artificial Sequence
  Synthetic
gugccauagugguuugcugcaccu

SEQ ID NO: 643527 - RNA, 18 nt, Artificial Sequence
  Synthetic
acggagcaguuugcaccu

SEQ ID NO: 643528 - RNA, 19 nt, Artificial Sequence
  Synthetic
gacggagcaguuugcaccu

SEQ ID NO: 643529 - RNA, 20 nt, Artificial Sequence
  Synthetic
ggacggagcaguuugcaccu

SEQ ID NO: 643530 - RNA, 21 nt, Artificial Sequence
  Synthetic
aggacggagcaguuugcaccu

SEQ ID NO: 643531 - RNA, 22 nt, Artificial Sequence
  Synthetic
aaggacggagcaguuugcaccu

SEQ ID NO: 643532 - RNA, 23 nt, Artificial Sequence
  Synthetic
gaaggacggagcaguuugcaccu

SEQ ID NO: 643533 - RNA, 24 nt, Artificial Sequence
  Synthetic
ggaaggacggagcaguuugcaccu

SEQ ID NO: 643534 - RNA, 18 nt, Artificial Sequence
  Synthetic
acauaauuaaaaucaccu

SEQ ID NO: 643535 - RNA, 19 nt, Artificial Sequence
  Synthetic
uacauaauuaaaaucaccu

SEQ ID NO: 643536 - RNA, 20 nt, Artificial Sequence
  Synthetic
auacauaauuaaaaucaccu

SEQ ID NO: 643537 - RNA, 21 nt, Artificial Sequence
  Synthetic
cauacauaauuaaaaucaccu

SEQ ID NO: 643538 - RNA, 22 nt, Artificial Sequence
  Synthetic
acauacauaauuaaaaucaccu

SEQ ID NO: 643539 - RNA, 23 nt, Artificial Sequence
  Synthetic
aacauacauaauuaaaaucaccu

SEQ ID NO: 643540 - RNA, 24 nt, Artificial Sequence
  Synthetic
aaacauacauaauuaaaaucaccu

SEQ ID NO: 643541 - RNA, 18 nt, Artificial Sequence
  Synthetic
gcugugacaccaucaccu

SEQ ID NO: 643542 - RNA, 19 nt, Artificial Sequence
  Synthetic
agcugugacaccaucaccu

SEQ ID NO: 643543 - RNA, 20 nt, Artificial Sequence
  Synthetic
cagcugugacaccaucaccu

SEQ ID NO: 643544 - RNA, 21 nt, Artificial Sequence
  Synthetic
acagcugugacaccaucaccu

SEQ ID NO: 643545 - RNA, 22 nt, Artificial Sequence
  Synthetic
cacagcugugacaccaucaccu

SEQ ID NO: 643546 - RNA, 23 nt, Artificial Sequence
  Synthetic
gcacagcugugacaccaucaccu

SEQ ID NO: 643547 - RNA, 24 nt, Artificial Sequence
  Synthetic
ugcacagcugugacaccaucaccu

SEQ ID NO: 643548 - RNA, 18 nt, Artificial Sequence
  Synthetic
ucaggacucucaucaccu

SEQ ID NO: 643549 - RNA, 19 nt, Artificial Sequence
  Synthetic
cucaggacucucaucaccu

SEQ ID NO: 643550 - RNA, 20 nt, Artificial Sequence
  Synthetic
ucucaggacucucaucaccu

SEQ ID NO: 643551 - RNA, 21 nt, Artificial Sequence
  Synthetic
uucucaggacucucaucaccu

SEQ ID NO: 643552 - RNA, 22 nt, Artificial Sequence
  Synthetic
cuucucaggacucucaucaccu

SEQ ID NO: 643553 - RNA, 23 nt, Artificial Sequence
  Synthetic
gcuucucaggacucucaucaccu

SEQ ID NO: 643554 - RNA, 24 nt, Artificial Sequence
  Synthetic
ggcuucucaggacucucaucaccu

SEQ ID NO: 643555 - RNA, 18 nt, Artificial Sequence
  Synthetic
gcaugagugucaucaccu

SEQ ID NO: 643556 - RNA, 19 nt, Artificial Sequence
  Synthetic
agcaugagugucaucaccu

SEQ ID NO: 643557 - RNA, 20 nt, Artificial Sequence
  Synthetic
cagcaugagugucaucaccu

SEQ ID NO: 643558 - RNA, 21 nt, Artificial Sequence
  Synthetic
ccagcaugagugucaucaccu

SEQ ID NO: 643559 - RNA, 22 nt, Artificial Sequence
  Synthetic
gccagcaugagugucaucaccu

SEQ ID NO: 643560 - RNA, 23 nt, Artificial Sequence
  Synthetic
ugccagcaugagugucaucaccu

SEQ ID NO: 643561 - RNA, 24 nt, Artificial Sequence
  Synthetic
uugccagcaugagugucaucaccu

SEQ ID NO: 643562 - RNA, 18 nt, Artificial Sequence
  Synthetic
ugaaugcuuauaucaccu

SEQ ID NO: 643563 - RNA, 19 nt, Artificial Sequence
  Synthetic
cugaaugcuuauaucaccu

SEQ ID NO: 643564 - RNA, 20 nt, Artificial Sequence
  Synthetic
acugaaugcuuauaucaccu

SEQ ID NO: 643565 - RNA, 21 nt, Artificial Sequence
  Synthetic
cacugaaugcuuauaucaccu

SEQ ID NO: 643566 - RNA, 22 nt, Artificial Sequence
  Synthetic
acacugaaugcuuauaucaccu

SEQ ID NO: 643567 - RNA, 23 nt, Artificial Sequence
  Synthetic
uacacugaaugcuuauaucaccu

SEQ ID NO: 643568 - RNA, 24 nt, Artificial Sequence
  Synthetic
auacacugaaugcuuauaucaccu

SEQ ID NO: 643569 - RNA, 18 nt, Artificial Sequence
  Synthetic
aaauggaugcuaucaccu

SEQ ID NO: 643570 - RNA, 19 nt, Artificial Sequence
  Synthetic
gaaauggaugcuaucaccu

SEQ ID NO: 643571 - RNA, 20 nt, Artificial Sequence
  Synthetic
agaaauggaugcuaucaccu

SEQ ID NO: 643572 - RNA, 21 nt, Artificial Sequence
  Synthetic
uagaaauggaugcuaucaccu

SEQ ID NO: 643573 - RNA, 22 nt, Artificial Sequence
  Synthetic
guagaaauggaugcuaucaccu

SEQ ID NO: 643574 - RNA, 23 nt, Artificial Sequence
  Synthetic
cguagaaauggaugcuaucaccu

SEQ ID NO: 643575 - RNA, 24 nt, Artificial Sequence
  Synthetic
ccguagaaauggaugcuaucaccu

SEQ ID NO: 643576 - RNA, 18 nt, Artificial Sequence
  Synthetic
cugugcaaugcgucaccu

SEQ ID NO: 643577 - RNA, 19 nt, Artificial Sequence
  Synthetic
ucugugcaaugcgucaccu

SEQ ID NO: 643578 - RNA, 20 nt, Artificial Sequence
  Synthetic
aucugugcaaugcgucaccu

SEQ ID NO: 643579 - RNA, 21 nt, Artificial Sequence
  Synthetic
aaucugugcaaugcgucaccu

SEQ ID NO: 643580 - RNA, 22 nt, Artificial Sequence
  Synthetic
aaaucugugcaaugcgucaccu

SEQ ID NO: 643581 - RNA, 23 nt, Artificial Sequence
  Synthetic
uaaaucugugcaaugcgucaccu

SEQ ID NO: 643582 - RNA, 24 nt, Artificial Sequence
  Synthetic
auaaaucugugcaaugcgucaccu

SEQ ID NO: 643583 - RNA, 18 nt, Artificial Sequence
  Synthetic
aaggguggaaauucaccu

SEQ ID NO: 643584 - RNA, 19 nt, Artificial Sequence
  Synthetic
uaaggguggaaauucaccu

SEQ ID NO: 643585 - RNA, 20 nt, Artificial Sequence
  Synthetic
cuaaggguggaaauucaccu

SEQ ID NO: 643586 - RNA, 21 nt, Artificial Sequence
  Synthetic
gcuaaggguggaaauucaccu

SEQ ID NO: 643587 - RNA, 22 nt, Artificial Sequence
  Synthetic
agcuaaggguggaaauucaccu

SEQ ID NO: 643588 - RNA, 23 nt, Artificial Sequence
  Synthetic
gagcuaaggguggaaauucaccu

SEQ ID NO: 643589 - RNA, 24 nt, Artificial Sequence
  Synthetic
ugagcuaaggguggaaauucaccu

SEQ ID NO: 643590 - RNA, 18 nt, Artificial Sequence
  Synthetic
ggauguaugucuucaccu

SEQ ID NO: 643591 - RNA, 19 nt, Artificial Sequence
  Synthetic
aggauguaugucuucaccu

SEQ ID NO: 643592 - RNA, 20 nt, Artificial Sequence
  Synthetic
uaggauguaugucuucaccu

SEQ ID NO: 643593 - RNA, 21 nt, Artificial Sequence
  Synthetic
uuaggauguaugucuucaccu

SEQ ID NO: 643594 - RNA, 22 nt, Artificial Sequence
  Synthetic
cuuaggauguaugucuucaccu

SEQ ID NO: 643595 - RNA, 23 nt, Artificial Sequence
  Synthetic
ucuuaggauguaugucuucaccu

SEQ ID NO: 643596 - RNA, 24 nt, Artificial Sequence
  Synthetic
gucuuaggauguaugucuucaccu

SEQ ID NO: 643597 - RNA, 18 nt, Artificial Sequence
  Synthetic
caaaaucccaguucaccu

SEQ ID NO: 643598 - RNA, 19 nt, Artificial Sequence
  Synthetic
ccaaaaucccaguucaccu

SEQ ID NO: 643599 - RNA, 20 nt, Artificial Sequence
  Synthetic
cccaaaaucccaguucaccu

SEQ ID NO: 643600 - RNA, 21 nt, Artificial Sequence
  Synthetic
ucccaaaaucccaguucaccu

SEQ ID NO: 643601 - RNA, 22 nt, Artificial Sequence
  Synthetic
cucccaaaaucccaguucaccu

SEQ ID NO: 643602 - RNA, 23 nt, Artificial Sequence
  Synthetic
ucucccaaaaucccaguucaccu

SEQ ID NO: 643603 - RNA, 24 nt, Artificial Sequence
  Synthetic
cucucccaaaaucccaguucaccu

SEQ ID NO: 643604 - RNA, 18 nt, Artificial Sequence
  Synthetic
ugagcuucaauuucaccu

SEQ ID NO: 643605 - RNA, 19 nt, Artificial Sequence
  Synthetic
gugagcuucaauuucaccu

SEQ ID NO: 643606 - RNA, 20 nt, Artificial Sequence
  Synthetic
ugugagcuucaauuucaccu

SEQ ID NO: 643607 - RNA, 21 nt, Artificial Sequence
  Synthetic
gugugagcuucaauuucaccu

SEQ ID NO: 643608 - RNA, 22 nt, Artificial Sequence
  Synthetic
ugugugagcuucaauuucaccu

SEQ ID NO: 643609 - RNA, 23 nt, Artificial Sequence
  Synthetic
cugugugagcuucaauuucaccu

SEQ ID NO: 643610 - RNA, 24 nt, Artificial Sequence
  Synthetic
ucugugugagcuucaauuucaccu

SEQ ID NO: 643611 - RNA, 18 nt, Artificial Sequence
  Synthetic
acucacuuguuuucaccu

SEQ ID NO: 643612 - RNA, 19 nt, Artificial Sequence
  Synthetic
aacucacuuguuuucaccu

SEQ ID NO: 643613 - RNA, 20 nt, Artificial Sequence
  Synthetic
aaacucacuuguuuucaccu

SEQ ID NO: 643614 - RNA, 21 nt, Artificial Sequence
  Synthetic
caaacucacuuguuuucaccu

SEQ ID NO: 643615 - RNA, 22 nt, Artificial Sequence
  Synthetic
ccaaacucacuuguuuucaccu

SEQ ID NO: 643616 - RNA, 23 nt, Artificial Sequence
  Synthetic
gccaaacucacuuguuuucaccu

SEQ ID NO: 643617 - RNA, 24 nt, Artificial Sequence
  Synthetic
ggccaaacucacuuguuuucaccu

SEQ ID NO: 643618 - RNA, 18 nt, Artificial Sequence
  Synthetic
uugggugugucaagaccu

SEQ ID NO: 643619 - RNA, 19 nt, Artificial Sequence
  Synthetic
auugggugugucaagaccu

SEQ ID NO: 643620 - RNA, 20 nt, Artificial Sequence
  Synthetic
uauugggugugucaagaccu

SEQ ID NO: 643621 - RNA, 21 nt, Artificial Sequence
  Synthetic
auauugggugugucaagaccu

SEQ ID NO: 643622 - RNA, 22 nt, Artificial Sequence
  Synthetic
cauauugggugugucaagaccu

SEQ ID NO: 643623 - RNA, 23 nt, Artificial Sequence
  Synthetic
gcauauugggugugucaagaccu

SEQ ID NO: 643624 - RNA, 24 nt, Artificial Sequence
  Synthetic
ugcauauugggugugucaagaccu

SEQ ID NO: 643625 - RNA, 18 nt, Artificial Sequence
  Synthetic
ugcagguaucuaagaccu

SEQ ID NO: 643626 - RNA, 19 nt, Artificial Sequence
  Synthetic
cugcagguaucuaagaccu

SEQ ID NO: 643627 - RNA, 20 nt, Artificial Sequence
  Synthetic
acugcagguaucuaagaccu

SEQ ID NO: 643628 - RNA, 21 nt, Artificial Sequence
  Synthetic
uacugcagguaucuaagaccu

SEQ ID NO: 643629 - RNA, 22 nt, Artificial Sequence
  Synthetic
cuacugcagguaucuaagaccu

SEQ ID NO: 643630 - RNA, 23 nt, Artificial Sequence
  Synthetic
ccuacugcagguaucuaagaccu

SEQ ID NO: 643631 - RNA, 24 nt, Artificial Sequence
  Synthetic
uccuacugcagguaucuaagaccu

SEQ ID NO: 643632 - RNA, 18 nt, Artificial Sequence
  Synthetic
caaaagcuacacagaccu

SEQ ID NO: 643633 - RNA, 19 nt, Artificial Sequence
  Synthetic
ccaaaagcuacacagaccu

SEQ ID NO: 643634 - RNA, 20 nt, Artificial Sequence
  Synthetic
uccaaaagcuacacagaccu

SEQ ID NO: 643635 - RNA, 21 nt, Artificial Sequence
  Synthetic
cuccaaaagcuacacagaccu

SEQ ID NO: 643636 - RNA, 22 nt, Artificial Sequence
  Synthetic
ucuccaaaagcuacacagaccu

SEQ ID NO: 643637 - RNA, 23 nt, Artificial Sequence
  Synthetic
cucuccaaaagcuacacagaccu

SEQ ID NO: 643638 - RNA, 24 nt, Artificial Sequence
  Synthetic
ccucuccaaaagcuacacagaccu

SEQ ID NO: 643639 - RNA, 18 nt, Artificial Sequence
  Synthetic
ugggauaacuccagaccu

SEQ ID NO: 643640 - RNA, 19 nt, Artificial Sequence
  Synthetic
cugggauaacuccagaccu

SEQ ID NO: 643641 - RNA, 20 nt, Artificial Sequence
  Synthetic
acugggauaacuccagaccu

SEQ ID NO: 643642 - RNA, 21 nt, Artificial Sequence
  Synthetic
uacugggauaacuccagaccu

SEQ ID NO: 643643 - RNA, 22 nt, Artificial Sequence
  Synthetic
cuacugggauaacuccagaccu

SEQ ID NO: 643644 - RNA, 23 nt, Artificial Sequence
  Synthetic
acuacugggauaacuccagaccu

SEQ ID NO: 643645 - RNA, 24 nt, Artificial Sequence
  Synthetic
uacuacugggauaacuccagaccu

SEQ ID NO: 643646 - RNA, 18 nt, Artificial Sequence
  Synthetic
cccuuauaaaagagaccu

SEQ ID NO: 643647 - RNA, 19 nt, Artificial Sequence
  Synthetic
gcccuuauaaaagagaccu

SEQ ID NO: 643648 - RNA, 20 nt, Artificial Sequence
  Synthetic
cgcccuuauaaaagagaccu

SEQ ID NO: 643649 - RNA, 21 nt, Artificial Sequence
  Synthetic
gcgcccuuauaaaagagaccu

SEQ ID NO: 643650 - RNA, 22 nt, Artificial Sequence
  Synthetic
agcgcccuuauaaaagagaccu

SEQ ID NO: 643651 - RNA, 23 nt, Artificial Sequence
  Synthetic
uagcgcccuuauaaaagagaccu

SEQ ID NO: 643652 - RNA, 24 nt, Artificial Sequence
  Synthetic
uuagcgcccuuauaaaagagaccu

SEQ ID NO: 643653 - RNA, 18 nt, Artificial Sequence
  Synthetic
gcauggcuggggagaccu

SEQ ID NO: 643654 - RNA, 19 nt, Artificial Sequence
  Synthetic
agcauggcuggggagaccu

SEQ ID NO: 643655 - RNA, 20 nt, Artificial Sequence
  Synthetic
cagcauggcuggggagaccu

SEQ ID NO: 643656 - RNA, 21 nt, Artificial Sequence
  Synthetic
ucagcauggcuggggagaccu

SEQ ID NO: 643657 - RNA, 22 nt, Artificial Sequence
  Synthetic
uucagcauggcuggggagaccu

SEQ ID NO: 643658 - RNA, 23 nt, Artificial Sequence
  Synthetic
guucagcauggcuggggagaccu

SEQ ID NO: 643659 - RNA, 24 nt, Artificial Sequence
  Synthetic
aguucagcauggcuggggagaccu

SEQ ID NO: 643660 - RNA, 18 nt, Artificial Sequence
  Synthetic
gcaaaauaacugagaccu

SEQ ID NO: 643661 - RNA, 19 nt, Artificial Sequence
  Synthetic
agcaaaauaacugagaccu

SEQ ID NO: 643662 - RNA, 20 nt, Artificial Sequence
  Synthetic
gagcaaaauaacugagaccu

SEQ ID NO: 643663 - RNA, 21 nt, Artificial Sequence
  Synthetic
agagcaaaauaacugagaccu

SEQ ID NO: 643664 - RNA, 22 nt, Artificial Sequence
  Synthetic
gagagcaaaauaacugagaccu

SEQ ID NO: 643665 - RNA, 23 nt, Artificial Sequence
  Synthetic
agagagcaaaauaacugagaccu

SEQ ID NO: 643666 - RNA, 24 nt, Artificial Sequence
  Synthetic
gagagagcaaaauaacugagaccu

SEQ ID NO: 643667 - RNA, 18 nt, Artificial Sequence
  Synthetic
aaccaaacugugagaccu

SEQ ID NO: 643668 - RNA, 19 nt, Artificial Sequence
  Synthetic
gaaccaaacugugagaccu

SEQ ID NO: 643669 - RNA, 20 nt, Artificial Sequence
  Synthetic
agaaccaaacugugagaccu

SEQ ID NO: 643670 - RNA, 21 nt, Artificial Sequence
  Synthetic
uagaaccaaacugugagaccu

SEQ ID NO: 643671 - RNA, 22 nt, Artificial Sequence
  Synthetic
auagaaccaaacugugagaccu

SEQ ID NO: 643672 - RNA, 23 nt, Artificial Sequence
  Synthetic
aauagaaccaaacugugagaccu

SEQ ID NO: 643673 - RNA, 24 nt, Artificial Sequence
  Synthetic
gaauagaaccaaacugugagaccu

SEQ ID NO: 643674 - RNA, 18 nt, Artificial Sequence
  Synthetic
aacaauaguacuagaccu

SEQ ID NO: 643675 - RNA, 19 nt, Artificial Sequence
  Synthetic
aaacaauaguacuagaccu

SEQ ID NO: 643676 - RNA, 20 nt, Artificial Sequence
  Synthetic
aaaacaauaguacuagaccu

SEQ ID NO: 643677 - RNA, 21 nt, Artificial Sequence
  Synthetic
uaaaacaauaguacuagaccu

SEQ ID NO: 643678 - RNA, 22 nt, Artificial Sequence
  Synthetic
auaaaacaauaguacuagaccu

SEQ ID NO: 643679 - RNA, 23 nt, Artificial Sequence
  Synthetic
uauaaaacaauaguacuagaccu

SEQ ID NO: 643680 - RNA, 24 nt, Artificial Sequence
  Synthetic
uuauaaaacaauaguacuagaccu

SEQ ID NO: 643681 - RNA, 18 nt, Artificial Sequence
  Synthetic
ugggaggcagcacgaccu

SEQ ID NO: 643682 - RNA, 19 nt, Artificial Sequence
  Synthetic
augggaggcagcacgaccu

SEQ ID NO: 643683 - RNA, 20 nt, Artificial Sequence
  Synthetic
aaugggaggcagcacgaccu

SEQ ID NO: 643684 - RNA, 21 nt, Artificial Sequence
  Synthetic
aaaugggaggcagcacgaccu

SEQ ID NO: 643685 - RNA, 22 nt, Artificial Sequence
  Synthetic
gaaaugggaggcagcacgaccu

SEQ ID NO: 643686 - RNA, 23 nt, Artificial Sequence
  Synthetic
agaaaugggaggcagcacgaccu

SEQ ID NO: 643687 - RNA, 24 nt, Artificial Sequence
  Synthetic
gagaaaugggaggcagcacgaccu

SEQ ID NO: 643688 - RNA, 18 nt, Artificial Sequence
  Synthetic
gaaacuaagcagcgaccu

SEQ ID NO: 643689 - RNA, 19 nt, Artificial Sequence
  Synthetic
ggaaacuaagcagcgaccu

SEQ ID NO: 643690 - RNA, 20 nt, Artificial Sequence
  Synthetic
gggaaacuaagcagcgaccu

SEQ ID NO: 643691 - RNA, 21 nt, Artificial Sequence
  Synthetic
agggaaacuaagcagcgaccu

SEQ ID NO: 643692 - RNA, 22 nt, Artificial Sequence
  Synthetic
aagggaaacuaagcagcgaccu

SEQ ID NO: 643693 - RNA, 23 nt, Artificial Sequence
  Synthetic
caagggaaacuaagcagcgaccu

SEQ ID NO: 643694 - RNA, 24 nt, Artificial Sequence
  Synthetic
gcaagggaaacuaagcagcgaccu

SEQ ID NO: 643695 - RNA, 18 nt, Artificial Sequence
  Synthetic
uguccuuuuugaggaccu

SEQ ID NO: 643696 - RNA, 19 nt, Artificial Sequence
  Synthetic
auguccuuuuugaggaccu

SEQ ID NO: 643697 - RNA, 20 nt, Artificial Sequence
  Synthetic
cauguccuuuuugaggaccu

SEQ ID NO: 643698 - RNA, 21 nt, Artificial Sequence
  Synthetic
gcauguccuuuuugaggaccu

SEQ ID NO: 643699 - RNA, 22 nt, Artificial Sequence
  Synthetic
agcauguccuuuuugaggaccu

SEQ ID NO: 643700 - RNA, 23 nt, Artificial Sequence
  Synthetic
aagcauguccuuuuugaggaccu

SEQ ID NO: 643701 - RNA, 24 nt, Artificial Sequence
  Synthetic
uaagcauguccuuuuugaggaccu

SEQ ID NO: 643702 - RNA, 18 nt, Artificial Sequence
  Synthetic
aauuuaaauuuaggaccu

SEQ ID NO: 643703 - RNA, 19 nt, Artificial Sequence
  Synthetic
caauuuaaauuuaggaccu

SEQ ID NO: 643704 - RNA, 20 nt, Artificial Sequence
  Synthetic
ccaauuuaaauuuaggaccu

SEQ ID NO: 643705 - RNA, 21 nt, Artificial Sequence
  Synthetic
uccaauuuaaauuuaggaccu

SEQ ID NO: 643706 - RNA, 22 nt, Artificial Sequence
  Synthetic
cuccaauuuaaauuuaggaccu

SEQ ID NO: 643707 - RNA, 23 nt, Artificial Sequence
  Synthetic
acuccaauuuaaauuuaggaccu

SEQ ID NO: 643708 - RNA, 24 nt, Artificial Sequence
  Synthetic
cacuccaauuuaaauuuaggaccu

SEQ ID NO: 643709 - RNA, 18 nt, Artificial Sequence
  Synthetic
accugggcuguuggaccu

SEQ ID NO: 643710 - RNA, 19 nt, Artificial Sequence
  Synthetic
gaccugggcuguuggaccu

SEQ ID NO: 643711 - RNA, 20 nt, Artificial Sequence
  Synthetic
agaccugggcuguuggaccu

SEQ ID NO: 643712 - RNA, 21 nt, Artificial Sequence
  Synthetic
aagaccugggcuguuggaccu

SEQ ID NO: 643713 - RNA, 22 nt, Artificial Sequence
  Synthetic
gaagaccugggcuguuggaccu

SEQ ID NO: 643714 - RNA, 23 nt, Artificial Sequence
  Synthetic
agaagaccugggcuguuggaccu

SEQ ID NO: 643715 - RNA, 24 nt, Artificial Sequence
  Synthetic
gagaagaccugggcuguuggaccu

SEQ ID NO: 643716 - RNA, 18 nt, Artificial Sequence
  Synthetic
ccgucuucauaaugaccu

SEQ ID NO: 643717 - RNA, 19 nt, Artificial Sequence
  Synthetic
uccgucuucauaaugaccu

SEQ ID NO: 643718 - RNA, 20 nt, Artificial Sequence
  Synthetic
cuccgucuucauaaugaccu

SEQ ID NO: 643719 - RNA, 21 nt, Artificial Sequence
  Synthetic
acuccgucuucauaaugaccu

SEQ ID NO: 643720 - RNA, 22 nt, Artificial Sequence
  Synthetic
aacuccgucuucauaaugaccu

SEQ ID NO: 643721 - RNA, 23 nt, Artificial Sequence
  Synthetic
gaacuccgucuucauaaugaccu

SEQ ID NO: 643722 - RNA, 24 nt, Artificial Sequence
  Synthetic
ugaacuccgucuucauaaugaccu

SEQ ID NO: 643723 - RNA, 18 nt, Artificial Sequence
  Synthetic
ucagcauccuaaugaccu

SEQ ID NO: 643724 - RNA, 19 nt, Artificial Sequence
  Synthetic
cucagcauccuaaugaccu

SEQ ID NO: 643725 - RNA, 20 nt, Artificial Sequence
  Synthetic
ccucagcauccuaaugaccu

SEQ ID NO: 643726 - RNA, 21 nt, Artificial Sequence
  Synthetic
cccucagcauccuaaugaccu

SEQ ID NO: 643727 - RNA, 22 nt, Artificial Sequence
  Synthetic
acccucagcauccuaaugaccu

SEQ ID NO: 643728 - RNA, 23 nt, Artificial Sequence
  Synthetic
cacccucagcauccuaaugaccu

SEQ ID NO: 643729 - RNA, 24 nt, Artificial Sequence
  Synthetic
ccacccucagcauccuaaugaccu

SEQ ID NO: 643730 - RNA, 18 nt, Artificial Sequence
  Synthetic
gggucucccacaugaccu

SEQ ID NO: 643731 - RNA, 19 nt, Artificial Sequence
  Synthetic
agggucucccacaugaccu

SEQ ID NO: 643732 - RNA, 20 nt, Artificial Sequence
  Synthetic
uagggucucccacaugaccu

SEQ ID NO: 643733 - RNA, 21 nt, Artificial Sequence
  Synthetic
uuagggucucccacaugaccu

SEQ ID NO: 643734 - RNA, 22 nt, Artificial Sequence
  Synthetic
auuagggucucccacaugaccu

SEQ ID NO: 643735 - RNA, 23 nt, Artificial Sequence
  Synthetic
gauuagggucucccacaugaccu

SEQ ID NO: 643736 - RNA, 24 nt, Artificial Sequence
  Synthetic
ggauuagggucucccacaugaccu

SEQ ID NO: 643737 - RNA, 18 nt, Artificial Sequence
  Synthetic
cucuuugccacaugaccu

SEQ ID NO: 643738 - RNA, 19 nt, Artificial Sequence
  Synthetic
acucuuugccacaugaccu

SEQ ID NO: 643739 - RNA, 20 nt, Artificial Sequence
  Synthetic
uacucuuugccacaugaccu

SEQ ID NO: 643740 - RNA, 21 nt, Artificial Sequence
  Synthetic
auacucuuugccacaugaccu

SEQ ID NO: 643741 - RNA, 22 nt, Artificial Sequence
  Synthetic
cauacucuuugccacaugaccu

SEQ ID NO: 643742 - RNA, 23 nt, Artificial Sequence
  Synthetic
ucauacucuuugccacaugaccu

SEQ ID NO: 643743 - RNA, 24 nt, Artificial Sequence
  Synthetic
cucauacucuuugccacaugaccu

SEQ ID NO: 643744 - RNA, 18 nt, Artificial Sequence
  Synthetic
gcaauaucagcaugaccu

SEQ ID NO: 643745 - RNA, 19 nt, Artificial Sequence
  Synthetic
agcaauaucagcaugaccu

SEQ ID NO: 643746 - RNA, 20 nt, Artificial Sequence
  Synthetic
aagcaauaucagcaugaccu

SEQ ID NO: 643747 - RNA, 21 nt, Artificial Sequence
  Synthetic
aaagcaauaucagcaugaccu

SEQ ID NO: 643748 - RNA, 22 nt, Artificial Sequence
  Synthetic
caaagcaauaucagcaugaccu

SEQ ID NO: 643749 - RNA, 23 nt, Artificial Sequence
  Synthetic
ucaaagcaauaucagcaugaccu

SEQ ID NO: 643750 - RNA, 24 nt, Artificial Sequence
  Synthetic
aucaaagcaauaucagcaugaccu

SEQ ID NO: 643751 - RNA, 18 nt, Artificial Sequence
  Synthetic
ugucacauauuaugaccu

SEQ ID NO: 643752 - RNA, 19 nt, Artificial Sequence
  Synthetic
cugucacauauuaugaccu

SEQ ID NO: 643753 - RNA, 20 nt, Artificial Sequence
  Synthetic
gcugucacauauuaugaccu

SEQ ID NO: 643754 - RNA, 21 nt, Artificial Sequence
  Synthetic
agcugucacauauuaugaccu

SEQ ID NO: 643755 - RNA, 22 nt, Artificial Sequence
  Synthetic
uagcugucacauauuaugaccu

SEQ ID NO: 643756 - RNA, 23 nt, Artificial Sequence
  Synthetic
uuagcugucacauauuaugaccu

SEQ ID NO: 643757 - RNA, 24 nt, Artificial Sequence
  Synthetic
uuuagcugucacauauuaugaccu

SEQ ID NO: 643758 - RNA, 18 nt, Artificial Sequence
  Synthetic
uaggguggcaugugaccu

SEQ ID NO: 643759 - RNA, 19 nt, Artificial Sequence
  Synthetic
cuaggguggcaugugaccu

SEQ ID NO: 643760 - RNA, 20 nt, Artificial Sequence
  Synthetic
acuaggguggcaugugaccu

SEQ ID NO: 643761 - RNA, 21 nt, Artificial Sequence
  Synthetic
gacuaggguggcaugugaccu

SEQ ID NO: 643762 - RNA, 22 nt, Artificial Sequence
  Synthetic
ggacuaggguggcaugugaccu

SEQ ID NO: 643763 - RNA, 23 nt, Artificial Sequence
  Synthetic
aggacuaggguggcaugugaccu

SEQ ID NO: 643764 - RNA, 24 nt, Artificial Sequence
  Synthetic
gaggacuaggguggcaugugaccu

SEQ ID NO: 643765 - RNA, 18 nt, Artificial Sequence
  Synthetic
uaauuuccuuugugaccu

SEQ ID NO: 643766 - RNA, 19 nt, Artificial Sequence
  Synthetic
uuaauuuccuuugugaccu

SEQ ID NO: 643767 - RNA, 20 nt, Artificial Sequence
  Synthetic
uuuaauuuccuuugugaccu

SEQ ID NO: 643768 - RNA, 21 nt, Artificial Sequence
  Synthetic
auuuaauuuccuuugugaccu

SEQ ID NO: 643769 - RNA, 22 nt, Artificial Sequence
  Synthetic
aauuuaauuuccuuugugaccu

SEQ ID NO: 643770 - RNA, 23 nt, Artificial Sequence
  Synthetic
caauuuaauuuccuuugugaccu

SEQ ID NO: 643771 - RNA, 24 nt, Artificial Sequence
  Synthetic
acaauuuaauuuccuuugugaccu

SEQ ID NO: 643772 - RNA, 18 nt, Artificial Sequence
  Synthetic
uaugccaagcauugaccu

SEQ ID NO: 643773 - RNA, 19 nt, Artificial Sequence
  Synthetic
auaugccaagcauugaccu

SEQ ID NO: 643774 - RNA, 20 nt, Artificial Sequence
  Synthetic
uauaugccaagcauugaccu

SEQ ID NO: 643775 - RNA, 21 nt, Artificial Sequence
  Synthetic
auauaugccaagcauugaccu

SEQ ID NO: 643776 - RNA, 22 nt, Artificial Sequence
  Synthetic
uauauaugccaagcauugaccu

SEQ ID NO: 643777 - RNA, 23 nt, Artificial Sequence
  Synthetic
auauauaugccaagcauugaccu

SEQ ID NO: 643778 - RNA, 24 nt, Artificial Sequence
  Synthetic
gauauauaugccaagcauugaccu

SEQ ID NO: 643779 - RNA, 18 nt, Artificial Sequence
  Synthetic
ggguggaucacuugaccu

SEQ ID NO: 643780 - RNA, 19 nt, Artificial Sequence
  Synthetic
uggguggaucacuugaccu

SEQ ID NO: 643781 - RNA, 20 nt, Artificial Sequence
  Synthetic
guggguggaucacuugaccu

SEQ ID NO: 643782 - RNA, 21 nt, Artificial Sequence
  Synthetic
gguggguggaucacuugaccu

SEQ ID NO: 643783 - RNA, 22 nt, Artificial Sequence
  Synthetic
agguggguggaucacuugaccu

SEQ ID NO: 643784 - RNA, 23 nt, Artificial Sequence
  Synthetic
gagguggguggaucacuugaccu

SEQ ID NO: 643785 - RNA, 24 nt, Artificial Sequence
  Synthetic
ugagguggguggaucacuugaccu

SEQ ID NO: 643786 - RNA, 18 nt, Artificial Sequence
  Synthetic
uuucuuuauccuugaccu

SEQ ID NO: 643787 - RNA, 19 nt, Artificial Sequence
  Synthetic
cuuucuuuauccuugaccu

SEQ ID NO: 643788 - RNA, 20 nt, Artificial Sequence
  Synthetic
ucuuucuuuauccuugaccu

SEQ ID NO: 643789 - RNA, 21 nt, Artificial Sequence
  Synthetic
uucuuucuuuauccuugaccu

SEQ ID NO: 643790 - RNA, 22 nt, Artificial Sequence
  Synthetic
auucuuucuuuauccuugaccu

SEQ ID NO: 643791 - RNA, 23 nt, Artificial Sequence
  Synthetic
gauucuuucuuuauccuugaccu

SEQ ID NO: 643792 - RNA, 24 nt, Artificial Sequence
  Synthetic
ggauucuuucuuuauccuugaccu

SEQ ID NO: 643793 - RNA, 18 nt, Artificial Sequence
  Synthetic
caaccuccuccuugaccu

SEQ ID NO: 643794 - RNA, 19 nt, Artificial Sequence
  Synthetic
gcaaccuccuccuugaccu

SEQ ID NO: 643795 - RNA, 20 nt, Artificial Sequence
  Synthetic
ugcaaccuccuccuugaccu

SEQ ID NO: 643796 - RNA, 21 nt, Artificial Sequence
  Synthetic
uugcaaccuccuccuugaccu

SEQ ID NO: 643797 - RNA, 22 nt, Artificial Sequence
  Synthetic
uuugcaaccuccuccuugaccu

SEQ ID NO: 643798 - RNA, 23 nt, Artificial Sequence
  Synthetic
cuuugcaaccuccuccuugaccu

SEQ ID NO: 643799 - RNA, 24 nt, Artificial Sequence
  Synthetic
ucuuugcaaccuccuccuugaccu

SEQ ID NO: 643800 - RNA, 18 nt, Artificial Sequence
  Synthetic
gugagagggaguugaccu

SEQ ID NO: 643801 - RNA, 19 nt, Artificial Sequence
  Synthetic
ugugagagggaguugaccu

SEQ ID NO: 643802 - RNA, 20 nt, Artificial Sequence
  Synthetic
cugugagagggaguugaccu

SEQ ID NO: 643803 - RNA, 21 nt, Artificial Sequence
  Synthetic
acugugagagggaguugaccu

SEQ ID NO: 643804 - RNA, 22 nt, Artificial Sequence
  Synthetic
gacugugagagggaguugaccu

SEQ ID NO: 643805 - RNA, 23 nt, Artificial Sequence
  Synthetic
agacugugagagggaguugaccu

SEQ ID NO: 643806 - RNA, 24 nt, Artificial Sequence
  Synthetic
gagacugugagagggaguugaccu

SEQ ID NO: 643807 - RNA, 18 nt, Artificial Sequence
  Synthetic
ggagauuaaaaaauaccu

SEQ ID NO: 643808 - RNA, 19 nt, Artificial Sequence
  Synthetic
aggagauuaaaaaauaccu

SEQ ID NO: 643809 - RNA, 20 nt, Artificial Sequence
  Synthetic
uaggagauuaaaaaauaccu

SEQ ID NO: 643810 - RNA, 21 nt, Artificial Sequence
  Synthetic
guaggagauuaaaaaauaccu

SEQ ID NO: 643811 - RNA, 22 nt, Artificial Sequence
  Synthetic
uguaggagauuaaaaaauaccu

SEQ ID NO: 643812 - RNA, 23 nt, Artificial Sequence
  Synthetic
cuguaggagauuaaaaaauaccu

SEQ ID NO: 643813 - RNA, 24 nt, Artificial Sequence
  Synthetic
acuguaggagauuaaaaaauaccu

SEQ ID NO: 643814 - RNA, 18 nt, Artificial Sequence
  Synthetic
gauauuauuaaaauaccu

SEQ ID NO: 643815 - RNA, 19 nt, Artificial Sequence
  Synthetic
cgauauuauuaaaauaccu

SEQ ID NO: 643816 - RNA, 20 nt, Artificial Sequence
  Synthetic
ccgauauuauuaaaauaccu

SEQ ID NO: 643817 - RNA, 21 nt, Artificial Sequence
  Synthetic
cccgauauuauuaaaauaccu

SEQ ID NO: 643818 - RNA, 22 nt, Artificial Sequence
  Synthetic
acccgauauuauuaaaauaccu

SEQ ID NO: 643819 - RNA, 23 nt, Artificial Sequence
  Synthetic
aacccgauauuauuaaaauaccu

SEQ ID NO: 643820 - RNA, 24 nt, Artificial Sequence
  Synthetic
gaacccgauauuauuaaaauaccu

SEQ ID NO: 643821 - RNA, 18 nt, Artificial Sequence
  Synthetic
ccugaguuagaaauaccu

SEQ ID NO: 643822 - RNA, 19 nt, Artificial Sequence
  Synthetic
uccugaguuagaaauaccu

SEQ ID NO: 643823 - RNA, 20 nt, Artificial Sequence
  Synthetic
auccugaguuagaaauaccu

SEQ ID NO: 643824 - RNA, 21 nt, Artificial Sequence
  Synthetic
uauccugaguuagaaauaccu

SEQ ID NO: 643825 - RNA, 22 nt, Artificial Sequence
  Synthetic
auauccugaguuagaaauaccu

SEQ ID NO: 643826 - RNA, 23 nt, Artificial Sequence
  Synthetic
cauauccugaguuagaaauaccu

SEQ ID NO: 643827 - RNA, 24 nt, Artificial Sequence
  Synthetic
acauauccugaguuagaaauaccu

SEQ ID NO: 643828 - RNA, 18 nt, Artificial Sequence
  Synthetic
aucuaauagacaauaccu

SEQ ID NO: 643829 - RNA, 19 nt, Artificial Sequence
  Synthetic
caucuaauagacaauaccu

SEQ ID NO: 643830 - RNA, 20 nt, Artificial Sequence
  Synthetic
ccaucuaauagacaauaccu

SEQ ID NO: 643831 - RNA, 21 nt, Artificial Sequence
  Synthetic
accaucuaauagacaauaccu

SEQ ID NO: 643832 - RNA, 22 nt, Artificial Sequence
  Synthetic
aaccaucuaauagacaauaccu

SEQ ID NO: 643833 - RNA, 23 nt, Artificial Sequence
  Synthetic
caaccaucuaauagacaauaccu

SEQ ID NO: 643834 - RNA, 24 nt, Artificial Sequence
  Synthetic
gcaaccaucuaauagacaauaccu

SEQ ID NO: 643835 - RNA, 18 nt, Artificial Sequence
  Synthetic
ucuccuuugucaauaccu

SEQ ID NO: 643836 - RNA, 19 nt, Artificial Sequence
  Synthetic
cucuccuuugucaauaccu

SEQ ID NO: 643837 - RNA, 20 nt, Artificial Sequence
  Synthetic
gcucuccuuugucaauaccu

SEQ ID NO: 643838 - RNA, 21 nt, Artificial Sequence
  Synthetic
agcucuccuuugucaauaccu

SEQ ID NO: 643839 - RNA, 22 nt, Artificial Sequence
  Synthetic
cagcucuccuuugucaauaccu

SEQ ID NO: 643840 - RNA, 23 nt, Artificial Sequence
  Synthetic
ucagcucuccuuugucaauaccu

SEQ ID NO: 643841 - RNA, 24 nt, Artificial Sequence
  Synthetic
cucagcucuccuuugucaauaccu

SEQ ID NO: 643842 - RNA, 18 nt, Artificial Sequence
  Synthetic
ucaucccugaacauaccu

SEQ ID NO: 643843 - RNA, 19 nt, Artificial Sequence
  Synthetic
gucaucccugaacauaccu

SEQ ID NO: 643844 - RNA, 20 nt, Artificial Sequence
  Synthetic
cgucaucccugaacauaccu

SEQ ID NO: 643845 - RNA, 21 nt, Artificial Sequence
  Synthetic
acgucaucccugaacauaccu

SEQ ID NO: 643846 - RNA, 22 nt, Artificial Sequence
  Synthetic
aacgucaucccugaacauaccu

SEQ ID NO: 643847 - RNA, 23 nt, Artificial Sequence
  Synthetic
uaacgucaucccugaacauaccu

SEQ ID NO: 643848 - RNA, 24 nt, Artificial Sequence
  Synthetic
guaacgucaucccugaacauaccu

SEQ ID NO: 643849 - RNA, 18 nt, Artificial Sequence
  Synthetic
aauaugaagcccauaccu

SEQ ID NO: 643850 - RNA, 19 nt, Artificial Sequence
  Synthetic
aaauaugaagcccauaccu

SEQ ID NO: 643851 - RNA, 20 nt, Artificial Sequence
  Synthetic
aaaauaugaagcccauaccu

SEQ ID NO: 643852 - RNA, 21 nt, Artificial Sequence
  Synthetic
aaaaauaugaagcccauaccu

SEQ ID NO: 643853 - RNA, 22 nt, Artificial Sequence
  Synthetic
aaaaaauaugaagcccauaccu

SEQ ID NO: 643854 - RNA, 23 nt, Artificial Sequence
  Synthetic
caaaaaauaugaagcccauaccu

SEQ ID NO: 643855 - RNA, 24 nt, Artificial Sequence
  Synthetic
ucaaaaaauaugaagcccauaccu

SEQ ID NO: 643856 - RNA, 18 nt, Artificial Sequence
  Synthetic
agugaaccucccauaccu

SEQ ID NO: 643857 - RNA, 19 nt, Artificial Sequence
  Synthetic
aagugaaccucccauaccu

SEQ ID NO: 643858 - RNA, 20 nt, Artificial Sequence
  Synthetic
aaagugaaccucccauaccu

SEQ ID NO: 643859 - RNA, 21 nt, Artificial Sequence
  Synthetic
gaaagugaaccucccauaccu

SEQ ID NO: 643860 - RNA, 22 nt, Artificial Sequence
  Synthetic
agaaagugaaccucccauaccu

SEQ ID NO: 643861 - RNA, 23 nt, Artificial Sequence
  Synthetic
gagaaagugaaccucccauaccu

SEQ ID NO: 643862 - RNA, 24 nt, Artificial Sequence
  Synthetic
agagaaagugaaccucccauaccu

SEQ ID NO: 643863 - RNA, 18 nt, Artificial Sequence
  Synthetic
caggguuacuugauaccu

SEQ ID NO: 643864 - RNA, 19 nt, Artificial Sequence
  Synthetic
ccaggguuacuugauaccu

SEQ ID NO: 643865 - RNA, 20 nt, Artificial Sequence
  Synthetic
uccaggguuacuugauaccu

SEQ ID NO: 643866 - RNA, 21 nt, Artificial Sequence
  Synthetic
cuccaggguuacuugauaccu

SEQ ID NO: 643867 - RNA, 22 nt, Artificial Sequence
  Synthetic
acuccaggguuacuugauaccu

SEQ ID NO: 643868 - RNA, 23 nt, Artificial Sequence
  Synthetic
aacuccaggguuacuugauaccu

SEQ ID NO: 643869 - RNA, 24 nt, Artificial Sequence
  Synthetic
caacuccaggguuacuugauaccu

SEQ ID NO: 643870 - RNA, 18 nt, Artificial Sequence
  Synthetic
auaccuaacauuauaccu

SEQ ID NO: 643871 - RNA, 19 nt, Artificial Sequence
  Synthetic
aauaccuaacauuauaccu

SEQ ID NO: 643872 - RNA, 20 nt, Artificial Sequence
  Synthetic
aaauaccuaacauuauaccu

SEQ ID NO: 643873 - RNA, 21 nt, Artificial Sequence
  Synthetic
gaaauaccuaacauuauaccu

SEQ ID NO: 643874 - RNA, 22 nt, Artificial Sequence
  Synthetic
ugaaauaccuaacauuauaccu

SEQ ID NO: 643875 - RNA, 23 nt, Artificial Sequence
  Synthetic
augaaauaccuaacauuauaccu

SEQ ID NO: 643876 - RNA, 24 nt, Artificial Sequence
  Synthetic
aaugaaauaccuaacauuauaccu

SEQ ID NO: 643877 - RNA, 18 nt, Artificial Sequence
  Synthetic
guuaggacuguuauaccu

SEQ ID NO: 643878 - RNA, 19 nt, Artificial Sequence
  Synthetic
aguuaggacuguuauaccu

SEQ ID NO: 643879 - RNA, 20 nt, Artificial Sequence
  Synthetic
aaguuaggacuguuauaccu

SEQ ID NO: 643880 - RNA, 21 nt, Artificial Sequence
  Synthetic
aaaguuaggacuguuauaccu

SEQ ID NO: 643881 - RNA, 22 nt, Artificial Sequence
  Synthetic
gaaaguuaggacuguuauaccu

SEQ ID NO: 643882 - RNA, 23 nt, Artificial Sequence
  Synthetic
cgaaaguuaggacuguuauaccu

SEQ ID NO: 643883 - RNA, 24 nt, Artificial Sequence
  Synthetic
gcgaaaguuaggacuguuauaccu

SEQ ID NO: 643884 - RNA, 18 nt, Artificial Sequence
  Synthetic
cuugccacuuuuauaccu

SEQ ID NO: 643885 - RNA, 19 nt, Artificial Sequence
  Synthetic
ucuugccacuuuuauaccu

SEQ ID NO: 643886 - RNA, 20 nt, Artificial Sequence
  Synthetic
cucuugccacuuuuauaccu

SEQ ID NO: 643887 - RNA, 21 nt, Artificial Sequence
  Synthetic
ccucuugccacuuuuauaccu

SEQ ID NO: 643888 - RNA, 22 nt, Artificial Sequence
  Synthetic
gccucuugccacuuuuauaccu

SEQ ID NO: 643889 - RNA, 23 nt, Artificial Sequence
  Synthetic
agccucuugccacuuuuauaccu

SEQ ID NO: 643890 - RNA, 24 nt, Artificial Sequence
  Synthetic
uagccucuugccacuuuuauaccu

SEQ ID NO: 643891 - RNA, 18 nt, Artificial Sequence
  Synthetic
ugggcacaagaacuaccu

SEQ ID NO: 643892 - RNA, 19 nt, Artificial Sequence
  Synthetic
gugggcacaagaacuaccu

SEQ ID NO: 643893 - RNA, 20 nt, Artificial Sequence
  Synthetic
agugggcacaagaacuaccu

SEQ ID NO: 643894 - RNA, 21 nt, Artificial Sequence
  Synthetic
aagugggcacaagaacuaccu

SEQ ID NO: 643895 - RNA, 22 nt, Artificial Sequence
  Synthetic
uaagugggcacaagaacuaccu

SEQ ID NO: 643896 - RNA, 23 nt, Artificial Sequence
  Synthetic
uuaagugggcacaagaacuaccu

SEQ ID NO: 643897 - RNA, 24 nt, Artificial Sequence
  Synthetic
uuuaagugggcacaagaacuaccu

SEQ ID NO: 643898 - RNA, 18 nt, Artificial Sequence
  Synthetic
gagaaguagguacuaccu

SEQ ID NO: 643899 - RNA, 19 nt, Artificial Sequence
  Synthetic
agagaaguagguacuaccu

SEQ ID NO: 643900 - RNA, 20 nt, Artificial Sequence
  Synthetic
uagagaaguagguacuaccu

SEQ ID NO: 643901 - RNA, 21 nt, Artificial Sequence
  Synthetic
uuagagaaguagguacuaccu

SEQ ID NO: 643902 - RNA, 22 nt, Artificial Sequence
  Synthetic
auuagagaaguagguacuaccu

SEQ ID NO: 643903 - RNA, 23 nt, Artificial Sequence
  Synthetic
cauuagagaaguagguacuaccu

SEQ ID NO: 643904 - RNA, 24 nt, Artificial Sequence
  Synthetic
gcauuagagaaguagguacuaccu

SEQ ID NO: 643905 - RNA, 18 nt, Artificial Sequence
  Synthetic
augcagccauuacuaccu

SEQ ID NO: 643906 - RNA, 19 nt, Artificial Sequence
  Synthetic
aaugcagccauuacuaccu

SEQ ID NO: 643907 - RNA, 20 nt, Artificial Sequence
  Synthetic
caaugcagccauuacuaccu

SEQ ID NO: 643908 - RNA, 21 nt, Artificial Sequence
  Synthetic
acaaugcagccauuacuaccu

SEQ ID NO: 643909 - RNA, 22 nt, Artificial Sequence
  Synthetic
aacaaugcagccauuacuaccu

SEQ ID NO: 643910 - RNA, 23 nt, Artificial Sequence
  Synthetic
aaacaaugcagccauuacuaccu

SEQ ID NO: 643911 - RNA, 24 nt, Artificial Sequence
  Synthetic
aaaacaaugcagccauuacuaccu

SEQ ID NO: 643912 - RNA, 18 nt, Artificial Sequence
  Synthetic
acugugacauaccuaccu

SEQ ID NO: 643913 - RNA, 19 nt, Artificial Sequence
  Synthetic
aacugugacauaccuaccu

SEQ ID NO: 643914 - RNA, 20 nt, Artificial Sequence
  Synthetic
aaacugugacauaccuaccu

SEQ ID NO: 643915 - RNA, 21 nt, Artificial Sequence
  Synthetic
caaacugugacauaccuaccu

SEQ ID NO: 643916 - RNA, 22 nt, Artificial Sequence
  Synthetic
ucaaacugugacauaccuaccu

SEQ ID NO: 643917 - RNA, 23 nt, Artificial Sequence
  Synthetic
cucaaacugugacauaccuaccu

SEQ ID NO: 643918 - RNA, 24 nt, Artificial Sequence
  Synthetic
ucucaaacugugacauaccuaccu

SEQ ID NO: 643919 - RNA, 18 nt, Artificial Sequence
  Synthetic
ccuucucuuguccuaccu

SEQ ID NO: 643920 - RNA, 19 nt, Artificial Sequence
  Synthetic
uccuucucuuguccuaccu

SEQ ID NO: 643921 - RNA, 20 nt, Artificial Sequence
  Synthetic
auccuucucuuguccuaccu

SEQ ID NO: 643922 - RNA, 21 nt, Artificial Sequence
  Synthetic
cauccuucucuuguccuaccu

SEQ ID NO: 643923 - RNA, 22 nt, Artificial Sequence
  Synthetic
ccauccuucucuuguccuaccu

SEQ ID NO: 643924 - RNA, 23 nt, Artificial Sequence
  Synthetic
uccauccuucucuuguccuaccu

SEQ ID NO: 643925 - RNA, 24 nt, Artificial Sequence
  Synthetic
uuccauccuucucuuguccuaccu

SEQ ID NO: 643926 - RNA, 18 nt, Artificial Sequence
  Synthetic
aaauacccagugcuaccu

SEQ ID NO: 643927 - RNA, 19 nt, Artificial Sequence
  Synthetic
caaauacccagugcuaccu

SEQ ID NO: 643928 - RNA, 20 nt, Artificial Sequence
  Synthetic
acaaauacccagugcuaccu

SEQ ID NO: 643929 - RNA, 21 nt, Artificial Sequence
  Synthetic
cacaaauacccagugcuaccu

SEQ ID NO: 643930 - RNA, 22 nt, Artificial Sequence
  Synthetic
ccacaaauacccagugcuaccu

SEQ ID NO: 643931 - RNA, 23 nt, Artificial Sequence
  Synthetic
uccacaaauacccagugcuaccu

SEQ ID NO: 643932 - RNA, 24 nt, Artificial Sequence
  Synthetic
guccacaaauacccagugcuaccu

SEQ ID NO: 643933 - RNA, 18 nt, Artificial Sequence
  Synthetic
caaacuucaacucuaccu

SEQ ID NO: 643934 - RNA, 19 nt, Artificial Sequence
  Synthetic
gcaaacuucaacucuaccu

SEQ ID NO: 643935 - RNA, 20 nt, Artificial Sequence
  Synthetic
ugcaaacuucaacucuaccu

SEQ ID NO: 643936 - RNA, 21 nt, Artificial Sequence
  Synthetic
gugcaaacuucaacucuaccu

SEQ ID NO: 643937 - RNA, 22 nt, Artificial Sequence
  Synthetic
ggugcaaacuucaacucuaccu

SEQ ID NO: 643938 - RNA, 23 nt, Artificial Sequence
  Synthetic
aggugcaaacuucaacucuaccu

SEQ ID NO: 643939 - RNA, 24 nt, Artificial Sequence
  Synthetic
caggugcaaacuucaacucuaccu

SEQ ID NO: 643940 - RNA, 18 nt, Artificial Sequence
  Synthetic
gccagaagacaaguaccu

SEQ ID NO: 643941 - RNA, 19 nt, Artificial Sequence
  Synthetic
ggccagaagacaaguaccu

SEQ ID NO: 643942 - RNA, 20 nt, Artificial Sequence
  Synthetic
cggccagaagacaaguaccu

SEQ ID NO: 643943 - RNA, 21 nt, Artificial Sequence
  Synthetic
ccggccagaagacaaguaccu

SEQ ID NO: 643944 - RNA, 22 nt, Artificial Sequence
  Synthetic
gccggccagaagacaaguaccu

SEQ ID NO: 643945 - RNA, 23 nt, Artificial Sequence
  Synthetic
agccggccagaagacaaguaccu

SEQ ID NO: 643946 - RNA, 24 nt, Artificial Sequence
  Synthetic
gagccggccagaagacaaguaccu

SEQ ID NO: 643947 - RNA, 18 nt, Artificial Sequence
  Synthetic
accuucaauuaaguaccu

SEQ ID NO: 643948 - RNA, 19 nt, Artificial Sequence
  Synthetic
gaccuucaauuaaguaccu

SEQ ID NO: 643949 - RNA, 20 nt, Artificial Sequence
  Synthetic
ggaccuucaauuaaguaccu

SEQ ID NO: 643950 - RNA, 21 nt, Artificial Sequence
  Synthetic
aggaccuucaauuaaguaccu

SEQ ID NO: 643951 - RNA, 22 nt, Artificial Sequence
  Synthetic
gaggaccuucaauuaaguaccu

SEQ ID NO: 643952 - RNA, 23 nt, Artificial Sequence
  Synthetic
agaggaccuucaauuaaguaccu

SEQ ID NO: 643953 - RNA, 24 nt, Artificial Sequence
  Synthetic
cagaggaccuucaauuaaguaccu

SEQ ID NO: 643954 - RNA, 18 nt, Artificial Sequence
  Synthetic
acagaagaguagguaccu

SEQ ID NO: 643955 - RNA, 19 nt, Artificial Sequence
  Synthetic
aacagaagaguagguaccu

SEQ ID NO: 643956 - RNA, 20 nt, Artificial Sequence
  Synthetic
aaacagaagaguagguaccu

SEQ ID NO: 643957 - RNA, 21 nt, Artificial Sequence
  Synthetic
gaaacagaagaguagguaccu

SEQ ID NO: 643958 - RNA, 22 nt, Artificial Sequence
  Synthetic
agaaacagaagaguagguaccu

SEQ ID NO: 643959 - RNA, 23 nt, Artificial Sequence
  Synthetic
gagaaacagaagaguagguaccu

SEQ ID NO: 643960 - RNA, 24 nt, Artificial Sequence
  Synthetic
ggagaaacagaagaguagguaccu

SEQ ID NO: 643961 - RNA, 18 nt, Artificial Sequence
  Synthetic
aauauuaacuggguaccu

SEQ ID NO: 643962 - RNA, 19 nt, Artificial Sequence
  Synthetic
aaauauuaacuggguaccu

SEQ ID NO: 643963 - RNA, 20 nt, Artificial Sequence
  Synthetic
caaauauuaacuggguaccu

SEQ ID NO: 643964 - RNA, 21 nt, Artificial Sequence
  Synthetic
acaaauauuaacuggguaccu

SEQ ID NO: 643965 - RNA, 22 nt, Artificial Sequence
  Synthetic
aacaaauauuaacuggguaccu

SEQ ID NO: 643966 - RNA, 23 nt, Artificial Sequence
  Synthetic
gaacaaauauuaacuggguaccu

SEQ ID NO: 643967 - RNA, 24 nt, Artificial Sequence
  Synthetic
ugaacaaauauuaacuggguaccu

SEQ ID NO: 643968 - RNA, 18 nt, Artificial Sequence
  Synthetic
aaaaauguucauguaccu

SEQ ID NO: 643969 - RNA, 19 nt, Artificial Sequence
  Synthetic
gaaaaauguucauguaccu

SEQ ID NO: 643970 - RNA, 20 nt, Artificial Sequence
  Synthetic
ggaaaaauguucauguaccu

SEQ ID NO: 643971 - RNA, 21 nt, Artificial Sequence
  Synthetic
gggaaaaauguucauguaccu

SEQ ID NO: 643972 - RNA, 22 nt, Artificial Sequence
  Synthetic
ggggaaaaauguucauguaccu

SEQ ID NO: 643973 - RNA, 23 nt, Artificial Sequence
  Synthetic
gggggaaaaauguucauguaccu

SEQ ID NO: 643974 - RNA, 24 nt, Artificial Sequence
  Synthetic
ugggggaaaaauguucauguaccu

SEQ ID NO: 643975 - RNA, 18 nt, Artificial Sequence
  Synthetic
gcaaguggauuuguaccu

SEQ ID NO: 643976 - RNA, 19 nt, Artificial Sequence
  Synthetic
ggcaaguggauuuguaccu

SEQ ID NO: 643977 - RNA, 20 nt, Artificial Sequence
  Synthetic
aggcaaguggauuuguaccu

SEQ ID NO: 643978 - RNA, 21 nt, Artificial Sequence
  Synthetic
aaggcaaguggauuuguaccu

SEQ ID NO: 643979 - RNA, 22 nt, Artificial Sequence
  Synthetic
gaaggcaaguggauuuguaccu

SEQ ID NO: 643980 - RNA, 23 nt, Artificial Sequence
  Synthetic
ggaaggcaaguggauuuguaccu

SEQ ID NO: 643981 - RNA, 24 nt, Artificial Sequence
  Synthetic
aggaaggcaaguggauuuguaccu

SEQ ID NO: 643982 - RNA, 18 nt, Artificial Sequence
  Synthetic
uucucauuacaauuaccu

SEQ ID NO: 643983 - RNA, 19 nt, Artificial Sequence
  Synthetic
cuucucauuacaauuaccu

SEQ ID NO: 643984 - RNA, 20 nt, Artificial Sequence
  Synthetic
gcuucucauuacaauuaccu

SEQ ID NO: 643985 - RNA, 21 nt, Artificial Sequence
  Synthetic
ugcuucucauuacaauuaccu

SEQ ID NO: 643986 - RNA, 22 nt, Artificial Sequence
  Synthetic
augcuucucauuacaauuaccu

SEQ ID NO: 643987 - RNA, 23 nt, Artificial Sequence
  Synthetic
gaugcuucucauuacaauuaccu

SEQ ID NO: 643988 - RNA, 24 nt, Artificial Sequence
  Synthetic
agaugcuucucauuacaauuaccu

SEQ ID NO: 643989 - RNA, 18 nt, Artificial Sequence
  Synthetic
uuccacauucaauuaccu

SEQ ID NO: 643990 - RNA, 19 nt, Artificial Sequence
  Synthetic
guuccacauucaauuaccu

SEQ ID NO: 643991 - RNA, 20 nt, Artificial Sequence
  Synthetic
aguuccacauucaauuaccu

SEQ ID NO: 643992 - RNA, 21 nt, Artificial Sequence
  Synthetic
uaguuccacauucaauuaccu

SEQ ID NO: 643993 - RNA, 22 nt, Artificial Sequence
  Synthetic
auaguuccacauucaauuaccu

SEQ ID NO: 643994 - RNA, 23 nt, Artificial Sequence
  Synthetic
uauaguuccacauucaauuaccu

SEQ ID NO: 643995 - RNA, 24 nt, Artificial Sequence
  Synthetic
uuauaguuccacauucaauuaccu

SEQ ID NO: 643996 - RNA, 18 nt, Artificial Sequence
  Synthetic
gaucuauauacauuaccu

SEQ ID NO: 643997 - RNA, 19 nt, Artificial Sequence
  Synthetic
agaucuauauacauuaccu

SEQ ID NO: 643998 - RNA, 20 nt, Artificial Sequence
  Synthetic
aagaucuauauacauuaccu

SEQ ID NO: 643999 - RNA, 21 nt, Artificial Sequence
  Synthetic
uaagaucuauauacauuaccu

SEQ ID NO: 644000 - RNA, 22 nt, Artificial Sequence
  Synthetic
auaagaucuauauacauuaccu

SEQ ID NO: 644001 - RNA, 23 nt, Artificial Sequence
  Synthetic
uauaagaucuauauacauuaccu

SEQ ID NO: 644002 - RNA, 24 nt, Artificial Sequence
  Synthetic
guauaagaucuauauacauuaccu

SEQ ID NO: 644003 - RNA, 18 nt, Artificial Sequence
  Synthetic
auaucuucuacauuaccu

SEQ ID NO: 644004 - RNA, 19 nt, Artificial Sequence
  Synthetic
aauaucuucuacauuaccu

SEQ ID NO: 644005 - RNA, 20 nt, Artificial Sequence
  Synthetic
uaauaucuucuacauuaccu

SEQ ID NO: 644006 - RNA, 21 nt, Artificial Sequence
  Synthetic
guaauaucuucuacauuaccu

SEQ ID NO: 644007 - RNA, 22 nt, Artificial Sequence
  Synthetic
gguaauaucuucuacauuaccu

SEQ ID NO: 644008 - RNA, 23 nt, Artificial Sequence
  Synthetic
agguaauaucuucuacauuaccu

SEQ ID NO: 644009 - RNA, 24 nt, Artificial Sequence
  Synthetic
cagguaauaucuucuacauuaccu

SEQ ID NO: 644010 - RNA, 18 nt, Artificial Sequence
  Synthetic
auuuggauuucauuaccu

SEQ ID NO: 644011 - RNA, 19 nt, Artificial Sequence
  Synthetic
cauuuggauuucauuaccu

SEQ ID NO: 644012 - RNA, 20 nt, Artificial Sequence
  Synthetic
gcauuuggauuucauuaccu

SEQ ID NO: 644013 - RNA, 21 nt, Artificial Sequence
  Synthetic
agcauuuggauuucauuaccu

SEQ ID NO: 644014 - RNA, 22 nt, Artificial Sequence
  Synthetic
cagcauuuggauuucauuaccu

SEQ ID NO: 644015 - RNA, 23 nt, Artificial Sequence
  Synthetic
ccagcauuuggauuucauuaccu

SEQ ID NO: 644016 - RNA, 24 nt, Artificial Sequence
  Synthetic
gccagcauuuggauuucauuaccu

SEQ ID NO: 644017 - RNA, 18 nt, Artificial Sequence
  Synthetic
acauagauaagauuaccu

SEQ ID NO: 644018 - RNA, 19 nt, Artificial Sequence
  Synthetic
aacauagauaagauuaccu

SEQ ID NO: 644019 - RNA, 20 nt, Artificial Sequence
  Synthetic
gaacauagauaagauuaccu

SEQ ID NO: 644020 - RNA, 21 nt, Artificial Sequence
  Synthetic
ggaacauagauaagauuaccu

SEQ ID NO: 644021 - RNA, 22 nt, Artificial Sequence
  Synthetic
aggaacauagauaagauuaccu

SEQ ID NO: 644022 - RNA, 23 nt, Artificial Sequence
  Synthetic
caggaacauagauaagauuaccu

SEQ ID NO: 644023 - RNA, 24 nt, Artificial Sequence
  Synthetic
ucaggaacauagauaagauuaccu

SEQ ID NO: 644024 - RNA, 18 nt, Artificial Sequence
  Synthetic
ucugcuaucggauuaccu

SEQ ID NO: 644025 - RNA, 19 nt, Artificial Sequence
  Synthetic
uucugcuaucggauuaccu

SEQ ID NO: 644026 - RNA, 20 nt, Artificial Sequence
  Synthetic
auucugcuaucggauuaccu

SEQ ID NO: 644027 - RNA, 21 nt, Artificial Sequence
  Synthetic
aauucugcuaucggauuaccu

SEQ ID NO: 644028 - RNA, 22 nt, Artificial Sequence
  Synthetic
gaauucugcuaucggauuaccu

SEQ ID NO: 644029 - RNA, 23 nt, Artificial Sequence
  Synthetic
ggaauucugcuaucggauuaccu

SEQ ID NO: 644030 - RNA, 24 nt, Artificial Sequence
  Synthetic
aggaauucugcuaucggauuaccu

SEQ ID NO: 644031 - RNA, 18 nt, Artificial Sequence
  Synthetic
aaaguauaugacuuaccu

SEQ ID NO: 644032 - RNA, 19 nt, Artificial Sequence
  Synthetic
aaaaguauaugacuuaccu

SEQ ID NO: 644033 - RNA, 20 nt, Artificial Sequence
  Synthetic
aaaaaguauaugacuuaccu

SEQ ID NO: 644034 - RNA, 21 nt, Artificial Sequence
  Synthetic
aaaaaaguauaugacuuaccu

SEQ ID NO: 644035 - RNA, 22 nt, Artificial Sequence
  Synthetic
gaaaaaaguauaugacuuaccu

SEQ ID NO: 644036 - RNA, 23 nt, Artificial Sequence
  Synthetic
ggaaaaaaguauaugacuuaccu

SEQ ID NO: 644037 - RNA, 24 nt, Artificial Sequence
  Synthetic
gggaaaaaaguauaugacuuaccu

SEQ ID NO: 644038 - RNA, 18 nt, Artificial Sequence
  Synthetic
auaauauaauaguuaccu

SEQ ID NO: 644039 - RNA, 19 nt, Artificial Sequence
  Synthetic
uauaauauaauaguuaccu

SEQ ID NO: 644040 - RNA, 20 nt, Artificial Sequence
  Synthetic
auauaauauaauaguuaccu

SEQ ID NO: 644041 - RNA, 21 nt, Artificial Sequence
  Synthetic
uauauaauauaauaguuaccu

SEQ ID NO: 644042 - RNA, 22 nt, Artificial Sequence
  Synthetic
uuauauaauauaauaguuaccu

SEQ ID NO: 644043 - RNA, 23 nt, Artificial Sequence
  Synthetic
uuuauauaauauaauaguuaccu

SEQ ID NO: 644044 - RNA, 24 nt, Artificial Sequence
  Synthetic
auuuauauaauauaauaguuaccu

SEQ ID NO: 644045 - RNA, 18 nt, Artificial Sequence
  Synthetic
augguguaaugguuaccu

SEQ ID NO: 644046 - RNA, 19 nt, Artificial Sequence
  Synthetic
aaugguguaaugguuaccu

SEQ ID NO: 644047 - RNA, 20 nt, Artificial Sequence
  Synthetic
aaaugguguaaugguuaccu

SEQ ID NO: 644048 - RNA, 21 nt, Artificial Sequence
  Synthetic
aaaaugguguaaugguuaccu

SEQ ID NO: 644049 - RNA, 22 nt, Artificial Sequence
  Synthetic
caaaaugguguaaugguuaccu

SEQ ID NO: 644050 - RNA, 23 nt, Artificial Sequence
  Synthetic
ucaaaaugguguaaugguuaccu

SEQ ID NO: 644051 - RNA, 24 nt, Artificial Sequence
  Synthetic
aucaaaaugguguaaugguuaccu

SEQ ID NO: 644052 - RNA, 18 nt, Artificial Sequence
  Synthetic
uuaaugguauauuuaccu

SEQ ID NO: 644053 - RNA, 19 nt, Artificial Sequence
  Synthetic
uuuaaugguauauuuaccu

SEQ ID NO: 644054 - RNA, 20 nt, Artificial Sequence
  Synthetic
auuuaaugguauauuuaccu

SEQ ID NO: 644055 - RNA, 21 nt, Artificial Sequence
  Synthetic
cauuuaaugguauauuuaccu

SEQ ID NO: 644056 - RNA, 22 nt, Artificial Sequence
  Synthetic
acauuuaaugguauauuuaccu

SEQ ID NO: 644057 - RNA, 23 nt, Artificial Sequence
  Synthetic
cacauuuaaugguauauuuaccu

SEQ ID NO: 644058 - RNA, 24 nt, Artificial Sequence
  Synthetic
ucacauuuaaugguauauuuaccu

SEQ ID NO: 644059 - RNA, 18 nt, Artificial Sequence
  Synthetic
acauugucuucuuuaccu

SEQ ID NO: 644060 - RNA, 19 nt, Artificial Sequence
  Synthetic
gacauugucuucuuuaccu

SEQ ID NO: 644061 - RNA, 20 nt, Artificial Sequence
  Synthetic
ggacauugucuucuuuaccu

SEQ ID NO: 644062 - RNA, 21 nt, Artificial Sequence
  Synthetic
gggacauugucuucuuuaccu

SEQ ID NO: 644063 - RNA, 22 nt, Artificial Sequence
  Synthetic
agggacauugucuucuuuaccu

SEQ ID NO: 644064 - RNA, 23 nt, Artificial Sequence
  Synthetic
cagggacauugucuucuuuaccu

SEQ ID NO: 644065 - RNA, 24 nt, Artificial Sequence
  Synthetic
ucagggacauugucuucuuuaccu

SEQ ID NO: 644066 - RNA, 18 nt, Artificial Sequence
  Synthetic
aaaggaaaauuuuuaccu

SEQ ID NO: 644067 - RNA, 19 nt, Artificial Sequence
  Synthetic
gaaaggaaaauuuuuaccu

SEQ ID NO: 644068 - RNA, 20 nt, Artificial Sequence
  Synthetic
ggaaaggaaaauuuuuaccu

SEQ ID NO: 644069 - RNA, 21 nt, Artificial Sequence
  Synthetic
aggaaaggaaaauuuuuaccu

SEQ ID NO: 644070 - RNA, 22 nt, Artificial Sequence
  Synthetic
aaggaaaggaaaauuuuuaccu

SEQ ID NO: 644071 - RNA, 23 nt, Artificial Sequence
  Synthetic
gaaggaaaggaaaauuuuuaccu

SEQ ID NO: 644072 - RNA, 24 nt, Artificial Sequence
  Synthetic
ggaaggaaaggaaaauuuuuaccu

SEQ ID NO: 644073 - RNA, 18 nt, Artificial Sequence
  Synthetic
gcaauaugauuuuuaccu

SEQ ID NO: 644074 - RNA, 19 nt, Artificial Sequence
  Synthetic
ugcaauaugauuuuuaccu

SEQ ID NO: 644075 - RNA, 20 nt, Artificial Sequence
  Synthetic
cugcaauaugauuuuuaccu

SEQ ID NO: 644076 - RNA, 21 nt, Artificial Sequence
  Synthetic
ucugcaauaugauuuuuaccu

SEQ ID NO: 644077 - RNA, 22 nt, Artificial Sequence
  Synthetic
gucugcaauaugauuuuuaccu

SEQ ID NO: 644078 - RNA, 23 nt, Artificial Sequence
  Synthetic
ugucugcaauaugauuuuuaccu

SEQ ID NO: 644079 - RNA, 24 nt, Artificial Sequence
  Synthetic
gugucugcaauaugauuuuuaccu

SEQ ID NO: 644080 - RNA, 18 nt, Artificial Sequence
  Synthetic
aggcaaaaaauaaacccu

SEQ ID NO: 644081 - RNA, 19 nt, Artificial Sequence
  Synthetic
uaggcaaaaaauaaacccu

SEQ ID NO: 644082 - RNA, 20 nt, Artificial Sequence
  Synthetic
uuaggcaaaaaauaaacccu

SEQ ID NO: 644083 - RNA, 21 nt, Artificial Sequence
  Synthetic
guuaggcaaaaaauaaacccu

SEQ ID NO: 644084 - RNA, 22 nt, Artificial Sequence
  Synthetic
uguuaggcaaaaaauaaacccu

SEQ ID NO: 644085 - RNA, 23 nt, Artificial Sequence
  Synthetic
uuguuaggcaaaaaauaaacccu

SEQ ID NO: 644086 - RNA, 24 nt, Artificial Sequence
  Synthetic
auuguuaggcaaaaaauaaacccu

SEQ ID NO: 644087 - RNA, 18 nt, Artificial Sequence
  Synthetic
ugcuuuagaguaaacccu

SEQ ID NO: 644088 - RNA, 19 nt, Artificial Sequence
  Synthetic
uugcuuuagaguaaacccu

SEQ ID NO: 644089 - RNA, 20 nt, Artificial Sequence
  Synthetic
guugcuuuagaguaaacccu

SEQ ID NO: 644090 - RNA, 21 nt, Artificial Sequence
  Synthetic
uguugcuuuagaguaaacccu

SEQ ID NO: 644091 - RNA, 22 nt, Artificial Sequence
  Synthetic
cuguugcuuuagaguaaacccu

SEQ ID NO: 644092 - RNA, 23 nt, Artificial Sequence
  Synthetic
ccuguugcuuuagaguaaacccu

SEQ ID NO: 644093 - RNA, 24 nt, Artificial Sequence
  Synthetic
cccuguugcuuuagaguaaacccu

SEQ ID NO: 644094 - RNA, 18 nt, Artificial Sequence
  Synthetic
acauacuguuuaaacccu

SEQ ID NO: 644095 - RNA, 19 nt, Artificial Sequence
  Synthetic
cacauacuguuuaaacccu

SEQ ID NO: 644096 - RNA, 20 nt, Artificial Sequence
  Synthetic
ucacauacuguuuaaacccu

SEQ ID NO: 644097 - RNA, 21 nt, Artificial Sequence
  Synthetic
gucacauacuguuuaaacccu

SEQ ID NO: 644098 - RNA, 22 nt, Artificial Sequence
  Synthetic
ggucacauacuguuuaaacccu

SEQ ID NO: 644099 - RNA, 23 nt, Artificial Sequence
  Synthetic
uggucacauacuguuuaaacccu

SEQ ID NO: 644100 - RNA, 24 nt, Artificial Sequence
  Synthetic
uuggucacauacuguuuaaacccu

SEQ ID NO: 644101 - RNA, 18 nt, Artificial Sequence
  Synthetic
cauucuaauaacaacccu

SEQ ID NO: 644102 - RNA, 19 nt, Artificial Sequence
  Synthetic
ucauucuaauaacaacccu

SEQ ID NO: 644103 - RNA, 20 nt, Artificial Sequence
  Synthetic
uucauucuaauaacaacccu

SEQ ID NO: 644104 - RNA, 21 nt, Artificial Sequence
  Synthetic
cuucauucuaauaacaacccu

SEQ ID NO: 644105 - RNA, 22 nt, Artificial Sequence
  Synthetic
acuucauucuaauaacaacccu

SEQ ID NO: 644106 - RNA, 23 nt, Artificial Sequence
  Synthetic
cacuucauucuaauaacaacccu

SEQ ID NO: 644107 - RNA, 24 nt, Artificial Sequence
  Synthetic
ucacuucauucuaauaacaacccu

SEQ ID NO: 644108 - RNA, 18 nt, Artificial Sequence
  Synthetic
guuauaaauagcaacccu

SEQ ID NO: 644109 - RNA, 19 nt, Artificial Sequence
  Synthetic
gguuauaaauagcaacccu

SEQ ID NO: 644110 - RNA, 20 nt, Artificial Sequence
  Synthetic
ugguuauaaauagcaacccu

SEQ ID NO: 644111 - RNA, 21 nt, Artificial Sequence
  Synthetic
gugguuauaaauagcaacccu

SEQ ID NO: 644112 - RNA, 22 nt, Artificial Sequence
  Synthetic
agugguuauaaauagcaacccu

SEQ ID NO: 644113 - RNA, 23 nt, Artificial Sequence
  Synthetic
aagugguuauaaauagcaacccu

SEQ ID NO: 644114 - RNA, 24 nt, Artificial Sequence
  Synthetic
gaagugguuauaaauagcaacccu

SEQ ID NO: 644115 - RNA, 18 nt, Artificial Sequence
  Synthetic
uuaacauaaccuaacccu

SEQ ID NO: 644116 - RNA, 19 nt, Artificial Sequence
  Synthetic
uuuaacauaaccuaacccu

SEQ ID NO: 644117 - RNA, 20 nt, Artificial Sequence
  Synthetic
guuuaacauaaccuaacccu

SEQ ID NO: 644118 - RNA, 21 nt, Artificial Sequence
  Synthetic
uguuuaacauaaccuaacccu

SEQ ID NO: 644119 - RNA, 22 nt, Artificial Sequence
  Synthetic
cuguuuaacauaaccuaacccu

SEQ ID NO: 644120 - RNA, 23 nt, Artificial Sequence
  Synthetic
ucuguuuaacauaaccuaacccu

SEQ ID NO: 644121 - RNA, 24 nt, Artificial Sequence
  Synthetic
aucuguuuaacauaaccuaacccu

SEQ ID NO: 644122 - RNA, 18 nt, Artificial Sequence
  Synthetic
aggggaacaucacacccu

SEQ ID NO: 644123 - RNA, 19 nt, Artificial Sequence
  Synthetic
aaggggaacaucacacccu

SEQ ID NO: 644124 - RNA, 20 nt, Artificial Sequence
  Synthetic
gaaggggaacaucacacccu

SEQ ID NO: 644125 - RNA, 21 nt, Artificial Sequence
  Synthetic
ggaaggggaacaucacacccu

SEQ ID NO: 644126 - RNA, 22 nt, Artificial Sequence
  Synthetic
aggaaggggaacaucacacccu

SEQ ID NO: 644127 - RNA, 23 nt, Artificial Sequence
  Synthetic
caggaaggggaacaucacacccu

SEQ ID NO: 644128 - RNA, 24 nt, Artificial Sequence
  Synthetic
acaggaaggggaacaucacacccu

SEQ ID NO: 644129 - RNA, 18 nt, Artificial Sequence
  Synthetic
uagcucagucuacacccu

SEQ ID NO: 644130 - RNA, 19 nt, Artificial Sequence
  Synthetic
guagcucagucuacacccu

SEQ ID NO: 644131 - RNA, 20 nt, Artificial Sequence
  Synthetic
aguagcucagucuacacccu

SEQ ID NO: 644132 - RNA, 21 nt, Artificial Sequence
  Synthetic
uaguagcucagucuacacccu

SEQ ID NO: 644133 - RNA, 22 nt, Artificial Sequence
  Synthetic
auaguagcucagucuacacccu

SEQ ID NO: 644134 - RNA, 23 nt, Artificial Sequence
  Synthetic
uauaguagcucagucuacacccu

SEQ ID NO: 644135 - RNA, 24 nt, Artificial Sequence
  Synthetic
uuauaguagcucagucuacacccu

SEQ ID NO: 644136 - RNA, 18 nt, Artificial Sequence
  Synthetic
agucaggaaaaccacccu

SEQ ID NO: 644137 - RNA, 19 nt, Artificial Sequence
  Synthetic
uagucaggaaaaccacccu

SEQ ID NO: 644138 - RNA, 20 nt, Artificial Sequence
  Synthetic
uuagucaggaaaaccacccu

SEQ ID NO: 644139 - RNA, 21 nt, Artificial Sequence
  Synthetic
auuagucaggaaaaccacccu

SEQ ID NO: 644140 - RNA, 22 nt, Artificial Sequence
  Synthetic
gauuagucaggaaaaccacccu

SEQ ID NO: 644141 - RNA, 23 nt, Artificial Sequence
  Synthetic
ugauuagucaggaaaaccacccu

SEQ ID NO: 644142 - RNA, 24 nt, Artificial Sequence
  Synthetic
cugauuagucaggaaaaccacccu

SEQ ID NO: 644143 - RNA, 18 nt, Artificial Sequence
  Synthetic
ggaaugagaaaccacccu

SEQ ID NO: 644144 - RNA, 19 nt, Artificial Sequence
  Synthetic
uggaaugagaaaccacccu

SEQ ID NO: 644145 - RNA, 20 nt, Artificial Sequence
  Synthetic
uuggaaugagaaaccacccu

SEQ ID NO: 644146 - RNA, 21 nt, Artificial Sequence
  Synthetic
auuggaaugagaaaccacccu

SEQ ID NO: 644147 - RNA, 22 nt, Artificial Sequence
  Synthetic
aauuggaaugagaaaccacccu

SEQ ID NO: 644148 - RNA, 23 nt, Artificial Sequence
  Synthetic
gaauuggaaugagaaaccacccu

SEQ ID NO: 644149 - RNA, 24 nt, Artificial Sequence
  Synthetic
agaauuggaaugagaaaccacccu

SEQ ID NO: 644150 - RNA, 18 nt, Artificial Sequence
  Synthetic
gaucuuguauaccacccu

SEQ ID NO: 644151 - RNA, 19 nt, Artificial Sequence
  Synthetic
ggaucuuguauaccacccu

SEQ ID NO: 644152 - RNA, 20 nt, Artificial Sequence
  Synthetic
aggaucuuguauaccacccu

SEQ ID NO: 644153 - RNA, 21 nt, Artificial Sequence
  Synthetic
aaggaucuuguauaccacccu

SEQ ID NO: 644154 - RNA, 22 nt, Artificial Sequence
  Synthetic
gaaggaucuuguauaccacccu

SEQ ID NO: 644155 - RNA, 23 nt, Artificial Sequence
  Synthetic
agaaggaucuuguauaccacccu

SEQ ID NO: 644156 - RNA, 24 nt, Artificial Sequence
  Synthetic
aagaaggaucuuguauaccacccu

SEQ ID NO: 644157 - RNA, 18 nt, Artificial Sequence
  Synthetic
aucauugccucccacccu

SEQ ID NO: 644158 - RNA, 19 nt, Artificial Sequence
  Synthetic
gaucauugccucccacccu

SEQ ID NO: 644159 - RNA, 20 nt, Artificial Sequence
  Synthetic
agaucauugccucccacccu

SEQ ID NO: 644160 - RNA, 21 nt, Artificial Sequence
  Synthetic
gagaucauugccucccacccu

SEQ ID NO: 644161 - RNA, 22 nt, Artificial Sequence
  Synthetic
ugagaucauugccucccacccu

SEQ ID NO: 644162 - RNA, 23 nt, Artificial Sequence
  Synthetic
gugagaucauugccucccacccu

SEQ ID NO: 644163 - RNA, 24 nt, Artificial Sequence
  Synthetic
ggugagaucauugccucccacccu

SEQ ID NO: 644164 - RNA, 18 nt, Artificial Sequence
  Synthetic
cacuaaggccugcacccu

SEQ ID NO: 644165 - RNA, 19 nt, Artificial Sequence
  Synthetic
ccacuaaggccugcacccu

SEQ ID NO: 644166 - RNA, 20 nt, Artificial Sequence
  Synthetic
gccacuaaggccugcacccu

SEQ ID NO: 644167 - RNA, 21 nt, Artificial Sequence
  Synthetic
agccacuaaggccugcacccu

SEQ ID NO: 644168 - RNA, 22 nt, Artificial Sequence
  Synthetic
aagccacuaaggccugcacccu

SEQ ID NO: 644169 - RNA, 23 nt, Artificial Sequence
  Synthetic
uaagccacuaaggccugcacccu

SEQ ID NO: 644170 - RNA, 24 nt, Artificial Sequence
  Synthetic
guaagccacuaaggccugcacccu

SEQ ID NO: 644171 - RNA, 18 nt, Artificial Sequence
  Synthetic
aagcccuuuagucacccu

SEQ ID NO: 644172 - RNA, 19 nt, Artificial Sequence
  Synthetic
uaagcccuuuagucacccu

SEQ ID NO: 644173 - RNA, 20 nt, Artificial Sequence
  Synthetic
uuaagcccuuuagucacccu

SEQ ID NO: 644174 - RNA, 21 nt, Artificial Sequence
  Synthetic
uuuaagcccuuuagucacccu

SEQ ID NO: 644175 - RNA, 22 nt, Artificial Sequence
  Synthetic
auuuaagcccuuuagucacccu

SEQ ID NO: 644176 - RNA, 23 nt, Artificial Sequence
  Synthetic
cauuuaagcccuuuagucacccu

SEQ ID NO: 644177 - RNA, 24 nt, Artificial Sequence
  Synthetic
ucauuuaagcccuuuagucacccu

SEQ ID NO: 644178 - RNA, 18 nt, Artificial Sequence
  Synthetic
acgggaacaauagacccu

SEQ ID NO: 644179 - RNA, 19 nt, Artificial Sequence
  Synthetic
uacgggaacaauagacccu

SEQ ID NO: 644180 - RNA, 20 nt, Artificial Sequence
  Synthetic
auacgggaacaauagacccu

SEQ ID NO: 644181 - RNA, 21 nt, Artificial Sequence
  Synthetic
aauacgggaacaauagacccu

SEQ ID NO: 644182 - RNA, 22 nt, Artificial Sequence
  Synthetic
aaauacgggaacaauagacccu

SEQ ID NO: 644183 - RNA, 23 nt, Artificial Sequence
  Synthetic
uaaauacgggaacaauagacccu

SEQ ID NO: 644184 - RNA, 24 nt, Artificial Sequence
  Synthetic
auaaauacgggaacaauagacccu

SEQ ID NO: 644185 - RNA, 18 nt, Artificial Sequence
  Synthetic
ugugguuuuagggacccu

SEQ ID NO: 644186 - RNA, 19 nt, Artificial Sequence
  Synthetic
uugugguuuuagggacccu

SEQ ID NO: 644187 - RNA, 20 nt, Artificial Sequence
  Synthetic
guugugguuuuagggacccu

SEQ ID NO: 644188 - RNA, 21 nt, Artificial Sequence
  Synthetic
aguugugguuuuagggacccu

SEQ ID NO: 644189 - RNA, 22 nt, Artificial Sequence
  Synthetic
aaguugugguuuuagggacccu

SEQ ID NO: 644190 - RNA, 23 nt, Artificial Sequence
  Synthetic
uaaguugugguuuuagggacccu

SEQ ID NO: 644191 - RNA, 24 nt, Artificial Sequence
  Synthetic
auaaguugugguuuuagggacccu

SEQ ID NO: 644192 - RNA, 18 nt, Artificial Sequence
  Synthetic
agauuccagauggacccu

SEQ ID NO: 644193 - RNA, 19 nt, Artificial Sequence
  Synthetic
cagauuccagauggacccu

SEQ ID NO: 644194 - RNA, 20 nt, Artificial Sequence
  Synthetic
ucagauuccagauggacccu

SEQ ID NO: 644195 - RNA, 21 nt, Artificial Sequence
  Synthetic
aucagauuccagauggacccu

SEQ ID NO: 644196 - RNA, 22 nt, Artificial Sequence
  Synthetic
aaucagauuccagauggacccu

SEQ ID NO: 644197 - RNA, 23 nt, Artificial Sequence
  Synthetic
caaucagauuccagauggacccu

SEQ ID NO: 644198 - RNA, 24 nt, Artificial Sequence
  Synthetic
gcaaucagauuccagauggacccu

SEQ ID NO: 644199 - RNA, 18 nt, Artificial Sequence
  Synthetic
aauuugaagcuggacccu

SEQ ID NO: 644200 - RNA, 19 nt, Artificial Sequence
  Synthetic
uaauuugaagcuggacccu

SEQ ID NO: 644201 - RNA, 20 nt, Artificial Sequence
  Synthetic
uuaauuugaagcuggacccu

SEQ ID NO: 644202 - RNA, 21 nt, Artificial Sequence
  Synthetic
auuaauuugaagcuggacccu

SEQ ID NO: 644203 - RNA, 22 nt, Artificial Sequence
  Synthetic
aauuaauuugaagcuggacccu

SEQ ID NO: 644204 - RNA, 23 nt, Artificial Sequence
  Synthetic
aaauuaauuugaagcuggacccu

SEQ ID NO: 644205 - RNA, 24 nt, Artificial Sequence
  Synthetic
uaaauuaauuugaagcuggacccu

SEQ ID NO: 644206 - RNA, 18 nt, Artificial Sequence
  Synthetic
gcaguuucacaugacccu

SEQ ID NO: 644207 - RNA, 19 nt, Artificial Sequence
  Synthetic
agcaguuucacaugacccu

SEQ ID NO: 644208 - RNA, 20 nt, Artificial Sequence
  Synthetic
uagcaguuucacaugacccu

SEQ ID NO: 644209 - RNA, 21 nt, Artificial Sequence
  Synthetic
uuagcaguuucacaugacccu

SEQ ID NO: 644210 - RNA, 22 nt, Artificial Sequence
  Synthetic
cuuagcaguuucacaugacccu

SEQ ID NO: 644211 - RNA, 23 nt, Artificial Sequence
  Synthetic
ccuuagcaguuucacaugacccu

SEQ ID NO: 644212 - RNA, 24 nt, Artificial Sequence
  Synthetic
uccuuagcaguuucacaugacccu

SEQ ID NO: 644213 - RNA, 18 nt, Artificial Sequence
  Synthetic
cacuugcuaagugacccu

SEQ ID NO: 644214 - RNA, 19 nt, Artificial Sequence
  Synthetic
ccacuugcuaagugacccu

SEQ ID NO: 644215 - RNA, 20 nt, Artificial Sequence
  Synthetic
uccacuugcuaagugacccu

SEQ ID NO: 644216 - RNA, 21 nt, Artificial Sequence
  Synthetic
uuccacuugcuaagugacccu

SEQ ID NO: 644217 - RNA, 22 nt, Artificial Sequence
  Synthetic
cuuccacuugcuaagugacccu

SEQ ID NO: 644218 - RNA, 23 nt, Artificial Sequence
  Synthetic
ucuuccacuugcuaagugacccu

SEQ ID NO: 644219 - RNA, 24 nt, Artificial Sequence
  Synthetic
aucuuccacuugcuaagugacccu

SEQ ID NO: 644220 - RNA, 18 nt, Artificial Sequence
  Synthetic
uaaauuuaaauauacccu

SEQ ID NO: 644221 - RNA, 19 nt, Artificial Sequence
  Synthetic
cuaaauuuaaauauacccu

SEQ ID NO: 644222 - RNA, 20 nt, Artificial Sequence
  Synthetic
acuaaauuuaaauauacccu

SEQ ID NO: 644223 - RNA, 21 nt, Artificial Sequence
  Synthetic
uacuaaauuuaaauauacccu

SEQ ID NO: 644224 - RNA, 22 nt, Artificial Sequence
  Synthetic
uuacuaaauuuaaauauacccu

SEQ ID NO: 644225 - RNA, 23 nt, Artificial Sequence
  Synthetic
auuacuaaauuuaaauauacccu

SEQ ID NO: 644226 - RNA, 24 nt, Artificial Sequence
  Synthetic
aauuacuaaauuuaaauauacccu

SEQ ID NO: 644227 - RNA, 18 nt, Artificial Sequence
  Synthetic
ggucccaccauauacccu

SEQ ID NO: 644228 - RNA, 19 nt, Artificial Sequence
  Synthetic
gggucccaccauauacccu

SEQ ID NO: 644229 - RNA, 20 nt, Artificial Sequence
  Synthetic
agggucccaccauauacccu

SEQ ID NO: 644230 - RNA, 21 nt, Artificial Sequence
  Synthetic
gagggucccaccauauacccu

SEQ ID NO: 644231 - RNA, 22 nt, Artificial Sequence
  Synthetic
agagggucccaccauauacccu

SEQ ID NO: 644232 - RNA, 23 nt, Artificial Sequence
  Synthetic
uagagggucccaccauauacccu

SEQ ID NO: 644233 - RNA, 24 nt, Artificial Sequence
  Synthetic
uuagagggucccaccauauacccu

SEQ ID NO: 644234 - RNA, 18 nt, Artificial Sequence
  Synthetic
acaaugguuuauuacccu

SEQ ID NO: 644235 - RNA, 19 nt, Artificial Sequence
  Synthetic
cacaaugguuuauuacccu

SEQ ID NO: 644236 - RNA, 20 nt, Artificial Sequence
  Synthetic
ucacaaugguuuauuacccu

SEQ ID NO: 644237 - RNA, 21 nt, Artificial Sequence
  Synthetic
gucacaaugguuuauuacccu

SEQ ID NO: 644238 - RNA, 22 nt, Artificial Sequence
  Synthetic
agucacaaugguuuauuacccu

SEQ ID NO: 644239 - RNA, 23 nt, Artificial Sequence
  Synthetic
gagucacaaugguuuauuacccu

SEQ ID NO: 644240 - RNA, 24 nt, Artificial Sequence
  Synthetic
ugagucacaaugguuuauuacccu

SEQ ID NO: 644241 - RNA, 18 nt, Artificial Sequence
  Synthetic
aacuguuauauuuacccu

SEQ ID NO: 644242 - RNA, 19 nt, Artificial Sequence
  Synthetic
aaacuguuauauuuacccu

SEQ ID NO: 644243 - RNA, 20 nt, Artificial Sequence
  Synthetic
aaaacuguuauauuuacccu

SEQ ID NO: 644244 - RNA, 21 nt, Artificial Sequence
  Synthetic
uaaaacuguuauauuuacccu

SEQ ID NO: 644245 - RNA, 22 nt, Artificial Sequence
  Synthetic
auaaaacuguuauauuuacccu

SEQ ID NO: 644246 - RNA, 23 nt, Artificial Sequence
  Synthetic
aauaaaacuguuauauuuacccu

SEQ ID NO: 644247 - RNA, 24 nt, Artificial Sequence
  Synthetic
caauaaaacuguuauauuuacccu

SEQ ID NO: 644248 - RNA, 18 nt, Artificial Sequence
  Synthetic
uacauuugucacaccccu

SEQ ID NO: 644249 - RNA, 19 nt, Artificial Sequence
  Synthetic
uuacauuugucacaccccu

SEQ ID NO: 644250 - RNA, 20 nt, Artificial Sequence
  Synthetic
auuacauuugucacaccccu

SEQ ID NO: 644251 - RNA, 21 nt, Artificial Sequence
  Synthetic
uauuacauuugucacaccccu

SEQ ID NO: 644252 - RNA, 22 nt, Artificial Sequence
  Synthetic
auauuacauuugucacaccccu

SEQ ID NO: 644253 - RNA, 23 nt, Artificial Sequence
  Synthetic
uauauuacauuugucacaccccu

SEQ ID NO: 644254 - RNA, 24 nt, Artificial Sequence
  Synthetic
cuauauuacauuugucacaccccu

SEQ ID NO: 644255 - RNA, 18 nt, Artificial Sequence
  Synthetic
gcaugacuguauaccccu

SEQ ID NO: 644256 - RNA, 19 nt, Artificial Sequence
  Synthetic
ugcaugacuguauaccccu

SEQ ID NO: 644257 - RNA, 20 nt, Artificial Sequence
  Synthetic
augcaugacuguauaccccu

SEQ ID NO: 644258 - RNA, 21 nt, Artificial Sequence
  Synthetic
aaugcaugacuguauaccccu

SEQ ID NO: 644259 - RNA, 22 nt, Artificial Sequence
  Synthetic
caaugcaugacuguauaccccu

SEQ ID NO: 644260 - RNA, 23 nt, Artificial Sequence
  Synthetic
gcaaugcaugacuguauaccccu

SEQ ID NO: 644261 - RNA, 24 nt, Artificial Sequence
  Synthetic
agcaaugcaugacuguauaccccu

SEQ ID NO: 644262 - RNA, 18 nt, Artificial Sequence
  Synthetic
uaaaaacugcuuaccccu

SEQ ID NO: 644263 - RNA, 19 nt, Artificial Sequence
  Synthetic
cuaaaaacugcuuaccccu

SEQ ID NO: 644264 - RNA, 20 nt, Artificial Sequence
  Synthetic
acuaaaaacugcuuaccccu

SEQ ID NO: 644265 - RNA, 21 nt, Artificial Sequence
  Synthetic
uacuaaaaacugcuuaccccu

SEQ ID NO: 644266 - RNA, 22 nt, Artificial Sequence
  Synthetic
uuacuaaaaacugcuuaccccu

SEQ ID NO: 644267 - RNA, 23 nt, Artificial Sequence
  Synthetic
uuuacuaaaaacugcuuaccccu

SEQ ID NO: 644268 - RNA, 24 nt, Artificial Sequence
  Synthetic
cuuuacuaaaaacugcuuaccccu

SEQ ID NO: 644269 - RNA, 18 nt, Artificial Sequence
  Synthetic
guaaaaaggacgcccccu

SEQ ID NO: 644270 - RNA, 19 nt, Artificial Sequence
  Synthetic
gguaaaaaggacgcccccu

SEQ ID NO: 644271 - RNA, 20 nt, Artificial Sequence
  Synthetic
ugguaaaaaggacgcccccu

SEQ ID NO: 644272 - RNA, 21 nt, Artificial Sequence
  Synthetic
augguaaaaaggacgcccccu

SEQ ID NO: 644273 - RNA, 22 nt, Artificial Sequence
  Synthetic
aaugguaaaaaggacgcccccu

SEQ ID NO: 644274 - RNA, 23 nt, Artificial Sequence
  Synthetic
aaaugguaaaaaggacgcccccu

SEQ ID NO: 644275 - RNA, 24 nt, Artificial Sequence
  Synthetic
uaaaugguaaaaaggacgcccccu

SEQ ID NO: 644276 - RNA, 18 nt, Artificial Sequence
  Synthetic
uuaagaucaugucccccu

SEQ ID NO: 644277 - RNA, 19 nt, Artificial Sequence
  Synthetic
cuuaagaucaugucccccu

SEQ ID NO: 644278 - RNA, 20 nt, Artificial Sequence
  Synthetic
ccuuaagaucaugucccccu

SEQ ID NO: 644279 - RNA, 21 nt, Artificial Sequence
  Synthetic
cccuuaagaucaugucccccu

SEQ ID NO: 644280 - RNA, 22 nt, Artificial Sequence
  Synthetic
ucccuuaagaucaugucccccu

SEQ ID NO: 644281 - RNA, 23 nt, Artificial Sequence
  Synthetic
uucccuuaagaucaugucccccu

SEQ ID NO: 644282 - RNA, 24 nt, Artificial Sequence
  Synthetic
uuucccuuaagaucaugucccccu

SEQ ID NO: 644283 - RNA, 18 nt, Artificial Sequence
  Synthetic
uaaguaaagucagccccu

SEQ ID NO: 644284 - RNA, 19 nt, Artificial Sequence
  Synthetic
guaaguaaagucagccccu

SEQ ID NO: 644285 - RNA, 20 nt, Artificial Sequence
  Synthetic
gguaaguaaagucagccccu

SEQ ID NO: 644286 - RNA, 21 nt, Artificial Sequence
  Synthetic
agguaaguaaagucagccccu

SEQ ID NO: 644287 - RNA, 22 nt, Artificial Sequence
  Synthetic
uagguaaguaaagucagccccu

SEQ ID NO: 644288 - RNA, 23 nt, Artificial Sequence
  Synthetic
uuagguaaguaaagucagccccu

SEQ ID NO: 644289 - RNA, 24 nt, Artificial Sequence
  Synthetic
uuuagguaaguaaagucagccccu

SEQ ID NO: 644290 - RNA, 18 nt, Artificial Sequence
  Synthetic
uaagacaacacugccccu

SEQ ID NO: 644291 - RNA, 19 nt, Artificial Sequence
  Synthetic
auaagacaacacugccccu

SEQ ID NO: 644292 - RNA, 20 nt, Artificial Sequence
  Synthetic
uauaagacaacacugccccu

SEQ ID NO: 644293 - RNA, 21 nt, Artificial Sequence
  Synthetic
uuauaagacaacacugccccu

SEQ ID NO: 644294 - RNA, 22 nt, Artificial Sequence
  Synthetic
auuauaagacaacacugccccu

SEQ ID NO: 644295 - RNA, 23 nt, Artificial Sequence
  Synthetic
aauuauaagacaacacugccccu

SEQ ID NO: 644296 - RNA, 24 nt, Artificial Sequence
  Synthetic
gaauuauaagacaacacugccccu

SEQ ID NO: 644297 - RNA, 18 nt, Artificial Sequence
  Synthetic
cccagcucccuugccccu

SEQ ID NO: 644298 - RNA, 19 nt, Artificial Sequence
  Synthetic
ccccagcucccuugccccu

SEQ ID NO: 644299 - RNA, 20 nt, Artificial Sequence
  Synthetic
accccagcucccuugccccu

SEQ ID NO: 644300 - RNA, 21 nt, Artificial Sequence
  Synthetic
uaccccagcucccuugccccu

SEQ ID NO: 644301 - RNA, 22 nt, Artificial Sequence
  Synthetic
auaccccagcucccuugccccu

SEQ ID NO: 644302 - RNA, 23 nt, Artificial Sequence
  Synthetic
aauaccccagcucccuugccccu

SEQ ID NO: 644303 - RNA, 24 nt, Artificial Sequence
  Synthetic
aaauaccccagcucccuugccccu

SEQ ID NO: 644304 - RNA, 18 nt, Artificial Sequence
  Synthetic
agguugccaaaauccccu

SEQ ID NO: 644305 - RNA, 19 nt, Artificial Sequence
  Synthetic
gagguugccaaaauccccu

SEQ ID NO: 644306 - RNA, 20 nt, Artificial Sequence
  Synthetic
agagguugccaaaauccccu

SEQ ID NO: 644307 - RNA, 21 nt, Artificial Sequence
  Synthetic
cagagguugccaaaauccccu

SEQ ID NO: 644308 - RNA, 22 nt, Artificial Sequence
  Synthetic
ucagagguugccaaaauccccu

SEQ ID NO: 644309 - RNA, 23 nt, Artificial Sequence
  Synthetic
gucagagguugccaaaauccccu

SEQ ID NO: 644310 - RNA, 24 nt, Artificial Sequence
  Synthetic
ugucagagguugccaaaauccccu

SEQ ID NO: 644311 - RNA, 18 nt, Artificial Sequence
  Synthetic
gggccggcaacauccccu

SEQ ID NO: 644312 - RNA, 19 nt, Artificial Sequence
  Synthetic
agggccggcaacauccccu

SEQ ID NO: 644313 - RNA, 20 nt, Artificial Sequence
  Synthetic
aagggccggcaacauccccu

SEQ ID NO: 644314 - RNA, 21 nt, Artificial Sequence
  Synthetic
caagggccggcaacauccccu

SEQ ID NO: 644315 - RNA, 22 nt, Artificial Sequence
  Synthetic
ucaagggccggcaacauccccu

SEQ ID NO: 644316 - RNA, 23 nt, Artificial Sequence
  Synthetic
uucaagggccggcaacauccccu

SEQ ID NO: 644317 - RNA, 24 nt, Artificial Sequence
  Synthetic
auucaagggccggcaacauccccu

SEQ ID NO: 644318 - RNA, 18 nt, Artificial Sequence
  Synthetic
cuaacaaucagauccccu

SEQ ID NO: 644319 - RNA, 19 nt, Artificial Sequence
  Synthetic
ucuaacaaucagauccccu

SEQ ID NO: 644320 - RNA, 20 nt, Artificial Sequence
  Synthetic
gucuaacaaucagauccccu

SEQ ID NO: 644321 - RNA, 21 nt, Artificial Sequence
  Synthetic
ugucuaacaaucagauccccu

SEQ ID NO: 644322 - RNA, 22 nt, Artificial Sequence
  Synthetic
augucuaacaaucagauccccu

SEQ ID NO: 644323 - RNA, 23 nt, Artificial Sequence
  Synthetic
aaugucuaacaaucagauccccu

SEQ ID NO: 644324 - RNA, 24 nt, Artificial Sequence
  Synthetic
aaaugucuaacaaucagauccccu

SEQ ID NO: 644325 - RNA, 18 nt, Artificial Sequence
  Synthetic
uacuugugugccuccccu

SEQ ID NO: 644326 - RNA, 19 nt, Artificial Sequence
  Synthetic
uuacuugugugccuccccu

SEQ ID NO: 644327 - RNA, 20 nt, Artificial Sequence
  Synthetic
uuuacuugugugccuccccu

SEQ ID NO: 644328 - RNA, 21 nt, Artificial Sequence
  Synthetic
guuuacuugugugccuccccu

SEQ ID NO: 644329 - RNA, 22 nt, Artificial Sequence
  Synthetic
uguuuacuugugugccuccccu

SEQ ID NO: 644330 - RNA, 23 nt, Artificial Sequence
  Synthetic
uuguuuacuugugugccuccccu

SEQ ID NO: 644331 - RNA, 24 nt, Artificial Sequence
  Synthetic
cuuguuuacuugugugccuccccu

SEQ ID NO: 644332 - RNA, 18 nt, Artificial Sequence
  Synthetic
cuagcugccagcuccccu

SEQ ID NO: 644333 - RNA, 19 nt, Artificial Sequence
  Synthetic
acuagcugccagcuccccu

SEQ ID NO: 644334 - RNA, 20 nt, Artificial Sequence
  Synthetic
cacuagcugccagcuccccu

SEQ ID NO: 644335 - RNA, 21 nt, Artificial Sequence
  Synthetic
acacuagcugccagcuccccu

SEQ ID NO: 644336 - RNA, 22 nt, Artificial Sequence
  Synthetic
uacacuagcugccagcuccccu

SEQ ID NO: 644337 - RNA, 23 nt, Artificial Sequence
  Synthetic
cuacacuagcugccagcuccccu

SEQ ID NO: 644338 - RNA, 24 nt, Artificial Sequence
  Synthetic
ccuacacuagcugccagcuccccu

SEQ ID NO: 644339 - RNA, 18 nt, Artificial Sequence
  Synthetic
gcacuugcugaguccccu

SEQ ID NO: 644340 - RNA, 19 nt, Artificial Sequence
  Synthetic
ugcacuugcugaguccccu

SEQ ID NO: 644341 - RNA, 20 nt, Artificial Sequence
  Synthetic
uugcacuugcugaguccccu

SEQ ID NO: 644342 - RNA, 21 nt, Artificial Sequence
  Synthetic
cuugcacuugcugaguccccu

SEQ ID NO: 644343 - RNA, 22 nt, Artificial Sequence
  Synthetic
acuugcacuugcugaguccccu

SEQ ID NO: 644344 - RNA, 23 nt, Artificial Sequence
  Synthetic
uacuugcacuugcugaguccccu

SEQ ID NO: 644345 - RNA, 24 nt, Artificial Sequence
  Synthetic
uuacuugcacuugcugaguccccu

SEQ ID NO: 644346 - RNA, 18 nt, Artificial Sequence
  Synthetic
aaccccuuuagguccccu

SEQ ID NO: 644347 - RNA, 19 nt, Artificial Sequence
  Synthetic
gaaccccuuuagguccccu

SEQ ID NO: 644348 - RNA, 20 nt, Artificial Sequence
  Synthetic
ugaaccccuuuagguccccu

SEQ ID NO: 644349 - RNA, 21 nt, Artificial Sequence
  Synthetic
augaaccccuuuagguccccu

SEQ ID NO: 644350 - RNA, 22 nt, Artificial Sequence
  Synthetic
aaugaaccccuuuagguccccu

SEQ ID NO: 644351 - RNA, 23 nt, Artificial Sequence
  Synthetic
caaugaaccccuuuagguccccu

SEQ ID NO: 644352 - RNA, 24 nt, Artificial Sequence
  Synthetic
ucaaugaaccccuuuagguccccu

SEQ ID NO: 644353 - RNA, 18 nt, Artificial Sequence
  Synthetic
aagaaagaaaauuccccu

SEQ ID NO: 644354 - RNA, 19 nt, Artificial Sequence
  Synthetic
caagaaagaaaauuccccu

SEQ ID NO: 644355 - RNA, 20 nt, Artificial Sequence
  Synthetic
ccaagaaagaaaauuccccu

SEQ ID NO: 644356 - RNA, 21 nt, Artificial Sequence
  Synthetic
cccaagaaagaaaauuccccu

SEQ ID NO: 644357 - RNA, 22 nt, Artificial Sequence
  Synthetic
acccaagaaagaaaauuccccu

SEQ ID NO: 644358 - RNA, 23 nt, Artificial Sequence
  Synthetic
aacccaagaaagaaaauuccccu

SEQ ID NO: 644359 - RNA, 24 nt, Artificial Sequence
  Synthetic
uaacccaagaaagaaaauuccccu

SEQ ID NO: 644360 - RNA, 18 nt, Artificial Sequence
  Synthetic
ccucuagcucauuccccu

SEQ ID NO: 644361 - RNA, 19 nt, Artificial Sequence
  Synthetic
uccucuagcucauuccccu

SEQ ID NO: 644362 - RNA, 20 nt, Artificial Sequence
  Synthetic
guccucuagcucauuccccu

SEQ ID NO: 644363 - RNA, 21 nt, Artificial Sequence
  Synthetic
aguccucuagcucauuccccu

SEQ ID NO: 644364 - RNA, 22 nt, Artificial Sequence
  Synthetic
caguccucuagcucauuccccu

SEQ ID NO: 644365 - RNA, 23 nt, Artificial Sequence
  Synthetic
gcaguccucuagcucauuccccu

SEQ ID NO: 644366 - RNA, 24 nt, Artificial Sequence
  Synthetic
ugcaguccucuagcucauuccccu

SEQ ID NO: 644367 - RNA, 18 nt, Artificial Sequence
  Synthetic
ugcugccuagauuccccu

SEQ ID NO: 644368 - RNA, 19 nt, Artificial Sequence
  Synthetic
augcugccuagauuccccu

SEQ ID NO: 644369 - RNA, 20 nt, Artificial Sequence
  Synthetic
uaugcugccuagauuccccu

SEQ ID NO: 644370 - RNA, 21 nt, Artificial Sequence
  Synthetic
auaugcugccuagauuccccu

SEQ ID NO: 644371 - RNA, 22 nt, Artificial Sequence
  Synthetic
aauaugcugccuagauuccccu

SEQ ID NO: 644372 - RNA, 23 nt, Artificial Sequence
  Synthetic
aaauaugcugccuagauuccccu

SEQ ID NO: 644373 - RNA, 24 nt, Artificial Sequence
  Synthetic
uaaauaugcugccuagauuccccu

SEQ ID NO: 644374 - RNA, 18 nt, Artificial Sequence
  Synthetic
aucauacuuccuuccccu

SEQ ID NO: 644375 - RNA, 19 nt, Artificial Sequence
  Synthetic
caucauacuuccuuccccu

SEQ ID NO: 644376 - RNA, 20 nt, Artificial Sequence
  Synthetic
ucaucauacuuccuuccccu

SEQ ID NO: 644377 - RNA, 21 nt, Artificial Sequence
  Synthetic
gucaucauacuuccuuccccu

SEQ ID NO: 644378 - RNA, 22 nt, Artificial Sequence
  Synthetic
agucaucauacuuccuuccccu

SEQ ID NO: 644379 - RNA, 23 nt, Artificial Sequence
  Synthetic
cagucaucauacuuccuuccccu

SEQ ID NO: 644380 - RNA, 24 nt, Artificial Sequence
  Synthetic
ucagucaucauacuuccuuccccu

SEQ ID NO: 644381 - RNA, 18 nt, Artificial Sequence
  Synthetic
auguuauaugcuuccccu

SEQ ID NO: 644382 - RNA, 19 nt, Artificial Sequence
  Synthetic
uauguuauaugcuuccccu

SEQ ID NO: 644383 - RNA, 20 nt, Artificial Sequence
  Synthetic
uuauguuauaugcuuccccu

SEQ ID NO: 644384 - RNA, 21 nt, Artificial Sequence
  Synthetic
auuauguuauaugcuuccccu

SEQ ID NO: 644385 - RNA, 22 nt, Artificial Sequence
  Synthetic
uauuauguuauaugcuuccccu

SEQ ID NO: 644386 - RNA, 23 nt, Artificial Sequence
  Synthetic
cuauuauguuauaugcuuccccu

SEQ ID NO: 644387 - RNA, 24 nt, Artificial Sequence
  Synthetic
acuauuauguuauaugcuuccccu

SEQ ID NO: 644388 - RNA, 18 nt, Artificial Sequence
  Synthetic
acucaauuuuuuuccccu

SEQ ID NO: 644389 - RNA, 19 nt, Artificial Sequence
  Synthetic
uacucaauuuuuuuccccu

SEQ ID NO: 644390 - RNA, 20 nt, Artificial Sequence
  Synthetic
uuacucaauuuuuuuccccu

SEQ ID NO: 644391 - RNA, 21 nt, Artificial Sequence
  Synthetic
guuacucaauuuuuuuccccu

SEQ ID NO: 644392 - RNA, 22 nt, Artificial Sequence
  Synthetic
uguuacucaauuuuuuuccccu

SEQ ID NO: 644393 - RNA, 23 nt, Artificial Sequence
  Synthetic
uuguuacucaauuuuuuuccccu

SEQ ID NO: 644394 - RNA, 24 nt, Artificial Sequence
  Synthetic
uuuguuacucaauuuuuuuccccu

SEQ ID NO: 644395 - RNA, 18 nt, Artificial Sequence
  Synthetic
cucugaaugcaaagcccu

SEQ ID NO: 644396 - RNA, 19 nt, Artificial Sequence
  Synthetic
acucugaaugcaaagcccu

SEQ ID NO: 644397 - RNA, 20 nt, Artificial Sequence
  Synthetic
uacucugaaugcaaagcccu

SEQ ID NO: 644398 - RNA, 21 nt, Artificial Sequence
  Synthetic
guacucugaaugcaaagcccu

SEQ ID NO: 644399 - RNA, 22 nt, Artificial Sequence
  Synthetic
gguacucugaaugcaaagcccu

SEQ ID NO: 644400 - RNA, 23 nt, Artificial Sequence
  Synthetic
agguacucugaaugcaaagcccu

SEQ ID NO: 644401 - RNA, 24 nt, Artificial Sequence
  Synthetic
uagguacucugaaugcaaagcccu

SEQ ID NO: 644402 - RNA, 18 nt, Artificial Sequence
  Synthetic
cauuaagacugaagcccu

SEQ ID NO: 644403 - RNA, 19 nt, Artificial Sequence
  Synthetic
gcauuaagacugaagcccu

SEQ ID NO: 644404 - RNA, 20 nt, Artificial Sequence
  Synthetic
ggcauuaagacugaagcccu

SEQ ID NO: 644405 - RNA, 21 nt, Artificial Sequence
  Synthetic
uggcauuaagacugaagcccu

SEQ ID NO: 644406 - RNA, 22 nt, Artificial Sequence
  Synthetic
auggcauuaagacugaagcccu

SEQ ID NO: 644407 - RNA, 23 nt, Artificial Sequence
  Synthetic
uauggcauuaagacugaagcccu

SEQ ID NO: 644408 - RNA, 24 nt, Artificial Sequence
  Synthetic
cuauggcauuaagacugaagcccu

SEQ ID NO: 644409 - RNA, 18 nt, Artificial Sequence
  Synthetic
aaacuggaacacagcccu

SEQ ID NO: 644410 - RNA, 19 nt, Artificial Sequence
  Synthetic
uaaacuggaacacagcccu

SEQ ID NO: 644411 - RNA, 20 nt, Artificial Sequence
  Synthetic
uuaaacuggaacacagcccu

SEQ ID NO: 644412 - RNA, 21 nt, Artificial Sequence
  Synthetic
guuaaacuggaacacagcccu

SEQ ID NO: 644413 - RNA, 22 nt, Artificial Sequence
  Synthetic
uguuaaacuggaacacagcccu

SEQ ID NO: 644414 - RNA, 23 nt, Artificial Sequence
  Synthetic
auguuaaacuggaacacagcccu

SEQ ID NO: 644415 - RNA, 24 nt, Artificial Sequence
  Synthetic
cauguuaaacuggaacacagcccu

SEQ ID NO: 644416 - RNA, 24 nt, Artificial Sequence
  Synthetic
aucaauggaacagaacagagcccu

SEQ ID NO: 644417 - RNA, 18 nt, Artificial Sequence
  Synthetic
cccauuuggcagagcccu

SEQ ID NO: 644418 - RNA, 19 nt, Artificial Sequence
  Synthetic
acccauuuggcagagcccu

SEQ ID NO: 644419 - RNA, 20 nt, Artificial Sequence
  Synthetic
gacccauuuggcagagcccu

SEQ ID NO: 644420 - RNA, 21 nt, Artificial Sequence
  Synthetic
ggacccauuuggcagagcccu

SEQ ID NO: 644421 - RNA, 22 nt, Artificial Sequence
  Synthetic
gggacccauuuggcagagcccu

SEQ ID NO: 644422 - RNA, 23 nt, Artificial Sequence
  Synthetic
agggacccauuuggcagagcccu

SEQ ID NO: 644423 - RNA, 24 nt, Artificial Sequence
  Synthetic
cagggacccauuuggcagagcccu

SEQ ID NO: 644424 - RNA, 18 nt, Artificial Sequence
  Synthetic
auucuccuuccgagcccu

SEQ ID NO: 644425 - RNA, 19 nt, Artificial Sequence
  Synthetic
gauucuccuuccgagcccu

SEQ ID NO: 644426 - RNA, 20 nt, Artificial Sequence
  Synthetic
agauucuccuuccgagcccu

SEQ ID NO: 644427 - RNA, 21 nt, Artificial Sequence
  Synthetic
cagauucuccuuccgagcccu

SEQ ID NO: 644428 - RNA, 22 nt, Artificial Sequence
  Synthetic
acagauucuccuuccgagcccu

SEQ ID NO: 644429 - RNA, 23 nt, Artificial Sequence
  Synthetic
aacagauucuccuuccgagcccu

SEQ ID NO: 644430 - RNA, 24 nt, Artificial Sequence
  Synthetic
gaacagauucuccuuccgagcccu

SEQ ID NO: 644431 - RNA, 18 nt, Artificial Sequence
  Synthetic
gaagacaggguuagcccu

SEQ ID NO: 644432 - RNA, 19 nt, Artificial Sequence
  Synthetic
cgaagacaggguuagcccu

SEQ ID NO: 644433 - RNA, 20 nt, Artificial Sequence
  Synthetic
ccgaagacaggguuagcccu

SEQ ID NO: 644434 - RNA, 21 nt, Artificial Sequence
  Synthetic
uccgaagacaggguuagcccu

SEQ ID NO: 644435 - RNA, 22 nt, Artificial Sequence
  Synthetic
uuccgaagacaggguuagcccu

SEQ ID NO: 644436 - RNA, 23 nt, Artificial Sequence
  Synthetic
auuccgaagacaggguuagcccu

SEQ ID NO: 644437 - RNA, 24 nt, Artificial Sequence
  Synthetic
cauuccgaagacaggguuagcccu

SEQ ID NO: 644438 - RNA, 18 nt, Artificial Sequence
  Synthetic
uuucucuuuuuucgcccu

SEQ ID NO: 644439 - RNA, 19 nt, Artificial Sequence
  Synthetic
uuuucucuuuuuucgcccu

SEQ ID NO: 644440 - RNA, 20 nt, Artificial Sequence
  Synthetic
cuuuucucuuuuuucgcccu

SEQ ID NO: 644441 - RNA, 21 nt, Artificial Sequence
  Synthetic
ccuuuucucuuuuuucgcccu

SEQ ID NO: 644442 - RNA, 22 nt, Artificial Sequence
  Synthetic
uccuuuucucuuuuuucgcccu

SEQ ID NO: 644443 - RNA, 23 nt, Artificial Sequence
  Synthetic
cuccuuuucucuuuuuucgcccu

SEQ ID NO: 644444 - RNA, 24 nt, Artificial Sequence
  Synthetic
acuccuuuucucuuuuuucgcccu

SEQ ID NO: 644445 - RNA, 18 nt, Artificial Sequence
  Synthetic
gacacauuuuaaggcccu

SEQ ID NO: 644446 - RNA, 19 nt, Artificial Sequence
  Synthetic
ugacacauuuuaaggcccu

SEQ ID NO: 644447 - RNA, 20 nt, Artificial Sequence
  Synthetic
augacacauuuuaaggcccu

SEQ ID NO: 644448 - RNA, 21 nt, Artificial Sequence
  Synthetic
aaugacacauuuuaaggcccu

SEQ ID NO: 644449 - RNA, 22 nt, Artificial Sequence
  Synthetic
aaaugacacauuuuaaggcccu

SEQ ID NO: 644450 - RNA, 23 nt, Artificial Sequence
  Synthetic
gaaaugacacauuuuaaggcccu

SEQ ID NO: 644451 - RNA, 24 nt, Artificial Sequence
  Synthetic
agaaaugacacauuuuaaggcccu

SEQ ID NO: 644452 - RNA, 18 nt, Artificial Sequence
  Synthetic
uuuaugcaagcaggcccu

SEQ ID NO: 644453 - RNA, 19 nt, Artificial Sequence
  Synthetic
cuuuaugcaagcaggcccu

SEQ ID NO: 644454 - RNA, 20 nt, Artificial Sequence
  Synthetic
ucuuuaugcaagcaggcccu

SEQ ID NO: 644455 - RNA, 21 nt, Artificial Sequence
  Synthetic
uucuuuaugcaagcaggcccu

SEQ ID NO: 644456 - RNA, 22 nt, Artificial Sequence
  Synthetic
cuucuuuaugcaagcaggcccu

SEQ ID NO: 644457 - RNA, 23 nt, Artificial Sequence
  Synthetic
acuucuuuaugcaagcaggcccu

SEQ ID NO: 644458 - RNA, 24 nt, Artificial Sequence
  Synthetic
uacuucuuuaugcaagcaggcccu

SEQ ID NO: 644459 - RNA, 18 nt, Artificial Sequence
  Synthetic
cuuuguaaauuaggcccu

SEQ ID NO: 644460 - RNA, 19 nt, Artificial Sequence
  Synthetic
gcuuuguaaauuaggcccu

SEQ ID NO: 644461 - RNA, 20 nt, Artificial Sequence
  Synthetic
ugcuuuguaaauuaggcccu

SEQ ID NO: 644462 - RNA, 21 nt, Artificial Sequence
  Synthetic
cugcuuuguaaauuaggcccu

SEQ ID NO: 644463 - RNA, 22 nt, Artificial Sequence
  Synthetic
gcugcuuuguaaauuaggcccu

SEQ ID NO: 644464 - RNA, 23 nt, Artificial Sequence
  Synthetic
ugcugcuuuguaaauuaggcccu

SEQ ID NO: 644465 - RNA, 24 nt, Artificial Sequence
  Synthetic
uugcugcuuuguaaauuaggcccu

SEQ ID NO: 644466 - RNA, 18 nt, Artificial Sequence
  Synthetic
caacucacuugcggcccu

SEQ ID NO: 644467 - RNA, 19 nt, Artificial Sequence
  Synthetic
ucaacucacuugcggcccu

SEQ ID NO: 644468 - RNA, 20 nt, Artificial Sequence
  Synthetic
aucaacucacuugcggcccu

SEQ ID NO: 644469 - RNA, 21 nt, Artificial Sequence
  Synthetic
uaucaacucacuugcggcccu

SEQ ID NO: 644470 - RNA, 22 nt, Artificial Sequence
  Synthetic
uuaucaacucacuugcggcccu

SEQ ID NO: 644471 - RNA, 23 nt, Artificial Sequence
  Synthetic
cuuaucaacucacuugcggcccu

SEQ ID NO: 644472 - RNA, 24 nt, Artificial Sequence
  Synthetic
gcuuaucaacucacuugcggcccu

SEQ ID NO: 644473 - RNA, 18 nt, Artificial Sequence
  Synthetic
cugcagagauggggcccu

SEQ ID NO: 644474 - RNA, 19 nt, Artificial Sequence
  Synthetic
gcugcagagauggggcccu

SEQ ID NO: 644475 - RNA, 20 nt, Artificial Sequence
  Synthetic
ugcugcagagauggggcccu

SEQ ID NO: 644476 - RNA, 21 nt, Artificial Sequence
  Synthetic
uugcugcagagauggggcccu

SEQ ID NO: 644477 - RNA, 22 nt, Artificial Sequence
  Synthetic
uuugcugcagagauggggcccu

SEQ ID NO: 644478 - RNA, 23 nt, Artificial Sequence
  Synthetic
guuugcugcagagauggggcccu

SEQ ID NO: 644479 - RNA, 24 nt, Artificial Sequence
  Synthetic
aguuugcugcagagauggggcccu

SEQ ID NO: 644480 - RNA, 18 nt, Artificial Sequence
  Synthetic
cugagcaaugugggcccu

SEQ ID NO: 644481 - RNA, 19 nt, Artificial Sequence
  Synthetic
ucugagcaaugugggcccu

SEQ ID NO: 644482 - RNA, 20 nt, Artificial Sequence
  Synthetic
uucugagcaaugugggcccu

SEQ ID NO: 644483 - RNA, 21 nt, Artificial Sequence
  Synthetic
uuucugagcaaugugggcccu

SEQ ID NO: 644484 - RNA, 22 nt, Artificial Sequence
  Synthetic
auuucugagcaaugugggcccu

SEQ ID NO: 644485 - RNA, 23 nt, Artificial Sequence
  Synthetic
cauuucugagcaaugugggcccu

SEQ ID NO: 644486 - RNA, 24 nt, Artificial Sequence
  Synthetic
ucauuucugagcaaugugggcccu

SEQ ID NO: 644487 - RNA, 18 nt, Artificial Sequence
  Synthetic
agagauuuguaaugcccu

SEQ ID NO: 644488 - RNA, 19 nt, Artificial Sequence
  Synthetic
gagagauuuguaaugcccu

SEQ ID NO: 644489 - RNA, 20 nt, Artificial Sequence
  Synthetic
ugagagauuuguaaugcccu

SEQ ID NO: 644490 - RNA, 21 nt, Artificial Sequence
  Synthetic
cugagagauuuguaaugcccu

SEQ ID NO: 644491 - RNA, 22 nt, Artificial Sequence
  Synthetic
acugagagauuuguaaugcccu

SEQ ID NO: 644492 - RNA, 23 nt, Artificial Sequence
  Synthetic
uacugagagauuuguaaugcccu

SEQ ID NO: 644493 - RNA, 24 nt, Artificial Sequence
  Synthetic
uuacugagagauuuguaaugcccu

SEQ ID NO: 644494 - RNA, 18 nt, Artificial Sequence
  Synthetic
uuuuugacuugcugcccu

SEQ ID NO: 644495 - RNA, 19 nt, Artificial Sequence
  Synthetic
cuuuuugacuugcugcccu

SEQ ID NO: 644496 - RNA, 20 nt, Artificial Sequence
  Synthetic
ucuuuuugacuugcugcccu

SEQ ID NO: 644497 - RNA, 21 nt, Artificial Sequence
  Synthetic
aucuuuuugacuugcugcccu

SEQ ID NO: 644498 - RNA, 22 nt, Artificial Sequence
  Synthetic
aaucuuuuugacuugcugcccu

SEQ ID NO: 644499 - RNA, 23 nt, Artificial Sequence
  Synthetic
gaaucuuuuugacuugcugcccu

SEQ ID NO: 644500 - RNA, 24 nt, Artificial Sequence
  Synthetic
ggaaucuuuuugacuugcugcccu

SEQ ID NO: 644501 - RNA, 18 nt, Artificial Sequence
  Synthetic
aauccuguucucugcccu

SEQ ID NO: 644502 - RNA, 19 nt, Artificial Sequence
  Synthetic
caauccuguucucugcccu

SEQ ID NO: 644503 - RNA, 20 nt, Artificial Sequence
  Synthetic
acaauccuguucucugcccu

SEQ ID NO: 644504 - RNA, 21 nt, Artificial Sequence
  Synthetic
gacaauccuguucucugcccu

SEQ ID NO: 644505 - RNA, 22 nt, Artificial Sequence
  Synthetic
agacaauccuguucucugcccu

SEQ ID NO: 644506 - RNA, 23 nt, Artificial Sequence
  Synthetic
uagacaauccuguucucugcccu

SEQ ID NO: 644507 - RNA, 24 nt, Artificial Sequence
  Synthetic
guagacaauccuguucucugcccu

SEQ ID NO: 644508 - RNA, 18 nt, Artificial Sequence
  Synthetic
ucaaagggcuucugcccu

SEQ ID NO: 644509 - RNA, 19 nt, Artificial Sequence
  Synthetic
uucaaagggcuucugcccu

SEQ ID NO: 644510 - RNA, 20 nt, Artificial Sequence
  Synthetic
cuucaaagggcuucugcccu

SEQ ID NO: 644511 - RNA, 21 nt, Artificial Sequence
  Synthetic
ucuucaaagggcuucugcccu

SEQ ID NO: 644512 - RNA, 22 nt, Artificial Sequence
  Synthetic
aucuucaaagggcuucugcccu

SEQ ID NO: 644513 - RNA, 23 nt, Artificial Sequence
  Synthetic
gaucuucaaagggcuucugcccu

SEQ ID NO: 644514 - RNA, 24 nt, Artificial Sequence
  Synthetic
ugaucuucaaagggcuucugcccu

SEQ ID NO: 644515 - RNA, 18 nt, Artificial Sequence
  Synthetic
uggccuacagugugcccu

SEQ ID NO: 644516 - RNA, 19 nt, Artificial Sequence
  Synthetic
auggccuacagugugcccu

SEQ ID NO: 644517 - RNA, 20 nt, Artificial Sequence
  Synthetic
uauggccuacagugugcccu

SEQ ID NO: 644518 - RNA, 21 nt, Artificial Sequence
  Synthetic
cuauggccuacagugugcccu

SEQ ID NO: 644519 - RNA, 22 nt, Artificial Sequence
  Synthetic
ucuauggccuacagugugcccu

SEQ ID NO: 644520 - RNA, 23 nt, Artificial Sequence
  Synthetic
aucuauggccuacagugugcccu

SEQ ID NO: 644521 - RNA, 24 nt, Artificial Sequence
  Synthetic
aaucuauggccuacagugugcccu

SEQ ID NO: 644522 - RNA, 18 nt, Artificial Sequence
  Synthetic
aaaggaugugcuugcccu

SEQ ID NO: 644523 - RNA, 19 nt, Artificial Sequence
  Synthetic
gaaaggaugugcuugcccu

SEQ ID NO: 644524 - RNA, 20 nt, Artificial Sequence
  Synthetic
ugaaaggaugugcuugcccu

SEQ ID NO: 644525 - RNA, 21 nt, Artificial Sequence
  Synthetic
cugaaaggaugugcuugcccu

SEQ ID NO: 644526 - RNA, 22 nt, Artificial Sequence
  Synthetic
gcugaaaggaugugcuugcccu

SEQ ID NO: 644527 - RNA, 23 nt, Artificial Sequence
  Synthetic
agcugaaaggaugugcuugcccu

SEQ ID NO: 644528 - RNA, 24 nt, Artificial Sequence
  Synthetic
aagcugaaaggaugugcuugcccu

SEQ ID NO: 644529 - RNA, 18 nt, Artificial Sequence
  Synthetic
uaauuagaauguugcccu

SEQ ID NO: 644530 - RNA, 19 nt, Artificial Sequence
  Synthetic
auaauuagaauguugcccu

SEQ ID NO: 644531 - RNA, 20 nt, Artificial Sequence
  Synthetic
gauaauuagaauguugcccu

SEQ ID NO: 644532 - RNA, 21 nt, Artificial Sequence
  Synthetic
agauaauuagaauguugcccu

SEQ ID NO: 644533 - RNA, 22 nt, Artificial Sequence
  Synthetic
aagauaauuagaauguugcccu

SEQ ID NO: 644534 - RNA, 23 nt, Artificial Sequence
  Synthetic
aaagauaauuagaauguugcccu

SEQ ID NO: 644535 - RNA, 24 nt, Artificial Sequence
  Synthetic
uaaagauaauuagaauguugcccu

SEQ ID NO: 644536 - RNA, 18 nt, Artificial Sequence
  Synthetic
caucuccagguuugcccu

SEQ ID NO: 644537 - RNA, 19 nt, Artificial Sequence
  Synthetic
ucaucuccagguuugcccu

SEQ ID NO: 644538 - RNA, 20 nt, Artificial Sequence
  Synthetic
aucaucuccagguuugcccu

SEQ ID NO: 644539 - RNA, 21 nt, Artificial Sequence
  Synthetic
uaucaucuccagguuugcccu

SEQ ID NO: 644540 - RNA, 22 nt, Artificial Sequence
  Synthetic
uuaucaucuccagguuugcccu

SEQ ID NO: 644541 - RNA, 23 nt, Artificial Sequence
  Synthetic
uuuaucaucuccagguuugcccu

SEQ ID NO: 644542 - RNA, 24 nt, Artificial Sequence
  Synthetic
cuuuaucaucuccagguuugcccu

SEQ ID NO: 644543 - RNA, 18 nt, Artificial Sequence
  Synthetic
auguuaaguuuuugcccu

SEQ ID NO: 644544 - RNA, 19 nt, Artificial Sequence
  Synthetic
uauguuaaguuuuugcccu

SEQ ID NO: 644545 - RNA, 20 nt, Artificial Sequence
  Synthetic
auauguuaaguuuuugcccu

SEQ ID NO: 644546 - RNA, 21 nt, Artificial Sequence
  Synthetic
aauauguuaaguuuuugcccu

SEQ ID NO: 644547 - RNA, 22 nt, Artificial Sequence
  Synthetic
aaauauguuaaguuuuugcccu

SEQ ID NO: 644548 - RNA, 23 nt, Artificial Sequence
  Synthetic
uaaauauguuaaguuuuugcccu

SEQ ID NO: 644549 - RNA, 24 nt, Artificial Sequence
  Synthetic
auaaauauguuaaguuuuugcccu

SEQ ID NO: 644550 - RNA, 18 nt, Artificial Sequence
  Synthetic
aacaauggagaaaucccu

SEQ ID NO: 644551 - RNA, 19 nt, Artificial Sequence
  Synthetic
gaacaauggagaaaucccu

SEQ ID NO: 644552 - RNA, 20 nt, Artificial Sequence
  Synthetic
ugaacaauggagaaaucccu

SEQ ID NO: 644553 - RNA, 21 nt, Artificial Sequence
  Synthetic
cugaacaauggagaaaucccu

SEQ ID NO: 644554 - RNA, 22 nt, Artificial Sequence
  Synthetic
acugaacaauggagaaaucccu

SEQ ID NO: 644555 - RNA, 23 nt, Artificial Sequence
  Synthetic
aacugaacaauggagaaaucccu

SEQ ID NO: 644556 - RNA, 24 nt, Artificial Sequence
  Synthetic
gaacugaacaauggagaaaucccu

SEQ ID NO: 644557 - RNA, 18 nt, Artificial Sequence
  Synthetic
cuaagaaugggaaucccu

SEQ ID NO: 644558 - RNA, 19 nt, Artificial Sequence
  Synthetic
ucuaagaaugggaaucccu

SEQ ID NO: 644559 - RNA, 20 nt, Artificial Sequence
  Synthetic
cucuaagaaugggaaucccu

SEQ ID NO: 644560 - RNA, 21 nt, Artificial Sequence
  Synthetic
gcucuaagaaugggaaucccu

SEQ ID NO: 644561 - RNA, 22 nt, Artificial Sequence
  Synthetic
ugcucuaagaaugggaaucccu

SEQ ID NO: 644562 - RNA, 23 nt, Artificial Sequence
  Synthetic
augcucuaagaaugggaaucccu

SEQ ID NO: 644563 - RNA, 24 nt, Artificial Sequence
  Synthetic
caugcucuaagaaugggaaucccu

SEQ ID NO: 644564 - RNA, 18 nt, Artificial Sequence
  Synthetic
gaagauugcuuaaucccu

SEQ ID NO: 644565 - RNA, 19 nt, Artificial Sequence
  Synthetic
agaagauugcuuaaucccu

SEQ ID NO: 644566 - RNA, 20 nt, Artificial Sequence
  Synthetic
gagaagauugcuuaaucccu

SEQ ID NO: 644567 - RNA, 21 nt, Artificial Sequence
  Synthetic
agagaagauugcuuaaucccu

SEQ ID NO: 644568 - RNA, 22 nt, Artificial Sequence
  Synthetic
cagagaagauugcuuaaucccu

SEQ ID NO: 644569 - RNA, 23 nt, Artificial Sequence
  Synthetic
ucagagaagauugcuuaaucccu

SEQ ID NO: 644570 - RNA, 24 nt, Artificial Sequence
  Synthetic
cucagagaagauugcuuaaucccu

SEQ ID NO: 644571 - RNA, 18 nt, Artificial Sequence
  Synthetic
acacuguauuccaucccu

SEQ ID NO: 644572 - RNA, 19 nt, Artificial Sequence
  Synthetic
uacacuguauuccaucccu

SEQ ID NO: 644573 - RNA, 20 nt, Artificial Sequence
  Synthetic
uuacacuguauuccaucccu

SEQ ID NO: 644574 - RNA, 21 nt, Artificial Sequence
  Synthetic
cuuacacuguauuccaucccu

SEQ ID NO: 644575 - RNA, 22 nt, Artificial Sequence
  Synthetic
ccuuacacuguauuccaucccu

SEQ ID NO: 644576 - RNA, 23 nt, Artificial Sequence
  Synthetic
uccuuacacuguauuccaucccu

SEQ ID NO: 644577 - RNA, 24 nt, Artificial Sequence
  Synthetic
uuccuuacacuguauuccaucccu

SEQ ID NO: 644578 - RNA, 18 nt, Artificial Sequence
  Synthetic
gaaccucauagcaucccu

SEQ ID NO: 644579 - RNA, 19 nt, Artificial Sequence
  Synthetic
agaaccucauagcaucccu

SEQ ID NO: 644580 - RNA, 20 nt, Artificial Sequence
  Synthetic
cagaaccucauagcaucccu

SEQ ID NO: 644581 - RNA, 21 nt, Artificial Sequence
  Synthetic
ucagaaccucauagcaucccu

SEQ ID NO: 644582 - RNA, 22 nt, Artificial Sequence
  Synthetic
uucagaaccucauagcaucccu

SEQ ID NO: 644583 - RNA, 23 nt, Artificial Sequence
  Synthetic
auucagaaccucauagcaucccu

SEQ ID NO: 644584 - RNA, 24 nt, Artificial Sequence
  Synthetic
cauucagaaccucauagcaucccu

SEQ ID NO: 644585 - RNA, 18 nt, Artificial Sequence
  Synthetic
agggcagcuugcaucccu

SEQ ID NO: 644586 - RNA, 19 nt, Artificial Sequence
  Synthetic
cagggcagcuugcaucccu

SEQ ID NO: 644587 - RNA, 20 nt, Artificial Sequence
  Synthetic
gcagggcagcuugcaucccu

SEQ ID NO: 644588 - RNA, 21 nt, Artificial Sequence
  Synthetic
agcagggcagcuugcaucccu

SEQ ID NO: 644589 - RNA, 22 nt, Artificial Sequence
  Synthetic
aagcagggcagcuugcaucccu

SEQ ID NO: 644590 - RNA, 23 nt, Artificial Sequence
  Synthetic
uaagcagggcagcuugcaucccu

SEQ ID NO: 644591 - RNA, 24 nt, Artificial Sequence
  Synthetic
guaagcagggcagcuugcaucccu

SEQ ID NO: 644592 - RNA, 18 nt, Artificial Sequence
  Synthetic
ucuccuguugucaucccu

SEQ ID NO: 644593 - RNA, 19 nt, Artificial Sequence
  Synthetic
gucuccuguugucaucccu

SEQ ID NO: 644594 - RNA, 20 nt, Artificial Sequence
  Synthetic
ggucuccuguugucaucccu

SEQ ID NO: 644595 - RNA, 21 nt, Artificial Sequence
  Synthetic
gggucuccuguugucaucccu

SEQ ID NO: 644596 - RNA, 22 nt, Artificial Sequence
  Synthetic
ugggucuccuguugucaucccu

SEQ ID NO: 644597 - RNA, 23 nt, Artificial Sequence
  Synthetic
cugggucuccuguugucaucccu

SEQ ID NO: 644598 - RNA, 24 nt, Artificial Sequence
  Synthetic
gcugggucuccuguugucaucccu

SEQ ID NO: 644599 - RNA, 18 nt, Artificial Sequence
  Synthetic
acgugcgugcagaucccu

SEQ ID NO: 644600 - RNA, 19 nt, Artificial Sequence
  Synthetic
aacgugcgugcagaucccu

SEQ ID NO: 644601 - RNA, 20 nt, Artificial Sequence
  Synthetic
caacgugcgugcagaucccu

SEQ ID NO: 644602 - RNA, 21 nt, Artificial Sequence
  Synthetic
gcaacgugcgugcagaucccu

SEQ ID NO: 644603 - RNA, 22 nt, Artificial Sequence
  Synthetic
ugcaacgugcgugcagaucccu

SEQ ID NO: 644604 - RNA, 23 nt, Artificial Sequence
  Synthetic
cugcaacgugcgugcagaucccu

SEQ ID NO: 644605 - RNA, 24 nt, Artificial Sequence
  Synthetic
gcugcaacgugcgugcagaucccu

SEQ ID NO: 644606 - RNA, 21 nt, Artificial Sequence
  Synthetic
uauuucuaguucuagaucccu

SEQ ID NO: 644607 - RNA, 22 nt, Artificial Sequence
  Synthetic
guauuucuaguucuagaucccu

SEQ ID NO: 644608 - RNA, 23 nt, Artificial Sequence
  Synthetic
gguauuucuaguucuagaucccu

SEQ ID NO: 644609 - RNA, 24 nt, Artificial Sequence
  Synthetic
ugguauuucuaguucuagaucccu

SEQ ID NO: 644610 - RNA, 18 nt, Artificial Sequence
  Synthetic
auuuggaagcugaucccu

SEQ ID NO: 644611 - RNA, 19 nt, Artificial Sequence
  Synthetic
cauuuggaagcugaucccu

SEQ ID NO: 644612 - RNA, 20 nt, Artificial Sequence
  Synthetic
ucauuuggaagcugaucccu

SEQ ID NO: 644613 - RNA, 21 nt, Artificial Sequence
  Synthetic
cucauuuggaagcugaucccu

SEQ ID NO: 644614 - RNA, 22 nt, Artificial Sequence
  Synthetic
gcucauuuggaagcugaucccu

SEQ ID NO: 644615 - RNA, 23 nt, Artificial Sequence
  Synthetic
agcucauuuggaagcugaucccu

SEQ ID NO: 644616 - RNA, 24 nt, Artificial Sequence
  Synthetic
uagcucauuuggaagcugaucccu

SEQ ID NO: 644617 - RNA, 18 nt, Artificial Sequence
  Synthetic
gacaaccagguuaucccu

SEQ ID NO: 644618 - RNA, 19 nt, Artificial Sequence
  Synthetic
ugacaaccagguuaucccu

SEQ ID NO: 644619 - RNA, 20 nt, Artificial Sequence
  Synthetic
augacaaccagguuaucccu

SEQ ID NO: 644620 - RNA, 21 nt, Artificial Sequence
  Synthetic
aaugacaaccagguuaucccu

SEQ ID NO: 644621 - RNA, 22 nt, Artificial Sequence
  Synthetic
uaaugacaaccagguuaucccu

SEQ ID NO: 644622 - RNA, 23 nt, Artificial Sequence
  Synthetic
guaaugacaaccagguuaucccu

SEQ ID NO: 644623 - RNA, 24 nt, Artificial Sequence
  Synthetic
uguaaugacaaccagguuaucccu

SEQ ID NO: 644624 - RNA, 18 nt, Artificial Sequence
  Synthetic
aauaaacugugacucccu

SEQ ID NO: 644625 - RNA, 19 nt, Artificial Sequence
  Synthetic
uaauaaacugugacucccu

SEQ ID NO: 644626 - RNA, 20 nt, Artificial Sequence
  Synthetic
auaauaaacugugacucccu

SEQ ID NO: 644627 - RNA, 21 nt, Artificial Sequence
  Synthetic
aauaauaaacugugacucccu

SEQ ID NO: 644628 - RNA, 22 nt, Artificial Sequence
  Synthetic
uaauaauaaacugugacucccu

SEQ ID NO: 644629 - RNA, 23 nt, Artificial Sequence
  Synthetic
auaauaauaaacugugacucccu

SEQ ID NO: 644630 - RNA, 24 nt, Artificial Sequence
  Synthetic
aauaauaauaaacugugacucccu

SEQ ID NO: 644631 - RNA, 18 nt, Artificial Sequence
  Synthetic
ugaucccgggaccucccu

SEQ ID NO: 644632 - RNA, 19 nt, Artificial Sequence
  Synthetic
cugaucccgggaccucccu

SEQ ID NO: 644633 - RNA, 20 nt, Artificial Sequence
  Synthetic
gcugaucccgggaccucccu

SEQ ID NO: 644634 - RNA, 21 nt, Artificial Sequence
  Synthetic
ugcugaucccgggaccucccu

SEQ ID NO: 644635 - RNA, 22 nt, Artificial Sequence
  Synthetic
cugcugaucccgggaccucccu

SEQ ID NO: 644636 - RNA, 23 nt, Artificial Sequence
  Synthetic
gcugcugaucccgggaccucccu

SEQ ID NO: 644637 - RNA, 24 nt, Artificial Sequence
  Synthetic
cgcugcugaucccgggaccucccu

SEQ ID NO: 644638 - RNA, 18 nt, Artificial Sequence
  Synthetic
auuauuaacaagcucccu

SEQ ID NO: 644639 - RNA, 19 nt, Artificial Sequence
  Synthetic
cauuauuaacaagcucccu

SEQ ID NO: 644640 - RNA, 20 nt, Artificial Sequence
  Synthetic
gcauuauuaacaagcucccu

SEQ ID NO: 644641 - RNA, 21 nt, Artificial Sequence
  Synthetic
ugcauuauuaacaagcucccu

SEQ ID NO: 644642 - RNA, 22 nt, Artificial Sequence
  Synthetic
cugcauuauuaacaagcucccu

SEQ ID NO: 644643 - RNA, 23 nt, Artificial Sequence
  Synthetic
ucugcauuauuaacaagcucccu

SEQ ID NO: 644644 - RNA, 24 nt, Artificial Sequence
  Synthetic
aucugcauuauuaacaagcucccu

SEQ ID NO: 644645 - RNA, 18 nt, Artificial Sequence
  Synthetic
uagcuuuuaagucucccu

SEQ ID NO: 644646 - RNA, 19 nt, Artificial Sequence
  Synthetic
uuagcuuuuaagucucccu

SEQ ID NO: 644647 - RNA, 20 nt, Artificial Sequence
  Synthetic
auuagcuuuuaagucucccu

SEQ ID NO: 644648 - RNA, 21 nt, Artificial Sequence
  Synthetic
aauuagcuuuuaagucucccu

SEQ ID NO: 644649 - RNA, 22 nt, Artificial Sequence
  Synthetic
gaauuagcuuuuaagucucccu

SEQ ID NO: 644650 - RNA, 23 nt, Artificial Sequence
  Synthetic
ugaauuagcuuuuaagucucccu

SEQ ID NO: 644651 - RNA, 24 nt, Artificial Sequence
  Synthetic
augaauuagcuuuuaagucucccu

SEQ ID NO: 644652 - RNA, 18 nt, Artificial Sequence
  Synthetic
agacuugccagucucccu

SEQ ID NO: 644653 - RNA, 19 nt, Artificial Sequence
  Synthetic
uagacuugccagucucccu

SEQ ID NO: 644654 - RNA, 20 nt, Artificial Sequence
  Synthetic
guagacuugccagucucccu

SEQ ID NO: 644655 - RNA, 21 nt, Artificial Sequence
  Synthetic
gguagacuugccagucucccu

SEQ ID NO: 644656 - RNA, 22 nt, Artificial Sequence
  Synthetic
agguagacuugccagucucccu

SEQ ID NO: 644657 - RNA, 23 nt, Artificial Sequence
  Synthetic
aagguagacuugccagucucccu

SEQ ID NO: 644658 - RNA, 24 nt, Artificial Sequence
  Synthetic
caagguagacuugccagucucccu

SEQ ID NO: 644659 - RNA, 18 nt, Artificial Sequence
  Synthetic
gauggaagaaaagucccu

SEQ ID NO: 644660 - RNA, 19 nt, Artificial Sequence
  Synthetic
agauggaagaaaagucccu

SEQ ID NO: 644661 - RNA, 20 nt, Artificial Sequence
  Synthetic
cagauggaagaaaagucccu

SEQ ID NO: 644662 - RNA, 21 nt, Artificial Sequence
  Synthetic
ccagauggaagaaaagucccu

SEQ ID NO: 644663 - RNA, 22 nt, Artificial Sequence
  Synthetic
gccagauggaagaaaagucccu

SEQ ID NO: 644664 - RNA, 23 nt, Artificial Sequence
  Synthetic
ugccagauggaagaaaagucccu

SEQ ID NO: 644665 - RNA, 24 nt, Artificial Sequence
  Synthetic
augccagauggaagaaaagucccu

SEQ ID NO: 644666 - RNA, 18 nt, Artificial Sequence
  Synthetic
auucacagcuuggucccu

SEQ ID NO: 644667 - RNA, 19 nt, Artificial Sequence
  Synthetic
aauucacagcuuggucccu

SEQ ID NO: 644668 - RNA, 20 nt, Artificial Sequence
  Synthetic
gaauucacagcuuggucccu

SEQ ID NO: 644669 - RNA, 21 nt, Artificial Sequence
  Synthetic
ggaauucacagcuuggucccu

SEQ ID NO: 644670 - RNA, 22 nt, Artificial Sequence
  Synthetic
uggaauucacagcuuggucccu

SEQ ID NO: 644671 - RNA, 23 nt, Artificial Sequence
  Synthetic
cuggaauucacagcuuggucccu

SEQ ID NO: 644672 - RNA, 24 nt, Artificial Sequence
  Synthetic
ucuggaauucacagcuuggucccu

SEQ ID NO: 644673 - RNA, 18 nt, Artificial Sequence
  Synthetic
ugccaucaaguugucccu

SEQ ID NO: 644674 - RNA, 19 nt, Artificial Sequence
  Synthetic
augccaucaaguugucccu

SEQ ID NO: 644675 - RNA, 20 nt, Artificial Sequence
  Synthetic
uaugccaucaaguugucccu

SEQ ID NO: 644676 - RNA, 21 nt, Artificial Sequence
  Synthetic
uuaugccaucaaguugucccu

SEQ ID NO: 644677 - RNA, 22 nt, Artificial Sequence
  Synthetic
guuaugccaucaaguugucccu

SEQ ID NO: 644678 - RNA, 23 nt, Artificial Sequence
  Synthetic
aguuaugccaucaaguugucccu

SEQ ID NO: 644679 - RNA, 24 nt, Artificial Sequence
  Synthetic
aaguuaugccaucaaguugucccu

SEQ ID NO: 644680 - RNA, 18 nt, Artificial Sequence
  Synthetic
uuuagcauauuugucccu

SEQ ID NO: 644681 - RNA, 19 nt, Artificial Sequence
  Synthetic
uuuuagcauauuugucccu

SEQ ID NO: 644682 - RNA, 20 nt, Artificial Sequence
  Synthetic
uuuuuagcauauuugucccu

SEQ ID NO: 644683 - RNA, 21 nt, Artificial Sequence
  Synthetic
auuuuuagcauauuugucccu

SEQ ID NO: 644684 - RNA, 22 nt, Artificial Sequence
  Synthetic
gauuuuuagcauauuugucccu

SEQ ID NO: 644685 - RNA, 23 nt, Artificial Sequence
  Synthetic
agauuuuuagcauauuugucccu

SEQ ID NO: 644686 - RNA, 24 nt, Artificial Sequence
  Synthetic
gagauuuuuagcauauuugucccu

SEQ ID NO: 644687 - RNA, 18 nt, Artificial Sequence
  Synthetic
aaaaaaacuaaauucccu

SEQ ID NO: 644688 - RNA, 19 nt, Artificial Sequence
  Synthetic
caaaaaaacuaaauucccu

SEQ ID NO: 644689 - RNA, 20 nt, Artificial Sequence
  Synthetic
acaaaaaaacuaaauucccu

SEQ ID NO: 644690 - RNA, 21 nt, Artificial Sequence
  Synthetic
aacaaaaaaacuaaauucccu

SEQ ID NO: 644691 - RNA, 22 nt, Artificial Sequence
  Synthetic
caacaaaaaaacuaaauucccu

SEQ ID NO: 644692 - RNA, 23 nt, Artificial Sequence
  Synthetic
ccaacaaaaaaacuaaauucccu

SEQ ID NO: 644693 - RNA, 24 nt, Artificial Sequence
  Synthetic
accaacaaaaaaacuaaauucccu

SEQ ID NO: 644694 - RNA, 18 nt, Artificial Sequence
  Synthetic
acuauagaagcauucccu

SEQ ID NO: 644695 - RNA, 19 nt, Artificial Sequence
  Synthetic
uacuauagaagcauucccu

SEQ ID NO: 644696 - RNA, 20 nt, Artificial Sequence
  Synthetic
guacuauagaagcauucccu

SEQ ID NO: 644697 - RNA, 21 nt, Artificial Sequence
  Synthetic
uguacuauagaagcauucccu

SEQ ID NO: 644698 - RNA, 22 nt, Artificial Sequence
  Synthetic
uuguacuauagaagcauucccu

SEQ ID NO: 644699 - RNA, 23 nt, Artificial Sequence
  Synthetic
cuuguacuauagaagcauucccu

SEQ ID NO: 644700 - RNA, 24 nt, Artificial Sequence
  Synthetic
ccuuguacuauagaagcauucccu

SEQ ID NO: 644701 - RNA, 18 nt, Artificial Sequence
  Synthetic
aagcuagaagcauucccu

SEQ ID NO: 644702 - RNA, 19 nt, Artificial Sequence
  Synthetic
aaagcuagaagcauucccu

SEQ ID NO: 644703 - RNA, 20 nt, Artificial Sequence
  Synthetic
aaaagcuagaagcauucccu

SEQ ID NO: 644704 - RNA, 21 nt, Artificial Sequence
  Synthetic
caaaagcuagaagcauucccu

SEQ ID NO: 644705 - RNA, 22 nt, Artificial Sequence
  Synthetic
gcaaaagcuagaagcauucccu

SEQ ID NO: 644706 - RNA, 23 nt, Artificial Sequence
  Synthetic
ggcaaaagcuagaagcauucccu

SEQ ID NO: 644707 - RNA, 24 nt, Artificial Sequence
  Synthetic
gggcaaaagcuagaagcauucccu

SEQ ID NO: 644708 - RNA, 20 nt, Artificial Sequence
  Synthetic
caaaacuggaagcauucccu

SEQ ID NO: 644709 - RNA, 21 nt, Artificial Sequence
  Synthetic
gcaaaacuggaagcauucccu

SEQ ID NO: 644710 - RNA, 22 nt, Artificial Sequence
  Synthetic
ggcaaaacuggaagcauucccu

SEQ ID NO: 644711 - RNA, 23 nt, Artificial Sequence
  Synthetic
gggcaaaacuggaagcauucccu

SEQ ID NO: 644712 - RNA, 24 nt, Artificial Sequence
  Synthetic
ugggcaaaacuggaagcauucccu

SEQ ID NO: 644713 - RNA, 18 nt, Artificial Sequence
  Synthetic
acaucuggcagauucccu

SEQ ID NO: 644714 - RNA, 19 nt, Artificial Sequence
  Synthetic
gacaucuggcagauucccu

SEQ ID NO: 644715 - RNA, 20 nt, Artificial Sequence
  Synthetic
ggacaucuggcagauucccu

SEQ ID NO: 644716 - RNA, 21 nt, Artificial Sequence
  Synthetic
uggacaucuggcagauucccu

SEQ ID NO: 644717 - RNA, 22 nt, Artificial Sequence
  Synthetic
cuggacaucuggcagauucccu

SEQ ID NO: 644718 - RNA, 23 nt, Artificial Sequence
  Synthetic
ccuggacaucuggcagauucccu

SEQ ID NO: 644719 - RNA, 24 nt, Artificial Sequence
  Synthetic
cccuggacaucuggcagauucccu

SEQ ID NO: 644720 - RNA, 18 nt, Artificial Sequence
  Synthetic
uuugaacauugauucccu

SEQ ID NO: 644721 - RNA, 19 nt, Artificial Sequence
  Synthetic
auuugaacauugauucccu

SEQ ID NO: 644722 - RNA, 20 nt, Artificial Sequence
  Synthetic
aauuugaacauugauucccu

SEQ ID NO: 644723 - RNA, 21 nt, Artificial Sequence
  Synthetic
uaauuugaacauugauucccu

SEQ ID NO: 644724 - RNA, 22 nt, Artificial Sequence
  Synthetic
auaauuugaacauugauucccu

SEQ ID NO: 644725 - RNA, 23 nt, Artificial Sequence
  Synthetic
uauaauuugaacauugauucccu

SEQ ID NO: 644726 - RNA, 24 nt, Artificial Sequence
  Synthetic
cuauaauuugaacauugauucccu

SEQ ID NO: 644727 - RNA, 18 nt, Artificial Sequence
  Synthetic
aaaauaaguaacuucccu

SEQ ID NO: 644728 - RNA, 19 nt, Artificial Sequence
  Synthetic
aaaaauaaguaacuucccu

SEQ ID NO: 644729 - RNA, 20 nt, Artificial Sequence
  Synthetic
uaaaaauaaguaacuucccu

SEQ ID NO: 644730 - RNA, 21 nt, Artificial Sequence
  Synthetic
auaaaaauaaguaacuucccu

SEQ ID NO: 644731 - RNA, 22 nt, Artificial Sequence
  Synthetic
uauaaaaauaaguaacuucccu

SEQ ID NO: 644732 - RNA, 23 nt, Artificial Sequence
  Synthetic
guauaaaaauaaguaacuucccu

SEQ ID NO: 644733 - RNA, 24 nt, Artificial Sequence
  Synthetic
uguauaaaaauaaguaacuucccu

SEQ ID NO: 644734 - RNA, 18 nt, Artificial Sequence
  Synthetic
gaaugacccaucuucccu

SEQ ID NO: 644735 - RNA, 19 nt, Artificial Sequence
  Synthetic
agaaugacccaucuucccu

SEQ ID NO: 644736 - RNA, 20 nt, Artificial Sequence
  Synthetic
aagaaugacccaucuucccu

SEQ ID NO: 644737 - RNA, 21 nt, Artificial Sequence
  Synthetic
uaagaaugacccaucuucccu

SEQ ID NO: 644738 - RNA, 22 nt, Artificial Sequence
  Synthetic
uuaagaaugacccaucuucccu

SEQ ID NO: 644739 - RNA, 23 nt, Artificial Sequence
  Synthetic
guuaagaaugacccaucuucccu

SEQ ID NO: 644740 - RNA, 24 nt, Artificial Sequence
  Synthetic
uguuaagaaugacccaucuucccu

SEQ ID NO: 644741 - RNA, 18 nt, Artificial Sequence
  Synthetic
gcaauccagaucuucccu

SEQ ID NO: 644742 - RNA, 19 nt, Artificial Sequence
  Synthetic
ggcaauccagaucuucccu

SEQ ID NO: 644743 - RNA, 20 nt, Artificial Sequence
  Synthetic
uggcaauccagaucuucccu

SEQ ID NO: 644744 - RNA, 21 nt, Artificial Sequence
  Synthetic
cuggcaauccagaucuucccu

SEQ ID NO: 644745 - RNA, 22 nt, Artificial Sequence
  Synthetic
ucuggcaauccagaucuucccu

SEQ ID NO: 644746 - RNA, 23 nt, Artificial Sequence
  Synthetic
aucuggcaauccagaucuucccu

SEQ ID NO: 644747 - RNA, 24 nt, Artificial Sequence
  Synthetic
gaucuggcaauccagaucuucccu

SEQ ID NO: 644748 - RNA, 18 nt, Artificial Sequence
  Synthetic
agaggaucuuucuucccu

SEQ ID NO: 644749 - RNA, 19 nt, Artificial Sequence
  Synthetic
gagaggaucuuucuucccu

SEQ ID NO: 644750 - RNA, 20 nt, Artificial Sequence
  Synthetic
ugagaggaucuuucuucccu

SEQ ID NO: 644751 - RNA, 21 nt, Artificial Sequence
  Synthetic
cugagaggaucuuucuucccu

SEQ ID NO: 644752 - RNA, 22 nt, Artificial Sequence
  Synthetic
gcugagaggaucuuucuucccu

SEQ ID NO: 644753 - RNA, 23 nt, Artificial Sequence
  Synthetic
ggcugagaggaucuuucuucccu

SEQ ID NO: 644754 - RNA, 24 nt, Artificial Sequence
  Synthetic
gggcugagaggaucuuucuucccu

SEQ ID NO: 644755 - RNA, 18 nt, Artificial Sequence
  Synthetic
uuuuaauuuuuguucccu

SEQ ID NO: 644756 - RNA, 19 nt, Artificial Sequence
  Synthetic
uuuuuaauuuuuguucccu

SEQ ID NO: 644757 - RNA, 20 nt, Artificial Sequence
  Synthetic
cuuuuuaauuuuuguucccu

SEQ ID NO: 644758 - RNA, 21 nt, Artificial Sequence
  Synthetic
ccuuuuuaauuuuuguucccu

SEQ ID NO: 644759 - RNA, 22 nt, Artificial Sequence
  Synthetic
cccuuuuuaauuuuuguucccu

SEQ ID NO: 644760 - RNA, 23 nt, Artificial Sequence
  Synthetic
ucccuuuuuaauuuuuguucccu

SEQ ID NO: 644761 - RNA, 24 nt, Artificial Sequence
  Synthetic
aucccuuuuuaauuuuuguucccu

SEQ ID NO: 644762 - RNA, 18 nt, Artificial Sequence
  Synthetic
ccaugugaaaauuucccu

SEQ ID NO: 644763 - RNA, 19 nt, Artificial Sequence
  Synthetic
uccaugugaaaauuucccu

SEQ ID NO: 644764 - RNA, 20 nt, Artificial Sequence
  Synthetic
cuccaugugaaaauuucccu

SEQ ID NO: 644765 - RNA, 21 nt, Artificial Sequence
  Synthetic
gcuccaugugaaaauuucccu

SEQ ID NO: 644766 - RNA, 22 nt, Artificial Sequence
  Synthetic
agcuccaugugaaaauuucccu

SEQ ID NO: 644767 - RNA, 23 nt, Artificial Sequence
  Synthetic
aagcuccaugugaaaauuucccu

SEQ ID NO: 644768 - RNA, 24 nt, Artificial Sequence
  Synthetic
aaagcuccaugugaaaauuucccu

SEQ ID NO: 644769 - RNA, 18 nt, Artificial Sequence
  Synthetic
cacucaguuuauuucccu

SEQ ID NO: 644770 - RNA, 19 nt, Artificial Sequence
  Synthetic
acacucaguuuauuucccu

SEQ ID NO: 644771 - RNA, 20 nt, Artificial Sequence
  Synthetic
uacacucaguuuauuucccu

SEQ ID NO: 644772 - RNA, 21 nt, Artificial Sequence
  Synthetic
uuacacucaguuuauuucccu

SEQ ID NO: 644773 - RNA, 22 nt, Artificial Sequence
  Synthetic
auuacacucaguuuauuucccu

SEQ ID NO: 644774 - RNA, 23 nt, Artificial Sequence
  Synthetic
uauuacacucaguuuauuucccu

SEQ ID NO: 644775 - RNA, 24 nt, Artificial Sequence
  Synthetic
uuauuacacucaguuuauuucccu

SEQ ID NO: 644776 - RNA, 18 nt, Artificial Sequence
  Synthetic
aauagaaauccuuucccu

SEQ ID NO: 644777 - RNA, 19 nt, Artificial Sequence
  Synthetic
aaauagaaauccuuucccu

SEQ ID NO: 644778 - RNA, 20 nt, Artificial Sequence
  Synthetic
uaaauagaaauccuuucccu

SEQ ID NO: 644779 - RNA, 21 nt, Artificial Sequence
  Synthetic
guaaauagaaauccuuucccu

SEQ ID NO: 644780 - RNA, 22 nt, Artificial Sequence
  Synthetic
uguaaauagaaauccuuucccu

SEQ ID NO: 644781 - RNA, 23 nt, Artificial Sequence
  Synthetic
uuguaaauagaaauccuuucccu

SEQ ID NO: 644782 - RNA, 24 nt, Artificial Sequence
  Synthetic
uuuguaaauagaaauccuuucccu

SEQ ID NO: 644783 - RNA, 18 nt, Artificial Sequence
  Synthetic
cauuuauuuucuuucccu

SEQ ID NO: 644784 - RNA, 19 nt, Artificial Sequence
  Synthetic
ucauuuauuuucuuucccu

SEQ ID NO: 644785 - RNA, 20 nt, Artificial Sequence
  Synthetic
gucauuuauuuucuuucccu

SEQ ID NO: 644786 - RNA, 21 nt, Artificial Sequence
  Synthetic
ggucauuuauuuucuuucccu

SEQ ID NO: 644787 - RNA, 22 nt, Artificial Sequence
  Synthetic
aggucauuuauuuucuuucccu

SEQ ID NO: 644788 - RNA, 23 nt, Artificial Sequence
  Synthetic
gaggucauuuauuuucuuucccu

SEQ ID NO: 644789 - RNA, 24 nt, Artificial Sequence
  Synthetic
ggaggucauuuauuuucuuucccu

SEQ ID NO: 644790 - RNA, 18 nt, Artificial Sequence
  Synthetic
augauaucagguuucccu

SEQ ID NO: 644791 - RNA, 19 nt, Artificial Sequence
  Synthetic
gaugauaucagguuucccu

SEQ ID NO: 644792 - RNA, 20 nt, Artificial Sequence
  Synthetic
ggaugauaucagguuucccu

SEQ ID NO: 644793 - RNA, 21 nt, Artificial Sequence
  Synthetic
aggaugauaucagguuucccu

SEQ ID NO: 644794 - RNA, 22 nt, Artificial Sequence
  Synthetic
aaggaugauaucagguuucccu

SEQ ID NO: 644795 - RNA, 23 nt, Artificial Sequence
  Synthetic
caaggaugauaucagguuucccu

SEQ ID NO: 644796 - RNA, 24 nt, Artificial Sequence
  Synthetic
ucaaggaugauaucagguuucccu

SEQ ID NO: 644797 - RNA, 18 nt, Artificial Sequence
  Synthetic
ugaucuucugguuucccu

SEQ ID NO: 644798 - RNA, 19 nt, Artificial Sequence
  Synthetic
uugaucuucugguuucccu

SEQ ID NO: 644799 - RNA, 20 nt, Artificial Sequence
  Synthetic
uuugaucuucugguuucccu

SEQ ID NO: 644800 - RNA, 21 nt, Artificial Sequence
  Synthetic
auuugaucuucugguuucccu

SEQ ID NO: 644801 - RNA, 22 nt, Artificial Sequence
  Synthetic
uauuugaucuucugguuucccu

SEQ ID NO: 644802 - RNA, 23 nt, Artificial Sequence
  Synthetic
auauuugaucuucugguuucccu

SEQ ID NO: 644803 - RNA, 24 nt, Artificial Sequence
  Synthetic
uauauuugaucuucugguuucccu

SEQ ID NO: 644804 - RNA, 18 nt, Artificial Sequence
  Synthetic
aguaaucucaaaaagccu

SEQ ID NO: 644805 - RNA, 19 nt, Artificial Sequence
  Synthetic
caguaaucucaaaaagccu

SEQ ID NO: 644806 - RNA, 20 nt, Artificial Sequence
  Synthetic
acaguaaucucaaaaagccu

SEQ ID NO: 644807 - RNA, 21 nt, Artificial Sequence
  Synthetic
cacaguaaucucaaaaagccu

SEQ ID NO: 644808 - RNA, 22 nt, Artificial Sequence
  Synthetic
ucacaguaaucucaaaaagccu

SEQ ID NO: 644809 - RNA, 23 nt, Artificial Sequence
  Synthetic
uucacaguaaucucaaaaagccu

SEQ ID NO: 644810 - RNA, 24 nt, Artificial Sequence
  Synthetic
uuucacaguaaucucaaaaagccu

SEQ ID NO: 644811 - RNA, 18 nt, Artificial Sequence
  Synthetic
ggucauucugaaaagccu

SEQ ID NO: 644812 - RNA, 19 nt, Artificial Sequence
  Synthetic
uggucauucugaaaagccu

SEQ ID NO: 644813 - RNA, 20 nt, Artificial Sequence
  Synthetic
auggucauucugaaaagccu

SEQ ID NO: 644814 - RNA, 21 nt, Artificial Sequence
  Synthetic
cauggucauucugaaaagccu

SEQ ID NO: 644815 - RNA, 22 nt, Artificial Sequence
  Synthetic
acauggucauucugaaaagccu

SEQ ID NO: 644816 - RNA, 23 nt, Artificial Sequence
  Synthetic
gacauggucauucugaaaagccu

SEQ ID NO: 644817 - RNA, 24 nt, Artificial Sequence
  Synthetic
ggacauggucauucugaaaagccu

SEQ ID NO: 644818 - RNA, 18 nt, Artificial Sequence
  Synthetic
gaccaaucuuaaaagccu

SEQ ID NO: 644819 - RNA, 19 nt, Artificial Sequence
  Synthetic
ggaccaaucuuaaaagccu

SEQ ID NO: 644820 - RNA, 20 nt, Artificial Sequence
  Synthetic
uggaccaaucuuaaaagccu

SEQ ID NO: 644821 - RNA, 21 nt, Artificial Sequence
  Synthetic
uuggaccaaucuuaaaagccu

SEQ ID NO: 644822 - RNA, 22 nt, Artificial Sequence
  Synthetic
uuuggaccaaucuuaaaagccu

SEQ ID NO: 644823 - RNA, 23 nt, Artificial Sequence
  Synthetic
guuuggaccaaucuuaaaagccu

SEQ ID NO: 644824 - RNA, 24 nt, Artificial Sequence
  Synthetic
aguuuggaccaaucuuaaaagccu

SEQ ID NO: 644825 - RNA, 18 nt, Artificial Sequence
  Synthetic
agaacaagggcaaagccu

SEQ ID NO: 644826 - RNA, 19 nt, Artificial Sequence
  Synthetic
aagaacaagggcaaagccu

SEQ ID NO: 644827 - RNA, 20 nt, Artificial Sequence
  Synthetic
aaagaacaagggcaaagccu

SEQ ID NO: 644828 - RNA, 21 nt, Artificial Sequence
  Synthetic
uaaagaacaagggcaaagccu

SEQ ID NO: 644829 - RNA, 22 nt, Artificial Sequence
  Synthetic
guaaagaacaagggcaaagccu

SEQ ID NO: 644830 - RNA, 23 nt, Artificial Sequence
  Synthetic
gguaaagaacaagggcaaagccu

SEQ ID NO: 644831 - RNA, 24 nt, Artificial Sequence
  Synthetic
ggguaaagaacaagggcaaagccu

SEQ ID NO: 644832 - RNA, 18 nt, Artificial Sequence
  Synthetic
uaguugagaagaaagccu

SEQ ID NO: 644833 - RNA, 19 nt, Artificial Sequence
  Synthetic
auaguugagaagaaagccu

SEQ ID NO: 644834 - RNA, 20 nt, Artificial Sequence
  Synthetic
gauaguugagaagaaagccu

SEQ ID NO: 644835 - RNA, 21 nt, Artificial Sequence
  Synthetic
agauaguugagaagaaagccu

SEQ ID NO: 644836 - RNA, 22 nt, Artificial Sequence
  Synthetic
aagauaguugagaagaaagccu

SEQ ID NO: 644837 - RNA, 23 nt, Artificial Sequence
  Synthetic
gaagauaguugagaagaaagccu

SEQ ID NO: 644838 - RNA, 24 nt, Artificial Sequence
  Synthetic
agaagauaguugagaagaaagccu

SEQ ID NO: 644839 - RNA, 18 nt, Artificial Sequence
  Synthetic
aauccuauaagaaagccu

SEQ ID NO: 644840 - RNA, 19 nt, Artificial Sequence
  Synthetic
gaauccuauaagaaagccu

SEQ ID NO: 644841 - RNA, 20 nt, Artificial Sequence
  Synthetic
agaauccuauaagaaagccu

SEQ ID NO: 644842 - RNA, 21 nt, Artificial Sequence
  Synthetic
aagaauccuauaagaaagccu

SEQ ID NO: 644843 - RNA, 22 nt, Artificial Sequence
  Synthetic
uaagaauccuauaagaaagccu

SEQ ID NO: 644844 - RNA, 23 nt, Artificial Sequence
  Synthetic
auaagaauccuauaagaaagccu

SEQ ID NO: 644845 - RNA, 24 nt, Artificial Sequence
  Synthetic
uauaagaauccuauaagaaagccu

SEQ ID NO: 644846 - RNA, 18 nt, Artificial Sequence
  Synthetic
cauaaaauuguaaagccu

SEQ ID NO: 644847 - RNA, 19 nt, Artificial Sequence
  Synthetic
acauaaaauuguaaagccu

SEQ ID NO: 644848 - RNA, 20 nt, Artificial Sequence
  Synthetic
cacauaaaauuguaaagccu

SEQ ID NO: 644849 - RNA, 21 nt, Artificial Sequence
  Synthetic
acacauaaaauuguaaagccu

SEQ ID NO: 644850 - RNA, 22 nt, Artificial Sequence
  Synthetic
gacacauaaaauuguaaagccu

SEQ ID NO: 644851 - RNA, 23 nt, Artificial Sequence
  Synthetic
ggacacauaaaauuguaaagccu

SEQ ID NO: 644852 - RNA, 24 nt, Artificial Sequence
  Synthetic
gggacacauaaaauuguaaagccu

SEQ ID NO: 644853 - RNA, 18 nt, Artificial Sequence
  Synthetic
caaggaaguuuaaagccu

SEQ ID NO: 644854 - RNA, 19 nt, Artificial Sequence
  Synthetic
acaaggaaguuuaaagccu

SEQ ID NO: 644855 - RNA, 20 nt, Artificial Sequence
  Synthetic
cacaaggaaguuuaaagccu

SEQ ID NO: 644856 - RNA, 21 nt, Artificial Sequence
  Synthetic
ucacaaggaaguuuaaagccu

SEQ ID NO: 644857 - RNA, 22 nt, Artificial Sequence
  Synthetic
cucacaaggaaguuuaaagccu

SEQ ID NO: 644858 - RNA, 23 nt, Artificial Sequence
  Synthetic
ucucacaaggaaguuuaaagccu

SEQ ID NO: 644859 - RNA, 24 nt, Artificial Sequence
  Synthetic
aucucacaaggaaguuuaaagccu

SEQ ID NO: 644860 - RNA, 18 nt, Artificial Sequence
  Synthetic
aucuaucaaaacaagccu

SEQ ID NO: 644861 - RNA, 19 nt, Artificial Sequence
  Synthetic
uaucuaucaaaacaagccu

SEQ ID NO: 644862 - RNA, 20 nt, Artificial Sequence
  Synthetic
auaucuaucaaaacaagccu

SEQ ID NO: 644863 - RNA, 21 nt, Artificial Sequence
  Synthetic
aauaucuaucaaaacaagccu

SEQ ID NO: 644864 - RNA, 22 nt, Artificial Sequence
  Synthetic
aaauaucuaucaaaacaagccu

SEQ ID NO: 644865 - RNA, 23 nt, Artificial Sequence
  Synthetic
gaaauaucuaucaaaacaagccu

SEQ ID NO: 644866 - RNA, 24 nt, Artificial Sequence
  Synthetic
ugaaauaucuaucaaaacaagccu

SEQ ID NO: 644867 - RNA, 18 nt, Artificial Sequence
  Synthetic
gggucuuuucucaagccu

SEQ ID NO: 644868 - RNA, 19 nt, Artificial Sequence
  Synthetic
agggucuuuucucaagccu

SEQ ID NO: 644869 - RNA, 20 nt, Artificial Sequence
  Synthetic
cagggucuuuucucaagccu

SEQ ID NO: 644870 - RNA, 21 nt, Artificial Sequence
  Synthetic
ucagggucuuuucucaagccu

SEQ ID NO: 644871 - RNA, 22 nt, Artificial Sequence
  Synthetic
uucagggucuuuucucaagccu

SEQ ID NO: 644872 - RNA, 23 nt, Artificial Sequence
  Synthetic
uuucagggucuuuucucaagccu

SEQ ID NO: 644873 - RNA, 24 nt, Artificial Sequence
  Synthetic
auuucagggucuuuucucaagccu

SEQ ID NO: 644874 - RNA, 18 nt, Artificial Sequence
  Synthetic
aguggagggcagaagccu

SEQ ID NO: 644875 - RNA, 19 nt, Artificial Sequence
  Synthetic
caguggagggcagaagccu

SEQ ID NO: 644876 - RNA, 20 nt, Artificial Sequence
  Synthetic
ucaguggagggcagaagccu

SEQ ID NO: 644877 - RNA, 21 nt, Artificial Sequence
  Synthetic
uucaguggagggcagaagccu

SEQ ID NO: 644878 - RNA, 22 nt, Artificial Sequence
  Synthetic
uuucaguggagggcagaagccu

SEQ ID NO: 644879 - RNA, 23 nt, Artificial Sequence
  Synthetic
auuucaguggagggcagaagccu

SEQ ID NO: 644880 - RNA, 24 nt, Artificial Sequence
  Synthetic
aauuucaguggagggcagaagccu

SEQ ID NO: 644881 - RNA, 18 nt, Artificial Sequence
  Synthetic
ugaagaaugcagaagccu

SEQ ID NO: 644882 - RNA, 19 nt, Artificial Sequence
  Synthetic
gugaagaaugcagaagccu

SEQ ID NO: 644883 - RNA, 20 nt, Artificial Sequence
  Synthetic
cgugaagaaugcagaagccu

SEQ ID NO: 644884 - RNA, 21 nt, Artificial Sequence
  Synthetic
acgugaagaaugcagaagccu

SEQ ID NO: 644885 - RNA, 22 nt, Artificial Sequence
  Synthetic
uacgugaagaaugcagaagccu

SEQ ID NO: 644886 - RNA, 23 nt, Artificial Sequence
  Synthetic
cuacgugaagaaugcagaagccu

SEQ ID NO: 644887 - RNA, 24 nt, Artificial Sequence
  Synthetic
acuacgugaagaaugcagaagccu

SEQ ID NO: 644888 - RNA, 18 nt, Artificial Sequence
  Synthetic
aauuggaagaggaagccu

SEQ ID NO: 644889 - RNA, 19 nt, Artificial Sequence
  Synthetic
caauuggaagaggaagccu

SEQ ID NO: 644890 - RNA, 20 nt, Artificial Sequence
  Synthetic
acaauuggaagaggaagccu

SEQ ID NO: 644891 - RNA, 21 nt, Artificial Sequence
  Synthetic
gacaauuggaagaggaagccu

SEQ ID NO: 644892 - RNA, 22 nt, Artificial Sequence
  Synthetic
agacaauuggaagaggaagccu

SEQ ID NO: 644893 - RNA, 23 nt, Artificial Sequence
  Synthetic
uagacaauuggaagaggaagccu

SEQ ID NO: 644894 - RNA, 24 nt, Artificial Sequence
  Synthetic
guagacaauuggaagaggaagccu

SEQ ID NO: 644895 - RNA, 18 nt, Artificial Sequence
  Synthetic
ggaacagaacggaagccu

SEQ ID NO: 644896 - RNA, 19 nt, Artificial Sequence
  Synthetic
uggaacagaacggaagccu

SEQ ID NO: 644897 - RNA, 20 nt, Artificial Sequence
  Synthetic
auggaacagaacggaagccu

SEQ ID NO: 644898 - RNA, 21 nt, Artificial Sequence
  Synthetic
aauggaacagaacggaagccu

SEQ ID NO: 644899 - RNA, 22 nt, Artificial Sequence
  Synthetic
caauggaacagaacggaagccu

SEQ ID NO: 644900 - RNA, 23 nt, Artificial Sequence
  Synthetic
ccaauggaacagaacggaagccu

SEQ ID NO: 644901 - RNA, 24 nt, Artificial Sequence
  Synthetic
accaauggaacagaacggaagccu

SEQ ID NO: 644902 - RNA, 18 nt, Artificial Sequence
  Synthetic
cagaaaauauggaagccu

SEQ ID NO: 644903 - RNA, 19 nt, Artificial Sequence
  Synthetic
acagaaaauauggaagccu

SEQ ID NO: 644904 - RNA, 20 nt, Artificial Sequence
  Synthetic
aacagaaaauauggaagccu

SEQ ID NO: 644905 - RNA, 21 nt, Artificial Sequence
  Synthetic
caacagaaaauauggaagccu

SEQ ID NO: 644906 - RNA, 22 nt, Artificial Sequence
  Synthetic
ucaacagaaaauauggaagccu

SEQ ID NO: 644907 - RNA, 23 nt, Artificial Sequence
  Synthetic
uucaacagaaaauauggaagccu

SEQ ID NO: 644908 - RNA, 24 nt, Artificial Sequence
  Synthetic
guucaacagaaaauauggaagccu

SEQ ID NO: 644909 - RNA, 18 nt, Artificial Sequence
  Synthetic
agaauuugcucuaagccu

SEQ ID NO: 644910 - RNA, 19 nt, Artificial Sequence
  Synthetic
cagaauuugcucuaagccu

SEQ ID NO: 644911 - RNA, 20 nt, Artificial Sequence
  Synthetic
ucagaauuugcucuaagccu

SEQ ID NO: 644912 - RNA, 21 nt, Artificial Sequence
  Synthetic
cucagaauuugcucuaagccu

SEQ ID NO: 644913 - RNA, 22 nt, Artificial Sequence
  Synthetic
ucucagaauuugcucuaagccu

SEQ ID NO: 644914 - RNA, 23 nt, Artificial Sequence
  Synthetic
gucucagaauuugcucuaagccu

SEQ ID NO: 644915 - RNA, 24 nt, Artificial Sequence
  Synthetic
cgucucagaauuugcucuaagccu

SEQ ID NO: 644916 - RNA, 18 nt, Artificial Sequence
  Synthetic
cuuuguaaaaaacagccu

SEQ ID NO: 644917 - RNA, 19 nt, Artificial Sequence
  Synthetic
ccuuuguaaaaaacagccu

SEQ ID NO: 644918 - RNA, 20 nt, Artificial Sequence
  Synthetic
uccuuuguaaaaaacagccu

SEQ ID NO: 644919 - RNA, 21 nt, Artificial Sequence
  Synthetic
auccuuuguaaaaaacagccu

SEQ ID NO: 644920 - RNA, 22 nt, Artificial Sequence
  Synthetic
cauccuuuguaaaaaacagccu

SEQ ID NO: 644921 - RNA, 23 nt, Artificial Sequence
  Synthetic
acauccuuuguaaaaaacagccu

SEQ ID NO: 644922 - RNA, 24 nt, Artificial Sequence
  Synthetic
aacauccuuuguaaaaaacagccu

SEQ ID NO: 644923 - RNA, 18 nt, Artificial Sequence
  Synthetic
agguaagaauaacagccu

SEQ ID NO: 644924 - RNA, 19 nt, Artificial Sequence
  Synthetic
gagguaagaauaacagccu

SEQ ID NO: 644925 - RNA, 20 nt, Artificial Sequence
  Synthetic
ugagguaagaauaacagccu

SEQ ID NO: 644926 - RNA, 21 nt, Artificial Sequence
  Synthetic
augagguaagaauaacagccu

SEQ ID NO: 644927 - RNA, 22 nt, Artificial Sequence
  Synthetic
uaugagguaagaauaacagccu

SEQ ID NO: 644928 - RNA, 23 nt, Artificial Sequence
  Synthetic
auaugagguaagaauaacagccu

SEQ ID NO: 644929 - RNA, 24 nt, Artificial Sequence
  Synthetic
aauaugagguaagaauaacagccu

SEQ ID NO: 644930 - RNA, 18 nt, Artificial Sequence
  Synthetic
cagcguuauccacagccu

SEQ ID NO: 644931 - RNA, 19 nt, Artificial Sequence
  Synthetic
ucagcguuauccacagccu

SEQ ID NO: 644932 - RNA, 20 nt, Artificial Sequence
  Synthetic
gucagcguuauccacagccu

SEQ ID NO: 644933 - RNA, 21 nt, Artificial Sequence
  Synthetic
cgucagcguuauccacagccu

SEQ ID NO: 644934 - RNA, 22 nt, Artificial Sequence
  Synthetic
ucgucagcguuauccacagccu

SEQ ID NO: 644935 - RNA, 23 nt, Artificial Sequence
  Synthetic
uucgucagcguuauccacagccu

SEQ ID NO: 644936 - RNA, 24 nt, Artificial Sequence
  Synthetic
auucgucagcguuauccacagccu

SEQ ID NO: 644937 - RNA, 18 nt, Artificial Sequence
  Synthetic
caacuagcaucacagccu

SEQ ID NO: 644938 - RNA, 19 nt, Artificial Sequence
  Synthetic
ucaacuagcaucacagccu

SEQ ID NO: 644939 - RNA, 20 nt, Artificial Sequence
  Synthetic
cucaacuagcaucacagccu

SEQ ID NO: 644940 - RNA, 21 nt, Artificial Sequence
  Synthetic
ucucaacuagcaucacagccu

SEQ ID NO: 644941 - RNA, 22 nt, Artificial Sequence
  Synthetic
aucucaacuagcaucacagccu

SEQ ID NO: 644942 - RNA, 23 nt, Artificial Sequence
  Synthetic
uaucucaacuagcaucacagccu

SEQ ID NO: 644943 - RNA, 24 nt, Artificial Sequence
  Synthetic
uuaucucaacuagcaucacagccu

SEQ ID NO: 644944 - RNA, 18 nt, Artificial Sequence
  Synthetic
auaauucagucacagccu

SEQ ID NO: 644945 - RNA, 19 nt, Artificial Sequence
  Synthetic
uauaauucagucacagccu

SEQ ID NO: 644946 - RNA, 20 nt, Artificial Sequence
  Synthetic
auauaauucagucacagccu

SEQ ID NO: 644947 - RNA, 21 nt, Artificial Sequence
  Synthetic
aauauaauucagucacagccu

SEQ ID NO: 644948 - RNA, 22 nt, Artificial Sequence
  Synthetic
aaauauaauucagucacagccu

SEQ ID NO: 644949 - RNA, 23 nt, Artificial Sequence
  Synthetic
caaauauaauucagucacagccu

SEQ ID NO: 644950 - RNA, 24 nt, Artificial Sequence
  Synthetic
gcaaauauaauucagucacagccu

SEQ ID NO: 644951 - RNA, 18 nt, Artificial Sequence
  Synthetic
ggaguuggauaccagccu

SEQ ID NO: 644952 - RNA, 19 nt, Artificial Sequence
  Synthetic
aggaguuggauaccagccu

SEQ ID NO: 644953 - RNA, 20 nt, Artificial Sequence
  Synthetic
caggaguuggauaccagccu

SEQ ID NO: 644954 - RNA, 21 nt, Artificial Sequence
  Synthetic
ccaggaguuggauaccagccu

SEQ ID NO: 644955 - RNA, 22 nt, Artificial Sequence
  Synthetic
cccaggaguuggauaccagccu

SEQ ID NO: 644956 - RNA, 23 nt, Artificial Sequence
  Synthetic
gcccaggaguuggauaccagccu

SEQ ID NO: 644957 - RNA, 24 nt, Artificial Sequence
  Synthetic
agcccaggaguuggauaccagccu

SEQ ID NO: 644958 - RNA, 18 nt, Artificial Sequence
  Synthetic
cucucacucagccagccu

SEQ ID NO: 644959 - RNA, 19 nt, Artificial Sequence
  Synthetic
gcucucacucagccagccu

SEQ ID NO: 644960 - RNA, 20 nt, Artificial Sequence
  Synthetic
agcucucacucagccagccu

SEQ ID NO: 644961 - RNA, 21 nt, Artificial Sequence
  Synthetic
gagcucucacucagccagccu

SEQ ID NO: 644962 - RNA, 22 nt, Artificial Sequence
  Synthetic
ggagcucucacucagccagccu

SEQ ID NO: 644963 - RNA, 23 nt, Artificial Sequence
  Synthetic
uggagcucucacucagccagccu

SEQ ID NO: 644964 - RNA, 24 nt, Artificial Sequence
  Synthetic
auggagcucucacucagccagccu

SEQ ID NO: 644965 - RNA, 18 nt, Artificial Sequence
  Synthetic
gccauugcacuccagccu

SEQ ID NO: 644966 - RNA, 19 nt, Artificial Sequence
  Synthetic
cgccauugcacuccagccu

SEQ ID NO: 644967 - RNA, 20 nt, Artificial Sequence
  Synthetic
gcgccauugcacuccagccu

SEQ ID NO: 644968 - RNA, 21 nt, Artificial Sequence
  Synthetic
ugcgccauugcacuccagccu

SEQ ID NO: 644969 - RNA, 22 nt, Artificial Sequence
  Synthetic
uugcgccauugcacuccagccu

SEQ ID NO: 644970 - RNA, 23 nt, Artificial Sequence
  Synthetic
auugcgccauugcacuccagccu

SEQ ID NO: 644971 - RNA, 24 nt, Artificial Sequence
  Synthetic
gauugcgccauugcacuccagccu

SEQ ID NO: 644972 - RNA, 19 nt, Artificial Sequence
  Synthetic
ugccauugcacuccagccu

SEQ ID NO: 644973 - RNA, 20 nt, Artificial Sequence
  Synthetic
augccauugcacuccagccu

SEQ ID NO: 644974 - RNA, 21 nt, Artificial Sequence
  Synthetic
caugccauugcacuccagccu

SEQ ID NO: 644975 - RNA, 22 nt, Artificial Sequence
  Synthetic
ucaugccauugcacuccagccu

SEQ ID NO: 644976 - RNA, 23 nt, Artificial Sequence
  Synthetic
aucaugccauugcacuccagccu

SEQ ID NO: 644977 - RNA, 24 nt, Artificial Sequence
  Synthetic
gaucaugccauugcacuccagccu

SEQ ID NO: 644978 - RNA, 18 nt, Artificial Sequence
  Synthetic
uuaguuuuauuccagccu

SEQ ID NO: 644979 - RNA, 19 nt, Artificial Sequence
  Synthetic
auuaguuuuauuccagccu

SEQ ID NO: 644980 - RNA, 20 nt, Artificial Sequence
  Synthetic
cauuaguuuuauuccagccu

SEQ ID NO: 644981 - RNA, 21 nt, Artificial Sequence
  Synthetic
acauuaguuuuauuccagccu

SEQ ID NO: 644982 - RNA, 22 nt, Artificial Sequence
  Synthetic
gacauuaguuuuauuccagccu

SEQ ID NO: 644983 - RNA, 23 nt, Artificial Sequence
  Synthetic
agacauuaguuuuauuccagccu

SEQ ID NO: 644984 - RNA, 24 nt, Artificial Sequence
  Synthetic
uagacauuaguuuuauuccagccu

SEQ ID NO: 644985 - RNA, 18 nt, Artificial Sequence
  Synthetic
uuaaaagcagagcagccu

SEQ ID NO: 644986 - RNA, 19 nt, Artificial Sequence
  Synthetic
auuaaaagcagagcagccu

SEQ ID NO: 644987 - RNA, 20 nt, Artificial Sequence
  Synthetic
uauuaaaagcagagcagccu

SEQ ID NO: 644988 - RNA, 21 nt, Artificial Sequence
  Synthetic
cuauuaaaagcagagcagccu

SEQ ID NO: 644989 - RNA, 22 nt, Artificial Sequence
  Synthetic
ucuauuaaaagcagagcagccu

SEQ ID NO: 644990 - RNA, 23 nt, Artificial Sequence
  Synthetic
cucuauuaaaagcagagcagccu

SEQ ID NO: 644991 - RNA, 24 nt, Artificial Sequence
  Synthetic
ccucuauuaaaagcagagcagccu

SEQ ID NO: 644992 - RNA, 18 nt, Artificial Sequence
  Synthetic
auuccaagauggcagccu

SEQ ID NO: 644993 - RNA, 19 nt, Artificial Sequence
  Synthetic
uauuccaagauggcagccu

SEQ ID NO: 644994 - RNA, 20 nt, Artificial Sequence
  Synthetic
auauuccaagauggcagccu

SEQ ID NO: 644995 - RNA, 21 nt, Artificial Sequence
  Synthetic
cauauuccaagauggcagccu

SEQ ID NO: 644996 - RNA, 22 nt, Artificial Sequence
  Synthetic
gcauauuccaagauggcagccu

SEQ ID NO: 644997 - RNA, 23 nt, Artificial Sequence
  Synthetic
ugcauauuccaagauggcagccu

SEQ ID NO: 644998 - RNA, 24 nt, Artificial Sequence
  Synthetic
uugcauauuccaagauggcagccu

SEQ ID NO: 644999 - RNA, 18 nt, Artificial Sequence
  Synthetic
cccugcuaugugcagccu

SEQ ID NO: 645000 - RNA, 19 nt, Artificial Sequence
  Synthetic
ccccugcuaugugcagccu

SEQ ID NO: 645001 - RNA, 20 nt, Artificial Sequence
  Synthetic
cccccugcuaugugcagccu

SEQ ID NO: 645002 - RNA, 21 nt, Artificial Sequence
  Synthetic
ccccccugcuaugugcagccu

SEQ ID NO: 645003 - RNA, 22 nt, Artificial Sequence
  Synthetic
gccccccugcuaugugcagccu

SEQ ID NO: 645004 - RNA, 23 nt, Artificial Sequence
  Synthetic
agccccccugcuaugugcagccu

SEQ ID NO: 645005 - RNA, 24 nt, Artificial Sequence
  Synthetic
gagccccccugcuaugugcagccu

SEQ ID NO: 645006 - RNA, 18 nt, Artificial Sequence
  Synthetic
uccuacaccuugcagccu

SEQ ID NO: 645007 - RNA, 19 nt, Artificial Sequence
  Synthetic
uuccuacaccuugcagccu

SEQ ID NO: 645008 - RNA, 20 nt, Artificial Sequence
  Synthetic
cuuccuacaccuugcagccu

SEQ ID NO: 645009 - RNA, 21 nt, Artificial Sequence
  Synthetic
acuuccuacaccuugcagccu

SEQ ID NO: 645010 - RNA, 22 nt, Artificial Sequence
  Synthetic
cacuuccuacaccuugcagccu

SEQ ID NO: 645011 - RNA, 23 nt, Artificial Sequence
  Synthetic
ccacuuccuacaccuugcagccu

SEQ ID NO: 645012 - RNA, 24 nt, Artificial Sequence
  Synthetic
uccacuuccuacaccuugcagccu

SEQ ID NO: 645013 - RNA, 18 nt, Artificial Sequence
  Synthetic
acagagauuuugcagccu

SEQ ID NO: 645014 - RNA, 19 nt, Artificial Sequence
  Synthetic
cacagagauuuugcagccu

SEQ ID NO: 645015 - RNA, 20 nt, Artificial Sequence
  Synthetic
acacagagauuuugcagccu

SEQ ID NO: 645016 - RNA, 21 nt, Artificial Sequence
  Synthetic
aacacagagauuuugcagccu

SEQ ID NO: 645017 - RNA, 22 nt, Artificial Sequence
  Synthetic
aaacacagagauuuugcagccu

SEQ ID NO: 645018 - RNA, 23 nt, Artificial Sequence
  Synthetic
aaaacacagagauuuugcagccu

SEQ ID NO: 645019 - RNA, 24 nt, Artificial Sequence
  Synthetic
aaaaacacagagauuuugcagccu

SEQ ID NO: 645020 - RNA, 18 nt, Artificial Sequence
  Synthetic
cuugaggaucaucagccu

SEQ ID NO: 645021 - RNA, 19 nt, Artificial Sequence
  Synthetic
acuugaggaucaucagccu

SEQ ID NO: 645022 - RNA, 20 nt, Artificial Sequence
  Synthetic
gacuugaggaucaucagccu

SEQ ID NO: 645023 - RNA, 21 nt, Artificial Sequence
  Synthetic
agacuugaggaucaucagccu

SEQ ID NO: 645024 - RNA, 22 nt, Artificial Sequence
  Synthetic
aagacuugaggaucaucagccu

SEQ ID NO: 645025 - RNA, 23 nt, Artificial Sequence
  Synthetic
caagacuugaggaucaucagccu

SEQ ID NO: 645026 - RNA, 24 nt, Artificial Sequence
  Synthetic
acaagacuugaggaucaucagccu

SEQ ID NO: 645027 - RNA, 18 nt, Artificial Sequence
  Synthetic
guaauccaagaucagccu

SEQ ID NO: 645028 - RNA, 19 nt, Artificial Sequence
  Synthetic
aguaauccaagaucagccu

SEQ ID NO: 645029 - RNA, 20 nt, Artificial Sequence
  Synthetic
caguaauccaagaucagccu

SEQ ID NO: 645030 - RNA, 21 nt, Artificial Sequence
  Synthetic
ccaguaauccaagaucagccu

SEQ ID NO: 645031 - RNA, 22 nt, Artificial Sequence
  Synthetic
cccaguaauccaagaucagccu

SEQ ID NO: 645032 - RNA, 23 nt, Artificial Sequence
  Synthetic
gcccaguaauccaagaucagccu

SEQ ID NO: 645033 - RNA, 24 nt, Artificial Sequence
  Synthetic
ggcccaguaauccaagaucagccu

SEQ ID NO: 645034 - RNA, 18 nt, Artificial Sequence
  Synthetic
auucucaugccucagccu

SEQ ID NO: 645035 - RNA, 19 nt, Artificial Sequence
  Synthetic
aauucucaugccucagccu

SEQ ID NO: 645036 - RNA, 20 nt, Artificial Sequence
  Synthetic
caauucucaugccucagccu

SEQ ID NO: 645037 - RNA, 21 nt, Artificial Sequence
  Synthetic
gcaauucucaugccucagccu

SEQ ID NO: 645038 - RNA, 22 nt, Artificial Sequence
  Synthetic
agcaauucucaugccucagccu

SEQ ID NO: 645039 - RNA, 23 nt, Artificial Sequence
  Synthetic
aagcaauucucaugccucagccu

SEQ ID NO: 645040 - RNA, 24 nt, Artificial Sequence
  Synthetic
caagcaauucucaugccucagccu

SEQ ID NO: 645041 - RNA, 21 nt, Artificial Sequence
  Synthetic
gcgauucuccugccucagccu

SEQ ID NO: 645042 - RNA, 22 nt, Artificial Sequence
  Synthetic
agcgauucuccugccucagccu

SEQ ID NO: 645043 - RNA, 23 nt, Artificial Sequence
  Synthetic
aagcgauucuccugccucagccu

SEQ ID NO: 645044 - RNA, 24 nt, Artificial Sequence
  Synthetic
caagcgauucuccugccucagccu

SEQ ID NO: 645045 - RNA, 18 nt, Artificial Sequence
  Synthetic
uggaacucuauucagccu

SEQ ID NO: 645046 - RNA, 19 nt, Artificial Sequence
  Synthetic
auggaacucuauucagccu

SEQ ID NO: 645047 - RNA, 20 nt, Artificial Sequence
  Synthetic
aauggaacucuauucagccu

SEQ ID NO: 645048 - RNA, 21 nt, Artificial Sequence
  Synthetic
caauggaacucuauucagccu

SEQ ID NO: 645049 - RNA, 22 nt, Artificial Sequence
  Synthetic
acaauggaacucuauucagccu

SEQ ID NO: 645050 - RNA, 23 nt, Artificial Sequence
  Synthetic
cacaauggaacucuauucagccu

SEQ ID NO: 645051 - RNA, 24 nt, Artificial Sequence
  Synthetic
acacaauggaacucuauucagccu

SEQ ID NO: 645052 - RNA, 18 nt, Artificial Sequence
  Synthetic
uacuucuggugagagccu

SEQ ID NO: 645053 - RNA, 19 nt, Artificial Sequence
  Synthetic
cuacuucuggugagagccu

SEQ ID NO: 645054 - RNA, 20 nt, Artificial Sequence
  Synthetic
ucuacuucuggugagagccu

SEQ ID NO: 645055 - RNA, 21 nt, Artificial Sequence
  Synthetic
aucuacuucuggugagagccu

SEQ ID NO: 645056 - RNA, 22 nt, Artificial Sequence
  Synthetic
caucuacuucuggugagagccu

SEQ ID NO: 645057 - RNA, 23 nt, Artificial Sequence
  Synthetic
gcaucuacuucuggugagagccu

SEQ ID NO: 645058 - RNA, 24 nt, Artificial Sequence
  Synthetic
ggcaucuacuucuggugagagccu

SEQ ID NO: 645059 - RNA, 18 nt, Artificial Sequence
  Synthetic
aaugaaaacucggagccu

SEQ ID NO: 645060 - RNA, 19 nt, Artificial Sequence
  Synthetic
aaaugaaaacucggagccu

SEQ ID NO: 645061 - RNA, 20 nt, Artificial Sequence
  Synthetic
uaaaugaaaacucggagccu

SEQ ID NO: 645062 - RNA, 21 nt, Artificial Sequence
  Synthetic
auaaaugaaaacucggagccu

SEQ ID NO: 645063 - RNA, 22 nt, Artificial Sequence
  Synthetic
aauaaaugaaaacucggagccu

SEQ ID NO: 645064 - RNA, 23 nt, Artificial Sequence
  Synthetic
aaauaaaugaaaacucggagccu

SEQ ID NO: 645065 - RNA, 24 nt, Artificial Sequence
  Synthetic
aaaauaaaugaaaacucggagccu

SEQ ID NO: 645066 - RNA, 18 nt, Artificial Sequence
  Synthetic
gcagauuaacuugagccu

SEQ ID NO: 645067 - RNA, 19 nt, Artificial Sequence
  Synthetic
ugcagauuaacuugagccu

SEQ ID NO: 645068 - RNA, 20 nt, Artificial Sequence
  Synthetic
augcagauuaacuugagccu

SEQ ID NO: 645069 - RNA, 21 nt, Artificial Sequence
  Synthetic
uaugcagauuaacuugagccu

SEQ ID NO: 645070 - RNA, 22 nt, Artificial Sequence
  Synthetic
auaugcagauuaacuugagccu

SEQ ID NO: 645071 - RNA, 23 nt, Artificial Sequence
  Synthetic
aauaugcagauuaacuugagccu

SEQ ID NO: 645072 - RNA, 24 nt, Artificial Sequence
  Synthetic
gaauaugcagauuaacuugagccu

SEQ ID NO: 645073 - RNA, 18 nt, Artificial Sequence
  Synthetic
ggcagaucacuugagccu

SEQ ID NO: 645074 - RNA, 19 nt, Artificial Sequence
  Synthetic
gggcagaucacuugagccu

SEQ ID NO: 645075 - RNA, 20 nt, Artificial Sequence
  Synthetic
ugggcagaucacuugagccu

SEQ ID NO: 645076 - RNA, 21 nt, Artificial Sequence
  Synthetic
gugggcagaucacuugagccu

SEQ ID NO: 645077 - RNA, 22 nt, Artificial Sequence
  Synthetic
ggugggcagaucacuugagccu

SEQ ID NO: 645078 - RNA, 23 nt, Artificial Sequence
  Synthetic
aggugggcagaucacuugagccu

SEQ ID NO: 645079 - RNA, 24 nt, Artificial Sequence
  Synthetic
gaggugggcagaucacuugagccu

SEQ ID NO: 645080 - RNA, 18 nt, Artificial Sequence
  Synthetic
uguugcaacuuugagccu

SEQ ID NO: 645081 - RNA, 19 nt, Artificial Sequence
  Synthetic
cuguugcaacuuugagccu

SEQ ID NO: 645082 - RNA, 20 nt, Artificial Sequence
  Synthetic
acuguugcaacuuugagccu

SEQ ID NO: 645083 - RNA, 21 nt, Artificial Sequence
  Synthetic
uacuguugcaacuuugagccu

SEQ ID NO: 645084 - RNA, 22 nt, Artificial Sequence
  Synthetic
auacuguugcaacuuugagccu

SEQ ID NO: 645085 - RNA, 23 nt, Artificial Sequence
  Synthetic
aauacuguugcaacuuugagccu

SEQ ID NO: 645086 - RNA, 24 nt, Artificial Sequence
  Synthetic
aaauacuguugcaacuuugagccu

SEQ ID NO: 645087 - RNA, 18 nt, Artificial Sequence
  Synthetic
uugaggcaguaauagccu

SEQ ID NO: 645088 - RNA, 19 nt, Artificial Sequence
  Synthetic
auugaggcaguaauagccu

SEQ ID NO: 645089 - RNA, 20 nt, Artificial Sequence
  Synthetic
aauugaggcaguaauagccu

SEQ ID NO: 645090 - RNA, 21 nt, Artificial Sequence
  Synthetic
aaauugaggcaguaauagccu

SEQ ID NO: 645091 - RNA, 22 nt, Artificial Sequence
  Synthetic
gaaauugaggcaguaauagccu

SEQ ID NO: 645092 - RNA, 23 nt, Artificial Sequence
  Synthetic
ugaaauugaggcaguaauagccu

SEQ ID NO: 645093 - RNA, 24 nt, Artificial Sequence
  Synthetic
cugaaauugaggcaguaauagccu

SEQ ID NO: 645094 - RNA, 18 nt, Artificial Sequence
  Synthetic
cugagccucagauagccu

SEQ ID NO: 645095 - RNA, 19 nt, Artificial Sequence
  Synthetic
gcugagccucagauagccu

SEQ ID NO: 645096 - RNA, 20 nt, Artificial Sequence
  Synthetic
ggcugagccucagauagccu

SEQ ID NO: 645097 - RNA, 21 nt, Artificial Sequence
  Synthetic
uggcugagccucagauagccu

SEQ ID NO: 645098 - RNA, 22 nt, Artificial Sequence
  Synthetic
cuggcugagccucagauagccu

SEQ ID NO: 645099 - RNA, 23 nt, Artificial Sequence
  Synthetic
acuggcugagccucagauagccu

SEQ ID NO: 645100 - RNA, 24 nt, Artificial Sequence
  Synthetic
aacuggcugagccucagauagccu

SEQ ID NO: 645101 - RNA, 18 nt, Artificial Sequence
  Synthetic
uguacugguuuauagccu

SEQ ID NO: 645102 - RNA, 19 nt, Artificial Sequence
  Synthetic
cuguacugguuuauagccu

SEQ ID NO: 645103 - RNA, 20 nt, Artificial Sequence
  Synthetic
gcuguacugguuuauagccu

SEQ ID NO: 645104 - RNA, 21 nt, Artificial Sequence
  Synthetic
ugcuguacugguuuauagccu

SEQ ID NO: 645105 - RNA, 22 nt, Artificial Sequence
  Synthetic
augcuguacugguuuauagccu

SEQ ID NO: 645106 - RNA, 23 nt, Artificial Sequence
  Synthetic
caugcuguacugguuuauagccu

SEQ ID NO: 645107 - RNA, 24 nt, Artificial Sequence
  Synthetic
acaugcuguacugguuuauagccu

SEQ ID NO: 645108 - RNA, 18 nt, Artificial Sequence
  Synthetic
auaaguaacaacuagccu

SEQ ID NO: 645109 - RNA, 19 nt, Artificial Sequence
  Synthetic
aauaaguaacaacuagccu

SEQ ID NO: 645110 - RNA, 20 nt, Artificial Sequence
  Synthetic
gaauaaguaacaacuagccu

SEQ ID NO: 645111 - RNA, 21 nt, Artificial Sequence
  Synthetic
ugaauaaguaacaacuagccu

SEQ ID NO: 645112 - RNA, 22 nt, Artificial Sequence
  Synthetic
cugaauaaguaacaacuagccu

SEQ ID NO: 645113 - RNA, 23 nt, Artificial Sequence
  Synthetic
ccugaauaaguaacaacuagccu

SEQ ID NO: 645114 - RNA, 24 nt, Artificial Sequence
  Synthetic
uccugaauaaguaacaacuagccu

SEQ ID NO: 645115 - RNA, 18 nt, Artificial Sequence
  Synthetic
gacacucaaugcuagccu

SEQ ID NO: 645116 - RNA, 19 nt, Artificial Sequence
  Synthetic
agacacucaaugcuagccu

SEQ ID NO: 645117 - RNA, 20 nt, Artificial Sequence
  Synthetic
cagacacucaaugcuagccu

SEQ ID NO: 645118 - RNA, 21 nt, Artificial Sequence
  Synthetic
acagacacucaaugcuagccu

SEQ ID NO: 645119 - RNA, 22 nt, Artificial Sequence
  Synthetic
cacagacacucaaugcuagccu

SEQ ID NO: 645120 - RNA, 23 nt, Artificial Sequence
  Synthetic
ccacagacacucaaugcuagccu

SEQ ID NO: 645121 - RNA, 24 nt, Artificial Sequence
  Synthetic
gccacagacacucaaugcuagccu

SEQ ID NO: 645122 - RNA, 18 nt, Artificial Sequence
  Synthetic
gaucaucuuagguagccu

SEQ ID NO: 645123 - RNA, 19 nt, Artificial Sequence
  Synthetic
ugaucaucuuagguagccu

SEQ ID NO: 645124 - RNA, 20 nt, Artificial Sequence
  Synthetic
uugaucaucuuagguagccu

SEQ ID NO: 645125 - RNA, 21 nt, Artificial Sequence
  Synthetic
uuugaucaucuuagguagccu

SEQ ID NO: 645126 - RNA, 22 nt, Artificial Sequence
  Synthetic
uuuugaucaucuuagguagccu

SEQ ID NO: 645127 - RNA, 23 nt, Artificial Sequence
  Synthetic
uuuuugaucaucuuagguagccu

SEQ ID NO: 645128 - RNA, 24 nt, Artificial Sequence
  Synthetic
uuuuuugaucaucuuagguagccu

SEQ ID NO: 645129 - RNA, 18 nt, Artificial Sequence
  Synthetic
cuugaacagcuguagccu

SEQ ID NO: 645130 - RNA, 19 nt, Artificial Sequence
  Synthetic
gcuugaacagcuguagccu

SEQ ID NO: 645131 - RNA, 20 nt, Artificial Sequence
  Synthetic
agcuugaacagcuguagccu

SEQ ID NO: 645132 - RNA, 21 nt, Artificial Sequence
  Synthetic
aagcuugaacagcuguagccu

SEQ ID NO: 645133 - RNA, 22 nt, Artificial Sequence
  Synthetic
caagcuugaacagcuguagccu

SEQ ID NO: 645134 - RNA, 23 nt, Artificial Sequence
  Synthetic
acaagcuugaacagcuguagccu

SEQ ID NO: 645135 - RNA, 24 nt, Artificial Sequence
  Synthetic
cacaagcuugaacagcuguagccu

SEQ ID NO: 645136 - RNA, 18 nt, Artificial Sequence
  Synthetic
aguacagguuuguagccu

SEQ ID NO: 645137 - RNA, 19 nt, Artificial Sequence
  Synthetic
caguacagguuuguagccu

SEQ ID NO: 645138 - RNA, 20 nt, Artificial Sequence
  Synthetic
gcaguacagguuuguagccu

SEQ ID NO: 645139 - RNA, 21 nt, Artificial Sequence
  Synthetic
ugcaguacagguuuguagccu

SEQ ID NO: 645140 - RNA, 22 nt, Artificial Sequence
  Synthetic
augcaguacagguuuguagccu

SEQ ID NO: 645141 - RNA, 23 nt, Artificial Sequence
  Synthetic
caugcaguacagguuuguagccu

SEQ ID NO: 645142 - RNA, 24 nt, Artificial Sequence
  Synthetic
acaugcaguacagguuuguagccu

SEQ ID NO: 645143 - RNA, 18 nt, Artificial Sequence
  Synthetic
cauaaauugaauuagccu

SEQ ID NO: 645144 - RNA, 19 nt, Artificial Sequence
  Synthetic
ucauaaauugaauuagccu

SEQ ID NO: 645145 - RNA, 20 nt, Artificial Sequence
  Synthetic
gucauaaauugaauuagccu

SEQ ID NO: 645146 - RNA, 21 nt, Artificial Sequence
  Synthetic
ugucauaaauugaauuagccu

SEQ ID NO: 645147 - RNA, 22 nt, Artificial Sequence
  Synthetic
augucauaaauugaauuagccu

SEQ ID NO: 645148 - RNA, 23 nt, Artificial Sequence
  Synthetic
uaugucauaaauugaauuagccu

SEQ ID NO: 645149 - RNA, 24 nt, Artificial Sequence
  Synthetic
guaugucauaaauugaauuagccu

SEQ ID NO: 645150 - RNA, 18 nt, Artificial Sequence
  Synthetic
cugucuuuuucuacgccu

SEQ ID NO: 645151 - RNA, 19 nt, Artificial Sequence
  Synthetic
acugucuuuuucuacgccu

SEQ ID NO: 645152 - RNA, 20 nt, Artificial Sequence
  Synthetic
cacugucuuuuucuacgccu

SEQ ID NO: 645153 - RNA, 21 nt, Artificial Sequence
  Synthetic
ucacugucuuuuucuacgccu

SEQ ID NO: 645154 - RNA, 22 nt, Artificial Sequence
  Synthetic
uucacugucuuuuucuacgccu

SEQ ID NO: 645155 - RNA, 23 nt, Artificial Sequence
  Synthetic
auucacugucuuuuucuacgccu

SEQ ID NO: 645156 - RNA, 24 nt, Artificial Sequence
  Synthetic
cauucacugucuuuuucuacgccu

SEQ ID NO: 645157 - RNA, 18 nt, Artificial Sequence
  Synthetic
agcaagucccauccgccu

SEQ ID NO: 645158 - RNA, 19 nt, Artificial Sequence
  Synthetic
aagcaagucccauccgccu

SEQ ID NO: 645159 - RNA, 20 nt, Artificial Sequence
  Synthetic
aaagcaagucccauccgccu

SEQ ID NO: 645160 - RNA, 21 nt, Artificial Sequence
  Synthetic
caaagcaagucccauccgccu

SEQ ID NO: 645161 - RNA, 22 nt, Artificial Sequence
  Synthetic
gcaaagcaagucccauccgccu

SEQ ID NO: 645162 - RNA, 23 nt, Artificial Sequence
  Synthetic
ggcaaagcaagucccauccgccu

SEQ ID NO: 645163 - RNA, 24 nt, Artificial Sequence
  Synthetic
aggcaaagcaagucccauccgccu

SEQ ID NO: 645164 - RNA, 18 nt, Artificial Sequence
  Synthetic
ugguuuaaccaaaggccu

SEQ ID NO: 645165 - RNA, 19 nt, Artificial Sequence
  Synthetic
augguuuaaccaaaggccu

SEQ ID NO: 645166 - RNA, 20 nt, Artificial Sequence
  Synthetic
caugguuuaaccaaaggccu

SEQ ID NO: 645167 - RNA, 21 nt, Artificial Sequence
  Synthetic
acaugguuuaaccaaaggccu

SEQ ID NO: 645168 - RNA, 22 nt, Artificial Sequence
  Synthetic
gacaugguuuaaccaaaggccu

SEQ ID NO: 645169 - RNA, 23 nt, Artificial Sequence
  Synthetic
agacaugguuuaaccaaaggccu

SEQ ID NO: 645170 - RNA, 24 nt, Artificial Sequence
  Synthetic
cagacaugguuuaaccaaaggccu

SEQ ID NO: 645171 - RNA, 18 nt, Artificial Sequence
  Synthetic
auucccucuugaaggccu

SEQ ID NO: 645172 - RNA, 19 nt, Artificial Sequence
  Synthetic
aauucccucuugaaggccu

SEQ ID NO: 645173 - RNA, 20 nt, Artificial Sequence
  Synthetic
caauucccucuugaaggccu

SEQ ID NO: 645174 - RNA, 21 nt, Artificial Sequence
  Synthetic
ucaauucccucuugaaggccu

SEQ ID NO: 645175 - RNA, 22 nt, Artificial Sequence
  Synthetic
uucaauucccucuugaaggccu

SEQ ID NO: 645176 - RNA, 23 nt, Artificial Sequence
  Synthetic
uuucaauucccucuugaaggccu

SEQ ID NO: 645177 - RNA, 24 nt, Artificial Sequence
  Synthetic
uuuucaauucccucuugaaggccu

SEQ ID NO: 645178 - RNA, 18 nt, Artificial Sequence
  Synthetic
acagcuauucucaggccu

SEQ ID NO: 645179 - RNA, 19 nt, Artificial Sequence
  Synthetic
cacagcuauucucaggccu

SEQ ID NO: 645180 - RNA, 20 nt, Artificial Sequence
  Synthetic
acacagcuauucucaggccu

SEQ ID NO: 645181 - RNA, 21 nt, Artificial Sequence
  Synthetic
gacacagcuauucucaggccu

SEQ ID NO: 645182 - RNA, 22 nt, Artificial Sequence
  Synthetic
agacacagcuauucucaggccu

SEQ ID NO: 645183 - RNA, 23 nt, Artificial Sequence
  Synthetic
gagacacagcuauucucaggccu

SEQ ID NO: 645184 - RNA, 24 nt, Artificial Sequence
  Synthetic
ugagacacagcuauucucaggccu

SEQ ID NO: 645185 - RNA, 18 nt, Artificial Sequence
  Synthetic
uuucuaaaauucaggccu

SEQ ID NO: 645186 - RNA, 19 nt, Artificial Sequence
  Synthetic
cuuucuaaaauucaggccu

SEQ ID NO: 645187 - RNA, 20 nt, Artificial Sequence
  Synthetic
gcuuucuaaaauucaggccu

SEQ ID NO: 645188 - RNA, 21 nt, Artificial Sequence
  Synthetic
ggcuuucuaaaauucaggccu

SEQ ID NO: 645189 - RNA, 22 nt, Artificial Sequence
  Synthetic
gggcuuucuaaaauucaggccu

SEQ ID NO: 645190 - RNA, 23 nt, Artificial Sequence
  Synthetic
ggggcuuucuaaaauucaggccu

SEQ ID NO: 645191 - RNA, 24 nt, Artificial Sequence
  Synthetic
gggggcuuucuaaaauucaggccu

SEQ ID NO: 645192 - RNA, 18 nt, Artificial Sequence
  Synthetic
aggacuuuuaagaggccu

SEQ ID NO: 645193 - RNA, 19 nt, Artificial Sequence
  Synthetic
gaggacuuuuaagaggccu

SEQ ID NO: 645194 - RNA, 20 nt, Artificial Sequence
  Synthetic
agaggacuuuuaagaggccu

SEQ ID NO: 645195 - RNA, 21 nt, Artificial Sequence
  Synthetic
uagaggacuuuuaagaggccu

SEQ ID NO: 645196 - RNA, 22 nt, Artificial Sequence
  Synthetic
cuagaggacuuuuaagaggccu

SEQ ID NO: 645197 - RNA, 23 nt, Artificial Sequence
  Synthetic
ucuagaggacuuuuaagaggccu

SEQ ID NO: 645198 - RNA, 24 nt, Artificial Sequence
  Synthetic
uucuagaggacuuuuaagaggccu

SEQ ID NO: 645199 - RNA, 18 nt, Artificial Sequence
  Synthetic
ggaacagaacagaggccu

SEQ ID NO: 645200 - RNA, 19 nt, Artificial Sequence
  Synthetic
cggaacagaacagaggccu

SEQ ID NO: 645201 - RNA, 20 nt, Artificial Sequence
  Synthetic
acggaacagaacagaggccu

SEQ ID NO: 645202 - RNA, 21 nt, Artificial Sequence
  Synthetic
aacggaacagaacagaggccu

SEQ ID NO: 645203 - RNA, 22 nt, Artificial Sequence
  Synthetic
caacggaacagaacagaggccu

SEQ ID NO: 645204 - RNA, 23 nt, Artificial Sequence
  Synthetic
ccaacggaacagaacagaggccu

SEQ ID NO: 645205 - RNA, 24 nt, Artificial Sequence
  Synthetic
accaacggaacagaacagaggccu

SEQ ID NO: 645206 - RNA, 18 nt, Artificial Sequence
  Synthetic
ucauaggaccagaggccu

SEQ ID NO: 645207 - RNA, 19 nt, Artificial Sequence
  Synthetic
aucauaggaccagaggccu

SEQ ID NO: 645208 - RNA, 20 nt, Artificial Sequence
  Synthetic
caucauaggaccagaggccu

SEQ ID NO: 645209 - RNA, 21 nt, Artificial Sequence
  Synthetic
ccaucauaggaccagaggccu

SEQ ID NO: 645210 - RNA, 22 nt, Artificial Sequence
  Synthetic
cccaucauaggaccagaggccu

SEQ ID NO: 645211 - RNA, 23 nt, Artificial Sequence
  Synthetic
ucccaucauaggaccagaggccu

SEQ ID NO: 645212 - RNA, 24 nt, Artificial Sequence
  Synthetic
cucccaucauaggaccagaggccu

SEQ ID NO: 645213 - RNA, 18 nt, Artificial Sequence
  Synthetic
gcauggcuucagaggccu

SEQ ID NO: 645214 - RNA, 19 nt, Artificial Sequence
  Synthetic
cgcauggcuucagaggccu

SEQ ID NO: 645215 - RNA, 20 nt, Artificial Sequence
  Synthetic
ccgcauggcuucagaggccu

SEQ ID NO: 645216 - RNA, 21 nt, Artificial Sequence
  Synthetic
uccgcauggcuucagaggccu

SEQ ID NO: 645217 - RNA, 22 nt, Artificial Sequence
  Synthetic
uuccgcauggcuucagaggccu

SEQ ID NO: 645218 - RNA, 23 nt, Artificial Sequence
  Synthetic
guuccgcauggcuucagaggccu

SEQ ID NO: 645219 - RNA, 24 nt, Artificial Sequence
  Synthetic
aguuccgcauggcuucagaggccu

SEQ ID NO: 645220 - RNA, 21 nt, Artificial Sequence
  Synthetic
ucagcauggcuggggaggccu

SEQ ID NO: 645221 - RNA, 22 nt, Artificial Sequence
  Synthetic
uucagcauggcuggggaggccu

SEQ ID NO: 645222 - RNA, 23 nt, Artificial Sequence
  Synthetic
guucagcauggcuggggaggccu

SEQ ID NO: 645223 - RNA, 24 nt, Artificial Sequence
  Synthetic
aguucagcauggcuggggaggccu

SEQ ID NO: 645224 - RNA, 20 nt, Artificial Sequence
  Synthetic
cugcauggcuggggaggccu

SEQ ID NO: 645225 - RNA, 21 nt, Artificial Sequence
  Synthetic
ucugcauggcuggggaggccu

SEQ ID NO: 645226 - RNA, 22 nt, Artificial Sequence
  Synthetic
uucugcauggcuggggaggccu

SEQ ID NO: 645227 - RNA, 23 nt, Artificial Sequence
  Synthetic
auucugcauggcuggggaggccu

SEQ ID NO: 645228 - RNA, 24 nt, Artificial Sequence
  Synthetic
cauucugcauggcuggggaggccu

SEQ ID NO: 645229 - RNA, 18 nt, Artificial Sequence
  Synthetic
uguuuuccuuuuaggccu

SEQ ID NO: 645230 - RNA, 19 nt, Artificial Sequence
  Synthetic
auguuuuccuuuuaggccu

SEQ ID NO: 645231 - RNA, 20 nt, Artificial Sequence
  Synthetic
cauguuuuccuuuuaggccu

SEQ ID NO: 645232 - RNA, 21 nt, Artificial Sequence
  Synthetic
ccauguuuuccuuuuaggccu

SEQ ID NO: 645233 - RNA, 22 nt, Artificial Sequence
  Synthetic
accauguuuuccuuuuaggccu

SEQ ID NO: 645234 - RNA, 23 nt, Artificial Sequence
  Synthetic
aaccauguuuuccuuuuaggccu

SEQ ID NO: 645235 - RNA, 24 nt, Artificial Sequence
  Synthetic
aaaccauguuuuccuuuuaggccu

SEQ ID NO: 645236 - RNA, 18 nt, Artificial Sequence
  Synthetic
uagaagaaacaccggccu

SEQ ID NO: 645237 - RNA, 19 nt, Artificial Sequence
  Synthetic
guagaagaaacaccggccu

SEQ ID NO: 645238 - RNA, 20 nt, Artificial Sequence
  Synthetic
aguagaagaaacaccggccu

SEQ ID NO: 645239 - RNA, 21 nt, Artificial Sequence
  Synthetic
gaguagaagaaacaccggccu

SEQ ID NO: 645240 - RNA, 22 nt, Artificial Sequence
  Synthetic
agaguagaagaaacaccggccu

SEQ ID NO: 645241 - RNA, 23 nt, Artificial Sequence
  Synthetic
uagaguagaagaaacaccggccu

SEQ ID NO: 645242 - RNA, 24 nt, Artificial Sequence
  Synthetic
auagaguagaagaaacaccggccu

SEQ ID NO: 645243 - RNA, 18 nt, Artificial Sequence
  Synthetic
aagaauugccuucggccu

SEQ ID NO: 645244 - RNA, 19 nt, Artificial Sequence
  Synthetic
uaagaauugccuucggccu

SEQ ID NO: 645245 - RNA, 20 nt, Artificial Sequence
  Synthetic
cuaagaauugccuucggccu

SEQ ID NO: 645246 - RNA, 21 nt, Artificial Sequence
  Synthetic
acuaagaauugccuucggccu

SEQ ID NO: 645247 - RNA, 22 nt, Artificial Sequence
  Synthetic
uacuaagaauugccuucggccu

SEQ ID NO: 645248 - RNA, 23 nt, Artificial Sequence
  Synthetic
uuacuaagaauugccuucggccu

SEQ ID NO: 645249 - RNA, 24 nt, Artificial Sequence
  Synthetic
cuuacuaagaauugccuucggccu

SEQ ID NO: 645250 - RNA, 18 nt, Artificial Sequence
  Synthetic
uuagccaucauagggccu

SEQ ID NO: 645251 - RNA, 19 nt, Artificial Sequence
  Synthetic
auuagccaucauagggccu

SEQ ID NO: 645252 - RNA, 20 nt, Artificial Sequence
  Synthetic
aauuagccaucauagggccu

SEQ ID NO: 645253 - RNA, 21 nt, Artificial Sequence
  Synthetic
uaauuagccaucauagggccu

SEQ ID NO: 645254 - RNA, 22 nt, Artificial Sequence
  Synthetic
uuaauuagccaucauagggccu

SEQ ID NO: 645255 - RNA, 23 nt, Artificial Sequence
  Synthetic
uuuaauuagccaucauagggccu

SEQ ID NO: 645256 - RNA, 24 nt, Artificial Sequence
  Synthetic
auuuaauuagccaucauagggccu

SEQ ID NO: 645257 - RNA, 18 nt, Artificial Sequence
  Synthetic
aggggcagaagggggccu

SEQ ID NO: 645258 - RNA, 19 nt, Artificial Sequence
  Synthetic
aaggggcagaagggggccu

SEQ ID NO: 645259 - RNA, 20 nt, Artificial Sequence
  Synthetic
aaaggggcagaagggggccu

SEQ ID NO: 645260 - RNA, 21 nt, Artificial Sequence
  Synthetic
aaaaggggcagaagggggccu

SEQ ID NO: 645261 - RNA, 22 nt, Artificial Sequence
  Synthetic
gaaaaggggcagaagggggccu

SEQ ID NO: 645262 - RNA, 23 nt, Artificial Sequence
  Synthetic
ugaaaaggggcagaagggggccu

SEQ ID NO: 645263 - RNA, 24 nt, Artificial Sequence
  Synthetic
cugaaaaggggcagaagggggccu

SEQ ID NO: 645264 - RNA, 18 nt, Artificial Sequence
  Synthetic
guggaagaaauggggccu

SEQ ID NO: 645265 - RNA, 19 nt, Artificial Sequence
  Synthetic
aguggaagaaauggggccu

SEQ ID NO: 645266 - RNA, 20 nt, Artificial Sequence
  Synthetic
gaguggaagaaauggggccu

SEQ ID NO: 645267 - RNA, 21 nt, Artificial Sequence
  Synthetic
agaguggaagaaauggggccu

SEQ ID NO: 645268 - RNA, 22 nt, Artificial Sequence
  Synthetic
gagaguggaagaaauggggccu

SEQ ID NO: 645269 - RNA, 23 nt, Artificial Sequence
  Synthetic
ggagaguggaagaaauggggccu

SEQ ID NO: 645270 - RNA, 24 nt, Artificial Sequence
  Synthetic
aggagaguggaagaaauggggccu

SEQ ID NO: 645271 - RNA, 18 nt, Artificial Sequence
  Synthetic
cauuaggaaguggggccu

SEQ ID NO: 645272 - RNA, 19 nt, Artificial Sequence
  Synthetic
acauuaggaaguggggccu

SEQ ID NO: 645273 - RNA, 20 nt, Artificial Sequence
  Synthetic
gacauuaggaaguggggccu

SEQ ID NO: 645274 - RNA, 21 nt, Artificial Sequence
  Synthetic
ugacauuaggaaguggggccu

SEQ ID NO: 645275 - RNA, 22 nt, Artificial Sequence
  Synthetic
augacauuaggaaguggggccu

SEQ ID NO: 645276 - RNA, 23 nt, Artificial Sequence
  Synthetic
gaugacauuaggaaguggggccu

SEQ ID NO: 645277 - RNA, 24 nt, Artificial Sequence
  Synthetic
ugaugacauuaggaaguggggccu

SEQ ID NO: 645278 - RNA, 18 nt, Artificial Sequence
  Synthetic
uauuuggagguggggccu

SEQ ID NO: 645279 - RNA, 19 nt, Artificial Sequence
  Synthetic
auauuuggagguggggccu

SEQ ID NO: 645280 - RNA, 20 nt, Artificial Sequence
  Synthetic
gauauuuggagguggggccu

SEQ ID NO: 645281 - RNA, 21 nt, Artificial Sequence
  Synthetic
ggauauuuggagguggggccu

SEQ ID NO: 645282 - RNA, 22 nt, Artificial Sequence
  Synthetic
uggauauuuggagguggggccu

SEQ ID NO: 645283 - RNA, 23 nt, Artificial Sequence
  Synthetic
auggauauuuggagguggggccu

SEQ ID NO: 645284 - RNA, 24 nt, Artificial Sequence
  Synthetic
aauggauauuuggagguggggccu

SEQ ID NO: 645285 - RNA, 18 nt, Artificial Sequence
  Synthetic
acaagaaaugaugggccu

SEQ ID NO: 645286 - RNA, 19 nt, Artificial Sequence
  Synthetic
cacaagaaaugaugggccu

SEQ ID NO: 645287 - RNA, 20 nt, Artificial Sequence
  Synthetic
acacaagaaaugaugggccu

SEQ ID NO: 645288 - RNA, 21 nt, Artificial Sequence
  Synthetic
uacacaagaaaugaugggccu

SEQ ID NO: 645289 - RNA, 22 nt, Artificial Sequence
  Synthetic
uuacacaagaaaugaugggccu

SEQ ID NO: 645290 - RNA, 23 nt, Artificial Sequence
  Synthetic
guuacacaagaaaugaugggccu

SEQ ID NO: 645291 - RNA, 24 nt, Artificial Sequence
  Synthetic
aguuacacaagaaaugaugggccu

SEQ ID NO: 645292 - RNA, 18 nt, Artificial Sequence
  Synthetic
uuuccaaguucauggccu

SEQ ID NO: 645293 - RNA, 19 nt, Artificial Sequence
  Synthetic
cuuuccaaguucauggccu

SEQ ID NO: 645294 - RNA, 20 nt, Artificial Sequence
  Synthetic
gcuuuccaaguucauggccu

SEQ ID NO: 645295 - RNA, 21 nt, Artificial Sequence
  Synthetic
ugcuuuccaaguucauggccu

SEQ ID NO: 645296 - RNA, 22 nt, Artificial Sequence
  Synthetic
uugcuuuccaaguucauggccu

SEQ ID NO: 645297 - RNA, 23 nt, Artificial Sequence
  Synthetic
guugcuuuccaaguucauggccu

SEQ ID NO: 645298 - RNA, 24 nt, Artificial Sequence
  Synthetic
aguugcuuuccaaguucauggccu

SEQ ID NO: 645299 - RNA, 18 nt, Artificial Sequence
  Synthetic
agucacuaaguauggccu

SEQ ID NO: 645300 - RNA, 19 nt, Artificial Sequence
  Synthetic
uagucacuaaguauggccu

SEQ ID NO: 645301 - RNA, 20 nt, Artificial Sequence
  Synthetic
uuagucacuaaguauggccu

SEQ ID NO: 645302 - RNA, 21 nt, Artificial Sequence
  Synthetic
uuuagucacuaaguauggccu

SEQ ID NO: 645303 - RNA, 22 nt, Artificial Sequence
  Synthetic
uuuuagucacuaaguauggccu

SEQ ID NO: 645304 - RNA, 23 nt, Artificial Sequence
  Synthetic
auuuuagucacuaaguauggccu

SEQ ID NO: 645305 - RNA, 24 nt, Artificial Sequence
  Synthetic
aauuuuagucacuaaguauggccu

SEQ ID NO: 645306 - RNA, 18 nt, Artificial Sequence
  Synthetic
uugggggaaaucuggccu

SEQ ID NO: 645307 - RNA, 19 nt, Artificial Sequence
  Synthetic
uuugggggaaaucuggccu

SEQ ID NO: 645308 - RNA, 20 nt, Artificial Sequence
  Synthetic
uuuugggggaaaucuggccu

SEQ ID NO: 645309 - RNA, 21 nt, Artificial Sequence
  Synthetic
auuuugggggaaaucuggccu

SEQ ID NO: 645310 - RNA, 22 nt, Artificial Sequence
  Synthetic
uauuuugggggaaaucuggccu

SEQ ID NO: 645311 - RNA, 23 nt, Artificial Sequence
  Synthetic
guauuuugggggaaaucuggccu

SEQ ID NO: 645312 - RNA, 24 nt, Artificial Sequence
  Synthetic
uguauuuugggggaaaucuggccu

SEQ ID NO: 645313 - RNA, 18 nt, Artificial Sequence
  Synthetic
gauguuagccucuggccu

SEQ ID NO: 645314 - RNA, 19 nt, Artificial Sequence
  Synthetic
ggauguuagccucuggccu

SEQ ID NO: 645315 - RNA, 20 nt, Artificial Sequence
  Synthetic
uggauguuagccucuggccu

SEQ ID NO: 645316 - RNA, 21 nt, Artificial Sequence
  Synthetic
cuggauguuagccucuggccu

SEQ ID NO: 645317 - RNA, 22 nt, Artificial Sequence
  Synthetic
ucuggauguuagccucuggccu

SEQ ID NO: 645318 - RNA, 23 nt, Artificial Sequence
  Synthetic
uucuggauguuagccucuggccu

SEQ ID NO: 645319 - RNA, 24 nt, Artificial Sequence
  Synthetic
auucuggauguuagccucuggccu

SEQ ID NO: 645320 - RNA, 18 nt, Artificial Sequence
  Synthetic
guuacaaggcauuggccu

SEQ ID NO: 645321 - RNA, 19 nt, Artificial Sequence
  Synthetic
uguuacaaggcauuggccu

SEQ ID NO: 645322 - RNA, 20 nt, Artificial Sequence
  Synthetic
auguuacaaggcauuggccu

SEQ ID NO: 645323 - RNA, 21 nt, Artificial Sequence
  Synthetic
uauguuacaaggcauuggccu

SEQ ID NO: 645324 - RNA, 22 nt, Artificial Sequence
  Synthetic
cuauguuacaaggcauuggccu

SEQ ID NO: 645325 - RNA, 23 nt, Artificial Sequence
  Synthetic
acuauguuacaaggcauuggccu

SEQ ID NO: 645326 - RNA, 24 nt, Artificial Sequence
  Synthetic
aacuauguuacaaggcauuggccu

SEQ ID NO: 645327 - RNA, 18 nt, Artificial Sequence
  Synthetic
auauuauuuuauuggccu

SEQ ID NO: 645328 - RNA, 19 nt, Artificial Sequence
  Synthetic
uauauuauuuuauuggccu

SEQ ID NO: 645329 - RNA, 20 nt, Artificial Sequence
  Synthetic
guauauuauuuuauuggccu

SEQ ID NO: 645330 - RNA, 21 nt, Artificial Sequence
  Synthetic
aguauauuauuuuauuggccu

SEQ ID NO: 645331 - RNA, 22 nt, Artificial Sequence
  Synthetic
aaguauauuauuuuauuggccu

SEQ ID NO: 645332 - RNA, 23 nt, Artificial Sequence
  Synthetic
gaaguauauuauuuuauuggccu

SEQ ID NO: 645333 - RNA, 24 nt, Artificial Sequence
  Synthetic
agaaguauauuauuuuauuggccu

SEQ ID NO: 645334 - RNA, 18 nt, Artificial Sequence
  Synthetic
cacugugggacuuggccu

SEQ ID NO: 645335 - RNA, 19 nt, Artificial Sequence
  Synthetic
acacugugggacuuggccu

SEQ ID NO: 645336 - RNA, 20 nt, Artificial Sequence
  Synthetic
uacacugugggacuuggccu

SEQ ID NO: 645337 - RNA, 21 nt, Artificial Sequence
  Synthetic
guacacugugggacuuggccu

SEQ ID NO: 645338 - RNA, 22 nt, Artificial Sequence
  Synthetic
aguacacugugggacuuggccu

SEQ ID NO: 645339 - RNA, 23 nt, Artificial Sequence
  Synthetic
gaguacacugugggacuuggccu

SEQ ID NO: 645340 - RNA, 24 nt, Artificial Sequence
  Synthetic
ggaguacacugugggacuuggccu

SEQ ID NO: 645341 - RNA, 18 nt, Artificial Sequence
  Synthetic
caucucucccuuuggccu

SEQ ID NO: 645342 - RNA, 19 nt, Artificial Sequence
  Synthetic
ccaucucucccuuuggccu

SEQ ID NO: 645343 - RNA, 20 nt, Artificial Sequence
  Synthetic
cccaucucucccuuuggccu

SEQ ID NO: 645344 - RNA, 21 nt, Artificial Sequence
  Synthetic
ucccaucucucccuuuggccu

SEQ ID NO: 645345 - RNA, 22 nt, Artificial Sequence
  Synthetic
uucccaucucucccuuuggccu

SEQ ID NO: 645346 - RNA, 23 nt, Artificial Sequence
  Synthetic
cuucccaucucucccuuuggccu

SEQ ID NO: 645347 - RNA, 24 nt, Artificial Sequence
  Synthetic
ucuucccaucucucccuuuggccu

SEQ ID NO: 645348 - RNA, 18 nt, Artificial Sequence
  Synthetic
ucugcauuguuuuggccu

SEQ ID NO: 645349 - RNA, 19 nt, Artificial Sequence
  Synthetic
cucugcauuguuuuggccu

SEQ ID NO: 645350 - RNA, 20 nt, Artificial Sequence
  Synthetic
acucugcauuguuuuggccu

SEQ ID NO: 645351 - RNA, 21 nt, Artificial Sequence
  Synthetic
aacucugcauuguuuuggccu

SEQ ID NO: 645352 - RNA, 22 nt, Artificial Sequence
  Synthetic
uaacucugcauuguuuuggccu

SEQ ID NO: 645353 - RNA, 23 nt, Artificial Sequence
  Synthetic
uuaacucugcauuguuuuggccu

SEQ ID NO: 645354 - RNA, 24 nt, Artificial Sequence
  Synthetic
auuaacucugcauuguuuuggccu

SEQ ID NO: 645355 - RNA, 18 nt, Artificial Sequence
  Synthetic
uaccaaaagccaaugccu

SEQ ID NO: 645356 - RNA, 19 nt, Artificial Sequence
  Synthetic
uuaccaaaagccaaugccu

SEQ ID NO: 645357 - RNA, 20 nt, Artificial Sequence
  Synthetic
guuaccaaaagccaaugccu

SEQ ID NO: 645358 - RNA, 21 nt, Artificial Sequence
  Synthetic
aguuaccaaaagccaaugccu

SEQ ID NO: 645359 - RNA, 22 nt, Artificial Sequence
  Synthetic
caguuaccaaaagccaaugccu

SEQ ID NO: 645360 - RNA, 23 nt, Artificial Sequence
  Synthetic
ucaguuaccaaaagccaaugccu

SEQ ID NO: 645361 - RNA, 24 nt, Artificial Sequence
  Synthetic
uucaguuaccaaaagccaaugccu

SEQ ID NO: 645362 - RNA, 18 nt, Artificial Sequence
  Synthetic
gggucaaguagaaugccu

SEQ ID NO: 645363 - RNA, 19 nt, Artificial Sequence
  Synthetic
agggucaaguagaaugccu

SEQ ID NO: 645364 - RNA, 20 nt, Artificial Sequence
  Synthetic
aagggucaaguagaaugccu

SEQ ID NO: 645365 - RNA, 21 nt, Artificial Sequence
  Synthetic
aaagggucaaguagaaugccu

SEQ ID NO: 645366 - RNA, 22 nt, Artificial Sequence
  Synthetic
gaaagggucaaguagaaugccu

SEQ ID NO: 645367 - RNA, 23 nt, Artificial Sequence
  Synthetic
ugaaagggucaaguagaaugccu

SEQ ID NO: 645368 - RNA, 24 nt, Artificial Sequence
  Synthetic
uugaaagggucaaguagaaugccu

SEQ ID NO: 645369 - RNA, 18 nt, Artificial Sequence
  Synthetic
caacccucaugaaugccu

SEQ ID NO: 645370 - RNA, 19 nt, Artificial Sequence
  Synthetic
ccaacccucaugaaugccu

SEQ ID NO: 645371 - RNA, 20 nt, Artificial Sequence
  Synthetic
uccaacccucaugaaugccu

SEQ ID NO: 645372 - RNA, 21 nt, Artificial Sequence
  Synthetic
uuccaacccucaugaaugccu

SEQ ID NO: 645373 - RNA, 22 nt, Artificial Sequence
  Synthetic
auuccaacccucaugaaugccu

SEQ ID NO: 645374 - RNA, 23 nt, Artificial Sequence
  Synthetic
uauuccaacccucaugaaugccu

SEQ ID NO: 645375 - RNA, 24 nt, Artificial Sequence
  Synthetic
uuauuccaacccucaugaaugccu

SEQ ID NO: 645376 - RNA, 18 nt, Artificial Sequence
  Synthetic
gcauagaaauuaaugccu

SEQ ID NO: 645377 - RNA, 19 nt, Artificial Sequence
  Synthetic
ggcauagaaauuaaugccu

SEQ ID NO: 645378 - RNA, 20 nt, Artificial Sequence
  Synthetic
aggcauagaaauuaaugccu

SEQ ID NO: 645379 - RNA, 21 nt, Artificial Sequence
  Synthetic
aaggcauagaaauuaaugccu

SEQ ID NO: 645380 - RNA, 22 nt, Artificial Sequence
  Synthetic
aaaggcauagaaauuaaugccu

SEQ ID NO: 645381 - RNA, 23 nt, Artificial Sequence
  Synthetic
uaaaggcauagaaauuaaugccu

SEQ ID NO: 645382 - RNA, 24 nt, Artificial Sequence
  Synthetic
uuaaaggcauagaaauuaaugccu

SEQ ID NO: 645383 - RNA, 18 nt, Artificial Sequence
  Synthetic
uugaguauucacaugccu

SEQ ID NO: 645384 - RNA, 19 nt, Artificial Sequence
  Synthetic
auugaguauucacaugccu

SEQ ID NO: 645385 - RNA, 20 nt, Artificial Sequence
  Synthetic
aauugaguauucacaugccu

SEQ ID NO: 645386 - RNA, 21 nt, Artificial Sequence
  Synthetic
uaauugaguauucacaugccu

SEQ ID NO: 645387 - RNA, 22 nt, Artificial Sequence
  Synthetic
auaauugaguauucacaugccu

SEQ ID NO: 645388 - RNA, 23 nt, Artificial Sequence
  Synthetic
cauaauugaguauucacaugccu

SEQ ID NO: 645389 - RNA, 24 nt, Artificial Sequence
  Synthetic
acauaauugaguauucacaugccu

SEQ ID NO: 645390 - RNA, 18 nt, Artificial Sequence
  Synthetic
accuuucuagacaugccu

SEQ ID NO: 645391 - RNA, 19 nt, Artificial Sequence
  Synthetic
uaccuuucuagacaugccu

SEQ ID NO: 645392 - RNA, 20 nt, Artificial Sequence
  Synthetic
cuaccuuucuagacaugccu

SEQ ID NO: 645393 - RNA, 21 nt, Artificial Sequence
  Synthetic
ucuaccuuucuagacaugccu

SEQ ID NO: 645394 - RNA, 22 nt, Artificial Sequence
  Synthetic
cucuaccuuucuagacaugccu

SEQ ID NO: 645395 - RNA, 23 nt, Artificial Sequence
  Synthetic
acucuaccuuucuagacaugccu

SEQ ID NO: 645396 - RNA, 24 nt, Artificial Sequence
  Synthetic
gacucuaccuuucuagacaugccu

SEQ ID NO: 645397 - RNA, 18 nt, Artificial Sequence
  Synthetic
augauuacuagcaugccu

SEQ ID NO: 645398 - RNA, 19 nt, Artificial Sequence
  Synthetic
caugauuacuagcaugccu

SEQ ID NO: 645399 - RNA, 20 nt, Artificial Sequence
  Synthetic
acaugauuacuagcaugccu

SEQ ID NO: 645400 - RNA, 21 nt, Artificial Sequence
  Synthetic
uacaugauuacuagcaugccu

SEQ ID NO: 645401 - RNA, 22 nt, Artificial Sequence
  Synthetic
cuacaugauuacuagcaugccu

SEQ ID NO: 645402 - RNA, 23 nt, Artificial Sequence
  Synthetic
ucuacaugauuacuagcaugccu

SEQ ID NO: 645403 - RNA, 24 nt, Artificial Sequence
  Synthetic
uucuacaugauuacuagcaugccu

SEQ ID NO: 645404 - RNA, 18 nt, Artificial Sequence
  Synthetic
uucuaguucuagaugccu

SEQ ID NO: 645405 - RNA, 19 nt, Artificial Sequence
  Synthetic
auucuaguucuagaugccu

SEQ ID NO: 645406 - RNA, 20 nt, Artificial Sequence
  Synthetic
aauucuaguucuagaugccu

SEQ ID NO: 645407 - RNA, 21 nt, Artificial Sequence
  Synthetic
uaauucuaguucuagaugccu

SEQ ID NO: 645408 - RNA, 22 nt, Artificial Sequence
  Synthetic
guaauucuaguucuagaugccu

SEQ ID NO: 645409 - RNA, 23 nt, Artificial Sequence
  Synthetic
gguaauucuaguucuagaugccu

SEQ ID NO: 645410 - RNA, 24 nt, Artificial Sequence
  Synthetic
ugguaauucuaguucuagaugccu

SEQ ID NO: 645411 - RNA, 18 nt, Artificial Sequence
  Synthetic
ccugacaccuggaugccu

SEQ ID NO: 645412 - RNA, 19 nt, Artificial Sequence
  Synthetic
gccugacaccuggaugccu

SEQ ID NO: 645413 - RNA, 20 nt, Artificial Sequence
  Synthetic
ugccugacaccuggaugccu

SEQ ID NO: 645414 - RNA, 21 nt, Artificial Sequence
  Synthetic
cugccugacaccuggaugccu

SEQ ID NO: 645415 - RNA, 22 nt, Artificial Sequence
  Synthetic
ucugccugacaccuggaugccu

SEQ ID NO: 645416 - RNA, 23 nt, Artificial Sequence
  Synthetic
gucugccugacaccuggaugccu

SEQ ID NO: 645417 - RNA, 24 nt, Artificial Sequence
  Synthetic
ugucugccugacaccuggaugccu

SEQ ID NO: 645418 - RNA, 18 nt, Artificial Sequence
  Synthetic
acaaguaauuugaugccu

SEQ ID NO: 645419 - RNA, 19 nt, Artificial Sequence
  Synthetic
gacaaguaauuugaugccu

SEQ ID NO: 645420 - RNA, 20 nt, Artificial Sequence
  Synthetic
ugacaaguaauuugaugccu

SEQ ID NO: 645421 - RNA, 21 nt, Artificial Sequence
  Synthetic
cugacaaguaauuugaugccu

SEQ ID NO: 645422 - RNA, 22 nt, Artificial Sequence
  Synthetic
acugacaaguaauuugaugccu

SEQ ID NO: 645423 - RNA, 23 nt, Artificial Sequence
  Synthetic
cacugacaaguaauuugaugccu

SEQ ID NO: 645424 - RNA, 24 nt, Artificial Sequence
  Synthetic
ccacugacaaguaauuugaugccu

SEQ ID NO: 645425 - RNA, 18 nt, Artificial Sequence
  Synthetic
caugccacugcacugccu

SEQ ID NO: 645426 - RNA, 19 nt, Artificial Sequence
  Synthetic
ccaugccacugcacugccu

SEQ ID NO: 645427 - RNA, 20 nt, Artificial Sequence
  Synthetic
cccaugccacugcacugccu

SEQ ID NO: 645428 - RNA, 21 nt, Artificial Sequence
  Synthetic
gcccaugccacugcacugccu

SEQ ID NO: 645429 - RNA, 22 nt, Artificial Sequence
  Synthetic
agcccaugccacugcacugccu

SEQ ID NO: 645430 - RNA, 23 nt, Artificial Sequence
  Synthetic
cagcccaugccacugcacugccu

SEQ ID NO: 645431 - RNA, 24 nt, Artificial Sequence
  Synthetic
gcagcccaugccacugcacugccu

SEQ ID NO: 645432 - RNA, 18 nt, Artificial Sequence
  Synthetic
uaauguccugcacugccu

SEQ ID NO: 645433 - RNA, 19 nt, Artificial Sequence
  Synthetic
guaauguccugcacugccu

SEQ ID NO: 645434 - RNA, 20 nt, Artificial Sequence
  Synthetic
uguaauguccugcacugccu

SEQ ID NO: 645435 - RNA, 21 nt, Artificial Sequence
  Synthetic
auguaauguccugcacugccu

SEQ ID NO: 645436 - RNA, 22 nt, Artificial Sequence
  Synthetic
cauguaauguccugcacugccu

SEQ ID NO: 645437 - RNA, 23 nt, Artificial Sequence
  Synthetic
ccauguaauguccugcacugccu

SEQ ID NO: 645438 - RNA, 24 nt, Artificial Sequence
  Synthetic
gccauguaauguccugcacugccu

SEQ ID NO: 645439 - RNA, 18 nt, Artificial Sequence
  Synthetic
gggaauaguucacugccu

SEQ ID NO: 645440 - RNA, 19 nt, Artificial Sequence
  Synthetic
ugggaauaguucacugccu

SEQ ID NO: 645441 - RNA, 20 nt, Artificial Sequence
  Synthetic
cugggaauaguucacugccu

SEQ ID NO: 645442 - RNA, 21 nt, Artificial Sequence
  Synthetic
acugggaauaguucacugccu

SEQ ID NO: 645443 - RNA, 22 nt, Artificial Sequence
  Synthetic
cacugggaauaguucacugccu

SEQ ID NO: 645444 - RNA, 23 nt, Artificial Sequence
  Synthetic
ccacugggaauaguucacugccu

SEQ ID NO: 645445 - RNA, 24 nt, Artificial Sequence
  Synthetic
accacugggaauaguucacugccu

SEQ ID NO: 645446 - RNA, 18 nt, Artificial Sequence
  Synthetic
augcucauaugacugccu

SEQ ID NO: 645447 - RNA, 19 nt, Artificial Sequence
  Synthetic
aaugcucauaugacugccu

SEQ ID NO: 645448 - RNA, 20 nt, Artificial Sequence
  Synthetic
caaugcucauaugacugccu

SEQ ID NO: 645449 - RNA, 21 nt, Artificial Sequence
  Synthetic
ucaaugcucauaugacugccu

SEQ ID NO: 645450 - RNA, 22 nt, Artificial Sequence
  Synthetic
cucaaugcucauaugacugccu

SEQ ID NO: 645451 - RNA, 23 nt, Artificial Sequence
  Synthetic
acucaaugcucauaugacugccu

SEQ ID NO: 645452 - RNA, 24 nt, Artificial Sequence
  Synthetic
uacucaaugcucauaugacugccu

SEQ ID NO: 645453 - RNA, 18 nt, Artificial Sequence
  Synthetic
ucagccaggggccugccu

SEQ ID NO: 645454 - RNA, 19 nt, Artificial Sequence
  Synthetic
uucagccaggggccugccu

SEQ ID NO: 645455 - RNA, 20 nt, Artificial Sequence
  Synthetic
auucagccaggggccugccu

SEQ ID NO: 645456 - RNA, 21 nt, Artificial Sequence
  Synthetic
cauucagccaggggccugccu

SEQ ID NO: 645457 - RNA, 22 nt, Artificial Sequence
  Synthetic
gcauucagccaggggccugccu

SEQ ID NO: 645458 - RNA, 23 nt, Artificial Sequence
  Synthetic
ugcauucagccaggggccugccu

SEQ ID NO: 645459 - RNA, 24 nt, Artificial Sequence
  Synthetic
gugcauucagccaggggccugccu

SEQ ID NO: 645460 - RNA, 18 nt, Artificial Sequence
  Synthetic
cuguuagauauccugccu

SEQ ID NO: 645461 - RNA, 19 nt, Artificial Sequence
  Synthetic
ucuguuagauauccugccu

SEQ ID NO: 645462 - RNA, 20 nt, Artificial Sequence
  Synthetic
uucuguuagauauccugccu

SEQ ID NO: 645463 - RNA, 21 nt, Artificial Sequence
  Synthetic
uuucuguuagauauccugccu

SEQ ID NO: 645464 - RNA, 22 nt, Artificial Sequence
  Synthetic
uuuucuguuagauauccugccu

SEQ ID NO: 645465 - RNA, 23 nt, Artificial Sequence
  Synthetic
guuuucuguuagauauccugccu

SEQ ID NO: 645466 - RNA, 24 nt, Artificial Sequence
  Synthetic
uguuuucuguuagauauccugccu

SEQ ID NO: 645467 - RNA, 18 nt, Artificial Sequence
  Synthetic
acauuauuccugcugccu

SEQ ID NO: 645468 - RNA, 19 nt, Artificial Sequence
  Synthetic
cacauuauuccugcugccu

SEQ ID NO: 645469 - RNA, 20 nt, Artificial Sequence
  Synthetic
ccacauuauuccugcugccu

SEQ ID NO: 645470 - RNA, 21 nt, Artificial Sequence
  Synthetic
cccacauuauuccugcugccu

SEQ ID NO: 645471 - RNA, 22 nt, Artificial Sequence
  Synthetic
ucccacauuauuccugcugccu

SEQ ID NO: 645472 - RNA, 23 nt, Artificial Sequence
  Synthetic
cucccacauuauuccugcugccu

SEQ ID NO: 645473 - RNA, 24 nt, Artificial Sequence
  Synthetic
ucucccacauuauuccugcugccu

SEQ ID NO: 645474 - RNA, 18 nt, Artificial Sequence
  Synthetic
aaaucaauaaaagugccu

SEQ ID NO: 645475 - RNA, 19 nt, Artificial Sequence
  Synthetic
aaaaucaauaaaagugccu

SEQ ID NO: 645476 - RNA, 20 nt, Artificial Sequence
  Synthetic
aaaaaucaauaaaagugccu

SEQ ID NO: 645477 - RNA, 21 nt, Artificial Sequence
  Synthetic
caaaaaucaauaaaagugccu

SEQ ID NO: 645478 - RNA, 22 nt, Artificial Sequence
  Synthetic
ccaaaaaucaauaaaagugccu

SEQ ID NO: 645479 - RNA, 23 nt, Artificial Sequence
  Synthetic
uccaaaaaucaauaaaagugccu

SEQ ID NO: 645480 - RNA, 24 nt, Artificial Sequence
  Synthetic
uuccaaaaaucaauaaaagugccu

SEQ ID NO: 645481 - RNA, 18 nt, Artificial Sequence
  Synthetic
ggagaaacaagagugccu

SEQ ID NO: 645482 - RNA, 19 nt, Artificial Sequence
  Synthetic
uggagaaacaagagugccu

SEQ ID NO: 645483 - RNA, 20 nt, Artificial Sequence
  Synthetic
uuggagaaacaagagugccu

SEQ ID NO: 645484 - RNA, 21 nt, Artificial Sequence
  Synthetic
uuuggagaaacaagagugccu

SEQ ID NO: 645485 - RNA, 22 nt, Artificial Sequence
  Synthetic
uuuuggagaaacaagagugccu

SEQ ID NO: 645486 - RNA, 23 nt, Artificial Sequence
  Synthetic
uuuuuggagaaacaagagugccu

SEQ ID NO: 645487 - RNA, 24 nt, Artificial Sequence
  Synthetic
guuuuuggagaaacaagagugccu

SEQ ID NO: 645488 - RNA, 18 nt, Artificial Sequence
  Synthetic
ugucauucacacgugccu

SEQ ID NO: 645489 - RNA, 19 nt, Artificial Sequence
  Synthetic
gugucauucacacgugccu

SEQ ID NO: 645490 - RNA, 20 nt, Artificial Sequence
  Synthetic
ugugucauucacacgugccu

SEQ ID NO: 645491 - RNA, 21 nt, Artificial Sequence
  Synthetic
uugugucauucacacgugccu

SEQ ID NO: 645492 - RNA, 22 nt, Artificial Sequence
  Synthetic
uuugugucauucacacgugccu

SEQ ID NO: 645493 - RNA, 23 nt, Artificial Sequence
  Synthetic
cuuugugucauucacacgugccu

SEQ ID NO: 645494 - RNA, 24 nt, Artificial Sequence
  Synthetic
ucuuugugucauucacacgugccu

SEQ ID NO: 645495 - RNA, 18 nt, Artificial Sequence
  Synthetic
aaaaacugccuggugccu

SEQ ID NO: 645496 - RNA, 19 nt, Artificial Sequence
  Synthetic
gaaaaacugccuggugccu

SEQ ID NO: 645497 - RNA, 20 nt, Artificial Sequence
  Synthetic
ugaaaaacugccuggugccu

SEQ ID NO: 645498 - RNA, 21 nt, Artificial Sequence
  Synthetic
cugaaaaacugccuggugccu

SEQ ID NO: 645499 - RNA, 22 nt, Artificial Sequence
  Synthetic
ccugaaaaacugccuggugccu

SEQ ID NO: 645500 - RNA, 23 nt, Artificial Sequence
  Synthetic
uccugaaaaacugccuggugccu

SEQ ID NO: 645501 - RNA, 24 nt, Artificial Sequence
  Synthetic
cuccugaaaaacugccuggugccu

SEQ ID NO: 645502 - RNA, 18 nt, Artificial Sequence
  Synthetic
auuugucuuucugugccu

SEQ ID NO: 645503 - RNA, 19 nt, Artificial Sequence
  Synthetic
uauuugucuuucugugccu

SEQ ID NO: 645504 - RNA, 20 nt, Artificial Sequence
  Synthetic
guauuugucuuucugugccu

SEQ ID NO: 645505 - RNA, 21 nt, Artificial Sequence
  Synthetic
gguauuugucuuucugugccu

SEQ ID NO: 645506 - RNA, 22 nt, Artificial Sequence
  Synthetic
ugguauuugucuuucugugccu

SEQ ID NO: 645507 - RNA, 23 nt, Artificial Sequence
  Synthetic
gugguauuugucuuucugugccu

SEQ ID NO: 645508 - RNA, 24 nt, Artificial Sequence
  Synthetic
ugugguauuugucuuucugugccu

SEQ ID NO: 645509 - RNA, 18 nt, Artificial Sequence
  Synthetic
uauauuugcacauugccu

SEQ ID NO: 645510 - RNA, 19 nt, Artificial Sequence
  Synthetic
guauauuugcacauugccu

SEQ ID NO: 645511 - RNA, 20 nt, Artificial Sequence
  Synthetic
gguauauuugcacauugccu

SEQ ID NO: 645512 - RNA, 21 nt, Artificial Sequence
  Synthetic
agguauauuugcacauugccu

SEQ ID NO: 645513 - RNA, 22 nt, Artificial Sequence
  Synthetic
uagguauauuugcacauugccu

SEQ ID NO: 645514 - RNA, 23 nt, Artificial Sequence
  Synthetic
guagguauauuugcacauugccu

SEQ ID NO: 645515 - RNA, 24 nt, Artificial Sequence
  Synthetic
aguagguauauuugcacauugccu

SEQ ID NO: 645516 - RNA, 18 nt, Artificial Sequence
  Synthetic
uugcccaugacauugccu

SEQ ID NO: 645517 - RNA, 19 nt, Artificial Sequence
  Synthetic
guugcccaugacauugccu

SEQ ID NO: 645518 - RNA, 20 nt, Artificial Sequence
  Synthetic
aguugcccaugacauugccu

SEQ ID NO: 645519 - RNA, 21 nt, Artificial Sequence
  Synthetic
uaguugcccaugacauugccu

SEQ ID NO: 645520 - RNA, 22 nt, Artificial Sequence
  Synthetic
uuaguugcccaugacauugccu

SEQ ID NO: 645521 - RNA, 23 nt, Artificial Sequence
  Synthetic
cuuaguugcccaugacauugccu

SEQ ID NO: 645522 - RNA, 24 nt, Artificial Sequence
  Synthetic
ccuuaguugcccaugacauugccu

SEQ ID NO: 645523 - RNA, 18 nt, Artificial Sequence
  Synthetic
uuuugaagagcauugccu

SEQ ID NO: 645524 - RNA, 19 nt, Artificial Sequence
  Synthetic
auuuugaagagcauugccu

SEQ ID NO: 645525 - RNA, 20 nt, Artificial Sequence
  Synthetic
aauuuugaagagcauugccu

SEQ ID NO: 645526 - RNA, 21 nt, Artificial Sequence
  Synthetic
aaauuuugaagagcauugccu

SEQ ID NO: 645527 - RNA, 22 nt, Artificial Sequence
  Synthetic
gaaauuuugaagagcauugccu

SEQ ID NO: 645528 - RNA, 23 nt, Artificial Sequence
  Synthetic
ugaaauuuugaagagcauugccu

SEQ ID NO: 645529 - RNA, 24 nt, Artificial Sequence
  Synthetic
uugaaauuuugaagagcauugccu

SEQ ID NO: 645530 - RNA, 18 nt, Artificial Sequence
  Synthetic
uuaaaaauauacuugccu

SEQ ID NO: 645531 - RNA, 19 nt, Artificial Sequence
  Synthetic
uuuaaaaauauacuugccu

SEQ ID NO: 645532 - RNA, 20 nt, Artificial Sequence
  Synthetic
uuuuaaaaauauacuugccu

SEQ ID NO: 645533 - RNA, 21 nt, Artificial Sequence
  Synthetic
auuuuaaaaauauacuugccu

SEQ ID NO: 645534 - RNA, 22 nt, Artificial Sequence
  Synthetic
gauuuuaaaaauauacuugccu

SEQ ID NO: 645535 - RNA, 23 nt, Artificial Sequence
  Synthetic
ggauuuuaaaaauauacuugccu

SEQ ID NO: 645536 - RNA, 24 nt, Artificial Sequence
  Synthetic
aggauuuuaaaaauauacuugccu

SEQ ID NO: 645537 - RNA, 18 nt, Artificial Sequence
  Synthetic
agagagaaacaguugccu

SEQ ID NO: 645538 - RNA, 19 nt, Artificial Sequence
  Synthetic
gagagagaaacaguugccu

SEQ ID NO: 645539 - RNA, 20 nt, Artificial Sequence
  Synthetic
ugagagagaaacaguugccu

SEQ ID NO: 645540 - RNA, 21 nt, Artificial Sequence
  Synthetic
cugagagagaaacaguugccu

SEQ ID NO: 645541 - RNA, 22 nt, Artificial Sequence
  Synthetic
gcugagagagaaacaguugccu

SEQ ID NO: 645542 - RNA, 23 nt, Artificial Sequence
  Synthetic
ugcugagagagaaacaguugccu

SEQ ID NO: 645543 - RNA, 24 nt, Artificial Sequence
  Synthetic
uugcugagagagaaacaguugccu

SEQ ID NO: 645544 - RNA, 18 nt, Artificial Sequence
  Synthetic
gcuuauucuuuguugccu

SEQ ID NO: 645545 - RNA, 19 nt, Artificial Sequence
  Synthetic
ugcuuauucuuuguugccu

SEQ ID NO: 645546 - RNA, 20 nt, Artificial Sequence
  Synthetic
uugcuuauucuuuguugccu

SEQ ID NO: 645547 - RNA, 21 nt, Artificial Sequence
  Synthetic
auugcuuauucuuuguugccu

SEQ ID NO: 645548 - RNA, 22 nt, Artificial Sequence
  Synthetic
aauugcuuauucuuuguugccu

SEQ ID NO: 645549 - RNA, 23 nt, Artificial Sequence
  Synthetic
aaauugcuuauucuuuguugccu

SEQ ID NO: 645550 - RNA, 24 nt, Artificial Sequence
  Synthetic
aaaauugcuuauucuuuguugccu

SEQ ID NO: 645551 - RNA, 18 nt, Artificial Sequence
  Synthetic
cucacccgucuuuugccu

SEQ ID NO: 645552 - RNA, 19 nt, Artificial Sequence
  Synthetic
ccucacccgucuuuugccu

SEQ ID NO: 645553 - RNA, 20 nt, Artificial Sequence
  Synthetic
uccucacccgucuuuugccu

SEQ ID NO: 645554 - RNA, 21 nt, Artificial Sequence
  Synthetic
uuccucacccgucuuuugccu

SEQ ID NO: 645555 - RNA, 22 nt, Artificial Sequence
  Synthetic
cuuccucacccgucuuuugccu

SEQ ID NO: 645556 - RNA, 23 nt, Artificial Sequence
  Synthetic
acuuccucacccgucuuuugccu

SEQ ID NO: 645557 - RNA, 24 nt, Artificial Sequence
  Synthetic
cacuuccucacccgucuuuugccu

SEQ ID NO: 645558 - RNA, 18 nt, Artificial Sequence
  Synthetic
aagugauauaaaaauccu

SEQ ID NO: 645559 - RNA, 19 nt, Artificial Sequence
  Synthetic
uaagugauauaaaaauccu

SEQ ID NO: 645560 - RNA, 20 nt, Artificial Sequence
  Synthetic
uuaagugauauaaaaauccu

SEQ ID NO: 645561 - RNA, 21 nt, Artificial Sequence
  Synthetic
uuuaagugauauaaaaauccu

SEQ ID NO: 645562 - RNA, 22 nt, Artificial Sequence
  Synthetic
auuuaagugauauaaaaauccu

SEQ ID NO: 645563 - RNA, 23 nt, Artificial Sequence
  Synthetic
aauuuaagugauauaaaaauccu

SEQ ID NO: 645564 - RNA, 24 nt, Artificial Sequence
  Synthetic
aaauuuaagugauauaaaaauccu

SEQ ID NO: 645565 - RNA, 18 nt, Artificial Sequence
  Synthetic
ucuuauacagcaaauccu

SEQ ID NO: 645566 - RNA, 19 nt, Artificial Sequence
  Synthetic
aucuuauacagcaaauccu

SEQ ID NO: 645567 - RNA, 20 nt, Artificial Sequence
  Synthetic
aaucuuauacagcaaauccu

SEQ ID NO: 645568 - RNA, 21 nt, Artificial Sequence
  Synthetic
uaaucuuauacagcaaauccu

SEQ ID NO: 645569 - RNA, 22 nt, Artificial Sequence
  Synthetic
auaaucuuauacagcaaauccu

SEQ ID NO: 645570 - RNA, 23 nt, Artificial Sequence
  Synthetic
cauaaucuuauacagcaaauccu

SEQ ID NO: 645571 - RNA, 24 nt, Artificial Sequence
  Synthetic
acauaaucuuauacagcaaauccu

SEQ ID NO: 645572 - RNA, 18 nt, Artificial Sequence
  Synthetic
aaaauuauaauaaauccu

SEQ ID NO: 645573 - RNA, 19 nt, Artificial Sequence
  Synthetic
aaaaauuauaauaaauccu

SEQ ID NO: 645574 - RNA, 20 nt, Artificial Sequence
  Synthetic
gaaaaauuauaauaaauccu

SEQ ID NO: 645575 - RNA, 21 nt, Artificial Sequence
  Synthetic
ugaaaaauuauaauaaauccu

SEQ ID NO: 645576 - RNA, 22 nt, Artificial Sequence
  Synthetic
uugaaaaauuauaauaaauccu

SEQ ID NO: 645577 - RNA, 23 nt, Artificial Sequence
  Synthetic
cuugaaaaauuauaauaaauccu

SEQ ID NO: 645578 - RNA, 24 nt, Artificial Sequence
  Synthetic
acuugaaaaauuauaauaaauccu

SEQ ID NO: 645579 - RNA, 18 nt, Artificial Sequence
  Synthetic
uuucuacccaacaauccu

SEQ ID NO: 645580 - RNA, 19 nt, Artificial Sequence
  Synthetic
auuucuacccaacaauccu

SEQ ID NO: 645581 - RNA, 20 nt, Artificial Sequence
  Synthetic
uauuucuacccaacaauccu

SEQ ID NO: 645582 - RNA, 21 nt, Artificial Sequence
  Synthetic
uuauuucuacccaacaauccu

SEQ ID NO: 645583 - RNA, 22 nt, Artificial Sequence
  Synthetic
uuuauuucuacccaacaauccu

SEQ ID NO: 645584 - RNA, 23 nt, Artificial Sequence
  Synthetic
uuuuauuucuacccaacaauccu

SEQ ID NO: 645585 - RNA, 24 nt, Artificial Sequence
  Synthetic
auuuuauuucuacccaacaauccu

SEQ ID NO: 645586 - RNA, 18 nt, Artificial Sequence
  Synthetic
uccccagcccccaauccu

SEQ ID NO: 645587 - RNA, 19 nt, Artificial Sequence
  Synthetic
uuccccagcccccaauccu

SEQ ID NO: 645588 - RNA, 20 nt, Artificial Sequence
  Synthetic
uuuccccagcccccaauccu

SEQ ID NO: 645589 - RNA, 21 nt, Artificial Sequence
  Synthetic
auuuccccagcccccaauccu

SEQ ID NO: 645590 - RNA, 22 nt, Artificial Sequence
  Synthetic
cauuuccccagcccccaauccu

SEQ ID NO: 645591 - RNA, 23 nt, Artificial Sequence
  Synthetic
gcauuuccccagcccccaauccu

SEQ ID NO: 645592 - RNA, 24 nt, Artificial Sequence
  Synthetic
agcauuuccccagcccccaauccu

SEQ ID NO: 645593 - RNA, 18 nt, Artificial Sequence
  Synthetic
cuguugcauagcaauccu

SEQ ID NO: 645594 - RNA, 19 nt, Artificial Sequence
  Synthetic
ccuguugcauagcaauccu

SEQ ID NO: 645595 - RNA, 20 nt, Artificial Sequence
  Synthetic
uccuguugcauagcaauccu

SEQ ID NO: 645596 - RNA, 21 nt, Artificial Sequence
  Synthetic
auccuguugcauagcaauccu

SEQ ID NO: 645597 - RNA, 22 nt, Artificial Sequence
  Synthetic
gauccuguugcauagcaauccu

SEQ ID NO: 645598 - RNA, 23 nt, Artificial Sequence
  Synthetic
ugauccuguugcauagcaauccu

SEQ ID NO: 645599 - RNA, 24 nt, Artificial Sequence
  Synthetic
cugauccuguugcauagcaauccu

SEQ ID NO: 645600 - RNA, 18 nt, Artificial Sequence
  Synthetic
aucuucagcaagaauccu

SEQ ID NO: 645601 - RNA, 19 nt, Artificial Sequence
  Synthetic
uaucuucagcaagaauccu

SEQ ID NO: 645602 - RNA, 20 nt, Artificial Sequence
  Synthetic
cuaucuucagcaagaauccu

SEQ ID NO: 645603 - RNA, 21 nt, Artificial Sequence
  Synthetic
ccuaucuucagcaagaauccu

SEQ ID NO: 645604 - RNA, 22 nt, Artificial Sequence
  Synthetic
gccuaucuucagcaagaauccu

SEQ ID NO: 645605 - RNA, 23 nt, Artificial Sequence
  Synthetic
ggccuaucuucagcaagaauccu

SEQ ID NO: 645606 - RNA, 24 nt, Artificial Sequence
  Synthetic
uggccuaucuucagcaagaauccu

SEQ ID NO: 645607 - RNA, 18 nt, Artificial Sequence
  Synthetic
acaucauuuuggaauccu

SEQ ID NO: 645608 - RNA, 19 nt, Artificial Sequence
  Synthetic
aacaucauuuuggaauccu

SEQ ID NO: 645609 - RNA, 20 nt, Artificial Sequence
  Synthetic
uaacaucauuuuggaauccu

SEQ ID NO: 645610 - RNA, 21 nt, Artificial Sequence
  Synthetic
auaacaucauuuuggaauccu

SEQ ID NO: 645611 - RNA, 22 nt, Artificial Sequence
  Synthetic
aauaacaucauuuuggaauccu

SEQ ID NO: 645612 - RNA, 23 nt, Artificial Sequence
  Synthetic
gaauaacaucauuuuggaauccu

SEQ ID NO: 645613 - RNA, 24 nt, Artificial Sequence
  Synthetic
ugaauaacaucauuuuggaauccu

SEQ ID NO: 645614 - RNA, 18 nt, Artificial Sequence
  Synthetic
cccuacagcaugaauccu

SEQ ID NO: 645615 - RNA, 19 nt, Artificial Sequence
  Synthetic
ucccuacagcaugaauccu

SEQ ID NO: 645616 - RNA, 20 nt, Artificial Sequence
  Synthetic
uucccuacagcaugaauccu

SEQ ID NO: 645617 - RNA, 21 nt, Artificial Sequence
  Synthetic
guucccuacagcaugaauccu

SEQ ID NO: 645618 - RNA, 22 nt, Artificial Sequence
  Synthetic
aguucccuacagcaugaauccu

SEQ ID NO: 645619 - RNA, 23 nt, Artificial Sequence
  Synthetic
aaguucccuacagcaugaauccu

SEQ ID NO: 645620 - RNA, 24 nt, Artificial Sequence
  Synthetic
aaaguucccuacagcaugaauccu

SEQ ID NO: 645621 - RNA, 18 nt, Artificial Sequence
  Synthetic
caucacucaacuaauccu

SEQ ID NO: 645622 - RNA, 19 nt, Artificial Sequence
  Synthetic
gcaucacucaacuaauccu

SEQ ID NO: 645623 - RNA, 20 nt, Artificial Sequence
  Synthetic
ggcaucacucaacuaauccu

SEQ ID NO: 645624 - RNA, 21 nt, Artificial Sequence
  Synthetic
aggcaucacucaacuaauccu

SEQ ID NO: 645625 - RNA, 22 nt, Artificial Sequence
  Synthetic
aaggcaucacucaacuaauccu

SEQ ID NO: 645626 - RNA, 23 nt, Artificial Sequence
  Synthetic
uaaggcaucacucaacuaauccu

SEQ ID NO: 645627 - RNA, 24 nt, Artificial Sequence
  Synthetic
uuaaggcaucacucaacuaauccu

SEQ ID NO: 645628 - RNA, 18 nt, Artificial Sequence
  Synthetic
uccuugaaaucuaauccu

SEQ ID NO: 645629 - RNA, 19 nt, Artificial Sequence
  Synthetic
guccuugaaaucuaauccu

SEQ ID NO: 645630 - RNA, 20 nt, Artificial Sequence
  Synthetic
aguccuugaaaucuaauccu

SEQ ID NO: 645631 - RNA, 21 nt, Artificial Sequence
  Synthetic
caguccuugaaaucuaauccu

SEQ ID NO: 645632 - RNA, 22 nt, Artificial Sequence
  Synthetic
gcaguccuugaaaucuaauccu

SEQ ID NO: 645633 - RNA, 23 nt, Artificial Sequence
  Synthetic
ggcaguccuugaaaucuaauccu

SEQ ID NO: 645634 - RNA, 24 nt, Artificial Sequence
  Synthetic
uggcaguccuugaaaucuaauccu

SEQ ID NO: 645635 - RNA, 18 nt, Artificial Sequence
  Synthetic
uuagaacacguuaauccu

SEQ ID NO: 645636 - RNA, 19 nt, Artificial Sequence
  Synthetic
uuuagaacacguuaauccu

SEQ ID NO: 645637 - RNA, 20 nt, Artificial Sequence
  Synthetic
auuuagaacacguuaauccu

SEQ ID NO: 645638 - RNA, 21 nt, Artificial Sequence
  Synthetic
uauuuagaacacguuaauccu

SEQ ID NO: 645639 - RNA, 22 nt, Artificial Sequence
  Synthetic
guauuuagaacacguuaauccu

SEQ ID NO: 645640 - RNA, 23 nt, Artificial Sequence
  Synthetic
uguauuuagaacacguuaauccu

SEQ ID NO: 645641 - RNA, 24 nt, Artificial Sequence
  Synthetic
cuguauuuagaacacguuaauccu

SEQ ID NO: 645642 - RNA, 18 nt, Artificial Sequence
  Synthetic
cucacagguguuaauccu

SEQ ID NO: 645643 - RNA, 19 nt, Artificial Sequence
  Synthetic
gcucacagguguuaauccu

SEQ ID NO: 645644 - RNA, 20 nt, Artificial Sequence
  Synthetic
cgcucacagguguuaauccu

SEQ ID NO: 645645 - RNA, 21 nt, Artificial Sequence
  Synthetic
ccgcucacagguguuaauccu

SEQ ID NO: 645646 - RNA, 22 nt, Artificial Sequence
  Synthetic
uccgcucacagguguuaauccu

SEQ ID NO: 645647 - RNA, 23 nt, Artificial Sequence
  Synthetic
cuccgcucacagguguuaauccu

SEQ ID NO: 645648 - RNA, 24 nt, Artificial Sequence
  Synthetic
ccuccgcucacagguguuaauccu

SEQ ID NO: 645649 - RNA, 18 nt, Artificial Sequence
  Synthetic
auuaccuuauuuaauccu

SEQ ID NO: 645650 - RNA, 19 nt, Artificial Sequence
  Synthetic
uauuaccuuauuuaauccu

SEQ ID NO: 645651 - RNA, 20 nt, Artificial Sequence
  Synthetic
auauuaccuuauuuaauccu

SEQ ID NO: 645652 - RNA, 21 nt, Artificial Sequence
  Synthetic
aauauuaccuuauuuaauccu

SEQ ID NO: 645653 - RNA, 22 nt, Artificial Sequence
  Synthetic
aaauauuaccuuauuuaauccu

SEQ ID NO: 645654 - RNA, 23 nt, Artificial Sequence
  Synthetic
caaauauuaccuuauuuaauccu

SEQ ID NO: 645655 - RNA, 24 nt, Artificial Sequence
  Synthetic
acaaauauuaccuuauuuaauccu

SEQ ID NO: 645656 - RNA, 18 nt, Artificial Sequence
  Synthetic
uucaacacaggccauccu

SEQ ID NO: 645657 - RNA, 19 nt, Artificial Sequence
  Synthetic
cuucaacacaggccauccu

SEQ ID NO: 645658 - RNA, 20 nt, Artificial Sequence
  Synthetic
gcuucaacacaggccauccu

SEQ ID NO: 645659 - RNA, 21 nt, Artificial Sequence
  Synthetic
ugcuucaacacaggccauccu

SEQ ID NO: 645660 - RNA, 22 nt, Artificial Sequence
  Synthetic
augcuucaacacaggccauccu

SEQ ID NO: 645661 - RNA, 23 nt, Artificial Sequence
  Synthetic
gaugcuucaacacaggccauccu

SEQ ID NO: 645662 - RNA, 24 nt, Artificial Sequence
  Synthetic
agaugcuucaacacaggccauccu

SEQ ID NO: 645663 - RNA, 18 nt, Artificial Sequence
  Synthetic
uuacggcccuuccauccu

SEQ ID NO: 645664 - RNA, 19 nt, Artificial Sequence
  Synthetic
uuuacggcccuuccauccu

SEQ ID NO: 645665 - RNA, 20 nt, Artificial Sequence
  Synthetic
cuuuacggcccuuccauccu

SEQ ID NO: 645666 - RNA, 21 nt, Artificial Sequence
  Synthetic
ccuuuacggcccuuccauccu

SEQ ID NO: 645667 - RNA, 22 nt, Artificial Sequence
  Synthetic
accuuuacggcccuuccauccu

SEQ ID NO: 645668 - RNA, 23 nt, Artificial Sequence
  Synthetic
aaccuuuacggcccuuccauccu

SEQ ID NO: 645669 - RNA, 24 nt, Artificial Sequence
  Synthetic
caaccuuuacggcccuuccauccu

SEQ ID NO: 645670 - RNA, 18 nt, Artificial Sequence
  Synthetic
acuuccuagaaucauccu

SEQ ID NO: 645671 - RNA, 19 nt, Artificial Sequence
  Synthetic
aacuuccuagaaucauccu

SEQ ID NO: 645672 - RNA, 20 nt, Artificial Sequence
  Synthetic
gaacuuccuagaaucauccu

SEQ ID NO: 645673 - RNA, 21 nt, Artificial Sequence
  Synthetic
agaacuuccuagaaucauccu

SEQ ID NO: 645674 - RNA, 22 nt, Artificial Sequence
  Synthetic
cagaacuuccuagaaucauccu

SEQ ID NO: 645675 - RNA, 23 nt, Artificial Sequence
  Synthetic
gcagaacuuccuagaaucauccu

SEQ ID NO: 645676 - RNA, 24 nt, Artificial Sequence
  Synthetic
agcagaacuuccuagaaucauccu

SEQ ID NO: 645677 - RNA, 18 nt, Artificial Sequence
  Synthetic
uaugccaaccaucauccu

SEQ ID NO: 645678 - RNA, 19 nt, Artificial Sequence
  Synthetic
auaugccaaccaucauccu

SEQ ID NO: 645679 - RNA, 20 nt, Artificial Sequence
  Synthetic
uauaugccaaccaucauccu

SEQ ID NO: 645680 - RNA, 21 nt, Artificial Sequence
  Synthetic
guauaugccaaccaucauccu

SEQ ID NO: 645681 - RNA, 22 nt, Artificial Sequence
  Synthetic
aguauaugccaaccaucauccu

SEQ ID NO: 645682 - RNA, 23 nt, Artificial Sequence
  Synthetic
caguauaugccaaccaucauccu

SEQ ID NO: 645683 - RNA, 24 nt, Artificial Sequence
  Synthetic
ucaguauaugccaaccaucauccu

SEQ ID NO: 645684 - RNA, 18 nt, Artificial Sequence
  Synthetic
aaucacagaccucauccu

SEQ ID NO: 645685 - RNA, 19 nt, Artificial Sequence
  Synthetic
aaaucacagaccucauccu

SEQ ID NO: 645686 - RNA, 20 nt, Artificial Sequence
  Synthetic
uaaaucacagaccucauccu

SEQ ID NO: 645687 - RNA, 21 nt, Artificial Sequence
  Synthetic
guaaaucacagaccucauccu

SEQ ID NO: 645688 - RNA, 22 nt, Artificial Sequence
  Synthetic
gguaaaucacagaccucauccu

SEQ ID NO: 645689 - RNA, 23 nt, Artificial Sequence
  Synthetic
agguaaaucacagaccucauccu

SEQ ID NO: 645690 - RNA, 24 nt, Artificial Sequence
  Synthetic
uagguaaaucacagaccucauccu

SEQ ID NO: 645691 - RNA, 18 nt, Artificial Sequence
  Synthetic
ucccuuuauugucauccu

SEQ ID NO: 645692 - RNA, 19 nt, Artificial Sequence
  Synthetic
gucccuuuauugucauccu

SEQ ID NO: 645693 - RNA, 20 nt, Artificial Sequence
  Synthetic
ugucccuuuauugucauccu

SEQ ID NO: 645694 - RNA, 21 nt, Artificial Sequence
  Synthetic
uugucccuuuauugucauccu

SEQ ID NO: 645695 - RNA, 22 nt, Artificial Sequence
  Synthetic
guugucccuuuauugucauccu

SEQ ID NO: 645696 - RNA, 23 nt, Artificial Sequence
  Synthetic
uguugucccuuuauugucauccu

SEQ ID NO: 645697 - RNA, 24 nt, Artificial Sequence
  Synthetic
cuguugucccuuuauugucauccu

SEQ ID NO: 645698 - RNA, 18 nt, Artificial Sequence
  Synthetic
cacacuauacaagauccu

SEQ ID NO: 645699 - RNA, 19 nt, Artificial Sequence
  Synthetic
ucacacuauacaagauccu

SEQ ID NO: 645700 - RNA, 20 nt, Artificial Sequence
  Synthetic
gucacacuauacaagauccu

SEQ ID NO: 645701 - RNA, 21 nt, Artificial Sequence
  Synthetic
ggucacacuauacaagauccu

SEQ ID NO: 645702 - RNA, 22 nt, Artificial Sequence
  Synthetic
gggucacacuauacaagauccu

SEQ ID NO: 645703 - RNA, 23 nt, Artificial Sequence
  Synthetic
agggucacacuauacaagauccu

SEQ ID NO: 645704 - RNA, 24 nt, Artificial Sequence
  Synthetic
aagggucacacuauacaagauccu

SEQ ID NO: 645705 - RNA, 18 nt, Artificial Sequence
  Synthetic
caauccucccaagauccu

SEQ ID NO: 645706 - RNA, 19 nt, Artificial Sequence
  Synthetic
ucaauccucccaagauccu

SEQ ID NO: 645707 - RNA, 20 nt, Artificial Sequence
  Synthetic
cucaauccucccaagauccu

SEQ ID NO: 645708 - RNA, 21 nt, Artificial Sequence
  Synthetic
acucaauccucccaagauccu

SEQ ID NO: 645709 - RNA, 22 nt, Artificial Sequence
  Synthetic
cacucaauccucccaagauccu

SEQ ID NO: 645710 - RNA, 23 nt, Artificial Sequence
  Synthetic
acacucaauccucccaagauccu

SEQ ID NO: 645711 - RNA, 24 nt, Artificial Sequence
  Synthetic
aacacucaauccucccaagauccu

SEQ ID NO: 645712 - RNA, 18 nt, Artificial Sequence
  Synthetic
gcggacgggacagauccu

SEQ ID NO: 645713 - RNA, 19 nt, Artificial Sequence
  Synthetic
agcggacgggacagauccu

SEQ ID NO: 645714 - RNA, 20 nt, Artificial Sequence
  Synthetic
aagcggacgggacagauccu

SEQ ID NO: 645715 - RNA, 21 nt, Artificial Sequence
  Synthetic
caagcggacgggacagauccu

SEQ ID NO: 645716 - RNA, 22 nt, Artificial Sequence
  Synthetic
gcaagcggacgggacagauccu

SEQ ID NO: 645717 - RNA, 23 nt, Artificial Sequence
  Synthetic
agcaagcggacgggacagauccu

SEQ ID NO: 645718 - RNA, 24 nt, Artificial Sequence
  Synthetic
gagcaagcggacgggacagauccu

SEQ ID NO: 645719 - RNA, 18 nt, Artificial Sequence
  Synthetic
gauuauuaaugagauccu

SEQ ID NO: 645720 - RNA, 19 nt, Artificial Sequence
  Synthetic
agauuauuaaugagauccu

SEQ ID NO: 645721 - RNA, 20 nt, Artificial Sequence
  Synthetic
aagauuauuaaugagauccu

SEQ ID NO: 645722 - RNA, 21 nt, Artificial Sequence
  Synthetic
gaagauuauuaaugagauccu

SEQ ID NO: 645723 - RNA, 22 nt, Artificial Sequence
  Synthetic
agaagauuauuaaugagauccu

SEQ ID NO: 645724 - RNA, 23 nt, Artificial Sequence
  Synthetic
gagaagauuauuaaugagauccu

SEQ ID NO: 645725 - RNA, 24 nt, Artificial Sequence
  Synthetic
ugagaagauuauuaaugagauccu

SEQ ID NO: 645726 - RNA, 18 nt, Artificial Sequence
  Synthetic
gagagcaauugagauccu

SEQ ID NO: 645727 - RNA, 19 nt, Artificial Sequence
  Synthetic
ugagagcaauugagauccu

SEQ ID NO: 645728 - RNA, 20 nt, Artificial Sequence
  Synthetic
cugagagcaauugagauccu

SEQ ID NO: 645729 - RNA, 21 nt, Artificial Sequence
  Synthetic
ucugagagcaauugagauccu

SEQ ID NO: 645730 - RNA, 22 nt, Artificial Sequence
  Synthetic
cucugagagcaauugagauccu

SEQ ID NO: 645731 - RNA, 23 nt, Artificial Sequence
  Synthetic
acucugagagcaauugagauccu

SEQ ID NO: 645732 - RNA, 24 nt, Artificial Sequence
  Synthetic
cacucugagagcaauugagauccu

SEQ ID NO: 645733 - RNA, 18 nt, Artificial Sequence
  Synthetic
agaaauacaaaggauccu

SEQ ID NO: 645734 - RNA, 19 nt, Artificial Sequence
  Synthetic
cagaaauacaaaggauccu

SEQ ID NO: 645735 - RNA, 20 nt, Artificial Sequence
  Synthetic
acagaaauacaaaggauccu

SEQ ID NO: 645736 - RNA, 21 nt, Artificial Sequence
  Synthetic
cacagaaauacaaaggauccu

SEQ ID NO: 645737 - RNA, 22 nt, Artificial Sequence
  Synthetic
acacagaaauacaaaggauccu

SEQ ID NO: 645738 - RNA, 23 nt, Artificial Sequence
  Synthetic
aacacagaaauacaaaggauccu

SEQ ID NO: 645739 - RNA, 24 nt, Artificial Sequence
  Synthetic
uaacacagaaauacaaaggauccu

SEQ ID NO: 645740 - RNA, 18 nt, Artificial Sequence
  Synthetic
uauucuacccaugauccu

SEQ ID NO: 645741 - RNA, 19 nt, Artificial Sequence
  Synthetic
uuauucuacccaugauccu

SEQ ID NO: 645742 - RNA, 20 nt, Artificial Sequence
  Synthetic
cuuauucuacccaugauccu

SEQ ID NO: 645743 - RNA, 21 nt, Artificial Sequence
  Synthetic
ucuuauucuacccaugauccu

SEQ ID NO: 645744 - RNA, 22 nt, Artificial Sequence
  Synthetic
uucuuauucuacccaugauccu

SEQ ID NO: 645745 - RNA, 23 nt, Artificial Sequence
  Synthetic
uuucuuauucuacccaugauccu

SEQ ID NO: 645746 - RNA, 24 nt, Artificial Sequence
  Synthetic
cuuucuuauucuacccaugauccu

SEQ ID NO: 645747 - RNA, 18 nt, Artificial Sequence
  Synthetic
aauaggguucgugauccu

SEQ ID NO: 645748 - RNA, 19 nt, Artificial Sequence
  Synthetic
caauaggguucgugauccu

SEQ ID NO: 645749 - RNA, 20 nt, Artificial Sequence
  Synthetic
acaauaggguucgugauccu

SEQ ID NO: 645750 - RNA, 21 nt, Artificial Sequence
  Synthetic
cacaauaggguucgugauccu

SEQ ID NO: 645751 - RNA, 22 nt, Artificial Sequence
  Synthetic
ucacaauaggguucgugauccu

SEQ ID NO: 645752 - RNA, 23 nt, Artificial Sequence
  Synthetic
uucacaauaggguucgugauccu

SEQ ID NO: 645753 - RNA, 24 nt, Artificial Sequence
  Synthetic
guucacaauaggguucgugauccu

SEQ ID NO: 645754 - RNA, 18 nt, Artificial Sequence
  Synthetic
gcagacugaggugauccu

SEQ ID NO: 645755 - RNA, 19 nt, Artificial Sequence
  Synthetic
agcagacugaggugauccu

SEQ ID NO: 645756 - RNA, 20 nt, Artificial Sequence
  Synthetic
cagcagacugaggugauccu

SEQ ID NO: 645757 - RNA, 21 nt, Artificial Sequence
  Synthetic
acagcagacugaggugauccu

SEQ ID NO: 645758 - RNA, 22 nt, Artificial Sequence
  Synthetic
uacagcagacugaggugauccu

SEQ ID NO: 645759 - RNA, 23 nt, Artificial Sequence
  Synthetic
auacagcagacugaggugauccu

SEQ ID NO: 645760 - RNA, 24 nt, Artificial Sequence
  Synthetic
cauacagcagacugaggugauccu

SEQ ID NO: 645761 - RNA, 18 nt, Artificial Sequence
  Synthetic
cagacugacugugauccu

SEQ ID NO: 645762 - RNA, 19 nt, Artificial Sequence
  Synthetic
acagacugacugugauccu

SEQ ID NO: 645763 - RNA, 20 nt, Artificial Sequence
  Synthetic
aacagacugacugugauccu

SEQ ID NO: 645764 - RNA, 21 nt, Artificial Sequence
  Synthetic
caacagacugacugugauccu

SEQ ID NO: 645765 - RNA, 22 nt, Artificial Sequence
  Synthetic
ucaacagacugacugugauccu

SEQ ID NO: 645766 - RNA, 23 nt, Artificial Sequence
  Synthetic
gucaacagacugacugugauccu

SEQ ID NO: 645767 - RNA, 24 nt, Artificial Sequence
  Synthetic
agucaacagacugacugugauccu

SEQ ID NO: 645768 - RNA, 18 nt, Artificial Sequence
  Synthetic
uacugguugugugauccu

SEQ ID NO: 645769 - RNA, 19 nt, Artificial Sequence
  Synthetic
cuacugguugugugauccu

SEQ ID NO: 645770 - RNA, 20 nt, Artificial Sequence
  Synthetic
acuacugguugugugauccu

SEQ ID NO: 645771 - RNA, 21 nt, Artificial Sequence
  Synthetic
uacuacugguugugugauccu

SEQ ID NO: 645772 - RNA, 22 nt, Artificial Sequence
  Synthetic
cuacuacugguugugugauccu

SEQ ID NO: 645773 - RNA, 23 nt, Artificial Sequence
  Synthetic
acuacuacugguugugugauccu

SEQ ID NO: 645774 - RNA, 24 nt, Artificial Sequence
  Synthetic
cacuacuacugguugugugauccu

SEQ ID NO: 645775 - RNA, 18 nt, Artificial Sequence
  Synthetic
aaacuaaggguugauccu

SEQ ID NO: 645776 - RNA, 19 nt, Artificial Sequence
  Synthetic
aaaacuaaggguugauccu

SEQ ID NO: 645777 - RNA, 20 nt, Artificial Sequence
  Synthetic
gaaaacuaaggguugauccu

SEQ ID NO: 645778 - RNA, 21 nt, Artificial Sequence
  Synthetic
agaaaacuaaggguugauccu

SEQ ID NO: 645779 - RNA, 22 nt, Artificial Sequence
  Synthetic
gagaaaacuaaggguugauccu

SEQ ID NO: 645780 - RNA, 23 nt, Artificial Sequence
  Synthetic
agagaaaacuaaggguugauccu

SEQ ID NO: 645781 - RNA, 24 nt, Artificial Sequence
  Synthetic
uagagaaaacuaaggguugauccu

SEQ ID NO: 645782 - RNA, 18 nt, Artificial Sequence
  Synthetic
caacuucaugcauauccu

SEQ ID NO: 645783 - RNA, 19 nt, Artificial Sequence
  Synthetic
ucaacuucaugcauauccu

SEQ ID NO: 645784 - RNA, 20 nt, Artificial Sequence
  Synthetic
aucaacuucaugcauauccu

SEQ ID NO: 645785 - RNA, 21 nt, Artificial Sequence
  Synthetic
caucaacuucaugcauauccu

SEQ ID NO: 645786 - RNA, 22 nt, Artificial Sequence
  Synthetic
acaucaacuucaugcauauccu

SEQ ID NO: 645787 - RNA, 23 nt, Artificial Sequence
  Synthetic
aacaucaacuucaugcauauccu

SEQ ID NO: 645788 - RNA, 24 nt, Artificial Sequence
  Synthetic
gaacaucaacuucaugcauauccu

SEQ ID NO: 645789 - RNA, 18 nt, Artificial Sequence
  Synthetic
ugaauuaugguauauccu

SEQ ID NO: 645790 - RNA, 19 nt, Artificial Sequence
  Synthetic
gugaauuaugguauauccu

SEQ ID NO: 645791 - RNA, 20 nt, Artificial Sequence
  Synthetic
agugaauuaugguauauccu

SEQ ID NO: 645792 - RNA, 21 nt, Artificial Sequence
  Synthetic
aagugaauuaugguauauccu

SEQ ID NO: 645793 - RNA, 22 nt, Artificial Sequence
  Synthetic
uaagugaauuaugguauauccu

SEQ ID NO: 645794 - RNA, 23 nt, Artificial Sequence
  Synthetic
uuaagugaauuaugguauauccu

SEQ ID NO: 645795 - RNA, 24 nt, Artificial Sequence
  Synthetic
cuuaagugaauuaugguauauccu

SEQ ID NO: 645796 - RNA, 18 nt, Artificial Sequence
  Synthetic
cuuguauacaacuauccu

SEQ ID NO: 645797 - RNA, 19 nt, Artificial Sequence
  Synthetic
gcuuguauacaacuauccu

SEQ ID NO: 645798 - RNA, 20 nt, Artificial Sequence
  Synthetic
ugcuuguauacaacuauccu

SEQ ID NO: 645799 - RNA, 21 nt, Artificial Sequence
  Synthetic
augcuuguauacaacuauccu

SEQ ID NO: 645800 - RNA, 22 nt, Artificial Sequence
  Synthetic
aaugcuuguauacaacuauccu

SEQ ID NO: 645801 - RNA, 23 nt, Artificial Sequence
  Synthetic
aaaugcuuguauacaacuauccu

SEQ ID NO: 645802 - RNA, 24 nt, Artificial Sequence
  Synthetic
aaaaugcuuguauacaacuauccu

SEQ ID NO: 645803 - RNA, 18 nt, Artificial Sequence
  Synthetic
cacaaccaagacuauccu

SEQ ID NO: 645804 - RNA, 19 nt, Artificial Sequence
  Synthetic
ucacaaccaagacuauccu

SEQ ID NO: 645805 - RNA, 20 nt, Artificial Sequence
  Synthetic
uucacaaccaagacuauccu

SEQ ID NO: 645806 - RNA, 21 nt, Artificial Sequence
  Synthetic
cuucacaaccaagacuauccu

SEQ ID NO: 645807 - RNA, 22 nt, Artificial Sequence
  Synthetic
acuucacaaccaagacuauccu

SEQ ID NO: 645808 - RNA, 23 nt, Artificial Sequence
  Synthetic
aacuucacaaccaagacuauccu

SEQ ID NO: 645809 - RNA, 24 nt, Artificial Sequence
  Synthetic
gaacuucacaaccaagacuauccu

SEQ ID NO: 645810 - RNA, 18 nt, Artificial Sequence
  Synthetic
gaaaagacaaucuauccu

SEQ ID NO: 645811 - RNA, 19 nt, Artificial Sequence
  Synthetic
agaaaagacaaucuauccu

SEQ ID NO: 645812 - RNA, 20 nt, Artificial Sequence
  Synthetic
uagaaaagacaaucuauccu

SEQ ID NO: 645813 - RNA, 21 nt, Artificial Sequence
  Synthetic
uuagaaaagacaaucuauccu

SEQ ID NO: 645814 - RNA, 22 nt, Artificial Sequence
  Synthetic
guuagaaaagacaaucuauccu

SEQ ID NO: 645815 - RNA, 23 nt, Artificial Sequence
  Synthetic
gguuagaaaagacaaucuauccu

SEQ ID NO: 645816 - RNA, 24 nt, Artificial Sequence
  Synthetic
agguuagaaaagacaaucuauccu

SEQ ID NO: 645817 - RNA, 18 nt, Artificial Sequence
  Synthetic
gagaugaaaaaguauccu

SEQ ID NO: 645818 - RNA, 19 nt, Artificial Sequence
  Synthetic
ugagaugaaaaaguauccu

SEQ ID NO: 645819 - RNA, 20 nt, Artificial Sequence
  Synthetic
gugagaugaaaaaguauccu

SEQ ID NO: 645820 - RNA, 21 nt, Artificial Sequence
  Synthetic
ugugagaugaaaaaguauccu

SEQ ID NO: 645821 - RNA, 22 nt, Artificial Sequence
  Synthetic
augugagaugaaaaaguauccu

SEQ ID NO: 645822 - RNA, 23 nt, Artificial Sequence
  Synthetic
uaugugagaugaaaaaguauccu

SEQ ID NO: 645823 - RNA, 24 nt, Artificial Sequence
  Synthetic
auaugugagaugaaaaaguauccu

SEQ ID NO: 645824 - RNA, 18 nt, Artificial Sequence
  Synthetic
gccuucccugaguauccu

SEQ ID NO: 645825 - RNA, 19 nt, Artificial Sequence
  Synthetic
ggccuucccugaguauccu

SEQ ID NO: 645826 - RNA, 20 nt, Artificial Sequence
  Synthetic
gggccuucccugaguauccu

SEQ ID NO: 645827 - RNA, 21 nt, Artificial Sequence
  Synthetic
agggccuucccugaguauccu

SEQ ID NO: 645828 - RNA, 22 nt, Artificial Sequence
  Synthetic
gagggccuucccugaguauccu

SEQ ID NO: 645829 - RNA, 23 nt, Artificial Sequence
  Synthetic
cgagggccuucccugaguauccu

SEQ ID NO: 645830 - RNA, 24 nt, Artificial Sequence
  Synthetic
ccgagggccuucccugaguauccu

SEQ ID NO: 645831 - RNA, 18 nt, Artificial Sequence
  Synthetic
cuucuucaaggguauccu

SEQ ID NO: 645832 - RNA, 19 nt, Artificial Sequence
  Synthetic
ucuucuucaaggguauccu

SEQ ID NO: 645833 - RNA, 20 nt, Artificial Sequence
  Synthetic
gucuucuucaaggguauccu

SEQ ID NO: 645834 - RNA, 21 nt, Artificial Sequence
  Synthetic
ggucuucuucaaggguauccu

SEQ ID NO: 645835 - RNA, 22 nt, Artificial Sequence
  Synthetic
uggucuucuucaaggguauccu

SEQ ID NO: 645836 - RNA, 23 nt, Artificial Sequence
  Synthetic
auggucuucuucaaggguauccu

SEQ ID NO: 645837 - RNA, 24 nt, Artificial Sequence
  Synthetic
gauggucuucuucaaggguauccu

SEQ ID NO: 645838 - RNA, 18 nt, Artificial Sequence
  Synthetic
gcaagugaaauguauccu

SEQ ID NO: 645839 - RNA, 19 nt, Artificial Sequence
  Synthetic
agcaagugaaauguauccu

SEQ ID NO: 645840 - RNA, 20 nt, Artificial Sequence
  Synthetic
gagcaagugaaauguauccu

SEQ ID NO: 645841 - RNA, 21 nt, Artificial Sequence
  Synthetic
ggagcaagugaaauguauccu

SEQ ID NO: 645842 - RNA, 22 nt, Artificial Sequence
  Synthetic
gggagcaagugaaauguauccu

SEQ ID NO: 645843 - RNA, 23 nt, Artificial Sequence
  Synthetic
agggagcaagugaaauguauccu

SEQ ID NO: 645844 - RNA, 24 nt, Artificial Sequence
  Synthetic
cagggagcaagugaaauguauccu

SEQ ID NO: 645845 - RNA, 18 nt, Artificial Sequence
  Synthetic
agaucacuuucuuauccu

SEQ ID NO: 645846 - RNA, 19 nt, Artificial Sequence
  Synthetic
aagaucacuuucuuauccu

SEQ ID NO: 645847 - RNA, 20 nt, Artificial Sequence
  Synthetic
aaagaucacuuucuuauccu

SEQ ID NO: 645848 - RNA, 21 nt, Artificial Sequence
  Synthetic
uaaagaucacuuucuuauccu

SEQ ID NO: 645849 - RNA, 22 nt, Artificial Sequence
  Synthetic
auaaagaucacuuucuuauccu

SEQ ID NO: 645850 - RNA, 23 nt, Artificial Sequence
  Synthetic
uauaaagaucacuuucuuauccu

SEQ ID NO: 645851 - RNA, 24 nt, Artificial Sequence
  Synthetic
auauaaagaucacuuucuuauccu

SEQ ID NO: 645852 - RNA, 18 nt, Artificial Sequence
  Synthetic
cuaaguuauaguuauccu

SEQ ID NO: 645853 - RNA, 19 nt, Artificial Sequence
  Synthetic
acuaaguuauaguuauccu

SEQ ID NO: 645854 - RNA, 20 nt, Artificial Sequence
  Synthetic
uacuaaguuauaguuauccu

SEQ ID NO: 645855 - RNA, 21 nt, Artificial Sequence
  Synthetic
cuacuaaguuauaguuauccu

SEQ ID NO: 645856 - RNA, 22 nt, Artificial Sequence
  Synthetic
ccuacuaaguuauaguuauccu

SEQ ID NO: 645857 - RNA, 23 nt, Artificial Sequence
  Synthetic
accuacuaaguuauaguuauccu

SEQ ID NO: 645858 - RNA, 24 nt, Artificial Sequence
  Synthetic
aaccuacuaaguuauaguuauccu

SEQ ID NO: 645859 - RNA, 18 nt, Artificial Sequence
  Synthetic
agaaggcauuguuauccu

SEQ ID NO: 645860 - RNA, 19 nt, Artificial Sequence
  Synthetic
aagaaggcauuguuauccu

SEQ ID NO: 645861 - RNA, 20 nt, Artificial Sequence
  Synthetic
aaagaaggcauuguuauccu

SEQ ID NO: 645862 - RNA, 21 nt, Artificial Sequence
  Synthetic
aaaagaaggcauuguuauccu

SEQ ID NO: 645863 - RNA, 22 nt, Artificial Sequence
  Synthetic
caaaagaaggcauuguuauccu

SEQ ID NO: 645864 - RNA, 23 nt, Artificial Sequence
  Synthetic
ucaaaagaaggcauuguuauccu

SEQ ID NO: 645865 - RNA, 24 nt, Artificial Sequence
  Synthetic
uucaaaagaaggcauuguuauccu

SEQ ID NO: 645866 - RNA, 18 nt, Artificial Sequence
  Synthetic
ggguuuggacuuuauccu

SEQ ID NO: 645867 - RNA, 19 nt, Artificial Sequence
  Synthetic
aggguuuggacuuuauccu

SEQ ID NO: 645868 - RNA, 20 nt, Artificial Sequence
  Synthetic
aaggguuuggacuuuauccu

SEQ ID NO: 645869 - RNA, 21 nt, Artificial Sequence
  Synthetic
uaaggguuuggacuuuauccu

SEQ ID NO: 645870 - RNA, 22 nt, Artificial Sequence
  Synthetic
cuaaggguuuggacuuuauccu

SEQ ID NO: 645871 - RNA, 23 nt, Artificial Sequence
  Synthetic
gcuaaggguuuggacuuuauccu

SEQ ID NO: 645872 - RNA, 24 nt, Artificial Sequence
  Synthetic
agcuaaggguuuggacuuuauccu

SEQ ID NO: 645873 - RNA, 18 nt, Artificial Sequence
  Synthetic
uccuuuuucuuuuauccu

SEQ ID NO: 645874 - RNA, 19 nt, Artificial Sequence
  Synthetic
uuccuuuuucuuuuauccu

SEQ ID NO: 645875 - RNA, 20 nt, Artificial Sequence
  Synthetic
uuuccuuuuucuuuuauccu

SEQ ID NO: 645876 - RNA, 21 nt, Artificial Sequence
  Synthetic
uuuuccuuuuucuuuuauccu

SEQ ID NO: 645877 - RNA, 22 nt, Artificial Sequence
  Synthetic
cuuuuccuuuuucuuuuauccu

SEQ ID NO: 645878 - RNA, 23 nt, Artificial Sequence
  Synthetic
ccuuuuccuuuuucuuuuauccu

SEQ ID NO: 645879 - RNA, 24 nt, Artificial Sequence
  Synthetic
uccuuuuccuuuuucuuuuauccu

SEQ ID NO: 645880 - RNA, 18 nt, Artificial Sequence
  Synthetic
ggagaguaguuuuauccu

SEQ ID NO: 645881 - RNA, 19 nt, Artificial Sequence
  Synthetic
aggagaguaguuuuauccu

SEQ ID NO: 645882 - RNA, 20 nt, Artificial Sequence
  Synthetic
aaggagaguaguuuuauccu

SEQ ID NO: 645883 - RNA, 21 nt, Artificial Sequence
  Synthetic
uaaggagaguaguuuuauccu

SEQ ID NO: 645884 - RNA, 22 nt, Artificial Sequence
  Synthetic
auaaggagaguaguuuuauccu

SEQ ID NO: 645885 - RNA, 23 nt, Artificial Sequence
  Synthetic
cauaaggagaguaguuuuauccu

SEQ ID NO: 645886 - RNA, 24 nt, Artificial Sequence
  Synthetic
ucauaaggagaguaguuuuauccu

SEQ ID NO: 645887 - RNA, 18 nt, Artificial Sequence
  Synthetic
augaucucauuaacuccu

SEQ ID NO: 645888 - RNA, 19 nt, Artificial Sequence
  Synthetic
uaugaucucauuaacuccu

SEQ ID NO: 645889 - RNA, 20 nt, Artificial Sequence
  Synthetic
auaugaucucauuaacuccu

SEQ ID NO: 645890 - RNA, 21 nt, Artificial Sequence
  Synthetic
gauaugaucucauuaacuccu

SEQ ID NO: 645891 - RNA, 22 nt, Artificial Sequence
  Synthetic
ugauaugaucucauuaacuccu

SEQ ID NO: 645892 - RNA, 23 nt, Artificial Sequence
  Synthetic
cugauaugaucucauuaacuccu

SEQ ID NO: 645893 - RNA, 24 nt, Artificial Sequence
  Synthetic
ccugauaugaucucauuaacuccu

SEQ ID NO: 645894 - RNA, 18 nt, Artificial Sequence
  Synthetic
gagcuaauagacacuccu

SEQ ID NO: 645895 - RNA, 19 nt, Artificial Sequence
  Synthetic
ggagcuaauagacacuccu

SEQ ID NO: 645896 - RNA, 20 nt, Artificial Sequence
  Synthetic
gggagcuaauagacacuccu

SEQ ID NO: 645897 - RNA, 21 nt, Artificial Sequence
  Synthetic
ugggagcuaauagacacuccu

SEQ ID NO: 645898 - RNA, 22 nt, Artificial Sequence
  Synthetic
augggagcuaauagacacuccu

SEQ ID NO: 645899 - RNA, 23 nt, Artificial Sequence
  Synthetic
aaugggagcuaauagacacuccu

SEQ ID NO: 645900 - RNA, 24 nt, Artificial Sequence
  Synthetic
uaaugggagcuaauagacacuccu

SEQ ID NO: 645901 - RNA, 18 nt, Artificial Sequence
  Synthetic
uauaaaaguuagacuccu

SEQ ID NO: 645902 - RNA, 19 nt, Artificial Sequence
  Synthetic
uuauaaaaguuagacuccu

SEQ ID NO: 645903 - RNA, 20 nt, Artificial Sequence
  Synthetic
auuauaaaaguuagacuccu

SEQ ID NO: 645904 - RNA, 21 nt, Artificial Sequence
  Synthetic
uauuauaaaaguuagacuccu

SEQ ID NO: 645905 - RNA, 22 nt, Artificial Sequence
  Synthetic
cuauuauaaaaguuagacuccu

SEQ ID NO: 645906 - RNA, 23 nt, Artificial Sequence
  Synthetic
acuauuauaaaaguuagacuccu

SEQ ID NO: 645907 - RNA, 24 nt, Artificial Sequence
  Synthetic
gacuauuauaaaaguuagacuccu

SEQ ID NO: 645908 - RNA, 18 nt, Artificial Sequence
  Synthetic
uuuacucagccuacuccu

SEQ ID NO: 645909 - RNA, 19 nt, Artificial Sequence
  Synthetic
auuuacucagccuacuccu

SEQ ID NO: 645910 - RNA, 20 nt, Artificial Sequence
  Synthetic
uauuuacucagccuacuccu

SEQ ID NO: 645911 - RNA, 21 nt, Artificial Sequence
  Synthetic
uuauuuacucagccuacuccu

SEQ ID NO: 645912 - RNA, 22 nt, Artificial Sequence
  Synthetic
auuauuuacucagccuacuccu

SEQ ID NO: 645913 - RNA, 23 nt, Artificial Sequence
  Synthetic
uauuauuuacucagccuacuccu

SEQ ID NO: 645914 - RNA, 24 nt, Artificial Sequence
  Synthetic
auauuauuuacucagccuacuccu

SEQ ID NO: 645915 - RNA, 18 nt, Artificial Sequence
  Synthetic
aagggucugauuacuccu

SEQ ID NO: 645916 - RNA, 19 nt, Artificial Sequence
  Synthetic
uaagggucugauuacuccu

SEQ ID NO: 645917 - RNA, 20 nt, Artificial Sequence
  Synthetic
auaagggucugauuacuccu

SEQ ID NO: 645918 - RNA, 21 nt, Artificial Sequence
  Synthetic
aauaagggucugauuacuccu

SEQ ID NO: 645919 - RNA, 22 nt, Artificial Sequence
  Synthetic
uaauaagggucugauuacuccu

SEQ ID NO: 645920 - RNA, 23 nt, Artificial Sequence
  Synthetic
guaauaagggucugauuacuccu

SEQ ID NO: 645921 - RNA, 24 nt, Artificial Sequence
  Synthetic
uguaauaagggucugauuacuccu

SEQ ID NO: 645922 - RNA, 18 nt, Artificial Sequence
  Synthetic
auaaauuaauuuacuccu

SEQ ID NO: 645923 - RNA, 19 nt, Artificial Sequence
  Synthetic
uauaaauuaauuuacuccu

SEQ ID NO: 645924 - RNA, 20 nt, Artificial Sequence
  Synthetic
auauaaauuaauuuacuccu

SEQ ID NO: 645925 - RNA, 21 nt, Artificial Sequence
  Synthetic
uauauaaauuaauuuacuccu

SEQ ID NO: 645926 - RNA, 22 nt, Artificial Sequence
  Synthetic
uuauauaaauuaauuuacuccu

SEQ ID NO: 645927 - RNA, 23 nt, Artificial Sequence
  Synthetic
uuuauauaaauuaauuuacuccu

SEQ ID NO: 645928 - RNA, 24 nt, Artificial Sequence
  Synthetic
uuuuauauaaauuaauuuacuccu

SEQ ID NO: 645929 - RNA, 18 nt, Artificial Sequence
  Synthetic
caauuuuaacaaccuccu

SEQ ID NO: 645930 - RNA, 19 nt, Artificial Sequence
  Synthetic
ccaauuuuaacaaccuccu

SEQ ID NO: 645931 - RNA, 20 nt, Artificial Sequence
  Synthetic
gccaauuuuaacaaccuccu

SEQ ID NO: 645932 - RNA, 21 nt, Artificial Sequence
  Synthetic
ggccaauuuuaacaaccuccu

SEQ ID NO: 645933 - RNA, 22 nt, Artificial Sequence
  Synthetic
uggccaauuuuaacaaccuccu

SEQ ID NO: 645934 - RNA, 23 nt, Artificial Sequence
  Synthetic
cuggccaauuuuaacaaccuccu

SEQ ID NO: 645935 - RNA, 24 nt, Artificial Sequence
  Synthetic
ccuggccaauuuuaacaaccuccu

SEQ ID NO: 645936 - RNA, 18 nt, Artificial Sequence
  Synthetic
auaaaaguuccaccuccu

SEQ ID NO: 645937 - RNA, 19 nt, Artificial Sequence
  Synthetic
aauaaaaguuccaccuccu

SEQ ID NO: 645938 - RNA, 20 nt, Artificial Sequence
  Synthetic
uaauaaaaguuccaccuccu

SEQ ID NO: 645939 - RNA, 21 nt, Artificial Sequence
  Synthetic
guaauaaaaguuccaccuccu

SEQ ID NO: 645940 - RNA, 22 nt, Artificial Sequence
  Synthetic
gguaauaaaaguuccaccuccu

SEQ ID NO: 645941 - RNA, 23 nt, Artificial Sequence
  Synthetic
ggguaauaaaaguuccaccuccu

SEQ ID NO: 645942 - RNA, 24 nt, Artificial Sequence
  Synthetic
uggguaauaaaaguuccaccuccu

SEQ ID NO: 645943 - RNA, 18 nt, Artificial Sequence
  Synthetic
acccccaucucaccuccu

SEQ ID NO: 645944 - RNA, 19 nt, Artificial Sequence
  Synthetic
uacccccaucucaccuccu

SEQ ID NO: 645945 - RNA, 20 nt, Artificial Sequence
  Synthetic
uuacccccaucucaccuccu

SEQ ID NO: 645946 - RNA, 21 nt, Artificial Sequence
  Synthetic
cuuacccccaucucaccuccu

SEQ ID NO: 645947 - RNA, 22 nt, Artificial Sequence
  Synthetic
ccuuacccccaucucaccuccu

SEQ ID NO: 645948 - RNA, 23 nt, Artificial Sequence
  Synthetic
uccuuacccccaucucaccuccu

SEQ ID NO: 645949 - RNA, 24 nt, Artificial Sequence
  Synthetic
guccuuacccccaucucaccuccu

SEQ ID NO: 645950 - RNA, 18 nt, Artificial Sequence
  Synthetic
agaaagcucuagccuccu

SEQ ID NO: 645951 - RNA, 19 nt, Artificial Sequence
  Synthetic
cagaaagcucuagccuccu

SEQ ID NO: 645952 - RNA, 20 nt, Artificial Sequence
  Synthetic
acagaaagcucuagccuccu

SEQ ID NO: 645953 - RNA, 21 nt, Artificial Sequence
  Synthetic
uacagaaagcucuagccuccu

SEQ ID NO: 645954 - RNA, 22 nt, Artificial Sequence
  Synthetic
cuacagaaagcucuagccuccu

SEQ ID NO: 645955 - RNA, 23 nt, Artificial Sequence
  Synthetic
ccuacagaaagcucuagccuccu

SEQ ID NO: 645956 - RNA, 24 nt, Artificial Sequence
  Synthetic
accuacagaaagcucuagccuccu

SEQ ID NO: 645957 - RNA, 18 nt, Artificial Sequence
  Synthetic
gacuucagagauccuccu

SEQ ID NO: 645958 - RNA, 19 nt, Artificial Sequence
  Synthetic
agacuucagagauccuccu

SEQ ID NO: 645959 - RNA, 20 nt, Artificial Sequence
  Synthetic
cagacuucagagauccuccu

SEQ ID NO: 645960 - RNA, 21 nt, Artificial Sequence
  Synthetic
ucagacuucagagauccuccu

SEQ ID NO: 645961 - RNA, 22 nt, Artificial Sequence
  Synthetic
uucagacuucagagauccuccu

SEQ ID NO: 645962 - RNA, 23 nt, Artificial Sequence
  Synthetic
cuucagacuucagagauccuccu

SEQ ID NO: 645963 - RNA, 24 nt, Artificial Sequence
  Synthetic
ccuucagacuucagagauccuccu

SEQ ID NO: 645964 - RNA, 18 nt, Artificial Sequence
  Synthetic
uauucuguuucuccuccu

SEQ ID NO: 645965 - RNA, 19 nt, Artificial Sequence
  Synthetic
cuauucuguuucuccuccu

SEQ ID NO: 645966 - RNA, 20 nt, Artificial Sequence
  Synthetic
acuauucuguuucuccuccu

SEQ ID NO: 645967 - RNA, 21 nt, Artificial Sequence
  Synthetic
cacuauucuguuucuccuccu

SEQ ID NO: 645968 - RNA, 22 nt, Artificial Sequence
  Synthetic
ucacuauucuguuucuccuccu

SEQ ID NO: 645969 - RNA, 23 nt, Artificial Sequence
  Synthetic
cucacuauucuguuucuccuccu

SEQ ID NO: 645970 - RNA, 24 nt, Artificial Sequence
  Synthetic
ucucacuauucuguuucuccuccu

SEQ ID NO: 645971 - RNA, 18 nt, Artificial Sequence
  Synthetic
auuaaaguaguuccuccu

SEQ ID NO: 645972 - RNA, 19 nt, Artificial Sequence
  Synthetic
uauuaaaguaguuccuccu

SEQ ID NO: 645973 - RNA, 20 nt, Artificial Sequence
  Synthetic
cuauuaaaguaguuccuccu

SEQ ID NO: 645974 - RNA, 21 nt, Artificial Sequence
  Synthetic
ucuauuaaaguaguuccuccu

SEQ ID NO: 645975 - RNA, 22 nt, Artificial Sequence
  Synthetic
uucuauuaaaguaguuccuccu

SEQ ID NO: 645976 - RNA, 23 nt, Artificial Sequence
  Synthetic
guucuauuaaaguaguuccuccu

SEQ ID NO: 645977 - RNA, 24 nt, Artificial Sequence
  Synthetic
aguucuauuaaaguaguuccuccu

SEQ ID NO: 645978 - RNA, 18 nt, Artificial Sequence
  Synthetic
cuauggaaaagagcuccu

SEQ ID NO: 645979 - RNA, 19 nt, Artificial Sequence
  Synthetic
gcuauggaaaagagcuccu

SEQ ID NO: 645980 - RNA, 20 nt, Artificial Sequence
  Synthetic
ugcuauggaaaagagcuccu

SEQ ID NO: 645981 - RNA, 21 nt, Artificial Sequence
  Synthetic
cugcuauggaaaagagcuccu

SEQ ID NO: 645982 - RNA, 22 nt, Artificial Sequence
  Synthetic
ucugcuauggaaaagagcuccu

SEQ ID NO: 645983 - RNA, 23 nt, Artificial Sequence
  Synthetic
uucugcuauggaaaagagcuccu

SEQ ID NO: 645984 - RNA, 24 nt, Artificial Sequence
  Synthetic
uuucugcuauggaaaagagcuccu

SEQ ID NO: 645985 - RNA, 18 nt, Artificial Sequence
  Synthetic
gcuacucugggagcuccu

SEQ ID NO: 645986 - RNA, 19 nt, Artificial Sequence
  Synthetic
ugcuacucugggagcuccu

SEQ ID NO: 645987 - RNA, 20 nt, Artificial Sequence
  Synthetic
cugcuacucugggagcuccu

SEQ ID NO: 645988 - RNA, 21 nt, Artificial Sequence
  Synthetic
ccugcuacucugggagcuccu

SEQ ID NO: 645989 - RNA, 22 nt, Artificial Sequence
  Synthetic
uccugcuacucugggagcuccu

SEQ ID NO: 645990 - RNA, 23 nt, Artificial Sequence
  Synthetic
cuccugcuacucugggagcuccu

SEQ ID NO: 645991 - RNA, 24 nt, Artificial Sequence
  Synthetic
ccuccugcuacucugggagcuccu

SEQ ID NO: 645992 - RNA, 18 nt, Artificial Sequence
  Synthetic
uuuuucaagugagcuccu

SEQ ID NO: 645993 - RNA, 19 nt, Artificial Sequence
  Synthetic
uuuuuucaagugagcuccu

SEQ ID NO: 645994 - RNA, 20 nt, Artificial Sequence
  Synthetic
cuuuuuucaagugagcuccu

SEQ ID NO: 645995 - RNA, 21 nt, Artificial Sequence
  Synthetic
ccuuuuuucaagugagcuccu

SEQ ID NO: 645996 - RNA, 22 nt, Artificial Sequence
  Synthetic
cccuuuuuucaagugagcuccu

SEQ ID NO: 645997 - RNA, 23 nt, Artificial Sequence
  Synthetic
acccuuuuuucaagugagcuccu

SEQ ID NO: 645998 - RNA, 24 nt, Artificial Sequence
  Synthetic
aacccuuuuuucaagugagcuccu

SEQ ID NO: 645999 - RNA, 18 nt, Artificial Sequence
  Synthetic
cccagauguagggcuccu

SEQ ID NO: 646000 - RNA, 19 nt, Artificial Sequence
  Synthetic
gcccagauguagggcuccu

SEQ ID NO: 646001 - RNA, 20 nt, Artificial Sequence
  Synthetic
agcccagauguagggcuccu

SEQ ID NO: 646002 - RNA, 21 nt, Artificial Sequence
  Synthetic
cagcccagauguagggcuccu

SEQ ID NO: 646003 - RNA, 22 nt, Artificial Sequence
  Synthetic
ccagcccagauguagggcuccu

SEQ ID NO: 646004 - RNA, 23 nt, Artificial Sequence
  Synthetic
gccagcccagauguagggcuccu

SEQ ID NO: 646005 - RNA, 24 nt, Artificial Sequence
  Synthetic
agccagcccagauguagggcuccu

SEQ ID NO: 646006 - RNA, 18 nt, Artificial Sequence
  Synthetic
gaaaugugguuggcuccu

SEQ ID NO: 646007 - RNA, 19 nt, Artificial Sequence
  Synthetic
ugaaaugugguuggcuccu

SEQ ID NO: 646008 - RNA, 20 nt, Artificial Sequence
  Synthetic
gugaaaugugguuggcuccu

SEQ ID NO: 646009 - RNA, 21 nt, Artificial Sequence
  Synthetic
ggugaaaugugguuggcuccu

SEQ ID NO: 646010 - RNA, 22 nt, Artificial Sequence
  Synthetic
aggugaaaugugguuggcuccu

SEQ ID NO: 646011 - RNA, 23 nt, Artificial Sequence
  Synthetic
gaggugaaaugugguuggcuccu

SEQ ID NO: 646012 - RNA, 24 nt, Artificial Sequence
  Synthetic
ugaggugaaaugugguuggcuccu

SEQ ID NO: 646013 - RNA, 18 nt, Artificial Sequence
  Synthetic
agcacagugccugcuccu

SEQ ID NO: 646014 - RNA, 19 nt, Artificial Sequence
  Synthetic
cagcacagugccugcuccu

SEQ ID NO: 646015 - RNA, 20 nt, Artificial Sequence
  Synthetic
ccagcacagugccugcuccu

SEQ ID NO: 646016 - RNA, 21 nt, Artificial Sequence
  Synthetic
accagcacagugccugcuccu

SEQ ID NO: 646017 - RNA, 22 nt, Artificial Sequence
  Synthetic
uaccagcacagugccugcuccu

SEQ ID NO: 646018 - RNA, 23 nt, Artificial Sequence
  Synthetic
cuaccagcacagugccugcuccu

SEQ ID NO: 646019 - RNA, 24 nt, Artificial Sequence
  Synthetic
ucuaccagcacagugccugcuccu

SEQ ID NO: 646020 - RNA, 18 nt, Artificial Sequence
  Synthetic
ucggaaugaagugcuccu

SEQ ID NO: 646021 - RNA, 19 nt, Artificial Sequence
  Synthetic
gucggaaugaagugcuccu

SEQ ID NO: 646022 - RNA, 20 nt, Artificial Sequence
  Synthetic
ugucggaaugaagugcuccu

SEQ ID NO: 646023 - RNA, 21 nt, Artificial Sequence
  Synthetic
uugucggaaugaagugcuccu

SEQ ID NO: 646024 - RNA, 22 nt, Artificial Sequence
  Synthetic
cuugucggaaugaagugcuccu

SEQ ID NO: 646025 - RNA, 23 nt, Artificial Sequence
  Synthetic
ucuugucggaaugaagugcuccu

SEQ ID NO: 646026 - RNA, 24 nt, Artificial Sequence
  Synthetic
gucuugucggaaugaagugcuccu

SEQ ID NO: 646027 - RNA, 18 nt, Artificial Sequence
  Synthetic
aauaggguuugugcuccu

SEQ ID NO: 646028 - RNA, 19 nt, Artificial Sequence
  Synthetic
caauaggguuugugcuccu

SEQ ID NO: 646029 - RNA, 20 nt, Artificial Sequence
  Synthetic
acaauaggguuugugcuccu

SEQ ID NO: 646030 - RNA, 21 nt, Artificial Sequence
  Synthetic
cacaauaggguuugugcuccu

SEQ ID NO: 646031 - RNA, 22 nt, Artificial Sequence
  Synthetic
ucacaauaggguuugugcuccu

SEQ ID NO: 646032 - RNA, 23 nt, Artificial Sequence
  Synthetic
uucacaauaggguuugugcuccu

SEQ ID NO: 646033 - RNA, 24 nt, Artificial Sequence
  Synthetic
guucacaauaggguuugugcuccu

SEQ ID NO: 646034 - RNA, 18 nt, Artificial Sequence
  Synthetic
aucuucaagauugcuccu

SEQ ID NO: 646035 - RNA, 19 nt, Artificial Sequence
  Synthetic
uaucuucaagauugcuccu

SEQ ID NO: 646036 - RNA, 20 nt, Artificial Sequence
  Synthetic
auaucuucaagauugcuccu

SEQ ID NO: 646037 - RNA, 21 nt, Artificial Sequence
  Synthetic
uauaucuucaagauugcuccu

SEQ ID NO: 646038 - RNA, 22 nt, Artificial Sequence
  Synthetic
uuauaucuucaagauugcuccu

SEQ ID NO: 646039 - RNA, 23 nt, Artificial Sequence
  Synthetic
uuuauaucuucaagauugcuccu

SEQ ID NO: 646040 - RNA, 24 nt, Artificial Sequence
  Synthetic
auuuauaucuucaagauugcuccu

SEQ ID NO: 646041 - RNA, 18 nt, Artificial Sequence
  Synthetic
gcacaaucacuugcuccu

SEQ ID NO: 646042 - RNA, 19 nt, Artificial Sequence
  Synthetic
ugcacaaucacuugcuccu

SEQ ID NO: 646043 - RNA, 20 nt, Artificial Sequence
  Synthetic
uugcacaaucacuugcuccu

SEQ ID NO: 646044 - RNA, 21 nt, Artificial Sequence
  Synthetic
cuugcacaaucacuugcuccu

SEQ ID NO: 646045 - RNA, 22 nt, Artificial Sequence
  Synthetic
ucuugcacaaucacuugcuccu

SEQ ID NO: 646046 - RNA, 23 nt, Artificial Sequence
  Synthetic
uucuugcacaaucacuugcuccu

SEQ ID NO: 646047 - RNA, 24 nt, Artificial Sequence
  Synthetic
guucuugcacaaucacuugcuccu

SEQ ID NO: 646048 - RNA, 18 nt, Artificial Sequence
  Synthetic
caagcccggacaucuccu

SEQ ID NO: 646049 - RNA, 19 nt, Artificial Sequence
  Synthetic
ucaagcccggacaucuccu

SEQ ID NO: 646050 - RNA, 20 nt, Artificial Sequence
  Synthetic
cucaagcccggacaucuccu

SEQ ID NO: 646051 - RNA, 21 nt, Artificial Sequence
  Synthetic
ucucaagcccggacaucuccu

SEQ ID NO: 646052 - RNA, 22 nt, Artificial Sequence
  Synthetic
aucucaagcccggacaucuccu

SEQ ID NO: 646053 - RNA, 23 nt, Artificial Sequence
  Synthetic
uaucucaagcccggacaucuccu

SEQ ID NO: 646054 - RNA, 24 nt, Artificial Sequence
  Synthetic
guaucucaagcccggacaucuccu

SEQ ID NO: 646055 - RNA, 18 nt, Artificial Sequence
  Synthetic
cagcccagcucaucuccu

SEQ ID NO: 646056 - RNA, 19 nt, Artificial Sequence
  Synthetic
gcagcccagcucaucuccu

SEQ ID NO: 646057 - RNA, 20 nt, Artificial Sequence
  Synthetic
ugcagcccagcucaucuccu

SEQ ID NO: 646058 - RNA, 21 nt, Artificial Sequence
  Synthetic
uugcagcccagcucaucuccu

SEQ ID NO: 646059 - RNA, 22 nt, Artificial Sequence
  Synthetic
auugcagcccagcucaucuccu

SEQ ID NO: 646060 - RNA, 23 nt, Artificial Sequence
  Synthetic
aauugcagcccagcucaucuccu

SEQ ID NO: 646061 - RNA, 24 nt, Artificial Sequence
  Synthetic
aaauugcagcccagcucaucuccu

SEQ ID NO: 646062 - RNA, 18 nt, Artificial Sequence
  Synthetic
cugaaaauauuaucuccu

SEQ ID NO: 646063 - RNA, 19 nt, Artificial Sequence
  Synthetic
ucugaaaauauuaucuccu

SEQ ID NO: 646064 - RNA, 20 nt, Artificial Sequence
  Synthetic
aucugaaaauauuaucuccu

SEQ ID NO: 646065 - RNA, 21 nt, Artificial Sequence
  Synthetic
aaucugaaaauauuaucuccu

SEQ ID NO: 646066 - RNA, 22 nt, Artificial Sequence
  Synthetic
uaaucugaaaauauuaucuccu

SEQ ID NO: 646067 - RNA, 23 nt, Artificial Sequence
  Synthetic
guaaucugaaaauauuaucuccu

SEQ ID NO: 646068 - RNA, 24 nt, Artificial Sequence
  Synthetic
gguaaucugaaaauauuaucuccu

SEQ ID NO: 646069 - RNA, 18 nt, Artificial Sequence
  Synthetic
aauucuucagacucuccu

SEQ ID NO: 646070 - RNA, 19 nt, Artificial Sequence
  Synthetic
caauucuucagacucuccu

SEQ ID NO: 646071 - RNA, 20 nt, Artificial Sequence
  Synthetic
ccaauucuucagacucuccu

SEQ ID NO: 646072 - RNA, 21 nt, Artificial Sequence
  Synthetic
gccaauucuucagacucuccu

SEQ ID NO: 646073 - RNA, 22 nt, Artificial Sequence
  Synthetic
ugccaauucuucagacucuccu

SEQ ID NO: 646074 - RNA, 23 nt, Artificial Sequence
  Synthetic
augccaauucuucagacucuccu

SEQ ID NO: 646075 - RNA, 24 nt, Artificial Sequence
  Synthetic
uaugccaauucuucagacucuccu

SEQ ID NO: 646076 - RNA, 18 nt, Artificial Sequence
  Synthetic
ccucuccaggacucuccu

SEQ ID NO: 646077 - RNA, 19 nt, Artificial Sequence
  Synthetic
cccucuccaggacucuccu

SEQ ID NO: 646078 - RNA, 20 nt, Artificial Sequence
  Synthetic
gcccucuccaggacucuccu

SEQ ID NO: 646079 - RNA, 21 nt, Artificial Sequence
  Synthetic
agcccucuccaggacucuccu

SEQ ID NO: 646080 - RNA, 22 nt, Artificial Sequence
  Synthetic
cagcccucuccaggacucuccu

SEQ ID NO: 646081 - RNA, 23 nt, Artificial Sequence
  Synthetic
acagcccucuccaggacucuccu

SEQ ID NO: 646082 - RNA, 24 nt, Artificial Sequence
  Synthetic
gacagcccucuccaggacucuccu

SEQ ID NO: 646083 - RNA, 18 nt, Artificial Sequence
  Synthetic
cuauaagcccucucuccu

SEQ ID NO: 646084 - RNA, 19 nt, Artificial Sequence
  Synthetic
gcuauaagcccucucuccu

SEQ ID NO: 646085 - RNA, 20 nt, Artificial Sequence
  Synthetic
ugcuauaagcccucucuccu

SEQ ID NO: 646086 - RNA, 21 nt, Artificial Sequence
  Synthetic
cugcuauaagcccucucuccu

SEQ ID NO: 646087 - RNA, 22 nt, Artificial Sequence
  Synthetic
acugcuauaagcccucucuccu

SEQ ID NO: 646088 - RNA, 23 nt, Artificial Sequence
  Synthetic
aacugcuauaagcccucucuccu

SEQ ID NO: 646089 - RNA, 24 nt, Artificial Sequence
  Synthetic
uaacugcuauaagcccucucuccu

SEQ ID NO: 646090 - RNA, 18 nt, Artificial Sequence
  Synthetic
cauucugggcucucuccu

SEQ ID NO: 646091 - RNA, 19 nt, Artificial Sequence
  Synthetic
acauucugggcucucuccu

SEQ ID NO: 646092 - RNA, 20 nt, Artificial Sequence
  Synthetic
gacauucugggcucucuccu

SEQ ID NO: 646093 - RNA, 21 nt, Artificial Sequence
  Synthetic
ugacauucugggcucucuccu

SEQ ID NO: 646094 - RNA, 22 nt, Artificial Sequence
  Synthetic
gugacauucugggcucucuccu

SEQ ID NO: 646095 - RNA, 23 nt, Artificial Sequence
  Synthetic
agugacauucugggcucucuccu

SEQ ID NO: 646096 - RNA, 24 nt, Artificial Sequence
  Synthetic
gagugacauucugggcucucuccu

SEQ ID NO: 646097 - RNA, 18 nt, Artificial Sequence
  Synthetic
cauuaccaaaugucuccu

SEQ ID NO: 646098 - RNA, 19 nt, Artificial Sequence
  Synthetic
acauuaccaaaugucuccu

SEQ ID NO: 646099 - RNA, 20 nt, Artificial Sequence
  Synthetic
gacauuaccaaaugucuccu

SEQ ID NO: 646100 - RNA, 21 nt, Artificial Sequence
  Synthetic
ugacauuaccaaaugucuccu

SEQ ID NO: 646101 - RNA, 22 nt, Artificial Sequence
  Synthetic
cugacauuaccaaaugucuccu

SEQ ID NO: 646102 - RNA, 23 nt, Artificial Sequence
  Synthetic
ccugacauuaccaaaugucuccu

SEQ ID NO: 646103 - RNA, 24 nt, Artificial Sequence
  Synthetic
uccugacauuaccaaaugucuccu

SEQ ID NO: 646104 - RNA, 18 nt, Artificial Sequence
  Synthetic
uuuuguuuucugucuccu

SEQ ID NO: 646105 - RNA, 19 nt, Artificial Sequence
  Synthetic
auuuuguuuucugucuccu

SEQ ID NO: 646106 - RNA, 20 nt, Artificial Sequence
  Synthetic
uauuuuguuuucugucuccu

SEQ ID NO: 646107 - RNA, 21 nt, Artificial Sequence
  Synthetic
uuauuuuguuuucugucuccu

SEQ ID NO: 646108 - RNA, 22 nt, Artificial Sequence
  Synthetic
guuauuuuguuuucugucuccu

SEQ ID NO: 646109 - RNA, 23 nt, Artificial Sequence
  Synthetic
aguuauuuuguuuucugucuccu

SEQ ID NO: 646110 - RNA, 24 nt, Artificial Sequence
  Synthetic
uaguuauuuuguuuucugucuccu

SEQ ID NO: 646111 - RNA, 18 nt, Artificial Sequence
  Synthetic
uuccucuuucauucuccu

SEQ ID NO: 646112 - RNA, 19 nt, Artificial Sequence
  Synthetic
guuccucuuucauucuccu

SEQ ID NO: 646113 - RNA, 20 nt, Artificial Sequence
  Synthetic
uguuccucuuucauucuccu

SEQ ID NO: 646114 - RNA, 21 nt, Artificial Sequence
  Synthetic
uuguuccucuuucauucuccu

SEQ ID NO: 646115 - RNA, 22 nt, Artificial Sequence
  Synthetic
uuuguuccucuuucauucuccu

SEQ ID NO: 646116 - RNA, 23 nt, Artificial Sequence
  Synthetic
auuuguuccucuuucauucuccu

SEQ ID NO: 646117 - RNA, 24 nt, Artificial Sequence
  Synthetic
uauuuguuccucuuucauucuccu

SEQ ID NO: 646118 - RNA, 18 nt, Artificial Sequence
  Synthetic
cccuuuucauauucuccu

SEQ ID NO: 646119 - RNA, 19 nt, Artificial Sequence
  Synthetic
ucccuuuucauauucuccu

SEQ ID NO: 646120 - RNA, 20 nt, Artificial Sequence
  Synthetic
cucccuuuucauauucuccu

SEQ ID NO: 646121 - RNA, 21 nt, Artificial Sequence
  Synthetic
ccucccuuuucauauucuccu

SEQ ID NO: 646122 - RNA, 22 nt, Artificial Sequence
  Synthetic
cccucccuuuucauauucuccu

SEQ ID NO: 646123 - RNA, 23 nt, Artificial Sequence
  Synthetic
acccucccuuuucauauucuccu

SEQ ID NO: 646124 - RNA, 24 nt, Artificial Sequence
  Synthetic
uacccucccuuuucauauucuccu

SEQ ID NO: 646125 - RNA, 18 nt, Artificial Sequence
  Synthetic
auuuauucuacuucuccu

SEQ ID NO: 646126 - RNA, 19 nt, Artificial Sequence
  Synthetic
uauuuauucuacuucuccu

SEQ ID NO: 646127 - RNA, 20 nt, Artificial Sequence
  Synthetic
auauuuauucuacuucuccu

SEQ ID NO: 646128 - RNA, 21 nt, Artificial Sequence
  Synthetic
gauauuuauucuacuucuccu

SEQ ID NO: 646129 - RNA, 22 nt, Artificial Sequence
  Synthetic
ugauauuuauucuacuucuccu

SEQ ID NO: 646130 - RNA, 23 nt, Artificial Sequence
  Synthetic
uugauauuuauucuacuucuccu

SEQ ID NO: 646131 - RNA, 24 nt, Artificial Sequence
  Synthetic
guugauauuuauucuacuucuccu

SEQ ID NO: 646132 - RNA, 18 nt, Artificial Sequence
  Synthetic
ccaauacaggcuucuccu

SEQ ID NO: 646133 - RNA, 19 nt, Artificial Sequence
  Synthetic
uccaauacaggcuucuccu

SEQ ID NO: 646134 - RNA, 20 nt, Artificial Sequence
  Synthetic
cuccaauacaggcuucuccu

SEQ ID NO: 646135 - RNA, 21 nt, Artificial Sequence
  Synthetic
acuccaauacaggcuucuccu

SEQ ID NO: 646136 - RNA, 22 nt, Artificial Sequence
  Synthetic
aacuccaauacaggcuucuccu

SEQ ID NO: 646137 - RNA, 23 nt, Artificial Sequence
  Synthetic
uaacuccaauacaggcuucuccu

SEQ ID NO: 646138 - RNA, 24 nt, Artificial Sequence
  Synthetic
cuaacuccaauacaggcuucuccu

SEQ ID NO: 646139 - RNA, 18 nt, Artificial Sequence
  Synthetic
uuuuauugcaguucuccu

SEQ ID NO: 646140 - RNA, 19 nt, Artificial Sequence
  Synthetic
guuuuauugcaguucuccu

SEQ ID NO: 646141 - RNA, 20 nt, Artificial Sequence
  Synthetic
uguuuuauugcaguucuccu

SEQ ID NO: 646142 - RNA, 21 nt, Artificial Sequence
  Synthetic
auguuuuauugcaguucuccu

SEQ ID NO: 646143 - RNA, 22 nt, Artificial Sequence
  Synthetic
gauguuuuauugcaguucuccu

SEQ ID NO: 646144 - RNA, 23 nt, Artificial Sequence
  Synthetic
ugauguuuuauugcaguucuccu

SEQ ID NO: 646145 - RNA, 24 nt, Artificial Sequence
  Synthetic
cugauguuuuauugcaguucuccu

SEQ ID NO: 646146 - RNA, 18 nt, Artificial Sequence
  Synthetic
uauuuccugcuuucuccu

SEQ ID NO: 646147 - RNA, 19 nt, Artificial Sequence
  Synthetic
auauuuccugcuuucuccu

SEQ ID NO: 646148 - RNA, 20 nt, Artificial Sequence
  Synthetic
gauauuuccugcuuucuccu

SEQ ID NO: 646149 - RNA, 21 nt, Artificial Sequence
  Synthetic
agauauuuccugcuuucuccu

SEQ ID NO: 646150 - RNA, 22 nt, Artificial Sequence
  Synthetic
uagauauuuccugcuuucuccu

SEQ ID NO: 646151 - RNA, 23 nt, Artificial Sequence
  Synthetic
uuagauauuuccugcuuucuccu

SEQ ID NO: 646152 - RNA, 24 nt, Artificial Sequence
  Synthetic
uuuagauauuuccugcuuucuccu

SEQ ID NO: 646153 - RNA, 18 nt, Artificial Sequence
  Synthetic
gcuaucuugcuuucuccu

SEQ ID NO: 646154 - RNA, 19 nt, Artificial Sequence
  Synthetic
agcuaucuugcuuucuccu

SEQ ID NO: 646155 - RNA, 20 nt, Artificial Sequence
  Synthetic
aagcuaucuugcuuucuccu

SEQ ID NO: 646156 - RNA, 21 nt, Artificial Sequence
  Synthetic
aaagcuaucuugcuuucuccu

SEQ ID NO: 646157 - RNA, 22 nt, Artificial Sequence
  Synthetic
aaaagcuaucuugcuuucuccu

SEQ ID NO: 646158 - RNA, 23 nt, Artificial Sequence
  Synthetic
gaaaagcuaucuugcuuucuccu

SEQ ID NO: 646159 - RNA, 24 nt, Artificial Sequence
  Synthetic
agaaaagcuaucuugcuuucuccu

SEQ ID NO: 646160 - RNA, 18 nt, Artificial Sequence
  Synthetic
cuuuaaaaucuuucuccu

SEQ ID NO: 646161 - RNA, 19 nt, Artificial Sequence
  Synthetic
acuuuaaaaucuuucuccu

SEQ ID NO: 646162 - RNA, 20 nt, Artificial Sequence
  Synthetic
aacuuuaaaaucuuucuccu

SEQ ID NO: 646163 - RNA, 21 nt, Artificial Sequence
  Synthetic
gaacuuuaaaaucuuucuccu

SEQ ID NO: 646164 - RNA, 22 nt, Artificial Sequence
  Synthetic
ugaacuuuaaaaucuuucuccu

SEQ ID NO: 646165 - RNA, 23 nt, Artificial Sequence
  Synthetic
cugaacuuuaaaaucuuucuccu

SEQ ID NO: 646166 - RNA, 24 nt, Artificial Sequence
  Synthetic
gcugaacuuuaaaaucuuucuccu

SEQ ID NO: 646167 - RNA, 18 nt, Artificial Sequence
  Synthetic
ggcuguuauuaaaguccu

SEQ ID NO: 646168 - RNA, 19 nt, Artificial Sequence
  Synthetic
cggcuguuauuaaaguccu

SEQ ID NO: 646169 - RNA, 20 nt, Artificial Sequence
  Synthetic
acggcuguuauuaaaguccu

SEQ ID NO: 646170 - RNA, 21 nt, Artificial Sequence
  Synthetic
aacggcuguuauuaaaguccu

SEQ ID NO: 646171 - RNA, 22 nt, Artificial Sequence
  Synthetic
aaacggcuguuauuaaaguccu

SEQ ID NO: 646172 - RNA, 23 nt, Artificial Sequence
  Synthetic
aaaacggcuguuauuaaaguccu

SEQ ID NO: 646173 - RNA, 24 nt, Artificial Sequence
  Synthetic
aaaaacggcuguuauuaaaguccu

SEQ ID NO: 646174 - RNA, 18 nt, Artificial Sequence
  Synthetic
caaugggcuggaaguccu

SEQ ID NO: 646175 - RNA, 19 nt, Artificial Sequence
  Synthetic
ucaaugggcuggaaguccu

SEQ ID NO: 646176 - RNA, 20 nt, Artificial Sequence
  Synthetic
aucaaugggcuggaaguccu

SEQ ID NO: 646177 - RNA, 21 nt, Artificial Sequence
  Synthetic
aaucaaugggcuggaaguccu

SEQ ID NO: 646178 - RNA, 22 nt, Artificial Sequence
  Synthetic
uaaucaaugggcuggaaguccu

SEQ ID NO: 646179 - RNA, 23 nt, Artificial Sequence
  Synthetic
guaaucaaugggcuggaaguccu

SEQ ID NO: 646180 - RNA, 24 nt, Artificial Sequence
  Synthetic
aguaaucaaugggcuggaaguccu

SEQ ID NO: 646181 - RNA, 18 nt, Artificial Sequence
  Synthetic
uuaggcaguaacaguccu

SEQ ID NO: 646182 - RNA, 19 nt, Artificial Sequence
  Synthetic
cuuaggcaguaacaguccu

SEQ ID NO: 646183 - RNA, 20 nt, Artificial Sequence
  Synthetic
ccuuaggcaguaacaguccu

SEQ ID NO: 646184 - RNA, 21 nt, Artificial Sequence
  Synthetic
gccuuaggcaguaacaguccu

SEQ ID NO: 646185 - RNA, 22 nt, Artificial Sequence
  Synthetic
ugccuuaggcaguaacaguccu

SEQ ID NO: 646186 - RNA, 23 nt, Artificial Sequence
  Synthetic
uugccuuaggcaguaacaguccu

SEQ ID NO: 646187 - RNA, 24 nt, Artificial Sequence
  Synthetic
auugccuuaggcaguaacaguccu

SEQ ID NO: 646188 - RNA, 18 nt, Artificial Sequence
  Synthetic
aaauagguuggcaguccu

SEQ ID NO: 646189 - RNA, 19 nt, Artificial Sequence
  Synthetic
uaaauagguuggcaguccu

SEQ ID NO: 646190 - RNA, 20 nt, Artificial Sequence
  Synthetic
auaaauagguuggcaguccu

SEQ ID NO: 646191 - RNA, 21 nt, Artificial Sequence
  Synthetic
aauaaauagguuggcaguccu

SEQ ID NO: 646192 - RNA, 22 nt, Artificial Sequence
  Synthetic
caauaaauagguuggcaguccu

SEQ ID NO: 646193 - RNA, 23 nt, Artificial Sequence
  Synthetic
acaauaaauagguuggcaguccu

SEQ ID NO: 646194 - RNA, 24 nt, Artificial Sequence
  Synthetic
uacaauaaauagguuggcaguccu

SEQ ID NO: 646195 - RNA, 18 nt, Artificial Sequence
  Synthetic
agaauaaagaagaguccu

SEQ ID NO: 646196 - RNA, 19 nt, Artificial Sequence
  Synthetic
gagaauaaagaagaguccu

SEQ ID NO: 646197 - RNA, 20 nt, Artificial Sequence
  Synthetic
ugagaauaaagaagaguccu

SEQ ID NO: 646198 - RNA, 21 nt, Artificial Sequence
  Synthetic
uugagaauaaagaagaguccu

SEQ ID NO: 646199 - RNA, 22 nt, Artificial Sequence
  Synthetic
uuugagaauaaagaagaguccu

SEQ ID NO: 646200 - RNA, 23 nt, Artificial Sequence
  Synthetic
cuuugagaauaaagaagaguccu

SEQ ID NO: 646201 - RNA, 24 nt, Artificial Sequence
  Synthetic
ucuuugagaauaaagaagaguccu

SEQ ID NO: 646202 - RNA, 18 nt, Artificial Sequence
  Synthetic
aaauuuguugagaguccu

SEQ ID NO: 646203 - RNA, 19 nt, Artificial Sequence
  Synthetic
caaauuuguugagaguccu

SEQ ID NO: 646204 - RNA, 20 nt, Artificial Sequence
  Synthetic
gcaaauuuguugagaguccu

SEQ ID NO: 646205 - RNA, 21 nt, Artificial Sequence
  Synthetic
agcaaauuuguugagaguccu

SEQ ID NO: 646206 - RNA, 22 nt, Artificial Sequence
  Synthetic
aagcaaauuuguugagaguccu

SEQ ID NO: 646207 - RNA, 23 nt, Artificial Sequence
  Synthetic
aaagcaaauuuguugagaguccu

SEQ ID NO: 646208 - RNA, 24 nt, Artificial Sequence
  Synthetic
caaagcaaauuuguugagaguccu

SEQ ID NO: 646209 - RNA, 18 nt, Artificial Sequence
  Synthetic
augauggacaugaguccu

SEQ ID NO: 646210 - RNA, 19 nt, Artificial Sequence
  Synthetic
gaugauggacaugaguccu

SEQ ID NO: 646211 - RNA, 20 nt, Artificial Sequence
  Synthetic
cgaugauggacaugaguccu

SEQ ID NO: 646212 - RNA, 21 nt, Artificial Sequence
  Synthetic
acgaugauggacaugaguccu

SEQ ID NO: 646213 - RNA, 22 nt, Artificial Sequence
  Synthetic
gacgaugauggacaugaguccu

SEQ ID NO: 646214 - RNA, 23 nt, Artificial Sequence
  Synthetic
ggacgaugauggacaugaguccu

SEQ ID NO: 646215 - RNA, 24 nt, Artificial Sequence
  Synthetic
uggacgaugauggacaugaguccu

SEQ ID NO: 646216 - RNA, 18 nt, Artificial Sequence
  Synthetic
caaaaugaggcuaguccu

SEQ ID NO: 646217 - RNA, 19 nt, Artificial Sequence
  Synthetic
ccaaaaugaggcuaguccu

SEQ ID NO: 646218 - RNA, 20 nt, Artificial Sequence
  Synthetic
uccaaaaugaggcuaguccu

SEQ ID NO: 646219 - RNA, 21 nt, Artificial Sequence
  Synthetic
cuccaaaaugaggcuaguccu

SEQ ID NO: 646220 - RNA, 22 nt, Artificial Sequence
  Synthetic
ccuccaaaaugaggcuaguccu

SEQ ID NO: 646221 - RNA, 23 nt, Artificial Sequence
  Synthetic
gccuccaaaaugaggcuaguccu

SEQ ID NO: 646222 - RNA, 24 nt, Artificial Sequence
  Synthetic
agccuccaaaaugaggcuaguccu

SEQ ID NO: 646223 - RNA, 18 nt, Artificial Sequence
  Synthetic
auaacccccacacguccu

SEQ ID NO: 646224 - RNA, 19 nt, Artificial Sequence
  Synthetic
cauaacccccacacguccu

SEQ ID NO: 646225 - RNA, 20 nt, Artificial Sequence
  Synthetic
ccauaacccccacacguccu

SEQ ID NO: 646226 - RNA, 21 nt, Artificial Sequence
  Synthetic
cccauaacccccacacguccu

SEQ ID NO: 646227 - RNA, 22 nt, Artificial Sequence
  Synthetic
ucccauaacccccacacguccu

SEQ ID NO: 646228 - RNA, 23 nt, Artificial Sequence
  Synthetic
uucccauaacccccacacguccu

SEQ ID NO: 646229 - RNA, 24 nt, Artificial Sequence
  Synthetic
guucccauaacccccacacguccu

SEQ ID NO: 646230 - RNA, 18 nt, Artificial Sequence
  Synthetic
aguaaaugucaagguccu

SEQ ID NO: 646231 - RNA, 19 nt, Artificial Sequence
  Synthetic
gaguaaaugucaagguccu

SEQ ID NO: 646232 - RNA, 20 nt, Artificial Sequence
  Synthetic
ugaguaaaugucaagguccu

SEQ ID NO: 646233 - RNA, 21 nt, Artificial Sequence
  Synthetic
gugaguaaaugucaagguccu

SEQ ID NO: 646234 - RNA, 22 nt, Artificial Sequence
  Synthetic
agugaguaaaugucaagguccu

SEQ ID NO: 646235 - RNA, 23 nt, Artificial Sequence
  Synthetic
aagugaguaaaugucaagguccu

SEQ ID NO: 646236 - RNA, 24 nt, Artificial Sequence
  Synthetic
aaagugaguaaaugucaagguccu

SEQ ID NO: 646237 - RNA, 18 nt, Artificial Sequence
  Synthetic
guucauuggagagguccu

SEQ ID NO: 646238 - RNA, 19 nt, Artificial Sequence
  Synthetic
uguucauuggagagguccu

SEQ ID NO: 646239 - RNA, 20 nt, Artificial Sequence
  Synthetic
cuguucauuggagagguccu

SEQ ID NO: 646240 - RNA, 21 nt, Artificial Sequence
  Synthetic
ccuguucauuggagagguccu

SEQ ID NO: 646241 - RNA, 22 nt, Artificial Sequence
  Synthetic
uccuguucauuggagagguccu

SEQ ID NO: 646242 - RNA, 23 nt, Artificial Sequence
  Synthetic
auccuguucauuggagagguccu

SEQ ID NO: 646243 - RNA, 24 nt, Artificial Sequence
  Synthetic
uauccuguucauuggagagguccu

SEQ ID NO: 646244 - RNA, 18 nt, Artificial Sequence
  Synthetic
ugaacaucuugagguccu

SEQ ID NO: 646245 - RNA, 19 nt, Artificial Sequence
  Synthetic
uugaacaucuugagguccu

SEQ ID NO: 646246 - RNA, 20 nt, Artificial Sequence
  Synthetic
cuugaacaucuugagguccu

SEQ ID NO: 646247 - RNA, 21 nt, Artificial Sequence
  Synthetic
gcuugaacaucuugagguccu

SEQ ID NO: 646248 - RNA, 22 nt, Artificial Sequence
  Synthetic
ugcuugaacaucuugagguccu

SEQ ID NO: 646249 - RNA, 23 nt, Artificial Sequence
  Synthetic
augcuugaacaucuugagguccu

SEQ ID NO: 646250 - RNA, 24 nt, Artificial Sequence
  Synthetic
gaugcuugaacaucuugagguccu

SEQ ID NO: 646251 - RNA, 18 nt, Artificial Sequence
  Synthetic
agaaaccucaacgguccu

SEQ ID NO: 646252 - RNA, 19 nt, Artificial Sequence
  Synthetic
aagaaaccucaacgguccu

SEQ ID NO: 646253 - RNA, 20 nt, Artificial Sequence
  Synthetic
caagaaaccucaacgguccu

SEQ ID NO: 646254 - RNA, 21 nt, Artificial Sequence
  Synthetic
ccaagaaaccucaacgguccu

SEQ ID NO: 646255 - RNA, 22 nt, Artificial Sequence
  Synthetic
uccaagaaaccucaacgguccu

SEQ ID NO: 646256 - RNA, 23 nt, Artificial Sequence
  Synthetic
auccaagaaaccucaacgguccu

SEQ ID NO: 646257 - RNA, 24 nt, Artificial Sequence
  Synthetic
uauccaagaaaccucaacgguccu

SEQ ID NO: 646258 - RNA, 18 nt, Artificial Sequence
  Synthetic
auuucuuucaaugguccu

SEQ ID NO: 646259 - RNA, 19 nt, Artificial Sequence
  Synthetic
aauuucuuucaaugguccu

SEQ ID NO: 646260 - RNA, 20 nt, Artificial Sequence
  Synthetic
gaauuucuuucaaugguccu

SEQ ID NO: 646261 - RNA, 21 nt, Artificial Sequence
  Synthetic
agaauuucuuucaaugguccu

SEQ ID NO: 646262 - RNA, 22 nt, Artificial Sequence
  Synthetic
gagaauuucuuucaaugguccu

SEQ ID NO: 646263 - RNA, 23 nt, Artificial Sequence
  Synthetic
ugagaauuucuuucaaugguccu

SEQ ID NO: 646264 - RNA, 24 nt, Artificial Sequence
  Synthetic
uugagaauuucuuucaaugguccu

SEQ ID NO: 646265 - RNA, 18 nt, Artificial Sequence
  Synthetic
ucaagccuuucugguccu

SEQ ID NO: 646266 - RNA, 19 nt, Artificial Sequence
  Synthetic
cucaagccuuucugguccu

SEQ ID NO: 646267 - RNA, 20 nt, Artificial Sequence
  Synthetic
ucucaagccuuucugguccu

SEQ ID NO: 646268 - RNA, 21 nt, Artificial Sequence
  Synthetic
uucucaagccuuucugguccu

SEQ ID NO: 646269 - RNA, 22 nt, Artificial Sequence
  Synthetic
uuucucaagccuuucugguccu

SEQ ID NO: 646270 - RNA, 23 nt, Artificial Sequence
  Synthetic
cuuucucaagccuuucugguccu

SEQ ID NO: 646271 - RNA, 24 nt, Artificial Sequence
  Synthetic
ucuuucucaagccuuucugguccu

SEQ ID NO: 646272 - RNA, 18 nt, Artificial Sequence
  Synthetic
aagagacucaaauguccu

SEQ ID NO: 646273 - RNA, 19 nt, Artificial Sequence
  Synthetic
aaagagacucaaauguccu

SEQ ID NO: 646274 - RNA, 20 nt, Artificial Sequence
  Synthetic
gaaagagacucaaauguccu

SEQ ID NO: 646275 - RNA, 21 nt, Artificial Sequence
  Synthetic
ggaaagagacucaaauguccu

SEQ ID NO: 646276 - RNA, 22 nt, Artificial Sequence
  Synthetic
aggaaagagacucaaauguccu

SEQ ID NO: 646277 - RNA, 23 nt, Artificial Sequence
  Synthetic
caggaaagagacucaaauguccu

SEQ ID NO: 646278 - RNA, 24 nt, Artificial Sequence
  Synthetic
ucaggaaagagacucaaauguccu

SEQ ID NO: 646279 - RNA, 18 nt, Artificial Sequence
  Synthetic
cuacauggagaauguccu

SEQ ID NO: 646280 - RNA, 19 nt, Artificial Sequence
  Synthetic
acuacauggagaauguccu

SEQ ID NO: 646281 - RNA, 20 nt, Artificial Sequence
  Synthetic
uacuacauggagaauguccu

SEQ ID NO: 646282 - RNA, 21 nt, Artificial Sequence
  Synthetic
auacuacauggagaauguccu

SEQ ID NO: 646283 - RNA, 22 nt, Artificial Sequence
  Synthetic
uauacuacauggagaauguccu

SEQ ID NO: 646284 - RNA, 23 nt, Artificial Sequence
  Synthetic
auauacuacauggagaauguccu

SEQ ID NO: 646285 - RNA, 24 nt, Artificial Sequence
  Synthetic
cauauacuacauggagaauguccu

SEQ ID NO: 646286 - RNA, 18 nt, Artificial Sequence
  Synthetic
uacaagggcuaauguccu

SEQ ID NO: 646287 - RNA, 19 nt, Artificial Sequence
  Synthetic
auacaagggcuaauguccu

SEQ ID NO: 646288 - RNA, 20 nt, Artificial Sequence
  Synthetic
uauacaagggcuaauguccu

SEQ ID NO: 646289 - RNA, 21 nt, Artificial Sequence
  Synthetic
auauacaagggcuaauguccu

SEQ ID NO: 646290 - RNA, 22 nt, Artificial Sequence
  Synthetic
uauauacaagggcuaauguccu

SEQ ID NO: 646291 - RNA, 23 nt, Artificial Sequence
  Synthetic
uuauauacaagggcuaauguccu

SEQ ID NO: 646292 - RNA, 24 nt, Artificial Sequence
  Synthetic
uuuauauacaagggcuaauguccu

SEQ ID NO: 646293 - RNA, 18 nt, Artificial Sequence
  Synthetic
augaguuguuuauguccu

SEQ ID NO: 646294 - RNA, 19 nt, Artificial Sequence
  Synthetic
gaugaguuguuuauguccu

SEQ ID NO: 646295 - RNA, 20 nt, Artificial Sequence
  Synthetic
ggaugaguuguuuauguccu

SEQ ID NO: 646296 - RNA, 21 nt, Artificial Sequence
  Synthetic
aggaugaguuguuuauguccu

SEQ ID NO: 646297 - RNA, 22 nt, Artificial Sequence
  Synthetic
aaggaugaguuguuuauguccu

SEQ ID NO: 646298 - RNA, 23 nt, Artificial Sequence
  Synthetic
aaaggaugaguuguuuauguccu

SEQ ID NO: 646299 - RNA, 24 nt, Artificial Sequence
  Synthetic
aaaaggaugaguuguuuauguccu

SEQ ID NO: 646300 - RNA, 18 nt, Artificial Sequence
  Synthetic
aauaauaaaaccuguccu

SEQ ID NO: 646301 - RNA, 19 nt, Artificial Sequence
  Synthetic
uaauaauaaaaccuguccu

SEQ ID NO: 646302 - RNA, 20 nt, Artificial Sequence
  Synthetic
auaauaauaaaaccuguccu

SEQ ID NO: 646303 - RNA, 21 nt, Artificial Sequence
  Synthetic
uauaauaauaaaaccuguccu

SEQ ID NO: 646304 - RNA, 22 nt, Artificial Sequence
  Synthetic
guauaauaauaaaaccuguccu

SEQ ID NO: 646305 - RNA, 23 nt, Artificial Sequence
  Synthetic
aguauaauaauaaaaccuguccu

SEQ ID NO: 646306 - RNA, 24 nt, Artificial Sequence
  Synthetic
aaguauaauaauaaaaccuguccu

SEQ ID NO: 646307 - RNA, 18 nt, Artificial Sequence
  Synthetic
gccaggauaaccuguccu

SEQ ID NO: 646308 - RNA, 19 nt, Artificial Sequence
  Synthetic
agccaggauaaccuguccu

SEQ ID NO: 646309 - RNA, 20 nt, Artificial Sequence
  Synthetic
gagccaggauaaccuguccu

SEQ ID NO: 646310 - RNA, 21 nt, Artificial Sequence
  Synthetic
ggagccaggauaaccuguccu

SEQ ID NO: 646311 - RNA, 22 nt, Artificial Sequence
  Synthetic
aggagccaggauaaccuguccu

SEQ ID NO: 646312 - RNA, 23 nt, Artificial Sequence
  Synthetic
uaggagccaggauaaccuguccu

SEQ ID NO: 646313 - RNA, 24 nt, Artificial Sequence
  Synthetic
auaggagccaggauaaccuguccu

SEQ ID NO: 646314 - RNA, 18 nt, Artificial Sequence
  Synthetic
aagacauugcccuguccu

SEQ ID NO: 646315 - RNA, 19 nt, Artificial Sequence
  Synthetic
aaagacauugcccuguccu

SEQ ID NO: 646316 - RNA, 20 nt, Artificial Sequence
  Synthetic
caaagacauugcccuguccu

SEQ ID NO: 646317 - RNA, 21 nt, Artificial Sequence
  Synthetic
acaaagacauugcccuguccu

SEQ ID NO: 646318 - RNA, 22 nt, Artificial Sequence
  Synthetic
uacaaagacauugcccuguccu

SEQ ID NO: 646319 - RNA, 23 nt, Artificial Sequence
  Synthetic
uuacaaagacauugcccuguccu

SEQ ID NO: 646320 - RNA, 24 nt, Artificial Sequence
  Synthetic
uuuacaaagacauugcccuguccu

SEQ ID NO: 646321 - RNA, 18 nt, Artificial Sequence
  Synthetic
agacagucagccuguccu

SEQ ID NO: 646322 - RNA, 19 nt, Artificial Sequence
  Synthetic
aagacagucagccuguccu

SEQ ID NO: 646323 - RNA, 20 nt, Artificial Sequence
  Synthetic
caagacagucagccuguccu

SEQ ID NO: 646324 - RNA, 21 nt, Artificial Sequence
  Synthetic
acaagacagucagccuguccu

SEQ ID NO: 646325 - RNA, 22 nt, Artificial Sequence
  Synthetic
cacaagacagucagccuguccu

SEQ ID NO: 646326 - RNA, 23 nt, Artificial Sequence
  Synthetic
ucacaagacagucagccuguccu

SEQ ID NO: 646327 - RNA, 24 nt, Artificial Sequence
  Synthetic
cucacaagacagucagccuguccu

SEQ ID NO: 646328 - RNA, 18 nt, Artificial Sequence
  Synthetic
uaaaugguaggcuguccu

SEQ ID NO: 646329 - RNA, 19 nt, Artificial Sequence
  Synthetic
cuaaaugguaggcuguccu

SEQ ID NO: 646330 - RNA, 20 nt, Artificial Sequence
  Synthetic
ccuaaaugguaggcuguccu

SEQ ID NO: 646331 - RNA, 21 nt, Artificial Sequence
  Synthetic
gccuaaaugguaggcuguccu

SEQ ID NO: 646332 - RNA, 22 nt, Artificial Sequence
  Synthetic
agccuaaaugguaggcuguccu

SEQ ID NO: 646333 - RNA, 23 nt, Artificial Sequence
  Synthetic
cagccuaaaugguaggcuguccu

SEQ ID NO: 646334 - RNA, 24 nt, Artificial Sequence
  Synthetic
ucagccuaaaugguaggcuguccu

SEQ ID NO: 646335 - RNA, 18 nt, Artificial Sequence
  Synthetic
uuaaaauaaaaaauuccu

SEQ ID NO: 646336 - RNA, 19 nt, Artificial Sequence
  Synthetic
auuaaaauaaaaaauuccu

SEQ ID NO: 646337 - RNA, 20 nt, Artificial Sequence
  Synthetic
aauuaaaauaaaaaauuccu

SEQ ID NO: 646338 - RNA, 21 nt, Artificial Sequence
  Synthetic
gaauuaaaauaaaaaauuccu

SEQ ID NO: 646339 - RNA, 22 nt, Artificial Sequence
  Synthetic
agaauuaaaauaaaaaauuccu

SEQ ID NO: 646340 - RNA, 23 nt, Artificial Sequence
  Synthetic
gagaauuaaaauaaaaaauuccu

SEQ ID NO: 646341 - RNA, 24 nt, Artificial Sequence
  Synthetic
ugagaauuaaaauaaaaaauuccu

SEQ ID NO: 646342 - RNA, 18 nt, Artificial Sequence
  Synthetic
gaaauuuaccuaauuccu

SEQ ID NO: 646343 - RNA, 19 nt, Artificial Sequence
  Synthetic
ugaaauuuaccuaauuccu

SEQ ID NO: 646344 - RNA, 20 nt, Artificial Sequence
  Synthetic
augaaauuuaccuaauuccu

SEQ ID NO: 646345 - RNA, 21 nt, Artificial Sequence
  Synthetic
caugaaauuuaccuaauuccu

SEQ ID NO: 646346 - RNA, 22 nt, Artificial Sequence
  Synthetic
ccaugaaauuuaccuaauuccu

SEQ ID NO: 646347 - RNA, 23 nt, Artificial Sequence
  Synthetic
accaugaaauuuaccuaauuccu

SEQ ID NO: 646348 - RNA, 24 nt, Artificial Sequence
  Synthetic
caccaugaaauuuaccuaauuccu

SEQ ID NO: 646349 - RNA, 18 nt, Artificial Sequence
  Synthetic
ucuuucccuuuaauuccu

SEQ ID NO: 646350 - RNA, 19 nt, Artificial Sequence
  Synthetic
cucuuucccuuuaauuccu

SEQ ID NO: 646351 - RNA, 20 nt, Artificial Sequence
  Synthetic
ucucuuucccuuuaauuccu

SEQ ID NO: 646352 - RNA, 21 nt, Artificial Sequence
  Synthetic
gucucuuucccuuuaauuccu

SEQ ID NO: 646353 - RNA, 22 nt, Artificial Sequence
  Synthetic
ugucucuuucccuuuaauuccu

SEQ ID NO: 646354 - RNA, 23 nt, Artificial Sequence
  Synthetic
augucucuuucccuuuaauuccu

SEQ ID NO: 646355 - RNA, 24 nt, Artificial Sequence
  Synthetic
aaugucucuuucccuuuaauuccu

SEQ ID NO: 646356 - RNA, 18 nt, Artificial Sequence
  Synthetic
agggaaaggaacauuccu

SEQ ID NO: 646357 - RNA, 19 nt, Artificial Sequence
  Synthetic
aagggaaaggaacauuccu

SEQ ID NO: 646358 - RNA, 20 nt, Artificial Sequence
  Synthetic
aaagggaaaggaacauuccu

SEQ ID NO: 646359 - RNA, 21 nt, Artificial Sequence
  Synthetic
gaaagggaaaggaacauuccu

SEQ ID NO: 646360 - RNA, 22 nt, Artificial Sequence
  Synthetic
ugaaagggaaaggaacauuccu

SEQ ID NO: 646361 - RNA, 23 nt, Artificial Sequence
  Synthetic
augaaagggaaaggaacauuccu

SEQ ID NO: 646362 - RNA, 24 nt, Artificial Sequence
  Synthetic
aaugaaagggaaaggaacauuccu

SEQ ID NO: 646363 - RNA, 18 nt, Artificial Sequence
  Synthetic
agccaagggaacauuccu

SEQ ID NO: 646364 - RNA, 19 nt, Artificial Sequence
  Synthetic
aagccaagggaacauuccu

SEQ ID NO: 646365 - RNA, 20 nt, Artificial Sequence
  Synthetic
aaagccaagggaacauuccu

SEQ ID NO: 646366 - RNA, 21 nt, Artificial Sequence
  Synthetic
caaagccaagggaacauuccu

SEQ ID NO: 646367 - RNA, 22 nt, Artificial Sequence
  Synthetic
ucaaagccaagggaacauuccu

SEQ ID NO: 646368 - RNA, 23 nt, Artificial Sequence
  Synthetic
gucaaagccaagggaacauuccu

SEQ ID NO: 646369 - RNA, 24 nt, Artificial Sequence
  Synthetic
agucaaagccaagggaacauuccu

SEQ ID NO: 646370 - RNA, 18 nt, Artificial Sequence
  Synthetic
uuuuuuuuucucauuccu

SEQ ID NO: 646371 - RNA, 19 nt, Artificial Sequence
  Synthetic
uuuuuuuuuucucauuccu

SEQ ID NO: 646372 - RNA, 20 nt, Artificial Sequence
  Synthetic
auuuuuuuuuucucauuccu

SEQ ID NO: 646373 - RNA, 21 nt, Artificial Sequence
  Synthetic
aauuuuuuuuuucucauuccu

SEQ ID NO: 646374 - RNA, 22 nt, Artificial Sequence
  Synthetic
caauuuuuuuuuucucauuccu

SEQ ID NO: 646375 - RNA, 23 nt, Artificial Sequence
  Synthetic
ccaauuuuuuuuuucucauuccu

SEQ ID NO: 646376 - RNA, 24 nt, Artificial Sequence
  Synthetic
uccaauuuuuuuuuucucauuccu

SEQ ID NO: 646377 - RNA, 18 nt, Artificial Sequence
  Synthetic
gucagcuccuucauuccu

SEQ ID NO: 646378 - RNA, 19 nt, Artificial Sequence
  Synthetic
ugucagcuccuucauuccu

SEQ ID NO: 646379 - RNA, 20 nt, Artificial Sequence
  Synthetic
uugucagcuccuucauuccu

SEQ ID NO: 646380 - RNA, 21 nt, Artificial Sequence
  Synthetic
uuugucagcuccuucauuccu

SEQ ID NO: 646381 - RNA, 22 nt, Artificial Sequence
  Synthetic
guuugucagcuccuucauuccu

SEQ ID NO: 646382 - RNA, 23 nt, Artificial Sequence
  Synthetic
gguuugucagcuccuucauuccu

SEQ ID NO: 646383 - RNA, 24 nt, Artificial Sequence
  Synthetic
ggguuugucagcuccuucauuccu

SEQ ID NO: 646384 - RNA, 18 nt, Artificial Sequence
  Synthetic
ucagaaugaaagauuccu

SEQ ID NO: 646385 - RNA, 19 nt, Artificial Sequence
  Synthetic
aucagaaugaaagauuccu

SEQ ID NO: 646386 - RNA, 20 nt, Artificial Sequence
  Synthetic
uaucagaaugaaagauuccu

SEQ ID NO: 646387 - RNA, 21 nt, Artificial Sequence
  Synthetic
cuaucagaaugaaagauuccu

SEQ ID NO: 646388 - RNA, 22 nt, Artificial Sequence
  Synthetic
acuaucagaaugaaagauuccu

SEQ ID NO: 646389 - RNA, 23 nt, Artificial Sequence
  Synthetic
cacuaucagaaugaaagauuccu

SEQ ID NO: 646390 - RNA, 24 nt, Artificial Sequence
  Synthetic
acacuaucagaaugaaagauuccu

SEQ ID NO: 646391 - RNA, 18 nt, Artificial Sequence
  Synthetic
aaccggggcaagauuccu

SEQ ID NO: 646392 - RNA, 19 nt, Artificial Sequence
  Synthetic
uaaccggggcaagauuccu

SEQ ID NO: 646393 - RNA, 20 nt, Artificial Sequence
  Synthetic
uuaaccggggcaagauuccu

SEQ ID NO: 646394 - RNA, 21 nt, Artificial Sequence
  Synthetic
auuaaccggggcaagauuccu

SEQ ID NO: 646395 - RNA, 22 nt, Artificial Sequence
  Synthetic
aauuaaccggggcaagauuccu

SEQ ID NO: 646396 - RNA, 23 nt, Artificial Sequence
  Synthetic
uaauuaaccggggcaagauuccu

SEQ ID NO: 646397 - RNA, 24 nt, Artificial Sequence
  Synthetic
auaauuaaccggggcaagauuccu

SEQ ID NO: 646398 - RNA, 18 nt, Artificial Sequence
  Synthetic
ggcaguguggcgauuccu

SEQ ID NO: 646399 - RNA, 19 nt, Artificial Sequence
  Synthetic
aggcaguguggcgauuccu

SEQ ID NO: 646400 - RNA, 20 nt, Artificial Sequence
  Synthetic
aaggcaguguggcgauuccu

SEQ ID NO: 646401 - RNA, 21 nt, Artificial Sequence
  Synthetic
gaaggcaguguggcgauuccu

SEQ ID NO: 646402 - RNA, 22 nt, Artificial Sequence
  Synthetic
ggaaggcaguguggcgauuccu

SEQ ID NO: 646403 - RNA, 23 nt, Artificial Sequence
  Synthetic
uggaaggcaguguggcgauuccu

SEQ ID NO: 646404 - RNA, 24 nt, Artificial Sequence
  Synthetic
guggaaggcaguguggcgauuccu

SEQ ID NO: 646405 - RNA, 21 nt, Artificial Sequence
  Synthetic
gaagucaguguggcgauuccu

SEQ ID NO: 646406 - RNA, 22 nt, Artificial Sequence
  Synthetic
ggaagucaguguggcgauuccu

SEQ ID NO: 646407 - RNA, 23 nt, Artificial Sequence
  Synthetic
uggaagucaguguggcgauuccu

SEQ ID NO: 646408 - RNA, 24 nt, Artificial Sequence
  Synthetic
guggaagucaguguggcgauuccu

SEQ ID NO: 646409 - RNA, 18 nt, Artificial Sequence
  Synthetic
ucacuuugaaggauuccu

SEQ ID NO: 646410 - RNA, 19 nt, Artificial Sequence
  Synthetic
aucacuuugaaggauuccu

SEQ ID NO: 646411 - RNA, 20 nt, Artificial Sequence
  Synthetic
uaucacuuugaaggauuccu

SEQ ID NO: 646412 - RNA, 21 nt, Artificial Sequence
  Synthetic
cuaucacuuugaaggauuccu

SEQ ID NO: 646413 - RNA, 22 nt, Artificial Sequence
  Synthetic
gcuaucacuuugaaggauuccu

SEQ ID NO: 646414 - RNA, 23 nt, Artificial Sequence
  Synthetic
ugcuaucacuuugaaggauuccu

SEQ ID NO: 646415 - RNA, 24 nt, Artificial Sequence
  Synthetic
augcuaucacuuugaaggauuccu

SEQ ID NO: 646416 - RNA, 18 nt, Artificial Sequence
  Synthetic
auaacagcuaauauuccu

SEQ ID NO: 646417 - RNA, 19 nt, Artificial Sequence
  Synthetic
aauaacagcuaauauuccu

SEQ ID NO: 646418 - RNA, 20 nt, Artificial Sequence
  Synthetic
caauaacagcuaauauuccu

SEQ ID NO: 646419 - RNA, 21 nt, Artificial Sequence
  Synthetic
acaauaacagcuaauauuccu

SEQ ID NO: 646420 - RNA, 22 nt, Artificial Sequence
  Synthetic
uacaauaacagcuaauauuccu

SEQ ID NO: 646421 - RNA, 23 nt, Artificial Sequence
  Synthetic
auacaauaacagcuaauauuccu

SEQ ID NO: 646422 - RNA, 24 nt, Artificial Sequence
  Synthetic
aauacaauaacagcuaauauuccu

SEQ ID NO: 646423 - RNA, 18 nt, Artificial Sequence
  Synthetic
cucuuuggacauauuccu

SEQ ID NO: 646424 - RNA, 19 nt, Artificial Sequence
  Synthetic
ucucuuuggacauauuccu

SEQ ID NO: 646425 - RNA, 20 nt, Artificial Sequence
  Synthetic
uucucuuuggacauauuccu

SEQ ID NO: 646426 - RNA, 21 nt, Artificial Sequence
  Synthetic
auucucuuuggacauauuccu

SEQ ID NO: 646427 - RNA, 22 nt, Artificial Sequence
  Synthetic
cauucucuuuggacauauuccu

SEQ ID NO: 646428 - RNA, 23 nt, Artificial Sequence
  Synthetic
ucauucucuuuggacauauuccu

SEQ ID NO: 646429 - RNA, 24 nt, Artificial Sequence
  Synthetic
aucauucucuuuggacauauuccu

SEQ ID NO: 646430 - RNA, 18 nt, Artificial Sequence
  Synthetic
guacacaaguauauuccu

SEQ ID NO: 646431 - RNA, 19 nt, Artificial Sequence
  Synthetic
aguacacaaguauauuccu

SEQ ID NO: 646432 - RNA, 20 nt, Artificial Sequence
  Synthetic
aaguacacaaguauauuccu

SEQ ID NO: 646433 - RNA, 21 nt, Artificial Sequence
  Synthetic
uaaguacacaaguauauuccu

SEQ ID NO: 646434 - RNA, 22 nt, Artificial Sequence
  Synthetic
uuaaguacacaaguauauuccu

SEQ ID NO: 646435 - RNA, 23 nt, Artificial Sequence
  Synthetic
auuaaguacacaaguauauuccu

SEQ ID NO: 646436 - RNA, 24 nt, Artificial Sequence
  Synthetic
cauuaaguacacaaguauauuccu

SEQ ID NO: 646437 - RNA, 18 nt, Artificial Sequence
  Synthetic
gguuugguggcuauuccu

SEQ ID NO: 646438 - RNA, 19 nt, Artificial Sequence
  Synthetic
ugguuugguggcuauuccu

SEQ ID NO: 646439 - RNA, 20 nt, Artificial Sequence
  Synthetic
cugguuugguggcuauuccu

SEQ ID NO: 646440 - RNA, 21 nt, Artificial Sequence
  Synthetic
acugguuugguggcuauuccu

SEQ ID NO: 646441 - RNA, 22 nt, Artificial Sequence
  Synthetic
uacugguuugguggcuauuccu

SEQ ID NO: 646442 - RNA, 23 nt, Artificial Sequence
  Synthetic
guacugguuugguggcuauuccu

SEQ ID NO: 646443 - RNA, 24 nt, Artificial Sequence
  Synthetic
aguacugguuugguggcuauuccu

SEQ ID NO: 646444 - RNA, 18 nt, Artificial Sequence
  Synthetic
accuucaccucuauuccu

SEQ ID NO: 646445 - RNA, 19 nt, Artificial Sequence
  Synthetic
gaccuucaccucuauuccu

SEQ ID NO: 646446 - RNA, 20 nt, Artificial Sequence
  Synthetic
ugaccuucaccucuauuccu

SEQ ID NO: 646447 - RNA, 21 nt, Artificial Sequence
  Synthetic
cugaccuucaccucuauuccu

SEQ ID NO: 646448 - RNA, 22 nt, Artificial Sequence
  Synthetic
acugaccuucaccucuauuccu

SEQ ID NO: 646449 - RNA, 23 nt, Artificial Sequence
  Synthetic
aacugaccuucaccucuauuccu

SEQ ID NO: 646450 - RNA, 24 nt, Artificial Sequence
  Synthetic
aaacugaccuucaccucuauuccu

SEQ ID NO: 646451 - RNA, 18 nt, Artificial Sequence
  Synthetic
cugauccugcuuauuccu

SEQ ID NO: 646452 - RNA, 19 nt, Artificial Sequence
  Synthetic
acugauccugcuuauuccu

SEQ ID NO: 646453 - RNA, 20 nt, Artificial Sequence
  Synthetic
gacugauccugcuuauuccu

SEQ ID NO: 646454 - RNA, 21 nt, Artificial Sequence
  Synthetic
agacugauccugcuuauuccu

SEQ ID NO: 646455 - RNA, 22 nt, Artificial Sequence
  Synthetic
uagacugauccugcuuauuccu

SEQ ID NO: 646456 - RNA, 23 nt, Artificial Sequence
  Synthetic
auagacugauccugcuuauuccu

SEQ ID NO: 646457 - RNA, 24 nt, Artificial Sequence
  Synthetic
uauagacugauccugcuuauuccu

SEQ ID NO: 646458 - RNA, 18 nt, Artificial Sequence
  Synthetic
caaauuacuuuuauuccu

SEQ ID NO: 646459 - RNA, 19 nt, Artificial Sequence
  Synthetic
ucaaauuacuuuuauuccu

SEQ ID NO: 646460 - RNA, 20 nt, Artificial Sequence
  Synthetic
aucaaauuacuuuuauuccu

SEQ ID NO: 646461 - RNA, 21 nt, Artificial Sequence
  Synthetic
uaucaaauuacuuuuauuccu

SEQ ID NO: 646462 - RNA, 22 nt, Artificial Sequence
  Synthetic
cuaucaaauuacuuuuauuccu

SEQ ID NO: 646463 - RNA, 23 nt, Artificial Sequence
  Synthetic
acuaucaaauuacuuuuauuccu

SEQ ID NO: 646464 - RNA, 24 nt, Artificial Sequence
  Synthetic
uacuaucaaauuacuuuuauuccu

SEQ ID NO: 646465 - RNA, 18 nt, Artificial Sequence
  Synthetic
aucaguggaagacuuccu

SEQ ID NO: 646466 - RNA, 19 nt, Artificial Sequence
  Synthetic
aaucaguggaagacuuccu

SEQ ID NO: 646467 - RNA, 20 nt, Artificial Sequence
  Synthetic
aaaucaguggaagacuuccu

SEQ ID NO: 646468 - RNA, 21 nt, Artificial Sequence
  Synthetic
aaaaucaguggaagacuuccu

SEQ ID NO: 646469 - RNA, 22 nt, Artificial Sequence
  Synthetic
caaaaucaguggaagacuuccu

SEQ ID NO: 646470 - RNA, 23 nt, Artificial Sequence
  Synthetic
acaaaaucaguggaagacuuccu

SEQ ID NO: 646471 - RNA, 24 nt, Artificial Sequence
  Synthetic
uacaaaaucaguggaagacuuccu

SEQ ID NO: 646472 - RNA, 18 nt, Artificial Sequence
  Synthetic
gaaugaacuugacuuccu

SEQ ID NO: 646473 - RNA, 19 nt, Artificial Sequence
  Synthetic
agaaugaacuugacuuccu

SEQ ID NO: 646474 - RNA, 20 nt, Artificial Sequence
  Synthetic
aagaaugaacuugacuuccu

SEQ ID NO: 646475 - RNA, 21 nt, Artificial Sequence
  Synthetic
aaagaaugaacuugacuuccu

SEQ ID NO: 646476 - RNA, 22 nt, Artificial Sequence
  Synthetic
uaaagaaugaacuugacuuccu

SEQ ID NO: 646477 - RNA, 23 nt, Artificial Sequence
  Synthetic
uuaaagaaugaacuugacuuccu

SEQ ID NO: 646478 - RNA, 24 nt, Artificial Sequence
  Synthetic
uuuaaagaaugaacuugacuuccu

SEQ ID NO: 646479 - RNA, 18 nt, Artificial Sequence
  Synthetic
cugguauacgaccuuccu

SEQ ID NO: 646480 - RNA, 19 nt, Artificial Sequence
  Synthetic
acugguauacgaccuuccu

SEQ ID NO: 646481 - RNA, 20 nt, Artificial Sequence
  Synthetic
aacugguauacgaccuuccu

SEQ ID NO: 646482 - RNA, 21 nt, Artificial Sequence
  Synthetic
uaacugguauacgaccuuccu

SEQ ID NO: 646483 - RNA, 22 nt, Artificial Sequence
  Synthetic
guaacugguauacgaccuuccu

SEQ ID NO: 646484 - RNA, 23 nt, Artificial Sequence
  Synthetic
uguaacugguauacgaccuuccu

SEQ ID NO: 646485 - RNA, 24 nt, Artificial Sequence
  Synthetic
guguaacugguauacgaccuuccu

SEQ ID NO: 646486 - RNA, 18 nt, Artificial Sequence
  Synthetic
ccagacaucacccuuccu

SEQ ID NO: 646487 - RNA, 19 nt, Artificial Sequence
  Synthetic
uccagacaucacccuuccu

SEQ ID NO: 646488 - RNA, 20 nt, Artificial Sequence
  Synthetic
uuccagacaucacccuuccu

SEQ ID NO: 646489 - RNA, 21 nt, Artificial Sequence
  Synthetic
uuuccagacaucacccuuccu

SEQ ID NO: 646490 - RNA, 22 nt, Artificial Sequence
  Synthetic
auuuccagacaucacccuuccu

SEQ ID NO: 646491 - RNA, 23 nt, Artificial Sequence
  Synthetic
cauuuccagacaucacccuuccu

SEQ ID NO: 646492 - RNA, 24 nt, Artificial Sequence
  Synthetic
ucauuuccagacaucacccuuccu

SEQ ID NO: 646493 - RNA, 18 nt, Artificial Sequence
  Synthetic
cuagauaucacccuuccu

SEQ ID NO: 646494 - RNA, 19 nt, Artificial Sequence
  Synthetic
ucuagauaucacccuuccu

SEQ ID NO: 646495 - RNA, 20 nt, Artificial Sequence
  Synthetic
uucuagauaucacccuuccu

SEQ ID NO: 646496 - RNA, 21 nt, Artificial Sequence
  Synthetic
uuucuagauaucacccuuccu

SEQ ID NO: 646497 - RNA, 22 nt, Artificial Sequence
  Synthetic
uuuucuagauaucacccuuccu

SEQ ID NO: 646498 - RNA, 23 nt, Artificial Sequence
  Synthetic
cuuuucuagauaucacccuuccu

SEQ ID NO: 646499 - RNA, 24 nt, Artificial Sequence
  Synthetic
ucuuuucuagauaucacccuuccu

SEQ ID NO: 646500 - RNA, 18 nt, Artificial Sequence
  Synthetic
uggcuuaaugcccuuccu

SEQ ID NO: 646501 - RNA, 19 nt, Artificial Sequence
  Synthetic
auggcuuaaugcccuuccu

SEQ ID NO: 646502 - RNA, 20 nt, Artificial Sequence
  Synthetic
aauggcuuaaugcccuuccu

SEQ ID NO: 646503 - RNA, 21 nt, Artificial Sequence
  Synthetic
gaauggcuuaaugcccuuccu

SEQ ID NO: 646504 - RNA, 22 nt, Artificial Sequence
  Synthetic
ugaauggcuuaaugcccuuccu

SEQ ID NO: 646505 - RNA, 23 nt, Artificial Sequence
  Synthetic
uugaauggcuuaaugcccuuccu

SEQ ID NO: 646506 - RNA, 24 nt, Artificial Sequence
  Synthetic
cuugaauggcuuaaugcccuuccu

SEQ ID NO: 646507 - RNA, 18 nt, Artificial Sequence
  Synthetic
aaggcagagagccuuccu

SEQ ID NO: 646508 - RNA, 19 nt, Artificial Sequence
  Synthetic
uaaggcagagagccuuccu

SEQ ID NO: 646509 - RNA, 20 nt, Artificial Sequence
  Synthetic
cuaaggcagagagccuuccu

SEQ ID NO: 646510 - RNA, 21 nt, Artificial Sequence
  Synthetic
acuaaggcagagagccuuccu

SEQ ID NO: 646511 - RNA, 22 nt, Artificial Sequence
  Synthetic
uacuaaggcagagagccuuccu

SEQ ID NO: 646512 - RNA, 23 nt, Artificial Sequence
  Synthetic
auacuaaggcagagagccuuccu

SEQ ID NO: 646513 - RNA, 24 nt, Artificial Sequence
  Synthetic
aauacuaaggcagagagccuuccu

SEQ ID NO: 646514 - RNA, 18 nt, Artificial Sequence
  Synthetic
ugcugucuguuccuuccu

SEQ ID NO: 646515 - RNA, 19 nt, Artificial Sequence
  Synthetic
uugcugucuguuccuuccu

SEQ ID NO: 646516 - RNA, 20 nt, Artificial Sequence
  Synthetic
auugcugucuguuccuuccu

SEQ ID NO: 646517 - RNA, 21 nt, Artificial Sequence
  Synthetic
gauugcugucuguuccuuccu

SEQ ID NO: 646518 - RNA, 22 nt, Artificial Sequence
  Synthetic
agauugcugucuguuccuuccu

SEQ ID NO: 646519 - RNA, 23 nt, Artificial Sequence
  Synthetic
aagauugcugucuguuccuuccu

SEQ ID NO: 646520 - RNA, 24 nt, Artificial Sequence
  Synthetic
aaagauugcugucuguuccuuccu

SEQ ID NO: 646521 - RNA, 18 nt, Artificial Sequence
  Synthetic
guauucuuguagcuuccu

SEQ ID NO: 646522 - RNA, 19 nt, Artificial Sequence
  Synthetic
uguauucuuguagcuuccu

SEQ ID NO: 646523 - RNA, 20 nt, Artificial Sequence
  Synthetic
guguauucuuguagcuuccu

SEQ ID NO: 646524 - RNA, 21 nt, Artificial Sequence
  Synthetic
uguguauucuuguagcuuccu

SEQ ID NO: 646525 - RNA, 22 nt, Artificial Sequence
  Synthetic
uuguguauucuuguagcuuccu

SEQ ID NO: 646526 - RNA, 23 nt, Artificial Sequence
  Synthetic
uuuguguauucuuguagcuuccu

SEQ ID NO: 646527 - RNA, 24 nt, Artificial Sequence
  Synthetic
auuuguguauucuuguagcuuccu

SEQ ID NO: 646528 - RNA, 18 nt, Artificial Sequence
  Synthetic
gcugagguaaggcuuccu

SEQ ID NO: 646529 - RNA, 19 nt, Artificial Sequence
  Synthetic
agcugagguaaggcuuccu

SEQ ID NO: 646530 - RNA, 20 nt, Artificial Sequence
  Synthetic
cagcugagguaaggcuuccu

SEQ ID NO: 646531 - RNA, 21 nt, Artificial Sequence
  Synthetic
ucagcugagguaaggcuuccu

SEQ ID NO: 646532 - RNA, 22 nt, Artificial Sequence
  Synthetic
cucagcugagguaaggcuuccu

SEQ ID NO: 646533 - RNA, 23 nt, Artificial Sequence
  Synthetic
ucucagcugagguaaggcuuccu

SEQ ID NO: 646534 - RNA, 24 nt, Artificial Sequence
  Synthetic
gucucagcugagguaaggcuuccu

SEQ ID NO: 646535 - RNA, 18 nt, Artificial Sequence
  Synthetic
uccuuccuuaugcuuccu

SEQ ID NO: 646536 - RNA, 19 nt, Artificial Sequence
  Synthetic
uuccuuccuuaugcuuccu

SEQ ID NO: 646537 - RNA, 20 nt, Artificial Sequence
  Synthetic
uuuccuuccuuaugcuuccu

SEQ ID NO: 646538 - RNA, 21 nt, Artificial Sequence
  Synthetic
auuuccuuccuuaugcuuccu

SEQ ID NO: 646539 - RNA, 22 nt, Artificial Sequence
  Synthetic
uauuuccuuccuuaugcuuccu

SEQ ID NO: 646540 - RNA, 23 nt, Artificial Sequence
  Synthetic
uuauuuccuuccuuaugcuuccu

SEQ ID NO: 646541 - RNA, 24 nt, Artificial Sequence
  Synthetic
guuauuuccuuccuuaugcuuccu

SEQ ID NO: 646542 - RNA, 18 nt, Artificial Sequence
  Synthetic
caauuuuaugaucuuccu

SEQ ID NO: 646543 - RNA, 19 nt, Artificial Sequence
  Synthetic
gcaauuuuaugaucuuccu

SEQ ID NO: 646544 - RNA, 20 nt, Artificial Sequence
  Synthetic
agcaauuuuaugaucuuccu

SEQ ID NO: 646545 - RNA, 21 nt, Artificial Sequence
  Synthetic
aagcaauuuuaugaucuuccu

SEQ ID NO: 646546 - RNA, 22 nt, Artificial Sequence
  Synthetic
caagcaauuuuaugaucuuccu

SEQ ID NO: 646547 - RNA, 23 nt, Artificial Sequence
  Synthetic
acaagcaauuuuaugaucuuccu

SEQ ID NO: 646548 - RNA, 24 nt, Artificial Sequence
  Synthetic
aacaagcaauuuuaugaucuuccu

SEQ ID NO: 646549 - RNA, 18 nt, Artificial Sequence
  Synthetic
aaaauuaauuaucuuccu

SEQ ID NO: 646550 - RNA, 19 nt, Artificial Sequence
  Synthetic
aaaaauuaauuaucuuccu

SEQ ID NO: 646551 - RNA, 20 nt, Artificial Sequence
  Synthetic
aaaaaauuaauuaucuuccu

SEQ ID NO: 646552 - RNA, 21 nt, Artificial Sequence
  Synthetic
uaaaaaauuaauuaucuuccu

SEQ ID NO: 646553 - RNA, 22 nt, Artificial Sequence
  Synthetic
cuaaaaaauuaauuaucuuccu

SEQ ID NO: 646554 - RNA, 23 nt, Artificial Sequence
  Synthetic
acuaaaaaauuaauuaucuuccu

SEQ ID NO: 646555 - RNA, 24 nt, Artificial Sequence
  Synthetic
uacuaaaaaauuaauuaucuuccu

SEQ ID NO: 646556 - RNA, 18 nt, Artificial Sequence
  Synthetic
aacucugaaauucuuccu

SEQ ID NO: 646557 - RNA, 19 nt, Artificial Sequence
  Synthetic
uaacucugaaauucuuccu

SEQ ID NO: 646558 - RNA, 20 nt, Artificial Sequence
  Synthetic
guaacucugaaauucuuccu

SEQ ID NO: 646559 - RNA, 21 nt, Artificial Sequence
  Synthetic
aguaacucugaaauucuuccu

SEQ ID NO: 646560 - RNA, 22 nt, Artificial Sequence
  Synthetic
aaguaacucugaaauucuuccu

SEQ ID NO: 646561 - RNA, 23 nt, Artificial Sequence
  Synthetic
uaaguaacucugaaauucuuccu

SEQ ID NO: 646562 - RNA, 24 nt, Artificial Sequence
  Synthetic
cuaaguaacucugaaauucuuccu

SEQ ID NO: 646563 - RNA, 18 nt, Artificial Sequence
  Synthetic
uuaaauuugaaaguuccu

SEQ ID NO: 646564 - RNA, 19 nt, Artificial Sequence
  Synthetic
auuaaauuugaaaguuccu

SEQ ID NO: 646565 - RNA, 20 nt, Artificial Sequence
  Synthetic
gauuaaauuugaaaguuccu

SEQ ID NO: 646566 - RNA, 21 nt, Artificial Sequence
  Synthetic
agauuaaauuugaaaguuccu

SEQ ID NO: 646567 - RNA, 22 nt, Artificial Sequence
  Synthetic
gagauuaaauuugaaaguuccu

SEQ ID NO: 646568 - RNA, 23 nt, Artificial Sequence
  Synthetic
ugagauuaaauuugaaaguuccu

SEQ ID NO: 646569 - RNA, 24 nt, Artificial Sequence
  Synthetic
augagauuaaauuugaaaguuccu

SEQ ID NO: 646570 - RNA, 18 nt, Artificial Sequence
  Synthetic
cuucaaugugaaguuccu

SEQ ID NO: 646571 - RNA, 19 nt, Artificial Sequence
  Synthetic
ucuucaaugugaaguuccu

SEQ ID NO: 646572 - RNA, 20 nt, Artificial Sequence
  Synthetic
cucuucaaugugaaguuccu

SEQ ID NO: 646573 - RNA, 21 nt, Artificial Sequence
  Synthetic
ccucuucaaugugaaguuccu

SEQ ID NO: 646574 - RNA, 22 nt, Artificial Sequence
  Synthetic
accucuucaaugugaaguuccu

SEQ ID NO: 646575 - RNA, 23 nt, Artificial Sequence
  Synthetic
gaccucuucaaugugaaguuccu

SEQ ID NO: 646576 - RNA, 24 nt, Artificial Sequence
  Synthetic
ggaccucuucaaugugaaguuccu

SEQ ID NO: 646577 - RNA, 18 nt, Artificial Sequence
  Synthetic
aauugcagcuaaguuccu

SEQ ID NO: 646578 - RNA, 19 nt, Artificial Sequence
  Synthetic
uaauugcagcuaaguuccu

SEQ ID NO: 646579 - RNA, 20 nt, Artificial Sequence
  Synthetic
auaauugcagcuaaguuccu

SEQ ID NO: 646580 - RNA, 21 nt, Artificial Sequence
  Synthetic
cauaauugcagcuaaguuccu

SEQ ID NO: 646581 - RNA, 22 nt, Artificial Sequence
  Synthetic
acauaauugcagcuaaguuccu

SEQ ID NO: 646582 - RNA, 23 nt, Artificial Sequence
  Synthetic
cacauaauugcagcuaaguuccu

SEQ ID NO: 646583 - RNA, 24 nt, Artificial Sequence
  Synthetic
gcacauaauugcagcuaaguuccu

SEQ ID NO: 646584 - RNA, 18 nt, Artificial Sequence
  Synthetic
uuucacccuuacguuccu

SEQ ID NO: 646585 - RNA, 19 nt, Artificial Sequence
  Synthetic
cuuucacccuuacguuccu

SEQ ID NO: 646586 - RNA, 20 nt, Artificial Sequence
  Synthetic
ucuuucacccuuacguuccu

SEQ ID NO: 646587 - RNA, 21 nt, Artificial Sequence
  Synthetic
aucuuucacccuuacguuccu

SEQ ID NO: 646588 - RNA, 22 nt, Artificial Sequence
  Synthetic
caucuuucacccuuacguuccu

SEQ ID NO: 646589 - RNA, 23 nt, Artificial Sequence
  Synthetic
ucaucuuucacccuuacguuccu

SEQ ID NO: 646590 - RNA, 24 nt, Artificial Sequence
  Synthetic
aucaucuuucacccuuacguuccu

SEQ ID NO: 646591 - RNA, 18 nt, Artificial Sequence
  Synthetic
cuggaaugcuccguuccu

SEQ ID NO: 646592 - RNA, 19 nt, Artificial Sequence
  Synthetic
gcuggaaugcuccguuccu

SEQ ID NO: 646593 - RNA, 20 nt, Artificial Sequence
  Synthetic
ggcuggaaugcuccguuccu

SEQ ID NO: 646594 - RNA, 21 nt, Artificial Sequence
  Synthetic
gggcuggaaugcuccguuccu

SEQ ID NO: 646595 - RNA, 22 nt, Artificial Sequence
  Synthetic
ugggcuggaaugcuccguuccu

SEQ ID NO: 646596 - RNA, 23 nt, Artificial Sequence
  Synthetic
cugggcuggaaugcuccguuccu

SEQ ID NO: 646597 - RNA, 24 nt, Artificial Sequence
  Synthetic
ucugggcuggaaugcuccguuccu

SEQ ID NO: 646598 - RNA, 18 nt, Artificial Sequence
  Synthetic
aauaguuuggagguuccu

SEQ ID NO: 646599 - RNA, 19 nt, Artificial Sequence
  Synthetic
gaauaguuuggagguuccu

SEQ ID NO: 646600 - RNA, 20 nt, Artificial Sequence
  Synthetic
agaauaguuuggagguuccu

SEQ ID NO: 646601 - RNA, 21 nt, Artificial Sequence
  Synthetic
gagaauaguuuggagguuccu

SEQ ID NO: 646602 - RNA, 22 nt, Artificial Sequence
  Synthetic
ggagaauaguuuggagguuccu

SEQ ID NO: 646603 - RNA, 23 nt, Artificial Sequence
  Synthetic
uggagaauaguuuggagguuccu

SEQ ID NO: 646604 - RNA, 24 nt, Artificial Sequence
  Synthetic
auggagaauaguuuggagguuccu

SEQ ID NO: 646605 - RNA, 18 nt, Artificial Sequence
  Synthetic
gaguauauuaggguuccu

SEQ ID NO: 646606 - RNA, 19 nt, Artificial Sequence
  Synthetic
ggaguauauuaggguuccu

SEQ ID NO: 646607 - RNA, 20 nt, Artificial Sequence
  Synthetic
aggaguauauuaggguuccu

SEQ ID NO: 646608 - RNA, 21 nt, Artificial Sequence
  Synthetic
aaggaguauauuaggguuccu

SEQ ID NO: 646609 - RNA, 22 nt, Artificial Sequence
  Synthetic
uaaggaguauauuaggguuccu

SEQ ID NO: 646610 - RNA, 23 nt, Artificial Sequence
  Synthetic
auaaggaguauauuaggguuccu

SEQ ID NO: 646611 - RNA, 24 nt, Artificial Sequence
  Synthetic
aauaaggaguauauuaggguuccu

SEQ ID NO: 646612 - RNA, 18 nt, Artificial Sequence
  Synthetic
ugaaauaacaauguuccu

SEQ ID NO: 646613 - RNA, 19 nt, Artificial Sequence
  Synthetic
uugaaauaacaauguuccu

SEQ ID NO: 646614 - RNA, 20 nt, Artificial Sequence
  Synthetic
auugaaauaacaauguuccu

SEQ ID NO: 646615 - RNA, 21 nt, Artificial Sequence
  Synthetic
uauugaaauaacaauguuccu

SEQ ID NO: 646616 - RNA, 22 nt, Artificial Sequence
  Synthetic
cuauugaaauaacaauguuccu

SEQ ID NO: 646617 - RNA, 23 nt, Artificial Sequence
  Synthetic
gcuauugaaauaacaauguuccu

SEQ ID NO: 646618 - RNA, 24 nt, Artificial Sequence
  Synthetic
ugcuauugaaauaacaauguuccu

SEQ ID NO: 646619 - RNA, 18 nt, Artificial Sequence
  Synthetic
uaguucauccauguuccu

SEQ ID NO: 646620 - RNA, 19 nt, Artificial Sequence
  Synthetic
auaguucauccauguuccu

SEQ ID NO: 646621 - RNA, 20 nt, Artificial Sequence
  Synthetic
cauaguucauccauguuccu

SEQ ID NO: 646622 - RNA, 21 nt, Artificial Sequence
  Synthetic
acauaguucauccauguuccu

SEQ ID NO: 646623 - RNA, 22 nt, Artificial Sequence
  Synthetic
aacauaguucauccauguuccu

SEQ ID NO: 646624 - RNA, 23 nt, Artificial Sequence
  Synthetic
aaacauaguucauccauguuccu

SEQ ID NO: 646625 - RNA, 24 nt, Artificial Sequence
  Synthetic
uaaacauaguucauccauguuccu

SEQ ID NO: 646626 - RNA, 18 nt, Artificial Sequence
  Synthetic
uagaagaggcauguuccu

SEQ ID NO: 646627 - RNA, 19 nt, Artificial Sequence
  Synthetic
cuagaagaggcauguuccu

SEQ ID NO: 646628 - RNA, 20 nt, Artificial Sequence
  Synthetic
acuagaagaggcauguuccu

SEQ ID NO: 646629 - RNA, 21 nt, Artificial Sequence
  Synthetic
cacuagaagaggcauguuccu

SEQ ID NO: 646630 - RNA, 22 nt, Artificial Sequence
  Synthetic
acacuagaagaggcauguuccu

SEQ ID NO: 646631 - RNA, 23 nt, Artificial Sequence
  Synthetic
aacacuagaagaggcauguuccu

SEQ ID NO: 646632 - RNA, 24 nt, Artificial Sequence
  Synthetic
gaacacuagaagaggcauguuccu

SEQ ID NO: 646633 - RNA, 18 nt, Artificial Sequence
  Synthetic
gagagacagauuguuccu

SEQ ID NO: 646634 - RNA, 19 nt, Artificial Sequence
  Synthetic
ggagagacagauuguuccu

SEQ ID NO: 646635 - RNA, 20 nt, Artificial Sequence
  Synthetic
aggagagacagauuguuccu

SEQ ID NO: 646636 - RNA, 21 nt, Artificial Sequence
  Synthetic
gaggagagacagauuguuccu

SEQ ID NO: 646637 - RNA, 22 nt, Artificial Sequence
  Synthetic
agaggagagacagauuguuccu

SEQ ID NO: 646638 - RNA, 23 nt, Artificial Sequence
  Synthetic
uagaggagagacagauuguuccu

SEQ ID NO: 646639 - RNA, 24 nt, Artificial Sequence
  Synthetic
auagaggagagacagauuguuccu

SEQ ID NO: 646640 - RNA, 18 nt, Artificial Sequence
  Synthetic
aauggagaauuuguuccu

SEQ ID NO: 646641 - RNA, 19 nt, Artificial Sequence
  Synthetic
aaauggagaauuuguuccu

SEQ ID NO: 646642 - RNA, 20 nt, Artificial Sequence
  Synthetic
gaaauggagaauuuguuccu

SEQ ID NO: 646643 - RNA, 21 nt, Artificial Sequence
  Synthetic
agaaauggagaauuuguuccu

SEQ ID NO: 646644 - RNA, 22 nt, Artificial Sequence
  Synthetic
cagaaauggagaauuuguuccu

SEQ ID NO: 646645 - RNA, 23 nt, Artificial Sequence
  Synthetic
ccagaaauggagaauuuguuccu

SEQ ID NO: 646646 - RNA, 24 nt, Artificial Sequence
  Synthetic
uccagaaauggagaauuuguuccu

SEQ ID NO: 646647 - RNA, 18 nt, Artificial Sequence
  Synthetic
uucuaguguuuuguuccu

SEQ ID NO: 646648 - RNA, 19 nt, Artificial Sequence
  Synthetic
uuucuaguguuuuguuccu

SEQ ID NO: 646649 - RNA, 20 nt, Artificial Sequence
  Synthetic
guuucuaguguuuuguuccu

SEQ ID NO: 646650 - RNA, 21 nt, Artificial Sequence
  Synthetic
aguuucuaguguuuuguuccu

SEQ ID NO: 646651 - RNA, 22 nt, Artificial Sequence
  Synthetic
gaguuucuaguguuuuguuccu

SEQ ID NO: 646652 - RNA, 23 nt, Artificial Sequence
  Synthetic
agaguuucuaguguuuuguuccu

SEQ ID NO: 646653 - RNA, 24 nt, Artificial Sequence
  Synthetic
aagaguuucuaguguuuuguuccu

SEQ ID NO: 646654 - RNA, 18 nt, Artificial Sequence
  Synthetic
uaaaggacacaauuuccu

SEQ ID NO: 646655 - RNA, 19 nt, Artificial Sequence
  Synthetic
cuaaaggacacaauuuccu

SEQ ID NO: 646656 - RNA, 20 nt, Artificial Sequence
  Synthetic
ucuaaaggacacaauuuccu

SEQ ID NO: 646657 - RNA, 21 nt, Artificial Sequence
  Synthetic
uucuaaaggacacaauuuccu

SEQ ID NO: 646658 - RNA, 22 nt, Artificial Sequence
  Synthetic
guucuaaaggacacaauuuccu

SEQ ID NO: 646659 - RNA, 23 nt, Artificial Sequence
  Synthetic
aguucuaaaggacacaauuuccu

SEQ ID NO: 646660 - RNA, 24 nt, Artificial Sequence
  Synthetic
caguucuaaaggacacaauuuccu

SEQ ID NO: 646661 - RNA, 18 nt, Artificial Sequence
  Synthetic
uagacaagucaauuuccu

SEQ ID NO: 646662 - RNA, 19 nt, Artificial Sequence
  Synthetic
auagacaagucaauuuccu

SEQ ID NO: 646663 - RNA, 20 nt, Artificial Sequence
  Synthetic
aauagacaagucaauuuccu

SEQ ID NO: 646664 - RNA, 21 nt, Artificial Sequence
  Synthetic
caauagacaagucaauuuccu

SEQ ID NO: 646665 - RNA, 22 nt, Artificial Sequence
  Synthetic
ccaauagacaagucaauuuccu

SEQ ID NO: 646666 - RNA, 23 nt, Artificial Sequence
  Synthetic
gccaauagacaagucaauuuccu

SEQ ID NO: 646667 - RNA, 24 nt, Artificial Sequence
  Synthetic
ugccaauagacaagucaauuuccu

SEQ ID NO: 646668 - RNA, 18 nt, Artificial Sequence
  Synthetic
uauuaaaaauaauuuccu

SEQ ID NO: 646669 - RNA, 19 nt, Artificial Sequence
  Synthetic
auauuaaaaauaauuuccu

SEQ ID NO: 646670 - RNA, 20 nt, Artificial Sequence
  Synthetic
uauauuaaaaauaauuuccu

SEQ ID NO: 646671 - RNA, 21 nt, Artificial Sequence
  Synthetic
uuauauuaaaaauaauuuccu

SEQ ID NO: 646672 - RNA, 22 nt, Artificial Sequence
  Synthetic
uuuauauuaaaaauaauuuccu

SEQ ID NO: 646673 - RNA, 23 nt, Artificial Sequence
  Synthetic
cuuuauauuaaaaauaauuuccu

SEQ ID NO: 646674 - RNA, 24 nt, Artificial Sequence
  Synthetic
ucuuuauauuaaaaauaauuuccu

SEQ ID NO: 646675 - RNA, 18 nt, Artificial Sequence
  Synthetic
aaauuuuauuaauuuccu

SEQ ID NO: 646676 - RNA, 19 nt, Artificial Sequence
  Synthetic
caaauuuuauuaauuuccu

SEQ ID NO: 646677 - RNA, 20 nt, Artificial Sequence
  Synthetic
acaaauuuuauuaauuuccu

SEQ ID NO: 646678 - RNA, 21 nt, Artificial Sequence
  Synthetic
aacaaauuuuauuaauuuccu

SEQ ID NO: 646679 - RNA, 22 nt, Artificial Sequence
  Synthetic
gaacaaauuuuauuaauuuccu

SEQ ID NO: 646680 - RNA, 23 nt, Artificial Sequence
  Synthetic
ugaacaaauuuuauuaauuuccu

SEQ ID NO: 646681 - RNA, 24 nt, Artificial Sequence
  Synthetic
uugaacaaauuuuauuaauuuccu

SEQ ID NO: 646682 - RNA, 18 nt, Artificial Sequence
  Synthetic
gacaacuagucauuuccu

SEQ ID NO: 646683 - RNA, 19 nt, Artificial Sequence
  Synthetic
ugacaacuagucauuuccu

SEQ ID NO: 646684 - RNA, 20 nt, Artificial Sequence
  Synthetic
uugacaacuagucauuuccu

SEQ ID NO: 646685 - RNA, 21 nt, Artificial Sequence
  Synthetic
auugacaacuagucauuuccu

SEQ ID NO: 646686 - RNA, 22 nt, Artificial Sequence
  Synthetic
uauugacaacuagucauuuccu

SEQ ID NO: 646687 - RNA, 23 nt, Artificial Sequence
  Synthetic
auauugacaacuagucauuuccu

SEQ ID NO: 646688 - RNA, 24 nt, Artificial Sequence
  Synthetic
cauauugacaacuagucauuuccu

SEQ ID NO: 646689 - RNA, 18 nt, Artificial Sequence
  Synthetic
cgaaugauuugauuuccu

SEQ ID NO: 646690 - RNA, 19 nt, Artificial Sequence
  Synthetic
acgaaugauuugauuuccu

SEQ ID NO: 646691 - RNA, 20 nt, Artificial Sequence
  Synthetic
gacgaaugauuugauuuccu

SEQ ID NO: 646692 - RNA, 21 nt, Artificial Sequence
  Synthetic
agacgaaugauuugauuuccu

SEQ ID NO: 646693 - RNA, 22 nt, Artificial Sequence
  Synthetic
uagacgaaugauuugauuuccu

SEQ ID NO: 646694 - RNA, 23 nt, Artificial Sequence
  Synthetic
uuagacgaaugauuugauuuccu

SEQ ID NO: 646695 - RNA, 24 nt, Artificial Sequence
  Synthetic
auuagacgaaugauuugauuuccu

SEQ ID NO: 646696 - RNA, 18 nt, Artificial Sequence
  Synthetic
guguuuggcauauuuccu

SEQ ID NO: 646697 - RNA, 19 nt, Artificial Sequence
  Synthetic
uguguuuggcauauuuccu

SEQ ID NO: 646698 - RNA, 20 nt, Artificial Sequence
  Synthetic
auguguuuggcauauuuccu

SEQ ID NO: 646699 - RNA, 21 nt, Artificial Sequence
  Synthetic
aauguguuuggcauauuuccu

SEQ ID NO: 646700 - RNA, 22 nt, Artificial Sequence
  Synthetic
caauguguuuggcauauuuccu

SEQ ID NO: 646701 - RNA, 23 nt, Artificial Sequence
  Synthetic
acaauguguuuggcauauuuccu

SEQ ID NO: 646702 - RNA, 24 nt, Artificial Sequence
  Synthetic
cacaauguguuuggcauauuuccu

SEQ ID NO: 646703 - RNA, 18 nt, Artificial Sequence
  Synthetic
caucauugccuauuuccu

SEQ ID NO: 646704 - RNA, 19 nt, Artificial Sequence
  Synthetic
acaucauugccuauuuccu

SEQ ID NO: 646705 - RNA, 20 nt, Artificial Sequence
  Synthetic
uacaucauugccuauuuccu

SEQ ID NO: 646706 - RNA, 21 nt, Artificial Sequence
  Synthetic
uuacaucauugccuauuuccu

SEQ ID NO: 646707 - RNA, 22 nt, Artificial Sequence
  Synthetic
auuacaucauugccuauuuccu

SEQ ID NO: 646708 - RNA, 23 nt, Artificial Sequence
  Synthetic
aauuacaucauugccuauuuccu

SEQ ID NO: 646709 - RNA, 24 nt, Artificial Sequence
  Synthetic
aaauuacaucauugccuauuuccu

SEQ ID NO: 646710 - RNA, 24 nt, Artificial Sequence
  Synthetic
gcuguuagucugaugggcuuuccu

SEQ ID NO: 646711 - RNA, 18 nt, Artificial Sequence
  Synthetic
cugcuauuucaguuuccu

SEQ ID NO: 646712 - RNA, 19 nt, Artificial Sequence
  Synthetic
acugcuauuucaguuuccu

SEQ ID NO: 646713 - RNA, 20 nt, Artificial Sequence
  Synthetic
aacugcuauuucaguuuccu

SEQ ID NO: 646714 - RNA, 21 nt, Artificial Sequence
  Synthetic
gaacugcuauuucaguuuccu

SEQ ID NO: 646715 - RNA, 22 nt, Artificial Sequence
  Synthetic
ugaacugcuauuucaguuuccu

SEQ ID NO: 646716 - RNA, 23 nt, Artificial Sequence
  Synthetic
uugaacugcuauuucaguuuccu

SEQ ID NO: 646717 - RNA, 24 nt, Artificial Sequence
  Synthetic
cuugaacugcuauuucaguuuccu

SEQ ID NO: 646718 - RNA, 18 nt, Artificial Sequence
  Synthetic
ggcuaaauaacguuuccu

SEQ ID NO: 646719 - RNA, 19 nt, Artificial Sequence
  Synthetic
uggcuaaauaacguuuccu

SEQ ID NO: 646720 - RNA, 20 nt, Artificial Sequence
  Synthetic
guggcuaaauaacguuuccu

SEQ ID NO: 646721 - RNA, 21 nt, Artificial Sequence
  Synthetic
aguggcuaaauaacguuuccu

SEQ ID NO: 646722 - RNA, 22 nt, Artificial Sequence
  Synthetic
aaguggcuaaauaacguuuccu

SEQ ID NO: 646723 - RNA, 23 nt, Artificial Sequence
  Synthetic
uaaguggcuaaauaacguuuccu

SEQ ID NO: 646724 - RNA, 24 nt, Artificial Sequence
  Synthetic
uuaaguggcuaaauaacguuuccu

SEQ ID NO: 646725 - RNA, 18 nt, Artificial Sequence
  Synthetic
gcuguaucaugguuuccu

SEQ ID NO: 646726 - RNA, 19 nt, Artificial Sequence
  Synthetic
ggcuguaucaugguuuccu

SEQ ID NO: 646727 - RNA, 20 nt, Artificial Sequence
  Synthetic
aggcuguaucaugguuuccu

SEQ ID NO: 646728 - RNA, 21 nt, Artificial Sequence
  Synthetic
gaggcuguaucaugguuuccu

SEQ ID NO: 646729 - RNA, 22 nt, Artificial Sequence
  Synthetic
agaggcuguaucaugguuuccu

SEQ ID NO: 646730 - RNA, 23 nt, Artificial Sequence
  Synthetic
aagaggcuguaucaugguuuccu

SEQ ID NO: 646731 - RNA, 24 nt, Artificial Sequence
  Synthetic
aaagaggcuguaucaugguuuccu

SEQ ID NO: 646732 - RNA, 18 nt, Artificial Sequence
  Synthetic
auucucaaaauguuuccu

SEQ ID NO: 646733 - RNA, 19 nt, Artificial Sequence
  Synthetic
uauucucaaaauguuuccu

SEQ ID NO: 646734 - RNA, 20 nt, Artificial Sequence
  Synthetic
uuauucucaaaauguuuccu

SEQ ID NO: 646735 - RNA, 21 nt, Artificial Sequence
  Synthetic
guuauucucaaaauguuuccu

SEQ ID NO: 646736 - RNA, 22 nt, Artificial Sequence
  Synthetic
uguuauucucaaaauguuuccu

SEQ ID NO: 646737 - RNA, 23 nt, Artificial Sequence
  Synthetic
cuguuauucucaaaauguuuccu

SEQ ID NO: 646738 - RNA, 24 nt, Artificial Sequence
  Synthetic
ucuguuauucucaaaauguuuccu

SEQ ID NO: 646739 - RNA, 18 nt, Artificial Sequence
  Synthetic
cccacagcacuguuuccu

SEQ ID NO: 646740 - RNA, 19 nt, Artificial Sequence
  Synthetic
ucccacagcacuguuuccu

SEQ ID NO: 646741 - RNA, 20 nt, Artificial Sequence
  Synthetic
cucccacagcacuguuuccu

SEQ ID NO: 646742 - RNA, 21 nt, Artificial Sequence
  Synthetic
gcucccacagcacuguuuccu

SEQ ID NO: 646743 - RNA, 22 nt, Artificial Sequence
  Synthetic
ggcucccacagcacuguuuccu

SEQ ID NO: 646744 - RNA, 23 nt, Artificial Sequence
  Synthetic
aggcucccacagcacuguuuccu

SEQ ID NO: 646745 - RNA, 24 nt, Artificial Sequence
  Synthetic
uaggcucccacagcacuguuuccu

SEQ ID NO: 646746 - RNA, 18 nt, Artificial Sequence
  Synthetic
acuucuaugaauuuuccu

SEQ ID NO: 646747 - RNA, 19 nt, Artificial Sequence
  Synthetic
uacuucuaugaauuuuccu

SEQ ID NO: 646748 - RNA, 20 nt, Artificial Sequence
  Synthetic
cuacuucuaugaauuuuccu

SEQ ID NO: 646749 - RNA, 21 nt, Artificial Sequence
  Synthetic
gcuacuucuaugaauuuuccu

SEQ ID NO: 646750 - RNA, 22 nt, Artificial Sequence
  Synthetic
ugcuacuucuaugaauuuuccu

SEQ ID NO: 646751 - RNA, 23 nt, Artificial Sequence
  Synthetic
augcuacuucuaugaauuuuccu

SEQ ID NO: 646752 - RNA, 24 nt, Artificial Sequence
  Synthetic
aaugcuacuucuaugaauuuuccu

SEQ ID NO: 646753 - RNA, 18 nt, Artificial Sequence
  Synthetic
agaaaagugccuuuuccu

SEQ ID NO: 646754 - RNA, 19 nt, Artificial Sequence
  Synthetic
gagaaaagugccuuuuccu

SEQ ID NO: 646755 - RNA, 20 nt, Artificial Sequence
  Synthetic
agagaaaagugccuuuuccu

SEQ ID NO: 646756 - RNA, 21 nt, Artificial Sequence
  Synthetic
aagagaaaagugccuuuuccu

SEQ ID NO: 646757 - RNA, 22 nt, Artificial Sequence
  Synthetic
aaagagaaaagugccuuuuccu

SEQ ID NO: 646758 - RNA, 23 nt, Artificial Sequence
  Synthetic
aaaagagaaaagugccuuuuccu

SEQ ID NO: 646759 - RNA, 24 nt, Artificial Sequence
  Synthetic
uaaaagagaaaagugccuuuuccu

SEQ ID NO: 646760 - RNA, 18 nt, Artificial Sequence
  Synthetic
ugguguucagcuuuuccu

SEQ ID NO: 646761 - RNA, 19 nt, Artificial Sequence
  Synthetic
augguguucagcuuuuccu

SEQ ID NO: 646762 - RNA, 20 nt, Artificial Sequence
  Synthetic
caugguguucagcuuuuccu

SEQ ID NO: 646763 - RNA, 21 nt, Artificial Sequence
  Synthetic
ucaugguguucagcuuuuccu

SEQ ID NO: 646764 - RNA, 22 nt, Artificial Sequence
  Synthetic
uucaugguguucagcuuuuccu

SEQ ID NO: 646765 - RNA, 23 nt, Artificial Sequence
  Synthetic
cuucaugguguucagcuuuuccu

SEQ ID NO: 646766 - RNA, 24 nt, Artificial Sequence
  Synthetic
ccuucaugguguucagcuuuuccu

SEQ ID NO: 646767 - RNA, 18 nt, Artificial Sequence
  Synthetic
ucacucauuucuuuuccu

SEQ ID NO: 646768 - RNA, 19 nt, Artificial Sequence
  Synthetic
cucacucauuucuuuuccu

SEQ ID NO: 646769 - RNA, 20 nt, Artificial Sequence
  Synthetic
ccucacucauuucuuuuccu

SEQ ID NO: 646770 - RNA, 21 nt, Artificial Sequence
  Synthetic
accucacucauuucuuuuccu

SEQ ID NO: 646771 - RNA, 22 nt, Artificial Sequence
  Synthetic
uaccucacucauuucuuuuccu

SEQ ID NO: 646772 - RNA, 23 nt, Artificial Sequence
  Synthetic
cuaccucacucauuucuuuuccu

SEQ ID NO: 646773 - RNA, 24 nt, Artificial Sequence
  Synthetic
ucuaccucacucauuucuuuuccu

SEQ ID NO: 646774 - RNA, 18 nt, Artificial Sequence
  Synthetic
uaauacucucuuuuuccu

SEQ ID NO: 646775 - RNA, 19 nt, Artificial Sequence
  Synthetic
uuaauacucucuuuuuccu

SEQ ID NO: 646776 - RNA, 20 nt, Artificial Sequence
  Synthetic
uuuaauacucucuuuuuccu

SEQ ID NO: 646777 - RNA, 21 nt, Artificial Sequence
  Synthetic
auuuaauacucucuuuuuccu

SEQ ID NO: 646778 - RNA, 22 nt, Artificial Sequence
  Synthetic
cauuuaauacucucuuuuuccu

SEQ ID NO: 646779 - RNA, 23 nt, Artificial Sequence
  Synthetic
ucauuuaauacucucuuuuuccu

SEQ ID NO: 646780 - RNA, 24 nt, Artificial Sequence
  Synthetic
uucauuuaauacucucuuuuuccu

SEQ ID NO: 646781 - RNA, 18 nt, Artificial Sequence
  Synthetic
cacaagacuguuuuuccu

SEQ ID NO: 646782 - RNA, 19 nt, Artificial Sequence
  Synthetic
ccacaagacuguuuuuccu

SEQ ID NO: 646783 - RNA, 20 nt, Artificial Sequence
  Synthetic
uccacaagacuguuuuuccu

SEQ ID NO: 646784 - RNA, 21 nt, Artificial Sequence
  Synthetic
uuccacaagacuguuuuuccu

SEQ ID NO: 646785 - RNA, 22 nt, Artificial Sequence
  Synthetic
cuuccacaagacuguuuuuccu

SEQ ID NO: 646786 - RNA, 23 nt, Artificial Sequence
  Synthetic
ccuuccacaagacuguuuuuccu

SEQ ID NO: 646787 - RNA, 24 nt, Artificial Sequence
  Synthetic
accuuccacaagacuguuuuuccu

SEQ ID NO: 646788 - RNA, 18 nt, Artificial Sequence
  Synthetic
aauacuauuguuuuuccu

SEQ ID NO: 646789 - RNA, 19 nt, Artificial Sequence
  Synthetic
uaauacuauuguuuuuccu

SEQ ID NO: 646790 - RNA, 20 nt, Artificial Sequence
  Synthetic
auaauacuauuguuuuuccu

SEQ ID NO: 646791 - RNA, 21 nt, Artificial Sequence
  Synthetic
gauaauacuauuguuuuuccu

SEQ ID NO: 646792 - RNA, 22 nt, Artificial Sequence
  Synthetic
cgauaauacuauuguuuuuccu

SEQ ID NO: 646793 - RNA, 23 nt, Artificial Sequence
  Synthetic
ucgauaauacuauuguuuuuccu

SEQ ID NO: 646794 - RNA, 24 nt, Artificial Sequence
  Synthetic
uucgauaauacuauuguuuuuccu

SEQ ID NO: 646795 - RNA, 18 nt, Artificial Sequence
  Synthetic
auucuacuguuuuuuccu

SEQ ID NO: 646796 - RNA, 19 nt, Artificial Sequence
  Synthetic
gauucuacuguuuuuuccu

SEQ ID NO: 646797 - RNA, 20 nt, Artificial Sequence
  Synthetic
ugauucuacuguuuuuuccu

SEQ ID NO: 646798 - RNA, 21 nt, Artificial Sequence
  Synthetic
uugauucuacuguuuuuuccu

SEQ ID NO: 646799 - RNA, 22 nt, Artificial Sequence
  Synthetic
uuugauucuacuguuuuuuccu

SEQ ID NO: 646800 - RNA, 23 nt, Artificial Sequence
  Synthetic
auuugauucuacuguuuuuuccu

SEQ ID NO: 646801 - RNA, 24 nt, Artificial Sequence
  Synthetic
aauuugauucuacuguuuuuuccu

SEQ ID NO: 646802 - RNA, 18 nt, Artificial Sequence
  Synthetic
uccuaaaagacaaaagcu

SEQ ID NO: 646803 - RNA, 19 nt, Artificial Sequence
  Synthetic
uuccuaaaagacaaaagcu

SEQ ID NO: 646804 - RNA, 20 nt, Artificial Sequence
  Synthetic
auuccuaaaagacaaaagcu

SEQ ID NO: 646805 - RNA, 21 nt, Artificial Sequence
  Synthetic
cauuccuaaaagacaaaagcu

SEQ ID NO: 646806 - RNA, 22 nt, Artificial Sequence
  Synthetic
ucauuccuaaaagacaaaagcu

SEQ ID NO: 646807 - RNA, 23 nt, Artificial Sequence
  Synthetic
uucauuccuaaaagacaaaagcu

SEQ ID NO: 646808 - RNA, 24 nt, Artificial Sequence
  Synthetic
auucauuccuaaaagacaaaagcu

SEQ ID NO: 646809 - RNA, 18 nt, Artificial Sequence
  Synthetic
cgggucaaugcaaaagcu

SEQ ID NO: 646810 - RNA, 19 nt, Artificial Sequence
  Synthetic
ucgggucaaugcaaaagcu

SEQ ID NO: 646811 - RNA, 20 nt, Artificial Sequence
  Synthetic
uucgggucaaugcaaaagcu

SEQ ID NO: 646812 - RNA, 21 nt, Artificial Sequence
  Synthetic
guucgggucaaugcaaaagcu

SEQ ID NO: 646813 - RNA, 22 nt, Artificial Sequence
  Synthetic
uguucgggucaaugcaaaagcu

SEQ ID NO: 646814 - RNA, 23 nt, Artificial Sequence
  Synthetic
auguucgggucaaugcaaaagcu

SEQ ID NO: 646815 - RNA, 24 nt, Artificial Sequence
  Synthetic
uauguucgggucaaugcaaaagcu

SEQ ID NO: 646816 - RNA, 18 nt, Artificial Sequence
  Synthetic
ucccaguaaagaaaagcu

SEQ ID NO: 646817 - RNA, 19 nt, Artificial Sequence
  Synthetic
cucccaguaaagaaaagcu

SEQ ID NO: 646818 - RNA, 20 nt, Artificial Sequence
  Synthetic
ucucccaguaaagaaaagcu

SEQ ID NO: 646819 - RNA, 21 nt, Artificial Sequence
  Synthetic
cucucccaguaaagaaaagcu

SEQ ID NO: 646820 - RNA, 22 nt, Artificial Sequence
  Synthetic
acucucccaguaaagaaaagcu

SEQ ID NO: 646821 - RNA, 23 nt, Artificial Sequence
  Synthetic
aacucucccaguaaagaaaagcu

SEQ ID NO: 646822 - RNA, 24 nt, Artificial Sequence
  Synthetic
aaacucucccaguaaagaaaagcu

SEQ ID NO: 646823 - RNA, 18 nt, Artificial Sequence
  Synthetic
augaauguuagaaaagcu

SEQ ID NO: 646824 - RNA, 19 nt, Artificial Sequence
  Synthetic
uaugaauguuagaaaagcu

SEQ ID NO: 646825 - RNA, 20 nt, Artificial Sequence
  Synthetic
uuaugaauguuagaaaagcu

SEQ ID NO: 646826 - RNA, 21 nt, Artificial Sequence
  Synthetic
auuaugaauguuagaaaagcu

SEQ ID NO: 646827 - RNA, 22 nt, Artificial Sequence
  Synthetic
aauuaugaauguuagaaaagcu

SEQ ID NO: 646828 - RNA, 23 nt, Artificial Sequence
  Synthetic
caauuaugaauguuagaaaagcu

SEQ ID NO: 646829 - RNA, 24 nt, Artificial Sequence
  Synthetic
acaauuaugaauguuagaaaagcu

SEQ ID NO: 646830 - RNA, 18 nt, Artificial Sequence
  Synthetic
agaguguauggaaaagcu

SEQ ID NO: 646831 - RNA, 19 nt, Artificial Sequence
  Synthetic
aagaguguauggaaaagcu

SEQ ID NO: 646832 - RNA, 20 nt, Artificial Sequence
  Synthetic
aaagaguguauggaaaagcu

SEQ ID NO: 646833 - RNA, 21 nt, Artificial Sequence
  Synthetic
uaaagaguguauggaaaagcu

SEQ ID NO: 646834 - RNA, 22 nt, Artificial Sequence
  Synthetic
guaaagaguguauggaaaagcu

SEQ ID NO: 646835 - RNA, 23 nt, Artificial Sequence
  Synthetic
uguaaagaguguauggaaaagcu

SEQ ID NO: 646836 - RNA, 24 nt, Artificial Sequence
  Synthetic
guguaaagaguguauggaaaagcu

SEQ ID NO: 646837 - RNA, 18 nt, Artificial Sequence
  Synthetic
agcauauauguaaaagcu

SEQ ID NO: 646838 - RNA, 19 nt, Artificial Sequence
  Synthetic
gagcauauauguaaaagcu

SEQ ID NO: 646839 - RNA, 20 nt, Artificial Sequence
  Synthetic
agagcauauauguaaaagcu

SEQ ID NO: 646840 - RNA, 21 nt, Artificial Sequence
  Synthetic
cagagcauauauguaaaagcu

SEQ ID NO: 646841 - RNA, 22 nt, Artificial Sequence
  Synthetic
ucagagcauauauguaaaagcu

SEQ ID NO: 646842 - RNA, 23 nt, Artificial Sequence
  Synthetic
aucagagcauauauguaaaagcu

SEQ ID NO: 646843 - RNA, 24 nt, Artificial Sequence
  Synthetic
uaucagagcauauauguaaaagcu

SEQ ID NO: 646844 - RNA, 18 nt, Artificial Sequence
  Synthetic
aucuaccaccccaaagcu

SEQ ID NO: 646845 - RNA, 19 nt, Artificial Sequence
  Synthetic
caucuaccaccccaaagcu

SEQ ID NO: 646846 - RNA, 20 nt, Artificial Sequence
  Synthetic
ccaucuaccaccccaaagcu

SEQ ID NO: 646847 - RNA, 21 nt, Artificial Sequence
  Synthetic
cccaucuaccaccccaaagcu

SEQ ID NO: 646848 - RNA, 22 nt, Artificial Sequence
  Synthetic
gcccaucuaccaccccaaagcu

SEQ ID NO: 646849 - RNA, 23 nt, Artificial Sequence
  Synthetic
ugcccaucuaccaccccaaagcu

SEQ ID NO: 646850 - RNA, 24 nt, Artificial Sequence
  Synthetic
gugcccaucuaccaccccaaagcu

SEQ ID NO: 646851 - RNA, 18 nt, Artificial Sequence
  Synthetic
agauacgcaaucaaagcu

SEQ ID NO: 646852 - RNA, 19 nt, Artificial Sequence
  Synthetic
cagauacgcaaucaaagcu

SEQ ID NO: 646853 - RNA, 20 nt, Artificial Sequence
  Synthetic
ucagauacgcaaucaaagcu

SEQ ID NO: 646854 - RNA, 21 nt, Artificial Sequence
  Synthetic
uucagauacgcaaucaaagcu

SEQ ID NO: 646855 - RNA, 22 nt, Artificial Sequence
  Synthetic
auucagauacgcaaucaaagcu

SEQ ID NO: 646856 - RNA, 23 nt, Artificial Sequence
  Synthetic
gauucagauacgcaaucaaagcu

SEQ ID NO: 646857 - RNA, 24 nt, Artificial Sequence
  Synthetic
ugauucagauacgcaaucaaagcu

SEQ ID NO: 646858 - RNA, 18 nt, Artificial Sequence
  Synthetic
uacauuaucaucaaagcu

SEQ ID NO: 646859 - RNA, 19 nt, Artificial Sequence
  Synthetic
guacauuaucaucaaagcu

SEQ ID NO: 646860 - RNA, 20 nt, Artificial Sequence
  Synthetic
aguacauuaucaucaaagcu

SEQ ID NO: 646861 - RNA, 21 nt, Artificial Sequence
  Synthetic
uaguacauuaucaucaaagcu

SEQ ID NO: 646862 - RNA, 22 nt, Artificial Sequence
  Synthetic
auaguacauuaucaucaaagcu

SEQ ID NO: 646863 - RNA, 23 nt, Artificial Sequence
  Synthetic
cauaguacauuaucaucaaagcu

SEQ ID NO: 646864 - RNA, 24 nt, Artificial Sequence
  Synthetic
ccauaguacauuaucaucaaagcu

SEQ ID NO: 646865 - RNA, 18 nt, Artificial Sequence
  Synthetic
agaaaaccacucaaagcu

SEQ ID NO: 646866 - RNA, 19 nt, Artificial Sequence
  Synthetic
aagaaaaccacucaaagcu

SEQ ID NO: 646867 - RNA, 20 nt, Artificial Sequence
  Synthetic
caagaaaaccacucaaagcu

SEQ ID NO: 646868 - RNA, 21 nt, Artificial Sequence
  Synthetic
gcaagaaaaccacucaaagcu

SEQ ID NO: 646869 - RNA, 22 nt, Artificial Sequence
  Synthetic
ugcaagaaaaccacucaaagcu

SEQ ID NO: 646870 - RNA, 23 nt, Artificial Sequence
  Synthetic
augcaagaaaaccacucaaagcu

SEQ ID NO: 646871 - RNA, 24 nt, Artificial Sequence
  Synthetic
uaugcaagaaaaccacucaaagcu

SEQ ID NO: 646872 - RNA, 18 nt, Artificial Sequence
  Synthetic
aguaaauaauucaaagcu

SEQ ID NO: 646873 - RNA, 19 nt, Artificial Sequence
  Synthetic
caguaaauaauucaaagcu

SEQ ID NO: 646874 - RNA, 20 nt, Artificial Sequence
  Synthetic
acaguaaauaauucaaagcu

SEQ ID NO: 646875 - RNA, 21 nt, Artificial Sequence
  Synthetic
gacaguaaauaauucaaagcu

SEQ ID NO: 646876 - RNA, 22 nt, Artificial Sequence
  Synthetic
ggacaguaaauaauucaaagcu

SEQ ID NO: 646877 - RNA, 23 nt, Artificial Sequence
  Synthetic
uggacaguaaauaauucaaagcu

SEQ ID NO: 646878 - RNA, 24 nt, Artificial Sequence
  Synthetic
cuggacaguaaauaauucaaagcu

SEQ ID NO: 646879 - RNA, 18 nt, Artificial Sequence
  Synthetic
aaacuaaagaagaaagcu

SEQ ID NO: 646880 - RNA, 19 nt, Artificial Sequence
  Synthetic
uaaacuaaagaagaaagcu

SEQ ID NO: 646881 - RNA, 20 nt, Artificial Sequence
  Synthetic
auaaacuaaagaagaaagcu

SEQ ID NO: 646882 - RNA, 21 nt, Artificial Sequence
  Synthetic
cauaaacuaaagaagaaagcu

SEQ ID NO: 646883 - RNA, 22 nt, Artificial Sequence
  Synthetic
ccauaaacuaaagaagaaagcu

SEQ ID NO: 646884 - RNA, 23 nt, Artificial Sequence
  Synthetic
uccauaaacuaaagaagaaagcu

SEQ ID NO: 646885 - RNA, 24 nt, Artificial Sequence
  Synthetic
cuccauaaacuaaagaagaaagcu

SEQ ID NO: 646886 - RNA, 18 nt, Artificial Sequence
  Synthetic
augugugugcugaaagcu

SEQ ID NO: 646887 - RNA, 19 nt, Artificial Sequence
  Synthetic
gaugugugugcugaaagcu

SEQ ID NO: 646888 - RNA, 20 nt, Artificial Sequence
  Synthetic
agaugugugugcugaaagcu

SEQ ID NO: 646889 - RNA, 21 nt, Artificial Sequence
  Synthetic
aagaugugugugcugaaagcu

SEQ ID NO: 646890 - RNA, 22 nt, Artificial Sequence
  Synthetic
aaagaugugugugcugaaagcu

SEQ ID NO: 646891 - RNA, 23 nt, Artificial Sequence
  Synthetic
aaaagaugugugugcugaaagcu

SEQ ID NO: 646892 - RNA, 24 nt, Artificial Sequence
  Synthetic
uaaaagaugugugugcugaaagcu

SEQ ID NO: 646893 - RNA, 18 nt, Artificial Sequence
  Synthetic
uacaucauaucuaaagcu

SEQ ID NO: 646894 - RNA, 19 nt, Artificial Sequence
  Synthetic
uuacaucauaucuaaagcu

SEQ ID NO: 646895 - RNA, 20 nt, Artificial Sequence
  Synthetic
uuuacaucauaucuaaagcu

SEQ ID NO: 646896 - RNA, 21 nt, Artificial Sequence
  Synthetic
uuuuacaucauaucuaaagcu

SEQ ID NO: 646897 - RNA, 22 nt, Artificial Sequence
  Synthetic
auuuuacaucauaucuaaagcu

SEQ ID NO: 646898 - RNA, 23 nt, Artificial Sequence
  Synthetic
uauuuuacaucauaucuaaagcu

SEQ ID NO: 646899 - RNA, 24 nt, Artificial Sequence
  Synthetic
cuauuuuacaucauaucuaaagcu

SEQ ID NO: 646900 - RNA, 18 nt, Artificial Sequence
  Synthetic
uguuucucagguaaagcu

SEQ ID NO: 646901 - RNA, 19 nt, Artificial Sequence
  Synthetic
uuguuucucagguaaagcu

SEQ ID NO: 646902 - RNA, 20 nt, Artificial Sequence
  Synthetic
cuuguuucucagguaaagcu

SEQ ID NO: 646903 - RNA, 21 nt, Artificial Sequence
  Synthetic
ccuuguuucucagguaaagcu

SEQ ID NO: 646904 - RNA, 22 nt, Artificial Sequence
  Synthetic
uccuuguuucucagguaaagcu

SEQ ID NO: 646905 - RNA, 23 nt, Artificial Sequence
  Synthetic
cuccuuguuucucagguaaagcu

SEQ ID NO: 646906 - RNA, 24 nt, Artificial Sequence
  Synthetic
ucuccuuguuucucagguaaagcu

SEQ ID NO: 646907 - RNA, 18 nt, Artificial Sequence
  Synthetic
caaguaauaacacaagcu

SEQ ID NO: 646908 - RNA, 19 nt, Artificial Sequence
  Synthetic
gcaaguaauaacacaagcu

SEQ ID NO: 646909 - RNA, 20 nt, Artificial Sequence
  Synthetic
agcaaguaauaacacaagcu

SEQ ID NO: 646910 - RNA, 21 nt, Artificial Sequence
  Synthetic
uagcaaguaauaacacaagcu

SEQ ID NO: 646911 - RNA, 22 nt, Artificial Sequence
  Synthetic
guagcaaguaauaacacaagcu

SEQ ID NO: 646912 - RNA, 23 nt, Artificial Sequence
  Synthetic
aguagcaaguaauaacacaagcu

SEQ ID NO: 646913 - RNA, 24 nt, Artificial Sequence
  Synthetic
caguagcaaguaauaacacaagcu

SEQ ID NO: 646914 - RNA, 18 nt, Artificial Sequence
  Synthetic
cagaagagggcacaagcu

SEQ ID NO: 646915 - RNA, 19 nt, Artificial Sequence
  Synthetic
gcagaagagggcacaagcu

SEQ ID NO: 646916 - RNA, 20 nt, Artificial Sequence
  Synthetic
cgcagaagagggcacaagcu

SEQ ID NO: 646917 - RNA, 21 nt, Artificial Sequence
  Synthetic
acgcagaagagggcacaagcu

SEQ ID NO: 646918 - RNA, 22 nt, Artificial Sequence
  Synthetic
aacgcagaagagggcacaagcu

SEQ ID NO: 646919 - RNA, 23 nt, Artificial Sequence
  Synthetic
aaacgcagaagagggcacaagcu

SEQ ID NO: 646920 - RNA, 24 nt, Artificial Sequence
  Synthetic
uaaacgcagaagagggcacaagcu

SEQ ID NO: 646921 - RNA, 18 nt, Artificial Sequence
  Synthetic
cugaugaaaauacaagcu

SEQ ID NO: 646922 - RNA, 19 nt, Artificial Sequence
  Synthetic
ccugaugaaaauacaagcu

SEQ ID NO: 646923 - RNA, 20 nt, Artificial Sequence
  Synthetic
uccugaugaaaauacaagcu

SEQ ID NO: 646924 - RNA, 21 nt, Artificial Sequence
  Synthetic
uuccugaugaaaauacaagcu

SEQ ID NO: 646925 - RNA, 22 nt, Artificial Sequence
  Synthetic
uuuccugaugaaaauacaagcu

SEQ ID NO: 646926 - RNA, 23 nt, Artificial Sequence
  Synthetic
auuuccugaugaaaauacaagcu

SEQ ID NO: 646927 - RNA, 24 nt, Artificial Sequence
  Synthetic
uauuuccugaugaaaauacaagcu

SEQ ID NO: 646928 - RNA, 18 nt, Artificial Sequence
  Synthetic
caacaaugacuacaagcu

SEQ ID NO: 646929 - RNA, 19 nt, Artificial Sequence
  Synthetic
ucaacaaugacuacaagcu

SEQ ID NO: 646930 - RNA, 20 nt, Artificial Sequence
  Synthetic
uucaacaaugacuacaagcu

SEQ ID NO: 646931 - RNA, 21 nt, Artificial Sequence
  Synthetic
uuucaacaaugacuacaagcu

SEQ ID NO: 646932 - RNA, 22 nt, Artificial Sequence
  Synthetic
cuuucaacaaugacuacaagcu

SEQ ID NO: 646933 - RNA, 23 nt, Artificial Sequence
  Synthetic
ccuuucaacaaugacuacaagcu

SEQ ID NO: 646934 - RNA, 24 nt, Artificial Sequence
  Synthetic
uccuuucaacaaugacuacaagcu

SEQ ID NO: 646935 - RNA, 18 nt, Artificial Sequence
  Synthetic
gaacucaaccaccaagcu

SEQ ID NO: 646936 - RNA, 19 nt, Artificial Sequence
  Synthetic
agaacucaaccaccaagcu

SEQ ID NO: 646937 - RNA, 20 nt, Artificial Sequence
  Synthetic
cagaacucaaccaccaagcu

SEQ ID NO: 646938 - RNA, 21 nt, Artificial Sequence
  Synthetic
acagaacucaaccaccaagcu

SEQ ID NO: 646939 - RNA, 22 nt, Artificial Sequence
  Synthetic
cacagaacucaaccaccaagcu

SEQ ID NO: 646940 - RNA, 23 nt, Artificial Sequence
  Synthetic
ucacagaacucaaccaccaagcu

SEQ ID NO: 646941 - RNA, 24 nt, Artificial Sequence
  Synthetic
uucacagaacucaaccaccaagcu

SEQ ID NO: 646942 - RNA, 18 nt, Artificial Sequence
  Synthetic
uccuaauucuaccaagcu

SEQ ID NO: 646943 - RNA, 19 nt, Artificial Sequence
  Synthetic
uuccuaauucuaccaagcu

SEQ ID NO: 646944 - RNA, 20 nt, Artificial Sequence
  Synthetic
cuuccuaauucuaccaagcu

SEQ ID NO: 646945 - RNA, 21 nt, Artificial Sequence
  Synthetic
acuuccuaauucuaccaagcu

SEQ ID NO: 646946 - RNA, 22 nt, Artificial Sequence
  Synthetic
uacuuccuaauucuaccaagcu

SEQ ID NO: 646947 - RNA, 23 nt, Artificial Sequence
  Synthetic
uuacuuccuaauucuaccaagcu

SEQ ID NO: 646948 - RNA, 24 nt, Artificial Sequence
  Synthetic
cuuacuuccuaauucuaccaagcu

SEQ ID NO: 646949 - RNA, 18 nt, Artificial Sequence
  Synthetic
cagcuugggagccaagcu

SEQ ID NO: 646950 - RNA, 19 nt, Artificial Sequence
  Synthetic
acagcuugggagccaagcu

SEQ ID NO: 646951 - RNA, 20 nt, Artificial Sequence
  Synthetic
cacagcuugggagccaagcu

SEQ ID NO: 646952 - RNA, 21 nt, Artificial Sequence
  Synthetic
acacagcuugggagccaagcu

SEQ ID NO: 646953 - RNA, 22 nt, Artificial Sequence
  Synthetic
cacacagcuugggagccaagcu

SEQ ID NO: 646954 - RNA, 23 nt, Artificial Sequence
  Synthetic
ucacacagcuugggagccaagcu

SEQ ID NO: 646955 - RNA, 24 nt, Artificial Sequence
  Synthetic
gucacacagcuugggagccaagcu

SEQ ID NO: 646956 - RNA, 18 nt, Artificial Sequence
  Synthetic
cauaaauacugucaagcu

SEQ ID NO: 646957 - RNA, 19 nt, Artificial Sequence
  Synthetic
gcauaaauacugucaagcu

SEQ ID NO: 646958 - RNA, 20 nt, Artificial Sequence
  Synthetic
ugcauaaauacugucaagcu

SEQ ID NO: 646959 - RNA, 21 nt, Artificial Sequence
  Synthetic
gugcauaaauacugucaagcu

SEQ ID NO: 646960 - RNA, 22 nt, Artificial Sequence
  Synthetic
cgugcauaaauacugucaagcu

SEQ ID NO: 646961 - RNA, 23 nt, Artificial Sequence
  Synthetic
ccgugcauaaauacugucaagcu

SEQ ID NO: 646962 - RNA, 24 nt, Artificial Sequence
  Synthetic
accgugcauaaauacugucaagcu

SEQ ID NO: 646963 - RNA, 18 nt, Artificial Sequence
  Synthetic
ccuuuuauccuucaagcu

SEQ ID NO: 646964 - RNA, 19 nt, Artificial Sequence
  Synthetic
accuuuuauccuucaagcu

SEQ ID NO: 646965 - RNA, 20 nt, Artificial Sequence
  Synthetic
gaccuuuuauccuucaagcu

SEQ ID NO: 646966 - RNA, 21 nt, Artificial Sequence
  Synthetic
ugaccuuuuauccuucaagcu

SEQ ID NO: 646967 - RNA, 22 nt, Artificial Sequence
  Synthetic
uugaccuuuuauccuucaagcu

SEQ ID NO: 646968 - RNA, 23 nt, Artificial Sequence
  Synthetic
uuugaccuuuuauccuucaagcu

SEQ ID NO: 646969 - RNA, 24 nt, Artificial Sequence
  Synthetic
guuugaccuuuuauccuucaagcu

SEQ ID NO: 646970 - RNA, 18 nt, Artificial Sequence
  Synthetic
ccuuugucucuucaagcu

SEQ ID NO: 646971 - RNA, 19 nt, Artificial Sequence
  Synthetic
uccuuugucucuucaagcu

SEQ ID NO: 646972 - RNA, 20 nt, Artificial Sequence
  Synthetic
cuccuuugucucuucaagcu

SEQ ID NO: 646973 - RNA, 21 nt, Artificial Sequence
  Synthetic
ucuccuuugucucuucaagcu

SEQ ID NO: 646974 - RNA, 22 nt, Artificial Sequence
  Synthetic
aucuccuuugucucuucaagcu

SEQ ID NO: 646975 - RNA, 23 nt, Artificial Sequence
  Synthetic
aaucuccuuugucucuucaagcu

SEQ ID NO: 646976 - RNA, 24 nt, Artificial Sequence
  Synthetic
aaaucuccuuugucucuucaagcu

SEQ ID NO: 646977 - RNA, 18 nt, Artificial Sequence
  Synthetic
uuaguggugaaagaagcu

SEQ ID NO: 646978 - RNA, 19 nt, Artificial Sequence
  Synthetic
auuaguggugaaagaagcu

SEQ ID NO: 646979 - RNA, 20 nt, Artificial Sequence
  Synthetic
aauuaguggugaaagaagcu

SEQ ID NO: 646980 - RNA, 21 nt, Artificial Sequence
  Synthetic
gaauuaguggugaaagaagcu

SEQ ID NO: 646981 - RNA, 22 nt, Artificial Sequence
  Synthetic
ggaauuaguggugaaagaagcu

SEQ ID NO: 646982 - RNA, 23 nt, Artificial Sequence
  Synthetic
aggaauuaguggugaaagaagcu

SEQ ID NO: 646983 - RNA, 24 nt, Artificial Sequence
  Synthetic
aaggaauuaguggugaaagaagcu

SEQ ID NO: 646984 - RNA, 18 nt, Artificial Sequence
  Synthetic
gauuacuacgaagaagcu

SEQ ID NO: 646985 - RNA, 19 nt, Artificial Sequence
  Synthetic
ggauuacuacgaagaagcu

SEQ ID NO: 646986 - RNA, 20 nt, Artificial Sequence
  Synthetic
aggauuacuacgaagaagcu

SEQ ID NO: 646987 - RNA, 21 nt, Artificial Sequence
  Synthetic
uaggauuacuacgaagaagcu

SEQ ID NO: 646988 - RNA, 22 nt, Artificial Sequence
  Synthetic
uuaggauuacuacgaagaagcu

SEQ ID NO: 646989 - RNA, 23 nt, Artificial Sequence
  Synthetic
uuuaggauuacuacgaagaagcu

SEQ ID NO: 646990 - RNA, 24 nt, Artificial Sequence
  Synthetic
auuuaggauuacuacgaagaagcu

SEQ ID NO: 646991 - RNA, 18 nt, Artificial Sequence
  Synthetic
acuccuucugaagaagcu

SEQ ID NO: 646992 - RNA, 19 nt, Artificial Sequence
  Synthetic
uacuccuucugaagaagcu

SEQ ID NO: 646993 - RNA, 20 nt, Artificial Sequence
  Synthetic
auacuccuucugaagaagcu

SEQ ID NO: 646994 - RNA, 21 nt, Artificial Sequence
  Synthetic
uauacuccuucugaagaagcu

SEQ ID NO: 646995 - RNA, 22 nt, Artificial Sequence
  Synthetic
cuauacuccuucugaagaagcu

SEQ ID NO: 646996 - RNA, 23 nt, Artificial Sequence
  Synthetic
gcuauacuccuucugaagaagcu

SEQ ID NO: 646997 - RNA, 24 nt, Artificial Sequence
  Synthetic
ggcuauacuccuucugaagaagcu

SEQ ID NO: 646998 - RNA, 18 nt, Artificial Sequence
  Synthetic
acuuucaaggcagaagcu

SEQ ID NO: 646999 - RNA, 19 nt, Artificial Sequence
  Synthetic
uacuuucaaggcagaagcu

SEQ ID NO: 647000 - RNA, 20 nt, Artificial Sequence
  Synthetic
uuacuuucaaggcagaagcu

SEQ ID NO: 647001 - RNA, 21 nt, Artificial Sequence
  Synthetic
cuuacuuucaaggcagaagcu

SEQ ID NO: 647002 - RNA, 22 nt, Artificial Sequence
  Synthetic
ucuuacuuucaaggcagaagcu

SEQ ID NO: 647003 - RNA, 23 nt, Artificial Sequence
  Synthetic
uucuuacuuucaaggcagaagcu

SEQ ID NO: 647004 - RNA, 24 nt, Artificial Sequence
  Synthetic
auucuuacuuucaaggcagaagcu

SEQ ID NO: 647005 - RNA, 18 nt, Artificial Sequence
  Synthetic
uucaguaacauagaagcu

SEQ ID NO: 647006 - RNA, 19 nt, Artificial Sequence
  Synthetic
uuucaguaacauagaagcu

SEQ ID NO: 647007 - RNA, 20 nt, Artificial Sequence
  Synthetic
uuuucaguaacauagaagcu

SEQ ID NO: 647008 - RNA, 21 nt, Artificial Sequence
  Synthetic
cuuuucaguaacauagaagcu

SEQ ID NO: 647009 - RNA, 22 nt, Artificial Sequence
  Synthetic
ccuuuucaguaacauagaagcu

SEQ ID NO: 647010 - RNA, 23 nt, Artificial Sequence
  Synthetic
gccuuuucaguaacauagaagcu

SEQ ID NO: 647011 - RNA, 24 nt, Artificial Sequence
  Synthetic
ugccuuuucaguaacauagaagcu

SEQ ID NO: 647012 - RNA, 18 nt, Artificial Sequence
  Synthetic
gaagggucauucgaagcu

SEQ ID NO: 647013 - RNA, 19 nt, Artificial Sequence
  Synthetic
ugaagggucauucgaagcu

SEQ ID NO: 647014 - RNA, 20 nt, Artificial Sequence
  Synthetic
cugaagggucauucgaagcu

SEQ ID NO: 647015 - RNA, 21 nt, Artificial Sequence
  Synthetic
ucugaagggucauucgaagcu

SEQ ID NO: 647016 - RNA, 22 nt, Artificial Sequence
  Synthetic
cucugaagggucauucgaagcu

SEQ ID NO: 647017 - RNA, 23 nt, Artificial Sequence
  Synthetic
acucugaagggucauucgaagcu

SEQ ID NO: 647018 - RNA, 24 nt, Artificial Sequence
  Synthetic
uacucugaagggucauucgaagcu

SEQ ID NO: 647019 - RNA, 18 nt, Artificial Sequence
  Synthetic
acaauugagcaggaagcu

SEQ ID NO: 647020 - RNA, 19 nt, Artificial Sequence
  Synthetic
gacaauugagcaggaagcu

SEQ ID NO: 647021 - RNA, 20 nt, Artificial Sequence
  Synthetic
ggacaauugagcaggaagcu

SEQ ID NO: 647022 - RNA, 21 nt, Artificial Sequence
  Synthetic
gggacaauugagcaggaagcu

SEQ ID NO: 647023 - RNA, 22 nt, Artificial Sequence
  Synthetic
ugggacaauugagcaggaagcu

SEQ ID NO: 647024 - RNA, 23 nt, Artificial Sequence
  Synthetic
cugggacaauugagcaggaagcu

SEQ ID NO: 647025 - RNA, 24 nt, Artificial Sequence
  Synthetic
ccugggacaauugagcaggaagcu

SEQ ID NO: 647026 - RNA, 18 nt, Artificial Sequence
  Synthetic
agaaaaucucgggaagcu

SEQ ID NO: 647027 - RNA, 19 nt, Artificial Sequence
  Synthetic
cagaaaaucucgggaagcu

SEQ ID NO: 647028 - RNA, 20 nt, Artificial Sequence
  Synthetic
ccagaaaaucucgggaagcu

SEQ ID NO: 647029 - RNA, 21 nt, Artificial Sequence
  Synthetic
accagaaaaucucgggaagcu

SEQ ID NO: 647030 - RNA, 22 nt, Artificial Sequence
  Synthetic
aaccagaaaaucucgggaagcu

SEQ ID NO: 647031 - RNA, 23 nt, Artificial Sequence
  Synthetic
uaaccagaaaaucucgggaagcu

SEQ ID NO: 647032 - RNA, 24 nt, Artificial Sequence
  Synthetic
uuaaccagaaaaucucgggaagcu

SEQ ID NO: 647033 - RNA, 18 nt, Artificial Sequence
  Synthetic
ccagugcuuugggaagcu

SEQ ID NO: 647034 - RNA, 19 nt, Artificial Sequence
  Synthetic
uccagugcuuugggaagcu

SEQ ID NO: 647035 - RNA, 20 nt, Artificial Sequence
  Synthetic
uuccagugcuuugggaagcu

SEQ ID NO: 647036 - RNA, 21 nt, Artificial Sequence
  Synthetic
auuccagugcuuugggaagcu

SEQ ID NO: 647037 - RNA, 22 nt, Artificial Sequence
  Synthetic
aauuccagugcuuugggaagcu

SEQ ID NO: 647038 - RNA, 23 nt, Artificial Sequence
  Synthetic
gaauuccagugcuuugggaagcu

SEQ ID NO: 647039 - RNA, 24 nt, Artificial Sequence
  Synthetic
ggaauuccagugcuuugggaagcu

SEQ ID NO: 647040 - RNA, 18 nt, Artificial Sequence
  Synthetic
accuacaagauugaagcu

SEQ ID NO: 647041 - RNA, 19 nt, Artificial Sequence
  Synthetic
gaccuacaagauugaagcu

SEQ ID NO: 647042 - RNA, 20 nt, Artificial Sequence
  Synthetic
agaccuacaagauugaagcu

SEQ ID NO: 647043 - RNA, 21 nt, Artificial Sequence
  Synthetic
gagaccuacaagauugaagcu

SEQ ID NO: 647044 - RNA, 22 nt, Artificial Sequence
  Synthetic
ggagaccuacaagauugaagcu

SEQ ID NO: 647045 - RNA, 23 nt, Artificial Sequence
  Synthetic
uggagaccuacaagauugaagcu

SEQ ID NO: 647046 - RNA, 24 nt, Artificial Sequence
  Synthetic
auggagaccuacaagauugaagcu

SEQ ID NO: 647047 - RNA, 18 nt, Artificial Sequence
  Synthetic
ucaaagguucaauaagcu

SEQ ID NO: 647048 - RNA, 19 nt, Artificial Sequence
  Synthetic
gucaaagguucaauaagcu

SEQ ID NO: 647049 - RNA, 20 nt, Artificial Sequence
  Synthetic
ggucaaagguucaauaagcu

SEQ ID NO: 647050 - RNA, 21 nt, Artificial Sequence
  Synthetic
gggucaaagguucaauaagcu

SEQ ID NO: 647051 - RNA, 22 nt, Artificial Sequence
  Synthetic
ugggucaaagguucaauaagcu

SEQ ID NO: 647052 - RNA, 23 nt, Artificial Sequence
  Synthetic
augggucaaagguucaauaagcu

SEQ ID NO: 647053 - RNA, 24 nt, Artificial Sequence
  Synthetic
aaugggucaaagguucaauaagcu

SEQ ID NO: 647054 - RNA, 18 nt, Artificial Sequence
  Synthetic
gaagaaaaggaauaagcu

SEQ ID NO: 647055 - RNA, 19 nt, Artificial Sequence
  Synthetic
ugaagaaaaggaauaagcu

SEQ ID NO: 647056 - RNA, 20 nt, Artificial Sequence
  Synthetic
augaagaaaaggaauaagcu

SEQ ID NO: 647057 - RNA, 21 nt, Artificial Sequence
  Synthetic
aaugaagaaaaggaauaagcu

SEQ ID NO: 647058 - RNA, 22 nt, Artificial Sequence
  Synthetic
aaaugaagaaaaggaauaagcu

SEQ ID NO: 647059 - RNA, 23 nt, Artificial Sequence
  Synthetic
caaaugaagaaaaggaauaagcu

SEQ ID NO: 647060 - RNA, 24 nt, Artificial Sequence
  Synthetic
acaaaugaagaaaaggaauaagcu

SEQ ID NO: 647061 - RNA, 18 nt, Artificial Sequence
  Synthetic
cuuuagagauaauaagcu

SEQ ID NO: 647062 - RNA, 19 nt, Artificial Sequence
  Synthetic
gcuuuagagauaauaagcu

SEQ ID NO: 647063 - RNA, 20 nt, Artificial Sequence
  Synthetic
agcuuuagagauaauaagcu

SEQ ID NO: 647064 - RNA, 21 nt, Artificial Sequence
  Synthetic
uagcuuuagagauaauaagcu

SEQ ID NO: 647065 - RNA, 22 nt, Artificial Sequence
  Synthetic
uuagcuuuagagauaauaagcu

SEQ ID NO: 647066 - RNA, 23 nt, Artificial Sequence
  Synthetic
uuuagcuuuagagauaauaagcu

SEQ ID NO: 647067 - RNA, 24 nt, Artificial Sequence
  Synthetic
cuuuagcuuuagagauaauaagcu

SEQ ID NO: 647068 - RNA, 18 nt, Artificial Sequence
  Synthetic
ugauuaauagcauaagcu

SEQ ID NO: 647069 - RNA, 19 nt, Artificial Sequence
  Synthetic
cugauuaauagcauaagcu

SEQ ID NO: 647070 - RNA, 20 nt, Artificial Sequence
  Synthetic
acugauuaauagcauaagcu

SEQ ID NO: 647071 - RNA, 21 nt, Artificial Sequence
  Synthetic
cacugauuaauagcauaagcu

SEQ ID NO: 647072 - RNA, 22 nt, Artificial Sequence
  Synthetic
gcacugauuaauagcauaagcu

SEQ ID NO: 647073 - RNA, 23 nt, Artificial Sequence
  Synthetic
ugcacugauuaauagcauaagcu

SEQ ID NO: 647074 - RNA, 24 nt, Artificial Sequence
  Synthetic
gugcacugauuaauagcauaagcu

SEQ ID NO: 647075 - RNA, 18 nt, Artificial Sequence
  Synthetic
ucuuacauugcauaagcu

SEQ ID NO: 647076 - RNA, 19 nt, Artificial Sequence
  Synthetic
uucuuacauugcauaagcu

SEQ ID NO: 647077 - RNA, 20 nt, Artificial Sequence
  Synthetic
auucuuacauugcauaagcu

SEQ ID NO: 647078 - RNA, 21 nt, Artificial Sequence
  Synthetic
uauucuuacauugcauaagcu

SEQ ID NO: 647079 - RNA, 22 nt, Artificial Sequence
  Synthetic
guauucuuacauugcauaagcu

SEQ ID NO: 647080 - RNA, 23 nt, Artificial Sequence
  Synthetic
uguauucuuacauugcauaagcu

SEQ ID NO: 647081 - RNA, 24 nt, Artificial Sequence
  Synthetic
auguauucuuacauugcauaagcu

SEQ ID NO: 647082 - RNA, 18 nt, Artificial Sequence
  Synthetic
guaagugggagcuaagcu

SEQ ID NO: 647083 - RNA, 19 nt, Artificial Sequence
  Synthetic
cguaagugggagcuaagcu

SEQ ID NO: 647084 - RNA, 20 nt, Artificial Sequence
  Synthetic
ucguaagugggagcuaagcu

SEQ ID NO: 647085 - RNA, 21 nt, Artificial Sequence
  Synthetic
cucguaagugggagcuaagcu

SEQ ID NO: 647086 - RNA, 22 nt, Artificial Sequence
  Synthetic
acucguaagugggagcuaagcu

SEQ ID NO: 647087 - RNA, 23 nt, Artificial Sequence
  Synthetic
cacucguaagugggagcuaagcu

SEQ ID NO: 647088 - RNA, 24 nt, Artificial Sequence
  Synthetic
ucacucguaagugggagcuaagcu

SEQ ID NO: 647089 - RNA, 18 nt, Artificial Sequence
  Synthetic
auacgugggagcuaagcu

SEQ ID NO: 647090 - RNA, 19 nt, Artificial Sequence
  Synthetic
gauacgugggagcuaagcu

SEQ ID NO: 647091 - RNA, 20 nt, Artificial Sequence
  Synthetic
ugauacgugggagcuaagcu

SEQ ID NO: 647092 - RNA, 21 nt, Artificial Sequence
  Synthetic
cugauacgugggagcuaagcu

SEQ ID NO: 647093 - RNA, 22 nt, Artificial Sequence
  Synthetic
acugauacgugggagcuaagcu

SEQ ID NO: 647094 - RNA, 23 nt, Artificial Sequence
  Synthetic
cacugauacgugggagcuaagcu

SEQ ID NO: 647095 - RNA, 24 nt, Artificial Sequence
  Synthetic
ucacugauacgugggagcuaagcu

SEQ ID NO: 647096 - RNA, 18 nt, Artificial Sequence
  Synthetic
uuaauuuuuuucuaagcu

SEQ ID NO: 647097 - RNA, 19 nt, Artificial Sequence
  Synthetic
uuuaauuuuuuucuaagcu

SEQ ID NO: 647098 - RNA, 20 nt, Artificial Sequence
  Synthetic
cuuuaauuuuuuucuaagcu

SEQ ID NO: 647099 - RNA, 21 nt, Artificial Sequence
  Synthetic
ccuuuaauuuuuuucuaagcu

SEQ ID NO: 647100 - RNA, 22 nt, Artificial Sequence
  Synthetic
uccuuuaauuuuuuucuaagcu

SEQ ID NO: 647101 - RNA, 23 nt, Artificial Sequence
  Synthetic
uuccuuuaauuuuuuucuaagcu

SEQ ID NO: 647102 - RNA, 24 nt, Artificial Sequence
  Synthetic
cuuccuuuaauuuuuuucuaagcu

SEQ ID NO: 647103 - RNA, 18 nt, Artificial Sequence
  Synthetic
guauaaaauagguaagcu

SEQ ID NO: 647104 - RNA, 19 nt, Artificial Sequence
  Synthetic
gguauaaaauagguaagcu

SEQ ID NO: 647105 - RNA, 20 nt, Artificial Sequence
  Synthetic
agguauaaaauagguaagcu

SEQ ID NO: 647106 - RNA, 21 nt, Artificial Sequence
  Synthetic
aagguauaaaauagguaagcu

SEQ ID NO: 647107 - RNA, 22 nt, Artificial Sequence
  Synthetic
caagguauaaaauagguaagcu

SEQ ID NO: 647108 - RNA, 23 nt, Artificial Sequence
  Synthetic
acaagguauaaaauagguaagcu

SEQ ID NO: 647109 - RNA, 24 nt, Artificial Sequence
  Synthetic
gacaagguauaaaauagguaagcu

SEQ ID NO: 647110 - RNA, 18 nt, Artificial Sequence
  Synthetic
cagaaaagaauguaagcu

SEQ ID NO: 647111 - RNA, 19 nt, Artificial Sequence
  Synthetic
ucagaaaagaauguaagcu

SEQ ID NO: 647112 - RNA, 20 nt, Artificial Sequence
  Synthetic
uucagaaaagaauguaagcu

SEQ ID NO: 647113 - RNA, 21 nt, Artificial Sequence
  Synthetic
uuucagaaaagaauguaagcu

SEQ ID NO: 647114 - RNA, 22 nt, Artificial Sequence
  Synthetic
uuuucagaaaagaauguaagcu

SEQ ID NO: 647115 - RNA, 23 nt, Artificial Sequence
  Synthetic
uuuuucagaaaagaauguaagcu

SEQ ID NO: 647116 - RNA, 24 nt, Artificial Sequence
  Synthetic
auuuuucagaaaagaauguaagcu

SEQ ID NO: 647117 - RNA, 18 nt, Artificial Sequence
  Synthetic
auauaagauuuuuaagcu

SEQ ID NO: 647118 - RNA, 19 nt, Artificial Sequence
  Synthetic
aauauaagauuuuuaagcu

SEQ ID NO: 647119 - RNA, 20 nt, Artificial Sequence
  Synthetic
caauauaagauuuuuaagcu

SEQ ID NO: 647120 - RNA, 21 nt, Artificial Sequence
  Synthetic
ucaauauaagauuuuuaagcu

SEQ ID NO: 647121 - RNA, 22 nt, Artificial Sequence
  Synthetic
aucaauauaagauuuuuaagcu

SEQ ID NO: 647122 - RNA, 23 nt, Artificial Sequence
  Synthetic
aaucaauauaagauuuuuaagcu

SEQ ID NO: 647123 - RNA, 24 nt, Artificial Sequence
  Synthetic
aaaucaauauaagauuuuuaagcu

SEQ ID NO: 647124 - RNA, 18 nt, Artificial Sequence
  Synthetic
auuaacaacaaaacagcu

SEQ ID NO: 647125 - RNA, 19 nt, Artificial Sequence
  Synthetic
aauuaacaacaaaacagcu

SEQ ID NO: 647126 - RNA, 20 nt, Artificial Sequence
  Synthetic
uaauuaacaacaaaacagcu

SEQ ID NO: 647127 - RNA, 21 nt, Artificial Sequence
  Synthetic
uuaauuaacaacaaaacagcu

SEQ ID NO: 647128 - RNA, 22 nt, Artificial Sequence
  Synthetic
guuaauuaacaacaaaacagcu

SEQ ID NO: 647129 - RNA, 23 nt, Artificial Sequence
  Synthetic
aguuaauuaacaacaaaacagcu

SEQ ID NO: 647130 - RNA, 24 nt, Artificial Sequence
  Synthetic
uaguuaauuaacaacaaaacagcu

SEQ ID NO: 647131 - RNA, 18 nt, Artificial Sequence
  Synthetic
agcuaucaccaaacagcu

SEQ ID NO: 647132 - RNA, 19 nt, Artificial Sequence
  Synthetic
cagcuaucaccaaacagcu

SEQ ID NO: 647133 - RNA, 20 nt, Artificial Sequence
  Synthetic
ccagcuaucaccaaacagcu

SEQ ID NO: 647134 - RNA, 21 nt, Artificial Sequence
  Synthetic
gccagcuaucaccaaacagcu

SEQ ID NO: 647135 - RNA, 22 nt, Artificial Sequence
  Synthetic
ugccagcuaucaccaaacagcu

SEQ ID NO: 647136 - RNA, 23 nt, Artificial Sequence
  Synthetic
cugccagcuaucaccaaacagcu

SEQ ID NO: 647137 - RNA, 24 nt, Artificial Sequence
  Synthetic
ucugccagcuaucaccaaacagcu

SEQ ID NO: 647138 - RNA, 18 nt, Artificial Sequence
  Synthetic
aaaagaccaguaacagcu

SEQ ID NO: 647139 - RNA, 19 nt, Artificial Sequence
  Synthetic
gaaaagaccaguaacagcu

SEQ ID NO: 647140 - RNA, 20 nt, Artificial Sequence
  Synthetic
ugaaaagaccaguaacagcu

SEQ ID NO: 647141 - RNA, 21 nt, Artificial Sequence
  Synthetic
cugaaaagaccaguaacagcu

SEQ ID NO: 647142 - RNA, 22 nt, Artificial Sequence
  Synthetic
ucugaaaagaccaguaacagcu

SEQ ID NO: 647143 - RNA, 23 nt, Artificial Sequence
  Synthetic
aucugaaaagaccaguaacagcu

SEQ ID NO: 647144 - RNA, 24 nt, Artificial Sequence
  Synthetic
aaucugaaaagaccaguaacagcu

SEQ ID NO: 647145 - RNA, 18 nt, Artificial Sequence
  Synthetic
acucaauacuuaacagcu

SEQ ID NO: 647146 - RNA, 19 nt, Artificial Sequence
  Synthetic
aacucaauacuuaacagcu

SEQ ID NO: 647147 - RNA, 20 nt, Artificial Sequence
  Synthetic
uaacucaauacuuaacagcu

SEQ ID NO: 647148 - RNA, 21 nt, Artificial Sequence
  Synthetic
auaacucaauacuuaacagcu

SEQ ID NO: 647149 - RNA, 22 nt, Artificial Sequence
  Synthetic
uauaacucaauacuuaacagcu

SEQ ID NO: 647150 - RNA, 23 nt, Artificial Sequence
  Synthetic
cuauaacucaauacuuaacagcu

SEQ ID NO: 647151 - RNA, 24 nt, Artificial Sequence
  Synthetic
ucuauaacucaauacuuaacagcu

SEQ ID NO: 647152 - RNA, 18 nt, Artificial Sequence
  Synthetic
auucuaaaucacacagcu

SEQ ID NO: 647153 - RNA, 19 nt, Artificial Sequence
  Synthetic
uauucuaaaucacacagcu

SEQ ID NO: 647154 - RNA, 20 nt, Artificial Sequence
  Synthetic
uuauucuaaaucacacagcu

SEQ ID NO: 647155 - RNA, 21 nt, Artificial Sequence
  Synthetic
uuuauucuaaaucacacagcu

SEQ ID NO: 647156 - RNA, 22 nt, Artificial Sequence
  Synthetic
auuuauucuaaaucacacagcu

SEQ ID NO: 647157 - RNA, 23 nt, Artificial Sequence
  Synthetic
aauuuauucuaaaucacacagcu

SEQ ID NO: 647158 - RNA, 24 nt, Artificial Sequence
  Synthetic
uaauuuauucuaaaucacacagcu

SEQ ID NO: 647159 - RNA, 18 nt, Artificial Sequence
  Synthetic
acucaaggucacacagcu

SEQ ID NO: 647160 - RNA, 19 nt, Artificial Sequence
  Synthetic
uacucaaggucacacagcu

SEQ ID NO: 647161 - RNA, 20 nt, Artificial Sequence
  Synthetic
uuacucaaggucacacagcu

SEQ ID NO: 647162 - RNA, 21 nt, Artificial Sequence
  Synthetic
cuuacucaaggucacacagcu

SEQ ID NO: 647163 - RNA, 22 nt, Artificial Sequence
  Synthetic
acuuacucaaggucacacagcu

SEQ ID NO: 647164 - RNA, 23 nt, Artificial Sequence
  Synthetic
aacuuacucaaggucacacagcu

SEQ ID NO: 647165 - RNA, 24 nt, Artificial Sequence
  Synthetic
uaacuuacucaaggucacacagcu

SEQ ID NO: 647166 - RNA, 18 nt, Artificial Sequence
  Synthetic
gucacaggugacacagcu

SEQ ID NO: 647167 - RNA, 19 nt, Artificial Sequence
  Synthetic
agucacaggugacacagcu

SEQ ID NO: 647168 - RNA, 20 nt, Artificial Sequence
  Synthetic
gagucacaggugacacagcu

SEQ ID NO: 647169 - RNA, 21 nt, Artificial Sequence
  Synthetic
ggagucacaggugacacagcu

SEQ ID NO: 647170 - RNA, 22 nt, Artificial Sequence
  Synthetic
uggagucacaggugacacagcu

SEQ ID NO: 647171 - RNA, 23 nt, Artificial Sequence
  Synthetic
uuggagucacaggugacacagcu

SEQ ID NO: 647172 - RNA, 24 nt, Artificial Sequence
  Synthetic
guuggagucacaggugacacagcu

SEQ ID NO: 647173 - RNA, 18 nt, Artificial Sequence
  Synthetic
caaagauaaaccacagcu

SEQ ID NO: 647174 - RNA, 19 nt, Artificial Sequence
  Synthetic
ccaaagauaaaccacagcu

SEQ ID NO: 647175 - RNA, 20 nt, Artificial Sequence
  Synthetic
uccaaagauaaaccacagcu

SEQ ID NO: 647176 - RNA, 21 nt, Artificial Sequence
  Synthetic
cuccaaagauaaaccacagcu

SEQ ID NO: 647177 - RNA, 22 nt, Artificial Sequence
  Synthetic
ccuccaaagauaaaccacagcu

SEQ ID NO: 647178 - RNA, 23 nt, Artificial Sequence
  Synthetic
uccuccaaagauaaaccacagcu

SEQ ID NO: 647179 - RNA, 24 nt, Artificial Sequence
  Synthetic
auccuccaaagauaaaccacagcu

SEQ ID NO: 647180 - RNA, 18 nt, Artificial Sequence
  Synthetic
guucuguuauucacagcu

SEQ ID NO: 647181 - RNA, 19 nt, Artificial Sequence
  Synthetic
gguucuguuauucacagcu

SEQ ID NO: 647182 - RNA, 20 nt, Artificial Sequence
  Synthetic
ggguucuguuauucacagcu

SEQ ID NO: 647183 - RNA, 21 nt, Artificial Sequence
  Synthetic
uggguucuguuauucacagcu

SEQ ID NO: 647184 - RNA, 22 nt, Artificial Sequence
  Synthetic
cuggguucuguuauucacagcu

SEQ ID NO: 647185 - RNA, 23 nt, Artificial Sequence
  Synthetic
acuggguucuguuauucacagcu

SEQ ID NO: 647186 - RNA, 24 nt, Artificial Sequence
  Synthetic
aacuggguucuguuauucacagcu

SEQ ID NO: 647187 - RNA, 18 nt, Artificial Sequence
  Synthetic
gugccuaucgggacagcu

SEQ ID NO: 647188 - RNA, 19 nt, Artificial Sequence
  Synthetic
ugugccuaucgggacagcu

SEQ ID NO: 647189 - RNA, 20 nt, Artificial Sequence
  Synthetic
gugugccuaucgggacagcu

SEQ ID NO: 647190 - RNA, 21 nt, Artificial Sequence
  Synthetic
ugugugccuaucgggacagcu

SEQ ID NO: 647191 - RNA, 22 nt, Artificial Sequence
  Synthetic
gugugugccuaucgggacagcu

SEQ ID NO: 647192 - RNA, 23 nt, Artificial Sequence
  Synthetic
ggugugugccuaucgggacagcu

SEQ ID NO: 647193 - RNA, 24 nt, Artificial Sequence
  Synthetic
aggugugugccuaucgggacagcu

SEQ ID NO: 647194 - RNA, 18 nt, Artificial Sequence
  Synthetic
uuauuccccuuuacagcu

SEQ ID NO: 647195 - RNA, 19 nt, Artificial Sequence
  Synthetic
uuuauuccccuuuacagcu

SEQ ID NO: 647196 - RNA, 20 nt, Artificial Sequence
  Synthetic
auuuauuccccuuuacagcu

SEQ ID NO: 647197 - RNA, 21 nt, Artificial Sequence
  Synthetic
uauuuauuccccuuuacagcu

SEQ ID NO: 647198 - RNA, 22 nt, Artificial Sequence
  Synthetic
uuauuuauuccccuuuacagcu

SEQ ID NO: 647199 - RNA, 23 nt, Artificial Sequence
  Synthetic
uuuauuuauuccccuuuacagcu

SEQ ID NO: 647200 - RNA, 24 nt, Artificial Sequence
  Synthetic
auuuauuuauuccccuuuacagcu

SEQ ID NO: 647201 - RNA, 18 nt, Artificial Sequence
  Synthetic
gcgccuguagucccagcu

SEQ ID NO: 647202 - RNA, 19 nt, Artificial Sequence
  Synthetic
ggcgccuguagucccagcu

SEQ ID NO: 647203 - RNA, 20 nt, Artificial Sequence
  Synthetic
gggcgccuguagucccagcu

SEQ ID NO: 647204 - RNA, 21 nt, Artificial Sequence
  Synthetic
cgggcgccuguagucccagcu

SEQ ID NO: 647205 - RNA, 22 nt, Artificial Sequence
  Synthetic
gcgggcgccuguagucccagcu

SEQ ID NO: 647206 - RNA, 23 nt, Artificial Sequence
  Synthetic
ggcgggcgccuguagucccagcu

SEQ ID NO: 647207 - RNA, 24 nt, Artificial Sequence
  Synthetic
uggcgggcgccuguagucccagcu

SEQ ID NO: 647208 - RNA, 18 nt, Artificial Sequence
  Synthetic
acaagaugucuuccagcu

SEQ ID NO: 647209 - RNA, 19 nt, Artificial Sequence
  Synthetic
gacaagaugucuuccagcu

SEQ ID NO: 647210 - RNA, 20 nt, Artificial Sequence
  Synthetic
agacaagaugucuuccagcu

SEQ ID NO: 647211 - RNA, 21 nt, Artificial Sequence
  Synthetic
gagacaagaugucuuccagcu

SEQ ID NO: 647212 - RNA, 22 nt, Artificial Sequence
  Synthetic
ggagacaagaugucuuccagcu

SEQ ID NO: 647213 - RNA, 23 nt, Artificial Sequence
  Synthetic
uggagacaagaugucuuccagcu

SEQ ID NO: 647214 - RNA, 24 nt, Artificial Sequence
  Synthetic
auggagacaagaugucuuccagcu

SEQ ID NO: 647215 - RNA, 18 nt, Artificial Sequence
  Synthetic
aaaguaacacuggcagcu

SEQ ID NO: 647216 - RNA, 19 nt, Artificial Sequence
  Synthetic
uaaaguaacacuggcagcu

SEQ ID NO: 647217 - RNA, 20 nt, Artificial Sequence
  Synthetic
uuaaaguaacacuggcagcu

SEQ ID NO: 647218 - RNA, 21 nt, Artificial Sequence
  Synthetic
auuaaaguaacacuggcagcu

SEQ ID NO: 647219 - RNA, 22 nt, Artificial Sequence
  Synthetic
aauuaaaguaacacuggcagcu

SEQ ID NO: 647220 - RNA, 23 nt, Artificial Sequence
  Synthetic
caauuaaaguaacacuggcagcu

SEQ ID NO: 647221 - RNA, 24 nt, Artificial Sequence
  Synthetic
ccaauuaaaguaacacuggcagcu

SEQ ID NO: 647222 - RNA, 18 nt, Artificial Sequence
  Synthetic
uccaaucagaacucagcu

SEQ ID NO: 647223 - RNA, 19 nt, Artificial Sequence
  Synthetic
uuccaaucagaacucagcu

SEQ ID NO: 647224 - RNA, 20 nt, Artificial Sequence
  Synthetic
cuuccaaucagaacucagcu

SEQ ID NO: 647225 - RNA, 21 nt, Artificial Sequence
  Synthetic
gcuuccaaucagaacucagcu

SEQ ID NO: 647226 - RNA, 22 nt, Artificial Sequence
  Synthetic
agcuuccaaucagaacucagcu

SEQ ID NO: 647227 - RNA, 23 nt, Artificial Sequence
  Synthetic
cagcuuccaaucagaacucagcu

SEQ ID NO: 647228 - RNA, 24 nt, Artificial Sequence
  Synthetic
ccagcuuccaaucagaacucagcu

SEQ ID NO: 647229 - RNA, 18 nt, Artificial Sequence
  Synthetic
acugugauaugcucagcu

SEQ ID NO: 647230 - RNA, 19 nt, Artificial Sequence
  Synthetic
gacugugauaugcucagcu

SEQ ID NO: 647231 - RNA, 20 nt, Artificial Sequence
  Synthetic
ggacugugauaugcucagcu

SEQ ID NO: 647232 - RNA, 21 nt, Artificial Sequence
  Synthetic
gggacugugauaugcucagcu

SEQ ID NO: 647233 - RNA, 22 nt, Artificial Sequence
  Synthetic
agggacugugauaugcucagcu

SEQ ID NO: 647234 - RNA, 23 nt, Artificial Sequence
  Synthetic
aagggacugugauaugcucagcu

SEQ ID NO: 647235 - RNA, 24 nt, Artificial Sequence
  Synthetic
uaagggacugugauaugcucagcu

SEQ ID NO: 647236 - RNA, 18 nt, Artificial Sequence
  Synthetic
uucaguauauagucagcu

SEQ ID NO: 647237 - RNA, 19 nt, Artificial Sequence
  Synthetic
uuucaguauauagucagcu

SEQ ID NO: 647238 - RNA, 20 nt, Artificial Sequence
  Synthetic
auuucaguauauagucagcu

SEQ ID NO: 647239 - RNA, 21 nt, Artificial Sequence
  Synthetic
uauuucaguauauagucagcu

SEQ ID NO: 647240 - RNA, 22 nt, Artificial Sequence
  Synthetic
auauuucaguauauagucagcu

SEQ ID NO: 647241 - RNA, 23 nt, Artificial Sequence
  Synthetic
aauauuucaguauauagucagcu

SEQ ID NO: 647242 - RNA, 24 nt, Artificial Sequence
  Synthetic
aaauauuucaguauauagucagcu

SEQ ID NO: 647243 - RNA, 18 nt, Artificial Sequence
  Synthetic
uauuccaaaauuucagcu

SEQ ID NO: 647244 - RNA, 19 nt, Artificial Sequence
  Synthetic
cuauuccaaaauuucagcu

SEQ ID NO: 647245 - RNA, 20 nt, Artificial Sequence
  Synthetic
gcuauuccaaaauuucagcu

SEQ ID NO: 647246 - RNA, 21 nt, Artificial Sequence
  Synthetic
agcuauuccaaaauuucagcu

SEQ ID NO: 647247 - RNA, 22 nt, Artificial Sequence
  Synthetic
aagcuauuccaaaauuucagcu

SEQ ID NO: 647248 - RNA, 23 nt, Artificial Sequence
  Synthetic
uaagcuauuccaaaauuucagcu

SEQ ID NO: 647249 - RNA, 24 nt, Artificial Sequence
  Synthetic
uuaagcuauuccaaaauuucagcu

SEQ ID NO: 647250 - RNA, 18 nt, Artificial Sequence
  Synthetic
uuagugaagacaagagcu

SEQ ID NO: 647251 - RNA, 19 nt, Artificial Sequence
  Synthetic
auuagugaagacaagagcu

SEQ ID NO: 647252 - RNA, 20 nt, Artificial Sequence
  Synthetic
uauuagugaagacaagagcu

SEQ ID NO: 647253 - RNA, 21 nt, Artificial Sequence
  Synthetic
uuauuagugaagacaagagcu

SEQ ID NO: 647254 - RNA, 22 nt, Artificial Sequence
  Synthetic
uuuauuagugaagacaagagcu

SEQ ID NO: 647255 - RNA, 23 nt, Artificial Sequence
  Synthetic
cuuuauuagugaagacaagagcu

SEQ ID NO: 647256 - RNA, 24 nt, Artificial Sequence
  Synthetic
ucuuuauuagugaagacaagagcu

SEQ ID NO: 647257 - RNA, 18 nt, Artificial Sequence
  Synthetic
aggguggaaugaagagcu

SEQ ID NO: 647258 - RNA, 19 nt, Artificial Sequence
  Synthetic
uaggguggaaugaagagcu

SEQ ID NO: 647259 - RNA, 20 nt, Artificial Sequence
  Synthetic
uuaggguggaaugaagagcu

SEQ ID NO: 647260 - RNA, 21 nt, Artificial Sequence
  Synthetic
auuaggguggaaugaagagcu

SEQ ID NO: 647261 - RNA, 22 nt, Artificial Sequence
  Synthetic
cauuaggguggaaugaagagcu

SEQ ID NO: 647262 - RNA, 23 nt, Artificial Sequence
  Synthetic
acauuaggguggaaugaagagcu

SEQ ID NO: 647263 - RNA, 24 nt, Artificial Sequence
  Synthetic
aacauuaggguggaaugaagagcu

SEQ ID NO: 647264 - RNA, 18 nt, Artificial Sequence
  Synthetic
aauuugugcuuaagagcu

SEQ ID NO: 647265 - RNA, 19 nt, Artificial Sequence
  Synthetic
aaauuugugcuuaagagcu

SEQ ID NO: 647266 - RNA, 20 nt, Artificial Sequence
  Synthetic
uaaauuugugcuuaagagcu

SEQ ID NO: 647267 - RNA, 21 nt, Artificial Sequence
  Synthetic
uuaaauuugugcuuaagagcu

SEQ ID NO: 647268 - RNA, 22 nt, Artificial Sequence
  Synthetic
auuaaauuugugcuuaagagcu

SEQ ID NO: 647269 - RNA, 23 nt, Artificial Sequence
  Synthetic
uauuaaauuugugcuuaagagcu

SEQ ID NO: 647270 - RNA, 24 nt, Artificial Sequence
  Synthetic
uuauuaaauuugugcuuaagagcu

SEQ ID NO: 647271 - RNA, 18 nt, Artificial Sequence
  Synthetic
aaauaaucgcacagagcu

SEQ ID NO: 647272 - RNA, 19 nt, Artificial Sequence
  Synthetic
aaaauaaucgcacagagcu

SEQ ID NO: 647273 - RNA, 20 nt, Artificial Sequence
  Synthetic
uaaaauaaucgcacagagcu

SEQ ID NO: 647274 - RNA, 21 nt, Artificial Sequence
  Synthetic
uuaaaauaaucgcacagagcu

SEQ ID NO: 647275 - RNA, 22 nt, Artificial Sequence
  Synthetic
uuuaaaauaaucgcacagagcu

SEQ ID NO: 647276 - RNA, 23 nt, Artificial Sequence
  Synthetic
auuuaaaauaaucgcacagagcu

SEQ ID NO: 647277 - RNA, 24 nt, Artificial Sequence
  Synthetic
cauuuaaaauaaucgcacagagcu

SEQ ID NO: 647278 - RNA, 18 nt, Artificial Sequence
  Synthetic
cugccuucuuacagagcu

SEQ ID NO: 647279 - RNA, 19 nt, Artificial Sequence
  Synthetic
acugccuucuuacagagcu

SEQ ID NO: 647280 - RNA, 20 nt, Artificial Sequence
  Synthetic
cacugccuucuuacagagcu

SEQ ID NO: 647281 - RNA, 21 nt, Artificial Sequence
  Synthetic
acacugccuucuuacagagcu

SEQ ID NO: 647282 - RNA, 22 nt, Artificial Sequence
  Synthetic
cacacugccuucuuacagagcu

SEQ ID NO: 647283 - RNA, 23 nt, Artificial Sequence
  Synthetic
ccacacugccuucuuacagagcu

SEQ ID NO: 647284 - RNA, 24 nt, Artificial Sequence
  Synthetic
gccacacugccuucuuacagagcu

SEQ ID NO: 647285 - RNA, 18 nt, Artificial Sequence
  Synthetic
gggcggacugccagagcu

SEQ ID NO: 647286 - RNA, 19 nt, Artificial Sequence
  Synthetic
cgggcggacugccagagcu

SEQ ID NO: 647287 - RNA, 20 nt, Artificial Sequence
  Synthetic
gcgggcggacugccagagcu

SEQ ID NO: 647288 - RNA, 21 nt, Artificial Sequence
  Synthetic
ggcgggcggacugccagagcu

SEQ ID NO: 647289 - RNA, 22 nt, Artificial Sequence
  Synthetic
aggcgggcggacugccagagcu

SEQ ID NO: 647290 - RNA, 23 nt, Artificial Sequence
  Synthetic
aaggcgggcggacugccagagcu

SEQ ID NO: 647291 - RNA, 24 nt, Artificial Sequence
  Synthetic
caaggcgggcggacugccagagcu

SEQ ID NO: 647292 - RNA, 18 nt, Artificial Sequence
  Synthetic
ugugaggagaagagagcu

SEQ ID NO: 647293 - RNA, 19 nt, Artificial Sequence
  Synthetic
gugugaggagaagagagcu

SEQ ID NO: 647294 - RNA, 20 nt, Artificial Sequence
  Synthetic
agugugaggagaagagagcu

SEQ ID NO: 647295 - RNA, 21 nt, Artificial Sequence
  Synthetic
aagugugaggagaagagagcu

SEQ ID NO: 647296 - RNA, 22 nt, Artificial Sequence
  Synthetic
aaagugugaggagaagagagcu

SEQ ID NO: 647297 - RNA, 23 nt, Artificial Sequence
  Synthetic
caaagugugaggagaagagagcu

SEQ ID NO: 647298 - RNA, 24 nt, Artificial Sequence
  Synthetic
gcaaagugugaggagaagagagcu

SEQ ID NO: 647299 - RNA, 18 nt, Artificial Sequence
  Synthetic
agauuucacuggagagcu

SEQ ID NO: 647300 - RNA, 19 nt, Artificial Sequence
  Synthetic
gagauuucacuggagagcu

SEQ ID NO: 647301 - RNA, 20 nt, Artificial Sequence
  Synthetic
agagauuucacuggagagcu

SEQ ID NO: 647302 - RNA, 21 nt, Artificial Sequence
  Synthetic
uagagauuucacuggagagcu

SEQ ID NO: 647303 - RNA, 22 nt, Artificial Sequence
  Synthetic
guagagauuucacuggagagcu

SEQ ID NO: 647304 - RNA, 23 nt, Artificial Sequence
  Synthetic
aguagagauuucacuggagagcu

SEQ ID NO: 647305 - RNA, 24 nt, Artificial Sequence
  Synthetic
aaguagagauuucacuggagagcu

SEQ ID NO: 647306 - RNA, 18 nt, Artificial Sequence
  Synthetic
uucuauaacuugagagcu

SEQ ID NO: 647307 - RNA, 19 nt, Artificial Sequence
  Synthetic
uuucuauaacuugagagcu

SEQ ID NO: 647308 - RNA, 20 nt, Artificial Sequence
  Synthetic
uuuucuauaacuugagagcu

SEQ ID NO: 647309 - RNA, 21 nt, Artificial Sequence
  Synthetic
auuuucuauaacuugagagcu

SEQ ID NO: 647310 - RNA, 22 nt, Artificial Sequence
  Synthetic
aauuuucuauaacuugagagcu

SEQ ID NO: 647311 - RNA, 23 nt, Artificial Sequence
  Synthetic
caauuuucuauaacuugagagcu

SEQ ID NO: 647312 - RNA, 24 nt, Artificial Sequence
  Synthetic
acaauuuucuauaacuugagagcu

SEQ ID NO: 647313 - RNA, 18 nt, Artificial Sequence
  Synthetic
gaaagggcauauagagcu

SEQ ID NO: 647314 - RNA, 19 nt, Artificial Sequence
  Synthetic
ugaaagggcauauagagcu

SEQ ID NO: 647315 - RNA, 20 nt, Artificial Sequence
  Synthetic
augaaagggcauauagagcu

SEQ ID NO: 647316 - RNA, 21 nt, Artificial Sequence
  Synthetic
aaugaaagggcauauagagcu

SEQ ID NO: 647317 - RNA, 22 nt, Artificial Sequence
  Synthetic
uaaugaaagggcauauagagcu

SEQ ID NO: 647318 - RNA, 23 nt, Artificial Sequence
  Synthetic
auaaugaaagggcauauagagcu

SEQ ID NO: 647319 - RNA, 24 nt, Artificial Sequence
  Synthetic
uauaaugaaagggcauauagagcu

SEQ ID NO: 647320 - RNA, 18 nt, Artificial Sequence
  Synthetic
gcacugccuaguagagcu

SEQ ID NO: 647321 - RNA, 19 nt, Artificial Sequence
  Synthetic
ggcacugccuaguagagcu

SEQ ID NO: 647322 - RNA, 20 nt, Artificial Sequence
  Synthetic
gggcacugccuaguagagcu

SEQ ID NO: 647323 - RNA, 21 nt, Artificial Sequence
  Synthetic
ggggcacugccuaguagagcu

SEQ ID NO: 647324 - RNA, 22 nt, Artificial Sequence
  Synthetic
uggggcacugccuaguagagcu

SEQ ID NO: 647325 - RNA, 23 nt, Artificial Sequence
  Synthetic
cuggggcacugccuaguagagcu

SEQ ID NO: 647326 - RNA, 24 nt, Artificial Sequence
  Synthetic
acuggggcacugccuaguagagcu

SEQ ID NO: 647327 - RNA, 18 nt, Artificial Sequence
  Synthetic
gcaaauauuauucgagcu

SEQ ID NO: 647328 - RNA, 19 nt, Artificial Sequence
  Synthetic
agcaaauauuauucgagcu

SEQ ID NO: 647329 - RNA, 20 nt, Artificial Sequence
  Synthetic
aagcaaauauuauucgagcu

SEQ ID NO: 647330 - RNA, 21 nt, Artificial Sequence
  Synthetic
aaagcaaauauuauucgagcu

SEQ ID NO: 647331 - RNA, 22 nt, Artificial Sequence
  Synthetic
uaaagcaaauauuauucgagcu

SEQ ID NO: 647332 - RNA, 23 nt, Artificial Sequence
  Synthetic
auaaagcaaauauuauucgagcu

SEQ ID NO: 647333 - RNA, 24 nt, Artificial Sequence
  Synthetic
uauaaagcaaauauuauucgagcu

SEQ ID NO: 647334 - RNA, 18 nt, Artificial Sequence
  Synthetic
gagcuacaggcaggagcu

SEQ ID NO: 647335 - RNA, 19 nt, Artificial Sequence
  Synthetic
agagcuacaggcaggagcu

SEQ ID NO: 647336 - RNA, 20 nt, Artificial Sequence
  Synthetic
cagagcuacaggcaggagcu

SEQ ID NO: 647337 - RNA, 21 nt, Artificial Sequence
  Synthetic
ccagagcuacaggcaggagcu

SEQ ID NO: 647338 - RNA, 22 nt, Artificial Sequence
  Synthetic
gccagagcuacaggcaggagcu

SEQ ID NO: 647339 - RNA, 23 nt, Artificial Sequence
  Synthetic
agccagagcuacaggcaggagcu

SEQ ID NO: 647340 - RNA, 24 nt, Artificial Sequence
  Synthetic
gagccagagcuacaggcaggagcu

SEQ ID NO: 647341 - RNA, 18 nt, Artificial Sequence
  Synthetic
gcucaugguugaggagcu

SEQ ID NO: 647342 - RNA, 19 nt, Artificial Sequence
  Synthetic
agcucaugguugaggagcu

SEQ ID NO: 647343 - RNA, 20 nt, Artificial Sequence
  Synthetic
cagcucaugguugaggagcu

SEQ ID NO: 647344 - RNA, 21 nt, Artificial Sequence
  Synthetic
acagcucaugguugaggagcu

SEQ ID NO: 647345 - RNA, 22 nt, Artificial Sequence
  Synthetic
aacagcucaugguugaggagcu

SEQ ID NO: 647346 - RNA, 23 nt, Artificial Sequence
  Synthetic
gaacagcucaugguugaggagcu

SEQ ID NO: 647347 - RNA, 24 nt, Artificial Sequence
  Synthetic
ggaacagcucaugguugaggagcu

SEQ ID NO: 647348 - RNA, 18 nt, Artificial Sequence
  Synthetic
ugggagaggagcggagcu

SEQ ID NO: 647349 - RNA, 19 nt, Artificial Sequence
  Synthetic
uugggagaggagcggagcu

SEQ ID NO: 647350 - RNA, 20 nt, Artificial Sequence
  Synthetic
guugggagaggagcggagcu

SEQ ID NO: 647351 - RNA, 21 nt, Artificial Sequence
  Synthetic
gguugggagaggagcggagcu

SEQ ID NO: 647352 - RNA, 22 nt, Artificial Sequence
  Synthetic
agguugggagaggagcggagcu

SEQ ID NO: 647353 - RNA, 23 nt, Artificial Sequence
  Synthetic
aagguugggagaggagcggagcu

SEQ ID NO: 647354 - RNA, 24 nt, Artificial Sequence
  Synthetic
aaagguugggagaggagcggagcu

SEQ ID NO: 647355 - RNA, 18 nt, Artificial Sequence
  Synthetic
gcacugccuagcggagcu

SEQ ID NO: 647356 - RNA, 19 nt, Artificial Sequence
  Synthetic
ggcacugccuagcggagcu

SEQ ID NO: 647357 - RNA, 20 nt, Artificial Sequence
  Synthetic
gggcacugccuagcggagcu

SEQ ID NO: 647358 - RNA, 21 nt, Artificial Sequence
  Synthetic
ggggcacugccuagcggagcu

SEQ ID NO: 647359 - RNA, 22 nt, Artificial Sequence
  Synthetic
uggggcacugccuagcggagcu

SEQ ID NO: 647360 - RNA, 23 nt, Artificial Sequence
  Synthetic
cuggggcacugccuagcggagcu

SEQ ID NO: 647361 - RNA, 24 nt, Artificial Sequence
  Synthetic
acuggggcacugccuagcggagcu

SEQ ID NO: 647362 - RNA, 18 nt, Artificial Sequence
  Synthetic
aacagcggaaggggagcu

SEQ ID NO: 647363 - RNA, 19 nt, Artificial Sequence
  Synthetic
aaacagcggaaggggagcu

SEQ ID NO: 647364 - RNA, 20 nt, Artificial Sequence
  Synthetic
gaaacagcggaaggggagcu

SEQ ID NO: 647365 - RNA, 21 nt, Artificial Sequence
  Synthetic
ggaaacagcggaaggggagcu

SEQ ID NO: 647366 - RNA, 22 nt, Artificial Sequence
  Synthetic
uggaaacagcggaaggggagcu

SEQ ID NO: 647367 - RNA, 23 nt, Artificial Sequence
  Synthetic
auggaaacagcggaaggggagcu

SEQ ID NO: 647368 - RNA, 24 nt, Artificial Sequence
  Synthetic
cauggaaacagcggaaggggagcu

SEQ ID NO: 647369 - RNA, 18 nt, Artificial Sequence
  Synthetic
guugguggggggggagcu

SEQ ID NO: 647370 - RNA, 19 nt, Artificial Sequence
  Synthetic
gguugguggggggggagcu

SEQ ID NO: 647371 - RNA, 20 nt, Artificial Sequence
  Synthetic
ggguugguggggggggagcu

SEQ ID NO: 647372 - RNA, 21 nt, Artificial Sequence
  Synthetic
gggguugguggggggggagcu

SEQ ID NO: 647373 - RNA, 22 nt, Artificial Sequence
  Synthetic
ggggguugguggggggggagcu

SEQ ID NO: 647374 - RNA, 23 nt, Artificial Sequence
  Synthetic
uggggguugguggggggggagcu

SEQ ID NO: 647375 - RNA, 24 nt, Artificial Sequence
  Synthetic
uuggggguugguggggggggagcu

SEQ ID NO: 647376 - RNA, 18 nt, Artificial Sequence
  Synthetic
gacucuaaguggggagcu

SEQ ID NO: 647377 - RNA, 19 nt, Artificial Sequence
  Synthetic
ggacucuaaguggggagcu

SEQ ID NO: 647378 - RNA, 20 nt, Artificial Sequence
  Synthetic
gggacucuaaguggggagcu

SEQ ID NO: 647379 - RNA, 21 nt, Artificial Sequence
  Synthetic
ggggacucuaaguggggagcu

SEQ ID NO: 647380 - RNA, 22 nt, Artificial Sequence
  Synthetic
uggggacucuaaguggggagcu

SEQ ID NO: 647381 - RNA, 23 nt, Artificial Sequence
  Synthetic
uuggggacucuaaguggggagcu

SEQ ID NO: 647382 - RNA, 24 nt, Artificial Sequence
  Synthetic
uuuggggacucuaaguggggagcu

SEQ ID NO: 647383 - RNA, 18 nt, Artificial Sequence
  Synthetic
aucaagagaucuggagcu

SEQ ID NO: 647384 - RNA, 19 nt, Artificial Sequence
  Synthetic
aaucaagagaucuggagcu

SEQ ID NO: 647385 - RNA, 20 nt, Artificial Sequence
  Synthetic
aaaucaagagaucuggagcu

SEQ ID NO: 647386 - RNA, 21 nt, Artificial Sequence
  Synthetic
uaaaucaagagaucuggagcu

SEQ ID NO: 647387 - RNA, 22 nt, Artificial Sequence
  Synthetic
auaaaucaagagaucuggagcu

SEQ ID NO: 647388 - RNA, 23 nt, Artificial Sequence
  Synthetic
aauaaaucaagagaucuggagcu

SEQ ID NO: 647389 - RNA, 24 nt, Artificial Sequence
  Synthetic
uaauaaaucaagagaucuggagcu

SEQ ID NO: 647390 - RNA, 18 nt, Artificial Sequence
  Synthetic
caaggcuacuguggagcu

SEQ ID NO: 647391 - RNA, 19 nt, Artificial Sequence
  Synthetic
ucaaggcuacuguggagcu

SEQ ID NO: 647392 - RNA, 20 nt, Artificial Sequence
  Synthetic
uucaaggcuacuguggagcu

SEQ ID NO: 647393 - RNA, 21 nt, Artificial Sequence
  Synthetic
uuucaaggcuacuguggagcu

SEQ ID NO: 647394 - RNA, 22 nt, Artificial Sequence
  Synthetic
uuuucaaggcuacuguggagcu

SEQ ID NO: 647395 - RNA, 23 nt, Artificial Sequence
  Synthetic
auuuucaaggcuacuguggagcu

SEQ ID NO: 647396 - RNA, 24 nt, Artificial Sequence
  Synthetic
gauuuucaaggcuacuguggagcu

SEQ ID NO: 647397 - RNA, 18 nt, Artificial Sequence
  Synthetic
auacagaauuguggagcu

SEQ ID NO: 647398 - RNA, 19 nt, Artificial Sequence
  Synthetic
aauacagaauuguggagcu

SEQ ID NO: 647399 - RNA, 20 nt, Artificial Sequence
  Synthetic
gaauacagaauuguggagcu

SEQ ID NO: 647400 - RNA, 21 nt, Artificial Sequence
  Synthetic
ugaauacagaauuguggagcu

SEQ ID NO: 647401 - RNA, 22 nt, Artificial Sequence
  Synthetic
augaauacagaauuguggagcu

SEQ ID NO: 647402 - RNA, 23 nt, Artificial Sequence
  Synthetic
uaugaauacagaauuguggagcu

SEQ ID NO: 647403 - RNA, 24 nt, Artificial Sequence
  Synthetic
auaugaauacagaauuguggagcu

SEQ ID NO: 647404 - RNA, 18 nt, Artificial Sequence
  Synthetic
cauuuaggauuuggagcu

SEQ ID NO: 647405 - RNA, 19 nt, Artificial Sequence
  Synthetic
acauuuaggauuuggagcu

SEQ ID NO: 647406 - RNA, 20 nt, Artificial Sequence
  Synthetic
uacauuuaggauuuggagcu

SEQ ID NO: 647407 - RNA, 21 nt, Artificial Sequence
  Synthetic
uuacauuuaggauuuggagcu

SEQ ID NO: 647408 - RNA, 22 nt, Artificial Sequence
  Synthetic
uuuacauuuaggauuuggagcu

SEQ ID NO: 647409 - RNA, 23 nt, Artificial Sequence
  Synthetic
cuuuacauuuaggauuuggagcu

SEQ ID NO: 647410 - RNA, 24 nt, Artificial Sequence
  Synthetic
ucuuuacauuuaggauuuggagcu

SEQ ID NO: 647411 - RNA, 18 nt, Artificial Sequence
  Synthetic
uuuauguuuucaugagcu

SEQ ID NO: 647412 - RNA, 19 nt, Artificial Sequence
  Synthetic
guuuauguuuucaugagcu

SEQ ID NO: 647413 - RNA, 20 nt, Artificial Sequence
  Synthetic
uguuuauguuuucaugagcu

SEQ ID NO: 647414 - RNA, 21 nt, Artificial Sequence
  Synthetic
cuguuuauguuuucaugagcu

SEQ ID NO: 647415 - RNA, 22 nt, Artificial Sequence
  Synthetic
ucuguuuauguuuucaugagcu

SEQ ID NO: 647416 - RNA, 23 nt, Artificial Sequence
  Synthetic
uucuguuuauguuuucaugagcu

SEQ ID NO: 647417 - RNA, 24 nt, Artificial Sequence
  Synthetic
uuucuguuuauguuuucaugagcu

SEQ ID NO: 647418 - RNA, 18 nt, Artificial Sequence
  Synthetic
caguguacaagaugagcu

SEQ ID NO: 647419 - RNA, 19 nt, Artificial Sequence
  Synthetic
gcaguguacaagaugagcu

SEQ ID NO: 647420 - RNA, 20 nt, Artificial Sequence
  Synthetic
ugcaguguacaagaugagcu

SEQ ID NO: 647421 - RNA, 21 nt, Artificial Sequence
  Synthetic
uugcaguguacaagaugagcu

SEQ ID NO: 647422 - RNA, 22 nt, Artificial Sequence
  Synthetic
uuugcaguguacaagaugagcu

SEQ ID NO: 647423 - RNA, 23 nt, Artificial Sequence
  Synthetic
auuugcaguguacaagaugagcu

SEQ ID NO: 647424 - RNA, 24 nt, Artificial Sequence
  Synthetic
gauuugcaguguacaagaugagcu

SEQ ID NO: 647425 - RNA, 18 nt, Artificial Sequence
  Synthetic
guaguuaccauaugagcu

SEQ ID NO: 647426 - RNA, 19 nt, Artificial Sequence
  Synthetic
uguaguuaccauaugagcu

SEQ ID NO: 647427 - RNA, 20 nt, Artificial Sequence
  Synthetic
uuguaguuaccauaugagcu

SEQ ID NO: 647428 - RNA, 21 nt, Artificial Sequence
  Synthetic
auuguaguuaccauaugagcu

SEQ ID NO: 647429 - RNA, 22 nt, Artificial Sequence
  Synthetic
uauuguaguuaccauaugagcu

SEQ ID NO: 647430 - RNA, 23 nt, Artificial Sequence
  Synthetic
uuauuguaguuaccauaugagcu

SEQ ID NO: 647431 - RNA, 24 nt, Artificial Sequence
  Synthetic
auuauuguaguuaccauaugagcu

SEQ ID NO: 647432 - RNA, 18 nt, Artificial Sequence
  Synthetic
gaagucaagaacugagcu

SEQ ID NO: 647433 - RNA, 19 nt, Artificial Sequence
  Synthetic
agaagucaagaacugagcu

SEQ ID NO: 647434 - RNA, 20 nt, Artificial Sequence
  Synthetic
cagaagucaagaacugagcu

SEQ ID NO: 647435 - RNA, 21 nt, Artificial Sequence
  Synthetic
acagaagucaagaacugagcu

SEQ ID NO: 647436 - RNA, 22 nt, Artificial Sequence
  Synthetic
cacagaagucaagaacugagcu

SEQ ID NO: 647437 - RNA, 23 nt, Artificial Sequence
  Synthetic
acacagaagucaagaacugagcu

SEQ ID NO: 647438 - RNA, 24 nt, Artificial Sequence
  Synthetic
uacacagaagucaagaacugagcu

SEQ ID NO: 647439 - RNA, 18 nt, Artificial Sequence
  Synthetic
guuuauuuuaacugagcu

SEQ ID NO: 647440 - RNA, 19 nt, Artificial Sequence
  Synthetic
gguuuauuuuaacugagcu

SEQ ID NO: 647441 - RNA, 20 nt, Artificial Sequence
  Synthetic
ggguuuauuuuaacugagcu

SEQ ID NO: 647442 - RNA, 21 nt, Artificial Sequence
  Synthetic
uggguuuauuuuaacugagcu

SEQ ID NO: 647443 - RNA, 22 nt, Artificial Sequence
  Synthetic
cuggguuuauuuuaacugagcu

SEQ ID NO: 647444 - RNA, 23 nt, Artificial Sequence
  Synthetic
acuggguuuauuuuaacugagcu

SEQ ID NO: 647445 - RNA, 24 nt, Artificial Sequence
  Synthetic
gacuggguuuauuuuaacugagcu

SEQ ID NO: 647446 - RNA, 18 nt, Artificial Sequence
  Synthetic
uuccagaggcacugagcu

SEQ ID NO: 647447 - RNA, 19 nt, Artificial Sequence
  Synthetic
cuuccagaggcacugagcu

SEQ ID NO: 647448 - RNA, 20 nt, Artificial Sequence
  Synthetic
gcuuccagaggcacugagcu

SEQ ID NO: 647449 - RNA, 21 nt, Artificial Sequence
  Synthetic
ugcuuccagaggcacugagcu

SEQ ID NO: 647450 - RNA, 22 nt, Artificial Sequence
  Synthetic
uugcuuccagaggcacugagcu

SEQ ID NO: 647451 - RNA, 23 nt, Artificial Sequence
  Synthetic
auugcuuccagaggcacugagcu

SEQ ID NO: 647452 - RNA, 24 nt, Artificial Sequence
  Synthetic
aauugcuuccagaggcacugagcu

SEQ ID NO: 647453 - RNA, 18 nt, Artificial Sequence
  Synthetic
aauuaacuacccugagcu

SEQ ID NO: 647454 - RNA, 19 nt, Artificial Sequence
  Synthetic
uaauuaacuacccugagcu

SEQ ID NO: 647455 - RNA, 20 nt, Artificial Sequence
  Synthetic
cuaauuaacuacccugagcu

SEQ ID NO: 647456 - RNA, 21 nt, Artificial Sequence
  Synthetic
ucuaauuaacuacccugagcu

SEQ ID NO: 647457 - RNA, 22 nt, Artificial Sequence
  Synthetic
gucuaauuaacuacccugagcu

SEQ ID NO: 647458 - RNA, 23 nt, Artificial Sequence
  Synthetic
ugucuaauuaacuacccugagcu

SEQ ID NO: 647459 - RNA, 24 nt, Artificial Sequence
  Synthetic
gugucuaauuaacuacccugagcu

SEQ ID NO: 647460 - RNA, 18 nt, Artificial Sequence
  Synthetic
uaauuacaaaauugagcu

SEQ ID NO: 647461 - RNA, 19 nt, Artificial Sequence
  Synthetic
uuaauuacaaaauugagcu

SEQ ID NO: 647462 - RNA, 20 nt, Artificial Sequence
  Synthetic
guuaauuacaaaauugagcu

SEQ ID NO: 647463 - RNA, 21 nt, Artificial Sequence
  Synthetic
uguuaauuacaaaauugagcu

SEQ ID NO: 647464 - RNA, 22 nt, Artificial Sequence
  Synthetic
auguuaauuacaaaauugagcu

SEQ ID NO: 647465 - RNA, 23 nt, Artificial Sequence
  Synthetic
uauguuaauuacaaaauugagcu

SEQ ID NO: 647466 - RNA, 24 nt, Artificial Sequence
  Synthetic
auauguuaauuacaaaauugagcu

SEQ ID NO: 647467 - RNA, 18 nt, Artificial Sequence
  Synthetic
guuuauaauacuugagcu

SEQ ID NO: 647468 - RNA, 19 nt, Artificial Sequence
  Synthetic
uguuuauaauacuugagcu

SEQ ID NO: 647469 - RNA, 20 nt, Artificial Sequence
  Synthetic
guguuuauaauacuugagcu

SEQ ID NO: 647470 - RNA, 21 nt, Artificial Sequence
  Synthetic
aguguuuauaauacuugagcu

SEQ ID NO: 647471 - RNA, 22 nt, Artificial Sequence
  Synthetic
caguguuuauaauacuugagcu

SEQ ID NO: 647472 - RNA, 23 nt, Artificial Sequence
  Synthetic
acaguguuuauaauacuugagcu

SEQ ID NO: 647473 - RNA, 24 nt, Artificial Sequence
  Synthetic
cacaguguuuauaauacuugagcu

SEQ ID NO: 647474 - RNA, 18 nt, Artificial Sequence
  Synthetic
gggcagauugcuugagcu

SEQ ID NO: 647475 - RNA, 19 nt, Artificial Sequence
  Synthetic
ugggcagauugcuugagcu

SEQ ID NO: 647476 - RNA, 20 nt, Artificial Sequence
  Synthetic
gugggcagauugcuugagcu

SEQ ID NO: 647477 - RNA, 21 nt, Artificial Sequence
  Synthetic
ggugggcagauugcuugagcu

SEQ ID NO: 647478 - RNA, 22 nt, Artificial Sequence
  Synthetic
aggugggcagauugcuugagcu

SEQ ID NO: 647479 - RNA, 23 nt, Artificial Sequence
  Synthetic
aaggugggcagauugcuugagcu

SEQ ID NO: 647480 - RNA, 24 nt, Artificial Sequence
  Synthetic
caaggugggcagauugcuugagcu

SEQ ID NO: 647481 - RNA, 18 nt, Artificial Sequence
  Synthetic
aggaggauugcuugagcu

SEQ ID NO: 647482 - RNA, 19 nt, Artificial Sequence
  Synthetic
gaggaggauugcuugagcu

SEQ ID NO: 647483 - RNA, 20 nt, Artificial Sequence
  Synthetic
ggaggaggauugcuugagcu

SEQ ID NO: 647484 - RNA, 21 nt, Artificial Sequence
  Synthetic
aggaggaggauugcuugagcu

SEQ ID NO: 647485 - RNA, 22 nt, Artificial Sequence
  Synthetic
aaggaggaggauugcuugagcu

SEQ ID NO: 647486 - RNA, 23 nt, Artificial Sequence
  Synthetic
gaaggaggaggauugcuugagcu

SEQ ID NO: 647487 - RNA, 24 nt, Artificial Sequence
  Synthetic
ugaaggaggaggauugcuugagcu

SEQ ID NO: 647488 - RNA, 18 nt, Artificial Sequence
  Synthetic
gggaggaucauuugagcu

SEQ ID NO: 647489 - RNA, 19 nt, Artificial Sequence
  Synthetic
ugggaggaucauuugagcu

SEQ ID NO: 647490 - RNA, 20 nt, Artificial Sequence
  Synthetic
gugggaggaucauuugagcu

SEQ ID NO: 647491 - RNA, 21 nt, Artificial Sequence
  Synthetic
ggugggaggaucauuugagcu

SEQ ID NO: 647492 - RNA, 22 nt, Artificial Sequence
  Synthetic
aggugggaggaucauuugagcu

SEQ ID NO: 647493 - RNA, 23 nt, Artificial Sequence
  Synthetic
gaggugggaggaucauuugagcu

SEQ ID NO: 647494 - RNA, 24 nt, Artificial Sequence
  Synthetic
ugaggugggaggaucauuugagcu

SEQ ID NO: 647495 - RNA, 18 nt, Artificial Sequence
  Synthetic
accaaacagcuuugagcu

SEQ ID NO: 647496 - RNA, 19 nt, Artificial Sequence
  Synthetic
caccaaacagcuuugagcu

SEQ ID NO: 647497 - RNA, 20 nt, Artificial Sequence
  Synthetic
ucaccaaacagcuuugagcu

SEQ ID NO: 647498 - RNA, 21 nt, Artificial Sequence
  Synthetic
aucaccaaacagcuuugagcu

SEQ ID NO: 647499 - RNA, 22 nt, Artificial Sequence
  Synthetic
uaucaccaaacagcuuugagcu

SEQ ID NO: 647500 - RNA, 23 nt, Artificial Sequence
  Synthetic
cuaucaccaaacagcuuugagcu

SEQ ID NO: 647501 - RNA, 24 nt, Artificial Sequence
  Synthetic
gcuaucaccaaacagcuuugagcu

SEQ ID NO: 647502 - RNA, 18 nt, Artificial Sequence
  Synthetic
aaacugguguuuugagcu

SEQ ID NO: 647503 - RNA, 19 nt, Artificial Sequence
  Synthetic
caaacugguguuuugagcu

SEQ ID NO: 647504 - RNA, 20 nt, Artificial Sequence
  Synthetic
acaaacugguguuuugagcu

SEQ ID NO: 647505 - RNA, 21 nt, Artificial Sequence
  Synthetic
cacaaacugguguuuugagcu

SEQ ID NO: 647506 - RNA, 22 nt, Artificial Sequence
  Synthetic
acacaaacugguguuuugagcu

SEQ ID NO: 647507 - RNA, 23 nt, Artificial Sequence
  Synthetic
aacacaaacugguguuuugagcu

SEQ ID NO: 647508 - RNA, 24 nt, Artificial Sequence
  Synthetic
uaacacaaacugguguuuugagcu

SEQ ID NO: 647509 - RNA, 18 nt, Artificial Sequence
  Synthetic
auuuaaaugaaaauagcu

SEQ ID NO: 647510 - RNA, 19 nt, Artificial Sequence
  Synthetic
uauuuaaaugaaaauagcu

SEQ ID NO: 647511 - RNA, 20 nt, Artificial Sequence
  Synthetic
auauuuaaaugaaaauagcu

SEQ ID NO: 647512 - RNA, 21 nt, Artificial Sequence
  Synthetic
aauauuuaaaugaaaauagcu

SEQ ID NO: 647513 - RNA, 22 nt, Artificial Sequence
  Synthetic
aaauauuuaaaugaaaauagcu

SEQ ID NO: 647514 - RNA, 23 nt, Artificial Sequence
  Synthetic
caaauauuuaaaugaaaauagcu

SEQ ID NO: 647515 - RNA, 24 nt, Artificial Sequence
  Synthetic
gcaaauauuuaaaugaaaauagcu

SEQ ID NO: 647516 - RNA, 18 nt, Artificial Sequence
  Synthetic
uuaaucuuuacaauagcu

SEQ ID NO: 647517 - RNA, 19 nt, Artificial Sequence
  Synthetic
auuaaucuuuacaauagcu

SEQ ID NO: 647518 - RNA, 20 nt, Artificial Sequence
  Synthetic
gauuaaucuuuacaauagcu

SEQ ID NO: 647519 - RNA, 21 nt, Artificial Sequence
  Synthetic
ugauuaaucuuuacaauagcu

SEQ ID NO: 647520 - RNA, 22 nt, Artificial Sequence
  Synthetic
augauuaaucuuuacaauagcu

SEQ ID NO: 647521 - RNA, 23 nt, Artificial Sequence
  Synthetic
aaugauuaaucuuuacaauagcu

SEQ ID NO: 647522 - RNA, 24 nt, Artificial Sequence
  Synthetic
aaaugauuaaucuuuacaauagcu

SEQ ID NO: 647523 - RNA, 18 nt, Artificial Sequence
  Synthetic
cuugauagcagaauagcu

SEQ ID NO: 647524 - RNA, 19 nt, Artificial Sequence
  Synthetic
ucuugauagcagaauagcu

SEQ ID NO: 647525 - RNA, 20 nt, Artificial Sequence
  Synthetic
uucuugauagcagaauagcu

SEQ ID NO: 647526 - RNA, 21 nt, Artificial Sequence
  Synthetic
auucuugauagcagaauagcu

SEQ ID NO: 647527 - RNA, 22 nt, Artificial Sequence
  Synthetic
uauucuugauagcagaauagcu

SEQ ID NO: 647528 - RNA, 23 nt, Artificial Sequence
  Synthetic
auauucuugauagcagaauagcu

SEQ ID NO: 647529 - RNA, 24 nt, Artificial Sequence
  Synthetic
uauauucuugauagcagaauagcu

SEQ ID NO: 647530 - RNA, 18 nt, Artificial Sequence
  Synthetic
aucuauauaauaauagcu

SEQ ID NO: 647531 - RNA, 19 nt, Artificial Sequence
  Synthetic
uaucuauauaauaauagcu

SEQ ID NO: 647532 - RNA, 20 nt, Artificial Sequence
  Synthetic
auaucuauauaauaauagcu

SEQ ID NO: 647533 - RNA, 21 nt, Artificial Sequence
  Synthetic
aauaucuauauaauaauagcu

SEQ ID NO: 647534 - RNA, 22 nt, Artificial Sequence
  Synthetic
aaauaucuauauaauaauagcu

SEQ ID NO: 647535 - RNA, 23 nt, Artificial Sequence
  Synthetic
caaauaucuauauaauaauagcu

SEQ ID NO: 647536 - RNA, 24 nt, Artificial Sequence
  Synthetic
gcaaauaucuauauaauaauagcu

SEQ ID NO: 647537 - RNA, 18 nt, Artificial Sequence
  Synthetic
cauagccuuguaauagcu

SEQ ID NO: 647538 - RNA, 19 nt, Artificial Sequence
  Synthetic
acauagccuuguaauagcu

SEQ ID NO: 647539 - RNA, 20 nt, Artificial Sequence
  Synthetic
uacauagccuuguaauagcu

SEQ ID NO: 647540 - RNA, 21 nt, Artificial Sequence
  Synthetic
uuacauagccuuguaauagcu

SEQ ID NO: 647541 - RNA, 22 nt, Artificial Sequence
  Synthetic
uuuacauagccuuguaauagcu

SEQ ID NO: 647542 - RNA, 23 nt, Artificial Sequence
  Synthetic
uuuuacauagccuuguaauagcu

SEQ ID NO: 647543 - RNA, 24 nt, Artificial Sequence
  Synthetic
guuuuacauagccuuguaauagcu

SEQ ID NO: 647544 - RNA, 18 nt, Artificial Sequence
  Synthetic
auauuuuuguacauagcu

SEQ ID NO: 647545 - RNA, 19 nt, Artificial Sequence
  Synthetic
cauauuuuuguacauagcu

SEQ ID NO: 647546 - RNA, 20 nt, Artificial Sequence
  Synthetic
ucauauuuuuguacauagcu

SEQ ID NO: 647547 - RNA, 21 nt, Artificial Sequence
  Synthetic
aucauauuuuuguacauagcu

SEQ ID NO: 647548 - RNA, 22 nt, Artificial Sequence
  Synthetic
uaucauauuuuuguacauagcu

SEQ ID NO: 647549 - RNA, 23 nt, Artificial Sequence
  Synthetic
cuaucauauuuuuguacauagcu

SEQ ID NO: 647550 - RNA, 24 nt, Artificial Sequence
  Synthetic
ucuaucauauuuuuguacauagcu

SEQ ID NO: 647551 - RNA, 18 nt, Artificial Sequence
  Synthetic
ucagaaguaggcauagcu

SEQ ID NO: 647552 - RNA, 19 nt, Artificial Sequence
  Synthetic
cucagaaguaggcauagcu

SEQ ID NO: 647553 - RNA, 20 nt, Artificial Sequence
  Synthetic
ccucagaaguaggcauagcu

SEQ ID NO: 647554 - RNA, 21 nt, Artificial Sequence
  Synthetic
gccucagaaguaggcauagcu

SEQ ID NO: 647555 - RNA, 22 nt, Artificial Sequence
  Synthetic
agccucagaaguaggcauagcu

SEQ ID NO: 647556 - RNA, 23 nt, Artificial Sequence
  Synthetic
aagccucagaaguaggcauagcu

SEQ ID NO: 647557 - RNA, 24 nt, Artificial Sequence
  Synthetic
gaagccucagaaguaggcauagcu

SEQ ID NO: 647558 - RNA, 18 nt, Artificial Sequence
  Synthetic
guacaaggucagauagcu

SEQ ID NO: 647559 - RNA, 19 nt, Artificial Sequence
  Synthetic
uguacaaggucagauagcu

SEQ ID NO: 647560 - RNA, 20 nt, Artificial Sequence
  Synthetic
uuguacaaggucagauagcu

SEQ ID NO: 647561 - RNA, 21 nt, Artificial Sequence
  Synthetic
cuuguacaaggucagauagcu

SEQ ID NO: 647562 - RNA, 22 nt, Artificial Sequence
  Synthetic
acuuguacaaggucagauagcu

SEQ ID NO: 647563 - RNA, 23 nt, Artificial Sequence
  Synthetic
gacuuguacaaggucagauagcu

SEQ ID NO: 647564 - RNA, 24 nt, Artificial Sequence
  Synthetic
ugacuuguacaaggucagauagcu

SEQ ID NO: 647565 - RNA, 18 nt, Artificial Sequence
  Synthetic
ccccauuuuaauauagcu

SEQ ID NO: 647566 - RNA, 19 nt, Artificial Sequence
  Synthetic
uccccauuuuaauauagcu

SEQ ID NO: 647567 - RNA, 20 nt, Artificial Sequence
  Synthetic
uuccccauuuuaauauagcu

SEQ ID NO: 647568 - RNA, 21 nt, Artificial Sequence
  Synthetic
cuuccccauuuuaauauagcu

SEQ ID NO: 647569 - RNA, 22 nt, Artificial Sequence
  Synthetic
acuuccccauuuuaauauagcu

SEQ ID NO: 647570 - RNA, 23 nt, Artificial Sequence
  Synthetic
aacuuccccauuuuaauauagcu

SEQ ID NO: 647571 - RNA, 24 nt, Artificial Sequence
  Synthetic
aaacuuccccauuuuaauauagcu

SEQ ID NO: 647572 - RNA, 18 nt, Artificial Sequence
  Synthetic
cacugcaaacauauagcu

SEQ ID NO: 647573 - RNA, 19 nt, Artificial Sequence
  Synthetic
gcacugcaaacauauagcu

SEQ ID NO: 647574 - RNA, 20 nt, Artificial Sequence
  Synthetic
agcacugcaaacauauagcu

SEQ ID NO: 647575 - RNA, 21 nt, Artificial Sequence
  Synthetic
aagcacugcaaacauauagcu

SEQ ID NO: 647576 - RNA, 22 nt, Artificial Sequence
  Synthetic
caagcacugcaaacauauagcu

SEQ ID NO: 647577 - RNA, 23 nt, Artificial Sequence
  Synthetic
ccaagcacugcaaacauauagcu

SEQ ID NO: 647578 - RNA, 24 nt, Artificial Sequence
  Synthetic
accaagcacugcaaacauauagcu

SEQ ID NO: 647579 - RNA, 18 nt, Artificial Sequence
  Synthetic
cucagccuuccuauagcu

SEQ ID NO: 647580 - RNA, 19 nt, Artificial Sequence
  Synthetic
gcucagccuuccuauagcu

SEQ ID NO: 647581 - RNA, 20 nt, Artificial Sequence
  Synthetic
ugcucagccuuccuauagcu

SEQ ID NO: 647582 - RNA, 21 nt, Artificial Sequence
  Synthetic
augcucagccuuccuauagcu

SEQ ID NO: 647583 - RNA, 22 nt, Artificial Sequence
  Synthetic
caugcucagccuuccuauagcu

SEQ ID NO: 647584 - RNA, 23 nt, Artificial Sequence
  Synthetic
acaugcucagccuuccuauagcu

SEQ ID NO: 647585 - RNA, 24 nt, Artificial Sequence
  Synthetic
aacaugcucagccuuccuauagcu

SEQ ID NO: 647586 - RNA, 18 nt, Artificial Sequence
  Synthetic
cugaucauaguuauagcu

SEQ ID NO: 647587 - RNA, 19 nt, Artificial Sequence
  Synthetic
ccugaucauaguuauagcu

SEQ ID NO: 647588 - RNA, 20 nt, Artificial Sequence
  Synthetic
uccugaucauaguuauagcu

SEQ ID NO: 647589 - RNA, 21 nt, Artificial Sequence
  Synthetic
uuccugaucauaguuauagcu

SEQ ID NO: 647590 - RNA, 22 nt, Artificial Sequence
  Synthetic
uuuccugaucauaguuauagcu

SEQ ID NO: 647591 - RNA, 23 nt, Artificial Sequence
  Synthetic
auuuccugaucauaguuauagcu

SEQ ID NO: 647592 - RNA, 24 nt, Artificial Sequence
  Synthetic
aauuuccugaucauaguuauagcu

SEQ ID NO: 647593 - RNA, 18 nt, Artificial Sequence
  Synthetic
ggccauggcuuuauagcu

SEQ ID NO: 647594 - RNA, 19 nt, Artificial Sequence
  Synthetic
cggccauggcuuuauagcu

SEQ ID NO: 647595 - RNA, 20 nt, Artificial Sequence
  Synthetic
ucggccauggcuuuauagcu

SEQ ID NO: 647596 - RNA, 21 nt, Artificial Sequence
  Synthetic
aucggccauggcuuuauagcu

SEQ ID NO: 647597 - RNA, 22 nt, Artificial Sequence
  Synthetic
aaucggccauggcuuuauagcu

SEQ ID NO: 647598 - RNA, 23 nt, Artificial Sequence
  Synthetic
gaaucggccauggcuuuauagcu

SEQ ID NO: 647599 - RNA, 24 nt, Artificial Sequence
  Synthetic
ugaaucggccauggcuuuauagcu

SEQ ID NO: 647600 - RNA, 18 nt, Artificial Sequence
  Synthetic
cuaugaauagcccuagcu

SEQ ID NO: 647601 - RNA, 19 nt, Artificial Sequence
  Synthetic
acuaugaauagcccuagcu

SEQ ID NO: 647602 - RNA, 20 nt, Artificial Sequence
  Synthetic
aacuaugaauagcccuagcu

SEQ ID NO: 647603 - RNA, 21 nt, Artificial Sequence
  Synthetic
gaacuaugaauagcccuagcu

SEQ ID NO: 647604 - RNA, 22 nt, Artificial Sequence
  Synthetic
agaacuaugaauagcccuagcu

SEQ ID NO: 647605 - RNA, 23 nt, Artificial Sequence
  Synthetic
aagaacuaugaauagcccuagcu

SEQ ID NO: 647606 - RNA, 24 nt, Artificial Sequence
  Synthetic
aaagaacuaugaauagcccuagcu

SEQ ID NO: 647607 - RNA, 18 nt, Artificial Sequence
  Synthetic
gaaacacauaugcuagcu

SEQ ID NO: 647608 - RNA, 19 nt, Artificial Sequence
  Synthetic
ugaaacacauaugcuagcu

SEQ ID NO: 647609 - RNA, 20 nt, Artificial Sequence
  Synthetic
augaaacacauaugcuagcu

SEQ ID NO: 647610 - RNA, 21 nt, Artificial Sequence
  Synthetic
caugaaacacauaugcuagcu

SEQ ID NO: 647611 - RNA, 22 nt, Artificial Sequence
  Synthetic
acaugaaacacauaugcuagcu

SEQ ID NO: 647612 - RNA, 23 nt, Artificial Sequence
  Synthetic
gacaugaaacacauaugcuagcu

SEQ ID NO: 647613 - RNA, 24 nt, Artificial Sequence
  Synthetic
agacaugaaacacauaugcuagcu

SEQ ID NO: 647614 - RNA, 18 nt, Artificial Sequence
  Synthetic
ucuucucuucugcuagcu

SEQ ID NO: 647615 - RNA, 19 nt, Artificial Sequence
  Synthetic
uucuucucuucugcuagcu

SEQ ID NO: 647616 - RNA, 20 nt, Artificial Sequence
  Synthetic
uuucuucucuucugcuagcu

SEQ ID NO: 647617 - RNA, 21 nt, Artificial Sequence
  Synthetic
auuucuucucuucugcuagcu

SEQ ID NO: 647618 - RNA, 22 nt, Artificial Sequence
  Synthetic
uauuucuucucuucugcuagcu

SEQ ID NO: 647619 - RNA, 23 nt, Artificial Sequence
  Synthetic
uuauuucuucucuucugcuagcu

SEQ ID NO: 647620 - RNA, 24 nt, Artificial Sequence
  Synthetic
guuauuucuucucuucugcuagcu

SEQ ID NO: 647621 - RNA, 18 nt, Artificial Sequence
  Synthetic
ccauaaauagaaguagcu

SEQ ID NO: 647622 - RNA, 19 nt, Artificial Sequence
  Synthetic
gccauaaauagaaguagcu

SEQ ID NO: 647623 - RNA, 20 nt, Artificial Sequence
  Synthetic
ugccauaaauagaaguagcu

SEQ ID NO: 647624 - RNA, 21 nt, Artificial Sequence
  Synthetic
augccauaaauagaaguagcu

SEQ ID NO: 647625 - RNA, 22 nt, Artificial Sequence
  Synthetic
aaugccauaaauagaaguagcu

SEQ ID NO: 647626 - RNA, 23 nt, Artificial Sequence
  Synthetic
uaaugccauaaauagaaguagcu

SEQ ID NO: 647627 - RNA, 24 nt, Artificial Sequence
  Synthetic
auaaugccauaaauagaaguagcu

SEQ ID NO: 647628 - RNA, 18 nt, Artificial Sequence
  Synthetic
ggacagcauuuaguagcu

SEQ ID NO: 647629 - RNA, 19 nt, Artificial Sequence
  Synthetic
uggacagcauuuaguagcu

SEQ ID NO: 647630 - RNA, 20 nt, Artificial Sequence
  Synthetic
guggacagcauuuaguagcu

SEQ ID NO: 647631 - RNA, 21 nt, Artificial Sequence
  Synthetic
aguggacagcauuuaguagcu

SEQ ID NO: 647632 - RNA, 22 nt, Artificial Sequence
  Synthetic
gaguggacagcauuuaguagcu

SEQ ID NO: 647633 - RNA, 23 nt, Artificial Sequence
  Synthetic
ugaguggacagcauuuaguagcu

SEQ ID NO: 647634 - RNA, 24 nt, Artificial Sequence
  Synthetic
gugaguggacagcauuuaguagcu

SEQ ID NO: 647635 - RNA, 18 nt, Artificial Sequence
  Synthetic
uuaguaugugagguagcu

SEQ ID NO: 647636 - RNA, 19 nt, Artificial Sequence
  Synthetic
auuaguaugugagguagcu

SEQ ID NO: 647637 - RNA, 20 nt, Artificial Sequence
  Synthetic
cauuaguaugugagguagcu

SEQ ID NO: 647638 - RNA, 21 nt, Artificial Sequence
  Synthetic
ccauuaguaugugagguagcu

SEQ ID NO: 647639 - RNA, 22 nt, Artificial Sequence
  Synthetic
accauuaguaugugagguagcu

SEQ ID NO: 647640 - RNA, 23 nt, Artificial Sequence
  Synthetic
uaccauuaguaugugagguagcu

SEQ ID NO: 647641 - RNA, 24 nt, Artificial Sequence
  Synthetic
cuaccauuaguaugugagguagcu

SEQ ID NO: 647642 - RNA, 18 nt, Artificial Sequence
  Synthetic
gucuagcagcuuguagcu

SEQ ID NO: 647643 - RNA, 19 nt, Artificial Sequence
  Synthetic
ugucuagcagcuuguagcu

SEQ ID NO: 647644 - RNA, 20 nt, Artificial Sequence
  Synthetic
cugucuagcagcuuguagcu

SEQ ID NO: 647645 - RNA, 21 nt, Artificial Sequence
  Synthetic
ccugucuagcagcuuguagcu

SEQ ID NO: 647646 - RNA, 22 nt, Artificial Sequence
  Synthetic
gccugucuagcagcuuguagcu

SEQ ID NO: 647647 - RNA, 23 nt, Artificial Sequence
  Synthetic
ugccugucuagcagcuuguagcu

SEQ ID NO: 647648 - RNA, 24 nt, Artificial Sequence
  Synthetic
augccugucuagcagcuuguagcu

SEQ ID NO: 647649 - RNA, 18 nt, Artificial Sequence
  Synthetic
uucacaauaacauuagcu

SEQ ID NO: 647650 - RNA, 19 nt, Artificial Sequence
  Synthetic
uuucacaauaacauuagcu

SEQ ID NO: 647651 - RNA, 20 nt, Artificial Sequence
  Synthetic
guuucacaauaacauuagcu

SEQ ID NO: 647652 - RNA, 21 nt, Artificial Sequence
  Synthetic
uguuucacaauaacauuagcu

SEQ ID NO: 647653 - RNA, 22 nt, Artificial Sequence
  Synthetic
guguuucacaauaacauuagcu

SEQ ID NO: 647654 - RNA, 23 nt, Artificial Sequence
  Synthetic
aguguuucacaauaacauuagcu

SEQ ID NO: 647655 - RNA, 24 nt, Artificial Sequence
  Synthetic
caguguuucacaauaacauuagcu

SEQ ID NO: 647656 - RNA, 18 nt, Artificial Sequence
  Synthetic
aaacaccugacauuagcu

SEQ ID NO: 647657 - RNA, 19 nt, Artificial Sequence
  Synthetic
caaacaccugacauuagcu

SEQ ID NO: 647658 - RNA, 20 nt, Artificial Sequence
  Synthetic
ucaaacaccugacauuagcu

SEQ ID NO: 647659 - RNA, 21 nt, Artificial Sequence
  Synthetic
aucaaacaccugacauuagcu

SEQ ID NO: 647660 - RNA, 22 nt, Artificial Sequence
  Synthetic
aaucaaacaccugacauuagcu

SEQ ID NO: 647661 - RNA, 23 nt, Artificial Sequence
  Synthetic
aaaucaaacaccugacauuagcu

SEQ ID NO: 647662 - RNA, 24 nt, Artificial Sequence
  Synthetic
gaaaucaaacaccugacauuagcu

SEQ ID NO: 647663 - RNA, 18 nt, Artificial Sequence
  Synthetic
guaucugggagcuuagcu

SEQ ID NO: 647664 - RNA, 19 nt, Artificial Sequence
  Synthetic
aguaucugggagcuuagcu

SEQ ID NO: 647665 - RNA, 20 nt, Artificial Sequence
  Synthetic
uaguaucugggagcuuagcu

SEQ ID NO: 647666 - RNA, 21 nt, Artificial Sequence
  Synthetic
uuaguaucugggagcuuagcu

SEQ ID NO: 647667 - RNA, 22 nt, Artificial Sequence
  Synthetic
uuuaguaucugggagcuuagcu

SEQ ID NO: 647668 - RNA, 23 nt, Artificial Sequence
  Synthetic
uuuuaguaucugggagcuuagcu

SEQ ID NO: 647669 - RNA, 24 nt, Artificial Sequence
  Synthetic
uuuuuaguaucugggagcuuagcu

SEQ ID NO: 647670 - RNA, 18 nt, Artificial Sequence
  Synthetic
ugacuguauagcuuagcu

SEQ ID NO: 647671 - RNA, 19 nt, Artificial Sequence
  Synthetic
cugacuguauagcuuagcu

SEQ ID NO: 647672 - RNA, 20 nt, Artificial Sequence
  Synthetic
acugacuguauagcuuagcu

SEQ ID NO: 647673 - RNA, 21 nt, Artificial Sequence
  Synthetic
gacugacuguauagcuuagcu

SEQ ID NO: 647674 - RNA, 22 nt, Artificial Sequence
  Synthetic
agacugacuguauagcuuagcu

SEQ ID NO: 647675 - RNA, 23 nt, Artificial Sequence
  Synthetic
cagacugacuguauagcuuagcu

SEQ ID NO: 647676 - RNA, 24 nt, Artificial Sequence
  Synthetic
acagacugacuguauagcuuagcu

SEQ ID NO: 647677 - RNA, 18 nt, Artificial Sequence
  Synthetic
agcauauuagaguuagcu

SEQ ID NO: 647678 - RNA, 19 nt, Artificial Sequence
  Synthetic
cagcauauuagaguuagcu

SEQ ID NO: 647679 - RNA, 20 nt, Artificial Sequence
  Synthetic
gcagcauauuagaguuagcu

SEQ ID NO: 647680 - RNA, 21 nt, Artificial Sequence
  Synthetic
ugcagcauauuagaguuagcu

SEQ ID NO: 647681 - RNA, 22 nt, Artificial Sequence
  Synthetic
augcagcauauuagaguuagcu

SEQ ID NO: 647682 - RNA, 23 nt, Artificial Sequence
  Synthetic
aaugcagcauauuagaguuagcu

SEQ ID NO: 647683 - RNA, 24 nt, Artificial Sequence
  Synthetic
gaaugcagcauauuagaguuagcu

SEQ ID NO: 647684 - RNA, 18 nt, Artificial Sequence
  Synthetic
uugauuacugaguuagcu

SEQ ID NO: 647685 - RNA, 19 nt, Artificial Sequence
  Synthetic
auugauuacugaguuagcu

SEQ ID NO: 647686 - RNA, 20 nt, Artificial Sequence
  Synthetic
uauugauuacugaguuagcu

SEQ ID NO: 647687 - RNA, 21 nt, Artificial Sequence
  Synthetic
uuauugauuacugaguuagcu

SEQ ID NO: 647688 - RNA, 22 nt, Artificial Sequence
  Synthetic
guuauugauuacugaguuagcu

SEQ ID NO: 647689 - RNA, 23 nt, Artificial Sequence
  Synthetic
uguuauugauuacugaguuagcu

SEQ ID NO: 647690 - RNA, 24 nt, Artificial Sequence
  Synthetic
auguuauugauuacugaguuagcu

SEQ ID NO: 647691 - RNA, 18 nt, Artificial Sequence
  Synthetic
ugacaacaacuguuagcu

SEQ ID NO: 647692 - RNA, 19 nt, Artificial Sequence
  Synthetic
cugacaacaacuguuagcu

SEQ ID NO: 647693 - RNA, 20 nt, Artificial Sequence
  Synthetic
ccugacaacaacuguuagcu

SEQ ID NO: 647694 - RNA, 21 nt, Artificial Sequence
  Synthetic
uccugacaacaacuguuagcu

SEQ ID NO: 647695 - RNA, 22 nt, Artificial Sequence
  Synthetic
cuccugacaacaacuguuagcu

SEQ ID NO: 647696 - RNA, 23 nt, Artificial Sequence
  Synthetic
acuccugacaacaacuguuagcu

SEQ ID NO: 647697 - RNA, 24 nt, Artificial Sequence
  Synthetic
gacuccugacaacaacuguuagcu

SEQ ID NO: 647698 - RNA, 18 nt, Artificial Sequence
  Synthetic
gugggaccacuguuagcu

SEQ ID NO: 647699 - RNA, 19 nt, Artificial Sequence
  Synthetic
ggugggaccacuguuagcu

SEQ ID NO: 647700 - RNA, 20 nt, Artificial Sequence
  Synthetic
gggugggaccacuguuagcu

SEQ ID NO: 647701 - RNA, 21 nt, Artificial Sequence
  Synthetic
agggugggaccacuguuagcu

SEQ ID NO: 647702 - RNA, 22 nt, Artificial Sequence
  Synthetic
gagggugggaccacuguuagcu

SEQ ID NO: 647703 - RNA, 23 nt, Artificial Sequence
  Synthetic
agagggugggaccacuguuagcu

SEQ ID NO: 647704 - RNA, 24 nt, Artificial Sequence
  Synthetic
cagagggugggaccacuguuagcu

SEQ ID NO: 647705 - RNA, 18 nt, Artificial Sequence
  Synthetic
cauuucuucuuguuagcu

SEQ ID NO: 647706 - RNA, 19 nt, Artificial Sequence
  Synthetic
acauuucuucuuguuagcu

SEQ ID NO: 647707 - RNA, 20 nt, Artificial Sequence
  Synthetic
aacauuucuucuuguuagcu

SEQ ID NO: 647708 - RNA, 21 nt, Artificial Sequence
  Synthetic
uaacauuucuucuuguuagcu

SEQ ID NO: 647709 - RNA, 22 nt, Artificial Sequence
  Synthetic
uuaacauuucuucuuguuagcu

SEQ ID NO: 647710 - RNA, 23 nt, Artificial Sequence
  Synthetic
auuaacauuucuucuuguuagcu

SEQ ID NO: 647711 - RNA, 24 nt, Artificial Sequence
  Synthetic
cauuaacauuucuucuuguuagcu

SEQ ID NO: 647712 - RNA, 18 nt, Artificial Sequence
  Synthetic
cauaugaguuauuuagcu

SEQ ID NO: 647713 - RNA, 19 nt, Artificial Sequence
  Synthetic
ucauaugaguuauuuagcu

SEQ ID NO: 647714 - RNA, 20 nt, Artificial Sequence
  Synthetic
uucauaugaguuauuuagcu

SEQ ID NO: 647715 - RNA, 21 nt, Artificial Sequence
  Synthetic
cuucauaugaguuauuuagcu

SEQ ID NO: 647716 - RNA, 22 nt, Artificial Sequence
  Synthetic
acuucauaugaguuauuuagcu

SEQ ID NO: 647717 - RNA, 23 nt, Artificial Sequence
  Synthetic
cacuucauaugaguuauuuagcu

SEQ ID NO: 647718 - RNA, 24 nt, Artificial Sequence
  Synthetic
ucacuucauaugaguuauuuagcu

SEQ ID NO: 647719 - RNA, 18 nt, Artificial Sequence
  Synthetic
caauauuuuucuuuagcu

SEQ ID NO: 647720 - RNA, 19 nt, Artificial Sequence
  Synthetic
acaauauuuuucuuuagcu

SEQ ID NO: 647721 - RNA, 20 nt, Artificial Sequence
  Synthetic
cacaauauuuuucuuuagcu

SEQ ID NO: 647722 - RNA, 21 nt, Artificial Sequence
  Synthetic
acacaauauuuuucuuuagcu

SEQ ID NO: 647723 - RNA, 22 nt, Artificial Sequence
  Synthetic
cacacaauauuuuucuuuagcu

SEQ ID NO: 647724 - RNA, 23 nt, Artificial Sequence
  Synthetic
ucacacaauauuuuucuuuagcu

SEQ ID NO: 647725 - RNA, 24 nt, Artificial Sequence
  Synthetic
aucacacaauauuuuucuuuagcu

SEQ ID NO: 647726 - RNA, 18 nt, Artificial Sequence
  Synthetic
gcaaagaugaguuuagcu

SEQ ID NO: 647727 - RNA, 19 nt, Artificial Sequence
  Synthetic
ggcaaagaugaguuuagcu

SEQ ID NO: 647728 - RNA, 20 nt, Artificial Sequence
  Synthetic
aggcaaagaugaguuuagcu

SEQ ID NO: 647729 - RNA, 21 nt, Artificial Sequence
  Synthetic
aaggcaaagaugaguuuagcu

SEQ ID NO: 647730 - RNA, 22 nt, Artificial Sequence
  Synthetic
gaaggcaaagaugaguuuagcu

SEQ ID NO: 647731 - RNA, 23 nt, Artificial Sequence
  Synthetic
agaaggcaaagaugaguuuagcu

SEQ ID NO: 647732 - RNA, 24 nt, Artificial Sequence
  Synthetic
aagaaggcaaagaugaguuuagcu

SEQ ID NO: 647733 - RNA, 18 nt, Artificial Sequence
  Synthetic
uacucaacacuuuuagcu

SEQ ID NO: 647734 - RNA, 19 nt, Artificial Sequence
  Synthetic
uuacucaacacuuuuagcu

SEQ ID NO: 647735 - RNA, 20 nt, Artificial Sequence
  Synthetic
auuacucaacacuuuuagcu

SEQ ID NO: 647736 - RNA, 21 nt, Artificial Sequence
  Synthetic
aauuacucaacacuuuuagcu

SEQ ID NO: 647737 - RNA, 22 nt, Artificial Sequence
  Synthetic
uaauuacucaacacuuuuagcu

SEQ ID NO: 647738 - RNA, 23 nt, Artificial Sequence
  Synthetic
uuaauuacucaacacuuuuagcu

SEQ ID NO: 647739 - RNA, 24 nt, Artificial Sequence
  Synthetic
uuuaauuacucaacacuuuuagcu

SEQ ID NO: 647740 - RNA, 18 nt, Artificial Sequence
  Synthetic
cacacauguuacaacgcu

SEQ ID NO: 647741 - RNA, 19 nt, Artificial Sequence
  Synthetic
ccacacauguuacaacgcu

SEQ ID NO: 647742 - RNA, 20 nt, Artificial Sequence
  Synthetic
cccacacauguuacaacgcu

SEQ ID NO: 647743 - RNA, 21 nt, Artificial Sequence
  Synthetic
gcccacacauguuacaacgcu

SEQ ID NO: 647744 - RNA, 22 nt, Artificial Sequence
  Synthetic
ggcccacacauguuacaacgcu

SEQ ID NO: 647745 - RNA, 23 nt, Artificial Sequence
  Synthetic
gggcccacacauguuacaacgcu

SEQ ID NO: 647746 - RNA, 24 nt, Artificial Sequence
  Synthetic
ugggcccacacauguuacaacgcu

SEQ ID NO: 647747 - RNA, 18 nt, Artificial Sequence
  Synthetic
aguuccucacuagacgcu

SEQ ID NO: 647748 - RNA, 19 nt, Artificial Sequence
  Synthetic
uaguuccucacuagacgcu

SEQ ID NO: 647749 - RNA, 20 nt, Artificial Sequence
  Synthetic
uuaguuccucacuagacgcu

SEQ ID NO: 647750 - RNA, 21 nt, Artificial Sequence
  Synthetic
uuuaguuccucacuagacgcu

SEQ ID NO: 647751 - RNA, 22 nt, Artificial Sequence
  Synthetic
uuuuaguuccucacuagacgcu

SEQ ID NO: 647752 - RNA, 23 nt, Artificial Sequence
  Synthetic
uuuuuaguuccucacuagacgcu

SEQ ID NO: 647753 - RNA, 24 nt, Artificial Sequence
  Synthetic
guuuuuaguuccucacuagacgcu

SEQ ID NO: 647754 - RNA, 18 nt, Artificial Sequence
  Synthetic
aggaaugcaaaggacgcu

SEQ ID NO: 647755 - RNA, 19 nt, Artificial Sequence
  Synthetic
gaggaaugcaaaggacgcu

SEQ ID NO: 647756 - RNA, 20 nt, Artificial Sequence
  Synthetic
agaggaaugcaaaggacgcu

SEQ ID NO: 647757 - RNA, 21 nt, Artificial Sequence
  Synthetic
uagaggaaugcaaaggacgcu

SEQ ID NO: 647758 - RNA, 22 nt, Artificial Sequence
  Synthetic
auagaggaaugcaaaggacgcu

SEQ ID NO: 647759 - RNA, 23 nt, Artificial Sequence
  Synthetic
uauagaggaaugcaaaggacgcu

SEQ ID NO: 647760 - RNA, 24 nt, Artificial Sequence
  Synthetic
auauagaggaaugcaaaggacgcu

SEQ ID NO: 647761 - RNA, 18 nt, Artificial Sequence
  Synthetic
acaaaaaaugaauacgcu

SEQ ID NO: 647762 - RNA, 19 nt, Artificial Sequence
  Synthetic
gacaaaaaaugaauacgcu

SEQ ID NO: 647763 - RNA, 20 nt, Artificial Sequence
  Synthetic
agacaaaaaaugaauacgcu

SEQ ID NO: 647764 - RNA, 21 nt, Artificial Sequence
  Synthetic
aagacaaaaaaugaauacgcu

SEQ ID NO: 647765 - RNA, 22 nt, Artificial Sequence
  Synthetic
aaagacaaaaaaugaauacgcu

SEQ ID NO: 647766 - RNA, 23 nt, Artificial Sequence
  Synthetic
gaaagacaaaaaaugaauacgcu

SEQ ID NO: 647767 - RNA, 24 nt, Artificial Sequence
  Synthetic
cgaaagacaaaaaaugaauacgcu

SEQ ID NO: 647768 - RNA, 18 nt, Artificial Sequence
  Synthetic
ucgggcuacucuuacgcu

SEQ ID NO: 647769 - RNA, 19 nt, Artificial Sequence
  Synthetic
gucgggcuacucuuacgcu

SEQ ID NO: 647770 - RNA, 20 nt, Artificial Sequence
  Synthetic
ugucgggcuacucuuacgcu

SEQ ID NO: 647771 - RNA, 21 nt, Artificial Sequence
  Synthetic
cugucgggcuacucuuacgcu

SEQ ID NO: 647772 - RNA, 22 nt, Artificial Sequence
  Synthetic
ucugucgggcuacucuuacgcu

SEQ ID NO: 647773 - RNA, 23 nt, Artificial Sequence
  Synthetic
uucugucgggcuacucuuacgcu

SEQ ID NO: 647774 - RNA, 24 nt, Artificial Sequence
  Synthetic
uuucugucgggcuacucuuacgcu

SEQ ID NO: 647775 - RNA, 18 nt, Artificial Sequence
  Synthetic
gccuugggaaccaccgcu

SEQ ID NO: 647776 - RNA, 19 nt, Artificial Sequence
  Synthetic
ggccuugggaaccaccgcu

SEQ ID NO: 647777 - RNA, 20 nt, Artificial Sequence
  Synthetic
aggccuugggaaccaccgcu

SEQ ID NO: 647778 - RNA, 21 nt, Artificial Sequence
  Synthetic
caggccuugggaaccaccgcu

SEQ ID NO: 647779 - RNA, 22 nt, Artificial Sequence
  Synthetic
ucaggccuugggaaccaccgcu

SEQ ID NO: 647780 - RNA, 23 nt, Artificial Sequence
  Synthetic
cucaggccuugggaaccaccgcu

SEQ ID NO: 647781 - RNA, 24 nt, Artificial Sequence
  Synthetic
ucucaggccuugggaaccaccgcu

SEQ ID NO: 647782 - RNA, 18 nt, Artificial Sequence
  Synthetic
uggaacucuuccaccgcu

SEQ ID NO: 647783 - RNA, 19 nt, Artificial Sequence
  Synthetic
uuggaacucuuccaccgcu

SEQ ID NO: 647784 - RNA, 20 nt, Artificial Sequence
  Synthetic
cuuggaacucuuccaccgcu

SEQ ID NO: 647785 - RNA, 21 nt, Artificial Sequence
  Synthetic
gcuuggaacucuuccaccgcu

SEQ ID NO: 647786 - RNA, 22 nt, Artificial Sequence
  Synthetic
ugcuuggaacucuuccaccgcu

SEQ ID NO: 647787 - RNA, 23 nt, Artificial Sequence
  Synthetic
augcuuggaacucuuccaccgcu

SEQ ID NO: 647788 - RNA, 24 nt, Artificial Sequence
  Synthetic
uaugcuuggaacucuuccaccgcu

SEQ ID NO: 647789 - RNA, 18 nt, Artificial Sequence
  Synthetic
gccuguaacccuagcgcu

SEQ ID NO: 647790 - RNA, 19 nt, Artificial Sequence
  Synthetic
ugccuguaacccuagcgcu

SEQ ID NO: 647791 - RNA, 20 nt, Artificial Sequence
  Synthetic
augccuguaacccuagcgcu

SEQ ID NO: 647792 - RNA, 21 nt, Artificial Sequence
  Synthetic
caugccuguaacccuagcgcu

SEQ ID NO: 647793 - RNA, 22 nt, Artificial Sequence
  Synthetic
ucaugccuguaacccuagcgcu

SEQ ID NO: 647794 - RNA, 23 nt, Artificial Sequence
  Synthetic
cucaugccuguaacccuagcgcu

SEQ ID NO: 647795 - RNA, 24 nt, Artificial Sequence
  Synthetic
gcucaugccuguaacccuagcgcu

SEQ ID NO: 647796 - RNA, 18 nt, Artificial Sequence
  Synthetic
aaacuaugcauaugcgcu

SEQ ID NO: 647797 - RNA, 19 nt, Artificial Sequence
  Synthetic
caaacuaugcauaugcgcu

SEQ ID NO: 647798 - RNA, 20 nt, Artificial Sequence
  Synthetic
acaaacuaugcauaugcgcu

SEQ ID NO: 647799 - RNA, 21 nt, Artificial Sequence
  Synthetic
aacaaacuaugcauaugcgcu

SEQ ID NO: 647800 - RNA, 22 nt, Artificial Sequence
  Synthetic
gaacaaacuaugcauaugcgcu

SEQ ID NO: 647801 - RNA, 23 nt, Artificial Sequence
  Synthetic
ggaacaaacuaugcauaugcgcu

SEQ ID NO: 647802 - RNA, 24 nt, Artificial Sequence
  Synthetic
aggaacaaacuaugcauaugcgcu

SEQ ID NO: 647803 - RNA, 18 nt, Artificial Sequence
  Synthetic
ugugcgcgcgcgugcgcu

SEQ ID NO: 647804 - RNA, 19 nt, Artificial Sequence
  Synthetic
gugugcgcgcgcgugcgcu

SEQ ID NO: 647805 - RNA, 20 nt, Artificial Sequence
  Synthetic
ugugugcgcgcgcgugcgcu

SEQ ID NO: 647806 - RNA, 21 nt, Artificial Sequence
  Synthetic
gugugugcgcgcgcgugcgcu

SEQ ID NO: 647807 - RNA, 22 nt, Artificial Sequence
  Synthetic
ugugugugcgcgcgcgugcgcu

SEQ ID NO: 647808 - RNA, 23 nt, Artificial Sequence
  Synthetic
gugugugugcgcgcgcgugcgcu

SEQ ID NO: 647809 - RNA, 24 nt, Artificial Sequence
  Synthetic
ugugugugugcgcgcgcgugcgcu

SEQ ID NO: 647810 - RNA, 18 nt, Artificial Sequence
  Synthetic
agaugagaaguugucgcu

SEQ ID NO: 647811 - RNA, 19 nt, Artificial Sequence
  Synthetic
gagaugagaaguugucgcu

SEQ ID NO: 647812 - RNA, 20 nt, Artificial Sequence
  Synthetic
agagaugagaaguugucgcu

SEQ ID NO: 647813 - RNA, 21 nt, Artificial Sequence
  Synthetic
cagagaugagaaguugucgcu

SEQ ID NO: 647814 - RNA, 22 nt, Artificial Sequence
  Synthetic
ccagagaugagaaguugucgcu

SEQ ID NO: 647815 - RNA, 23 nt, Artificial Sequence
  Synthetic
accagagaugagaaguugucgcu

SEQ ID NO: 647816 - RNA, 24 nt, Artificial Sequence
  Synthetic
caccagagaugagaaguugucgcu

SEQ ID NO: 647817 - RNA, 18 nt, Artificial Sequence
  Synthetic
gagggugggguuuucgcu

SEQ ID NO: 647818 - RNA, 19 nt, Artificial Sequence
  Synthetic
ugagggugggguuuucgcu

SEQ ID NO: 647819 - RNA, 20 nt, Artificial Sequence
  Synthetic
uugagggugggguuuucgcu

SEQ ID NO: 647820 - RNA, 21 nt, Artificial Sequence
  Synthetic
cuugagggugggguuuucgcu

SEQ ID NO: 647821 - RNA, 22 nt, Artificial Sequence
  Synthetic
gcuugagggugggguuuucgcu

SEQ ID NO: 647822 - RNA, 23 nt, Artificial Sequence
  Synthetic
ggcuugagggugggguuuucgcu

SEQ ID NO: 647823 - RNA, 24 nt, Artificial Sequence
  Synthetic
uggcuugagggugggguuuucgcu

SEQ ID NO: 647824 - RNA, 18 nt, Artificial Sequence
  Synthetic
gaaaaucugaaaaaggcu

SEQ ID NO: 647825 - RNA, 19 nt, Artificial Sequence
  Synthetic
ugaaaaucugaaaaaggcu

SEQ ID NO: 647826 - RNA, 20 nt, Artificial Sequence
  Synthetic
cugaaaaucugaaaaaggcu

SEQ ID NO: 647827 - RNA, 21 nt, Artificial Sequence
  Synthetic
ccugaaaaucugaaaaaggcu

SEQ ID NO: 647828 - RNA, 22 nt, Artificial Sequence
  Synthetic
uccugaaaaucugaaaaaggcu

SEQ ID NO: 647829 - RNA, 23 nt, Artificial Sequence
  Synthetic
cuccugaaaaucugaaaaaggcu

SEQ ID NO: 647830 - RNA, 24 nt, Artificial Sequence
  Synthetic
ucuccugaaaaucugaaaaaggcu

SEQ ID NO: 647831 - RNA, 18 nt, Artificial Sequence
  Synthetic
gcacuuaagcaaaaggcu

SEQ ID NO: 647832 - RNA, 19 nt, Artificial Sequence
  Synthetic
agcacuuaagcaaaaggcu

SEQ ID NO: 647833 - RNA, 20 nt, Artificial Sequence
  Synthetic
aagcacuuaagcaaaaggcu

SEQ ID NO: 647834 - RNA, 21 nt, Artificial Sequence
  Synthetic
aaagcacuuaagcaaaaggcu

SEQ ID NO: 647835 - RNA, 22 nt, Artificial Sequence
  Synthetic
gaaagcacuuaagcaaaaggcu

SEQ ID NO: 647836 - RNA, 23 nt, Artificial Sequence
  Synthetic
ggaaagcacuuaagcaaaaggcu

SEQ ID NO: 647837 - RNA, 24 nt, Artificial Sequence
  Synthetic
aggaaagcacuuaagcaaaaggcu

SEQ ID NO: 647838 - RNA, 18 nt, Artificial Sequence
  Synthetic
auuuuaagaagaaaggcu

SEQ ID NO: 647839 - RNA, 19 nt, Artificial Sequence
  Synthetic
uauuuuaagaagaaaggcu

SEQ ID NO: 647840 - RNA, 20 nt, Artificial Sequence
  Synthetic
guauuuuaagaagaaaggcu

SEQ ID NO: 647841 - RNA, 21 nt, Artificial Sequence
  Synthetic
uguauuuuaagaagaaaggcu

SEQ ID NO: 647842 - RNA, 22 nt, Artificial Sequence
  Synthetic
cuguauuuuaagaagaaaggcu

SEQ ID NO: 647843 - RNA, 23 nt, Artificial Sequence
  Synthetic
ucuguauuuuaagaagaaaggcu

SEQ ID NO: 647844 - RNA, 24 nt, Artificial Sequence
  Synthetic
aucuguauuuuaagaagaaaggcu

SEQ ID NO: 647845 - RNA, 18 nt, Artificial Sequence
  Synthetic
ggucaggacagaaaggcu

SEQ ID NO: 647846 - RNA, 19 nt, Artificial Sequence
  Synthetic
aggucaggacagaaaggcu

SEQ ID NO: 647847 - RNA, 20 nt, Artificial Sequence
  Synthetic
aaggucaggacagaaaggcu

SEQ ID NO: 647848 - RNA, 21 nt, Artificial Sequence
  Synthetic
gaaggucaggacagaaaggcu

SEQ ID NO: 647849 - RNA, 22 nt, Artificial Sequence
  Synthetic
agaaggucaggacagaaaggcu

SEQ ID NO: 647850 - RNA, 23 nt, Artificial Sequence
  Synthetic
aagaaggucaggacagaaaggcu

SEQ ID NO: 647851 - RNA, 24 nt, Artificial Sequence
  Synthetic
caagaaggucaggacagaaaggcu

SEQ ID NO: 647852 - RNA, 18 nt, Artificial Sequence
  Synthetic
aagugaccuggaaaggcu

SEQ ID NO: 647853 - RNA, 19 nt, Artificial Sequence
  Synthetic
aaagugaccuggaaaggcu

SEQ ID NO: 647854 - RNA, 20 nt, Artificial Sequence
  Synthetic
uaaagugaccuggaaaggcu

SEQ ID NO: 647855 - RNA, 21 nt, Artificial Sequence
  Synthetic
auaaagugaccuggaaaggcu

SEQ ID NO: 647856 - RNA, 22 nt, Artificial Sequence
  Synthetic
gauaaagugaccuggaaaggcu

SEQ ID NO: 647857 - RNA, 23 nt, Artificial Sequence
  Synthetic
agauaaagugaccuggaaaggcu

SEQ ID NO: 647858 - RNA, 24 nt, Artificial Sequence
  Synthetic
uagauaaagugaccuggaaaggcu

SEQ ID NO: 647859 - RNA, 18 nt, Artificial Sequence
  Synthetic
cucaaggccugaaaggcu

SEQ ID NO: 647860 - RNA, 19 nt, Artificial Sequence
  Synthetic
ccucaaggccugaaaggcu

SEQ ID NO: 647861 - RNA, 20 nt, Artificial Sequence
  Synthetic
uccucaaggccugaaaggcu

SEQ ID NO: 647862 - RNA, 21 nt, Artificial Sequence
  Synthetic
cuccucaaggccugaaaggcu

SEQ ID NO: 647863 - RNA, 22 nt, Artificial Sequence
  Synthetic
ccuccucaaggccugaaaggcu

SEQ ID NO: 647864 - RNA, 23 nt, Artificial Sequence
  Synthetic
uccuccucaaggccugaaaggcu

SEQ ID NO: 647865 - RNA, 24 nt, Artificial Sequence
  Synthetic
uuccuccucaaggccugaaaggcu

SEQ ID NO: 647866 - RNA, 18 nt, Artificial Sequence
  Synthetic
ucuugacagaacaaggcu

SEQ ID NO: 647867 - RNA, 19 nt, Artificial Sequence
  Synthetic
uucuugacagaacaaggcu

SEQ ID NO: 647868 - RNA, 20 nt, Artificial Sequence
  Synthetic
auucuugacagaacaaggcu

SEQ ID NO: 647869 - RNA, 21 nt, Artificial Sequence
  Synthetic
gauucuugacagaacaaggcu

SEQ ID NO: 647870 - RNA, 22 nt, Artificial Sequence
  Synthetic
agauucuugacagaacaaggcu

SEQ ID NO: 647871 - RNA, 23 nt, Artificial Sequence
  Synthetic
gagauucuugacagaacaaggcu

SEQ ID NO: 647872 - RNA, 24 nt, Artificial Sequence
  Synthetic
ggagauucuugacagaacaaggcu

SEQ ID NO: 647873 - RNA, 18 nt, Artificial Sequence
  Synthetic
guggagcuacccaaggcu

SEQ ID NO: 647874 - RNA, 19 nt, Artificial Sequence
  Synthetic
aguggagcuacccaaggcu

SEQ ID NO: 647875 - RNA, 20 nt, Artificial Sequence
  Synthetic
gaguggagcuacccaaggcu

SEQ ID NO: 647876 - RNA, 21 nt, Artificial Sequence
  Synthetic
ggaguggagcuacccaaggcu

SEQ ID NO: 647877 - RNA, 22 nt, Artificial Sequence
  Synthetic
aggaguggagcuacccaaggcu

SEQ ID NO: 647878 - RNA, 23 nt, Artificial Sequence
  Synthetic
aaggaguggagcuacccaaggcu

SEQ ID NO: 647879 - RNA, 24 nt, Artificial Sequence
  Synthetic
aaaggaguggagcuacccaaggcu

SEQ ID NO: 647880 - RNA, 18 nt, Artificial Sequence
  Synthetic
cacuaugcugccaaggcu

SEQ ID NO: 647881 - RNA, 19 nt, Artificial Sequence
  Synthetic
acacuaugcugccaaggcu

SEQ ID NO: 647882 - RNA, 20 nt, Artificial Sequence
  Synthetic
uacacuaugcugccaaggcu

SEQ ID NO: 647883 - RNA, 21 nt, Artificial Sequence
  Synthetic
guacacuaugcugccaaggcu

SEQ ID NO: 647884 - RNA, 22 nt, Artificial Sequence
  Synthetic
gguacacuaugcugccaaggcu

SEQ ID NO: 647885 - RNA, 23 nt, Artificial Sequence
  Synthetic
agguacacuaugcugccaaggcu

SEQ ID NO: 647886 - RNA, 24 nt, Artificial Sequence
  Synthetic
cagguacacuaugcugccaaggcu

SEQ ID NO: 647887 - RNA, 18 nt, Artificial Sequence
  Synthetic
uacagcaaaagcaaggcu

SEQ ID NO: 647888 - RNA, 19 nt, Artificial Sequence
  Synthetic
auacagcaaaagcaaggcu

SEQ ID NO: 647889 - RNA, 20 nt, Artificial Sequence
  Synthetic
gauacagcaaaagcaaggcu

SEQ ID NO: 647890 - RNA, 21 nt, Artificial Sequence
  Synthetic
ggauacagcaaaagcaaggcu

SEQ ID NO: 647891 - RNA, 22 nt, Artificial Sequence
  Synthetic
gggauacagcaaaagcaaggcu

SEQ ID NO: 647892 - RNA, 23 nt, Artificial Sequence
  Synthetic
ugggauacagcaaaagcaaggcu

SEQ ID NO: 647893 - RNA, 24 nt, Artificial Sequence
  Synthetic
cugggauacagcaaaagcaaggcu

SEQ ID NO: 647894 - RNA, 18 nt, Artificial Sequence
  Synthetic
agaagguaagucaaggcu

SEQ ID NO: 647895 - RNA, 19 nt, Artificial Sequence
  Synthetic
gagaagguaagucaaggcu

SEQ ID NO: 647896 - RNA, 20 nt, Artificial Sequence
  Synthetic
ugagaagguaagucaaggcu

SEQ ID NO: 647897 - RNA, 21 nt, Artificial Sequence
  Synthetic
cugagaagguaagucaaggcu

SEQ ID NO: 647898 - RNA, 22 nt, Artificial Sequence
  Synthetic
gcugagaagguaagucaaggcu

SEQ ID NO: 647899 - RNA, 23 nt, Artificial Sequence
  Synthetic
ggcugagaagguaagucaaggcu

SEQ ID NO: 647900 - RNA, 24 nt, Artificial Sequence
  Synthetic
uggcugagaagguaagucaaggcu

SEQ ID NO: 647901 - RNA, 18 nt, Artificial Sequence
  Synthetic
gagaagcgggggaaggcu

SEQ ID NO: 647902 - RNA, 19 nt, Artificial Sequence
  Synthetic
agagaagcgggggaaggcu

SEQ ID NO: 647903 - RNA, 20 nt, Artificial Sequence
  Synthetic
gagagaagcgggggaaggcu

SEQ ID NO: 647904 - RNA, 21 nt, Artificial Sequence
  Synthetic
agagagaagcgggggaaggcu

SEQ ID NO: 647905 - RNA, 22 nt, Artificial Sequence
  Synthetic
gagagagaagcgggggaaggcu

SEQ ID NO: 647906 - RNA, 23 nt, Artificial Sequence
  Synthetic
agagagagaagcgggggaaggcu

SEQ ID NO: 647907 - RNA, 24 nt, Artificial Sequence
  Synthetic
gagagagagaagcgggggaaggcu

SEQ ID NO: 647908 - RNA, 18 nt, Artificial Sequence
  Synthetic
auccuccuggggaaggcu

SEQ ID NO: 647909 - RNA, 19 nt, Artificial Sequence
  Synthetic
gauccuccuggggaaggcu

SEQ ID NO: 647910 - RNA, 20 nt, Artificial Sequence
  Synthetic
agauccuccuggggaaggcu

SEQ ID NO: 647911 - RNA, 21 nt, Artificial Sequence
  Synthetic
gagauccuccuggggaaggcu

SEQ ID NO: 647912 - RNA, 22 nt, Artificial Sequence
  Synthetic
agagauccuccuggggaaggcu

SEQ ID NO: 647913 - RNA, 23 nt, Artificial Sequence
  Synthetic
cagagauccuccuggggaaggcu

SEQ ID NO: 647914 - RNA, 24 nt, Artificial Sequence
  Synthetic
ucagagauccuccuggggaaggcu

SEQ ID NO: 647915 - RNA, 18 nt, Artificial Sequence
  Synthetic
auaacaaauuggaaggcu

SEQ ID NO: 647916 - RNA, 19 nt, Artificial Sequence
  Synthetic
aauaacaaauuggaaggcu

SEQ ID NO: 647917 - RNA, 20 nt, Artificial Sequence
  Synthetic
caauaacaaauuggaaggcu

SEQ ID NO: 647918 - RNA, 21 nt, Artificial Sequence
  Synthetic
acaauaacaaauuggaaggcu

SEQ ID NO: 647919 - RNA, 22 nt, Artificial Sequence
  Synthetic
gacaauaacaaauuggaaggcu

SEQ ID NO: 647920 - RNA, 23 nt, Artificial Sequence
  Synthetic
ugacaauaacaaauuggaaggcu

SEQ ID NO: 647921 - RNA, 24 nt, Artificial Sequence
  Synthetic
augacaauaacaaauuggaaggcu

SEQ ID NO: 647922 - RNA, 18 nt, Artificial Sequence
  Synthetic
guucuauugcauaaggcu

SEQ ID NO: 647923 - RNA, 19 nt, Artificial Sequence
  Synthetic
aguucuauugcauaaggcu

SEQ ID NO: 647924 - RNA, 20 nt, Artificial Sequence
  Synthetic
uaguucuauugcauaaggcu

SEQ ID NO: 647925 - RNA, 21 nt, Artificial Sequence
  Synthetic
guaguucuauugcauaaggcu

SEQ ID NO: 647926 - RNA, 22 nt, Artificial Sequence
  Synthetic
uguaguucuauugcauaaggcu

SEQ ID NO: 647927 - RNA, 23 nt, Artificial Sequence
  Synthetic
uuguaguucuauugcauaaggcu

SEQ ID NO: 647928 - RNA, 24 nt, Artificial Sequence
  Synthetic
uuuguaguucuauugcauaaggcu

SEQ ID NO: 647929 - RNA, 18 nt, Artificial Sequence
  Synthetic
aaugauauauguaaggcu

SEQ ID NO: 647930 - RNA, 19 nt, Artificial Sequence
  Synthetic
aaaugauauauguaaggcu

SEQ ID NO: 647931 - RNA, 20 nt, Artificial Sequence
  Synthetic
gaaaugauauauguaaggcu

SEQ ID NO: 647932 - RNA, 21 nt, Artificial Sequence
  Synthetic
ugaaaugauauauguaaggcu

SEQ ID NO: 647933 - RNA, 22 nt, Artificial Sequence
  Synthetic
augaaaugauauauguaaggcu

SEQ ID NO: 647934 - RNA, 23 nt, Artificial Sequence
  Synthetic
aaugaaaugauauauguaaggcu

SEQ ID NO: 647935 - RNA, 24 nt, Artificial Sequence
  Synthetic
gaaugaaaugauauauguaaggcu

SEQ ID NO: 647936 - RNA, 18 nt, Artificial Sequence
  Synthetic
caguugcugaaacaggcu

SEQ ID NO: 647937 - RNA, 19 nt, Artificial Sequence
  Synthetic
acaguugcugaaacaggcu

SEQ ID NO: 647938 - RNA, 20 nt, Artificial Sequence
  Synthetic
cacaguugcugaaacaggcu

SEQ ID NO: 647939 - RNA, 21 nt, Artificial Sequence
  Synthetic
acacaguugcugaaacaggcu

SEQ ID NO: 647940 - RNA, 22 nt, Artificial Sequence
  Synthetic
uacacaguugcugaaacaggcu

SEQ ID NO: 647941 - RNA, 23 nt, Artificial Sequence
  Synthetic
cuacacaguugcugaaacaggcu

SEQ ID NO: 647942 - RNA, 24 nt, Artificial Sequence
  Synthetic
ucuacacaguugcugaaacaggcu

SEQ ID NO: 647943 - RNA, 18 nt, Artificial Sequence
  Synthetic
auagaccaauaacaggcu

SEQ ID NO: 647944 - RNA, 19 nt, Artificial Sequence
  Synthetic
aauagaccaauaacaggcu

SEQ ID NO: 647945 - RNA, 20 nt, Artificial Sequence
  Synthetic
gaauagaccaauaacaggcu

SEQ ID NO: 647946 - RNA, 21 nt, Artificial Sequence
  Synthetic
ugaauagaccaauaacaggcu

SEQ ID NO: 647947 - RNA, 22 nt, Artificial Sequence
  Synthetic
cugaauagaccaauaacaggcu

SEQ ID NO: 647948 - RNA, 23 nt, Artificial Sequence
  Synthetic
ccugaauagaccaauaacaggcu

SEQ ID NO: 647949 - RNA, 24 nt, Artificial Sequence
  Synthetic
cccugaauagaccaauaacaggcu

SEQ ID NO: 647950 - RNA, 23 nt, Artificial Sequence
  Synthetic
ucugaauagaccaauaacaggcu

SEQ ID NO: 647951 - RNA, 24 nt, Artificial Sequence
  Synthetic
cucugaauagaccaauaacaggcu

SEQ ID NO: 647952 - RNA, 18 nt, Artificial Sequence
  Synthetic
caaaacaaaacacaggcu

SEQ ID NO: 647953 - RNA, 19 nt, Artificial Sequence
  Synthetic
acaaaacaaaacacaggcu

SEQ ID NO: 647954 - RNA, 20 nt, Artificial Sequence
  Synthetic
cacaaaacaaaacacaggcu

SEQ ID NO: 647955 - RNA, 21 nt, Artificial Sequence
  Synthetic
ccacaaaacaaaacacaggcu

SEQ ID NO: 647956 - RNA, 22 nt, Artificial Sequence
  Synthetic
gccacaaaacaaaacacaggcu

SEQ ID NO: 647957 - RNA, 23 nt, Artificial Sequence
  Synthetic
agccacaaaacaaaacacaggcu

SEQ ID NO: 647958 - RNA, 24 nt, Artificial Sequence
  Synthetic
cagccacaaaacaaaacacaggcu

SEQ ID NO: 647959 - RNA, 18 nt, Artificial Sequence
  Synthetic
gaggacacuagacaggcu

SEQ ID NO: 647960 - RNA, 19 nt, Artificial Sequence
  Synthetic
agaggacacuagacaggcu

SEQ ID NO: 647961 - RNA, 20 nt, Artificial Sequence
  Synthetic
gagaggacacuagacaggcu

SEQ ID NO: 647962 - RNA, 21 nt, Artificial Sequence
  Synthetic
ugagaggacacuagacaggcu

SEQ ID NO: 647963 - RNA, 22 nt, Artificial Sequence
  Synthetic
augagaggacacuagacaggcu

SEQ ID NO: 647964 - RNA, 23 nt, Artificial Sequence
  Synthetic
gaugagaggacacuagacaggcu

SEQ ID NO: 647965 - RNA, 24 nt, Artificial Sequence
  Synthetic
agaugagaggacacuagacaggcu

SEQ ID NO: 647966 - RNA, 18 nt, Artificial Sequence
  Synthetic
ugucucaaaggacaggcu

SEQ ID NO: 647967 - RNA, 19 nt, Artificial Sequence
  Synthetic
gugucucaaaggacaggcu

SEQ ID NO: 647968 - RNA, 20 nt, Artificial Sequence
  Synthetic
ugugucucaaaggacaggcu

SEQ ID NO: 647969 - RNA, 21 nt, Artificial Sequence
  Synthetic
augugucucaaaggacaggcu

SEQ ID NO: 647970 - RNA, 22 nt, Artificial Sequence
  Synthetic
aaugugucucaaaggacaggcu

SEQ ID NO: 647971 - RNA, 23 nt, Artificial Sequence
  Synthetic
aaaugugucucaaaggacaggcu

SEQ ID NO: 647972 - RNA, 24 nt, Artificial Sequence
  Synthetic
aaaaugugucucaaaggacaggcu

SEQ ID NO: 647973 - RNA, 18 nt, Artificial Sequence
  Synthetic
uucugaguaugccaggcu

SEQ ID NO: 647974 - RNA, 19 nt, Artificial Sequence
  Synthetic
auucugaguaugccaggcu

SEQ ID NO: 647975 - RNA, 20 nt, Artificial Sequence
  Synthetic
cauucugaguaugccaggcu

SEQ ID NO: 647976 - RNA, 21 nt, Artificial Sequence
  Synthetic
acauucugaguaugccaggcu

SEQ ID NO: 647977 - RNA, 22 nt, Artificial Sequence
  Synthetic
aacauucugaguaugccaggcu

SEQ ID NO: 647978 - RNA, 23 nt, Artificial Sequence
  Synthetic
uaacauucugaguaugccaggcu

SEQ ID NO: 647979 - RNA, 24 nt, Artificial Sequence
  Synthetic
cuaacauucugaguaugccaggcu

SEQ ID NO: 647980 - RNA, 18 nt, Artificial Sequence
  Synthetic
accaaaauaauccaggcu

SEQ ID NO: 647981 - RNA, 19 nt, Artificial Sequence
  Synthetic
caccaaaauaauccaggcu

SEQ ID NO: 647982 - RNA, 20 nt, Artificial Sequence
  Synthetic
ucaccaaaauaauccaggcu

SEQ ID NO: 647983 - RNA, 21 nt, Artificial Sequence
  Synthetic
gucaccaaaauaauccaggcu

SEQ ID NO: 647984 - RNA, 22 nt, Artificial Sequence
  Synthetic
agucaccaaaauaauccaggcu

SEQ ID NO: 647985 - RNA, 23 nt, Artificial Sequence
  Synthetic
cagucaccaaaauaauccaggcu

SEQ ID NO: 647986 - RNA, 24 nt, Artificial Sequence
  Synthetic
gcagucaccaaaauaauccaggcu

SEQ ID NO: 647987 - RNA, 18 nt, Artificial Sequence
  Synthetic
gauucgauuuugcaggcu

SEQ ID NO: 647988 - RNA, 19 nt, Artificial Sequence
  Synthetic
ugauucgauuuugcaggcu

SEQ ID NO: 647989 - RNA, 20 nt, Artificial Sequence
  Synthetic
uugauucgauuuugcaggcu

SEQ ID NO: 647990 - RNA, 21 nt, Artificial Sequence
  Synthetic
cuugauucgauuuugcaggcu

SEQ ID NO: 647991 - RNA, 22 nt, Artificial Sequence
  Synthetic
acuugauucgauuuugcaggcu

SEQ ID NO: 647992 - RNA, 23 nt, Artificial Sequence
  Synthetic
aacuugauucgauuuugcaggcu

SEQ ID NO: 647993 - RNA, 24 nt, Artificial Sequence
  Synthetic
gaacuugauucgauuuugcaggcu

SEQ ID NO: 647994 - RNA, 18 nt, Artificial Sequence
  Synthetic
caugaaauguaucaggcu

SEQ ID NO: 647995 - RNA, 19 nt, Artificial Sequence
  Synthetic
ucaugaaauguaucaggcu

SEQ ID NO: 647996 - RNA, 20 nt, Artificial Sequence
  Synthetic
uucaugaaauguaucaggcu

SEQ ID NO: 647997 - RNA, 21 nt, Artificial Sequence
  Synthetic
cuucaugaaauguaucaggcu

SEQ ID NO: 647998 - RNA, 22 nt, Artificial Sequence
  Synthetic
ccuucaugaaauguaucaggcu

SEQ ID NO: 647999 - RNA, 23 nt, Artificial Sequence
  Synthetic
cccuucaugaaauguaucaggcu

SEQ ID NO: 648000 - RNA, 24 nt, Artificial Sequence
  Synthetic
gcccuucaugaaauguaucaggcu

SEQ ID NO: 648001 - RNA, 18 nt, Artificial Sequence
  Synthetic
uuauagauaccagaggcu

SEQ ID NO: 648002 - RNA, 19 nt, Artificial Sequence
  Synthetic
uuuauagauaccagaggcu

SEQ ID NO: 648003 - RNA, 20 nt, Artificial Sequence
  Synthetic
uuuuauagauaccagaggcu

SEQ ID NO: 648004 - RNA, 21 nt, Artificial Sequence
  Synthetic
uuuuuauagauaccagaggcu

SEQ ID NO: 648005 - RNA, 22 nt, Artificial Sequence
  Synthetic
uuuuuuauagauaccagaggcu

SEQ ID NO: 648006 - RNA, 23 nt, Artificial Sequence
  Synthetic
uuuuuuuauagauaccagaggcu

SEQ ID NO: 648007 - RNA, 24 nt, Artificial Sequence
  Synthetic
uuuuuuuuauagauaccagaggcu

SEQ ID NO: 648008 - RNA, 18 nt, Artificial Sequence
  Synthetic
ggaugguuaccagaggcu

SEQ ID NO: 648009 - RNA, 19 nt, Artificial Sequence
  Synthetic
aggaugguuaccagaggcu

SEQ ID NO: 648010 - RNA, 20 nt, Artificial Sequence
  Synthetic
aaggaugguuaccagaggcu

SEQ ID NO: 648011 - RNA, 21 nt, Artificial Sequence
  Synthetic
gaaggaugguuaccagaggcu

SEQ ID NO: 648012 - RNA, 22 nt, Artificial Sequence
  Synthetic
ggaaggaugguuaccagaggcu

SEQ ID NO: 648013 - RNA, 23 nt, Artificial Sequence
  Synthetic
uggaaggaugguuaccagaggcu

SEQ ID NO: 648014 - RNA, 24 nt, Artificial Sequence
  Synthetic
guggaaggaugguuaccagaggcu

SEQ ID NO: 648015 - RNA, 18 nt, Artificial Sequence
  Synthetic
agguaguugccagaggcu

SEQ ID NO: 648016 - RNA, 19 nt, Artificial Sequence
  Synthetic
aagguaguugccagaggcu

SEQ ID NO: 648017 - RNA, 20 nt, Artificial Sequence
  Synthetic
aaagguaguugccagaggcu

SEQ ID NO: 648018 - RNA, 21 nt, Artificial Sequence
  Synthetic
gaaagguaguugccagaggcu

SEQ ID NO: 648019 - RNA, 22 nt, Artificial Sequence
  Synthetic
agaaagguaguugccagaggcu

SEQ ID NO: 648020 - RNA, 23 nt, Artificial Sequence
  Synthetic
uagaaagguaguugccagaggcu

SEQ ID NO: 648021 - RNA, 24 nt, Artificial Sequence
  Synthetic
guagaaagguaguugccagaggcu

SEQ ID NO: 648022 - RNA, 18 nt, Artificial Sequence
  Synthetic
uggcacagagcagaggcu

SEQ ID NO: 648023 - RNA, 19 nt, Artificial Sequence
  Synthetic
uuggcacagagcagaggcu

SEQ ID NO: 648024 - RNA, 20 nt, Artificial Sequence
  Synthetic
uuuggcacagagcagaggcu

SEQ ID NO: 648025 - RNA, 21 nt, Artificial Sequence
  Synthetic
guuuggcacagagcagaggcu

SEQ ID NO: 648026 - RNA, 22 nt, Artificial Sequence
  Synthetic
cguuuggcacagagcagaggcu

SEQ ID NO: 648027 - RNA, 23 nt, Artificial Sequence
  Synthetic
gcguuuggcacagagcagaggcu

SEQ ID NO: 648028 - RNA, 24 nt, Artificial Sequence
  Synthetic
ugcguuuggcacagagcagaggcu

SEQ ID NO: 648029 - RNA, 18 nt, Artificial Sequence
  Synthetic
uggaacaguuaggaggcu

SEQ ID NO: 648030 - RNA, 19 nt, Artificial Sequence
  Synthetic
uuggaacaguuaggaggcu

SEQ ID NO: 648031 - RNA, 20 nt, Artificial Sequence
  Synthetic
guuggaacaguuaggaggcu

SEQ ID NO: 648032 - RNA, 21 nt, Artificial Sequence
  Synthetic
gguuggaacaguuaggaggcu

SEQ ID NO: 648033 - RNA, 22 nt, Artificial Sequence
  Synthetic
ggguuggaacaguuaggaggcu

SEQ ID NO: 648034 - RNA, 23 nt, Artificial Sequence
  Synthetic
gggguuggaacaguuaggaggcu

SEQ ID NO: 648035 - RNA, 24 nt, Artificial Sequence
  Synthetic
agggguuggaacaguuaggaggcu

SEQ ID NO: 648036 - RNA, 18 nt, Artificial Sequence
  Synthetic
cugcauguugcggaggcu

SEQ ID NO: 648037 - RNA, 19 nt, Artificial Sequence
  Synthetic
ucugcauguugcggaggcu

SEQ ID NO: 648038 - RNA, 20 nt, Artificial Sequence
  Synthetic
gucugcauguugcggaggcu

SEQ ID NO: 648039 - RNA, 21 nt, Artificial Sequence
  Synthetic
ggucugcauguugcggaggcu

SEQ ID NO: 648040 - RNA, 22 nt, Artificial Sequence
  Synthetic
uggucugcauguugcggaggcu

SEQ ID NO: 648041 - RNA, 23 nt, Artificial Sequence
  Synthetic
cuggucugcauguugcggaggcu

SEQ ID NO: 648042 - RNA, 24 nt, Artificial Sequence
  Synthetic
ccuggucugcauguugcggaggcu

SEQ ID NO: 648043 - RNA, 18 nt, Artificial Sequence
  Synthetic
aauaauaugcuggaggcu

SEQ ID NO: 648044 - RNA, 19 nt, Artificial Sequence
  Synthetic
aaauaauaugcuggaggcu

SEQ ID NO: 648045 - RNA, 20 nt, Artificial Sequence
  Synthetic
aaaauaauaugcuggaggcu

SEQ ID NO: 648046 - RNA, 21 nt, Artificial Sequence
  Synthetic
caaaauaauaugcuggaggcu

SEQ ID NO: 648047 - RNA, 22 nt, Artificial Sequence
  Synthetic
ucaaaauaauaugcuggaggcu

SEQ ID NO: 648048 - RNA, 23 nt, Artificial Sequence
  Synthetic
uucaaaauaauaugcuggaggcu

SEQ ID NO: 648049 - RNA, 24 nt, Artificial Sequence
  Synthetic
auucaaaauaauaugcuggaggcu

SEQ ID NO: 648050 - RNA, 18 nt, Artificial Sequence
  Synthetic
cucacaguucuggaggcu

SEQ ID NO: 648051 - RNA, 19 nt, Artificial Sequence
  Synthetic
acucacaguucuggaggcu

SEQ ID NO: 648052 - RNA, 20 nt, Artificial Sequence
  Synthetic
cacucacaguucuggaggcu

SEQ ID NO: 648053 - RNA, 21 nt, Artificial Sequence
  Synthetic
ucacucacaguucuggaggcu

SEQ ID NO: 648054 - RNA, 22 nt, Artificial Sequence
  Synthetic
uucacucacaguucuggaggcu

SEQ ID NO: 648055 - RNA, 23 nt, Artificial Sequence
  Synthetic
auucacucacaguucuggaggcu

SEQ ID NO: 648056 - RNA, 24 nt, Artificial Sequence
  Synthetic
uauucacucacaguucuggaggcu

SEQ ID NO: 648057 - RNA, 18 nt, Artificial Sequence
  Synthetic
caguuuggggcugaggcu

SEQ ID NO: 648058 - RNA, 19 nt, Artificial Sequence
  Synthetic
ucaguuuggggcugaggcu

SEQ ID NO: 648059 - RNA, 20 nt, Artificial Sequence
  Synthetic
gucaguuuggggcugaggcu

SEQ ID NO: 648060 - RNA, 21 nt, Artificial Sequence
  Synthetic
ugucaguuuggggcugaggcu

SEQ ID NO: 648061 - RNA, 22 nt, Artificial Sequence
  Synthetic
uugucaguuuggggcugaggcu

SEQ ID NO: 648062 - RNA, 23 nt, Artificial Sequence
  Synthetic
uuugucaguuuggggcugaggcu

SEQ ID NO: 648063 - RNA, 24 nt, Artificial Sequence
  Synthetic
guuugucaguuuggggcugaggcu

SEQ ID NO: 648064 - RNA, 18 nt, Artificial Sequence
  Synthetic
gcgcuuuuaaaauaggcu

SEQ ID NO: 648065 - RNA, 19 nt, Artificial Sequence
  Synthetic
ugcgcuuuuaaaauaggcu

SEQ ID NO: 648066 - RNA, 20 nt, Artificial Sequence
  Synthetic
uugcgcuuuuaaaauaggcu

SEQ ID NO: 648067 - RNA, 21 nt, Artificial Sequence
  Synthetic
uuugcgcuuuuaaaauaggcu

SEQ ID NO: 648068 - RNA, 22 nt, Artificial Sequence
  Synthetic
uuuugcgcuuuuaaaauaggcu

SEQ ID NO: 648069 - RNA, 23 nt, Artificial Sequence
  Synthetic
uuuuugcgcuuuuaaaauaggcu

SEQ ID NO: 648070 - RNA, 24 nt, Artificial Sequence
  Synthetic
guuuuugcgcuuuuaaaauaggcu

SEQ ID NO: 648071 - RNA, 18 nt, Artificial Sequence
  Synthetic
uauauuuggucauaggcu

SEQ ID NO: 648072 - RNA, 19 nt, Artificial Sequence
  Synthetic
auauauuuggucauaggcu

SEQ ID NO: 648073 - RNA, 20 nt, Artificial Sequence
  Synthetic
cauauauuuggucauaggcu

SEQ ID NO: 648074 - RNA, 21 nt, Artificial Sequence
  Synthetic
ucauauauuuggucauaggcu

SEQ ID NO: 648075 - RNA, 22 nt, Artificial Sequence
  Synthetic
aucauauauuuggucauaggcu

SEQ ID NO: 648076 - RNA, 23 nt, Artificial Sequence
  Synthetic
uaucauauauuuggucauaggcu

SEQ ID NO: 648077 - RNA, 24 nt, Artificial Sequence
  Synthetic
guaucauauauuuggucauaggcu

SEQ ID NO: 648078 - RNA, 18 nt, Artificial Sequence
  Synthetic
aacccaagaaguuaggcu

SEQ ID NO: 648079 - RNA, 19 nt, Artificial Sequence
  Synthetic
gaacccaagaaguuaggcu

SEQ ID NO: 648080 - RNA, 20 nt, Artificial Sequence
  Synthetic
ugaacccaagaaguuaggcu

SEQ ID NO: 648081 - RNA, 21 nt, Artificial Sequence
  Synthetic
uugaacccaagaaguuaggcu

SEQ ID NO: 648082 - RNA, 22 nt, Artificial Sequence
  Synthetic
uuugaacccaagaaguuaggcu

SEQ ID NO: 648083 - RNA, 23 nt, Artificial Sequence
  Synthetic
auuugaacccaagaaguuaggcu

SEQ ID NO: 648084 - RNA, 24 nt, Artificial Sequence
  Synthetic
gauuugaacccaagaaguuaggcu

SEQ ID NO: 648085 - RNA, 18 nt, Artificial Sequence
  Synthetic
uugaugaauccuacggcu

SEQ ID NO: 648086 - RNA, 19 nt, Artificial Sequence
  Synthetic
uuugaugaauccuacggcu

SEQ ID NO: 648087 - RNA, 20 nt, Artificial Sequence
  Synthetic
auuugaugaauccuacggcu

SEQ ID NO: 648088 - RNA, 21 nt, Artificial Sequence
  Synthetic
uauuugaugaauccuacggcu

SEQ ID NO: 648089 - RNA, 22 nt, Artificial Sequence
  Synthetic
uuauuugaugaauccuacggcu

SEQ ID NO: 648090 - RNA, 23 nt, Artificial Sequence
  Synthetic
uuuauuugaugaauccuacggcu

SEQ ID NO: 648091 - RNA, 24 nt, Artificial Sequence
  Synthetic
uuuuauuugaugaauccuacggcu

SEQ ID NO: 648092 - RNA, 18 nt, Artificial Sequence
  Synthetic
aaagagucugaaagggcu

SEQ ID NO: 648093 - RNA, 19 nt, Artificial Sequence
  Synthetic
aaaagagucugaaagggcu

SEQ ID NO: 648094 - RNA, 20 nt, Artificial Sequence
  Synthetic
caaaagagucugaaagggcu

SEQ ID NO: 648095 - RNA, 21 nt, Artificial Sequence
  Synthetic
ccaaaagagucugaaagggcu

SEQ ID NO: 648096 - RNA, 22 nt, Artificial Sequence
  Synthetic
accaaaagagucugaaagggcu

SEQ ID NO: 648097 - RNA, 23 nt, Artificial Sequence
  Synthetic
uaccaaaagagucugaaagggcu

SEQ ID NO: 648098 - RNA, 24 nt, Artificial Sequence
  Synthetic
uuaccaaaagagucugaaagggcu

SEQ ID NO: 648099 - RNA, 18 nt, Artificial Sequence
  Synthetic
agaauauucugaagggcu

SEQ ID NO: 648100 - RNA, 19 nt, Artificial Sequence
  Synthetic
uagaauauucugaagggcu

SEQ ID NO: 648101 - RNA, 20 nt, Artificial Sequence
  Synthetic
guagaauauucugaagggcu

SEQ ID NO: 648102 - RNA, 21 nt, Artificial Sequence
  Synthetic
uguagaauauucugaagggcu

SEQ ID NO: 648103 - RNA, 22 nt, Artificial Sequence
  Synthetic
cuguagaauauucugaagggcu

SEQ ID NO: 648104 - RNA, 23 nt, Artificial Sequence
  Synthetic
ucuguagaauauucugaagggcu

SEQ ID NO: 648105 - RNA, 24 nt, Artificial Sequence
  Synthetic
gucuguagaauauucugaagggcu

SEQ ID NO: 648106 - RNA, 18 nt, Artificial Sequence
  Synthetic
cugaucaguauaagggcu

SEQ ID NO: 648107 - RNA, 19 nt, Artificial Sequence
  Synthetic
acugaucaguauaagggcu

SEQ ID NO: 648108 - RNA, 20 nt, Artificial Sequence
  Synthetic
uacugaucaguauaagggcu

SEQ ID NO: 648109 - RNA, 21 nt, Artificial Sequence
  Synthetic
auacugaucaguauaagggcu

SEQ ID NO: 648110 - RNA, 22 nt, Artificial Sequence
  Synthetic
cauacugaucaguauaagggcu

SEQ ID NO: 648111 - RNA, 23 nt, Artificial Sequence
  Synthetic
acauacugaucaguauaagggcu

SEQ ID NO: 648112 - RNA, 24 nt, Artificial Sequence
  Synthetic
aacauacugaucaguauaagggcu

SEQ ID NO: 648113 - RNA, 18 nt, Artificial Sequence
  Synthetic
cuaaaugugcacagggcu

SEQ ID NO: 648114 - RNA, 19 nt, Artificial Sequence
  Synthetic
gcuaaaugugcacagggcu

SEQ ID NO: 648115 - RNA, 20 nt, Artificial Sequence
  Synthetic
ugcuaaaugugcacagggcu

SEQ ID NO: 648116 - RNA, 21 nt, Artificial Sequence
  Synthetic
augcuaaaugugcacagggcu

SEQ ID NO: 648117 - RNA, 22 nt, Artificial Sequence
  Synthetic
aaugcuaaaugugcacagggcu

SEQ ID NO: 648118 - RNA, 23 nt, Artificial Sequence
  Synthetic
uaaugcuaaaugugcacagggcu

SEQ ID NO: 648119 - RNA, 24 nt, Artificial Sequence
  Synthetic
cuaaugcuaaaugugcacagggcu

SEQ ID NO: 648120 - RNA, 18 nt, Artificial Sequence
  Synthetic
gucuguggccccagggcu

SEQ ID NO: 648121 - RNA, 19 nt, Artificial Sequence
  Synthetic
ggucuguggccccagggcu

SEQ ID NO: 648122 - RNA, 20 nt, Artificial Sequence
  Synthetic
uggucuguggccccagggcu

SEQ ID NO: 648123 - RNA, 21 nt, Artificial Sequence
  Synthetic
cuggucuguggccccagggcu

SEQ ID NO: 648124 - RNA, 22 nt, Artificial Sequence
  Synthetic
acuggucuguggccccagggcu

SEQ ID NO: 648125 - RNA, 23 nt, Artificial Sequence
  Synthetic
uacuggucuguggccccagggcu

SEQ ID NO: 648126 - RNA, 24 nt, Artificial Sequence
  Synthetic
guacuggucuguggccccagggcu

SEQ ID NO: 648127 - RNA, 18 nt, Artificial Sequence
  Synthetic
cccucagaguucagggcu

SEQ ID NO: 648128 - RNA, 19 nt, Artificial Sequence
  Synthetic
ccccucagaguucagggcu

SEQ ID NO: 648129 - RNA, 20 nt, Artificial Sequence
  Synthetic
accccucagaguucagggcu

SEQ ID NO: 648130 - RNA, 21 nt, Artificial Sequence
  Synthetic
aaccccucagaguucagggcu

SEQ ID NO: 648131 - RNA, 22 nt, Artificial Sequence
  Synthetic
aaaccccucagaguucagggcu

SEQ ID NO: 648132 - RNA, 23 nt, Artificial Sequence
  Synthetic
caaaccccucagaguucagggcu

SEQ ID NO: 648133 - RNA, 24 nt, Artificial Sequence
  Synthetic
gcaaaccccucagaguucagggcu

SEQ ID NO: 648134 - RNA, 18 nt, Artificial Sequence
  Synthetic
gguacaguuuggagggcu

SEQ ID NO: 648135 - RNA, 19 nt, Artificial Sequence
  Synthetic
ugguacaguuuggagggcu

SEQ ID NO: 648136 - RNA, 20 nt, Artificial Sequence
  Synthetic
cugguacaguuuggagggcu

SEQ ID NO: 648137 - RNA, 21 nt, Artificial Sequence
  Synthetic
ucugguacaguuuggagggcu

SEQ ID NO: 648138 - RNA, 22 nt, Artificial Sequence
  Synthetic
gucugguacaguuuggagggcu

SEQ ID NO: 648139 - RNA, 23 nt, Artificial Sequence
  Synthetic
agucugguacaguuuggagggcu

SEQ ID NO: 648140 - RNA, 24 nt, Artificial Sequence
  Synthetic
gagucugguacaguuuggagggcu

SEQ ID NO: 648141 - RNA, 18 nt, Artificial Sequence
  Synthetic
gugaaauagaugagggcu

SEQ ID NO: 648142 - RNA, 19 nt, Artificial Sequence
  Synthetic
ugugaaauagaugagggcu

SEQ ID NO: 648143 - RNA, 20 nt, Artificial Sequence
  Synthetic
cugugaaauagaugagggcu

SEQ ID NO: 648144 - RNA, 21 nt, Artificial Sequence
  Synthetic
acugugaaauagaugagggcu

SEQ ID NO: 648145 - RNA, 22 nt, Artificial Sequence
  Synthetic
uacugugaaauagaugagggcu

SEQ ID NO: 648146 - RNA, 23 nt, Artificial Sequence
  Synthetic
cuacugugaaauagaugagggcu

SEQ ID NO: 648147 - RNA, 24 nt, Artificial Sequence
  Synthetic
acuacugugaaauagaugagggcu

SEQ ID NO: 648148 - RNA, 18 nt, Artificial Sequence
  Synthetic
ggccagaaugugagggcu

SEQ ID NO: 648149 - RNA, 19 nt, Artificial Sequence
  Synthetic
gggccagaaugugagggcu

SEQ ID NO: 648150 - RNA, 20 nt, Artificial Sequence
  Synthetic
ggggccagaaugugagggcu

SEQ ID NO: 648151 - RNA, 21 nt, Artificial Sequence
  Synthetic
uggggccagaaugugagggcu

SEQ ID NO: 648152 - RNA, 22 nt, Artificial Sequence
  Synthetic
cuggggccagaaugugagggcu

SEQ ID NO: 648153 - RNA, 23 nt, Artificial Sequence
  Synthetic
gcuggggccagaaugugagggcu

SEQ ID NO: 648154 - RNA, 24 nt, Artificial Sequence
  Synthetic
agcuggggccagaaugugagggcu

SEQ ID NO: 648155 - RNA, 18 nt, Artificial Sequence
  Synthetic
ugguuucccuugagggcu

SEQ ID NO: 648156 - RNA, 19 nt, Artificial Sequence
  Synthetic
augguuucccuugagggcu

SEQ ID NO: 648157 - RNA, 20 nt, Artificial Sequence
  Synthetic
caugguuucccuugagggcu

SEQ ID NO: 648158 - RNA, 21 nt, Artificial Sequence
  Synthetic
ccaugguuucccuugagggcu

SEQ ID NO: 648159 - RNA, 22 nt, Artificial Sequence
  Synthetic
cccaugguuucccuugagggcu

SEQ ID NO: 648160 - RNA, 23 nt, Artificial Sequence
  Synthetic
gcccaugguuucccuugagggcu

SEQ ID NO: 648161 - RNA, 24 nt, Artificial Sequence
  Synthetic
agcccaugguuucccuugagggcu

SEQ ID NO: 648162 - RNA, 18 nt, Artificial Sequence
  Synthetic
cuuuccagaugacgggcu

SEQ ID NO: 648163 - RNA, 19 nt, Artificial Sequence
  Synthetic
gcuuuccagaugacgggcu

SEQ ID NO: 648164 - RNA, 20 nt, Artificial Sequence
  Synthetic
agcuuuccagaugacgggcu

SEQ ID NO: 648165 - RNA, 21 nt, Artificial Sequence
  Synthetic
cagcuuuccagaugacgggcu

SEQ ID NO: 648166 - RNA, 22 nt, Artificial Sequence
  Synthetic
acagcuuuccagaugacgggcu

SEQ ID NO: 648167 - RNA, 23 nt, Artificial Sequence
  Synthetic
uacagcuuuccagaugacgggcu

SEQ ID NO: 648168 - RNA, 24 nt, Artificial Sequence
  Synthetic
guacagcuuuccagaugacgggcu

SEQ ID NO: 648169 - RNA, 18 nt, Artificial Sequence
  Synthetic
aguugaaugaaucgggcu

SEQ ID NO: 648170 - RNA, 19 nt, Artificial Sequence
  Synthetic
aaguugaaugaaucgggcu

SEQ ID NO: 648171 - RNA, 20 nt, Artificial Sequence
  Synthetic
caaguugaaugaaucgggcu

SEQ ID NO: 648172 - RNA, 21 nt, Artificial Sequence
  Synthetic
acaaguugaaugaaucgggcu

SEQ ID NO: 648173 - RNA, 22 nt, Artificial Sequence
  Synthetic
cacaaguugaaugaaucgggcu

SEQ ID NO: 648174 - RNA, 23 nt, Artificial Sequence
  Synthetic
ucacaaguugaaugaaucgggcu

SEQ ID NO: 648175 - RNA, 24 nt, Artificial Sequence
  Synthetic
uucacaaguugaaugaaucgggcu

SEQ ID NO: 648176 - RNA, 18 nt, Artificial Sequence
  Synthetic
aucaauuggaaaggggcu

SEQ ID NO: 648177 - RNA, 19 nt, Artificial Sequence
  Synthetic
caucaauuggaaaggggcu

SEQ ID NO: 648178 - RNA, 20 nt, Artificial Sequence
  Synthetic
ccaucaauuggaaaggggcu

SEQ ID NO: 648179 - RNA, 21 nt, Artificial Sequence
  Synthetic
accaucaauuggaaaggggcu

SEQ ID NO: 648180 - RNA, 22 nt, Artificial Sequence
  Synthetic
uaccaucaauuggaaaggggcu

SEQ ID NO: 648181 - RNA, 23 nt, Artificial Sequence
  Synthetic
guaccaucaauuggaaaggggcu

SEQ ID NO: 648182 - RNA, 24 nt, Artificial Sequence
  Synthetic
uguaccaucaauuggaaaggggcu

SEQ ID NO: 648183 - RNA, 18 nt, Artificial Sequence
  Synthetic
uggugguuuccaggggcu

SEQ ID NO: 648184 - RNA, 19 nt, Artificial Sequence
  Synthetic
auggugguuuccaggggcu

SEQ ID NO: 648185 - RNA, 20 nt, Artificial Sequence
  Synthetic
aauggugguuuccaggggcu

SEQ ID NO: 648186 - RNA, 21 nt, Artificial Sequence
  Synthetic
gaauggugguuuccaggggcu

SEQ ID NO: 648187 - RNA, 22 nt, Artificial Sequence
  Synthetic
agaauggugguuuccaggggcu

SEQ ID NO: 648188 - RNA, 23 nt, Artificial Sequence
  Synthetic
uagaauggugguuuccaggggcu

SEQ ID NO: 648189 - RNA, 24 nt, Artificial Sequence
  Synthetic
auagaauggugguuuccaggggcu

SEQ ID NO: 648190 - RNA, 18 nt, Artificial Sequence
  Synthetic
uguugaggcagaggggcu

SEQ ID NO: 648191 - RNA, 19 nt, Artificial Sequence
  Synthetic
guguugaggcagaggggcu

SEQ ID NO: 648192 - RNA, 20 nt, Artificial Sequence
  Synthetic
gguguugaggcagaggggcu

SEQ ID NO: 648193 - RNA, 21 nt, Artificial Sequence
  Synthetic
ugguguugaggcagaggggcu

SEQ ID NO: 648194 - RNA, 22 nt, Artificial Sequence
  Synthetic
uugguguugaggcagaggggcu

SEQ ID NO: 648195 - RNA, 23 nt, Artificial Sequence
  Synthetic
guugguguugaggcagaggggcu

SEQ ID NO: 648196 - RNA, 24 nt, Artificial Sequence
  Synthetic
gguugguguugaggcagaggggcu

SEQ ID NO: 648197 - RNA, 18 nt, Artificial Sequence
  Synthetic
caaguucauggaggggcu

SEQ ID NO: 648198 - RNA, 19 nt, Artificial Sequence
  Synthetic
ccaaguucauggaggggcu

SEQ ID NO: 648199 - RNA, 20 nt, Artificial Sequence
  Synthetic
accaaguucauggaggggcu

SEQ ID NO: 648200 - RNA, 21 nt, Artificial Sequence
  Synthetic
uaccaaguucauggaggggcu

SEQ ID NO: 648201 - RNA, 22 nt, Artificial Sequence
  Synthetic
uuaccaaguucauggaggggcu

SEQ ID NO: 648202 - RNA, 23 nt, Artificial Sequence
  Synthetic
guuaccaaguucauggaggggcu

SEQ ID NO: 648203 - RNA, 24 nt, Artificial Sequence
  Synthetic
aguuaccaaguucauggaggggcu

SEQ ID NO: 648204 - RNA, 18 nt, Artificial Sequence
  Synthetic
uagauacugcagggggcu

SEQ ID NO: 648205 - RNA, 19 nt, Artificial Sequence
  Synthetic
cuagauacugcagggggcu

SEQ ID NO: 648206 - RNA, 20 nt, Artificial Sequence
  Synthetic
gcuagauacugcagggggcu

SEQ ID NO: 648207 - RNA, 21 nt, Artificial Sequence
  Synthetic
ugcuagauacugcagggggcu

SEQ ID NO: 648208 - RNA, 22 nt, Artificial Sequence
  Synthetic
cugcuagauacugcagggggcu

SEQ ID NO: 648209 - RNA, 23 nt, Artificial Sequence
  Synthetic
ucugcuagauacugcagggggcu

SEQ ID NO: 648210 - RNA, 24 nt, Artificial Sequence
  Synthetic
uucugcuagauacugcagggggcu

SEQ ID NO: 648211 - RNA, 18 nt, Artificial Sequence
  Synthetic
agugauuuuuagggggcu

SEQ ID NO: 648212 - RNA, 19 nt, Artificial Sequence
  Synthetic
gagugauuuuuagggggcu

SEQ ID NO: 648213 - RNA, 20 nt, Artificial Sequence
  Synthetic
ugagugauuuuuagggggcu

SEQ ID NO: 648214 - RNA, 21 nt, Artificial Sequence
  Synthetic
cugagugauuuuuagggggcu

SEQ ID NO: 648215 - RNA, 22 nt, Artificial Sequence
  Synthetic
ccugagugauuuuuagggggcu

SEQ ID NO: 648216 - RNA, 23 nt, Artificial Sequence
  Synthetic
gccugagugauuuuuagggggcu

SEQ ID NO: 648217 - RNA, 24 nt, Artificial Sequence
  Synthetic
ggccugagugauuuuuagggggcu

SEQ ID NO: 648218 - RNA, 18 nt, Artificial Sequence
  Synthetic
ucacagcuaacgggggcu

SEQ ID NO: 648219 - RNA, 19 nt, Artificial Sequence
  Synthetic
aucacagcuaacgggggcu

SEQ ID NO: 648220 - RNA, 20 nt, Artificial Sequence
  Synthetic
uaucacagcuaacgggggcu

SEQ ID NO: 648221 - RNA, 21 nt, Artificial Sequence
  Synthetic
auaucacagcuaacgggggcu

SEQ ID NO: 648222 - RNA, 22 nt, Artificial Sequence
  Synthetic
uauaucacagcuaacgggggcu

SEQ ID NO: 648223 - RNA, 23 nt, Artificial Sequence
  Synthetic
auauaucacagcuaacgggggcu

SEQ ID NO: 648224 - RNA, 24 nt, Artificial Sequence
  Synthetic
gauauaucacagcuaacgggggcu

SEQ ID NO: 648225 - RNA, 18 nt, Artificial Sequence
  Synthetic
gucaggggguggggggcu

SEQ ID NO: 648226 - RNA, 19 nt, Artificial Sequence
  Synthetic
ugucaggggguggggggcu

SEQ ID NO: 648227 - RNA, 20 nt, Artificial Sequence
  Synthetic
cugucaggggguggggggcu

SEQ ID NO: 648228 - RNA, 21 nt, Artificial Sequence
  Synthetic
ccugucaggggguggggggcu

SEQ ID NO: 648229 - RNA, 22 nt, Artificial Sequence
  Synthetic
gccugucaggggguggggggcu

SEQ ID NO: 648230 - RNA, 23 nt, Artificial Sequence
  Synthetic
ggccugucaggggguggggggcu

SEQ ID NO: 648231 - RNA, 24 nt, Artificial Sequence
  Synthetic
gggccugucaggggguggggggcu

SEQ ID NO: 648232 - RNA, 18 nt, Artificial Sequence
  Synthetic
gucgugggguggggggcu

SEQ ID NO: 648233 - RNA, 19 nt, Artificial Sequence
  Synthetic
ugucgugggguggggggcu

SEQ ID NO: 648234 - RNA, 20 nt, Artificial Sequence
  Synthetic
cugucgugggguggggggcu

SEQ ID NO: 648235 - RNA, 21 nt, Artificial Sequence
  Synthetic
ccugucgugggguggggggcu

SEQ ID NO: 648236 - RNA, 22 nt, Artificial Sequence
  Synthetic
gccugucgugggguggggggcu

SEQ ID NO: 648237 - RNA, 23 nt, Artificial Sequence
  Synthetic
ggccugucgugggguggggggcu

SEQ ID NO: 648238 - RNA, 24 nt, Artificial Sequence
  Synthetic
gggccugucgugggguggggggcu

SEQ ID NO: 648239 - RNA, 18 nt, Artificial Sequence
  Synthetic
cugccacuacugggggcu

SEQ ID NO: 648240 - RNA, 19 nt, Artificial Sequence
  Synthetic
ccugccacuacugggggcu

SEQ ID NO: 648241 - RNA, 20 nt, Artificial Sequence
  Synthetic
cccugccacuacugggggcu

SEQ ID NO: 648242 - RNA, 21 nt, Artificial Sequence
  Synthetic
ucccugccacuacugggggcu

SEQ ID NO: 648243 - RNA, 22 nt, Artificial Sequence
  Synthetic
cucccugccacuacugggggcu

SEQ ID NO: 648244 - RNA, 23 nt, Artificial Sequence
  Synthetic
gcucccugccacuacugggggcu

SEQ ID NO: 648245 - RNA, 24 nt, Artificial Sequence
  Synthetic
ugcucccugccacuacugggggcu

SEQ ID NO: 648246 - RNA, 18 nt, Artificial Sequence
  Synthetic
ucuuccagcuugggggcu

SEQ ID NO: 648247 - RNA, 19 nt, Artificial Sequence
  Synthetic
gucuuccagcuugggggcu

SEQ ID NO: 648248 - RNA, 20 nt, Artificial Sequence
  Synthetic
ugucuuccagcuugggggcu

SEQ ID NO: 648249 - RNA, 21 nt, Artificial Sequence
  Synthetic
augucuuccagcuugggggcu

SEQ ID NO: 648250 - RNA, 22 nt, Artificial Sequence
  Synthetic
gaugucuuccagcuugggggcu

SEQ ID NO: 648251 - RNA, 23 nt, Artificial Sequence
  Synthetic
agaugucuuccagcuugggggcu

SEQ ID NO: 648252 - RNA, 24 nt, Artificial Sequence
  Synthetic
aagaugucuuccagcuugggggcu

SEQ ID NO: 648253 - RNA, 18 nt, Artificial Sequence
  Synthetic
cuagaugccaguggggcu

SEQ ID NO: 648254 - RNA, 19 nt, Artificial Sequence
  Synthetic
acuagaugccaguggggcu

SEQ ID NO: 648255 - RNA, 20 nt, Artificial Sequence
  Synthetic
aacuagaugccaguggggcu

SEQ ID NO: 648256 - RNA, 21 nt, Artificial Sequence
  Synthetic
uaacuagaugccaguggggcu

SEQ ID NO: 648257 - RNA, 22 nt, Artificial Sequence
  Synthetic
cuaacuagaugccaguggggcu

SEQ ID NO: 648258 - RNA, 23 nt, Artificial Sequence
  Synthetic
ucuaacuagaugccaguggggcu

SEQ ID NO: 648259 - RNA, 24 nt, Artificial Sequence
  Synthetic
cucuaacuagaugccaguggggcu

SEQ ID NO: 648260 - RNA, 18 nt, Artificial Sequence
  Synthetic
aauaagauuuuuggggcu

SEQ ID NO: 648261 - RNA, 19 nt, Artificial Sequence
  Synthetic
aaauaagauuuuuggggcu

SEQ ID NO: 648262 - RNA, 20 nt, Artificial Sequence
  Synthetic
gaaauaagauuuuuggggcu

SEQ ID NO: 648263 - RNA, 21 nt, Artificial Sequence
  Synthetic
ugaaauaagauuuuuggggcu

SEQ ID NO: 648264 - RNA, 22 nt, Artificial Sequence
  Synthetic
cugaaauaagauuuuuggggcu

SEQ ID NO: 648265 - RNA, 23 nt, Artificial Sequence
  Synthetic
gcugaaauaagauuuuuggggcu

SEQ ID NO: 648266 - RNA, 24 nt, Artificial Sequence
  Synthetic
ugcugaaauaagauuuuuggggcu

SEQ ID NO: 648267 - RNA, 18 nt, Artificial Sequence
  Synthetic
agaaugauacaaugggcu

SEQ ID NO: 648268 - RNA, 19 nt, Artificial Sequence
  Synthetic
aagaaugauacaaugggcu

SEQ ID NO: 648269 - RNA, 20 nt, Artificial Sequence
  Synthetic
uaagaaugauacaaugggcu

SEQ ID NO: 648270 - RNA, 21 nt, Artificial Sequence
  Synthetic
auaagaaugauacaaugggcu

SEQ ID NO: 648271 - RNA, 22 nt, Artificial Sequence
  Synthetic
cauaagaaugauacaaugggcu

SEQ ID NO: 648272 - RNA, 23 nt, Artificial Sequence
  Synthetic
gcauaagaaugauacaaugggcu

SEQ ID NO: 648273 - RNA, 24 nt, Artificial Sequence
  Synthetic
ggcauaagaaugauacaaugggcu

SEQ ID NO: 648274 - RNA, 18 nt, Artificial Sequence
  Synthetic
aaaaaaccccacugggcu

SEQ ID NO: 648275 - RNA, 19 nt, Artificial Sequence
  Synthetic
aaaaaaaccccacugggcu

SEQ ID NO: 648276 - RNA, 20 nt, Artificial Sequence
  Synthetic
aaaaaaaaccccacugggcu

SEQ ID NO: 648277 - RNA, 21 nt, Artificial Sequence
  Synthetic
aaaaaaaaaccccacugggcu

SEQ ID NO: 648278 - RNA, 22 nt, Artificial Sequence
  Synthetic
aaaaaaaaaaccccacugggcu

SEQ ID NO: 648279 - RNA, 23 nt, Artificial Sequence
  Synthetic
aaaaaaaaaaaccccacugggcu

SEQ ID NO: 648280 - RNA, 24 nt, Artificial Sequence
  Synthetic
aaaaaaaaaaaaccccacugggcu

SEQ ID NO: 648281 - RNA, 18 nt, Artificial Sequence
  Synthetic
cuagucauagccugggcu

SEQ ID NO: 648282 - RNA, 19 nt, Artificial Sequence
  Synthetic
ucuagucauagccugggcu

SEQ ID NO: 648283 - RNA, 20 nt, Artificial Sequence
  Synthetic
uucuagucauagccugggcu

SEQ ID NO: 648284 - RNA, 21 nt, Artificial Sequence
  Synthetic
cuucuagucauagccugggcu

SEQ ID NO: 648285 - RNA, 22 nt, Artificial Sequence
  Synthetic
acuucuagucauagccugggcu

SEQ ID NO: 648286 - RNA, 23 nt, Artificial Sequence
  Synthetic
aacuucuagucauagccugggcu

SEQ ID NO: 648287 - RNA, 24 nt, Artificial Sequence
  Synthetic
uaacuucuagucauagccugggcu

SEQ ID NO: 648288 - RNA, 18 nt, Artificial Sequence
  Synthetic
gcuuuuggggccugggcu

SEQ ID NO: 648289 - RNA, 19 nt, Artificial Sequence
  Synthetic
ggcuuuuggggccugggcu

SEQ ID NO: 648290 - RNA, 20 nt, Artificial Sequence
  Synthetic
gggcuuuuggggccugggcu

SEQ ID NO: 648291 - RNA, 21 nt, Artificial Sequence
  Synthetic
agggcuuuuggggccugggcu

SEQ ID NO: 648292 - RNA, 22 nt, Artificial Sequence
  Synthetic
uagggcuuuuggggccugggcu

SEQ ID NO: 648293 - RNA, 23 nt, Artificial Sequence
  Synthetic
auagggcuuuuggggccugggcu

SEQ ID NO: 648294 - RNA, 24 nt, Artificial Sequence
  Synthetic
cauagggcuuuuggggccugggcu

SEQ ID NO: 648295 - RNA, 18 nt, Artificial Sequence
  Synthetic
uagugcaggggcugggcu

SEQ ID NO: 648296 - RNA, 19 nt, Artificial Sequence
  Synthetic
auagugcaggggcugggcu

SEQ ID NO: 648297 - RNA, 20 nt, Artificial Sequence
  Synthetic
aauagugcaggggcugggcu

SEQ ID NO: 648298 - RNA, 21 nt, Artificial Sequence
  Synthetic
aaauagugcaggggcugggcu

SEQ ID NO: 648299 - RNA, 22 nt, Artificial Sequence
  Synthetic
uaaauagugcaggggcugggcu

SEQ ID NO: 648300 - RNA, 23 nt, Artificial Sequence
  Synthetic
uuaaauagugcaggggcugggcu

SEQ ID NO: 648301 - RNA, 24 nt, Artificial Sequence
  Synthetic
uuuaaauagugcaggggcugggcu

SEQ ID NO: 648302 - RNA, 18 nt, Artificial Sequence
  Synthetic
aaaggcacaaucugggcu

SEQ ID NO: 648303 - RNA, 19 nt, Artificial Sequence
  Synthetic
aaaaggcacaaucugggcu

SEQ ID NO: 648304 - RNA, 20 nt, Artificial Sequence
  Synthetic
aaaaaggcacaaucugggcu

SEQ ID NO: 648305 - RNA, 21 nt, Artificial Sequence
  Synthetic
caaaaaggcacaaucugggcu

SEQ ID NO: 648306 - RNA, 22 nt, Artificial Sequence
  Synthetic
ucaaaaaggcacaaucugggcu

SEQ ID NO: 648307 - RNA, 23 nt, Artificial Sequence
  Synthetic
aucaaaaaggcacaaucugggcu

SEQ ID NO: 648308 - RNA, 24 nt, Artificial Sequence
  Synthetic
aaucaaaaaggcacaaucugggcu

SEQ ID NO: 648309 - RNA, 18 nt, Artificial Sequence
  Synthetic
uuucuuuuuuucugggcu

SEQ ID NO: 648310 - RNA, 19 nt, Artificial Sequence
  Synthetic
uuuucuuuuuuucugggcu

SEQ ID NO: 648311 - RNA, 20 nt, Artificial Sequence
  Synthetic
uuuuucuuuuuuucugggcu

SEQ ID NO: 648312 - RNA, 21 nt, Artificial Sequence
  Synthetic
uuuuuucuuuuuuucugggcu

SEQ ID NO: 648313 - RNA, 22 nt, Artificial Sequence
  Synthetic
uuuuuuucuuuuuuucugggcu

SEQ ID NO: 648314 - RNA, 23 nt, Artificial Sequence
  Synthetic
uuuuuuuucuuuuuuucugggcu

SEQ ID NO: 648315 - RNA, 24 nt, Artificial Sequence
  Synthetic
uuuuuuuuucuuuuuuucugggcu

SEQ ID NO: 648316 - RNA, 18 nt, Artificial Sequence
  Synthetic
uacagagagaggugggcu

SEQ ID NO: 648317 - RNA, 19 nt, Artificial Sequence
  Synthetic
uuacagagagaggugggcu

SEQ ID NO: 648318 - RNA, 20 nt, Artificial Sequence
  Synthetic
uuuacagagagaggugggcu

SEQ ID NO: 648319 - RNA, 21 nt, Artificial Sequence
  Synthetic
auuuacagagagaggugggcu

SEQ ID NO: 648320 - RNA, 22 nt, Artificial Sequence
  Synthetic
cauuuacagagagaggugggcu

SEQ ID NO: 648321 - RNA, 23 nt, Artificial Sequence
  Synthetic
ccauuuacagagagaggugggcu

SEQ ID NO: 648322 - RNA, 24 nt, Artificial Sequence
  Synthetic
cccauuuacagagagaggugggcu

SEQ ID NO: 648323 - RNA, 18 nt, Artificial Sequence
  Synthetic
caaagaacagaaauggcu

SEQ ID NO: 648324 - RNA, 19 nt, Artificial Sequence
  Synthetic
acaaagaacagaaauggcu

SEQ ID NO: 648325 - RNA, 20 nt, Artificial Sequence
  Synthetic
aacaaagaacagaaauggcu

SEQ ID NO: 648326 - RNA, 21 nt, Artificial Sequence
  Synthetic
aaacaaagaacagaaauggcu

SEQ ID NO: 648327 - RNA, 22 nt, Artificial Sequence
  Synthetic
aaaacaaagaacagaaauggcu

SEQ ID NO: 648328 - RNA, 23 nt, Artificial Sequence
  Synthetic
gaaaacaaagaacagaaauggcu

SEQ ID NO: 648329 - RNA, 24 nt, Artificial Sequence
  Synthetic
ugaaaacaaagaacagaaauggcu

SEQ ID NO: 648330 - RNA, 18 nt, Artificial Sequence
  Synthetic
aaugcuauauuaauggcu

SEQ ID NO: 648331 - RNA, 19 nt, Artificial Sequence
  Synthetic
caaugcuauauuaauggcu

SEQ ID NO: 648332 - RNA, 20 nt, Artificial Sequence
  Synthetic
acaaugcuauauuaauggcu

SEQ ID NO: 648333 - RNA, 21 nt, Artificial Sequence
  Synthetic
aacaaugcuauauuaauggcu

SEQ ID NO: 648334 - RNA, 22 nt, Artificial Sequence
  Synthetic
aaacaaugcuauauuaauggcu

SEQ ID NO: 648335 - RNA, 23 nt, Artificial Sequence
  Synthetic
uaaacaaugcuauauuaauggcu

SEQ ID NO: 648336 - RNA, 24 nt, Artificial Sequence
  Synthetic
uuaaacaaugcuauauuaauggcu

SEQ ID NO: 648337 - RNA, 18 nt, Artificial Sequence
  Synthetic
uguuuaaauaacauggcu

SEQ ID NO: 648338 - RNA, 19 nt, Artificial Sequence
  Synthetic
cuguuuaaauaacauggcu

SEQ ID NO: 648339 - RNA, 20 nt, Artificial Sequence
  Synthetic
ucuguuuaaauaacauggcu

SEQ ID NO: 648340 - RNA, 21 nt, Artificial Sequence
  Synthetic
cucuguuuaaauaacauggcu

SEQ ID NO: 648341 - RNA, 22 nt, Artificial Sequence
  Synthetic
ucucuguuuaaauaacauggcu

SEQ ID NO: 648342 - RNA, 23 nt, Artificial Sequence
  Synthetic
aucucuguuuaaauaacauggcu

SEQ ID NO: 648343 - RNA, 24 nt, Artificial Sequence
  Synthetic
gaucucuguuuaaauaacauggcu

SEQ ID NO: 648344 - RNA, 18 nt, Artificial Sequence
  Synthetic
acacaguucagcauggcu

SEQ ID NO: 648345 - RNA, 19 nt, Artificial Sequence
  Synthetic
cacacaguucagcauggcu

SEQ ID NO: 648346 - RNA, 20 nt, Artificial Sequence
  Synthetic
acacacaguucagcauggcu

SEQ ID NO: 648347 - RNA, 21 nt, Artificial Sequence
  Synthetic
gacacacaguucagcauggcu

SEQ ID NO: 648348 - RNA, 22 nt, Artificial Sequence
  Synthetic
ugacacacaguucagcauggcu

SEQ ID NO: 648349 - RNA, 23 nt, Artificial Sequence
  Synthetic
uugacacacaguucagcauggcu

SEQ ID NO: 648350 - RNA, 24 nt, Artificial Sequence
  Synthetic
auugacacacaguucagcauggcu

SEQ ID NO: 648351 - RNA, 18 nt, Artificial Sequence
  Synthetic
ucauaguucagcauggcu

SEQ ID NO: 648352 - RNA, 19 nt, Artificial Sequence
  Synthetic
cucauaguucagcauggcu

SEQ ID NO: 648353 - RNA, 20 nt, Artificial Sequence
  Synthetic
acucauaguucagcauggcu

SEQ ID NO: 648354 - RNA, 21 nt, Artificial Sequence
  Synthetic
gacucauaguucagcauggcu

SEQ ID NO: 648355 - RNA, 22 nt, Artificial Sequence
  Synthetic
ugacucauaguucagcauggcu

SEQ ID NO: 648356 - RNA, 23 nt, Artificial Sequence
  Synthetic
uugacucauaguucagcauggcu

SEQ ID NO: 648357 - RNA, 24 nt, Artificial Sequence
  Synthetic
auugacucauaguucagcauggcu

SEQ ID NO: 648358 - RNA, 18 nt, Artificial Sequence
  Synthetic
acaccagcuggcauggcu

SEQ ID NO: 648359 - RNA, 19 nt, Artificial Sequence
  Synthetic
gacaccagcuggcauggcu

SEQ ID NO: 648360 - RNA, 20 nt, Artificial Sequence
  Synthetic
agacaccagcuggcauggcu

SEQ ID NO: 648361 - RNA, 21 nt, Artificial Sequence
  Synthetic
gagacaccagcuggcauggcu

SEQ ID NO: 648362 - RNA, 22 nt, Artificial Sequence
  Synthetic
ggagacaccagcuggcauggcu

SEQ ID NO: 648363 - RNA, 23 nt, Artificial Sequence
  Synthetic
gggagacaccagcuggcauggcu

SEQ ID NO: 648364 - RNA, 24 nt, Artificial Sequence
  Synthetic
agggagacaccagcuggcauggcu

SEQ ID NO: 648365 - RNA, 18 nt, Artificial Sequence
  Synthetic
ucaccauucugcauggcu

SEQ ID NO: 648366 - RNA, 19 nt, Artificial Sequence
  Synthetic
uucaccauucugcauggcu

SEQ ID NO: 648367 - RNA, 20 nt, Artificial Sequence
  Synthetic
auucaccauucugcauggcu

SEQ ID NO: 648368 - RNA, 21 nt, Artificial Sequence
  Synthetic
gauucaccauucugcauggcu

SEQ ID NO: 648369 - RNA, 22 nt, Artificial Sequence
  Synthetic
ugauucaccauucugcauggcu

SEQ ID NO: 648370 - RNA, 23 nt, Artificial Sequence
  Synthetic
uugauucaccauucugcauggcu

SEQ ID NO: 648371 - RNA, 24 nt, Artificial Sequence
  Synthetic
auugauucaccauucugcauggcu

SEQ ID NO: 648372 - RNA, 18 nt, Artificial Sequence
  Synthetic
acugacuuugagauggcu

SEQ ID NO: 648373 - RNA, 19 nt, Artificial Sequence
  Synthetic
uacugacuuugagauggcu

SEQ ID NO: 648374 - RNA, 20 nt, Artificial Sequence
  Synthetic
auacugacuuugagauggcu

SEQ ID NO: 648375 - RNA, 21 nt, Artificial Sequence
  Synthetic
uauacugacuuugagauggcu

SEQ ID NO: 648376 - RNA, 22 nt, Artificial Sequence
  Synthetic
auauacugacuuugagauggcu

SEQ ID NO: 648377 - RNA, 23 nt, Artificial Sequence
  Synthetic
gauauacugacuuugagauggcu

SEQ ID NO: 648378 - RNA, 24 nt, Artificial Sequence
  Synthetic
ggauauacugacuuugagauggcu

SEQ ID NO: 648379 - RNA, 18 nt, Artificial Sequence
  Synthetic
gcagauaaaccgauggcu

SEQ ID NO: 648380 - RNA, 19 nt, Artificial Sequence
  Synthetic
agcagauaaaccgauggcu

SEQ ID NO: 648381 - RNA, 20 nt, Artificial Sequence
  Synthetic
cagcagauaaaccgauggcu

SEQ ID NO: 648382 - RNA, 21 nt, Artificial Sequence
  Synthetic
acagcagauaaaccgauggcu

SEQ ID NO: 648383 - RNA, 22 nt, Artificial Sequence
  Synthetic
aacagcagauaaaccgauggcu

SEQ ID NO: 648384 - RNA, 23 nt, Artificial Sequence
  Synthetic
aaacagcagauaaaccgauggcu

SEQ ID NO: 648385 - RNA, 24 nt, Artificial Sequence
  Synthetic
caaacagcagauaaaccgauggcu

SEQ ID NO: 648386 - RNA, 18 nt, Artificial Sequence
  Synthetic
caggccaaucggauggcu

SEQ ID NO: 648387 - RNA, 19 nt, Artificial Sequence
  Synthetic
ucaggccaaucggauggcu

SEQ ID NO: 648388 - RNA, 20 nt, Artificial Sequence
  Synthetic
uucaggccaaucggauggcu

SEQ ID NO: 648389 - RNA, 21 nt, Artificial Sequence
  Synthetic
auucaggccaaucggauggcu

SEQ ID NO: 648390 - RNA, 22 nt, Artificial Sequence
  Synthetic
gauucaggccaaucggauggcu

SEQ ID NO: 648391 - RNA, 23 nt, Artificial Sequence
  Synthetic
ugauucaggccaaucggauggcu

SEQ ID NO: 648392 - RNA, 24 nt, Artificial Sequence
  Synthetic
augauucaggccaaucggauggcu

SEQ ID NO: 648393 - RNA, 18 nt, Artificial Sequence
  Synthetic
uaaauucaaaugauggcu

SEQ ID NO: 648394 - RNA, 19 nt, Artificial Sequence
  Synthetic
auaaauucaaaugauggcu

SEQ ID NO: 648395 - RNA, 20 nt, Artificial Sequence
  Synthetic
uauaaauucaaaugauggcu

SEQ ID NO: 648396 - RNA, 21 nt, Artificial Sequence
  Synthetic
cuauaaauucaaaugauggcu

SEQ ID NO: 648397 - RNA, 22 nt, Artificial Sequence
  Synthetic
acuauaaauucaaaugauggcu

SEQ ID NO: 648398 - RNA, 23 nt, Artificial Sequence
  Synthetic
aacuauaaauucaaaugauggcu

SEQ ID NO: 648399 - RNA, 24 nt, Artificial Sequence
  Synthetic
caacuauaaauucaaaugauggcu

SEQ ID NO: 648400 - RNA, 18 nt, Artificial Sequence
  Synthetic
uuauacauagugauggcu

SEQ ID NO: 648401 - RNA, 19 nt, Artificial Sequence
  Synthetic
uuuauacauagugauggcu

SEQ ID NO: 648402 - RNA, 20 nt, Artificial Sequence
  Synthetic
uuuuauacauagugauggcu

SEQ ID NO: 648403 - RNA, 21 nt, Artificial Sequence
  Synthetic
auuuuauacauagugauggcu

SEQ ID NO: 648404 - RNA, 22 nt, Artificial Sequence
  Synthetic
uauuuuauacauagugauggcu

SEQ ID NO: 648405 - RNA, 23 nt, Artificial Sequence
  Synthetic
uuauuuuauacauagugauggcu

SEQ ID NO: 648406 - RNA, 24 nt, Artificial Sequence
  Synthetic
cuuauuuuauacauagugauggcu

SEQ ID NO: 648407 - RNA, 18 nt, Artificial Sequence
  Synthetic
uguccaggauugauggcu

SEQ ID NO: 648408 - RNA, 19 nt, Artificial Sequence
  Synthetic
cuguccaggauugauggcu

SEQ ID NO: 648409 - RNA, 20 nt, Artificial Sequence
  Synthetic
ucuguccaggauugauggcu

SEQ ID NO: 648410 - RNA, 21 nt, Artificial Sequence
  Synthetic
uucuguccaggauugauggcu

SEQ ID NO: 648411 - RNA, 22 nt, Artificial Sequence
  Synthetic
cuucuguccaggauugauggcu

SEQ ID NO: 648412 - RNA, 23 nt, Artificial Sequence
  Synthetic
acuucuguccaggauugauggcu

SEQ ID NO: 648413 - RNA, 24 nt, Artificial Sequence
  Synthetic
aacuucuguccaggauugauggcu

SEQ ID NO: 648414 - RNA, 18 nt, Artificial Sequence
  Synthetic
uuggugaaacauauggcu

SEQ ID NO: 648415 - RNA, 19 nt, Artificial Sequence
  Synthetic
cuuggugaaacauauggcu

SEQ ID NO: 648416 - RNA, 20 nt, Artificial Sequence
  Synthetic
ccuuggugaaacauauggcu

SEQ ID NO: 648417 - RNA, 21 nt, Artificial Sequence
  Synthetic
accuuggugaaacauauggcu

SEQ ID NO: 648418 - RNA, 22 nt, Artificial Sequence
  Synthetic
uaccuuggugaaacauauggcu

SEQ ID NO: 648419 - RNA, 23 nt, Artificial Sequence
  Synthetic
auaccuuggugaaacauauggcu

SEQ ID NO: 648420 - RNA, 24 nt, Artificial Sequence
  Synthetic
aauaccuuggugaaacauauggcu

SEQ ID NO: 648421 - RNA, 18 nt, Artificial Sequence
  Synthetic
agaauaggagcuauggcu

SEQ ID NO: 648422 - RNA, 19 nt, Artificial Sequence
  Synthetic
gagaauaggagcuauggcu

SEQ ID NO: 648423 - RNA, 20 nt, Artificial Sequence
  Synthetic
ggagaauaggagcuauggcu

SEQ ID NO: 648424 - RNA, 21 nt, Artificial Sequence
  Synthetic
uggagaauaggagcuauggcu

SEQ ID NO: 648425 - RNA, 22 nt, Artificial Sequence
  Synthetic
cuggagaauaggagcuauggcu

SEQ ID NO: 648426 - RNA, 23 nt, Artificial Sequence
  Synthetic
ucuggagaauaggagcuauggcu

SEQ ID NO: 648427 - RNA, 24 nt, Artificial Sequence
  Synthetic
gucuggagaauaggagcuauggcu

SEQ ID NO: 648428 - RNA, 18 nt, Artificial Sequence
  Synthetic
caguuacuggguauggcu

SEQ ID NO: 648429 - RNA, 19 nt, Artificial Sequence
  Synthetic
ucaguuacuggguauggcu

SEQ ID NO: 648430 - RNA, 20 nt, Artificial Sequence
  Synthetic
gucaguuacuggguauggcu

SEQ ID NO: 648431 - RNA, 21 nt, Artificial Sequence
  Synthetic
agucaguuacuggguauggcu

SEQ ID NO: 648432 - RNA, 22 nt, Artificial Sequence
  Synthetic
aagucaguuacuggguauggcu

SEQ ID NO: 648433 - RNA, 23 nt, Artificial Sequence
  Synthetic
aaagucaguuacuggguauggcu

SEQ ID NO: 648434 - RNA, 24 nt, Artificial Sequence
  Synthetic
caaagucaguuacuggguauggcu

SEQ ID NO: 648435 - RNA, 18 nt, Artificial Sequence
  Synthetic
agaaacacaggacuggcu

SEQ ID NO: 648436 - RNA, 19 nt, Artificial Sequence
  Synthetic
uagaaacacaggacuggcu

SEQ ID NO: 648437 - RNA, 20 nt, Artificial Sequence
  Synthetic
auagaaacacaggacuggcu

SEQ ID NO: 648438 - RNA, 21 nt, Artificial Sequence
  Synthetic
uauagaaacacaggacuggcu

SEQ ID NO: 648439 - RNA, 22 nt, Artificial Sequence
  Synthetic
uuauagaaacacaggacuggcu

SEQ ID NO: 648440 - RNA, 23 nt, Artificial Sequence
  Synthetic
uuuauagaaacacaggacuggcu

SEQ ID NO: 648441 - RNA, 24 nt, Artificial Sequence
  Synthetic
uuuuauagaaacacaggacuggcu

SEQ ID NO: 648442 - RNA, 18 nt, Artificial Sequence
  Synthetic
auagauuuuggacuggcu

SEQ ID NO: 648443 - RNA, 19 nt, Artificial Sequence
  Synthetic
gauagauuuuggacuggcu

SEQ ID NO: 648444 - RNA, 20 nt, Artificial Sequence
  Synthetic
ugauagauuuuggacuggcu

SEQ ID NO: 648445 - RNA, 21 nt, Artificial Sequence
  Synthetic
cugauagauuuuggacuggcu

SEQ ID NO: 648446 - RNA, 22 nt, Artificial Sequence
  Synthetic
ccugauagauuuuggacuggcu

SEQ ID NO: 648447 - RNA, 23 nt, Artificial Sequence
  Synthetic
cccugauagauuuuggacuggcu

SEQ ID NO: 648448 - RNA, 24 nt, Artificial Sequence
  Synthetic
gcccugauagauuuuggacuggcu

SEQ ID NO: 648449 - RNA, 18 nt, Artificial Sequence
  Synthetic
gcagaaucaccccuggcu

SEQ ID NO: 648450 - RNA, 19 nt, Artificial Sequence
  Synthetic
agcagaaucaccccuggcu

SEQ ID NO: 648451 - RNA, 20 nt, Artificial Sequence
  Synthetic
cagcagaaucaccccuggcu

SEQ ID NO: 648452 - RNA, 21 nt, Artificial Sequence
  Synthetic
gcagcagaaucaccccuggcu

SEQ ID NO: 648453 - RNA, 22 nt, Artificial Sequence
  Synthetic
ugcagcagaaucaccccuggcu

SEQ ID NO: 648454 - RNA, 23 nt, Artificial Sequence
  Synthetic
gugcagcagaaucaccccuggcu

SEQ ID NO: 648455 - RNA, 24 nt, Artificial Sequence
  Synthetic
cgugcagcagaaucaccccuggcu

SEQ ID NO: 648456 - RNA, 18 nt, Artificial Sequence
  Synthetic
agaagucaaugccuggcu

SEQ ID NO: 648457 - RNA, 19 nt, Artificial Sequence
  Synthetic
gagaagucaaugccuggcu

SEQ ID NO: 648458 - RNA, 20 nt, Artificial Sequence
  Synthetic
agagaagucaaugccuggcu

SEQ ID NO: 648459 - RNA, 21 nt, Artificial Sequence
  Synthetic
gagagaagucaaugccuggcu

SEQ ID NO: 648460 - RNA, 22 nt, Artificial Sequence
  Synthetic
agagagaagucaaugccuggcu

SEQ ID NO: 648461 - RNA, 23 nt, Artificial Sequence
  Synthetic
uagagagaagucaaugccuggcu

SEQ ID NO: 648462 - RNA, 24 nt, Artificial Sequence
  Synthetic
cuagagagaagucaaugccuggcu

SEQ ID NO: 648463 - RNA, 18 nt, Artificial Sequence
  Synthetic
acaguauguugccuggcu

SEQ ID NO: 648464 - RNA, 19 nt, Artificial Sequence
  Synthetic
cacaguauguugccuggcu

SEQ ID NO: 648465 - RNA, 20 nt, Artificial Sequence
  Synthetic
gcacaguauguugccuggcu

SEQ ID NO: 648466 - RNA, 21 nt, Artificial Sequence
  Synthetic
ugcacaguauguugccuggcu

SEQ ID NO: 648467 - RNA, 22 nt, Artificial Sequence
  Synthetic
gugcacaguauguugccuggcu

SEQ ID NO: 648468 - RNA, 23 nt, Artificial Sequence
  Synthetic
ugugcacaguauguugccuggcu

SEQ ID NO: 648469 - RNA, 24 nt, Artificial Sequence
  Synthetic
uugugcacaguauguugccuggcu

SEQ ID NO: 648470 - RNA, 18 nt, Artificial Sequence
  Synthetic
aggaugaaaaggcuggcu

SEQ ID NO: 648471 - RNA, 19 nt, Artificial Sequence
  Synthetic
caggaugaaaaggcuggcu

SEQ ID NO: 648472 - RNA, 20 nt, Artificial Sequence
  Synthetic
ucaggaugaaaaggcuggcu

SEQ ID NO: 648473 - RNA, 21 nt, Artificial Sequence
  Synthetic
gucaggaugaaaaggcuggcu

SEQ ID NO: 648474 - RNA, 22 nt, Artificial Sequence
  Synthetic
ugucaggaugaaaaggcuggcu

SEQ ID NO: 648475 - RNA, 23 nt, Artificial Sequence
  Synthetic
gugucaggaugaaaaggcuggcu

SEQ ID NO: 648476 - RNA, 24 nt, Artificial Sequence
  Synthetic
ggugucaggaugaaaaggcuggcu

SEQ ID NO: 648477 - RNA, 18 nt, Artificial Sequence
  Synthetic
cagaagauaacucuggcu

SEQ ID NO: 648478 - RNA, 19 nt, Artificial Sequence
  Synthetic
ucagaagauaacucuggcu

SEQ ID NO: 648479 - RNA, 20 nt, Artificial Sequence
  Synthetic
gucagaagauaacucuggcu

SEQ ID NO: 648480 - RNA, 21 nt, Artificial Sequence
  Synthetic
ugucagaagauaacucuggcu

SEQ ID NO: 648481 - RNA, 22 nt, Artificial Sequence
  Synthetic
augucagaagauaacucuggcu

SEQ ID NO: 648482 - RNA, 23 nt, Artificial Sequence
  Synthetic
caugucagaagauaacucuggcu

SEQ ID NO: 648483 - RNA, 24 nt, Artificial Sequence
  Synthetic
ucaugucagaagauaacucuggcu

SEQ ID NO: 648484 - RNA, 18 nt, Artificial Sequence
  Synthetic
aauacuaauacucuggcu

SEQ ID NO: 648485 - RNA, 19 nt, Artificial Sequence
  Synthetic
aaauacuaauacucuggcu

SEQ ID NO: 648486 - RNA, 20 nt, Artificial Sequence
  Synthetic
aaaauacuaauacucuggcu

SEQ ID NO: 648487 - RNA, 21 nt, Artificial Sequence
  Synthetic
aaaaauacuaauacucuggcu

SEQ ID NO: 648488 - RNA, 22 nt, Artificial Sequence
  Synthetic
aaaaaauacuaauacucuggcu

SEQ ID NO: 648489 - RNA, 23 nt, Artificial Sequence
  Synthetic
gaaaaaauacuaauacucuggcu

SEQ ID NO: 648490 - RNA, 24 nt, Artificial Sequence
  Synthetic
agaaaaaauacuaauacucuggcu

SEQ ID NO: 648491 - RNA, 18 nt, Artificial Sequence
  Synthetic
uuugacuaacgucuggcu

SEQ ID NO: 648492 - RNA, 19 nt, Artificial Sequence
  Synthetic
auuugacuaacgucuggcu

SEQ ID NO: 648493 - RNA, 20 nt, Artificial Sequence
  Synthetic
aauuugacuaacgucuggcu

SEQ ID NO: 648494 - RNA, 21 nt, Artificial Sequence
  Synthetic
uaauuugacuaacgucuggcu

SEQ ID NO: 648495 - RNA, 22 nt, Artificial Sequence
  Synthetic
guaauuugacuaacgucuggcu

SEQ ID NO: 648496 - RNA, 23 nt, Artificial Sequence
  Synthetic
aguaauuugacuaacgucuggcu

SEQ ID NO: 648497 - RNA, 24 nt, Artificial Sequence
  Synthetic
aaguaauuugacuaacgucuggcu

SEQ ID NO: 648498 - RNA, 18 nt, Artificial Sequence
  Synthetic
caaguuggguuucuggcu

SEQ ID NO: 648499 - RNA, 19 nt, Artificial Sequence
  Synthetic
gcaaguuggguuucuggcu

SEQ ID NO: 648500 - RNA, 20 nt, Artificial Sequence
  Synthetic
ggcaaguuggguuucuggcu

SEQ ID NO: 648501 - RNA, 21 nt, Artificial Sequence
  Synthetic
aggcaaguuggguuucuggcu

SEQ ID NO: 648502 - RNA, 22 nt, Artificial Sequence
  Synthetic
gaggcaaguuggguuucuggcu

SEQ ID NO: 648503 - RNA, 23 nt, Artificial Sequence
  Synthetic
ggaggcaaguuggguuucuggcu

SEQ ID NO: 648504 - RNA, 24 nt, Artificial Sequence
  Synthetic
gggaggcaaguuggguuucuggcu

SEQ ID NO: 648505 - RNA, 18 nt, Artificial Sequence
  Synthetic
aguauuugagggguggcu

SEQ ID NO: 648506 - RNA, 19 nt, Artificial Sequence
  Synthetic
caguauuugagggguggcu

SEQ ID NO: 648507 - RNA, 20 nt, Artificial Sequence
  Synthetic
acaguauuugagggguggcu

SEQ ID NO: 648508 - RNA, 21 nt, Artificial Sequence
  Synthetic
aacaguauuugagggguggcu

SEQ ID NO: 648509 - RNA, 22 nt, Artificial Sequence
  Synthetic
caacaguauuugagggguggcu

SEQ ID NO: 648510 - RNA, 23 nt, Artificial Sequence
  Synthetic
acaacaguauuugagggguggcu

SEQ ID NO: 648511 - RNA, 24 nt, Artificial Sequence
  Synthetic
cacaacaguauuugagggguggcu

SEQ ID NO: 648512 - RNA, 18 nt, Artificial Sequence
  Synthetic
aaguugagggggguggcu

SEQ ID NO: 648513 - RNA, 19 nt, Artificial Sequence
  Synthetic
gaaguugagggggguggcu

SEQ ID NO: 648514 - RNA, 20 nt, Artificial Sequence
  Synthetic
agaaguugagggggguggcu

SEQ ID NO: 648515 - RNA, 21 nt, Artificial Sequence
  Synthetic
aagaaguugagggggguggcu

SEQ ID NO: 648516 - RNA, 22 nt, Artificial Sequence
  Synthetic
uaagaaguugagggggguggcu

SEQ ID NO: 648517 - RNA, 23 nt, Artificial Sequence
  Synthetic
guaagaaguugagggggguggcu

SEQ ID NO: 648518 - RNA, 24 nt, Artificial Sequence
  Synthetic
uguaagaaguugagggggguggcu

SEQ ID NO: 648519 - RNA, 18 nt, Artificial Sequence
  Synthetic
aggguugaacugguggcu

SEQ ID NO: 648520 - RNA, 19 nt, Artificial Sequence
  Synthetic
gaggguugaacugguggcu

SEQ ID NO: 648521 - RNA, 20 nt, Artificial Sequence
  Synthetic
agaggguugaacugguggcu

SEQ ID NO: 648522 - RNA, 21 nt, Artificial Sequence
  Synthetic
gagaggguugaacugguggcu

SEQ ID NO: 648523 - RNA, 22 nt, Artificial Sequence
  Synthetic
ugagaggguugaacugguggcu

SEQ ID NO: 648524 - RNA, 23 nt, Artificial Sequence
  Synthetic
uugagaggguugaacugguggcu

SEQ ID NO: 648525 - RNA, 24 nt, Artificial Sequence
  Synthetic
auugagaggguugaacugguggcu

SEQ ID NO: 648526 - RNA, 18 nt, Artificial Sequence
  Synthetic
ucaguaucuuauguggcu

SEQ ID NO: 648527 - RNA, 19 nt, Artificial Sequence
  Synthetic
cucaguaucuuauguggcu

SEQ ID NO: 648528 - RNA, 20 nt, Artificial Sequence
  Synthetic
gcucaguaucuuauguggcu

SEQ ID NO: 648529 - RNA, 21 nt, Artificial Sequence
  Synthetic
agcucaguaucuuauguggcu

SEQ ID NO: 648530 - RNA, 22 nt, Artificial Sequence
  Synthetic
gagcucaguaucuuauguggcu

SEQ ID NO: 648531 - RNA, 23 nt, Artificial Sequence
  Synthetic
agagcucaguaucuuauguggcu

SEQ ID NO: 648532 - RNA, 24 nt, Artificial Sequence
  Synthetic
aagagcucaguaucuuauguggcu

SEQ ID NO: 648533 - RNA, 18 nt, Artificial Sequence
  Synthetic
aaggauucuuauguggcu

SEQ ID NO: 648534 - RNA, 19 nt, Artificial Sequence
  Synthetic
aaaggauucuuauguggcu

SEQ ID NO: 648535 - RNA, 20 nt, Artificial Sequence
  Synthetic
gaaaggauucuuauguggcu

SEQ ID NO: 648536 - RNA, 21 nt, Artificial Sequence
  Synthetic
agaaaggauucuuauguggcu

SEQ ID NO: 648537 - RNA, 22 nt, Artificial Sequence
  Synthetic
gagaaaggauucuuauguggcu

SEQ ID NO: 648538 - RNA, 23 nt, Artificial Sequence
  Synthetic
agagaaaggauucuuauguggcu

SEQ ID NO: 648539 - RNA, 24 nt, Artificial Sequence
  Synthetic
aagagaaaggauucuuauguggcu

SEQ ID NO: 648540 - RNA, 18 nt, Artificial Sequence
  Synthetic
ugguacgggucuguggcu

SEQ ID NO: 648541 - RNA, 19 nt, Artificial Sequence
  Synthetic
uugguacgggucuguggcu

SEQ ID NO: 648542 - RNA, 20 nt, Artificial Sequence
  Synthetic
auugguacgggucuguggcu

SEQ ID NO: 648543 - RNA, 21 nt, Artificial Sequence
  Synthetic
gauugguacgggucuguggcu

SEQ ID NO: 648544 - RNA, 22 nt, Artificial Sequence
  Synthetic
ggauugguacgggucuguggcu

SEQ ID NO: 648545 - RNA, 23 nt, Artificial Sequence
  Synthetic
cggauugguacgggucuguggcu

SEQ ID NO: 648546 - RNA, 24 nt, Artificial Sequence
  Synthetic
acggauugguacgggucuguggcu

SEQ ID NO: 648547 - RNA, 18 nt, Artificial Sequence
  Synthetic
ucacagaggaguguggcu

SEQ ID NO: 648548 - RNA, 19 nt, Artificial Sequence
  Synthetic
uucacagaggaguguggcu

SEQ ID NO: 648549 - RNA, 20 nt, Artificial Sequence
  Synthetic
guucacagaggaguguggcu

SEQ ID NO: 648550 - RNA, 21 nt, Artificial Sequence
  Synthetic
uguucacagaggaguguggcu

SEQ ID NO: 648551 - RNA, 22 nt, Artificial Sequence
  Synthetic
cuguucacagaggaguguggcu

SEQ ID NO: 648552 - RNA, 23 nt, Artificial Sequence
  Synthetic
acuguucacagaggaguguggcu

SEQ ID NO: 648553 - RNA, 24 nt, Artificial Sequence
  Synthetic
aacuguucacagaggaguguggcu

SEQ ID NO: 648554 - RNA, 18 nt, Artificial Sequence
  Synthetic
aguauacauaaauuggcu

SEQ ID NO: 648555 - RNA, 19 nt, Artificial Sequence
  Synthetic
gaguauacauaaauuggcu

SEQ ID NO: 648556 - RNA, 20 nt, Artificial Sequence
  Synthetic
agaguauacauaaauuggcu

SEQ ID NO: 648557 - RNA, 21 nt, Artificial Sequence
  Synthetic
aagaguauacauaaauuggcu

SEQ ID NO: 648558 - RNA, 22 nt, Artificial Sequence
  Synthetic
uaagaguauacauaaauuggcu

SEQ ID NO: 648559 - RNA, 23 nt, Artificial Sequence
  Synthetic
cuaagaguauacauaaauuggcu

SEQ ID NO: 648560 - RNA, 24 nt, Artificial Sequence
  Synthetic
acuaagaguauacauaaauuggcu

SEQ ID NO: 648561 - RNA, 18 nt, Artificial Sequence
  Synthetic
acuacaugcugauuggcu

SEQ ID NO: 648562 - RNA, 19 nt, Artificial Sequence
  Synthetic
gacuacaugcugauuggcu

SEQ ID NO: 648563 - RNA, 20 nt, Artificial Sequence
  Synthetic
ugacuacaugcugauuggcu

SEQ ID NO: 648564 - RNA, 21 nt, Artificial Sequence
  Synthetic
cugacuacaugcugauuggcu

SEQ ID NO: 648565 - RNA, 22 nt, Artificial Sequence
  Synthetic
acugacuacaugcugauuggcu

SEQ ID NO: 648566 - RNA, 23 nt, Artificial Sequence
  Synthetic
cacugacuacaugcugauuggcu

SEQ ID NO: 648567 - RNA, 24 nt, Artificial Sequence
  Synthetic
acacugacuacaugcugauuggcu

SEQ ID NO: 648568 - RNA, 18 nt, Artificial Sequence
  Synthetic
uaacuguuaauauuggcu

SEQ ID NO: 648569 - RNA, 19 nt, Artificial Sequence
  Synthetic
uuaacuguuaauauuggcu

SEQ ID NO: 648570 - RNA, 20 nt, Artificial Sequence
  Synthetic
auuaacuguuaauauuggcu

SEQ ID NO: 648571 - RNA, 21 nt, Artificial Sequence
  Synthetic
aauuaacuguuaauauuggcu

SEQ ID NO: 648572 - RNA, 22 nt, Artificial Sequence
  Synthetic
caauuaacuguuaauauuggcu

SEQ ID NO: 648573 - RNA, 23 nt, Artificial Sequence
  Synthetic
ucaauuaacuguuaauauuggcu

SEQ ID NO: 648574 - RNA, 24 nt, Artificial Sequence
  Synthetic
aucaauuaacuguuaauauuggcu

SEQ ID NO: 648575 - RNA, 18 nt, Artificial Sequence
  Synthetic
uuauugauucucuuggcu

SEQ ID NO: 648576 - RNA, 19 nt, Artificial Sequence
  Synthetic
uuuauugauucucuuggcu

SEQ ID NO: 648577 - RNA, 20 nt, Artificial Sequence
  Synthetic
auuuauugauucucuuggcu

SEQ ID NO: 648578 - RNA, 21 nt, Artificial Sequence
  Synthetic
aauuuauugauucucuuggcu

SEQ ID NO: 648579 - RNA, 22 nt, Artificial Sequence
  Synthetic
gaauuuauugauucucuuggcu

SEQ ID NO: 648580 - RNA, 23 nt, Artificial Sequence
  Synthetic
agaauuuauugauucucuuggcu

SEQ ID NO: 648581 - RNA, 24 nt, Artificial Sequence
  Synthetic
uagaauuuauugauucucuuggcu

SEQ ID NO: 648582 - RNA, 18 nt, Artificial Sequence
  Synthetic
aagcuuugcuaguuggcu

SEQ ID NO: 648583 - RNA, 19 nt, Artificial Sequence
  Synthetic
uaagcuuugcuaguuggcu

SEQ ID NO: 648584 - RNA, 20 nt, Artificial Sequence
  Synthetic
auaagcuuugcuaguuggcu

SEQ ID NO: 648585 - RNA, 21 nt, Artificial Sequence
  Synthetic
cauaagcuuugcuaguuggcu

SEQ ID NO: 648586 - RNA, 22 nt, Artificial Sequence
  Synthetic
ucauaagcuuugcuaguuggcu

SEQ ID NO: 648587 - RNA, 23 nt, Artificial Sequence
  Synthetic
uucauaagcuuugcuaguuggcu

SEQ ID NO: 648588 - RNA, 24 nt, Artificial Sequence
  Synthetic
auucauaagcuuugcuaguuggcu

SEQ ID NO: 648589 - RNA, 18 nt, Artificial Sequence
  Synthetic
ucacggcuucuguuggcu

SEQ ID NO: 648590 - RNA, 19 nt, Artificial Sequence
  Synthetic
cucacggcuucuguuggcu

SEQ ID NO: 648591 - RNA, 20 nt, Artificial Sequence
  Synthetic
ccucacggcuucuguuggcu

SEQ ID NO: 648592 - RNA, 21 nt, Artificial Sequence
  Synthetic
cccucacggcuucuguuggcu

SEQ ID NO: 648593 - RNA, 22 nt, Artificial Sequence
  Synthetic
ucccucacggcuucuguuggcu

SEQ ID NO: 648594 - RNA, 23 nt, Artificial Sequence
  Synthetic
gucccucacggcuucuguuggcu

SEQ ID NO: 648595 - RNA, 24 nt, Artificial Sequence
  Synthetic
agucccucacggcuucuguuggcu

SEQ ID NO: 648596 - RNA, 18 nt, Artificial Sequence
  Synthetic
gaggacugcuguuuggcu

SEQ ID NO: 648597 - RNA, 19 nt, Artificial Sequence
  Synthetic
ugaggacugcuguuuggcu

SEQ ID NO: 648598 - RNA, 20 nt, Artificial Sequence
  Synthetic
uugaggacugcuguuuggcu

SEQ ID NO: 648599 - RNA, 21 nt, Artificial Sequence
  Synthetic
uuugaggacugcuguuuggcu

SEQ ID NO: 648600 - RNA, 22 nt, Artificial Sequence
  Synthetic
auuugaggacugcuguuuggcu

SEQ ID NO: 648601 - RNA, 23 nt, Artificial Sequence
  Synthetic
aauuugaggacugcuguuuggcu

SEQ ID NO: 648602 - RNA, 24 nt, Artificial Sequence
  Synthetic
uaauuugaggacugcuguuuggcu

SEQ ID NO: 648603 - RNA, 18 nt, Artificial Sequence
  Synthetic
aagcacucuauuuuggcu

SEQ ID NO: 648604 - RNA, 19 nt, Artificial Sequence
  Synthetic
uaagcacucuauuuuggcu

SEQ ID NO: 648605 - RNA, 20 nt, Artificial Sequence
  Synthetic
uuaagcacucuauuuuggcu

SEQ ID NO: 648606 - RNA, 21 nt, Artificial Sequence
  Synthetic
auuaagcacucuauuuuggcu

SEQ ID NO: 648607 - RNA, 22 nt, Artificial Sequence
  Synthetic
aauuaagcacucuauuuuggcu

SEQ ID NO: 648608 - RNA, 23 nt, Artificial Sequence
  Synthetic
uaauuaagcacucuauuuuggcu

SEQ ID NO: 648609 - RNA, 24 nt, Artificial Sequence
  Synthetic
uuaauuaagcacucuauuuuggcu

SEQ ID NO: 648610 - RNA, 18 nt, Artificial Sequence
  Synthetic
uaaugguuacuuuuggcu

SEQ ID NO: 648611 - RNA, 19 nt, Artificial Sequence
  Synthetic
auaaugguuacuuuuggcu

SEQ ID NO: 648612 - RNA, 20 nt, Artificial Sequence
  Synthetic
gauaaugguuacuuuuggcu

SEQ ID NO: 648613 - RNA, 21 nt, Artificial Sequence
  Synthetic
agauaaugguuacuuuuggcu

SEQ ID NO: 648614 - RNA, 22 nt, Artificial Sequence
  Synthetic
aagauaaugguuacuuuuggcu

SEQ ID NO: 648615 - RNA, 23 nt, Artificial Sequence
  Synthetic
caagauaaugguuacuuuuggcu

SEQ ID NO: 648616 - RNA, 24 nt, Artificial Sequence
  Synthetic
ucaagauaaugguuacuuuuggcu

SEQ ID NO: 648617 - RNA, 18 nt, Artificial Sequence
  Synthetic
gguggcuuccuuuuggcu

SEQ ID NO: 648618 - RNA, 19 nt, Artificial Sequence
  Synthetic
agguggcuuccuuuuggcu

SEQ ID NO: 648619 - RNA, 20 nt, Artificial Sequence
  Synthetic
aagguggcuuccuuuuggcu

SEQ ID NO: 648620 - RNA, 21 nt, Artificial Sequence
  Synthetic
caagguggcuuccuuuuggcu

SEQ ID NO: 648621 - RNA, 22 nt, Artificial Sequence
  Synthetic
ucaagguggcuuccuuuuggcu

SEQ ID NO: 648622 - RNA, 23 nt, Artificial Sequence
  Synthetic
gucaagguggcuuccuuuuggcu

SEQ ID NO: 648623 - RNA, 24 nt, Artificial Sequence
  Synthetic
agucaagguggcuuccuuuuggcu

SEQ ID NO: 648624 - RNA, 18 nt, Artificial Sequence
  Synthetic
agagagaauguuuuggcu

SEQ ID NO: 648625 - RNA, 19 nt, Artificial Sequence
  Synthetic
aagagagaauguuuuggcu

SEQ ID NO: 648626 - RNA, 20 nt, Artificial Sequence
  Synthetic
uaagagagaauguuuuggcu

SEQ ID NO: 648627 - RNA, 21 nt, Artificial Sequence
  Synthetic
guaagagagaauguuuuggcu

SEQ ID NO: 648628 - RNA, 22 nt, Artificial Sequence
  Synthetic
uguaagagagaauguuuuggcu

SEQ ID NO: 648629 - RNA, 23 nt, Artificial Sequence
  Synthetic
auguaagagagaauguuuuggcu

SEQ ID NO: 648630 - RNA, 24 nt, Artificial Sequence
  Synthetic
aauguaagagagaauguuuuggcu

SEQ ID NO: 648631 - RNA, 18 nt, Artificial Sequence
  Synthetic
ccaucagugaaaaaugcu

SEQ ID NO: 648632 - RNA, 19 nt, Artificial Sequence
  Synthetic
gccaucagugaaaaaugcu

SEQ ID NO: 648633 - RNA, 20 nt, Artificial Sequence
  Synthetic
agccaucagugaaaaaugcu

SEQ ID NO: 648634 - RNA, 21 nt, Artificial Sequence
  Synthetic
aagccaucagugaaaaaugcu

SEQ ID NO: 648635 - RNA, 22 nt, Artificial Sequence
  Synthetic
aaagccaucagugaaaaaugcu

SEQ ID NO: 648636 - RNA, 23 nt, Artificial Sequence
  Synthetic
uaaagccaucagugaaaaaugcu

SEQ ID NO: 648637 - RNA, 24 nt, Artificial Sequence
  Synthetic
cuaaagccaucagugaaaaaugcu

SEQ ID NO: 648638 - RNA, 18 nt, Artificial Sequence
  Synthetic
uuauaugguaaaaaugcu

SEQ ID NO: 648639 - RNA, 19 nt, Artificial Sequence
  Synthetic
uuuauaugguaaaaaugcu

SEQ ID NO: 648640 - RNA, 20 nt, Artificial Sequence
  Synthetic
uuuuauaugguaaaaaugcu

SEQ ID NO: 648641 - RNA, 21 nt, Artificial Sequence
  Synthetic
auuuuauaugguaaaaaugcu

SEQ ID NO: 648642 - RNA, 22 nt, Artificial Sequence
  Synthetic
uauuuuauaugguaaaaaugcu

SEQ ID NO: 648643 - RNA, 23 nt, Artificial Sequence
  Synthetic
auauuuuauaugguaaaaaugcu

SEQ ID NO: 648644 - RNA, 24 nt, Artificial Sequence
  Synthetic
gauauuuuauaugguaaaaaugcu

SEQ ID NO: 648645 - RNA, 18 nt, Artificial Sequence
  Synthetic
uguguagaagaaaaugcu

SEQ ID NO: 648646 - RNA, 19 nt, Artificial Sequence
  Synthetic
cuguguagaagaaaaugcu

SEQ ID NO: 648647 - RNA, 20 nt, Artificial Sequence
  Synthetic
gcuguguagaagaaaaugcu

SEQ ID NO: 648648 - RNA, 21 nt, Artificial Sequence
  Synthetic
agcuguguagaagaaaaugcu

SEQ ID NO: 648649 - RNA, 22 nt, Artificial Sequence
  Synthetic
uagcuguguagaagaaaaugcu

SEQ ID NO: 648650 - RNA, 23 nt, Artificial Sequence
  Synthetic
auagcuguguagaagaaaaugcu

SEQ ID NO: 648651 - RNA, 24 nt, Artificial Sequence
  Synthetic
aauagcuguguagaagaaaaugcu

SEQ ID NO: 648652 - RNA, 18 nt, Artificial Sequence
  Synthetic
augcucccauaaaaugcu

SEQ ID NO: 648653 - RNA, 19 nt, Artificial Sequence
  Synthetic
uaugcucccauaaaaugcu

SEQ ID NO: 648654 - RNA, 20 nt, Artificial Sequence
  Synthetic
uuaugcucccauaaaaugcu

SEQ ID NO: 648655 - RNA, 21 nt, Artificial Sequence
  Synthetic
uuuaugcucccauaaaaugcu

SEQ ID NO: 648656 - RNA, 22 nt, Artificial Sequence
  Synthetic
uuuuaugcucccauaaaaugcu

SEQ ID NO: 648657 - RNA, 23 nt, Artificial Sequence
  Synthetic
uuuuuaugcucccauaaaaugcu

SEQ ID NO: 648658 - RNA, 24 nt, Artificial Sequence
  Synthetic
cuuuuuaugcucccauaaaaugcu

SEQ ID NO: 648659 - RNA, 18 nt, Artificial Sequence
  Synthetic
uauagacaagcaaaugcu

SEQ ID NO: 648660 - RNA, 19 nt, Artificial Sequence
  Synthetic
uuauagacaagcaaaugcu

SEQ ID NO: 648661 - RNA, 20 nt, Artificial Sequence
  Synthetic
uuuauagacaagcaaaugcu

SEQ ID NO: 648662 - RNA, 21 nt, Artificial Sequence
  Synthetic
cuuuauagacaagcaaaugcu

SEQ ID NO: 648663 - RNA, 22 nt, Artificial Sequence
  Synthetic
acuuuauagacaagcaaaugcu

SEQ ID NO: 648664 - RNA, 23 nt, Artificial Sequence
  Synthetic
uacuuuauagacaagcaaaugcu

SEQ ID NO: 648665 - RNA, 24 nt, Artificial Sequence
  Synthetic
auacuuuauagacaagcaaaugcu

SEQ ID NO: 648666 - RNA, 18 nt, Artificial Sequence
  Synthetic
ugguaugccagaaaugcu

SEQ ID NO: 648667 - RNA, 19 nt, Artificial Sequence
  Synthetic
gugguaugccagaaaugcu

SEQ ID NO: 648668 - RNA, 20 nt, Artificial Sequence
  Synthetic
ggugguaugccagaaaugcu

SEQ ID NO: 648669 - RNA, 21 nt, Artificial Sequence
  Synthetic
aggugguaugccagaaaugcu

SEQ ID NO: 648670 - RNA, 22 nt, Artificial Sequence
  Synthetic
aaggugguaugccagaaaugcu

SEQ ID NO: 648671 - RNA, 23 nt, Artificial Sequence
  Synthetic
caaggugguaugccagaaaugcu

SEQ ID NO: 648672 - RNA, 24 nt, Artificial Sequence
  Synthetic
ccaaggugguaugccagaaaugcu

SEQ ID NO: 648673 - RNA, 18 nt, Artificial Sequence
  Synthetic
gucucaaugugaaaugcu

SEQ ID NO: 648674 - RNA, 19 nt, Artificial Sequence
  Synthetic
ugucucaaugugaaaugcu

SEQ ID NO: 648675 - RNA, 20 nt, Artificial Sequence
  Synthetic
augucucaaugugaaaugcu

SEQ ID NO: 648676 - RNA, 21 nt, Artificial Sequence
  Synthetic
aaugucucaaugugaaaugcu

SEQ ID NO: 648677 - RNA, 22 nt, Artificial Sequence
  Synthetic
uaaugucucaaugugaaaugcu

SEQ ID NO: 648678 - RNA, 23 nt, Artificial Sequence
  Synthetic
auaaugucucaaugugaaaugcu

SEQ ID NO: 648679 - RNA, 24 nt, Artificial Sequence
  Synthetic
cauaaugucucaaugugaaaugcu

SEQ ID NO: 648680 - RNA, 18 nt, Artificial Sequence
  Synthetic
caugagaauauaaaugcu

SEQ ID NO: 648681 - RNA, 19 nt, Artificial Sequence
  Synthetic
acaugagaauauaaaugcu

SEQ ID NO: 648682 - RNA, 20 nt, Artificial Sequence
  Synthetic
cacaugagaauauaaaugcu

SEQ ID NO: 648683 - RNA, 21 nt, Artificial Sequence
  Synthetic
ccacaugagaauauaaaugcu

SEQ ID NO: 648684 - RNA, 22 nt, Artificial Sequence
  Synthetic
uccacaugagaauauaaaugcu

SEQ ID NO: 648685 - RNA, 23 nt, Artificial Sequence
  Synthetic
guccacaugagaauauaaaugcu

SEQ ID NO: 648686 - RNA, 24 nt, Artificial Sequence
  Synthetic
uguccacaugagaauauaaaugcu

SEQ ID NO: 648687 - RNA, 18 nt, Artificial Sequence
  Synthetic
agccagauuauaaaugcu

SEQ ID NO: 648688 - RNA, 19 nt, Artificial Sequence
  Synthetic
gagccagauuauaaaugcu

SEQ ID NO: 648689 - RNA, 20 nt, Artificial Sequence
  Synthetic
agagccagauuauaaaugcu

SEQ ID NO: 648690 - RNA, 21 nt, Artificial Sequence
  Synthetic
gagagccagauuauaaaugcu

SEQ ID NO: 648691 - RNA, 22 nt, Artificial Sequence
  Synthetic
ugagagccagauuauaaaugcu

SEQ ID NO: 648692 - RNA, 23 nt, Artificial Sequence
  Synthetic
augagagccagauuauaaaugcu

SEQ ID NO: 648693 - RNA, 24 nt, Artificial Sequence
  Synthetic
gaugagagccagauuauaaaugcu

SEQ ID NO: 648694 - RNA, 18 nt, Artificial Sequence
  Synthetic
uuauuucuaguaaaugcu

SEQ ID NO: 648695 - RNA, 19 nt, Artificial Sequence
  Synthetic
cuuauuucuaguaaaugcu

SEQ ID NO: 648696 - RNA, 20 nt, Artificial Sequence
  Synthetic
ccuuauuucuaguaaaugcu

SEQ ID NO: 648697 - RNA, 21 nt, Artificial Sequence
  Synthetic
accuuauuucuaguaaaugcu

SEQ ID NO: 648698 - RNA, 22 nt, Artificial Sequence
  Synthetic
gaccuuauuucuaguaaaugcu

SEQ ID NO: 648699 - RNA, 23 nt, Artificial Sequence
  Synthetic
agaccuuauuucuaguaaaugcu

SEQ ID NO: 648700 - RNA, 24 nt, Artificial Sequence
  Synthetic
aagaccuuauuucuaguaaaugcu

SEQ ID NO: 648701 - RNA, 18 nt, Artificial Sequence
  Synthetic
ucuuuagaguuaaaugcu

SEQ ID NO: 648702 - RNA, 19 nt, Artificial Sequence
  Synthetic
cucuuuagaguuaaaugcu

SEQ ID NO: 648703 - RNA, 20 nt, Artificial Sequence
  Synthetic
acucuuuagaguuaaaugcu

SEQ ID NO: 648704 - RNA, 21 nt, Artificial Sequence
  Synthetic
uacucuuuagaguuaaaugcu

SEQ ID NO: 648705 - RNA, 22 nt, Artificial Sequence
  Synthetic
uuacucuuuagaguuaaaugcu

SEQ ID NO: 648706 - RNA, 23 nt, Artificial Sequence
  Synthetic
uuuacucuuuagaguuaaaugcu

SEQ ID NO: 648707 - RNA, 24 nt, Artificial Sequence
  Synthetic
cuuuacucuuuagaguuaaaugcu

SEQ ID NO: 648708 - RNA, 18 nt, Artificial Sequence
  Synthetic
auuuuaaucaacaaugcu

SEQ ID NO: 648709 - RNA, 19 nt, Artificial Sequence
  Synthetic
aauuuuaaucaacaaugcu

SEQ ID NO: 648710 - RNA, 20 nt, Artificial Sequence
  Synthetic
aaauuuuaaucaacaaugcu

SEQ ID NO: 648711 - RNA, 21 nt, Artificial Sequence
  Synthetic
caaauuuuaaucaacaaugcu

SEQ ID NO: 648712 - RNA, 22 nt, Artificial Sequence
  Synthetic
ucaaauuuuaaucaacaaugcu

SEQ ID NO: 648713 - RNA, 23 nt, Artificial Sequence
  Synthetic
gucaaauuuuaaucaacaaugcu

SEQ ID NO: 648714 - RNA, 24 nt, Artificial Sequence
  Synthetic
agucaaauuuuaaucaacaaugcu

SEQ ID NO: 648715 - RNA, 18 nt, Artificial Sequence
  Synthetic
gugagccaacccaaugcu

SEQ ID NO: 648716 - RNA, 19 nt, Artificial Sequence
  Synthetic
ggugagccaacccaaugcu

SEQ ID NO: 648717 - RNA, 20 nt, Artificial Sequence
  Synthetic
aggugagccaacccaaugcu

SEQ ID NO: 648718 - RNA, 21 nt, Artificial Sequence
  Synthetic
uaggugagccaacccaaugcu

SEQ ID NO: 648719 - RNA, 22 nt, Artificial Sequence
  Synthetic
cuaggugagccaacccaaugcu

SEQ ID NO: 648720 - RNA, 23 nt, Artificial Sequence
  Synthetic
ucuaggugagccaacccaaugcu

SEQ ID NO: 648721 - RNA, 24 nt, Artificial Sequence
  Synthetic
aucuaggugagccaacccaaugcu

SEQ ID NO: 648722 - RNA, 18 nt, Artificial Sequence
  Synthetic
auacauuuagucaaugcu

SEQ ID NO: 648723 - RNA, 19 nt, Artificial Sequence
  Synthetic
cauacauuuagucaaugcu

SEQ ID NO: 648724 - RNA, 20 nt, Artificial Sequence
  Synthetic
acauacauuuagucaaugcu

SEQ ID NO: 648725 - RNA, 21 nt, Artificial Sequence
  Synthetic
cacauacauuuagucaaugcu

SEQ ID NO: 648726 - RNA, 22 nt, Artificial Sequence
  Synthetic
acacauacauuuagucaaugcu

SEQ ID NO: 648727 - RNA, 23 nt, Artificial Sequence
  Synthetic
aacacauacauuuagucaaugcu

SEQ ID NO: 648728 - RNA, 24 nt, Artificial Sequence
  Synthetic
aaacacauacauuuagucaaugcu

SEQ ID NO: 648729 - RNA, 18 nt, Artificial Sequence
  Synthetic
uggguggccuagaaugcu

SEQ ID NO: 648730 - RNA, 19 nt, Artificial Sequence
  Synthetic
guggguggccuagaaugcu

SEQ ID NO: 648731 - RNA, 20 nt, Artificial Sequence
  Synthetic
uguggguggccuagaaugcu

SEQ ID NO: 648732 - RNA, 21 nt, Artificial Sequence
  Synthetic
guguggguggccuagaaugcu

SEQ ID NO: 648733 - RNA, 22 nt, Artificial Sequence
  Synthetic
gguguggguggccuagaaugcu

SEQ ID NO: 648734 - RNA, 23 nt, Artificial Sequence
  Synthetic
ugguguggguggccuagaaugcu

SEQ ID NO: 648735 - RNA, 24 nt, Artificial Sequence
  Synthetic
augguguggguggccuagaaugcu

SEQ ID NO: 648736 - RNA, 18 nt, Artificial Sequence
  Synthetic
cccaccugaaugaaugcu

SEQ ID NO: 648737 - RNA, 19 nt, Artificial Sequence
  Synthetic
acccaccugaaugaaugcu

SEQ ID NO: 648738 - RNA, 20 nt, Artificial Sequence
  Synthetic
uacccaccugaaugaaugcu

SEQ ID NO: 648739 - RNA, 21 nt, Artificial Sequence
  Synthetic
guacccaccugaaugaaugcu

SEQ ID NO: 648740 - RNA, 22 nt, Artificial Sequence
  Synthetic
aguacccaccugaaugaaugcu

SEQ ID NO: 648741 - RNA, 23 nt, Artificial Sequence
  Synthetic
caguacccaccugaaugaaugcu

SEQ ID NO: 648742 - RNA, 24 nt, Artificial Sequence
  Synthetic
ucaguacccaccugaaugaaugcu

SEQ ID NO: 648743 - RNA, 18 nt, Artificial Sequence
  Synthetic
uucaguuguaugaaugcu

SEQ ID NO: 648744 - RNA, 19 nt, Artificial Sequence
  Synthetic
guucaguuguaugaaugcu

SEQ ID NO: 648745 - RNA, 20 nt, Artificial Sequence
  Synthetic
uguucaguuguaugaaugcu

SEQ ID NO: 648746 - RNA, 21 nt, Artificial Sequence
  Synthetic
cuguucaguuguaugaaugcu

SEQ ID NO: 648747 - RNA, 22 nt, Artificial Sequence
  Synthetic
ucuguucaguuguaugaaugcu

SEQ ID NO: 648748 - RNA, 23 nt, Artificial Sequence
  Synthetic
uucuguucaguuguaugaaugcu

SEQ ID NO: 648749 - RNA, 24 nt, Artificial Sequence
  Synthetic
auucuguucaguuguaugaaugcu

SEQ ID NO: 648750 - RNA, 18 nt, Artificial Sequence
  Synthetic
ccaaaugucucuaaugcu

SEQ ID NO: 648751 - RNA, 19 nt, Artificial Sequence
  Synthetic
uccaaaugucucuaaugcu

SEQ ID NO: 648752 - RNA, 20 nt, Artificial Sequence
  Synthetic
uuccaaaugucucuaaugcu

SEQ ID NO: 648753 - RNA, 21 nt, Artificial Sequence
  Synthetic
uuuccaaaugucucuaaugcu

SEQ ID NO: 648754 - RNA, 22 nt, Artificial Sequence
  Synthetic
uuuuccaaaugucucuaaugcu

SEQ ID NO: 648755 - RNA, 23 nt, Artificial Sequence
  Synthetic
uuuuuccaaaugucucuaaugcu

SEQ ID NO: 648756 - RNA, 24 nt, Artificial Sequence
  Synthetic
auuuuuccaaaugucucuaaugcu

SEQ ID NO: 648757 - RNA, 18 nt, Artificial Sequence
  Synthetic
ccuuaagacaaacaugcu

SEQ ID NO: 648758 - RNA, 19 nt, Artificial Sequence
  Synthetic
accuuaagacaaacaugcu

SEQ ID NO: 648759 - RNA, 20 nt, Artificial Sequence
  Synthetic
uaccuuaagacaaacaugcu

SEQ ID NO: 648760 - RNA, 21 nt, Artificial Sequence
  Synthetic
uuaccuuaagacaaacaugcu

SEQ ID NO: 648761 - RNA, 22 nt, Artificial Sequence
  Synthetic
auuaccuuaagacaaacaugcu

SEQ ID NO: 648762 - RNA, 23 nt, Artificial Sequence
  Synthetic
cauuaccuuaagacaaacaugcu

SEQ ID NO: 648763 - RNA, 24 nt, Artificial Sequence
  Synthetic
ccauuaccuuaagacaaacaugcu

SEQ ID NO: 648764 - RNA, 18 nt, Artificial Sequence
  Synthetic
aggggaacaacacaugcu

SEQ ID NO: 648765 - RNA, 19 nt, Artificial Sequence
  Synthetic
gaggggaacaacacaugcu

SEQ ID NO: 648766 - RNA, 20 nt, Artificial Sequence
  Synthetic
agaggggaacaacacaugcu

SEQ ID NO: 648767 - RNA, 21 nt, Artificial Sequence
  Synthetic
uagaggggaacaacacaugcu

SEQ ID NO: 648768 - RNA, 22 nt, Artificial Sequence
  Synthetic
guagaggggaacaacacaugcu

SEQ ID NO: 648769 - RNA, 23 nt, Artificial Sequence
  Synthetic
cguagaggggaacaacacaugcu

SEQ ID NO: 648770 - RNA, 24 nt, Artificial Sequence
  Synthetic
acguagaggggaacaacacaugcu

SEQ ID NO: 648771 - RNA, 18 nt, Artificial Sequence
  Synthetic
uaaacaaugucacaugcu

SEQ ID NO: 648772 - RNA, 19 nt, Artificial Sequence
  Synthetic
auaaacaaugucacaugcu

SEQ ID NO: 648773 - RNA, 20 nt, Artificial Sequence
  Synthetic
cauaaacaaugucacaugcu

SEQ ID NO: 648774 - RNA, 21 nt, Artificial Sequence
  Synthetic
acauaaacaaugucacaugcu

SEQ ID NO: 648775 - RNA, 22 nt, Artificial Sequence
  Synthetic
cacauaaacaaugucacaugcu

SEQ ID NO: 648776 - RNA, 23 nt, Artificial Sequence
  Synthetic
ucacauaaacaaugucacaugcu

SEQ ID NO: 648777 - RNA, 24 nt, Artificial Sequence
  Synthetic
gucacauaaacaaugucacaugcu

SEQ ID NO: 648778 - RNA, 18 nt, Artificial Sequence
  Synthetic
aguuguucuggacaugcu

SEQ ID NO: 648779 - RNA, 19 nt, Artificial Sequence
  Synthetic
caguuguucuggacaugcu

SEQ ID NO: 648780 - RNA, 20 nt, Artificial Sequence
  Synthetic
ccaguuguucuggacaugcu

SEQ ID NO: 648781 - RNA, 21 nt, Artificial Sequence
  Synthetic
accaguuguucuggacaugcu

SEQ ID NO: 648782 - RNA, 22 nt, Artificial Sequence
  Synthetic
aaccaguuguucuggacaugcu

SEQ ID NO: 648783 - RNA, 23 nt, Artificial Sequence
  Synthetic
uaaccaguuguucuggacaugcu

SEQ ID NO: 648784 - RNA, 24 nt, Artificial Sequence
  Synthetic
uuaaccaguuguucuggacaugcu

SEQ ID NO: 648785 - RNA, 18 nt, Artificial Sequence
  Synthetic
aaaacgggaggccaugcu

SEQ ID NO: 648786 - RNA, 19 nt, Artificial Sequence
  Synthetic
aaaaacgggaggccaugcu

SEQ ID NO: 648787 - RNA, 20 nt, Artificial Sequence
  Synthetic
aaaaaacgggaggccaugcu

SEQ ID NO: 648788 - RNA, 21 nt, Artificial Sequence
  Synthetic
caaaaaacgggaggccaugcu

SEQ ID NO: 648789 - RNA, 22 nt, Artificial Sequence
  Synthetic
acaaaaaacgggaggccaugcu

SEQ ID NO: 648790 - RNA, 23 nt, Artificial Sequence
  Synthetic
aacaaaaaacgggaggccaugcu

SEQ ID NO: 648791 - RNA, 24 nt, Artificial Sequence
  Synthetic
caacaaaaaacgggaggccaugcu

SEQ ID NO: 648792 - RNA, 18 nt, Artificial Sequence
  Synthetic
aaauuguaccagcaugcu

SEQ ID NO: 648793 - RNA, 19 nt, Artificial Sequence
  Synthetic
caaauuguaccagcaugcu

SEQ ID NO: 648794 - RNA, 20 nt, Artificial Sequence
  Synthetic
acaaauuguaccagcaugcu

SEQ ID NO: 648795 - RNA, 21 nt, Artificial Sequence
  Synthetic
uacaaauuguaccagcaugcu

SEQ ID NO: 648796 - RNA, 22 nt, Artificial Sequence
  Synthetic
auacaaauuguaccagcaugcu

SEQ ID NO: 648797 - RNA, 23 nt, Artificial Sequence
  Synthetic
gauacaaauuguaccagcaugcu

SEQ ID NO: 648798 - RNA, 24 nt, Artificial Sequence
  Synthetic
ggauacaaauuguaccagcaugcu

SEQ ID NO: 648799 - RNA, 18 nt, Artificial Sequence
  Synthetic
cagcauacugggcaugcu

SEQ ID NO: 648800 - RNA, 19 nt, Artificial Sequence
  Synthetic
gcagcauacugggcaugcu

SEQ ID NO: 648801 - RNA, 20 nt, Artificial Sequence
  Synthetic
ugcagcauacugggcaugcu

SEQ ID NO: 648802 - RNA, 21 nt, Artificial Sequence
  Synthetic
uugcagcauacugggcaugcu

SEQ ID NO: 648803 - RNA, 22 nt, Artificial Sequence
  Synthetic
cuugcagcauacugggcaugcu

SEQ ID NO: 648804 - RNA, 23 nt, Artificial Sequence
  Synthetic
ucuugcagcauacugggcaugcu

SEQ ID NO: 648805 - RNA, 24 nt, Artificial Sequence
  Synthetic
cucuugcagcauacugggcaugcu

SEQ ID NO: 648806 - RNA, 18 nt, Artificial Sequence
  Synthetic
uguuugaaaauucaugcu

SEQ ID NO: 648807 - RNA, 19 nt, Artificial Sequence
  Synthetic
guguuugaaaauucaugcu

SEQ ID NO: 648808 - RNA, 20 nt, Artificial Sequence
  Synthetic
uguguuugaaaauucaugcu

SEQ ID NO: 648809 - RNA, 21 nt, Artificial Sequence
  Synthetic
guguguuugaaaauucaugcu

SEQ ID NO: 648810 - RNA, 22 nt, Artificial Sequence
  Synthetic
gguguguuugaaaauucaugcu

SEQ ID NO: 648811 - RNA, 23 nt, Artificial Sequence
  Synthetic
agguguguuugaaaauucaugcu

SEQ ID NO: 648812 - RNA, 24 nt, Artificial Sequence
  Synthetic
aagguguguuugaaaauucaugcu

SEQ ID NO: 648813 - RNA, 18 nt, Artificial Sequence
  Synthetic
uaucuaaaaucagaugcu

SEQ ID NO: 648814 - RNA, 19 nt, Artificial Sequence
  Synthetic
cuaucuaaaaucagaugcu

SEQ ID NO: 648815 - RNA, 20 nt, Artificial Sequence
  Synthetic
gcuaucuaaaaucagaugcu

SEQ ID NO: 648816 - RNA, 21 nt, Artificial Sequence
  Synthetic
cgcuaucuaaaaucagaugcu

SEQ ID NO: 648817 - RNA, 22 nt, Artificial Sequence
  Synthetic
gcgcuaucuaaaaucagaugcu

SEQ ID NO: 648818 - RNA, 23 nt, Artificial Sequence
  Synthetic
agcgcuaucuaaaaucagaugcu

SEQ ID NO: 648819 - RNA, 24 nt, Artificial Sequence
  Synthetic
cagcgcuaucuaaaaucagaugcu

SEQ ID NO: 648820 - RNA, 18 nt, Artificial Sequence
  Synthetic
uuuaaaacuuacgaugcu

SEQ ID NO: 648821 - RNA, 19 nt, Artificial Sequence
  Synthetic
auuuaaaacuuacgaugcu

SEQ ID NO: 648822 - RNA, 20 nt, Artificial Sequence
  Synthetic
aauuuaaaacuuacgaugcu

SEQ ID NO: 648823 - RNA, 21 nt, Artificial Sequence
  Synthetic
uaauuuaaaacuuacgaugcu

SEQ ID NO: 648824 - RNA, 22 nt, Artificial Sequence
  Synthetic
guaauuuaaaacuuacgaugcu

SEQ ID NO: 648825 - RNA, 23 nt, Artificial Sequence
  Synthetic
gguaauuuaaaacuuacgaugcu

SEQ ID NO: 648826 - RNA, 24 nt, Artificial Sequence
  Synthetic
ugguaauuuaaaacuuacgaugcu

SEQ ID NO: 648827 - RNA, 18 nt, Artificial Sequence
  Synthetic
aaugcuguuggggaugcu

SEQ ID NO: 648828 - RNA, 19 nt, Artificial Sequence
  Synthetic
caaugcuguuggggaugcu

SEQ ID NO: 648829 - RNA, 20 nt, Artificial Sequence
  Synthetic
ucaaugcuguuggggaugcu

SEQ ID NO: 648830 - RNA, 21 nt, Artificial Sequence
  Synthetic
cucaaugcuguuggggaugcu

SEQ ID NO: 648831 - RNA, 22 nt, Artificial Sequence
  Synthetic
gcucaaugcuguuggggaugcu

SEQ ID NO: 648832 - RNA, 23 nt, Artificial Sequence
  Synthetic
ggcucaaugcuguuggggaugcu

SEQ ID NO: 648833 - RNA, 24 nt, Artificial Sequence
  Synthetic
gggcucaaugcuguuggggaugcu

SEQ ID NO: 648834 - RNA, 18 nt, Artificial Sequence
  Synthetic
ccaucuacuugggaugcu

SEQ ID NO: 648835 - RNA, 19 nt, Artificial Sequence
  Synthetic
uccaucuacuugggaugcu

SEQ ID NO: 648836 - RNA, 20 nt, Artificial Sequence
  Synthetic
uuccaucuacuugggaugcu

SEQ ID NO: 648837 - RNA, 21 nt, Artificial Sequence
  Synthetic
guuccaucuacuugggaugcu

SEQ ID NO: 648838 - RNA, 22 nt, Artificial Sequence
  Synthetic
aguuccaucuacuugggaugcu

SEQ ID NO: 648839 - RNA, 23 nt, Artificial Sequence
  Synthetic
uaguuccaucuacuugggaugcu

SEQ ID NO: 648840 - RNA, 24 nt, Artificial Sequence
  Synthetic
guaguuccaucuacuugggaugcu

SEQ ID NO: 648841 - RNA, 18 nt, Artificial Sequence
  Synthetic
gauuugcuacuggaugcu

SEQ ID NO: 648842 - RNA, 19 nt, Artificial Sequence
  Synthetic
ugauuugcuacuggaugcu

SEQ ID NO: 648843 - RNA, 20 nt, Artificial Sequence
  Synthetic
uugauuugcuacuggaugcu

SEQ ID NO: 648844 - RNA, 21 nt, Artificial Sequence
  Synthetic
cuugauuugcuacuggaugcu

SEQ ID NO: 648845 - RNA, 22 nt, Artificial Sequence
  Synthetic
acuugauuugcuacuggaugcu

SEQ ID NO: 648846 - RNA, 23 nt, Artificial Sequence
  Synthetic
uacuugauuugcuacuggaugcu

SEQ ID NO: 648847 - RNA, 24 nt, Artificial Sequence
  Synthetic
uuacuugauuugcuacuggaugcu

SEQ ID NO: 648848 - RNA, 18 nt, Artificial Sequence
  Synthetic
cagucuuuccuggaugcu

SEQ ID NO: 648849 - RNA, 19 nt, Artificial Sequence
  Synthetic
gcagucuuuccuggaugcu

SEQ ID NO: 648850 - RNA, 20 nt, Artificial Sequence
  Synthetic
agcagucuuuccuggaugcu

SEQ ID NO: 648851 - RNA, 21 nt, Artificial Sequence
  Synthetic
gagcagucuuuccuggaugcu

SEQ ID NO: 648852 - RNA, 22 nt, Artificial Sequence
  Synthetic
agagcagucuuuccuggaugcu

SEQ ID NO: 648853 - RNA, 23 nt, Artificial Sequence
  Synthetic
cagagcagucuuuccuggaugcu

SEQ ID NO: 648854 - RNA, 24 nt, Artificial Sequence
  Synthetic
ucagagcagucuuuccuggaugcu

SEQ ID NO: 648855 - RNA, 18 nt, Artificial Sequence
  Synthetic
aaauuaaacaaugaugcu

SEQ ID NO: 648856 - RNA, 19 nt, Artificial Sequence
  Synthetic
aaaauuaaacaaugaugcu

SEQ ID NO: 648857 - RNA, 20 nt, Artificial Sequence
  Synthetic
caaaauuaaacaaugaugcu

SEQ ID NO: 648858 - RNA, 21 nt, Artificial Sequence
  Synthetic
ccaaaauuaaacaaugaugcu

SEQ ID NO: 648859 - RNA, 22 nt, Artificial Sequence
  Synthetic
gccaaaauuaaacaaugaugcu

SEQ ID NO: 648860 - RNA, 23 nt, Artificial Sequence
  Synthetic
agccaaaauuaaacaaugaugcu

SEQ ID NO: 648861 - RNA, 24 nt, Artificial Sequence
  Synthetic
cagccaaaauuaaacaaugaugcu

SEQ ID NO: 648862 - RNA, 18 nt, Artificial Sequence
  Synthetic
uggugguuaccugaugcu

SEQ ID NO: 648863 - RNA, 19 nt, Artificial Sequence
  Synthetic
uuggugguuaccugaugcu

SEQ ID NO: 648864 - RNA, 20 nt, Artificial Sequence
  Synthetic
auuggugguuaccugaugcu

SEQ ID NO: 648865 - RNA, 21 nt, Artificial Sequence
  Synthetic
gauuggugguuaccugaugcu

SEQ ID NO: 648866 - RNA, 22 nt, Artificial Sequence
  Synthetic
ugauuggugguuaccugaugcu

SEQ ID NO: 648867 - RNA, 23 nt, Artificial Sequence
  Synthetic
gugauuggugguuaccugaugcu

SEQ ID NO: 648868 - RNA, 24 nt, Artificial Sequence
  Synthetic
ugugauuggugguuaccugaugcu

SEQ ID NO: 648869 - RNA, 18 nt, Artificial Sequence
  Synthetic
ccugggaauggugaugcu

SEQ ID NO: 648870 - RNA, 19 nt, Artificial Sequence
  Synthetic
uccugggaauggugaugcu

SEQ ID NO: 648871 - RNA, 20 nt, Artificial Sequence
  Synthetic
cuccugggaauggugaugcu

SEQ ID NO: 648872 - RNA, 21 nt, Artificial Sequence
  Synthetic
acuccugggaauggugaugcu

SEQ ID NO: 648873 - RNA, 22 nt, Artificial Sequence
  Synthetic
uacuccugggaauggugaugcu

SEQ ID NO: 648874 - RNA, 23 nt, Artificial Sequence
  Synthetic
cuacuccugggaauggugaugcu

SEQ ID NO: 648875 - RNA, 24 nt, Artificial Sequence
  Synthetic
gcuacuccugggaauggugaugcu

SEQ ID NO: 648876 - RNA, 18 nt, Artificial Sequence
  Synthetic
gaugcggagauugaugcu

SEQ ID NO: 648877 - RNA, 19 nt, Artificial Sequence
  Synthetic
agaugcggagauugaugcu

SEQ ID NO: 648878 - RNA, 20 nt, Artificial Sequence
  Synthetic
cagaugcggagauugaugcu

SEQ ID NO: 648879 - RNA, 21 nt, Artificial Sequence
  Synthetic
acagaugcggagauugaugcu

SEQ ID NO: 648880 - RNA, 22 nt, Artificial Sequence
  Synthetic
cacagaugcggagauugaugcu

SEQ ID NO: 648881 - RNA, 23 nt, Artificial Sequence
  Synthetic
ucacagaugcggagauugaugcu

SEQ ID NO: 648882 - RNA, 24 nt, Artificial Sequence
  Synthetic
uucacagaugcggagauugaugcu

SEQ ID NO: 648883 - RNA, 18 nt, Artificial Sequence
  Synthetic
acuagcucccuugaugcu

SEQ ID NO: 648884 - RNA, 19 nt, Artificial Sequence
  Synthetic
cacuagcucccuugaugcu

SEQ ID NO: 648885 - RNA, 20 nt, Artificial Sequence
  Synthetic
acacuagcucccuugaugcu

SEQ ID NO: 648886 - RNA, 21 nt, Artificial Sequence
  Synthetic
uacacuagcucccuugaugcu

SEQ ID NO: 648887 - RNA, 22 nt, Artificial Sequence
  Synthetic
uuacacuagcucccuugaugcu

SEQ ID NO: 648888 - RNA, 23 nt, Artificial Sequence
  Synthetic
guuacacuagcucccuugaugcu

SEQ ID NO: 648889 - RNA, 24 nt, Artificial Sequence
  Synthetic
uguuacacuagcucccuugaugcu

SEQ ID NO: 648890 - RNA, 18 nt, Artificial Sequence
  Synthetic
ggcacugccaaauaugcu

SEQ ID NO: 648891 - RNA, 19 nt, Artificial Sequence
  Synthetic
aggcacugccaaauaugcu

SEQ ID NO: 648892 - RNA, 20 nt, Artificial Sequence
  Synthetic
aaggcacugccaaauaugcu

SEQ ID NO: 648893 - RNA, 21 nt, Artificial Sequence
  Synthetic
caaggcacugccaaauaugcu

SEQ ID NO: 648894 - RNA, 22 nt, Artificial Sequence
  Synthetic
ucaaggcacugccaaauaugcu

SEQ ID NO: 648895 - RNA, 23 nt, Artificial Sequence
  Synthetic
uucaaggcacugccaaauaugcu

SEQ ID NO: 648896 - RNA, 24 nt, Artificial Sequence
  Synthetic
uuucaaggcacugccaaauaugcu

SEQ ID NO: 648897 - RNA, 18 nt, Artificial Sequence
  Synthetic
aauauuaucuaauaugcu

SEQ ID NO: 648898 - RNA, 19 nt, Artificial Sequence
  Synthetic
caauauuaucuaauaugcu

SEQ ID NO: 648899 - RNA, 20 nt, Artificial Sequence
  Synthetic
ucaauauuaucuaauaugcu

SEQ ID NO: 648900 - RNA, 21 nt, Artificial Sequence
  Synthetic
cucaauauuaucuaauaugcu

SEQ ID NO: 648901 - RNA, 22 nt, Artificial Sequence
  Synthetic
gcucaauauuaucuaauaugcu

SEQ ID NO: 648902 - RNA, 23 nt, Artificial Sequence
  Synthetic
agcucaauauuaucuaauaugcu

SEQ ID NO: 648903 - RNA, 24 nt, Artificial Sequence
  Synthetic
cagcucaauauuaucuaauaugcu

SEQ ID NO: 648904 - RNA, 18 nt, Artificial Sequence
  Synthetic
acauaggcagcauaugcu

SEQ ID NO: 648905 - RNA, 19 nt, Artificial Sequence
  Synthetic
uacauaggcagcauaugcu

SEQ ID NO: 648906 - RNA, 20 nt, Artificial Sequence
  Synthetic
guacauaggcagcauaugcu

SEQ ID NO: 648907 - RNA, 21 nt, Artificial Sequence
  Synthetic
gguacauaggcagcauaugcu

SEQ ID NO: 648908 - RNA, 22 nt, Artificial Sequence
  Synthetic
ggguacauaggcagcauaugcu

SEQ ID NO: 648909 - RNA, 23 nt, Artificial Sequence
  Synthetic
gggguacauaggcagcauaugcu

SEQ ID NO: 648910 - RNA, 24 nt, Artificial Sequence
  Synthetic
agggguacauaggcagcauaugcu

SEQ ID NO: 648911 - RNA, 18 nt, Artificial Sequence
  Synthetic
aagugauuaugauaugcu

SEQ ID NO: 648912 - RNA, 19 nt, Artificial Sequence
  Synthetic
gaagugauuaugauaugcu

SEQ ID NO: 648913 - RNA, 20 nt, Artificial Sequence
  Synthetic
ggaagugauuaugauaugcu

SEQ ID NO: 648914 - RNA, 21 nt, Artificial Sequence
  Synthetic
gggaagugauuaugauaugcu

SEQ ID NO: 648915 - RNA, 22 nt, Artificial Sequence
  Synthetic
ugggaagugauuaugauaugcu

SEQ ID NO: 648916 - RNA, 23 nt, Artificial Sequence
  Synthetic
gugggaagugauuaugauaugcu

SEQ ID NO: 648917 - RNA, 24 nt, Artificial Sequence
  Synthetic
ggugggaagugauuaugauaugcu

SEQ ID NO: 648918 - RNA, 18 nt, Artificial Sequence
  Synthetic
aaucauuuccacuaugcu

SEQ ID NO: 648919 - RNA, 19 nt, Artificial Sequence
  Synthetic
uaaucauuuccacuaugcu

SEQ ID NO: 648920 - RNA, 20 nt, Artificial Sequence
  Synthetic
guaaucauuuccacuaugcu

SEQ ID NO: 648921 - RNA, 21 nt, Artificial Sequence
  Synthetic
uguaaucauuuccacuaugcu

SEQ ID NO: 648922 - RNA, 22 nt, Artificial Sequence
  Synthetic
cuguaaucauuuccacuaugcu

SEQ ID NO: 648923 - RNA, 23 nt, Artificial Sequence
  Synthetic
ucuguaaucauuuccacuaugcu

SEQ ID NO: 648924 - RNA, 24 nt, Artificial Sequence
  Synthetic
aucuguaaucauuuccacuaugcu

SEQ ID NO: 648925 - RNA, 18 nt, Artificial Sequence
  Synthetic
uggguguugggcuaugcu

SEQ ID NO: 648926 - RNA, 19 nt, Artificial Sequence
  Synthetic
uuggguguugggcuaugcu

SEQ ID NO: 648927 - RNA, 20 nt, Artificial Sequence
  Synthetic
cuuggguguugggcuaugcu

SEQ ID NO: 648928 - RNA, 21 nt, Artificial Sequence
  Synthetic
gcuuggguguugggcuaugcu

SEQ ID NO: 648929 - RNA, 22 nt, Artificial Sequence
  Synthetic
ugcuuggguguugggcuaugcu

SEQ ID NO: 648930 - RNA, 23 nt, Artificial Sequence
  Synthetic
augcuuggguguugggcuaugcu

SEQ ID NO: 648931 - RNA, 24 nt, Artificial Sequence
  Synthetic
aaugcuuggguguugggcuaugcu

SEQ ID NO: 648932 - RNA, 18 nt, Artificial Sequence
  Synthetic
uauauguauauguaugcu

SEQ ID NO: 648933 - RNA, 19 nt, Artificial Sequence
  Synthetic
auauauguauauguaugcu

SEQ ID NO: 648934 - RNA, 20 nt, Artificial Sequence
  Synthetic
uauauauguauauguaugcu

SEQ ID NO: 648935 - RNA, 21 nt, Artificial Sequence
  Synthetic
auauauauguauauguaugcu

SEQ ID NO: 648936 - RNA, 22 nt, Artificial Sequence
  Synthetic
uauauauauguauauguaugcu

SEQ ID NO: 648937 - RNA, 23 nt, Artificial Sequence
  Synthetic
guauauauauguauauguaugcu

SEQ ID NO: 648938 - RNA, 24 nt, Artificial Sequence
  Synthetic
uguauauauauguauauguaugcu

SEQ ID NO: 648939 - RNA, 18 nt, Artificial Sequence
  Synthetic
agacacagaguguaugcu

SEQ ID NO: 648940 - RNA, 19 nt, Artificial Sequence
  Synthetic
gagacacagaguguaugcu

SEQ ID NO: 648941 - RNA, 20 nt, Artificial Sequence
  Synthetic
ugagacacagaguguaugcu

SEQ ID NO: 648942 - RNA, 21 nt, Artificial Sequence
  Synthetic
cugagacacagaguguaugcu

SEQ ID NO: 648943 - RNA, 22 nt, Artificial Sequence
  Synthetic
acugagacacagaguguaugcu

SEQ ID NO: 648944 - RNA, 23 nt, Artificial Sequence
  Synthetic
uacugagacacagaguguaugcu

SEQ ID NO: 648945 - RNA, 24 nt, Artificial Sequence
  Synthetic
auacugagacacagaguguaugcu

SEQ ID NO: 648946 - RNA, 18 nt, Artificial Sequence
  Synthetic
gcacucuguuuguaugcu

SEQ ID NO: 648947 - RNA, 19 nt, Artificial Sequence
  Synthetic
agcacucuguuuguaugcu

SEQ ID NO: 648948 - RNA, 20 nt, Artificial Sequence
  Synthetic
gagcacucuguuuguaugcu

SEQ ID NO: 648949 - RNA, 21 nt, Artificial Sequence
  Synthetic
agagcacucuguuuguaugcu

SEQ ID NO: 648950 - RNA, 22 nt, Artificial Sequence
  Synthetic
gagagcacucuguuuguaugcu

SEQ ID NO: 648951 - RNA, 23 nt, Artificial Sequence
  Synthetic
agagagcacucuguuuguaugcu

SEQ ID NO: 648952 - RNA, 24 nt, Artificial Sequence
  Synthetic
uagagagcacucuguuuguaugcu

SEQ ID NO: 648953 - RNA, 18 nt, Artificial Sequence
  Synthetic
ccuugaaaauauuaugcu

SEQ ID NO: 648954 - RNA, 19 nt, Artificial Sequence
  Synthetic
accuugaaaauauuaugcu

SEQ ID NO: 648955 - RNA, 20 nt, Artificial Sequence
  Synthetic
aaccuugaaaauauuaugcu

SEQ ID NO: 648956 - RNA, 21 nt, Artificial Sequence
  Synthetic
gaaccuugaaaauauuaugcu

SEQ ID NO: 648957 - RNA, 22 nt, Artificial Sequence
  Synthetic
ugaaccuugaaaauauuaugcu

SEQ ID NO: 648958 - RNA, 23 nt, Artificial Sequence
  Synthetic
augaaccuugaaaauauuaugcu

SEQ ID NO: 648959 - RNA, 24 nt, Artificial Sequence
  Synthetic
gaugaaccuugaaaauauuaugcu

SEQ ID NO: 648960 - RNA, 18 nt, Artificial Sequence
  Synthetic
uccaagagcccuuaugcu

SEQ ID NO: 648961 - RNA, 19 nt, Artificial Sequence
  Synthetic
auccaagagcccuuaugcu

SEQ ID NO: 648962 - RNA, 20 nt, Artificial Sequence
  Synthetic
aauccaagagcccuuaugcu

SEQ ID NO: 648963 - RNA, 21 nt, Artificial Sequence
  Synthetic
uaauccaagagcccuuaugcu

SEQ ID NO: 648964 - RNA, 22 nt, Artificial Sequence
  Synthetic
cuaauccaagagcccuuaugcu

SEQ ID NO: 648965 - RNA, 23 nt, Artificial Sequence
  Synthetic
ccuaauccaagagcccuuaugcu

SEQ ID NO: 648966 - RNA, 24 nt, Artificial Sequence
  Synthetic
uccuaauccaagagcccuuaugcu

SEQ ID NO: 648967 - RNA, 18 nt, Artificial Sequence
  Synthetic
gcauaugagucuuaugcu

SEQ ID NO: 648968 - RNA, 19 nt, Artificial Sequence
  Synthetic
ugcauaugagucuuaugcu

SEQ ID NO: 648969 - RNA, 20 nt, Artificial Sequence
  Synthetic
augcauaugagucuuaugcu

SEQ ID NO: 648970 - RNA, 21 nt, Artificial Sequence
  Synthetic
aaugcauaugagucuuaugcu

SEQ ID NO: 648971 - RNA, 22 nt, Artificial Sequence
  Synthetic
aaaugcauaugagucuuaugcu

SEQ ID NO: 648972 - RNA, 23 nt, Artificial Sequence
  Synthetic
uaaaugcauaugagucuuaugcu

SEQ ID NO: 648973 - RNA, 24 nt, Artificial Sequence
  Synthetic
uuaaaugcauaugagucuuaugcu

SEQ ID NO: 648974 - RNA, 18 nt, Artificial Sequence
  Synthetic
caccccgcucaaacugcu

SEQ ID NO: 648975 - RNA, 19 nt, Artificial Sequence
  Synthetic
ccaccccgcucaaacugcu

SEQ ID NO: 648976 - RNA, 20 nt, Artificial Sequence
  Synthetic
cccaccccgcucaaacugcu

SEQ ID NO: 648977 - RNA, 21 nt, Artificial Sequence
  Synthetic
ccccaccccgcucaaacugcu

SEQ ID NO: 648978 - RNA, 22 nt, Artificial Sequence
  Synthetic
uccccaccccgcucaaacugcu

SEQ ID NO: 648979 - RNA, 23 nt, Artificial Sequence
  Synthetic
cuccccaccccgcucaaacugcu

SEQ ID NO: 648980 - RNA, 24 nt, Artificial Sequence
  Synthetic
ucuccccaccccgcucaaacugcu

SEQ ID NO: 648981 - RNA, 18 nt, Artificial Sequence
  Synthetic
uuaagaaaggcaacugcu

SEQ ID NO: 648982 - RNA, 19 nt, Artificial Sequence
  Synthetic
auuaagaaaggcaacugcu

SEQ ID NO: 648983 - RNA, 20 nt, Artificial Sequence
  Synthetic
aauuaagaaaggcaacugcu

SEQ ID NO: 648984 - RNA, 21 nt, Artificial Sequence
  Synthetic
gaauuaagaaaggcaacugcu

SEQ ID NO: 648985 - RNA, 22 nt, Artificial Sequence
  Synthetic
ugaauuaagaaaggcaacugcu

SEQ ID NO: 648986 - RNA, 23 nt, Artificial Sequence
  Synthetic
augaauuaagaaaggcaacugcu

SEQ ID NO: 648987 - RNA, 24 nt, Artificial Sequence
  Synthetic
aaugaauuaagaaaggcaacugcu

SEQ ID NO: 648988 - RNA, 18 nt, Artificial Sequence
  Synthetic
ucaugccacucaacugcu

SEQ ID NO: 648989 - RNA, 19 nt, Artificial Sequence
  Synthetic
aucaugccacucaacugcu

SEQ ID NO: 648990 - RNA, 20 nt, Artificial Sequence
  Synthetic
gaucaugccacucaacugcu

SEQ ID NO: 648991 - RNA, 21 nt, Artificial Sequence
  Synthetic
agaucaugccacucaacugcu

SEQ ID NO: 648992 - RNA, 22 nt, Artificial Sequence
  Synthetic
gagaucaugccacucaacugcu

SEQ ID NO: 648993 - RNA, 23 nt, Artificial Sequence
  Synthetic
ugagaucaugccacucaacugcu

SEQ ID NO: 648994 - RNA, 24 nt, Artificial Sequence
  Synthetic
uugagaucaugccacucaacugcu

SEQ ID NO: 648995 - RNA, 18 nt, Artificial Sequence
  Synthetic
gucaccauauuaacugcu

SEQ ID NO: 648996 - RNA, 19 nt, Artificial Sequence
  Synthetic
agucaccauauuaacugcu

SEQ ID NO: 648997 - RNA, 20 nt, Artificial Sequence
  Synthetic
aagucaccauauuaacugcu

SEQ ID NO: 648998 - RNA, 21 nt, Artificial Sequence
  Synthetic
aaagucaccauauuaacugcu

SEQ ID NO: 648999 - RNA, 22 nt, Artificial Sequence
  Synthetic
gaaagucaccauauuaacugcu

SEQ ID NO: 649000 - RNA, 23 nt, Artificial Sequence
  Synthetic
ugaaagucaccauauuaacugcu

SEQ ID NO: 649001 - RNA, 24 nt, Artificial Sequence
  Synthetic
augaaagucaccauauuaacugcu

SEQ ID NO: 649002 - RNA, 18 nt, Artificial Sequence
  Synthetic
gcaagucacuuaacugcu

SEQ ID NO: 649003 - RNA, 19 nt, Artificial Sequence
  Synthetic
agcaagucacuuaacugcu

SEQ ID NO: 649004 - RNA, 20 nt, Artificial Sequence
  Synthetic
gagcaagucacuuaacugcu

SEQ ID NO: 649005 - RNA, 21 nt, Artificial Sequence
  Synthetic
ugagcaagucacuuaacugcu

SEQ ID NO: 649006 - RNA, 22 nt, Artificial Sequence
  Synthetic
cugagcaagucacuuaacugcu

SEQ ID NO: 649007 - RNA, 23 nt, Artificial Sequence
  Synthetic
ccugagcaagucacuuaacugcu

SEQ ID NO: 649008 - RNA, 24 nt, Artificial Sequence
  Synthetic
accugagcaagucacuuaacugcu

SEQ ID NO: 649009 - RNA, 18 nt, Artificial Sequence
  Synthetic
gcagcacaggacacugcu

SEQ ID NO: 649010 - RNA, 19 nt, Artificial Sequence
  Synthetic
agcagcacaggacacugcu

SEQ ID NO: 649011 - RNA, 20 nt, Artificial Sequence
  Synthetic
uagcagcacaggacacugcu

SEQ ID NO: 649012 - RNA, 21 nt, Artificial Sequence
  Synthetic
auagcagcacaggacacugcu

SEQ ID NO: 649013 - RNA, 22 nt, Artificial Sequence
  Synthetic
aauagcagcacaggacacugcu

SEQ ID NO: 649014 - RNA, 23 nt, Artificial Sequence
  Synthetic
uaauagcagcacaggacacugcu

SEQ ID NO: 649015 - RNA, 24 nt, Artificial Sequence
  Synthetic
uuaauagcagcacaggacacugcu

SEQ ID NO: 649016 - RNA, 18 nt, Artificial Sequence
  Synthetic
aucuaucuguacacugcu

SEQ ID NO: 649017 - RNA, 19 nt, Artificial Sequence
  Synthetic
caucuaucuguacacugcu

SEQ ID NO: 649018 - RNA, 20 nt, Artificial Sequence
  Synthetic
acaucuaucuguacacugcu

SEQ ID NO: 649019 - RNA, 21 nt, Artificial Sequence
  Synthetic
aacaucuaucuguacacugcu

SEQ ID NO: 649020 - RNA, 22 nt, Artificial Sequence
  Synthetic
gaacaucuaucuguacacugcu

SEQ ID NO: 649021 - RNA, 23 nt, Artificial Sequence
  Synthetic
agaacaucuaucuguacacugcu

SEQ ID NO: 649022 - RNA, 24 nt, Artificial Sequence
  Synthetic
aagaacaucuaucuguacacugcu

SEQ ID NO: 649023 - RNA, 18 nt, Artificial Sequence
  Synthetic
ggaggaagacccacugcu

SEQ ID NO: 649024 - RNA, 19 nt, Artificial Sequence
  Synthetic
uggaggaagacccacugcu

SEQ ID NO: 649025 - RNA, 20 nt, Artificial Sequence
  Synthetic
auggaggaagacccacugcu

SEQ ID NO: 649026 - RNA, 21 nt, Artificial Sequence
  Synthetic
aauggaggaagacccacugcu

SEQ ID NO: 649027 - RNA, 22 nt, Artificial Sequence
  Synthetic
uaauggaggaagacccacugcu

SEQ ID NO: 649028 - RNA, 23 nt, Artificial Sequence
  Synthetic
auaauggaggaagacccacugcu

SEQ ID NO: 649029 - RNA, 24 nt, Artificial Sequence
  Synthetic
gauaauggaggaagacccacugcu

SEQ ID NO: 649030 - RNA, 18 nt, Artificial Sequence
  Synthetic
acacuagucuccacugcu

SEQ ID NO: 649031 - RNA, 19 nt, Artificial Sequence
  Synthetic
aacacuagucuccacugcu

SEQ ID NO: 649032 - RNA, 20 nt, Artificial Sequence
  Synthetic
caacacuagucuccacugcu

SEQ ID NO: 649033 - RNA, 21 nt, Artificial Sequence
  Synthetic
gcaacacuagucuccacugcu

SEQ ID NO: 649034 - RNA, 22 nt, Artificial Sequence
  Synthetic
agcaacacuagucuccacugcu

SEQ ID NO: 649035 - RNA, 23 nt, Artificial Sequence
  Synthetic
uagcaacacuagucuccacugcu

SEQ ID NO: 649036 - RNA, 24 nt, Artificial Sequence
  Synthetic
auagcaacacuagucuccacugcu

SEQ ID NO: 649037 - RNA, 18 nt, Artificial Sequence
  Synthetic
uggauauaaggcacugcu

SEQ ID NO: 649038 - RNA, 19 nt, Artificial Sequence
  Synthetic
cuggauauaaggcacugcu

SEQ ID NO: 649039 - RNA, 20 nt, Artificial Sequence
  Synthetic
ucuggauauaaggcacugcu

SEQ ID NO: 649040 - RNA, 21 nt, Artificial Sequence
  Synthetic
uucuggauauaaggcacugcu

SEQ ID NO: 649041 - RNA, 22 nt, Artificial Sequence
  Synthetic
uuucuggauauaaggcacugcu

SEQ ID NO: 649042 - RNA, 23 nt, Artificial Sequence
  Synthetic
auuucuggauauaaggcacugcu

SEQ ID NO: 649043 - RNA, 24 nt, Artificial Sequence
  Synthetic
uauuucuggauauaaggcacugcu

SEQ ID NO: 649044 - RNA, 18 nt, Artificial Sequence
  Synthetic
cacacucuggggacugcu

SEQ ID NO: 649045 - RNA, 19 nt, Artificial Sequence
  Synthetic
ucacacucuggggacugcu

SEQ ID NO: 649046 - RNA, 20 nt, Artificial Sequence
  Synthetic
aucacacucuggggacugcu

SEQ ID NO: 649047 - RNA, 21 nt, Artificial Sequence
  Synthetic
uaucacacucuggggacugcu

SEQ ID NO: 649048 - RNA, 22 nt, Artificial Sequence
  Synthetic
auaucacacucuggggacugcu

SEQ ID NO: 649049 - RNA, 23 nt, Artificial Sequence
  Synthetic
aauaucacacucuggggacugcu

SEQ ID NO: 649050 - RNA, 24 nt, Artificial Sequence
  Synthetic
gaauaucacacucuggggacugcu

SEQ ID NO: 649051 - RNA, 18 nt, Artificial Sequence
  Synthetic
ugucagccuuugacugcu

SEQ ID NO: 649052 - RNA, 19 nt, Artificial Sequence
  Synthetic
uugucagccuuugacugcu

SEQ ID NO: 649053 - RNA, 20 nt, Artificial Sequence
  Synthetic
uuugucagccuuugacugcu

SEQ ID NO: 649054 - RNA, 21 nt, Artificial Sequence
  Synthetic
auuugucagccuuugacugcu

SEQ ID NO: 649055 - RNA, 22 nt, Artificial Sequence
  Synthetic
gauuugucagccuuugacugcu

SEQ ID NO: 649056 - RNA, 23 nt, Artificial Sequence
  Synthetic
ggauuugucagccuuugacugcu

SEQ ID NO: 649057 - RNA, 24 nt, Artificial Sequence
  Synthetic
aggauuugucagccuuugacugcu

SEQ ID NO: 649058 - RNA, 18 nt, Artificial Sequence
  Synthetic
uguaagugaaauacugcu

SEQ ID NO: 649059 - RNA, 19 nt, Artificial Sequence
  Synthetic
uuguaagugaaauacugcu

SEQ ID NO: 649060 - RNA, 20 nt, Artificial Sequence
  Synthetic
guuguaagugaaauacugcu

SEQ ID NO: 649061 - RNA, 21 nt, Artificial Sequence
  Synthetic
cguuguaagugaaauacugcu

SEQ ID NO: 649062 - RNA, 22 nt, Artificial Sequence
  Synthetic
acguuguaagugaaauacugcu

SEQ ID NO: 649063 - RNA, 23 nt, Artificial Sequence
  Synthetic
aacguuguaagugaaauacugcu

SEQ ID NO: 649064 - RNA, 24 nt, Artificial Sequence
  Synthetic
gaacguuguaagugaaauacugcu

SEQ ID NO: 649065 - RNA, 18 nt, Artificial Sequence
  Synthetic
uuggguuaacauacugcu

SEQ ID NO: 649066 - RNA, 19 nt, Artificial Sequence
  Synthetic
cuuggguuaacauacugcu

SEQ ID NO: 649067 - RNA, 20 nt, Artificial Sequence
  Synthetic
ucuuggguuaacauacugcu

SEQ ID NO: 649068 - RNA, 21 nt, Artificial Sequence
  Synthetic
gucuuggguuaacauacugcu

SEQ ID NO: 649069 - RNA, 22 nt, Artificial Sequence
  Synthetic
ugucuuggguuaacauacugcu

SEQ ID NO: 649070 - RNA, 23 nt, Artificial Sequence
  Synthetic
uugucuuggguuaacauacugcu

SEQ ID NO: 649071 - RNA, 24 nt, Artificial Sequence
  Synthetic
auugucuuggguuaacauacugcu

SEQ ID NO: 649072 - RNA, 18 nt, Artificial Sequence
  Synthetic
augaguuaauauacugcu

SEQ ID NO: 649073 - RNA, 19 nt, Artificial Sequence
  Synthetic
caugaguuaauauacugcu

SEQ ID NO: 649074 - RNA, 20 nt, Artificial Sequence
  Synthetic
gcaugaguuaauauacugcu

SEQ ID NO: 649075 - RNA, 21 nt, Artificial Sequence
  Synthetic
ugcaugaguuaauauacugcu

SEQ ID NO: 649076 - RNA, 22 nt, Artificial Sequence
  Synthetic
augcaugaguuaauauacugcu

SEQ ID NO: 649077 - RNA, 23 nt, Artificial Sequence
  Synthetic
aaugcaugaguuaauauacugcu

SEQ ID NO: 649078 - RNA, 24 nt, Artificial Sequence
  Synthetic
aaaugcaugaguuaauauacugcu

SEQ ID NO: 649079 - RNA, 18 nt, Artificial Sequence
  Synthetic
ccagcuuugccuacugcu

SEQ ID NO: 649080 - RNA, 19 nt, Artificial Sequence
  Synthetic
accagcuuugccuacugcu

SEQ ID NO: 649081 - RNA, 20 nt, Artificial Sequence
  Synthetic
gaccagcuuugccuacugcu

SEQ ID NO: 649082 - RNA, 21 nt, Artificial Sequence
  Synthetic
ugaccagcuuugccuacugcu

SEQ ID NO: 649083 - RNA, 22 nt, Artificial Sequence
  Synthetic
uugaccagcuuugccuacugcu

SEQ ID NO: 649084 - RNA, 23 nt, Artificial Sequence
  Synthetic
cuugaccagcuuugccuacugcu

SEQ ID NO: 649085 - RNA, 24 nt, Artificial Sequence
  Synthetic
ccuugaccagcuuugccuacugcu

SEQ ID NO: 649086 - RNA, 18 nt, Artificial Sequence
  Synthetic
caucuuuuugcuacugcu

SEQ ID NO: 649087 - RNA, 19 nt, Artificial Sequence
  Synthetic
ucaucuuuuugcuacugcu

SEQ ID NO: 649088 - RNA, 20 nt, Artificial Sequence
  Synthetic
uucaucuuuuugcuacugcu

SEQ ID NO: 649089 - RNA, 21 nt, Artificial Sequence
  Synthetic
uuucaucuuuuugcuacugcu

SEQ ID NO: 649090 - RNA, 22 nt, Artificial Sequence
  Synthetic
uuuucaucuuuuugcuacugcu

SEQ ID NO: 649091 - RNA, 23 nt, Artificial Sequence
  Synthetic
guuuucaucuuuuugcuacugcu

SEQ ID NO: 649092 - RNA, 24 nt, Artificial Sequence
  Synthetic
aguuuucaucuuuuugcuacugcu

SEQ ID NO: 649093 - RNA, 18 nt, Artificial Sequence
  Synthetic
cauucacguauuacugcu

SEQ ID NO: 649094 - RNA, 19 nt, Artificial Sequence
  Synthetic
acauucacguauuacugcu

SEQ ID NO: 649095 - RNA, 20 nt, Artificial Sequence
  Synthetic
cacauucacguauuacugcu

SEQ ID NO: 649096 - RNA, 21 nt, Artificial Sequence
  Synthetic
gcacauucacguauuacugcu

SEQ ID NO: 649097 - RNA, 22 nt, Artificial Sequence
  Synthetic
agcacauucacguauuacugcu

SEQ ID NO: 649098 - RNA, 23 nt, Artificial Sequence
  Synthetic
uagcacauucacguauuacugcu

SEQ ID NO: 649099 - RNA, 24 nt, Artificial Sequence
  Synthetic
cuagcacauucacguauuacugcu

SEQ ID NO: 649100 - RNA, 18 nt, Artificial Sequence
  Synthetic
ugaaauuuuauuacugcu

SEQ ID NO: 649101 - RNA, 19 nt, Artificial Sequence
  Synthetic
augaaauuuuauuacugcu

SEQ ID NO: 649102 - RNA, 20 nt, Artificial Sequence
  Synthetic
uaugaaauuuuauuacugcu

SEQ ID NO: 649103 - RNA, 21 nt, Artificial Sequence
  Synthetic
uuaugaaauuuuauuacugcu

SEQ ID NO: 649104 - RNA, 22 nt, Artificial Sequence
  Synthetic
cuuaugaaauuuuauuacugcu

SEQ ID NO: 649105 - RNA, 23 nt, Artificial Sequence
  Synthetic
ucuuaugaaauuuuauuacugcu

SEQ ID NO: 649106 - RNA, 24 nt, Artificial Sequence
  Synthetic
aucuuaugaaauuuuauuacugcu

SEQ ID NO: 649107 - RNA, 18 nt, Artificial Sequence
  Synthetic
ugcugcaggcuuacugcu

SEQ ID NO: 649108 - RNA, 19 nt, Artificial Sequence
  Synthetic
augcugcaggcuuacugcu

SEQ ID NO: 649109 - RNA, 20 nt, Artificial Sequence
  Synthetic
aaugcugcaggcuuacugcu

SEQ ID NO: 649110 - RNA, 21 nt, Artificial Sequence
  Synthetic
uaaugcugcaggcuuacugcu

SEQ ID NO: 649111 - RNA, 22 nt, Artificial Sequence
  Synthetic
uuaaugcugcaggcuuacugcu

SEQ ID NO: 649112 - RNA, 23 nt, Artificial Sequence
  Synthetic
uuuaaugcugcaggcuuacugcu

SEQ ID NO: 649113 - RNA, 24 nt, Artificial Sequence
  Synthetic
cuuuaaugcugcaggcuuacugcu

SEQ ID NO: 649114 - RNA, 18 nt, Artificial Sequence
  Synthetic
caauguuuuuuuacugcu

SEQ ID NO: 649115 - RNA, 19 nt, Artificial Sequence
  Synthetic
acaauguuuuuuuacugcu

SEQ ID NO: 649116 - RNA, 20 nt, Artificial Sequence
  Synthetic
gacaauguuuuuuuacugcu

SEQ ID NO: 649117 - RNA, 21 nt, Artificial Sequence
  Synthetic
agacaauguuuuuuuacugcu

SEQ ID NO: 649118 - RNA, 22 nt, Artificial Sequence
  Synthetic
aagacaauguuuuuuuacugcu

SEQ ID NO: 649119 - RNA, 23 nt, Artificial Sequence
  Synthetic
aaagacaauguuuuuuuacugcu

SEQ ID NO: 649120 - RNA, 24 nt, Artificial Sequence
  Synthetic
aaaagacaauguuuuuuuacugcu

SEQ ID NO: 649121 - RNA, 18 nt, Artificial Sequence
  Synthetic
ugugcuuaaaaaccugcu

SEQ ID NO: 649122 - RNA, 19 nt, Artificial Sequence
  Synthetic
gugugcuuaaaaaccugcu

SEQ ID NO: 649123 - RNA, 20 nt, Artificial Sequence
  Synthetic
agugugcuuaaaaaccugcu

SEQ ID NO: 649124 - RNA, 21 nt, Artificial Sequence
  Synthetic
gagugugcuuaaaaaccugcu

SEQ ID NO: 649125 - RNA, 22 nt, Artificial Sequence
  Synthetic
agagugugcuuaaaaaccugcu

SEQ ID NO: 649126 - RNA, 23 nt, Artificial Sequence
  Synthetic
aagagugugcuuaaaaaccugcu

SEQ ID NO: 649127 - RNA, 24 nt, Artificial Sequence
  Synthetic
gaagagugugcuuaaaaaccugcu

SEQ ID NO: 649128 - RNA, 18 nt, Artificial Sequence
  Synthetic
guguaauucacaccugcu

SEQ ID NO: 649129 - RNA, 19 nt, Artificial Sequence
  Synthetic
uguguaauucacaccugcu

SEQ ID NO: 649130 - RNA, 20 nt, Artificial Sequence
  Synthetic
cuguguaauucacaccugcu

SEQ ID NO: 649131 - RNA, 21 nt, Artificial Sequence
  Synthetic
acuguguaauucacaccugcu

SEQ ID NO: 649132 - RNA, 22 nt, Artificial Sequence
  Synthetic
aacuguguaauucacaccugcu

SEQ ID NO: 649133 - RNA, 23 nt, Artificial Sequence
  Synthetic
aaacuguguaauucacaccugcu

SEQ ID NO: 649134 - RNA, 24 nt, Artificial Sequence
  Synthetic
uaaacuguguaauucacaccugcu

SEQ ID NO: 649135 - RNA, 18 nt, Artificial Sequence
  Synthetic
ugucugucaaccccugcu

SEQ ID NO: 649136 - RNA, 19 nt, Artificial Sequence
  Synthetic
gugucugucaaccccugcu

SEQ ID NO: 649137 - RNA, 20 nt, Artificial Sequence
  Synthetic
ggugucugucaaccccugcu

SEQ ID NO: 649138 - RNA, 21 nt, Artificial Sequence
  Synthetic
gggugucugucaaccccugcu

SEQ ID NO: 649139 - RNA, 22 nt, Artificial Sequence
  Synthetic
agggugucugucaaccccugcu

SEQ ID NO: 649140 - RNA, 23 nt, Artificial Sequence
  Synthetic
gagggugucugucaaccccugcu

SEQ ID NO: 649141 - RNA, 24 nt, Artificial Sequence
  Synthetic
ugagggugucugucaaccccugcu

SEQ ID NO: 649142 - RNA, 18 nt, Artificial Sequence
  Synthetic
gaucacaucaucccugcu

SEQ ID NO: 649143 - RNA, 19 nt, Artificial Sequence
  Synthetic
agaucacaucaucccugcu

SEQ ID NO: 649144 - RNA, 20 nt, Artificial Sequence
  Synthetic
cagaucacaucaucccugcu

SEQ ID NO: 649145 - RNA, 21 nt, Artificial Sequence
  Synthetic
ucagaucacaucaucccugcu

SEQ ID NO: 649146 - RNA, 22 nt, Artificial Sequence
  Synthetic
aucagaucacaucaucccugcu

SEQ ID NO: 649147 - RNA, 23 nt, Artificial Sequence
  Synthetic
aaucagaucacaucaucccugcu

SEQ ID NO: 649148 - RNA, 24 nt, Artificial Sequence
  Synthetic
aaaucagaucacaucaucccugcu

SEQ ID NO: 649149 - RNA, 18 nt, Artificial Sequence
  Synthetic
cacacacuggggccugcu

SEQ ID NO: 649150 - RNA, 19 nt, Artificial Sequence
  Synthetic
ucacacacuggggccugcu

SEQ ID NO: 649151 - RNA, 20 nt, Artificial Sequence
  Synthetic
aucacacacuggggccugcu

SEQ ID NO: 649152 - RNA, 21 nt, Artificial Sequence
  Synthetic
caucacacacuggggccugcu

SEQ ID NO: 649153 - RNA, 22 nt, Artificial Sequence
  Synthetic
acaucacacacuggggccugcu

SEQ ID NO: 649154 - RNA, 23 nt, Artificial Sequence
  Synthetic
aacaucacacacuggggccugcu

SEQ ID NO: 649155 - RNA, 24 nt, Artificial Sequence
  Synthetic
gaacaucacacacuggggccugcu

SEQ ID NO: 649156 - RNA, 18 nt, Artificial Sequence
  Synthetic
gccaagaauauuccugcu

SEQ ID NO: 649157 - RNA, 19 nt, Artificial Sequence
  Synthetic
ugccaagaauauuccugcu

SEQ ID NO: 649158 - RNA, 20 nt, Artificial Sequence
  Synthetic
augccaagaauauuccugcu

SEQ ID NO: 649159 - RNA, 21 nt, Artificial Sequence
  Synthetic
caugccaagaauauuccugcu

SEQ ID NO: 649160 - RNA, 22 nt, Artificial Sequence
  Synthetic
acaugccaagaauauuccugcu

SEQ ID NO: 649161 - RNA, 23 nt, Artificial Sequence
  Synthetic
aacaugccaagaauauuccugcu

SEQ ID NO: 649162 - RNA, 24 nt, Artificial Sequence
  Synthetic
caacaugccaagaauauuccugcu

SEQ ID NO: 649163 - RNA, 18 nt, Artificial Sequence
  Synthetic
ccugugguaccagcugcu

SEQ ID NO: 649164 - RNA, 19 nt, Artificial Sequence
  Synthetic
gccugugguaccagcugcu

SEQ ID NO: 649165 - RNA, 20 nt, Artificial Sequence
  Synthetic
cgccugugguaccagcugcu

SEQ ID NO: 649166 - RNA, 21 nt, Artificial Sequence
  Synthetic
gcgccugugguaccagcugcu

SEQ ID NO: 649167 - RNA, 22 nt, Artificial Sequence
  Synthetic
ggcgccugugguaccagcugcu

SEQ ID NO: 649168 - RNA, 23 nt, Artificial Sequence
  Synthetic
aggcgccugugguaccagcugcu

SEQ ID NO: 649169 - RNA, 24 nt, Artificial Sequence
  Synthetic
caggcgccugugguaccagcugcu

SEQ ID NO: 649170 - RNA, 18 nt, Artificial Sequence
  Synthetic
ccucuaaucccagcugcu

SEQ ID NO: 649171 - RNA, 19 nt, Artificial Sequence
  Synthetic
gccucuaaucccagcugcu

SEQ ID NO: 649172 - RNA, 20 nt, Artificial Sequence
  Synthetic
cgccucuaaucccagcugcu

SEQ ID NO: 649173 - RNA, 21 nt, Artificial Sequence
  Synthetic
gcgccucuaaucccagcugcu

SEQ ID NO: 649174 - RNA, 22 nt, Artificial Sequence
  Synthetic
ggcgccucuaaucccagcugcu

SEQ ID NO: 649175 - RNA, 23 nt, Artificial Sequence
  Synthetic
gggcgccucuaaucccagcugcu

SEQ ID NO: 649176 - RNA, 24 nt, Artificial Sequence
  Synthetic
ugggcgccucuaaucccagcugcu

SEQ ID NO: 649177 - RNA, 19 nt, Artificial Sequence
  Synthetic
gccuguagucccagcugcu

SEQ ID NO: 649178 - RNA, 20 nt, Artificial Sequence
  Synthetic
cgccuguagucccagcugcu

SEQ ID NO: 649179 - RNA, 21 nt, Artificial Sequence
  Synthetic
gcgccuguagucccagcugcu

SEQ ID NO: 649180 - RNA, 22 nt, Artificial Sequence
  Synthetic
ggcgccuguagucccagcugcu

SEQ ID NO: 649181 - RNA, 23 nt, Artificial Sequence
  Synthetic
gggcgccuguagucccagcugcu

SEQ ID NO: 649182 - RNA, 24 nt, Artificial Sequence
  Synthetic
cgggcgccuguagucccagcugcu

SEQ ID NO: 649183 - RNA, 18 nt, Artificial Sequence
  Synthetic
auuucucuuccagcugcu

SEQ ID NO: 649184 - RNA, 19 nt, Artificial Sequence
  Synthetic
cauuucucuuccagcugcu

SEQ ID NO: 649185 - RNA, 20 nt, Artificial Sequence
  Synthetic
ccauuucucuuccagcugcu

SEQ ID NO: 649186 - RNA, 21 nt, Artificial Sequence
  Synthetic
cccauuucucuuccagcugcu

SEQ ID NO: 649187 - RNA, 22 nt, Artificial Sequence
  Synthetic
ccccauuucucuuccagcugcu

SEQ ID NO: 649188 - RNA, 23 nt, Artificial Sequence
  Synthetic
gccccauuucucuuccagcugcu

SEQ ID NO: 649189 - RNA, 24 nt, Artificial Sequence
  Synthetic
ggccccauuucucuuccagcugcu

SEQ ID NO: 649190 - RNA, 18 nt, Artificial Sequence
  Synthetic
aggagaaacauagcugcu

SEQ ID NO: 649191 - RNA, 19 nt, Artificial Sequence
  Synthetic
aaggagaaacauagcugcu

SEQ ID NO: 649192 - RNA, 20 nt, Artificial Sequence
  Synthetic
aaaggagaaacauagcugcu

SEQ ID NO: 649193 - RNA, 21 nt, Artificial Sequence
  Synthetic
gaaaggagaaacauagcugcu

SEQ ID NO: 649194 - RNA, 22 nt, Artificial Sequence
  Synthetic
agaaaggagaaacauagcugcu

SEQ ID NO: 649195 - RNA, 23 nt, Artificial Sequence
  Synthetic
aagaaaggagaaacauagcugcu

SEQ ID NO: 649196 - RNA, 24 nt, Artificial Sequence
  Synthetic
gaagaaaggagaaacauagcugcu

SEQ ID NO: 649197 - RNA, 18 nt, Artificial Sequence
  Synthetic
uucaacagguuagcugcu

SEQ ID NO: 649198 - RNA, 19 nt, Artificial Sequence
  Synthetic
uuucaacagguuagcugcu

SEQ ID NO: 649199 - RNA, 20 nt, Artificial Sequence
  Synthetic
auuucaacagguuagcugcu

SEQ ID NO: 649200 - RNA, 21 nt, Artificial Sequence
  Synthetic
uauuucaacagguuagcugcu

SEQ ID NO: 649201 - RNA, 22 nt, Artificial Sequence
  Synthetic
uuauuucaacagguuagcugcu

SEQ ID NO: 649202 - RNA, 23 nt, Artificial Sequence
  Synthetic
uuuauuucaacagguuagcugcu

SEQ ID NO: 649203 - RNA, 24 nt, Artificial Sequence
  Synthetic
uuuuauuucaacagguuagcugcu

SEQ ID NO: 649204 - RNA, 18 nt, Artificial Sequence
  Synthetic
cuaaucuaugacgcugcu

SEQ ID NO: 649205 - RNA, 19 nt, Artificial Sequence
  Synthetic
gcuaaucuaugacgcugcu

SEQ ID NO: 649206 - RNA, 20 nt, Artificial Sequence
  Synthetic
ugcuaaucuaugacgcugcu

SEQ ID NO: 649207 - RNA, 21 nt, Artificial Sequence
  Synthetic
cugcuaaucuaugacgcugcu

SEQ ID NO: 649208 - RNA, 22 nt, Artificial Sequence
  Synthetic
ucugcuaaucuaugacgcugcu

SEQ ID NO: 649209 - RNA, 23 nt, Artificial Sequence
  Synthetic
uucugcuaaucuaugacgcugcu

SEQ ID NO: 649210 - RNA, 24 nt, Artificial Sequence
  Synthetic
uuucugcuaaucuaugacgcugcu

SEQ ID NO: 649211 - RNA, 18 nt, Artificial Sequence
  Synthetic
auuauaaauaaugcugcu

SEQ ID NO: 649212 - RNA, 19 nt, Artificial Sequence
  Synthetic
uauuauaaauaaugcugcu

SEQ ID NO: 649213 - RNA, 20 nt, Artificial Sequence
  Synthetic
cuauuauaaauaaugcugcu

SEQ ID NO: 649214 - RNA, 21 nt, Artificial Sequence
  Synthetic
gcuauuauaaauaaugcugcu

SEQ ID NO: 649215 - RNA, 22 nt, Artificial Sequence
  Synthetic
ggcuauuauaaauaaugcugcu

SEQ ID NO: 649216 - RNA, 23 nt, Artificial Sequence
  Synthetic
uggcuauuauaaauaaugcugcu

SEQ ID NO: 649217 - RNA, 24 nt, Artificial Sequence
  Synthetic
uuggcuauuauaaauaaugcugcu

SEQ ID NO: 649218 - RNA, 18 nt, Artificial Sequence
  Synthetic
guccguucucaugcugcu

SEQ ID NO: 649219 - RNA, 19 nt, Artificial Sequence
  Synthetic
aguccguucucaugcugcu

SEQ ID NO: 649220 - RNA, 20 nt, Artificial Sequence
  Synthetic
uaguccguucucaugcugcu

SEQ ID NO: 649221 - RNA, 21 nt, Artificial Sequence
  Synthetic
uuaguccguucucaugcugcu

SEQ ID NO: 649222 - RNA, 22 nt, Artificial Sequence
  Synthetic
auuaguccguucucaugcugcu

SEQ ID NO: 649223 - RNA, 23 nt, Artificial Sequence
  Synthetic
uauuaguccguucucaugcugcu

SEQ ID NO: 649224 - RNA, 24 nt, Artificial Sequence
  Synthetic
guauuaguccguucucaugcugcu

SEQ ID NO: 649225 - RNA, 18 nt, Artificial Sequence
  Synthetic
gucuguucucaugcugcu

SEQ ID NO: 649226 - RNA, 19 nt, Artificial Sequence
  Synthetic
agucuguucucaugcugcu

SEQ ID NO: 649227 - RNA, 20 nt, Artificial Sequence
  Synthetic
uagucuguucucaugcugcu

SEQ ID NO: 649228 - RNA, 21 nt, Artificial Sequence
  Synthetic
uuagucuguucucaugcugcu

SEQ ID NO: 649229 - RNA, 22 nt, Artificial Sequence
  Synthetic
auuagucuguucucaugcugcu

SEQ ID NO: 649230 - RNA, 23 nt, Artificial Sequence
  Synthetic
uauuagucuguucucaugcugcu

SEQ ID NO: 649231 - RNA, 24 nt, Artificial Sequence
  Synthetic
guauuagucuguucucaugcugcu

SEQ ID NO: 649232 - RNA, 18 nt, Artificial Sequence
  Synthetic
cuugucuuugaugcugcu

SEQ ID NO: 649233 - RNA, 19 nt, Artificial Sequence
  Synthetic
gcuugucuuugaugcugcu

SEQ ID NO: 649234 - RNA, 20 nt, Artificial Sequence
  Synthetic
ugcuugucuuugaugcugcu

SEQ ID NO: 649235 - RNA, 21 nt, Artificial Sequence
  Synthetic
augcuugucuuugaugcugcu

SEQ ID NO: 649236 - RNA, 22 nt, Artificial Sequence
  Synthetic
caugcuugucuuugaugcugcu

SEQ ID NO: 649237 - RNA, 23 nt, Artificial Sequence
  Synthetic
ccaugcuugucuuugaugcugcu

SEQ ID NO: 649238 - RNA, 24 nt, Artificial Sequence
  Synthetic
accaugcuugucuuugaugcugcu

SEQ ID NO: 649239 - RNA, 18 nt, Artificial Sequence
  Synthetic
acaguaaaauaugcugcu

SEQ ID NO: 649240 - RNA, 19 nt, Artificial Sequence
  Synthetic
uacaguaaaauaugcugcu

SEQ ID NO: 649241 - RNA, 20 nt, Artificial Sequence
  Synthetic
cuacaguaaaauaugcugcu

SEQ ID NO: 649242 - RNA, 21 nt, Artificial Sequence
  Synthetic
ucuacaguaaaauaugcugcu

SEQ ID NO: 649243 - RNA, 22 nt, Artificial Sequence
  Synthetic
cucuacaguaaaauaugcugcu

SEQ ID NO: 649244 - RNA, 23 nt, Artificial Sequence
  Synthetic
ucucuacaguaaaauaugcugcu

SEQ ID NO: 649245 - RNA, 24 nt, Artificial Sequence
  Synthetic
uucucuacaguaaaauaugcugcu

SEQ ID NO: 649246 - RNA, 18 nt, Artificial Sequence
  Synthetic
augguuugaacugcugcu

SEQ ID NO: 649247 - RNA, 19 nt, Artificial Sequence
  Synthetic
caugguuugaacugcugcu

SEQ ID NO: 649248 - RNA, 20 nt, Artificial Sequence
  Synthetic
ccaugguuugaacugcugcu

SEQ ID NO: 649249 - RNA, 21 nt, Artificial Sequence
  Synthetic
uccaugguuugaacugcugcu

SEQ ID NO: 649250 - RNA, 22 nt, Artificial Sequence
  Synthetic
uuccaugguuugaacugcugcu

SEQ ID NO: 649251 - RNA, 23 nt, Artificial Sequence
  Synthetic
guuccaugguuugaacugcugcu

SEQ ID NO: 649252 - RNA, 24 nt, Artificial Sequence
  Synthetic
aguuccaugguuugaacugcugcu

SEQ ID NO: 649253 - RNA, 18 nt, Artificial Sequence
  Synthetic
uaugaaaacagugcugcu

SEQ ID NO: 649254 - RNA, 19 nt, Artificial Sequence
  Synthetic
uuaugaaaacagugcugcu

SEQ ID NO: 649255 - RNA, 20 nt, Artificial Sequence
  Synthetic
auuaugaaaacagugcugcu

SEQ ID NO: 649256 - RNA, 21 nt, Artificial Sequence
  Synthetic
gauuaugaaaacagugcugcu

SEQ ID NO: 649257 - RNA, 22 nt, Artificial Sequence
  Synthetic
ggauuaugaaaacagugcugcu

SEQ ID NO: 649258 - RNA, 23 nt, Artificial Sequence
  Synthetic
gggauuaugaaaacagugcugcu

SEQ ID NO: 649259 - RNA, 24 nt, Artificial Sequence
  Synthetic
ggggauuaugaaaacagugcugcu

SEQ ID NO: 649260 - RNA, 18 nt, Artificial Sequence
  Synthetic
auaccguagcuugcugcu

SEQ ID NO: 649261 - RNA, 19 nt, Artificial Sequence
  Synthetic
cauaccguagcuugcugcu

SEQ ID NO: 649262 - RNA, 20 nt, Artificial Sequence
  Synthetic
gcauaccguagcuugcugcu

SEQ ID NO: 649263 - RNA, 21 nt, Artificial Sequence
  Synthetic
agcauaccguagcuugcugcu

SEQ ID NO: 649264 - RNA, 22 nt, Artificial Sequence
  Synthetic
uagcauaccguagcuugcugcu

SEQ ID NO: 649265 - RNA, 23 nt, Artificial Sequence
  Synthetic
auagcauaccguagcuugcugcu

SEQ ID NO: 649266 - RNA, 24 nt, Artificial Sequence
  Synthetic
cauagcauaccguagcuugcugcu

SEQ ID NO: 649267 - RNA, 18 nt, Artificial Sequence
  Synthetic
aaacauucacgaucugcu

SEQ ID NO: 649268 - RNA, 19 nt, Artificial Sequence
  Synthetic
caaacauucacgaucugcu

SEQ ID NO: 649269 - RNA, 20 nt, Artificial Sequence
  Synthetic
acaaacauucacgaucugcu

SEQ ID NO: 649270 - RNA, 21 nt, Artificial Sequence
  Synthetic
aacaaacauucacgaucugcu

SEQ ID NO: 649271 - RNA, 22 nt, Artificial Sequence
  Synthetic
caacaaacauucacgaucugcu

SEQ ID NO: 649272 - RNA, 23 nt, Artificial Sequence
  Synthetic
ucaacaaacauucacgaucugcu

SEQ ID NO: 649273 - RNA, 24 nt, Artificial Sequence
  Synthetic
aucaacaaacauucacgaucugcu

SEQ ID NO: 649274 - RNA, 18 nt, Artificial Sequence
  Synthetic
uuucuccuucucucugcu

SEQ ID NO: 649275 - RNA, 19 nt, Artificial Sequence
  Synthetic
auuucuccuucucucugcu

SEQ ID NO: 649276 - RNA, 20 nt, Artificial Sequence
  Synthetic
uauuucuccuucucucugcu

SEQ ID NO: 649277 - RNA, 21 nt, Artificial Sequence
  Synthetic
guauuucuccuucucucugcu

SEQ ID NO: 649278 - RNA, 22 nt, Artificial Sequence
  Synthetic
gguauuucuccuucucucugcu

SEQ ID NO: 649279 - RNA, 23 nt, Artificial Sequence
  Synthetic
ggguauuucuccuucucucugcu

SEQ ID NO: 649280 - RNA, 24 nt, Artificial Sequence
  Synthetic
aggguauuucuccuucucucugcu

SEQ ID NO: 649281 - RNA, 18 nt, Artificial Sequence
  Synthetic
aauugagggaauucugcu

SEQ ID NO: 649282 - RNA, 19 nt, Artificial Sequence
  Synthetic
aaauugagggaauucugcu

SEQ ID NO: 649283 - RNA, 20 nt, Artificial Sequence
  Synthetic
uaaauugagggaauucugcu

SEQ ID NO: 649284 - RNA, 21 nt, Artificial Sequence
  Synthetic
guaaauugagggaauucugcu

SEQ ID NO: 649285 - RNA, 22 nt, Artificial Sequence
  Synthetic
aguaaauugagggaauucugcu

SEQ ID NO: 649286 - RNA, 23 nt, Artificial Sequence
  Synthetic
gaguaaauugagggaauucugcu

SEQ ID NO: 649287 - RNA, 24 nt, Artificial Sequence
  Synthetic
agaguaaauugagggaauucugcu

SEQ ID NO: 649288 - RNA, 18 nt, Artificial Sequence
  Synthetic
aacucuuugcuuucugcu

SEQ ID NO: 649289 - RNA, 19 nt, Artificial Sequence
  Synthetic
aaacucuuugcuuucugcu

SEQ ID NO: 649290 - RNA, 20 nt, Artificial Sequence
  Synthetic
aaaacucuuugcuuucugcu

SEQ ID NO: 649291 - RNA, 21 nt, Artificial Sequence
  Synthetic
caaaacucuuugcuuucugcu

SEQ ID NO: 649292 - RNA, 22 nt, Artificial Sequence
  Synthetic
ucaaaacucuuugcuuucugcu

SEQ ID NO: 649293 - RNA, 23 nt, Artificial Sequence
  Synthetic
uucaaaacucuuugcuuucugcu

SEQ ID NO: 649294 - RNA, 24 nt, Artificial Sequence
  Synthetic
auucaaaacucuuugcuuucugcu

SEQ ID NO: 649295 - RNA, 18 nt, Artificial Sequence
  Synthetic
uccaaaacuguuucugcu

SEQ ID NO: 649296 - RNA, 19 nt, Artificial Sequence
  Synthetic
uuccaaaacuguuucugcu

SEQ ID NO: 649297 - RNA, 20 nt, Artificial Sequence
  Synthetic
uuuccaaaacuguuucugcu

SEQ ID NO: 649298 - RNA, 21 nt, Artificial Sequence
  Synthetic
auuuccaaaacuguuucugcu

SEQ ID NO: 649299 - RNA, 22 nt, Artificial Sequence
  Synthetic
aauuuccaaaacuguuucugcu

SEQ ID NO: 649300 - RNA, 23 nt, Artificial Sequence
  Synthetic
uaauuuccaaaacuguuucugcu

SEQ ID NO: 649301 - RNA, 24 nt, Artificial Sequence
  Synthetic
uuaauuuccaaaacuguuucugcu

SEQ ID NO: 649302 - RNA, 18 nt, Artificial Sequence
  Synthetic
aaguccuaguuuucugcu

SEQ ID NO: 649303 - RNA, 19 nt, Artificial Sequence
  Synthetic
uaaguccuaguuuucugcu

SEQ ID NO: 649304 - RNA, 20 nt, Artificial Sequence
  Synthetic
uuaaguccuaguuuucugcu

SEQ ID NO: 649305 - RNA, 21 nt, Artificial Sequence
  Synthetic
auuaaguccuaguuuucugcu

SEQ ID NO: 649306 - RNA, 22 nt, Artificial Sequence
  Synthetic
uauuaaguccuaguuuucugcu

SEQ ID NO: 649307 - RNA, 23 nt, Artificial Sequence
  Synthetic
cuauuaaguccuaguuuucugcu

SEQ ID NO: 649308 - RNA, 24 nt, Artificial Sequence
  Synthetic
gcuauuaaguccuaguuuucugcu

SEQ ID NO: 649309 - RNA, 18 nt, Artificial Sequence
  Synthetic
auugugggccaaagugcu

SEQ ID NO: 649310 - RNA, 19 nt, Artificial Sequence
  Synthetic
cauugugggccaaagugcu

SEQ ID NO: 649311 - RNA, 20 nt, Artificial Sequence
  Synthetic
ccauugugggccaaagugcu

SEQ ID NO: 649312 - RNA, 21 nt, Artificial Sequence
  Synthetic
accauugugggccaaagugcu

SEQ ID NO: 649313 - RNA, 22 nt, Artificial Sequence
  Synthetic
caccauugugggccaaagugcu

SEQ ID NO: 649314 - RNA, 23 nt, Artificial Sequence
  Synthetic
ucaccauugugggccaaagugcu

SEQ ID NO: 649315 - RNA, 24 nt, Artificial Sequence
  Synthetic
cucaccauugugggccaaagugcu

SEQ ID NO: 649316 - RNA, 18 nt, Artificial Sequence
  Synthetic
cugcaacucuuaagugcu

SEQ ID NO: 649317 - RNA, 19 nt, Artificial Sequence
  Synthetic
ucugcaacucuuaagugcu

SEQ ID NO: 649318 - RNA, 20 nt, Artificial Sequence
  Synthetic
cucugcaacucuuaagugcu

SEQ ID NO: 649319 - RNA, 21 nt, Artificial Sequence
  Synthetic
acucugcaacucuuaagugcu

SEQ ID NO: 649320 - RNA, 22 nt, Artificial Sequence
  Synthetic
cacucugcaacucuuaagugcu

SEQ ID NO: 649321 - RNA, 23 nt, Artificial Sequence
  Synthetic
ucacucugcaacucuuaagugcu

SEQ ID NO: 649322 - RNA, 24 nt, Artificial Sequence
  Synthetic
aucacucugcaacucuuaagugcu

SEQ ID NO: 649323 - RNA, 18 nt, Artificial Sequence
  Synthetic
agauagugguuaagugcu

SEQ ID NO: 649324 - RNA, 19 nt, Artificial Sequence
  Synthetic
uagauagugguuaagugcu

SEQ ID NO: 649325 - RNA, 20 nt, Artificial Sequence
  Synthetic
uuagauagugguuaagugcu

SEQ ID NO: 649326 - RNA, 21 nt, Artificial Sequence
  Synthetic
guuagauagugguuaagugcu

SEQ ID NO: 649327 - RNA, 22 nt, Artificial Sequence
  Synthetic
aguuagauagugguuaagugcu

SEQ ID NO: 649328 - RNA, 23 nt, Artificial Sequence
  Synthetic
caguuagauagugguuaagugcu

SEQ ID NO: 649329 - RNA, 24 nt, Artificial Sequence
  Synthetic
ucaguuagauagugguuaagugcu

SEQ ID NO: 649330 - RNA, 18 nt, Artificial Sequence
  Synthetic
uacagcaaaaacagugcu

SEQ ID NO: 649331 - RNA, 19 nt, Artificial Sequence
  Synthetic
auacagcaaaaacagugcu

SEQ ID NO: 649332 - RNA, 20 nt, Artificial Sequence
  Synthetic
gauacagcaaaaacagugcu

SEQ ID NO: 649333 - RNA, 21 nt, Artificial Sequence
  Synthetic
agauacagcaaaaacagugcu

SEQ ID NO: 649334 - RNA, 22 nt, Artificial Sequence
  Synthetic
gagauacagcaaaaacagugcu

SEQ ID NO: 649335 - RNA, 23 nt, Artificial Sequence
  Synthetic
ugagauacagcaaaaacagugcu

SEQ ID NO: 649336 - RNA, 24 nt, Artificial Sequence
  Synthetic
cugagauacagcaaaaacagugcu

SEQ ID NO: 649337 - RNA, 18 nt, Artificial Sequence
  Synthetic
gucuggaauuccagugcu

SEQ ID NO: 649338 - RNA, 19 nt, Artificial Sequence
  Synthetic
cgucuggaauuccagugcu

SEQ ID NO: 649339 - RNA, 20 nt, Artificial Sequence
  Synthetic
acgucuggaauuccagugcu

SEQ ID NO: 649340 - RNA, 21 nt, Artificial Sequence
  Synthetic
cacgucuggaauuccagugcu

SEQ ID NO: 649341 - RNA, 22 nt, Artificial Sequence
  Synthetic
ucacgucuggaauuccagugcu

SEQ ID NO: 649342 - RNA, 23 nt, Artificial Sequence
  Synthetic
cucacgucuggaauuccagugcu

SEQ ID NO: 649343 - RNA, 24 nt, Artificial Sequence
  Synthetic
gcucacgucuggaauuccagugcu

SEQ ID NO: 649344 - RNA, 18 nt, Artificial Sequence
  Synthetic
cacagcaaaagcagugcu

SEQ ID NO: 649345 - RNA, 19 nt, Artificial Sequence
  Synthetic
ccacagcaaaagcagugcu

SEQ ID NO: 649346 - RNA, 20 nt, Artificial Sequence
  Synthetic
accacagcaaaagcagugcu

SEQ ID NO: 649347 - RNA, 21 nt, Artificial Sequence
  Synthetic
gaccacagcaaaagcagugcu

SEQ ID NO: 649348 - RNA, 22 nt, Artificial Sequence
  Synthetic
ugaccacagcaaaagcagugcu

SEQ ID NO: 649349 - RNA, 23 nt, Artificial Sequence
  Synthetic
uugaccacagcaaaagcagugcu

SEQ ID NO: 649350 - RNA, 24 nt, Artificial Sequence
  Synthetic
guugaccacagcaaaagcagugcu

SEQ ID NO: 649351 - RNA, 18 nt, Artificial Sequence
  Synthetic
gguagcaaaagcagugcu

SEQ ID NO: 649352 - RNA, 19 nt, Artificial Sequence
  Synthetic
ggguagcaaaagcagugcu

SEQ ID NO: 649353 - RNA, 20 nt, Artificial Sequence
  Synthetic
gggguagcaaaagcagugcu

SEQ ID NO: 649354 - RNA, 21 nt, Artificial Sequence
  Synthetic
ggggguagcaaaagcagugcu

SEQ ID NO: 649355 - RNA, 22 nt, Artificial Sequence
  Synthetic
uggggguagcaaaagcagugcu

SEQ ID NO: 649356 - RNA, 23 nt, Artificial Sequence
  Synthetic
cuggggguagcaaaagcagugcu

SEQ ID NO: 649357 - RNA, 24 nt, Artificial Sequence
  Synthetic
ucuggggguagcaaaagcagugcu

SEQ ID NO: 649358 - RNA, 18 nt, Artificial Sequence
  Synthetic
agcuaguugagcagugcu

SEQ ID NO: 649359 - RNA, 19 nt, Artificial Sequence
  Synthetic
aagcuaguugagcagugcu

SEQ ID NO: 649360 - RNA, 20 nt, Artificial Sequence
  Synthetic
caagcuaguugagcagugcu

SEQ ID NO: 649361 - RNA, 21 nt, Artificial Sequence
  Synthetic
gcaagcuaguugagcagugcu

SEQ ID NO: 649362 - RNA, 22 nt, Artificial Sequence
  Synthetic
agcaagcuaguugagcagugcu

SEQ ID NO: 649363 - RNA, 23 nt, Artificial Sequence
  Synthetic
cagcaagcuaguugagcagugcu

SEQ ID NO: 649364 - RNA, 24 nt, Artificial Sequence
  Synthetic
gcagcaagcuaguugagcagugcu

SEQ ID NO: 649365 - RNA, 18 nt, Artificial Sequence
  Synthetic
aggaaguagggcagugcu

SEQ ID NO: 649366 - RNA, 19 nt, Artificial Sequence
  Synthetic
aaggaaguagggcagugcu

SEQ ID NO: 649367 - RNA, 20 nt, Artificial Sequence
  Synthetic
gaaggaaguagggcagugcu

SEQ ID NO: 649368 - RNA, 21 nt, Artificial Sequence
  Synthetic
agaaggaaguagggcagugcu

SEQ ID NO: 649369 - RNA, 22 nt, Artificial Sequence
  Synthetic
gagaaggaaguagggcagugcu

SEQ ID NO: 649370 - RNA, 23 nt, Artificial Sequence
  Synthetic
ggagaaggaaguagggcagugcu

SEQ ID NO: 649371 - RNA, 24 nt, Artificial Sequence
  Synthetic
gggagaaggaaguagggcagugcu

SEQ ID NO: 649372 - RNA, 18 nt, Artificial Sequence
  Synthetic
uauuucuggggcagugcu

SEQ ID NO: 649373 - RNA, 19 nt, Artificial Sequence
  Synthetic
uuauuucuggggcagugcu

SEQ ID NO: 649374 - RNA, 20 nt, Artificial Sequence
  Synthetic
guuauuucuggggcagugcu

SEQ ID NO: 649375 - RNA, 21 nt, Artificial Sequence
  Synthetic
aguuauuucuggggcagugcu

SEQ ID NO: 649376 - RNA, 22 nt, Artificial Sequence
  Synthetic
aaguuauuucuggggcagugcu

SEQ ID NO: 649377 - RNA, 23 nt, Artificial Sequence
  Synthetic
gaaguuauuucuggggcagugcu

SEQ ID NO: 649378 - RNA, 24 nt, Artificial Sequence
  Synthetic
agaaguuauuucuggggcagugcu

SEQ ID NO: 649379 - RNA, 18 nt, Artificial Sequence
  Synthetic
gaggaaggaaugagugcu

SEQ ID NO: 649380 - RNA, 19 nt, Artificial Sequence
  Synthetic
agaggaaggaaugagugcu

SEQ ID NO: 649381 - RNA, 20 nt, Artificial Sequence
  Synthetic
aagaggaaggaaugagugcu

SEQ ID NO: 649382 - RNA, 21 nt, Artificial Sequence
  Synthetic
aaagaggaaggaaugagugcu

SEQ ID NO: 649383 - RNA, 22 nt, Artificial Sequence
  Synthetic
gaaagaggaaggaaugagugcu

SEQ ID NO: 649384 - RNA, 23 nt, Artificial Sequence
  Synthetic
agaaagaggaaggaaugagugcu

SEQ ID NO: 649385 - RNA, 24 nt, Artificial Sequence
  Synthetic
aagaaagaggaaggaaugagugcu

SEQ ID NO: 649386 - RNA, 18 nt, Artificial Sequence
  Synthetic
auaggaaggcugagugcu

SEQ ID NO: 649387 - RNA, 19 nt, Artificial Sequence
  Synthetic
uauaggaaggcugagugcu

SEQ ID NO: 649388 - RNA, 20 nt, Artificial Sequence
  Synthetic
uuauaggaaggcugagugcu

SEQ ID NO: 649389 - RNA, 21 nt, Artificial Sequence
  Synthetic
uuuauaggaaggcugagugcu

SEQ ID NO: 649390 - RNA, 22 nt, Artificial Sequence
  Synthetic
guuuauaggaaggcugagugcu

SEQ ID NO: 649391 - RNA, 23 nt, Artificial Sequence
  Synthetic
gguuuauaggaaggcugagugcu

SEQ ID NO: 649392 - RNA, 24 nt, Artificial Sequence
  Synthetic
ugguuuauaggaaggcugagugcu

SEQ ID NO: 649393 - RNA, 18 nt, Artificial Sequence
  Synthetic
aacaaggaaacuagugcu

SEQ ID NO: 649394 - RNA, 19 nt, Artificial Sequence
  Synthetic
caacaaggaaacuagugcu

SEQ ID NO: 649395 - RNA, 20 nt, Artificial Sequence
  Synthetic
ucaacaaggaaacuagugcu

SEQ ID NO: 649396 - RNA, 21 nt, Artificial Sequence
  Synthetic
aucaacaaggaaacuagugcu

SEQ ID NO: 649397 - RNA, 22 nt, Artificial Sequence
  Synthetic
uaucaacaaggaaacuagugcu

SEQ ID NO: 649398 - RNA, 23 nt, Artificial Sequence
  Synthetic
cuaucaacaaggaaacuagugcu

SEQ ID NO: 649399 - RNA, 24 nt, Artificial Sequence
  Synthetic
ucuaucaacaaggaaacuagugcu

SEQ ID NO: 649400 - RNA, 18 nt, Artificial Sequence
  Synthetic
gccuguaauccuagugcu

SEQ ID NO: 649401 - RNA, 19 nt, Artificial Sequence
  Synthetic
ugccuguaauccuagugcu

SEQ ID NO: 649402 - RNA, 20 nt, Artificial Sequence
  Synthetic
augccuguaauccuagugcu

SEQ ID NO: 649403 - RNA, 21 nt, Artificial Sequence
  Synthetic
caugccuguaauccuagugcu

SEQ ID NO: 649404 - RNA, 22 nt, Artificial Sequence
  Synthetic
ucaugccuguaauccuagugcu

SEQ ID NO: 649405 - RNA, 23 nt, Artificial Sequence
  Synthetic
cucaugccuguaauccuagugcu

SEQ ID NO: 649406 - RNA, 24 nt, Artificial Sequence
  Synthetic
acucaugccuguaauccuagugcu

SEQ ID NO: 649407 - RNA, 18 nt, Artificial Sequence
  Synthetic
gaagcuguauaacgugcu

SEQ ID NO: 649408 - RNA, 19 nt, Artificial Sequence
  Synthetic
ugaagcuguauaacgugcu

SEQ ID NO: 649409 - RNA, 20 nt, Artificial Sequence
  Synthetic
augaagcuguauaacgugcu

SEQ ID NO: 649410 - RNA, 21 nt, Artificial Sequence
  Synthetic
caugaagcuguauaacgugcu

SEQ ID NO: 649411 - RNA, 22 nt, Artificial Sequence
  Synthetic
acaugaagcuguauaacgugcu

SEQ ID NO: 649412 - RNA, 23 nt, Artificial Sequence
  Synthetic
gacaugaagcuguauaacgugcu

SEQ ID NO: 649413 - RNA, 24 nt, Artificial Sequence
  Synthetic
ugacaugaagcuguauaacgugcu

SEQ ID NO: 649414 - RNA, 18 nt, Artificial Sequence
  Synthetic
aagagaaauuaaggugcu

SEQ ID NO: 649415 - RNA, 19 nt, Artificial Sequence
  Synthetic
aaagagaaauuaaggugcu

SEQ ID NO: 649416 - RNA, 20 nt, Artificial Sequence
  Synthetic
aaaagagaaauuaaggugcu

SEQ ID NO: 649417 - RNA, 21 nt, Artificial Sequence
  Synthetic
uaaaagagaaauuaaggugcu

SEQ ID NO: 649418 - RNA, 22 nt, Artificial Sequence
  Synthetic
guaaaagagaaauuaaggugcu

SEQ ID NO: 649419 - RNA, 23 nt, Artificial Sequence
  Synthetic
aguaaaagagaaauuaaggugcu

SEQ ID NO: 649420 - RNA, 24 nt, Artificial Sequence
  Synthetic
uaguaaaagagaaauuaaggugcu

SEQ ID NO: 649421 - RNA, 18 nt, Artificial Sequence
  Synthetic
gaaucuuaaacaggugcu

SEQ ID NO: 649422 - RNA, 19 nt, Artificial Sequence
  Synthetic
agaaucuuaaacaggugcu

SEQ ID NO: 649423 - RNA, 20 nt, Artificial Sequence
  Synthetic
aagaaucuuaaacaggugcu

SEQ ID NO: 649424 - RNA, 21 nt, Artificial Sequence
  Synthetic
aaagaaucuuaaacaggugcu

SEQ ID NO: 649425 - RNA, 22 nt, Artificial Sequence
  Synthetic
gaaagaaucuuaaacaggugcu

SEQ ID NO: 649426 - RNA, 23 nt, Artificial Sequence
  Synthetic
ggaaagaaucuuaaacaggugcu

SEQ ID NO: 649427 - RNA, 24 nt, Artificial Sequence
  Synthetic
aggaaagaaucuuaaacaggugcu

SEQ ID NO: 649428 - RNA, 18 nt, Artificial Sequence
  Synthetic
gccuguaauccaggugcu

SEQ ID NO: 649429 - RNA, 19 nt, Artificial Sequence
  Synthetic
ugccuguaauccaggugcu

SEQ ID NO: 649430 - RNA, 20 nt, Artificial Sequence
  Synthetic
augccuguaauccaggugcu

SEQ ID NO: 649431 - RNA, 21 nt, Artificial Sequence
  Synthetic
caugccuguaauccaggugcu

SEQ ID NO: 649432 - RNA, 22 nt, Artificial Sequence
  Synthetic
ucaugccuguaauccaggugcu

SEQ ID NO: 649433 - RNA, 23 nt, Artificial Sequence
  Synthetic
cucaugccuguaauccaggugcu

SEQ ID NO: 649434 - RNA, 24 nt, Artificial Sequence
  Synthetic
gcucaugccuguaauccaggugcu

SEQ ID NO: 649435 - RNA, 18 nt, Artificial Sequence
  Synthetic
cuaaaaagaggaggugcu

SEQ ID NO: 649436 - RNA, 19 nt, Artificial Sequence
  Synthetic
ccuaaaaagaggaggugcu

SEQ ID NO: 649437 - RNA, 20 nt, Artificial Sequence
  Synthetic
gccuaaaaagaggaggugcu

SEQ ID NO: 649438 - RNA, 21 nt, Artificial Sequence
  Synthetic
agccuaaaaagaggaggugcu

SEQ ID NO: 649439 - RNA, 22 nt, Artificial Sequence
  Synthetic
cagccuaaaaagaggaggugcu

SEQ ID NO: 649440 - RNA, 23 nt, Artificial Sequence
  Synthetic
acagccuaaaaagaggaggugcu

SEQ ID NO: 649441 - RNA, 24 nt, Artificial Sequence
  Synthetic
aacagccuaaaaagaggaggugcu

SEQ ID NO: 649442 - RNA, 18 nt, Artificial Sequence
  Synthetic
agaaauagguuaggugcu

SEQ ID NO: 649443 - RNA, 19 nt, Artificial Sequence
  Synthetic
cagaaauagguuaggugcu

SEQ ID NO: 649444 - RNA, 20 nt, Artificial Sequence
  Synthetic
ucagaaauagguuaggugcu

SEQ ID NO: 649445 - RNA, 21 nt, Artificial Sequence
  Synthetic
cucagaaauagguuaggugcu

SEQ ID NO: 649446 - RNA, 22 nt, Artificial Sequence
  Synthetic
acucagaaauagguuaggugcu

SEQ ID NO: 649447 - RNA, 23 nt, Artificial Sequence
  Synthetic
cacucagaaauagguuaggugcu

SEQ ID NO: 649448 - RNA, 24 nt, Artificial Sequence
  Synthetic
ucacucagaaauagguuaggugcu

SEQ ID NO: 649449 - RNA, 18 nt, Artificial Sequence
  Synthetic
uauuuaauaaacggugcu

SEQ ID NO: 649450 - RNA, 19 nt, Artificial Sequence
  Synthetic
cuauuuaauaaacggugcu

SEQ ID NO: 649451 - RNA, 20 nt, Artificial Sequence
  Synthetic
ccuauuuaauaaacggugcu

SEQ ID NO: 649452 - RNA, 21 nt, Artificial Sequence
  Synthetic
cccuauuuaauaaacggugcu

SEQ ID NO: 649453 - RNA, 22 nt, Artificial Sequence
  Synthetic
ucccuauuuaauaaacggugcu

SEQ ID NO: 649454 - RNA, 23 nt, Artificial Sequence
  Synthetic
uucccuauuuaauaaacggugcu

SEQ ID NO: 649455 - RNA, 24 nt, Artificial Sequence
  Synthetic
auucccuauuuaauaaacggugcu

SEQ ID NO: 649456 - RNA, 18 nt, Artificial Sequence
  Synthetic
aaauuaauccugggugcu

SEQ ID NO: 649457 - RNA, 19 nt, Artificial Sequence
  Synthetic
aaaauuaauccugggugcu

SEQ ID NO: 649458 - RNA, 20 nt, Artificial Sequence
  Synthetic
caaaauuaauccugggugcu

SEQ ID NO: 649459 - RNA, 21 nt, Artificial Sequence
  Synthetic
ucaaaauuaauccugggugcu

SEQ ID NO: 649460 - RNA, 22 nt, Artificial Sequence
  Synthetic
cucaaaauuaauccugggugcu

SEQ ID NO: 649461 - RNA, 23 nt, Artificial Sequence
  Synthetic
ucucaaaauuaauccugggugcu

SEQ ID NO: 649462 - RNA, 24 nt, Artificial Sequence
  Synthetic
uucucaaaauuaauccugggugcu

SEQ ID NO: 649463 - RNA, 21 nt, Artificial Sequence
  Synthetic
cccuauuuaauaaauggugcu

SEQ ID NO: 649464 - RNA, 22 nt, Artificial Sequence
  Synthetic
ucccuauuuaauaaauggugcu

SEQ ID NO: 649465 - RNA, 23 nt, Artificial Sequence
  Synthetic
uucccuauuuaauaaauggugcu

SEQ ID NO: 649466 - RNA, 24 nt, Artificial Sequence
  Synthetic
auucccuauuuaauaaauggugcu

SEQ ID NO: 649467 - RNA, 18 nt, Artificial Sequence
  Synthetic
ucuucaaccaauggugcu

SEQ ID NO: 649468 - RNA, 19 nt, Artificial Sequence
  Synthetic
cucuucaaccaauggugcu

SEQ ID NO: 649469 - RNA, 20 nt, Artificial Sequence
  Synthetic
ccucuucaaccaauggugcu

SEQ ID NO: 649470 - RNA, 21 nt, Artificial Sequence
  Synthetic
uccucuucaaccaauggugcu

SEQ ID NO: 649471 - RNA, 22 nt, Artificial Sequence
  Synthetic
auccucuucaaccaauggugcu

SEQ ID NO: 649472 - RNA, 23 nt, Artificial Sequence
  Synthetic
uauccucuucaaccaauggugcu

SEQ ID NO: 649473 - RNA, 24 nt, Artificial Sequence
  Synthetic
auauccucuucaaccaauggugcu

SEQ ID NO: 649474 - RNA, 18 nt, Artificial Sequence
  Synthetic
ggaaauaauaauggugcu

SEQ ID NO: 649475 - RNA, 19 nt, Artificial Sequence
  Synthetic
aggaaauaauaauggugcu

SEQ ID NO: 649476 - RNA, 20 nt, Artificial Sequence
  Synthetic
caggaaauaauaauggugcu

SEQ ID NO: 649477 - RNA, 21 nt, Artificial Sequence
  Synthetic
gcaggaaauaauaauggugcu

SEQ ID NO: 649478 - RNA, 22 nt, Artificial Sequence
  Synthetic
ugcaggaaauaauaauggugcu

SEQ ID NO: 649479 - RNA, 23 nt, Artificial Sequence
  Synthetic
augcaggaaauaauaauggugcu

SEQ ID NO: 649480 - RNA, 24 nt, Artificial Sequence
  Synthetic
uaugcaggaaauaauaauggugcu

SEQ ID NO: 649481 - RNA, 18 nt, Artificial Sequence
  Synthetic
uaucuaucuucuggugcu

SEQ ID NO: 649482 - RNA, 19 nt, Artificial Sequence
  Synthetic
uuaucuaucuucuggugcu

SEQ ID NO: 649483 - RNA, 20 nt, Artificial Sequence
  Synthetic
cuuaucuaucuucuggugcu

SEQ ID NO: 649484 - RNA, 21 nt, Artificial Sequence
  Synthetic
ucuuaucuaucuucuggugcu

SEQ ID NO: 649485 - RNA, 22 nt, Artificial Sequence
  Synthetic
aucuuaucuaucuucuggugcu

SEQ ID NO: 649486 - RNA, 23 nt, Artificial Sequence
  Synthetic
uaucuuaucuaucuucuggugcu

SEQ ID NO: 649487 - RNA, 24 nt, Artificial Sequence
  Synthetic
uuaucuuaucuaucuucuggugcu

SEQ ID NO: 649488 - RNA, 18 nt, Artificial Sequence
  Synthetic
ucauaaagugguggugcu

SEQ ID NO: 649489 - RNA, 19 nt, Artificial Sequence
  Synthetic
uucauaaagugguggugcu

SEQ ID NO: 649490 - RNA, 20 nt, Artificial Sequence
  Synthetic
uuucauaaagugguggugcu

SEQ ID NO: 649491 - RNA, 21 nt, Artificial Sequence
  Synthetic
uuuucauaaagugguggugcu

SEQ ID NO: 649492 - RNA, 22 nt, Artificial Sequence
  Synthetic
guuuucauaaagugguggugcu

SEQ ID NO: 649493 - RNA, 23 nt, Artificial Sequence
  Synthetic
uguuuucauaaagugguggugcu

SEQ ID NO: 649494 - RNA, 24 nt, Artificial Sequence
  Synthetic
uuguuuucauaaagugguggugcu

SEQ ID NO: 649495 - RNA, 18 nt, Artificial Sequence
  Synthetic
agaaacucggaaugugcu

SEQ ID NO: 649496 - RNA, 19 nt, Artificial Sequence
  Synthetic
aagaaacucggaaugugcu

SEQ ID NO: 649497 - RNA, 20 nt, Artificial Sequence
  Synthetic
uaagaaacucggaaugugcu

SEQ ID NO: 649498 - RNA, 21 nt, Artificial Sequence
  Synthetic
auaagaaacucggaaugugcu

SEQ ID NO: 649499 - RNA, 22 nt, Artificial Sequence
  Synthetic
gauaagaaacucggaaugugcu

SEQ ID NO: 649500 - RNA, 23 nt, Artificial Sequence
  Synthetic
agauaagaaacucggaaugugcu

SEQ ID NO: 649501 - RNA, 24 nt, Artificial Sequence
  Synthetic
gagauaagaaacucggaaugugcu

SEQ ID NO: 649502 - RNA, 18 nt, Artificial Sequence
  Synthetic
guguucacuagaugugcu

SEQ ID NO: 649503 - RNA, 19 nt, Artificial Sequence
  Synthetic
aguguucacuagaugugcu

SEQ ID NO: 649504 - RNA, 20 nt, Artificial Sequence
  Synthetic
gaguguucacuagaugugcu

SEQ ID NO: 649505 - RNA, 21 nt, Artificial Sequence
  Synthetic
agaguguucacuagaugugcu

SEQ ID NO: 649506 - RNA, 22 nt, Artificial Sequence
  Synthetic
cagaguguucacuagaugugcu

SEQ ID NO: 649507 - RNA, 23 nt, Artificial Sequence
  Synthetic
gcagaguguucacuagaugugcu

SEQ ID NO: 649508 - RNA, 24 nt, Artificial Sequence
  Synthetic
ugcagaguguucacuagaugugcu

SEQ ID NO: 649509 - RNA, 18 nt, Artificial Sequence
  Synthetic
uauaaaauaaacugugcu

SEQ ID NO: 649510 - RNA, 19 nt, Artificial Sequence
  Synthetic
auauaaaauaaacugugcu

SEQ ID NO: 649511 - RNA, 20 nt, Artificial Sequence
  Synthetic
aauauaaaauaaacugugcu

SEQ ID NO: 649512 - RNA, 21 nt, Artificial Sequence
  Synthetic
aaauauaaaauaaacugugcu

SEQ ID NO: 649513 - RNA, 22 nt, Artificial Sequence
  Synthetic
uaaauauaaaauaaacugugcu

SEQ ID NO: 649514 - RNA, 23 nt, Artificial Sequence
  Synthetic
auaaauauaaaauaaacugugcu

SEQ ID NO: 649515 - RNA, 24 nt, Artificial Sequence
  Synthetic
uauaaauauaaaauaaacugugcu

SEQ ID NO: 649516 - RNA, 18 nt, Artificial Sequence
  Synthetic
acugaagguuccugugcu

SEQ ID NO: 649517 - RNA, 19 nt, Artificial Sequence
  Synthetic
cacugaagguuccugugcu

SEQ ID NO: 649518 - RNA, 20 nt, Artificial Sequence
  Synthetic
acacugaagguuccugugcu

SEQ ID NO: 649519 - RNA, 21 nt, Artificial Sequence
  Synthetic
aacacugaagguuccugugcu

SEQ ID NO: 649520 - RNA, 22 nt, Artificial Sequence
  Synthetic
aaacacugaagguuccugugcu

SEQ ID NO: 649521 - RNA, 23 nt, Artificial Sequence
  Synthetic
gaaacacugaagguuccugugcu

SEQ ID NO: 649522 - RNA, 24 nt, Artificial Sequence
  Synthetic
agaaacacugaagguuccugugcu

SEQ ID NO: 649523 - RNA, 18 nt, Artificial Sequence
  Synthetic
gagcucgagugcugugcu

SEQ ID NO: 649524 - RNA, 19 nt, Artificial Sequence
  Synthetic
agagcucgagugcugugcu

SEQ ID NO: 649525 - RNA, 20 nt, Artificial Sequence
  Synthetic
cagagcucgagugcugugcu

SEQ ID NO: 649526 - RNA, 21 nt, Artificial Sequence
  Synthetic
gcagagcucgagugcugugcu

SEQ ID NO: 649527 - RNA, 22 nt, Artificial Sequence
  Synthetic
agcagagcucgagugcugugcu

SEQ ID NO: 649528 - RNA, 23 nt, Artificial Sequence
  Synthetic
uagcagagcucgagugcugugcu

SEQ ID NO: 649529 - RNA, 24 nt, Artificial Sequence
  Synthetic
uuagcagagcucgagugcugugcu

SEQ ID NO: 649530 - RNA, 18 nt, Artificial Sequence
  Synthetic
ugccaauaucucugugcu

SEQ ID NO: 649531 - RNA, 19 nt, Artificial Sequence
  Synthetic
uugccaauaucucugugcu

SEQ ID NO: 649532 - RNA, 20 nt, Artificial Sequence
  Synthetic
auugccaauaucucugugcu

SEQ ID NO: 649533 - RNA, 21 nt, Artificial Sequence
  Synthetic
cauugccaauaucucugugcu

SEQ ID NO: 649534 - RNA, 22 nt, Artificial Sequence
  Synthetic
acauugccaauaucucugugcu

SEQ ID NO: 649535 - RNA, 23 nt, Artificial Sequence
  Synthetic
cacauugccaauaucucugugcu

SEQ ID NO: 649536 - RNA, 24 nt, Artificial Sequence
  Synthetic
gcacauugccaauaucucugugcu

SEQ ID NO: 649537 - RNA, 18 nt, Artificial Sequence
  Synthetic
ccaggugaugucugugcu

SEQ ID NO: 649538 - RNA, 19 nt, Artificial Sequence
  Synthetic
cccaggugaugucugugcu

SEQ ID NO: 649539 - RNA, 20 nt, Artificial Sequence
  Synthetic
ucccaggugaugucugugcu

SEQ ID NO: 649540 - RNA, 21 nt, Artificial Sequence
  Synthetic
cucccaggugaugucugugcu

SEQ ID NO: 649541 - RNA, 22 nt, Artificial Sequence
  Synthetic
acucccaggugaugucugugcu

SEQ ID NO: 649542 - RNA, 23 nt, Artificial Sequence
  Synthetic
aacucccaggugaugucugugcu

SEQ ID NO: 649543 - RNA, 24 nt, Artificial Sequence
  Synthetic
caacucccaggugaugucugugcu

SEQ ID NO: 649544 - RNA, 18 nt, Artificial Sequence
  Synthetic
cggggaugguucugugcu

SEQ ID NO: 649545 - RNA, 19 nt, Artificial Sequence
  Synthetic
acggggaugguucugugcu

SEQ ID NO: 649546 - RNA, 20 nt, Artificial Sequence
  Synthetic
cacggggaugguucugugcu

SEQ ID NO: 649547 - RNA, 21 nt, Artificial Sequence
  Synthetic
ucacggggaugguucugugcu

SEQ ID NO: 649548 - RNA, 22 nt, Artificial Sequence
  Synthetic
aucacggggaugguucugugcu

SEQ ID NO: 649549 - RNA, 23 nt, Artificial Sequence
  Synthetic
aaucacggggaugguucugugcu

SEQ ID NO: 649550 - RNA, 24 nt, Artificial Sequence
  Synthetic
gaaucacggggaugguucugugcu

SEQ ID NO: 649551 - RNA, 18 nt, Artificial Sequence
  Synthetic
aguaggaaagugugugcu

SEQ ID NO: 649552 - RNA, 19 nt, Artificial Sequence
  Synthetic
uaguaggaaagugugugcu

SEQ ID NO: 649553 - RNA, 20 nt, Artificial Sequence
  Synthetic
guaguaggaaagugugugcu

SEQ ID NO: 649554 - RNA, 21 nt, Artificial Sequence
  Synthetic
aguaguaggaaagugugugcu

SEQ ID NO: 649555 - RNA, 22 nt, Artificial Sequence
  Synthetic
gaguaguaggaaagugugugcu

SEQ ID NO: 649556 - RNA, 23 nt, Artificial Sequence
  Synthetic
agaguaguaggaaagugugugcu

SEQ ID NO: 649557 - RNA, 24 nt, Artificial Sequence
  Synthetic
uagaguaguaggaaagugugugcu

SEQ ID NO: 649558 - RNA, 18 nt, Artificial Sequence
  Synthetic
uaagauuuggugugugcu

SEQ ID NO: 649559 - RNA, 19 nt, Artificial Sequence
  Synthetic
auaagauuuggugugugcu

SEQ ID NO: 649560 - RNA, 20 nt, Artificial Sequence
  Synthetic
uauaagauuuggugugugcu

SEQ ID NO: 649561 - RNA, 21 nt, Artificial Sequence
  Synthetic
auauaagauuuggugugugcu

SEQ ID NO: 649562 - RNA, 22 nt, Artificial Sequence
  Synthetic
aauauaagauuuggugugugcu

SEQ ID NO: 649563 - RNA, 23 nt, Artificial Sequence
  Synthetic
aaauauaagauuuggugugugcu

SEQ ID NO: 649564 - RNA, 24 nt, Artificial Sequence
  Synthetic
uaaauauaagauuuggugugugcu

SEQ ID NO: 649565 - RNA, 18 nt, Artificial Sequence
  Synthetic
acaaaaaaaaguugugcu

SEQ ID NO: 649566 - RNA, 19 nt, Artificial Sequence
  Synthetic
uacaaaaaaaaguugugcu

SEQ ID NO: 649567 - RNA, 20 nt, Artificial Sequence
  Synthetic
uuacaaaaaaaaguugugcu

SEQ ID NO: 649568 - RNA, 21 nt, Artificial Sequence
  Synthetic
uuuacaaaaaaaaguugugcu

SEQ ID NO: 649569 - RNA, 22 nt, Artificial Sequence
  Synthetic
cuuuacaaaaaaaaguugugcu

SEQ ID NO: 649570 - RNA, 23 nt, Artificial Sequence
  Synthetic
ccuuuacaaaaaaaaguugugcu

SEQ ID NO: 649571 - RNA, 24 nt, Artificial Sequence
  Synthetic
uccuuuacaaaaaaaaguugugcu

SEQ ID NO: 649572 - RNA, 18 nt, Artificial Sequence
  Synthetic
auuagaaagaguugugcu

SEQ ID NO: 649573 - RNA, 19 nt, Artificial Sequence
  Synthetic
aauuagaaagaguugugcu

SEQ ID NO: 649574 - RNA, 20 nt, Artificial Sequence
  Synthetic
aaauuagaaagaguugugcu

SEQ ID NO: 649575 - RNA, 21 nt, Artificial Sequence
  Synthetic
aaaauuagaaagaguugugcu

SEQ ID NO: 649576 - RNA, 22 nt, Artificial Sequence
  Synthetic
gaaaauuagaaagaguugugcu

SEQ ID NO: 649577 - RNA, 23 nt, Artificial Sequence
  Synthetic
ugaaaauuagaaagaguugugcu

SEQ ID NO: 649578 - RNA, 24 nt, Artificial Sequence
  Synthetic
cugaaaauuagaaagaguugugcu

SEQ ID NO: 649579 - RNA, 18 nt, Artificial Sequence
  Synthetic
guaugucacuuuugugcu

SEQ ID NO: 649580 - RNA, 19 nt, Artificial Sequence
  Synthetic
aguaugucacuuuugugcu

SEQ ID NO: 649581 - RNA, 20 nt, Artificial Sequence
  Synthetic
uaguaugucacuuuugugcu

SEQ ID NO: 649582 - RNA, 21 nt, Artificial Sequence
  Synthetic
guaguaugucacuuuugugcu

SEQ ID NO: 649583 - RNA, 22 nt, Artificial Sequence
  Synthetic
uguaguaugucacuuuugugcu

SEQ ID NO: 649584 - RNA, 23 nt, Artificial Sequence
  Synthetic
auguaguaugucacuuuugugcu

SEQ ID NO: 649585 - RNA, 24 nt, Artificial Sequence
  Synthetic
uauguaguaugucacuuuugugcu

SEQ ID NO: 649586 - RNA, 18 nt, Artificial Sequence
  Synthetic
cagguacuuuuuugugcu

SEQ ID NO: 649587 - RNA, 19 nt, Artificial Sequence
  Synthetic
gcagguacuuuuuugugcu

SEQ ID NO: 649588 - RNA, 20 nt, Artificial Sequence
  Synthetic
agcagguacuuuuuugugcu

SEQ ID NO: 649589 - RNA, 21 nt, Artificial Sequence
  Synthetic
gagcagguacuuuuuugugcu

SEQ ID NO: 649590 - RNA, 22 nt, Artificial Sequence
  Synthetic
agagcagguacuuuuuugugcu

SEQ ID NO: 649591 - RNA, 23 nt, Artificial Sequence
  Synthetic
aagagcagguacuuuuuugugcu

SEQ ID NO: 649592 - RNA, 24 nt, Artificial Sequence
  Synthetic
gaagagcagguacuuuuuugugcu

SEQ ID NO: 649593 - RNA, 18 nt, Artificial Sequence
  Synthetic
uuuuagaugaaaauugcu

SEQ ID NO: 649594 - RNA, 19 nt, Artificial Sequence
  Synthetic
cuuuuagaugaaaauugcu

SEQ ID NO: 649595 - RNA, 20 nt, Artificial Sequence
  Synthetic
acuuuuagaugaaaauugcu

SEQ ID NO: 649596 - RNA, 21 nt, Artificial Sequence
  Synthetic
cacuuuuagaugaaaauugcu

SEQ ID NO: 649597 - RNA, 22 nt, Artificial Sequence
  Synthetic
gcacuuuuagaugaaaauugcu

SEQ ID NO: 649598 - RNA, 23 nt, Artificial Sequence
  Synthetic
agcacuuuuagaugaaaauugcu

SEQ ID NO: 649599 - RNA, 24 nt, Artificial Sequence
  Synthetic
cagcacuuuuagaugaaaauugcu

SEQ ID NO: 649600 - RNA, 18 nt, Artificial Sequence
  Synthetic
augggugugaaaauugcu

SEQ ID NO: 649601 - RNA, 19 nt, Artificial Sequence
  Synthetic
caugggugugaaaauugcu

SEQ ID NO: 649602 - RNA, 20 nt, Artificial Sequence
  Synthetic
ccaugggugugaaaauugcu

SEQ ID NO: 649603 - RNA, 21 nt, Artificial Sequence
  Synthetic
cccaugggugugaaaauugcu

SEQ ID NO: 649604 - RNA, 22 nt, Artificial Sequence
  Synthetic
ucccaugggugugaaaauugcu

SEQ ID NO: 649605 - RNA, 23 nt, Artificial Sequence
  Synthetic
cucccaugggugugaaaauugcu

SEQ ID NO: 649606 - RNA, 24 nt, Artificial Sequence
  Synthetic
acucccaugggugugaaaauugcu

SEQ ID NO: 649607 - RNA, 18 nt, Artificial Sequence
  Synthetic
caaaaucaagcaauugcu

SEQ ID NO: 649608 - RNA, 19 nt, Artificial Sequence
  Synthetic
ucaaaaucaagcaauugcu

SEQ ID NO: 649609 - RNA, 20 nt, Artificial Sequence
  Synthetic
gucaaaaucaagcaauugcu

SEQ ID NO: 649610 - RNA, 21 nt, Artificial Sequence
  Synthetic
ugucaaaaucaagcaauugcu

SEQ ID NO: 649611 - RNA, 22 nt, Artificial Sequence
  Synthetic
gugucaaaaucaagcaauugcu

SEQ ID NO: 649612 - RNA, 23 nt, Artificial Sequence
  Synthetic
agugucaaaaucaagcaauugcu

SEQ ID NO: 649613 - RNA, 24 nt, Artificial Sequence
  Synthetic
aagugucaaaaucaagcaauugcu

SEQ ID NO: 649614 - RNA, 18 nt, Artificial Sequence
  Synthetic
aacguguuaguaauugcu

SEQ ID NO: 649615 - RNA, 19 nt, Artificial Sequence
  Synthetic
caacguguuaguaauugcu

SEQ ID NO: 649616 - RNA, 20 nt, Artificial Sequence
  Synthetic
gcaacguguuaguaauugcu

SEQ ID NO: 649617 - RNA, 21 nt, Artificial Sequence
  Synthetic
ugcaacguguuaguaauugcu

SEQ ID NO: 649618 - RNA, 22 nt, Artificial Sequence
  Synthetic
augcaacguguuaguaauugcu

SEQ ID NO: 649619 - RNA, 23 nt, Artificial Sequence
  Synthetic
aaugcaacguguuaguaauugcu

SEQ ID NO: 649620 - RNA, 24 nt, Artificial Sequence
  Synthetic
uaaugcaacguguuaguaauugcu

SEQ ID NO: 649621 - RNA, 18 nt, Artificial Sequence
  Synthetic
cuaaaacaaaacauugcu

SEQ ID NO: 649622 - RNA, 19 nt, Artificial Sequence
  Synthetic
gcuaaaacaaaacauugcu

SEQ ID NO: 649623 - RNA, 20 nt, Artificial Sequence
  Synthetic
agcuaaaacaaaacauugcu

SEQ ID NO: 649624 - RNA, 21 nt, Artificial Sequence
  Synthetic
cagcuaaaacaaaacauugcu

SEQ ID NO: 649625 - RNA, 22 nt, Artificial Sequence
  Synthetic
ucagcuaaaacaaaacauugcu

SEQ ID NO: 649626 - RNA, 23 nt, Artificial Sequence
  Synthetic
aucagcuaaaacaaaacauugcu

SEQ ID NO: 649627 - RNA, 24 nt, Artificial Sequence
  Synthetic
aaucagcuaaaacaaaacauugcu

SEQ ID NO: 649628 - RNA, 18 nt, Artificial Sequence
  Synthetic
ggaguuuagugcauugcu

SEQ ID NO: 649629 - RNA, 19 nt, Artificial Sequence
  Synthetic
uggaguuuagugcauugcu

SEQ ID NO: 649630 - RNA, 20 nt, Artificial Sequence
  Synthetic
uuggaguuuagugcauugcu

SEQ ID NO: 649631 - RNA, 21 nt, Artificial Sequence
  Synthetic
cuuggaguuuagugcauugcu

SEQ ID NO: 649632 - RNA, 22 nt, Artificial Sequence
  Synthetic
ccuuggaguuuagugcauugcu

SEQ ID NO: 649633 - RNA, 23 nt, Artificial Sequence
  Synthetic
accuuggaguuuagugcauugcu

SEQ ID NO: 649634 - RNA, 24 nt, Artificial Sequence
  Synthetic
uaccuuggaguuuagugcauugcu

SEQ ID NO: 649635 - RNA, 18 nt, Artificial Sequence
  Synthetic
agggauggucagauugcu

SEQ ID NO: 649636 - RNA, 19 nt, Artificial Sequence
  Synthetic
uagggauggucagauugcu

SEQ ID NO: 649637 - RNA, 20 nt, Artificial Sequence
  Synthetic
cuagggauggucagauugcu

SEQ ID NO: 649638 - RNA, 21 nt, Artificial Sequence
  Synthetic
acuagggauggucagauugcu

SEQ ID NO: 649639 - RNA, 22 nt, Artificial Sequence
  Synthetic
gacuagggauggucagauugcu

SEQ ID NO: 649640 - RNA, 23 nt, Artificial Sequence
  Synthetic
agacuagggauggucagauugcu

SEQ ID NO: 649641 - RNA, 24 nt, Artificial Sequence
  Synthetic
aagacuagggauggucagauugcu

SEQ ID NO: 649642 - RNA, 18 nt, Artificial Sequence
  Synthetic
auaacuauggcgauugcu

SEQ ID NO: 649643 - RNA, 19 nt, Artificial Sequence
  Synthetic
uauaacuauggcgauugcu

SEQ ID NO: 649644 - RNA, 20 nt, Artificial Sequence
  Synthetic
auauaacuauggcgauugcu

SEQ ID NO: 649645 - RNA, 21 nt, Artificial Sequence
  Synthetic
aauauaacuauggcgauugcu

SEQ ID NO: 649646 - RNA, 22 nt, Artificial Sequence
  Synthetic
caauauaacuauggcgauugcu

SEQ ID NO: 649647 - RNA, 23 nt, Artificial Sequence
  Synthetic
acaauauaacuauggcgauugcu

SEQ ID NO: 649648 - RNA, 24 nt, Artificial Sequence
  Synthetic
uacaauauaacuauggcgauugcu

SEQ ID NO: 649649 - RNA, 18 nt, Artificial Sequence
  Synthetic
cuaucuuauaggauugcu

SEQ ID NO: 649650 - RNA, 19 nt, Artificial Sequence
  Synthetic
ccuaucuuauaggauugcu

SEQ ID NO: 649651 - RNA, 20 nt, Artificial Sequence
  Synthetic
accuaucuuauaggauugcu

SEQ ID NO: 649652 - RNA, 21 nt, Artificial Sequence
  Synthetic
uaccuaucuuauaggauugcu

SEQ ID NO: 649653 - RNA, 22 nt, Artificial Sequence
  Synthetic
guaccuaucuuauaggauugcu

SEQ ID NO: 649654 - RNA, 23 nt, Artificial Sequence
  Synthetic
aguaccuaucuuauaggauugcu

SEQ ID NO: 649655 - RNA, 24 nt, Artificial Sequence
  Synthetic
gaguaccuaucuuauaggauugcu

SEQ ID NO: 649656 - RNA, 18 nt, Artificial Sequence
  Synthetic
uuguaagcugugauugcu

SEQ ID NO: 649657 - RNA, 19 nt, Artificial Sequence
  Synthetic
uuuguaagcugugauugcu

SEQ ID NO: 649658 - RNA, 20 nt, Artificial Sequence
  Synthetic
auuuguaagcugugauugcu

SEQ ID NO: 649659 - RNA, 21 nt, Artificial Sequence
  Synthetic
cauuuguaagcugugauugcu

SEQ ID NO: 649660 - RNA, 22 nt, Artificial Sequence
  Synthetic
acauuuguaagcugugauugcu

SEQ ID NO: 649661 - RNA, 23 nt, Artificial Sequence
  Synthetic
cacauuuguaagcugugauugcu

SEQ ID NO: 649662 - RNA, 24 nt, Artificial Sequence
  Synthetic
ccacauuuguaagcugugauugcu

SEQ ID NO: 649663 - RNA, 18 nt, Artificial Sequence
  Synthetic
guggcaugguauauugcu

SEQ ID NO: 649664 - RNA, 19 nt, Artificial Sequence
  Synthetic
aguggcaugguauauugcu

SEQ ID NO: 649665 - RNA, 20 nt, Artificial Sequence
  Synthetic
uaguggcaugguauauugcu

SEQ ID NO: 649666 - RNA, 21 nt, Artificial Sequence
  Synthetic
auaguggcaugguauauugcu

SEQ ID NO: 649667 - RNA, 22 nt, Artificial Sequence
  Synthetic
cauaguggcaugguauauugcu

SEQ ID NO: 649668 - RNA, 23 nt, Artificial Sequence
  Synthetic
ccauaguggcaugguauauugcu

SEQ ID NO: 649669 - RNA, 24 nt, Artificial Sequence
  Synthetic
uccauaguggcaugguauauugcu

SEQ ID NO: 649670 - RNA, 18 nt, Artificial Sequence
  Synthetic
augauaauguauauugcu

SEQ ID NO: 649671 - RNA, 19 nt, Artificial Sequence
  Synthetic
aaugauaauguauauugcu

SEQ ID NO: 649672 - RNA, 20 nt, Artificial Sequence
  Synthetic
aaaugauaauguauauugcu

SEQ ID NO: 649673 - RNA, 21 nt, Artificial Sequence
  Synthetic
aaaaugauaauguauauugcu

SEQ ID NO: 649674 - RNA, 22 nt, Artificial Sequence
  Synthetic
uaaaaugauaauguauauugcu

SEQ ID NO: 649675 - RNA, 23 nt, Artificial Sequence
  Synthetic
guaaaaugauaauguauauugcu

SEQ ID NO: 649676 - RNA, 24 nt, Artificial Sequence
  Synthetic
uguaaaaugauaauguauauugcu

SEQ ID NO: 649677 - RNA, 18 nt, Artificial Sequence
  Synthetic
ugaauuaugauuauugcu

SEQ ID NO: 649678 - RNA, 19 nt, Artificial Sequence
  Synthetic
augaauuaugauuauugcu

SEQ ID NO: 649679 - RNA, 20 nt, Artificial Sequence
  Synthetic
uaugaauuaugauuauugcu

SEQ ID NO: 649680 - RNA, 21 nt, Artificial Sequence
  Synthetic
cuaugaauuaugauuauugcu

SEQ ID NO: 649681 - RNA, 22 nt, Artificial Sequence
  Synthetic
ucuaugaauuaugauuauugcu

SEQ ID NO: 649682 - RNA, 23 nt, Artificial Sequence
  Synthetic
aucuaugaauuaugauuauugcu

SEQ ID NO: 649683 - RNA, 24 nt, Artificial Sequence
  Synthetic
aaucuaugaauuaugauuauugcu

SEQ ID NO: 649684 - RNA, 18 nt, Artificial Sequence
  Synthetic
aucucuuccaaacuugcu

SEQ ID NO: 649685 - RNA, 19 nt, Artificial Sequence
  Synthetic
aaucucuuccaaacuugcu

SEQ ID NO: 649686 - RNA, 20 nt, Artificial Sequence
  Synthetic
uaaucucuuccaaacuugcu

SEQ ID NO: 649687 - RNA, 21 nt, Artificial Sequence
  Synthetic
uuaaucucuuccaaacuugcu

SEQ ID NO: 649688 - RNA, 22 nt, Artificial Sequence
  Synthetic
uuuaaucucuuccaaacuugcu

SEQ ID NO: 649689 - RNA, 23 nt, Artificial Sequence
  Synthetic
uuuuaaucucuuccaaacuugcu

SEQ ID NO: 649690 - RNA, 24 nt, Artificial Sequence
  Synthetic
uuuuuaaucucuuccaaacuugcu

SEQ ID NO: 649691 - RNA, 18 nt, Artificial Sequence
  Synthetic
uuaguccauuuccuugcu

SEQ ID NO: 649692 - RNA, 19 nt, Artificial Sequence
  Synthetic
auuaguccauuuccuugcu

SEQ ID NO: 649693 - RNA, 20 nt, Artificial Sequence
  Synthetic
gauuaguccauuuccuugcu

SEQ ID NO: 649694 - RNA, 21 nt, Artificial Sequence
  Synthetic
ugauuaguccauuuccuugcu

SEQ ID NO: 649695 - RNA, 22 nt, Artificial Sequence
  Synthetic
cugauuaguccauuuccuugcu

SEQ ID NO: 649696 - RNA, 23 nt, Artificial Sequence
  Synthetic
ucugauuaguccauuuccuugcu

SEQ ID NO: 649697 - RNA, 24 nt, Artificial Sequence
  Synthetic
gucugauuaguccauuuccuugcu

SEQ ID NO: 649698 - RNA, 18 nt, Artificial Sequence
  Synthetic
cagggaagagagcuugcu

SEQ ID NO: 649699 - RNA, 19 nt, Artificial Sequence
  Synthetic
gcagggaagagagcuugcu

SEQ ID NO: 649700 - RNA, 20 nt, Artificial Sequence
  Synthetic
agcagggaagagagcuugcu

SEQ ID NO: 649701 - RNA, 21 nt, Artificial Sequence
  Synthetic
cagcagggaagagagcuugcu

SEQ ID NO: 649702 - RNA, 22 nt, Artificial Sequence
  Synthetic
gcagcagggaagagagcuugcu

SEQ ID NO: 649703 - RNA, 23 nt, Artificial Sequence
  Synthetic
ggcagcagggaagagagcuugcu

SEQ ID NO: 649704 - RNA, 24 nt, Artificial Sequence
  Synthetic
uggcagcagggaagagagcuugcu

SEQ ID NO: 649705 - RNA, 18 nt, Artificial Sequence
  Synthetic
gcauacagucugcuugcu

SEQ ID NO: 649706 - RNA, 19 nt, Artificial Sequence
  Synthetic
ugcauacagucugcuugcu

SEQ ID NO: 649707 - RNA, 20 nt, Artificial Sequence
  Synthetic
uugcauacagucugcuugcu

SEQ ID NO: 649708 - RNA, 21 nt, Artificial Sequence
  Synthetic
guugcauacagucugcuugcu

SEQ ID NO: 649709 - RNA, 22 nt, Artificial Sequence
  Synthetic
cguugcauacagucugcuugcu

SEQ ID NO: 649710 - RNA, 23 nt, Artificial Sequence
  Synthetic
ccguugcauacagucugcuugcu

SEQ ID NO: 649711 - RNA, 24 nt, Artificial Sequence
  Synthetic
gccguugcauacagucugcuugcu

SEQ ID NO: 649712 - RNA, 18 nt, Artificial Sequence
  Synthetic
gcuuuucaauugcuugcu

SEQ ID NO: 649713 - RNA, 19 nt, Artificial Sequence
  Synthetic
ugcuuuucaauugcuugcu

SEQ ID NO: 649714 - RNA, 20 nt, Artificial Sequence
  Synthetic
uugcuuuucaauugcuugcu

SEQ ID NO: 649715 - RNA, 21 nt, Artificial Sequence
  Synthetic
uuugcuuuucaauugcuugcu

SEQ ID NO: 649716 - RNA, 22 nt, Artificial Sequence
  Synthetic
auuugcuuuucaauugcuugcu

SEQ ID NO: 649717 - RNA, 23 nt, Artificial Sequence
  Synthetic
uauuugcuuuucaauugcuugcu

SEQ ID NO: 649718 - RNA, 24 nt, Artificial Sequence
  Synthetic
cuauuugcuuuucaauugcuugcu

SEQ ID NO: 649719 - RNA, 18 nt, Artificial Sequence
  Synthetic
uuaucccuuuugcuugcu

SEQ ID NO: 649720 - RNA, 19 nt, Artificial Sequence
  Synthetic
auuaucccuuuugcuugcu

SEQ ID NO: 649721 - RNA, 20 nt, Artificial Sequence
  Synthetic
aauuaucccuuuugcuugcu

SEQ ID NO: 649722 - RNA, 21 nt, Artificial Sequence
  Synthetic
aaauuaucccuuuugcuugcu

SEQ ID NO: 649723 - RNA, 22 nt, Artificial Sequence
  Synthetic
caaauuaucccuuuugcuugcu

SEQ ID NO: 649724 - RNA, 23 nt, Artificial Sequence
  Synthetic
ccaaauuaucccuuuugcuugcu

SEQ ID NO: 649725 - RNA, 24 nt, Artificial Sequence
  Synthetic
uccaaauuaucccuuuugcuugcu

SEQ ID NO: 649726 - RNA, 18 nt, Artificial Sequence
  Synthetic
gaagcuuuuaaucuugcu

SEQ ID NO: 649727 - RNA, 19 nt, Artificial Sequence
  Synthetic
ugaagcuuuuaaucuugcu

SEQ ID NO: 649728 - RNA, 20 nt, Artificial Sequence
  Synthetic
augaagcuuuuaaucuugcu

SEQ ID NO: 649729 - RNA, 21 nt, Artificial Sequence
  Synthetic
caugaagcuuuuaaucuugcu

SEQ ID NO: 649730 - RNA, 22 nt, Artificial Sequence
  Synthetic
ucaugaagcuuuuaaucuugcu

SEQ ID NO: 649731 - RNA, 23 nt, Artificial Sequence
  Synthetic
cucaugaagcuuuuaaucuugcu

SEQ ID NO: 649732 - RNA, 24 nt, Artificial Sequence
  Synthetic
ccucaugaagcuuuuaaucuugcu

SEQ ID NO: 649733 - RNA, 18 nt, Artificial Sequence
  Synthetic
uccuuaguuugucuugcu

SEQ ID NO: 649734 - RNA, 19 nt, Artificial Sequence
  Synthetic
cuccuuaguuugucuugcu

SEQ ID NO: 649735 - RNA, 20 nt, Artificial Sequence
  Synthetic
gcuccuuaguuugucuugcu

SEQ ID NO: 649736 - RNA, 21 nt, Artificial Sequence
  Synthetic
ugcuccuuaguuugucuugcu

SEQ ID NO: 649737 - RNA, 22 nt, Artificial Sequence
  Synthetic
uugcuccuuaguuugucuugcu

SEQ ID NO: 649738 - RNA, 23 nt, Artificial Sequence
  Synthetic
auugcuccuuaguuugucuugcu

SEQ ID NO: 649739 - RNA, 24 nt, Artificial Sequence
  Synthetic
uauugcuccuuaguuugucuugcu

SEQ ID NO: 649740 - RNA, 18 nt, Artificial Sequence
  Synthetic
ucaaauaucuuucuugcu

SEQ ID NO: 649741 - RNA, 19 nt, Artificial Sequence
  Synthetic
cucaaauaucuuucuugcu

SEQ ID NO: 649742 - RNA, 20 nt, Artificial Sequence
  Synthetic
ucucaaauaucuuucuugcu

SEQ ID NO: 649743 - RNA, 21 nt, Artificial Sequence
  Synthetic
uucucaaauaucuuucuugcu

SEQ ID NO: 649744 - RNA, 22 nt, Artificial Sequence
  Synthetic
auucucaaauaucuuucuugcu

SEQ ID NO: 649745 - RNA, 23 nt, Artificial Sequence
  Synthetic
gauucucaaauaucuuucuugcu

SEQ ID NO: 649746 - RNA, 24 nt, Artificial Sequence
  Synthetic
ggauucucaaauaucuuucuugcu

SEQ ID NO: 649747 - RNA, 18 nt, Artificial Sequence
  Synthetic
ccugaauuaauaguugcu

SEQ ID NO: 649748 - RNA, 19 nt, Artificial Sequence
  Synthetic
uccugaauuaauaguugcu

SEQ ID NO: 649749 - RNA, 20 nt, Artificial Sequence
  Synthetic
cuccugaauuaauaguugcu

SEQ ID NO: 649750 - RNA, 21 nt, Artificial Sequence
  Synthetic
ucuccugaauuaauaguugcu

SEQ ID NO: 649751 - RNA, 22 nt, Artificial Sequence
  Synthetic
uucuccugaauuaauaguugcu

SEQ ID NO: 649752 - RNA, 23 nt, Artificial Sequence
  Synthetic
auucuccugaauuaauaguugcu

SEQ ID NO: 649753 - RNA, 24 nt, Artificial Sequence
  Synthetic
cauucuccugaauuaauaguugcu

SEQ ID NO: 649754 - RNA, 18 nt, Artificial Sequence
  Synthetic
ggaagcugaaagguugcu

SEQ ID NO: 649755 - RNA, 19 nt, Artificial Sequence
  Synthetic
gggaagcugaaagguugcu

SEQ ID NO: 649756 - RNA, 20 nt, Artificial Sequence
  Synthetic
ugggaagcugaaagguugcu

SEQ ID NO: 649757 - RNA, 21 nt, Artificial Sequence
  Synthetic
augggaagcugaaagguugcu

SEQ ID NO: 649758 - RNA, 22 nt, Artificial Sequence
  Synthetic
caugggaagcugaaagguugcu

SEQ ID NO: 649759 - RNA, 23 nt, Artificial Sequence
  Synthetic
acaugggaagcugaaagguugcu

SEQ ID NO: 649760 - RNA, 24 nt, Artificial Sequence
  Synthetic
gacaugggaagcugaaagguugcu

SEQ ID NO: 649761 - RNA, 18 nt, Artificial Sequence
  Synthetic
caggaggcagagguugcu

SEQ ID NO: 649762 - RNA, 19 nt, Artificial Sequence
  Synthetic
ccaggaggcagagguugcu

SEQ ID NO: 649763 - RNA, 20 nt, Artificial Sequence
  Synthetic
cccaggaggcagagguugcu

SEQ ID NO: 649764 - RNA, 21 nt, Artificial Sequence
  Synthetic
acccaggaggcagagguugcu

SEQ ID NO: 649765 - RNA, 22 nt, Artificial Sequence
  Synthetic
aacccaggaggcagagguugcu

SEQ ID NO: 649766 - RNA, 23 nt, Artificial Sequence
  Synthetic
caacccaggaggcagagguugcu

SEQ ID NO: 649767 - RNA, 24 nt, Artificial Sequence
  Synthetic
ucaacccaggaggcagagguugcu

SEQ ID NO: 649768 - RNA, 18 nt, Artificial Sequence
  Synthetic
caggaggcggagguugcu

SEQ ID NO: 649769 - RNA, 19 nt, Artificial Sequence
  Synthetic
ccaggaggcggagguugcu

SEQ ID NO: 649770 - RNA, 20 nt, Artificial Sequence
  Synthetic
cccaggaggcggagguugcu

SEQ ID NO: 649771 - RNA, 21 nt, Artificial Sequence
  Synthetic
acccaggaggcggagguugcu

SEQ ID NO: 649772 - RNA, 22 nt, Artificial Sequence
  Synthetic
aacccaggaggcggagguugcu

SEQ ID NO: 649773 - RNA, 23 nt, Artificial Sequence
  Synthetic
gaacccaggaggcggagguugcu

SEQ ID NO: 649774 - RNA, 24 nt, Artificial Sequence
  Synthetic
ugaacccaggaggcggagguugcu

SEQ ID NO: 649775 - RNA, 18 nt, Artificial Sequence
  Synthetic
gucaugcuuuagguugcu

SEQ ID NO: 649776 - RNA, 19 nt, Artificial Sequence
  Synthetic
ggucaugcuuuagguugcu

SEQ ID NO: 649777 - RNA, 20 nt, Artificial Sequence
  Synthetic
aggucaugcuuuagguugcu

SEQ ID NO: 649778 - RNA, 21 nt, Artificial Sequence
  Synthetic
caggucaugcuuuagguugcu

SEQ ID NO: 649779 - RNA, 22 nt, Artificial Sequence
  Synthetic
gcaggucaugcuuuagguugcu

SEQ ID NO: 649780 - RNA, 23 nt, Artificial Sequence
  Synthetic
agcaggucaugcuuuagguugcu

SEQ ID NO: 649781 - RNA, 24 nt, Artificial Sequence
  Synthetic
aagcaggucaugcuuuagguugcu

SEQ ID NO: 649782 - RNA, 18 nt, Artificial Sequence
  Synthetic
cuaccucuuaggguugcu

SEQ ID NO: 649783 - RNA, 19 nt, Artificial Sequence
  Synthetic
ucuaccucuuaggguugcu

SEQ ID NO: 649784 - RNA, 20 nt, Artificial Sequence
  Synthetic
aucuaccucuuaggguugcu

SEQ ID NO: 649785 - RNA, 21 nt, Artificial Sequence
  Synthetic
aaucuaccucuuaggguugcu

SEQ ID NO: 649786 - RNA, 22 nt, Artificial Sequence
  Synthetic
aaaucuaccucuuaggguugcu

SEQ ID NO: 649787 - RNA, 23 nt, Artificial Sequence
  Synthetic
aaaaucuaccucuuaggguugcu

SEQ ID NO: 649788 - RNA, 24 nt, Artificial Sequence
  Synthetic
uaaaaucuaccucuuaggguugcu

SEQ ID NO: 649789 - RNA, 18 nt, Artificial Sequence
  Synthetic
uuugcucagcugguugcu

SEQ ID NO: 649790 - RNA, 19 nt, Artificial Sequence
  Synthetic
cuuugcucagcugguugcu

SEQ ID NO: 649791 - RNA, 20 nt, Artificial Sequence
  Synthetic
ucuuugcucagcugguugcu

SEQ ID NO: 649792 - RNA, 21 nt, Artificial Sequence
  Synthetic
aucuuugcucagcugguugcu

SEQ ID NO: 649793 - RNA, 22 nt, Artificial Sequence
  Synthetic
aaucuuugcucagcugguugcu

SEQ ID NO: 649794 - RNA, 23 nt, Artificial Sequence
  Synthetic
aaaucuuugcucagcugguugcu

SEQ ID NO: 649795 - RNA, 24 nt, Artificial Sequence
  Synthetic
uaaaucuuugcucagcugguugcu

SEQ ID NO: 649796 - RNA, 18 nt, Artificial Sequence
  Synthetic
aguacaauggugguugcu

SEQ ID NO: 649797 - RNA, 19 nt, Artificial Sequence
  Synthetic
aaguacaauggugguugcu

SEQ ID NO: 649798 - RNA, 20 nt, Artificial Sequence
  Synthetic
aaaguacaauggugguugcu

SEQ ID NO: 649799 - RNA, 21 nt, Artificial Sequence
  Synthetic
gaaaguacaauggugguugcu

SEQ ID NO: 649800 - RNA, 22 nt, Artificial Sequence
  Synthetic
agaaaguacaauggugguugcu

SEQ ID NO: 649801 - RNA, 23 nt, Artificial Sequence
  Synthetic
cagaaaguacaauggugguugcu

SEQ ID NO: 649802 - RNA, 24 nt, Artificial Sequence
  Synthetic
acagaaaguacaauggugguugcu

SEQ ID NO: 649803 - RNA, 18 nt, Artificial Sequence
  Synthetic
accaaucuagauguugcu

SEQ ID NO: 649804 - RNA, 19 nt, Artificial Sequence
  Synthetic
caccaaucuagauguugcu

SEQ ID NO: 649805 - RNA, 20 nt, Artificial Sequence
  Synthetic
acaccaaucuagauguugcu

SEQ ID NO: 649806 - RNA, 21 nt, Artificial Sequence
  Synthetic
aacaccaaucuagauguugcu

SEQ ID NO: 649807 - RNA, 22 nt, Artificial Sequence
  Synthetic
aaacaccaaucuagauguugcu

SEQ ID NO: 649808 - RNA, 23 nt, Artificial Sequence
  Synthetic
caaacaccaaucuagauguugcu

SEQ ID NO: 649809 - RNA, 24 nt, Artificial Sequence
  Synthetic
ucaaacaccaaucuagauguugcu

SEQ ID NO: 649810 - RNA, 18 nt, Artificial Sequence
  Synthetic
aaggaagagucuguugcu

SEQ ID NO: 649811 - RNA, 19 nt, Artificial Sequence
  Synthetic
uaaggaagagucuguugcu

SEQ ID NO: 649812 - RNA, 20 nt, Artificial Sequence
  Synthetic
uuaaggaagagucuguugcu

SEQ ID NO: 649813 - RNA, 21 nt, Artificial Sequence
  Synthetic
auuaaggaagagucuguugcu

SEQ ID NO: 649814 - RNA, 22 nt, Artificial Sequence
  Synthetic
uauuaaggaagagucuguugcu

SEQ ID NO: 649815 - RNA, 23 nt, Artificial Sequence
  Synthetic
uuauuaaggaagagucuguugcu

SEQ ID NO: 649816 - RNA, 24 nt, Artificial Sequence
  Synthetic
guuauuaaggaagagucuguugcu

SEQ ID NO: 649817 - RNA, 18 nt, Artificial Sequence
  Synthetic
gguguguaggaauuugcu

SEQ ID NO: 649818 - RNA, 19 nt, Artificial Sequence
  Synthetic
ugguguguaggaauuugcu

SEQ ID NO: 649819 - RNA, 20 nt, Artificial Sequence
  Synthetic
augguguguaggaauuugcu

SEQ ID NO: 649820 - RNA, 21 nt, Artificial Sequence
  Synthetic
aaugguguguaggaauuugcu

SEQ ID NO: 649821 - RNA, 22 nt, Artificial Sequence
  Synthetic
gaaugguguguaggaauuugcu

SEQ ID NO: 649822 - RNA, 23 nt, Artificial Sequence
  Synthetic
ugaaugguguguaggaauuugcu

SEQ ID NO: 649823 - RNA, 24 nt, Artificial Sequence
  Synthetic
cugaaugguguguaggaauuugcu

SEQ ID NO: 649824 - RNA, 18 nt, Artificial Sequence
  Synthetic
aggcuguuggaauuugcu

SEQ ID NO: 649825 - RNA, 19 nt, Artificial Sequence
  Synthetic
caggcuguuggaauuugcu

SEQ ID NO: 649826 - RNA, 20 nt, Artificial Sequence
  Synthetic
ucaggcuguuggaauuugcu

SEQ ID NO: 649827 - RNA, 21 nt, Artificial Sequence
  Synthetic
aucaggcuguuggaauuugcu

SEQ ID NO: 649828 - RNA, 22 nt, Artificial Sequence
  Synthetic
caucaggcuguuggaauuugcu

SEQ ID NO: 649829 - RNA, 23 nt, Artificial Sequence
  Synthetic
gcaucaggcuguuggaauuugcu

SEQ ID NO: 649830 - RNA, 24 nt, Artificial Sequence
  Synthetic
agcaucaggcuguuggaauuugcu

SEQ ID NO: 649831 - RNA, 18 nt, Artificial Sequence
  Synthetic
cagauucagccauuugcu

SEQ ID NO: 649832 - RNA, 19 nt, Artificial Sequence
  Synthetic
acagauucagccauuugcu

SEQ ID NO: 649833 - RNA, 20 nt, Artificial Sequence
  Synthetic
uacagauucagccauuugcu

SEQ ID NO: 649834 - RNA, 21 nt, Artificial Sequence
  Synthetic
uuacagauucagccauuugcu

SEQ ID NO: 649835 - RNA, 22 nt, Artificial Sequence
  Synthetic
uuuacagauucagccauuugcu

SEQ ID NO: 649836 - RNA, 23 nt, Artificial Sequence
  Synthetic
uuuuacagauucagccauuugcu

SEQ ID NO: 649837 - RNA, 24 nt, Artificial Sequence
  Synthetic
auuuuacagauucagccauuugcu

SEQ ID NO: 649838 - RNA, 18 nt, Artificial Sequence
  Synthetic
uuuugcuuuccauuugcu

SEQ ID NO: 649839 - RNA, 19 nt, Artificial Sequence
  Synthetic
uuuuugcuuuccauuugcu

SEQ ID NO: 649840 - RNA, 20 nt, Artificial Sequence
  Synthetic
uuuuuugcuuuccauuugcu

SEQ ID NO: 649841 - RNA, 21 nt, Artificial Sequence
  Synthetic
uuuuuuugcuuuccauuugcu

SEQ ID NO: 649842 - RNA, 22 nt, Artificial Sequence
  Synthetic
auuuuuuugcuuuccauuugcu

SEQ ID NO: 649843 - RNA, 23 nt, Artificial Sequence
  Synthetic
uauuuuuuugcuuuccauuugcu

SEQ ID NO: 649844 - RNA, 24 nt, Artificial Sequence
  Synthetic
uuauuuuuuugcuuuccauuugcu

SEQ ID NO: 649845 - RNA, 18 nt, Artificial Sequence
  Synthetic
uguuuuuuugcauuugcu

SEQ ID NO: 649846 - RNA, 19 nt, Artificial Sequence
  Synthetic
cuguuuuuuugcauuugcu

SEQ ID NO: 649847 - RNA, 20 nt, Artificial Sequence
  Synthetic
ucuguuuuuuugcauuugcu

SEQ ID NO: 649848 - RNA, 21 nt, Artificial Sequence
  Synthetic
uucuguuuuuuugcauuugcu

SEQ ID NO: 649849 - RNA, 22 nt, Artificial Sequence
  Synthetic
uuucuguuuuuuugcauuugcu

SEQ ID NO: 649850 - RNA, 23 nt, Artificial Sequence
  Synthetic
auuucuguuuuuuugcauuugcu

SEQ ID NO: 649851 - RNA, 24 nt, Artificial Sequence
  Synthetic
gauuucuguuuuuuugcauuugcu

SEQ ID NO: 649852 - RNA, 18 nt, Artificial Sequence
  Synthetic
gauaaacuuucauuugcu

SEQ ID NO: 649853 - RNA, 19 nt, Artificial Sequence
  Synthetic
ugauaaacuuucauuugcu

SEQ ID NO: 649854 - RNA, 20 nt, Artificial Sequence
  Synthetic
augauaaacuuucauuugcu

SEQ ID NO: 649855 - RNA, 21 nt, Artificial Sequence
  Synthetic
aaugauaaacuuucauuugcu

SEQ ID NO: 649856 - RNA, 22 nt, Artificial Sequence
  Synthetic
aaaugauaaacuuucauuugcu

SEQ ID NO: 649857 - RNA, 23 nt, Artificial Sequence
  Synthetic
uaaaugauaaacuuucauuugcu

SEQ ID NO: 649858 - RNA, 24 nt, Artificial Sequence
  Synthetic
uuaaaugauaaacuuucauuugcu

SEQ ID NO: 649859 - RNA, 18 nt, Artificial Sequence
  Synthetic
uuccgccaucccuuugcu

SEQ ID NO: 649860 - RNA, 19 nt, Artificial Sequence
  Synthetic
auuccgccaucccuuugcu

SEQ ID NO: 649861 - RNA, 20 nt, Artificial Sequence
  Synthetic
uauuccgccaucccuuugcu

SEQ ID NO: 649862 - RNA, 21 nt, Artificial Sequence
  Synthetic
auauuccgccaucccuuugcu

SEQ ID NO: 649863 - RNA, 22 nt, Artificial Sequence
  Synthetic
aauauuccgccaucccuuugcu

SEQ ID NO: 649864 - RNA, 23 nt, Artificial Sequence
  Synthetic
aaauauuccgccaucccuuugcu

SEQ ID NO: 649865 - RNA, 24 nt, Artificial Sequence
  Synthetic
aaaauauuccgccaucccuuugcu

SEQ ID NO: 649866 - RNA, 18 nt, Artificial Sequence
  Synthetic
gucugcauuuccuuugcu

SEQ ID NO: 649867 - RNA, 19 nt, Artificial Sequence
  Synthetic
ugucugcauuuccuuugcu

SEQ ID NO: 649868 - RNA, 20 nt, Artificial Sequence
  Synthetic
augucugcauuuccuuugcu

SEQ ID NO: 649869 - RNA, 21 nt, Artificial Sequence
  Synthetic
caugucugcauuuccuuugcu

SEQ ID NO: 649870 - RNA, 22 nt, Artificial Sequence
  Synthetic
gcaugucugcauuuccuuugcu

SEQ ID NO: 649871 - RNA, 23 nt, Artificial Sequence
  Synthetic
ugcaugucugcauuuccuuugcu

SEQ ID NO: 649872 - RNA, 24 nt, Artificial Sequence
  Synthetic
uugcaugucugcauuuccuuugcu

SEQ ID NO: 649873 - RNA, 18 nt, Artificial Sequence
  Synthetic
uuuggaaaauucuuugcu

SEQ ID NO: 649874 - RNA, 19 nt, Artificial Sequence
  Synthetic
guuuggaaaauucuuugcu

SEQ ID NO: 649875 - RNA, 20 nt, Artificial Sequence
  Synthetic
gguuuggaaaauucuuugcu

SEQ ID NO: 649876 - RNA, 21 nt, Artificial Sequence
  Synthetic
agguuuggaaaauucuuugcu

SEQ ID NO: 649877 - RNA, 22 nt, Artificial Sequence
  Synthetic
uagguuuggaaaauucuuugcu

SEQ ID NO: 649878 - RNA, 23 nt, Artificial Sequence
  Synthetic
uuagguuuggaaaauucuuugcu

SEQ ID NO: 649879 - RNA, 24 nt, Artificial Sequence
  Synthetic
uuuagguuuggaaaauucuuugcu

SEQ ID NO: 649880 - RNA, 18 nt, Artificial Sequence
  Synthetic
cugugcguaaaguuugcu

SEQ ID NO: 649881 - RNA, 19 nt, Artificial Sequence
  Synthetic
ucugugcguaaaguuugcu

SEQ ID NO: 649882 - RNA, 20 nt, Artificial Sequence
  Synthetic
cucugugcguaaaguuugcu

SEQ ID NO: 649883 - RNA, 21 nt, Artificial Sequence
  Synthetic
ucucugugcguaaaguuugcu

SEQ ID NO: 649884 - RNA, 22 nt, Artificial Sequence
  Synthetic
uucucugugcguaaaguuugcu

SEQ ID NO: 649885 - RNA, 23 nt, Artificial Sequence
  Synthetic
uuucucugugcguaaaguuugcu

SEQ ID NO: 649886 - RNA, 24 nt, Artificial Sequence
  Synthetic
auuucucugugcguaaaguuugcu

SEQ ID NO: 649887 - RNA, 18 nt, Artificial Sequence
  Synthetic
uccuugcaauaguuugcu

SEQ ID NO: 649888 - RNA, 19 nt, Artificial Sequence
  Synthetic
guccuugcaauaguuugcu

SEQ ID NO: 649889 - RNA, 20 nt, Artificial Sequence
  Synthetic
uguccuugcaauaguuugcu

SEQ ID NO: 649890 - RNA, 21 nt, Artificial Sequence
  Synthetic
uuguccuugcaauaguuugcu

SEQ ID NO: 649891 - RNA, 22 nt, Artificial Sequence
  Synthetic
uuuguccuugcaauaguuugcu

SEQ ID NO: 649892 - RNA, 23 nt, Artificial Sequence
  Synthetic
uuuuguccuugcaauaguuugcu

SEQ ID NO: 649893 - RNA, 24 nt, Artificial Sequence
  Synthetic
uuuuuguccuugcaauaguuugcu

SEQ ID NO: 649894 - RNA, 18 nt, Artificial Sequence
  Synthetic
ugaaugggaacguuugcu

SEQ ID NO: 649895 - RNA, 19 nt, Artificial Sequence
  Synthetic
augaaugggaacguuugcu

SEQ ID NO: 649896 - RNA, 20 nt, Artificial Sequence
  Synthetic
aaugaaugggaacguuugcu

SEQ ID NO: 649897 - RNA, 21 nt, Artificial Sequence
  Synthetic
aaaugaaugggaacguuugcu

SEQ ID NO: 649898 - RNA, 22 nt, Artificial Sequence
  Synthetic
caaaugaaugggaacguuugcu

SEQ ID NO: 649899 - RNA, 23 nt, Artificial Sequence
  Synthetic
acaaaugaaugggaacguuugcu

SEQ ID NO: 649900 - RNA, 24 nt, Artificial Sequence
  Synthetic
aacaaaugaaugggaacguuugcu

SEQ ID NO: 649901 - RNA, 18 nt, Artificial Sequence
  Synthetic
uauugguugagguuugcu

SEQ ID NO: 649902 - RNA, 19 nt, Artificial Sequence
  Synthetic
uuauugguugagguuugcu

SEQ ID NO: 649903 - RNA, 20 nt, Artificial Sequence
  Synthetic
guuauugguugagguuugcu

SEQ ID NO: 649904 - RNA, 21 nt, Artificial Sequence
  Synthetic
uguuauugguugagguuugcu

SEQ ID NO: 649905 - RNA, 22 nt, Artificial Sequence
  Synthetic
uuguuauugguugagguuugcu

SEQ ID NO: 649906 - RNA, 23 nt, Artificial Sequence
  Synthetic
uuuguuauugguugagguuugcu

SEQ ID NO: 649907 - RNA, 24 nt, Artificial Sequence
  Synthetic
auuuguuauugguugagguuugcu

SEQ ID NO: 649908 - RNA, 18 nt, Artificial Sequence
  Synthetic
uauuaauuuagguuugcu

SEQ ID NO: 649909 - RNA, 19 nt, Artificial Sequence
  Synthetic
guauuaauuuagguuugcu

SEQ ID NO: 649910 - RNA, 20 nt, Artificial Sequence
  Synthetic
uguauuaauuuagguuugcu

SEQ ID NO: 649911 - RNA, 21 nt, Artificial Sequence
  Synthetic
uuguauuaauuuagguuugcu

SEQ ID NO: 649912 - RNA, 22 nt, Artificial Sequence
  Synthetic
cuuguauuaauuuagguuugcu

SEQ ID NO: 649913 - RNA, 23 nt, Artificial Sequence
  Synthetic
acuuguauuaauuuagguuugcu

SEQ ID NO: 649914 - RNA, 24 nt, Artificial Sequence
  Synthetic
gacuuguauuaauuuagguuugcu

SEQ ID NO: 649915 - RNA, 18 nt, Artificial Sequence
  Synthetic
uguuaaaagugguuugcu

SEQ ID NO: 649916 - RNA, 19 nt, Artificial Sequence
  Synthetic
auguuaaaagugguuugcu

SEQ ID NO: 649917 - RNA, 20 nt, Artificial Sequence
  Synthetic
aauguuaaaagugguuugcu

SEQ ID NO: 649918 - RNA, 21 nt, Artificial Sequence
  Synthetic
aaauguuaaaagugguuugcu

SEQ ID NO: 649919 - RNA, 22 nt, Artificial Sequence
  Synthetic
aaaauguuaaaagugguuugcu

SEQ ID NO: 649920 - RNA, 23 nt, Artificial Sequence
  Synthetic
caaaauguuaaaagugguuugcu

SEQ ID NO: 649921 - RNA, 24 nt, Artificial Sequence
  Synthetic
ucaaaauguuaaaagugguuugcu

SEQ ID NO: 649922 - RNA, 18 nt, Artificial Sequence
  Synthetic
ccuucgguucuguuugcu

SEQ ID NO: 649923 - RNA, 19 nt, Artificial Sequence
  Synthetic
accuucgguucuguuugcu

SEQ ID NO: 649924 - RNA, 20 nt, Artificial Sequence
  Synthetic
caccuucgguucuguuugcu

SEQ ID NO: 649925 - RNA, 21 nt, Artificial Sequence
  Synthetic
acaccuucgguucuguuugcu

SEQ ID NO: 649926 - RNA, 22 nt, Artificial Sequence
  Synthetic
aacaccuucgguucuguuugcu

SEQ ID NO: 649927 - RNA, 23 nt, Artificial Sequence
  Synthetic
aaacaccuucgguucuguuugcu

SEQ ID NO: 649928 - RNA, 24 nt, Artificial Sequence
  Synthetic
uaaacaccuucgguucuguuugcu

SEQ ID NO: 649929 - RNA, 18 nt, Artificial Sequence
  Synthetic
gagaguaauguguuugcu

SEQ ID NO: 649930 - RNA, 19 nt, Artificial Sequence
  Synthetic
ugagaguaauguguuugcu

SEQ ID NO: 649931 - RNA, 20 nt, Artificial Sequence
  Synthetic
gugagaguaauguguuugcu

SEQ ID NO: 649932 - RNA, 21 nt, Artificial Sequence
  Synthetic
agugagaguaauguguuugcu

SEQ ID NO: 649933 - RNA, 22 nt, Artificial Sequence
  Synthetic
uagugagaguaauguguuugcu

SEQ ID NO: 649934 - RNA, 23 nt, Artificial Sequence
  Synthetic
auagugagaguaauguguuugcu

SEQ ID NO: 649935 - RNA, 24 nt, Artificial Sequence
  Synthetic
aauagugagaguaauguguuugcu

SEQ ID NO: 649936 - RNA, 18 nt, Artificial Sequence
  Synthetic
uugcaaacaaauuuugcu

SEQ ID NO: 649937 - RNA, 19 nt, Artificial Sequence
  Synthetic
uuugcaaacaaauuuugcu

SEQ ID NO: 649938 - RNA, 20 nt, Artificial Sequence
  Synthetic
auuugcaaacaaauuuugcu

SEQ ID NO: 649939 - RNA, 21 nt, Artificial Sequence
  Synthetic
cauuugcaaacaaauuuugcu

SEQ ID NO: 649940 - RNA, 22 nt, Artificial Sequence
  Synthetic
gcauuugcaaacaaauuuugcu

SEQ ID NO: 649941 - RNA, 23 nt, Artificial Sequence
  Synthetic
agcauuugcaaacaaauuuugcu

SEQ ID NO: 649942 - RNA, 24 nt, Artificial Sequence
  Synthetic
aagcauuugcaaacaaauuuugcu

SEQ ID NO: 649943 - RNA, 18 nt, Artificial Sequence
  Synthetic
accuugacaaauuuugcu

SEQ ID NO: 649944 - RNA, 19 nt, Artificial Sequence
  Synthetic
uaccuugacaaauuuugcu

SEQ ID NO: 649945 - RNA, 20 nt, Artificial Sequence
  Synthetic
cuaccuugacaaauuuugcu

SEQ ID NO: 649946 - RNA, 21 nt, Artificial Sequence
  Synthetic
acuaccuugacaaauuuugcu

SEQ ID NO: 649947 - RNA, 22 nt, Artificial Sequence
  Synthetic
aacuaccuugacaaauuuugcu

SEQ ID NO: 649948 - RNA, 23 nt, Artificial Sequence
  Synthetic
aaacuaccuugacaaauuuugcu

SEQ ID NO: 649949 - RNA, 24 nt, Artificial Sequence
  Synthetic
caaacuaccuugacaaauuuugcu

SEQ ID NO: 649950 - RNA, 18 nt, Artificial Sequence
  Synthetic
gauuuccagcauuuugcu

SEQ ID NO: 649951 - RNA, 19 nt, Artificial Sequence
  Synthetic
ggauuuccagcauuuugcu

SEQ ID NO: 649952 - RNA, 20 nt, Artificial Sequence
  Synthetic
gggauuuccagcauuuugcu

SEQ ID NO: 649953 - RNA, 21 nt, Artificial Sequence
  Synthetic
ggggauuuccagcauuuugcu

SEQ ID NO: 649954 - RNA, 22 nt, Artificial Sequence
  Synthetic
aggggauuuccagcauuuugcu

SEQ ID NO: 649955 - RNA, 23 nt, Artificial Sequence
  Synthetic
gaggggauuuccagcauuuugcu

SEQ ID NO: 649956 - RNA, 24 nt, Artificial Sequence
  Synthetic
ugaggggauuuccagcauuuugcu

SEQ ID NO: 649957 - RNA, 18 nt, Artificial Sequence
  Synthetic
auaucacugacuuuugcu

SEQ ID NO: 649958 - RNA, 19 nt, Artificial Sequence
  Synthetic
aauaucacugacuuuugcu

SEQ ID NO: 649959 - RNA, 20 nt, Artificial Sequence
  Synthetic
caauaucacugacuuuugcu

SEQ ID NO: 649960 - RNA, 21 nt, Artificial Sequence
  Synthetic
ccaauaucacugacuuuugcu

SEQ ID NO: 649961 - RNA, 22 nt, Artificial Sequence
  Synthetic
gccaauaucacugacuuuugcu

SEQ ID NO: 649962 - RNA, 23 nt, Artificial Sequence
  Synthetic
ugccaauaucacugacuuuugcu

SEQ ID NO: 649963 - RNA, 24 nt, Artificial Sequence
  Synthetic
augccaauaucacugacuuuugcu

SEQ ID NO: 649964 - RNA, 18 nt, Artificial Sequence
  Synthetic
gaacgauucccuuuugcu

SEQ ID NO: 649965 - RNA, 19 nt, Artificial Sequence
  Synthetic
agaacgauucccuuuugcu

SEQ ID NO: 649966 - RNA, 20 nt, Artificial Sequence
  Synthetic
cagaacgauucccuuuugcu

SEQ ID NO: 649967 - RNA, 21 nt, Artificial Sequence
  Synthetic
gcagaacgauucccuuuugcu

SEQ ID NO: 649968 - RNA, 22 nt, Artificial Sequence
  Synthetic
ggcagaacgauucccuuuugcu

SEQ ID NO: 649969 - RNA, 23 nt, Artificial Sequence
  Synthetic
gggcagaacgauucccuuuugcu

SEQ ID NO: 649970 - RNA, 24 nt, Artificial Sequence
  Synthetic
cgggcagaacgauucccuuuugcu

SEQ ID NO: 649971 - RNA, 18 nt, Artificial Sequence
  Synthetic
cgccaugcuucuuuugcu

SEQ ID NO: 649972 - RNA, 19 nt, Artificial Sequence
  Synthetic
ucgccaugcuucuuuugcu

SEQ ID NO: 649973 - RNA, 20 nt, Artificial Sequence
  Synthetic
uucgccaugcuucuuuugcu

SEQ ID NO: 649974 - RNA, 21 nt, Artificial Sequence
  Synthetic
cuucgccaugcuucuuuugcu

SEQ ID NO: 649975 - RNA, 22 nt, Artificial Sequence
  Synthetic
ccuucgccaugcuucuuuugcu

SEQ ID NO: 649976 - RNA, 23 nt, Artificial Sequence
  Synthetic
cccuucgccaugcuucuuuugcu

SEQ ID NO: 649977 - RNA, 24 nt, Artificial Sequence
  Synthetic
ucccuucgccaugcuucuuuugcu

SEQ ID NO: 649978 - RNA, 18 nt, Artificial Sequence
  Synthetic
agaauaaaaaaaaaaucu

SEQ ID NO: 649979 - RNA, 19 nt, Artificial Sequence
  Synthetic
uagaauaaaaaaaaaaucu

SEQ ID NO: 649980 - RNA, 20 nt, Artificial Sequence
  Synthetic
guagaauaaaaaaaaaaucu

SEQ ID NO: 649981 - RNA, 21 nt, Artificial Sequence
  Synthetic
aguagaauaaaaaaaaaaucu

SEQ ID NO: 649982 - RNA, 22 nt, Artificial Sequence
  Synthetic
aaguagaauaaaaaaaaaaucu

SEQ ID NO: 649983 - RNA, 23 nt, Artificial Sequence
  Synthetic
aaaguagaauaaaaaaaaaaucu

SEQ ID NO: 649984 - RNA, 24 nt, Artificial Sequence
  Synthetic
uaaaguagaauaaaaaaaaaaucu

SEQ ID NO: 649985 - RNA, 18 nt, Artificial Sequence
  Synthetic
aauuaaaacaaaaaaucu

SEQ ID NO: 649986 - RNA, 19 nt, Artificial Sequence
  Synthetic
caauuaaaacaaaaaaucu

SEQ ID NO: 649987 - RNA, 20 nt, Artificial Sequence
  Synthetic
gcaauuaaaacaaaaaaucu

SEQ ID NO: 649988 - RNA, 21 nt, Artificial Sequence
  Synthetic
cgcaauuaaaacaaaaaaucu

SEQ ID NO: 649989 - RNA, 22 nt, Artificial Sequence
  Synthetic
ucgcaauuaaaacaaaaaaucu

SEQ ID NO: 649990 - RNA, 23 nt, Artificial Sequence
  Synthetic
gucgcaauuaaaacaaaaaaucu

SEQ ID NO: 649991 - RNA, 24 nt, Artificial Sequence
  Synthetic
agucgcaauuaaaacaaaaaaucu

SEQ ID NO: 649992 - RNA, 18 nt, Artificial Sequence
  Synthetic
gaaaugacacaaaaaucu

SEQ ID NO: 649993 - RNA, 19 nt, Artificial Sequence
  Synthetic
ugaaaugacacaaaaaucu

SEQ ID NO: 649994 - RNA, 20 nt, Artificial Sequence
  Synthetic
uugaaaugacacaaaaaucu

SEQ ID NO: 649995 - RNA, 21 nt, Artificial Sequence
  Synthetic
cuugaaaugacacaaaaaucu

SEQ ID NO: 649996 - RNA, 22 nt, Artificial Sequence
  Synthetic
acuugaaaugacacaaaaaucu

SEQ ID NO: 649997 - RNA, 23 nt, Artificial Sequence
  Synthetic
gacuugaaaugacacaaaaaucu

SEQ ID NO: 649998 - RNA, 24 nt, Artificial Sequence
  Synthetic
ugacuugaaaugacacaaaaaucu

SEQ ID NO: 649999 - RNA, 18 nt, Artificial Sequence
  Synthetic
uagugcccucaaaaaucu

SEQ ID NO: 650000 - RNA, 19 nt, Artificial Sequence
  Synthetic
uuagugcccucaaaaaucu

SEQ ID NO: 650001 - RNA, 20 nt, Artificial Sequence
  Synthetic
uuuagugcccucaaaaaucu

SEQ ID NO: 650002 - RNA, 21 nt, Artificial Sequence
  Synthetic
auuuagugcccucaaaaaucu

SEQ ID NO: 650003 - RNA, 22 nt, Artificial Sequence
  Synthetic
gauuuagugcccucaaaaaucu

SEQ ID NO: 650004 - RNA, 23 nt, Artificial Sequence
  Synthetic
ugauuuagugcccucaaaaaucu

SEQ ID NO: 650005 - RNA, 24 nt, Artificial Sequence
  Synthetic
augauuuagugcccucaaaaaucu

SEQ ID NO: 650006 - RNA, 18 nt, Artificial Sequence
  Synthetic
cagccuccuuaaaaaucu

SEQ ID NO: 650007 - RNA, 19 nt, Artificial Sequence
  Synthetic
gcagccuccuuaaaaaucu

SEQ ID NO: 650008 - RNA, 20 nt, Artificial Sequence
  Synthetic
agcagccuccuuaaaaaucu

SEQ ID NO: 650009 - RNA, 21 nt, Artificial Sequence
  Synthetic
aagcagccuccuuaaaaaucu

SEQ ID NO: 650010 - RNA, 22 nt, Artificial Sequence
  Synthetic
gaagcagccuccuuaaaaaucu

SEQ ID NO: 650011 - RNA, 23 nt, Artificial Sequence
  Synthetic
ugaagcagccuccuuaaaaaucu

SEQ ID NO: 650012 - RNA, 24 nt, Artificial Sequence
  Synthetic
uugaagcagccuccuuaaaaaucu

SEQ ID NO: 650013 - RNA, 18 nt, Artificial Sequence
  Synthetic
uguguuuuaacaaaaucu

SEQ ID NO: 650014 - RNA, 19 nt, Artificial Sequence
  Synthetic
auguguuuuaacaaaaucu

SEQ ID NO: 650015 - RNA, 20 nt, Artificial Sequence
  Synthetic
gauguguuuuaacaaaaucu

SEQ ID NO: 650016 - RNA, 21 nt, Artificial Sequence
  Synthetic
ggauguguuuuaacaaaaucu

SEQ ID NO: 650017 - RNA, 22 nt, Artificial Sequence
  Synthetic
aggauguguuuuaacaaaaucu

SEQ ID NO: 650018 - RNA, 23 nt, Artificial Sequence
  Synthetic
gaggauguguuuuaacaaaaucu

SEQ ID NO: 650019 - RNA, 24 nt, Artificial Sequence
  Synthetic
agaggauguguuuuaacaaaaucu

SEQ ID NO: 650020 - RNA, 18 nt, Artificial Sequence
  Synthetic
agaaagcucacaaaaucu

SEQ ID NO: 650021 - RNA, 19 nt, Artificial Sequence
  Synthetic
gagaaagcucacaaaaucu

SEQ ID NO: 650022 - RNA, 20 nt, Artificial Sequence
  Synthetic
ugagaaagcucacaaaaucu

SEQ ID NO: 650023 - RNA, 21 nt, Artificial Sequence
  Synthetic
gugagaaagcucacaaaaucu

SEQ ID NO: 650024 - RNA, 22 nt, Artificial Sequence
  Synthetic
ggugagaaagcucacaaaaucu

SEQ ID NO: 650025 - RNA, 23 nt, Artificial Sequence
  Synthetic
gggugagaaagcucacaaaaucu

SEQ ID NO: 650026 - RNA, 24 nt, Artificial Sequence
  Synthetic
agggugagaaagcucacaaaaucu

SEQ ID NO: 650027 - RNA, 18 nt, Artificial Sequence
  Synthetic
uagaauuuuccaaaaucu

SEQ ID NO: 650028 - RNA, 19 nt, Artificial Sequence
  Synthetic
cuagaauuuuccaaaaucu

SEQ ID NO: 650029 - RNA, 20 nt, Artificial Sequence
  Synthetic
ccuagaauuuuccaaaaucu

SEQ ID NO: 650030 - RNA, 21 nt, Artificial Sequence
  Synthetic
uccuagaauuuuccaaaaucu

SEQ ID NO: 650031 - RNA, 22 nt, Artificial Sequence
  Synthetic
auccuagaauuuuccaaaaucu

SEQ ID NO: 650032 - RNA, 23 nt, Artificial Sequence
  Synthetic
uauccuagaauuuuccaaaaucu

SEQ ID NO: 650033 - RNA, 24 nt, Artificial Sequence
  Synthetic
auauccuagaauuuuccaaaaucu

SEQ ID NO: 650034 - RNA, 18 nt, Artificial Sequence
  Synthetic
aucuuaaccagaaaaucu

SEQ ID NO: 650035 - RNA, 19 nt, Artificial Sequence
  Synthetic
aaucuuaaccagaaaaucu

SEQ ID NO: 650036 - RNA, 20 nt, Artificial Sequence
  Synthetic
aaaucuuaaccagaaaaucu

SEQ ID NO: 650037 - RNA, 21 nt, Artificial Sequence
  Synthetic
uaaaucuuaaccagaaaaucu

SEQ ID NO: 650038 - RNA, 22 nt, Artificial Sequence
  Synthetic
cuaaaucuuaaccagaaaaucu

SEQ ID NO: 650039 - RNA, 23 nt, Artificial Sequence
  Synthetic
ucuaaaucuuaaccagaaaaucu

SEQ ID NO: 650040 - RNA, 24 nt, Artificial Sequence
  Synthetic
aucuaaaucuuaaccagaaaaucu

SEQ ID NO: 650041 - RNA, 18 nt, Artificial Sequence
  Synthetic
augcggaagagaaaaucu

SEQ ID NO: 650042 - RNA, 19 nt, Artificial Sequence
  Synthetic
aaugcggaagagaaaaucu

SEQ ID NO: 650043 - RNA, 20 nt, Artificial Sequence
  Synthetic
aaaugcggaagagaaaaucu

SEQ ID NO: 650044 - RNA, 21 nt, Artificial Sequence
  Synthetic
uaaaugcggaagagaaaaucu

SEQ ID NO: 650045 - RNA, 22 nt, Artificial Sequence
  Synthetic
uuaaaugcggaagagaaaaucu

SEQ ID NO: 650046 - RNA, 23 nt, Artificial Sequence
  Synthetic
uuuaaaugcggaagagaaaaucu

SEQ ID NO: 650047 - RNA, 24 nt, Artificial Sequence
  Synthetic
uuuuaaaugcggaagagaaaaucu

SEQ ID NO: 650048 - RNA, 18 nt, Artificial Sequence
  Synthetic
gcuauaauaugaaaaucu

SEQ ID NO: 650049 - RNA, 19 nt, Artificial Sequence
  Synthetic
agcuauaauaugaaaaucu

SEQ ID NO: 650050 - RNA, 20 nt, Artificial Sequence
  Synthetic
gagcuauaauaugaaaaucu

SEQ ID NO: 650051 - RNA, 21 nt, Artificial Sequence
  Synthetic
ugagcuauaauaugaaaaucu

SEQ ID NO: 650052 - RNA, 22 nt, Artificial Sequence
  Synthetic
gugagcuauaauaugaaaaucu

SEQ ID NO: 650053 - RNA, 23 nt, Artificial Sequence
  Synthetic
ugugagcuauaauaugaaaaucu

SEQ ID NO: 650054 - RNA, 24 nt, Artificial Sequence
  Synthetic
gugugagcuauaauaugaaaaucu

SEQ ID NO: 650055 - RNA, 18 nt, Artificial Sequence
  Synthetic
ucccuggauuuaaaaucu

SEQ ID NO: 650056 - RNA, 19 nt, Artificial Sequence
  Synthetic
gucccuggauuuaaaaucu

SEQ ID NO: 650057 - RNA, 20 nt, Artificial Sequence
  Synthetic
agucccuggauuuaaaaucu

SEQ ID NO: 650058 - RNA, 21 nt, Artificial Sequence
  Synthetic
gagucccuggauuuaaaaucu

SEQ ID NO: 650059 - RNA, 22 nt, Artificial Sequence
  Synthetic
cgagucccuggauuuaaaaucu

SEQ ID NO: 650060 - RNA, 23 nt, Artificial Sequence
  Synthetic
acgagucccuggauuuaaaaucu

SEQ ID NO: 650061 - RNA, 24 nt, Artificial Sequence
  Synthetic
aacgagucccuggauuuaaaaucu

SEQ ID NO: 650062 - RNA, 18 nt, Artificial Sequence
  Synthetic
gcucucuagggcaaaucu

SEQ ID NO: 650063 - RNA, 19 nt, Artificial Sequence
  Synthetic
ugcucucuagggcaaaucu

SEQ ID NO: 650064 - RNA, 20 nt, Artificial Sequence
  Synthetic
uugcucucuagggcaaaucu

SEQ ID NO: 650065 - RNA, 21 nt, Artificial Sequence
  Synthetic
auugcucucuagggcaaaucu

SEQ ID NO: 650066 - RNA, 22 nt, Artificial Sequence
  Synthetic
cauugcucucuagggcaaaucu

SEQ ID NO: 650067 - RNA, 23 nt, Artificial Sequence
  Synthetic
ucauugcucucuagggcaaaucu

SEQ ID NO: 650068 - RNA, 24 nt, Artificial Sequence
  Synthetic
gucauugcucucuagggcaaaucu

SEQ ID NO: 650069 - RNA, 18 nt, Artificial Sequence
  Synthetic
acagcuagacucaaaucu

SEQ ID NO: 650070 - RNA, 19 nt, Artificial Sequence
  Synthetic
aacagcuagacucaaaucu

SEQ ID NO: 650071 - RNA, 20 nt, Artificial Sequence
  Synthetic
aaacagcuagacucaaaucu

SEQ ID NO: 650072 - RNA, 21 nt, Artificial Sequence
  Synthetic
gaaacagcuagacucaaaucu

SEQ ID NO: 650073 - RNA, 22 nt, Artificial Sequence
  Synthetic
ugaaacagcuagacucaaaucu

SEQ ID NO: 650074 - RNA, 23 nt, Artificial Sequence
  Synthetic
cugaaacagcuagacucaaaucu

SEQ ID NO: 650075 - RNA, 24 nt, Artificial Sequence
  Synthetic
gcugaaacagcuagacucaaaucu

SEQ ID NO: 650076 - RNA, 18 nt, Artificial Sequence
  Synthetic
cuugccuagaugaaaucu

SEQ ID NO: 650077 - RNA, 19 nt, Artificial Sequence
  Synthetic
acuugccuagaugaaaucu

SEQ ID NO: 650078 - RNA, 20 nt, Artificial Sequence
  Synthetic
aacuugccuagaugaaaucu

SEQ ID NO: 650079 - RNA, 21 nt, Artificial Sequence
  Synthetic
uaacuugccuagaugaaaucu

SEQ ID NO: 650080 - RNA, 22 nt, Artificial Sequence
  Synthetic
auaacuugccuagaugaaaucu

SEQ ID NO: 650081 - RNA, 23 nt, Artificial Sequence
  Synthetic
aauaacuugccuagaugaaaucu

SEQ ID NO: 650082 - RNA, 24 nt, Artificial Sequence
  Synthetic
uaauaacuugccuagaugaaaucu

SEQ ID NO: 650083 - RNA, 18 nt, Artificial Sequence
  Synthetic
aucuguaggaugaaaucu

SEQ ID NO: 650084 - RNA, 19 nt, Artificial Sequence
  Synthetic
aaucuguaggaugaaaucu

SEQ ID NO: 650085 - RNA, 20 nt, Artificial Sequence
  Synthetic
caaucuguaggaugaaaucu

SEQ ID NO: 650086 - RNA, 21 nt, Artificial Sequence
  Synthetic
gcaaucuguaggaugaaaucu

SEQ ID NO: 650087 - RNA, 22 nt, Artificial Sequence
  Synthetic
ugcaaucuguaggaugaaaucu

SEQ ID NO: 650088 - RNA, 23 nt, Artificial Sequence
  Synthetic
cugcaaucuguaggaugaaaucu

SEQ ID NO: 650089 - RNA, 24 nt, Artificial Sequence
  Synthetic
ucugcaaucuguaggaugaaaucu

SEQ ID NO: 650090 - RNA, 18 nt, Artificial Sequence
  Synthetic
uaaaacauacugaaaucu

SEQ ID NO: 650091 - RNA, 19 nt, Artificial Sequence
  Synthetic
auaaaacauacugaaaucu

SEQ ID NO: 650092 - RNA, 20 nt, Artificial Sequence
  Synthetic
cauaaaacauacugaaaucu

SEQ ID NO: 650093 - RNA, 21 nt, Artificial Sequence
  Synthetic
ucauaaaacauacugaaaucu

SEQ ID NO: 650094 - RNA, 22 nt, Artificial Sequence
  Synthetic
gucauaaaacauacugaaaucu

SEQ ID NO: 650095 - RNA, 23 nt, Artificial Sequence
  Synthetic
agucauaaaacauacugaaaucu

SEQ ID NO: 650096 - RNA, 24 nt, Artificial Sequence
  Synthetic
aagucauaaaacauacugaaaucu

SEQ ID NO: 650097 - RNA, 18 nt, Artificial Sequence
  Synthetic
acucugguauauaaaucu

SEQ ID NO: 650098 - RNA, 19 nt, Artificial Sequence
  Synthetic
aacucugguauauaaaucu

SEQ ID NO: 650099 - RNA, 20 nt, Artificial Sequence
  Synthetic
gaacucugguauauaaaucu

SEQ ID NO: 650100 - RNA, 21 nt, Artificial Sequence
  Synthetic
agaacucugguauauaaaucu

SEQ ID NO: 650101 - RNA, 22 nt, Artificial Sequence
  Synthetic
aagaacucugguauauaaaucu

SEQ ID NO: 650102 - RNA, 23 nt, Artificial Sequence
  Synthetic
uaagaacucugguauauaaaucu

SEQ ID NO: 650103 - RNA, 24 nt, Artificial Sequence
  Synthetic
uuaagaacucugguauauaaaucu

SEQ ID NO: 650104 - RNA, 18 nt, Artificial Sequence
  Synthetic
uucuagauuuuuaaaucu

SEQ ID NO: 650105 - RNA, 19 nt, Artificial Sequence
  Synthetic
auucuagauuuuuaaaucu

SEQ ID NO: 650106 - RNA, 20 nt, Artificial Sequence
  Synthetic
uauucuagauuuuuaaaucu

SEQ ID NO: 650107 - RNA, 21 nt, Artificial Sequence
  Synthetic
uuauucuagauuuuuaaaucu

SEQ ID NO: 650108 - RNA, 22 nt, Artificial Sequence
  Synthetic
uuuauucuagauuuuuaaaucu

SEQ ID NO: 650109 - RNA, 23 nt, Artificial Sequence
  Synthetic
guuuauucuagauuuuuaaaucu

SEQ ID NO: 650110 - RNA, 24 nt, Artificial Sequence
  Synthetic
gguuuauucuagauuuuuaaaucu

SEQ ID NO: 650111 - RNA, 18 nt, Artificial Sequence
  Synthetic
uuuguuuuaaaacaaucu

SEQ ID NO: 650112 - RNA, 19 nt, Artificial Sequence
  Synthetic
auuuguuuuaaaacaaucu

SEQ ID NO: 650113 - RNA, 20 nt, Artificial Sequence
  Synthetic
uauuuguuuuaaaacaaucu

SEQ ID NO: 650114 - RNA, 21 nt, Artificial Sequence
  Synthetic
auauuuguuuuaaaacaaucu

SEQ ID NO: 650115 - RNA, 22 nt, Artificial Sequence
  Synthetic
gauauuuguuuuaaaacaaucu

SEQ ID NO: 650116 - RNA, 23 nt, Artificial Sequence
  Synthetic
ugauauuuguuuuaaaacaaucu

SEQ ID NO: 650117 - RNA, 24 nt, Artificial Sequence
  Synthetic
cugauauuuguuuuaaaacaaucu

SEQ ID NO: 650118 - RNA, 18 nt, Artificial Sequence
  Synthetic
auuuaaggaccacaaucu

SEQ ID NO: 650119 - RNA, 19 nt, Artificial Sequence
  Synthetic
gauuuaaggaccacaaucu

SEQ ID NO: 650120 - RNA, 20 nt, Artificial Sequence
  Synthetic
agauuuaaggaccacaaucu

SEQ ID NO: 650121 - RNA, 21 nt, Artificial Sequence
  Synthetic
uagauuuaaggaccacaaucu

SEQ ID NO: 650122 - RNA, 22 nt, Artificial Sequence
  Synthetic
cuagauuuaaggaccacaaucu

SEQ ID NO: 650123 - RNA, 23 nt, Artificial Sequence
  Synthetic
ucuagauuuaaggaccacaaucu

SEQ ID NO: 650124 - RNA, 24 nt, Artificial Sequence
  Synthetic
cucuagauuuaaggaccacaaucu

SEQ ID NO: 650125 - RNA, 18 nt, Artificial Sequence
  Synthetic
uuccuaaauagacaaucu

SEQ ID NO: 650126 - RNA, 19 nt, Artificial Sequence
  Synthetic
uuuccuaaauagacaaucu

SEQ ID NO: 650127 - RNA, 20 nt, Artificial Sequence
  Synthetic
uuuuccuaaauagacaaucu

SEQ ID NO: 650128 - RNA, 21 nt, Artificial Sequence
  Synthetic
uuuuuccuaaauagacaaucu

SEQ ID NO: 650129 - RNA, 22 nt, Artificial Sequence
  Synthetic
cuuuuuccuaaauagacaaucu

SEQ ID NO: 650130 - RNA, 23 nt, Artificial Sequence
  Synthetic
acuuuuuccuaaauagacaaucu

SEQ ID NO: 650131 - RNA, 24 nt, Artificial Sequence
  Synthetic
uacuuuuuccuaaauagacaaucu

SEQ ID NO: 650132 - RNA, 18 nt, Artificial Sequence
  Synthetic
ccagagaaugugcaaucu

SEQ ID NO: 650133 - RNA, 19 nt, Artificial Sequence
  Synthetic
accagagaaugugcaaucu

SEQ ID NO: 650134 - RNA, 20 nt, Artificial Sequence
  Synthetic
aaccagagaaugugcaaucu

SEQ ID NO: 650135 - RNA, 21 nt, Artificial Sequence
  Synthetic
aaaccagagaaugugcaaucu

SEQ ID NO: 650136 - RNA, 22 nt, Artificial Sequence
  Synthetic
caaaccagagaaugugcaaucu

SEQ ID NO: 650137 - RNA, 23 nt, Artificial Sequence
  Synthetic
ccaaaccagagaaugugcaaucu

SEQ ID NO: 650138 - RNA, 24 nt, Artificial Sequence
  Synthetic
accaaaccagagaaugugcaaucu

SEQ ID NO: 650139 - RNA, 18 nt, Artificial Sequence
  Synthetic
guacugagcccucaaucu

SEQ ID NO: 650140 - RNA, 19 nt, Artificial Sequence
  Synthetic
gguacugagcccucaaucu

SEQ ID NO: 650141 - RNA, 20 nt, Artificial Sequence
  Synthetic
cgguacugagcccucaaucu

SEQ ID NO: 650142 - RNA, 21 nt, Artificial Sequence
  Synthetic
ucgguacugagcccucaaucu

SEQ ID NO: 650143 - RNA, 22 nt, Artificial Sequence
  Synthetic
cucgguacugagcccucaaucu

SEQ ID NO: 650144 - RNA, 23 nt, Artificial Sequence
  Synthetic
ccucgguacugagcccucaaucu

SEQ ID NO: 650145 - RNA, 24 nt, Artificial Sequence
  Synthetic
accucgguacugagcccucaaucu

SEQ ID NO: 650146 - RNA, 18 nt, Artificial Sequence
  Synthetic
uguacagauauucaaucu

SEQ ID NO: 650147 - RNA, 19 nt, Artificial Sequence
  Synthetic
auguacagauauucaaucu

SEQ ID NO: 650148 - RNA, 20 nt, Artificial Sequence
  Synthetic
aauguacagauauucaaucu

SEQ ID NO: 650149 - RNA, 21 nt, Artificial Sequence
  Synthetic
aaauguacagauauucaaucu

SEQ ID NO: 650150 - RNA, 22 nt, Artificial Sequence
  Synthetic
caaauguacagauauucaaucu

SEQ ID NO: 650151 - RNA, 23 nt, Artificial Sequence
  Synthetic
gcaaauguacagauauucaaucu

SEQ ID NO: 650152 - RNA, 24 nt, Artificial Sequence
  Synthetic
ugcaaauguacagauauucaaucu

SEQ ID NO: 650153 - RNA, 18 nt, Artificial Sequence
  Synthetic
agagaagaauuucaaucu

SEQ ID NO: 650154 - RNA, 19 nt, Artificial Sequence
  Synthetic
aagagaagaauuucaaucu

SEQ ID NO: 650155 - RNA, 20 nt, Artificial Sequence
  Synthetic
uaagagaagaauuucaaucu

SEQ ID NO: 650156 - RNA, 21 nt, Artificial Sequence
  Synthetic
uuaagagaagaauuucaaucu

SEQ ID NO: 650157 - RNA, 22 nt, Artificial Sequence
  Synthetic
auuaagagaagaauuucaaucu

SEQ ID NO: 650158 - RNA, 23 nt, Artificial Sequence
  Synthetic
gauuaagagaagaauuucaaucu

SEQ ID NO: 650159 - RNA, 24 nt, Artificial Sequence
  Synthetic
ugauuaagagaagaauuucaaucu

SEQ ID NO: 650160 - RNA, 18 nt, Artificial Sequence
  Synthetic
agcauauugaaagaaucu

SEQ ID NO: 650161 - RNA, 19 nt, Artificial Sequence
  Synthetic
cagcauauugaaagaaucu

SEQ ID NO: 650162 - RNA, 20 nt, Artificial Sequence
  Synthetic
gcagcauauugaaagaaucu

SEQ ID NO: 650163 - RNA, 21 nt, Artificial Sequence
  Synthetic
ggcagcauauugaaagaaucu

SEQ ID NO: 650164 - RNA, 22 nt, Artificial Sequence
  Synthetic
gggcagcauauugaaagaaucu

SEQ ID NO: 650165 - RNA, 23 nt, Artificial Sequence
  Synthetic
ggggcagcauauugaaagaaucu

SEQ ID NO: 650166 - RNA, 24 nt, Artificial Sequence
  Synthetic
cggggcagcauauugaaagaaucu

SEQ ID NO: 650167 - RNA, 18 nt, Artificial Sequence
  Synthetic
cugggcagaacagaaucu

SEQ ID NO: 650168 - RNA, 19 nt, Artificial Sequence
  Synthetic
gcugggcagaacagaaucu

SEQ ID NO: 650169 - RNA, 20 nt, Artificial Sequence
  Synthetic
ggcugggcagaacagaaucu

SEQ ID NO: 650170 - RNA, 21 nt, Artificial Sequence
  Synthetic
aggcugggcagaacagaaucu

SEQ ID NO: 650171 - RNA, 22 nt, Artificial Sequence
  Synthetic
gaggcugggcagaacagaaucu

SEQ ID NO: 650172 - RNA, 23 nt, Artificial Sequence
  Synthetic
agaggcugggcagaacagaaucu

SEQ ID NO: 650173 - RNA, 24 nt, Artificial Sequence
  Synthetic
gagaggcugggcagaacagaaucu

SEQ ID NO: 650174 - RNA, 18 nt, Artificial Sequence
  Synthetic
caccacauaccagaaucu

SEQ ID NO: 650175 - RNA, 19 nt, Artificial Sequence
  Synthetic
acaccacauaccagaaucu

SEQ ID NO: 650176 - RNA, 20 nt, Artificial Sequence
  Synthetic
gacaccacauaccagaaucu

SEQ ID NO: 650177 - RNA, 21 nt, Artificial Sequence
  Synthetic
agacaccacauaccagaaucu

SEQ ID NO: 650178 - RNA, 22 nt, Artificial Sequence
  Synthetic
aagacaccacauaccagaaucu

SEQ ID NO: 650179 - RNA, 23 nt, Artificial Sequence
  Synthetic
aaagacaccacauaccagaaucu

SEQ ID NO: 650180 - RNA, 24 nt, Artificial Sequence
  Synthetic
caaagacaccacauaccagaaucu

SEQ ID NO: 650181 - RNA, 18 nt, Artificial Sequence
  Synthetic
agaauauuaucagaaucu

SEQ ID NO: 650182 - RNA, 19 nt, Artificial Sequence
  Synthetic
uagaauauuaucagaaucu

SEQ ID NO: 650183 - RNA, 20 nt, Artificial Sequence
  Synthetic
auagaauauuaucagaaucu

SEQ ID NO: 650184 - RNA, 21 nt, Artificial Sequence
  Synthetic
aauagaauauuaucagaaucu

SEQ ID NO: 650185 - RNA, 22 nt, Artificial Sequence
  Synthetic
aaauagaauauuaucagaaucu

SEQ ID NO: 650186 - RNA, 23 nt, Artificial Sequence
  Synthetic
gaaauagaauauuaucagaaucu

SEQ ID NO: 650187 - RNA, 24 nt, Artificial Sequence
  Synthetic
ggaaauagaauauuaucagaaucu

SEQ ID NO: 650188 - RNA, 18 nt, Artificial Sequence
  Synthetic
cauuucugaggagaaucu

SEQ ID NO: 650189 - RNA, 19 nt, Artificial Sequence
  Synthetic
ucauuucugaggagaaucu

SEQ ID NO: 650190 - RNA, 20 nt, Artificial Sequence
  Synthetic
cucauuucugaggagaaucu

SEQ ID NO: 650191 - RNA, 21 nt, Artificial Sequence
  Synthetic
ccucauuucugaggagaaucu

SEQ ID NO: 650192 - RNA, 22 nt, Artificial Sequence
  Synthetic
accucauuucugaggagaaucu

SEQ ID NO: 650193 - RNA, 23 nt, Artificial Sequence
  Synthetic
gaccucauuucugaggagaaucu

SEQ ID NO: 650194 - RNA, 24 nt, Artificial Sequence
  Synthetic
ggaccucauuucugaggagaaucu

SEQ ID NO: 650195 - RNA, 18 nt, Artificial Sequence
  Synthetic
aaaauaucacuagaaucu

SEQ ID NO: 650196 - RNA, 19 nt, Artificial Sequence
  Synthetic
caaaauaucacuagaaucu

SEQ ID NO: 650197 - RNA, 20 nt, Artificial Sequence
  Synthetic
ucaaaauaucacuagaaucu

SEQ ID NO: 650198 - RNA, 21 nt, Artificial Sequence
  Synthetic
aucaaaauaucacuagaaucu

SEQ ID NO: 650199 - RNA, 22 nt, Artificial Sequence
  Synthetic
uaucaaaauaucacuagaaucu

SEQ ID NO: 650200 - RNA, 23 nt, Artificial Sequence
  Synthetic
guaucaaaauaucacuagaaucu

SEQ ID NO: 650201 - RNA, 24 nt, Artificial Sequence
  Synthetic
uguaucaaaauaucacuagaaucu

SEQ ID NO: 650202 - RNA, 18 nt, Artificial Sequence
  Synthetic
guauaguuaguagaaucu

SEQ ID NO: 650203 - RNA, 19 nt, Artificial Sequence
  Synthetic
gguauaguuaguagaaucu

SEQ ID NO: 650204 - RNA, 20 nt, Artificial Sequence
  Synthetic
ggguauaguuaguagaaucu

SEQ ID NO: 650205 - RNA, 21 nt, Artificial Sequence
  Synthetic
aggguauaguuaguagaaucu

SEQ ID NO: 650206 - RNA, 22 nt, Artificial Sequence
  Synthetic
gaggguauaguuaguagaaucu

SEQ ID NO: 650207 - RNA, 23 nt, Artificial Sequence
  Synthetic
ggaggguauaguuaguagaaucu

SEQ ID NO: 650208 - RNA, 24 nt, Artificial Sequence
  Synthetic
gggaggguauaguuaguagaaucu

SEQ ID NO: 650209 - RNA, 18 nt, Artificial Sequence
  Synthetic
acagggcacuuagaaucu

SEQ ID NO: 650210 - RNA, 19 nt, Artificial Sequence
  Synthetic
uacagggcacuuagaaucu

SEQ ID NO: 650211 - RNA, 20 nt, Artificial Sequence
  Synthetic
cuacagggcacuuagaaucu

SEQ ID NO: 650212 - RNA, 21 nt, Artificial Sequence
  Synthetic
ccuacagggcacuuagaaucu

SEQ ID NO: 650213 - RNA, 22 nt, Artificial Sequence
  Synthetic
gccuacagggcacuuagaaucu

SEQ ID NO: 650214 - RNA, 23 nt, Artificial Sequence
  Synthetic
ugccuacagggcacuuagaaucu

SEQ ID NO: 650215 - RNA, 24 nt, Artificial Sequence
  Synthetic
cugccuacagggcacuuagaaucu

SEQ ID NO: 650216 - RNA, 18 nt, Artificial Sequence
  Synthetic
caagagcuaaaggaaucu

SEQ ID NO: 650217 - RNA, 19 nt, Artificial Sequence
  Synthetic
ucaagagcuaaaggaaucu

SEQ ID NO: 650218 - RNA, 20 nt, Artificial Sequence
  Synthetic
uucaagagcuaaaggaaucu

SEQ ID NO: 650219 - RNA, 21 nt, Artificial Sequence
  Synthetic
auucaagagcuaaaggaaucu

SEQ ID NO: 650220 - RNA, 22 nt, Artificial Sequence
  Synthetic
aauucaagagcuaaaggaaucu

SEQ ID NO: 650221 - RNA, 23 nt, Artificial Sequence
  Synthetic
gaauucaagagcuaaaggaaucu

SEQ ID NO: 650222 - RNA, 24 nt, Artificial Sequence
  Synthetic
agaauucaagagcuaaaggaaucu

SEQ ID NO: 650223 - RNA, 18 nt, Artificial Sequence
  Synthetic
auaguggucaaugaaucu

SEQ ID NO: 650224 - RNA, 19 nt, Artificial Sequence
  Synthetic
cauaguggucaaugaaucu

SEQ ID NO: 650225 - RNA, 20 nt, Artificial Sequence
  Synthetic
acauaguggucaaugaaucu

SEQ ID NO: 650226 - RNA, 21 nt, Artificial Sequence
  Synthetic
gacauaguggucaaugaaucu

SEQ ID NO: 650227 - RNA, 22 nt, Artificial Sequence
  Synthetic
ggacauaguggucaaugaaucu

SEQ ID NO: 650228 - RNA, 23 nt, Artificial Sequence
  Synthetic
gggacauaguggucaaugaaucu

SEQ ID NO: 650229 - RNA, 24 nt, Artificial Sequence
  Synthetic
ugggacauaguggucaaugaaucu

SEQ ID NO: 650230 - RNA, 18 nt, Artificial Sequence
  Synthetic
ugacauaaguaugaaucu

SEQ ID NO: 650231 - RNA, 19 nt, Artificial Sequence
  Synthetic
augacauaaguaugaaucu

SEQ ID NO: 650232 - RNA, 20 nt, Artificial Sequence
  Synthetic
caugacauaaguaugaaucu

SEQ ID NO: 650233 - RNA, 21 nt, Artificial Sequence
  Synthetic
acaugacauaaguaugaaucu

SEQ ID NO: 650234 - RNA, 22 nt, Artificial Sequence
  Synthetic
aacaugacauaaguaugaaucu

SEQ ID NO: 650235 - RNA, 23 nt, Artificial Sequence
  Synthetic
caacaugacauaaguaugaaucu

SEQ ID NO: 650236 - RNA, 24 nt, Artificial Sequence
  Synthetic
ucaacaugacauaaguaugaaucu

SEQ ID NO: 650237 - RNA, 18 nt, Artificial Sequence
  Synthetic
uaccuuccagcugaaucu

SEQ ID NO: 650238 - RNA, 19 nt, Artificial Sequence
  Synthetic
uuaccuuccagcugaaucu

SEQ ID NO: 650239 - RNA, 20 nt, Artificial Sequence
  Synthetic
auuaccuuccagcugaaucu

SEQ ID NO: 650240 - RNA, 21 nt, Artificial Sequence
  Synthetic
cauuaccuuccagcugaaucu

SEQ ID NO: 650241 - RNA, 22 nt, Artificial Sequence
  Synthetic
ucauuaccuuccagcugaaucu

SEQ ID NO: 650242 - RNA, 23 nt, Artificial Sequence
  Synthetic
aucauuaccuuccagcugaaucu

SEQ ID NO: 650243 - RNA, 24 nt, Artificial Sequence
  Synthetic
caucauuaccuuccagcugaaucu

SEQ ID NO: 650244 - RNA, 18 nt, Artificial Sequence
  Synthetic
ggugaaaucucugaaucu

SEQ ID NO: 650245 - RNA, 19 nt, Artificial Sequence
  Synthetic
gggugaaaucucugaaucu

SEQ ID NO: 650246 - RNA, 20 nt, Artificial Sequence
  Synthetic
agggugaaaucucugaaucu

SEQ ID NO: 650247 - RNA, 21 nt, Artificial Sequence
  Synthetic
gagggugaaaucucugaaucu

SEQ ID NO: 650248 - RNA, 22 nt, Artificial Sequence
  Synthetic
ugagggugaaaucucugaaucu

SEQ ID NO: 650249 - RNA, 23 nt, Artificial Sequence
  Synthetic
cugagggugaaaucucugaaucu

SEQ ID NO: 650250 - RNA, 24 nt, Artificial Sequence
  Synthetic
ucugagggugaaaucucugaaucu

SEQ ID NO: 650251 - RNA, 18 nt, Artificial Sequence
  Synthetic
aggaaauugagugaaucu

SEQ ID NO: 650252 - RNA, 19 nt, Artificial Sequence
  Synthetic
aaggaaauugagugaaucu

SEQ ID NO: 650253 - RNA, 20 nt, Artificial Sequence
  Synthetic
gaaggaaauugagugaaucu

SEQ ID NO: 650254 - RNA, 21 nt, Artificial Sequence
  Synthetic
ggaaggaaauugagugaaucu

SEQ ID NO: 650255 - RNA, 22 nt, Artificial Sequence
  Synthetic
aggaaggaaauugagugaaucu

SEQ ID NO: 650256 - RNA, 23 nt, Artificial Sequence
  Synthetic
gaggaaggaaauugagugaaucu

SEQ ID NO: 650257 - RNA, 24 nt, Artificial Sequence
  Synthetic
agaggaaggaaauugagugaaucu

SEQ ID NO: 650258 - RNA, 18 nt, Artificial Sequence
  Synthetic
agagaauagcuugaaucu

SEQ ID NO: 650259 - RNA, 19 nt, Artificial Sequence
  Synthetic
aagagaauagcuugaaucu

SEQ ID NO: 650260 - RNA, 20 nt, Artificial Sequence
  Synthetic
caagagaauagcuugaaucu

SEQ ID NO: 650261 - RNA, 21 nt, Artificial Sequence
  Synthetic
gcaagagaauagcuugaaucu

SEQ ID NO: 650262 - RNA, 22 nt, Artificial Sequence
  Synthetic
ggcaagagaauagcuugaaucu

SEQ ID NO: 650263 - RNA, 23 nt, Artificial Sequence
  Synthetic
aggcaagagaauagcuugaaucu

SEQ ID NO: 650264 - RNA, 24 nt, Artificial Sequence
  Synthetic
gaggcaagagaauagcuugaaucu

SEQ ID NO: 650265 - RNA, 18 nt, Artificial Sequence
  Synthetic
ggagaaucgcuugaaucu

SEQ ID NO: 650266 - RNA, 19 nt, Artificial Sequence
  Synthetic
aggagaaucgcuugaaucu

SEQ ID NO: 650267 - RNA, 20 nt, Artificial Sequence
  Synthetic
caggagaaucgcuugaaucu

SEQ ID NO: 650268 - RNA, 21 nt, Artificial Sequence
  Synthetic
gcaggagaaucgcuugaaucu

SEQ ID NO: 650269 - RNA, 22 nt, Artificial Sequence
  Synthetic
ggcaggagaaucgcuugaaucu

SEQ ID NO: 650270 - RNA, 23 nt, Artificial Sequence
  Synthetic
aggcaggagaaucgcuugaaucu

SEQ ID NO: 650271 - RNA, 24 nt, Artificial Sequence
  Synthetic
gaggcaggagaaucgcuugaaucu

SEQ ID NO: 650272 - RNA, 18 nt, Artificial Sequence
  Synthetic
ucaaaauuaaaauaaucu

SEQ ID NO: 650273 - RNA, 19 nt, Artificial Sequence
  Synthetic
uucaaaauuaaaauaaucu

SEQ ID NO: 650274 - RNA, 20 nt, Artificial Sequence
  Synthetic
uuucaaaauuaaaauaaucu

SEQ ID NO: 650275 - RNA, 21 nt, Artificial Sequence
  Synthetic
cuuucaaaauuaaaauaaucu

SEQ ID NO: 650276 - RNA, 22 nt, Artificial Sequence
  Synthetic
acuuucaaaauuaaaauaaucu

SEQ ID NO: 650277 - RNA, 23 nt, Artificial Sequence
  Synthetic
aacuuucaaaauuaaaauaaucu

SEQ ID NO: 650278 - RNA, 24 nt, Artificial Sequence
  Synthetic
uaacuuucaaaauuaaaauaaucu

SEQ ID NO: 650279 - RNA, 18 nt, Artificial Sequence
  Synthetic
agugccccauaauaaucu

SEQ ID NO: 650280 - RNA, 19 nt, Artificial Sequence
  Synthetic
gagugccccauaauaaucu

SEQ ID NO: 650281 - RNA, 20 nt, Artificial Sequence
  Synthetic
ggagugccccauaauaaucu

SEQ ID NO: 650282 - RNA, 21 nt, Artificial Sequence
  Synthetic
aggagugccccauaauaaucu

SEQ ID NO: 650283 - RNA, 22 nt, Artificial Sequence
  Synthetic
caggagugccccauaauaaucu

SEQ ID NO: 650284 - RNA, 23 nt, Artificial Sequence
  Synthetic
gcaggagugccccauaauaaucu

SEQ ID NO: 650285 - RNA, 24 nt, Artificial Sequence
  Synthetic
ggcaggagugccccauaauaaucu

SEQ ID NO: 650286 - RNA, 18 nt, Artificial Sequence
  Synthetic
auuuaugcuccauaaucu

SEQ ID NO: 650287 - RNA, 19 nt, Artificial Sequence
  Synthetic
gauuuaugcuccauaaucu

SEQ ID NO: 650288 - RNA, 20 nt, Artificial Sequence
  Synthetic
ugauuuaugcuccauaaucu

SEQ ID NO: 650289 - RNA, 21 nt, Artificial Sequence
  Synthetic
uugauuuaugcuccauaaucu

SEQ ID NO: 650290 - RNA, 22 nt, Artificial Sequence
  Synthetic
uuugauuuaugcuccauaaucu

SEQ ID NO: 650291 - RNA, 23 nt, Artificial Sequence
  Synthetic
uuuugauuuaugcuccauaaucu

SEQ ID NO: 650292 - RNA, 24 nt, Artificial Sequence
  Synthetic
cuuuugauuuaugcuccauaaucu

SEQ ID NO: 650293 - RNA, 18 nt, Artificial Sequence
  Synthetic
uucuacaaugcauaaucu

SEQ ID NO: 650294 - RNA, 19 nt, Artificial Sequence
  Synthetic
auucuacaaugcauaaucu

SEQ ID NO: 650295 - RNA, 20 nt, Artificial Sequence
  Synthetic
aauucuacaaugcauaaucu

SEQ ID NO: 650296 - RNA, 21 nt, Artificial Sequence
  Synthetic
aaauucuacaaugcauaaucu

SEQ ID NO: 650297 - RNA, 22 nt, Artificial Sequence
  Synthetic
uaaauucuacaaugcauaaucu

SEQ ID NO: 650298 - RNA, 23 nt, Artificial Sequence
  Synthetic
auaaauucuacaaugcauaaucu

SEQ ID NO: 650299 - RNA, 24 nt, Artificial Sequence
  Synthetic
uauaaauucuacaaugcauaaucu

SEQ ID NO: 650300 - RNA, 18 nt, Artificial Sequence
  Synthetic
aucuugccuagauaaucu

SEQ ID NO: 650301 - RNA, 19 nt, Artificial Sequence
  Synthetic
gaucuugccuagauaaucu

SEQ ID NO: 650302 - RNA, 20 nt, Artificial Sequence
  Synthetic
ugaucuugccuagauaaucu

SEQ ID NO: 650303 - RNA, 21 nt, Artificial Sequence
  Synthetic
augaucuugccuagauaaucu

SEQ ID NO: 650304 - RNA, 22 nt, Artificial Sequence
  Synthetic
uaugaucuugccuagauaaucu

SEQ ID NO: 650305 - RNA, 23 nt, Artificial Sequence
  Synthetic
cuaugaucuugccuagauaaucu

SEQ ID NO: 650306 - RNA, 24 nt, Artificial Sequence
  Synthetic
ucuaugaucuugccuagauaaucu

SEQ ID NO: 650307 - RNA, 18 nt, Artificial Sequence
  Synthetic
ugaguagauuacuaaucu

SEQ ID NO: 650308 - RNA, 19 nt, Artificial Sequence
  Synthetic
uugaguagauuacuaaucu

SEQ ID NO: 650309 - RNA, 20 nt, Artificial Sequence
  Synthetic
auugaguagauuacuaaucu

SEQ ID NO: 650310 - RNA, 21 nt, Artificial Sequence
  Synthetic
uauugaguagauuacuaaucu

SEQ ID NO: 650311 - RNA, 22 nt, Artificial Sequence
  Synthetic
uuauugaguagauuacuaaucu

SEQ ID NO: 650312 - RNA, 23 nt, Artificial Sequence
  Synthetic
uuuauugaguagauuacuaaucu

SEQ ID NO: 650313 - RNA, 24 nt, Artificial Sequence
  Synthetic
auuuauugaguagauuacuaaucu

SEQ ID NO: 650314 - RNA, 18 nt, Artificial Sequence
  Synthetic
ugccacaguugcuaaucu

SEQ ID NO: 650315 - RNA, 19 nt, Artificial Sequence
  Synthetic
augccacaguugcuaaucu

SEQ ID NO: 650316 - RNA, 20 nt, Artificial Sequence
  Synthetic
caugccacaguugcuaaucu

SEQ ID NO: 650317 - RNA, 21 nt, Artificial Sequence
  Synthetic
ucaugccacaguugcuaaucu

SEQ ID NO: 650318 - RNA, 22 nt, Artificial Sequence
  Synthetic
uucaugccacaguugcuaaucu

SEQ ID NO: 650319 - RNA, 23 nt, Artificial Sequence
  Synthetic
cuucaugccacaguugcuaaucu

SEQ ID NO: 650320 - RNA, 24 nt, Artificial Sequence
  Synthetic
gcuucaugccacaguugcuaaucu

SEQ ID NO: 650321 - RNA, 18 nt, Artificial Sequence
  Synthetic
uaagucucucucuaaucu

SEQ ID NO: 650322 - RNA, 19 nt, Artificial Sequence
  Synthetic
guaagucucucucuaaucu

SEQ ID NO: 650323 - RNA, 20 nt, Artificial Sequence
  Synthetic
cguaagucucucucuaaucu

SEQ ID NO: 650324 - RNA, 21 nt, Artificial Sequence
  Synthetic
ccguaagucucucucuaaucu

SEQ ID NO: 650325 - RNA, 22 nt, Artificial Sequence
  Synthetic
accguaagucucucucuaaucu

SEQ ID NO: 650326 - RNA, 23 nt, Artificial Sequence
  Synthetic
aaccguaagucucucucuaaucu

SEQ ID NO: 650327 - RNA, 24 nt, Artificial Sequence
  Synthetic
uaaccguaagucucucucuaaucu

SEQ ID NO: 650328 - RNA, 18 nt, Artificial Sequence
  Synthetic
aaguaaaacuaguaaucu

SEQ ID NO: 650329 - RNA, 19 nt, Artificial Sequence
  Synthetic
uaaguaaaacuaguaaucu

SEQ ID NO: 650330 - RNA, 20 nt, Artificial Sequence
  Synthetic
cuaaguaaaacuaguaaucu

SEQ ID NO: 650331 - RNA, 21 nt, Artificial Sequence
  Synthetic
acuaaguaaaacuaguaaucu

SEQ ID NO: 650332 - RNA, 22 nt, Artificial Sequence
  Synthetic
uacuaaguaaaacuaguaaucu

SEQ ID NO: 650333 - RNA, 23 nt, Artificial Sequence
  Synthetic
auacuaaguaaaacuaguaaucu

SEQ ID NO: 650334 - RNA, 24 nt, Artificial Sequence
  Synthetic
aauacuaaguaaaacuaguaaucu

SEQ ID NO: 650335 - RNA, 18 nt, Artificial Sequence
  Synthetic
auucccuuagcguaaucu

SEQ ID NO: 650336 - RNA, 19 nt, Artificial Sequence
  Synthetic
uauucccuuagcguaaucu

SEQ ID NO: 650337 - RNA, 20 nt, Artificial Sequence
  Synthetic
uuauucccuuagcguaaucu

SEQ ID NO: 650338 - RNA, 21 nt, Artificial Sequence
  Synthetic
uuuauucccuuagcguaaucu

SEQ ID NO: 650339 - RNA, 22 nt, Artificial Sequence
  Synthetic
uuuuauucccuuagcguaaucu

SEQ ID NO: 650340 - RNA, 23 nt, Artificial Sequence
  Synthetic
uuuuuauucccuuagcguaaucu

SEQ ID NO: 650341 - RNA, 24 nt, Artificial Sequence
  Synthetic
guuuuuauucccuuagcguaaucu

SEQ ID NO: 650342 - RNA, 18 nt, Artificial Sequence
  Synthetic
auauuuauauuguaaucu

SEQ ID NO: 650343 - RNA, 19 nt, Artificial Sequence
  Synthetic
uauauuuauauuguaaucu

SEQ ID NO: 650344 - RNA, 20 nt, Artificial Sequence
  Synthetic
auauauuuauauuguaaucu

SEQ ID NO: 650345 - RNA, 21 nt, Artificial Sequence
  Synthetic
aauauauuuauauuguaaucu

SEQ ID NO: 650346 - RNA, 22 nt, Artificial Sequence
  Synthetic
gaauauauuuauauuguaaucu

SEQ ID NO: 650347 - RNA, 23 nt, Artificial Sequence
  Synthetic
ugaauauauuuauauuguaaucu

SEQ ID NO: 650348 - RNA, 24 nt, Artificial Sequence
  Synthetic
cugaauauauuuauauuguaaucu

SEQ ID NO: 650349 - RNA, 18 nt, Artificial Sequence
  Synthetic
guugaaacuuuguaaucu

SEQ ID NO: 650350 - RNA, 19 nt, Artificial Sequence
  Synthetic
aguugaaacuuuguaaucu

SEQ ID NO: 650351 - RNA, 20 nt, Artificial Sequence
  Synthetic
uaguugaaacuuuguaaucu

SEQ ID NO: 650352 - RNA, 21 nt, Artificial Sequence
  Synthetic
cuaguugaaacuuuguaaucu

SEQ ID NO: 650353 - RNA, 22 nt, Artificial Sequence
  Synthetic
ucuaguugaaacuuuguaaucu

SEQ ID NO: 650354 - RNA, 23 nt, Artificial Sequence
  Synthetic
gucuaguugaaacuuuguaaucu

SEQ ID NO: 650355 - RNA, 24 nt, Artificial Sequence
  Synthetic
ugucuaguugaaacuuuguaaucu

SEQ ID NO: 650356 - RNA, 18 nt, Artificial Sequence
  Synthetic
aagaaaggcaauuaaucu

SEQ ID NO: 650357 - RNA, 19 nt, Artificial Sequence
  Synthetic
aaagaaaggcaauuaaucu

SEQ ID NO: 650358 - RNA, 20 nt, Artificial Sequence
  Synthetic
uaaagaaaggcaauuaaucu

SEQ ID NO: 650359 - RNA, 21 nt, Artificial Sequence
  Synthetic
uuaaagaaaggcaauuaaucu

SEQ ID NO: 650360 - RNA, 22 nt, Artificial Sequence
  Synthetic
guuaaagaaaggcaauuaaucu

SEQ ID NO: 650361 - RNA, 23 nt, Artificial Sequence
  Synthetic
gguuaaagaaaggcaauuaaucu

SEQ ID NO: 650362 - RNA, 24 nt, Artificial Sequence
  Synthetic
agguuaaagaaaggcaauuaaucu

SEQ ID NO: 650363 - RNA, 18 nt, Artificial Sequence
  Synthetic
uuguuaucuuauuaaucu

SEQ ID NO: 650364 - RNA, 19 nt, Artificial Sequence
  Synthetic
auuguuaucuuauuaaucu

SEQ ID NO: 650365 - RNA, 20 nt, Artificial Sequence
  Synthetic
aauuguuaucuuauuaaucu

SEQ ID NO: 650366 - RNA, 21 nt, Artificial Sequence
  Synthetic
uaauuguuaucuuauuaaucu

SEQ ID NO: 650367 - RNA, 22 nt, Artificial Sequence
  Synthetic
auaauuguuaucuuauuaaucu

SEQ ID NO: 650368 - RNA, 23 nt, Artificial Sequence
  Synthetic
uauaauuguuaucuuauuaaucu

SEQ ID NO: 650369 - RNA, 24 nt, Artificial Sequence
  Synthetic
cuauaauuguuaucuuauuaaucu

SEQ ID NO: 650370 - RNA, 18 nt, Artificial Sequence
  Synthetic
ggaaauuugcuuuaaucu

SEQ ID NO: 650371 - RNA, 19 nt, Artificial Sequence
  Synthetic
uggaaauuugcuuuaaucu

SEQ ID NO: 650372 - RNA, 20 nt, Artificial Sequence
  Synthetic
uuggaaauuugcuuuaaucu

SEQ ID NO: 650373 - RNA, 21 nt, Artificial Sequence
  Synthetic
guuggaaauuugcuuuaaucu

SEQ ID NO: 650374 - RNA, 22 nt, Artificial Sequence
  Synthetic
uguuggaaauuugcuuuaaucu

SEQ ID NO: 650375 - RNA, 23 nt, Artificial Sequence
  Synthetic
guguuggaaauuugcuuuaaucu

SEQ ID NO: 650376 - RNA, 24 nt, Artificial Sequence
  Synthetic
cguguuggaaauuugcuuuaaucu

SEQ ID NO: 650377 - RNA, 18 nt, Artificial Sequence
  Synthetic
ucuuuugaauuuuaaucu

SEQ ID NO: 650378 - RNA, 19 nt, Artificial Sequence
  Synthetic
uucuuuugaauuuuaaucu

SEQ ID NO: 650379 - RNA, 20 nt, Artificial Sequence
  Synthetic
cuucuuuugaauuuuaaucu

SEQ ID NO: 650380 - RNA, 21 nt, Artificial Sequence
  Synthetic
acuucuuuugaauuuuaaucu

SEQ ID NO: 650381 - RNA, 22 nt, Artificial Sequence
  Synthetic
aacuucuuuugaauuuuaaucu

SEQ ID NO: 650382 - RNA, 23 nt, Artificial Sequence
  Synthetic
uaacuucuuuugaauuuuaaucu

SEQ ID NO: 650383 - RNA, 24 nt, Artificial Sequence
  Synthetic
uuaacuucuuuugaauuuuaaucu

SEQ ID NO: 650384 - RNA, 18 nt, Artificial Sequence
  Synthetic
aguuucgcauuuuaaucu

SEQ ID NO: 650385 - RNA, 19 nt, Artificial Sequence
  Synthetic
caguuucgcauuuuaaucu

SEQ ID NO: 650386 - RNA, 20 nt, Artificial Sequence
  Synthetic
ccaguuucgcauuuuaaucu

SEQ ID NO: 650387 - RNA, 21 nt, Artificial Sequence
  Synthetic
uccaguuucgcauuuuaaucu

SEQ ID NO: 650388 - RNA, 22 nt, Artificial Sequence
  Synthetic
uuccaguuucgcauuuuaaucu

SEQ ID NO: 650389 - RNA, 23 nt, Artificial Sequence
  Synthetic
uuuccaguuucgcauuuuaaucu

SEQ ID NO: 650390 - RNA, 24 nt, Artificial Sequence
  Synthetic
auuuccaguuucgcauuuuaaucu

SEQ ID NO: 650391 - RNA, 18 nt, Artificial Sequence
  Synthetic
uuacauaucuuuuaaucu

SEQ ID NO: 650392 - RNA, 19 nt, Artificial Sequence
  Synthetic
uuuacauaucuuuuaaucu

SEQ ID NO: 650393 - RNA, 20 nt, Artificial Sequence
  Synthetic
guuuacauaucuuuuaaucu

SEQ ID NO: 650394 - RNA, 21 nt, Artificial Sequence
  Synthetic
uguuuacauaucuuuuaaucu

SEQ ID NO: 650395 - RNA, 22 nt, Artificial Sequence
  Synthetic
cuguuuacauaucuuuuaaucu

SEQ ID NO: 650396 - RNA, 23 nt, Artificial Sequence
  Synthetic
gcuguuuacauaucuuuuaaucu

SEQ ID NO: 650397 - RNA, 24 nt, Artificial Sequence
  Synthetic
agcuguuuacauaucuuuuaaucu

SEQ ID NO: 650398 - RNA, 18 nt, Artificial Sequence
  Synthetic
caacacauguuuuaaucu

SEQ ID NO: 650399 - RNA, 19 nt, Artificial Sequence
  Synthetic
acaacacauguuuuaaucu

SEQ ID NO: 650400 - RNA, 20 nt, Artificial Sequence
  Synthetic
gacaacacauguuuuaaucu

SEQ ID NO: 650401 - RNA, 21 nt, Artificial Sequence
  Synthetic
ggacaacacauguuuuaaucu

SEQ ID NO: 650402 - RNA, 22 nt, Artificial Sequence
  Synthetic
aggacaacacauguuuuaaucu

SEQ ID NO: 650403 - RNA, 23 nt, Artificial Sequence
  Synthetic
aaggacaacacauguuuuaaucu

SEQ ID NO: 650404 - RNA, 24 nt, Artificial Sequence
  Synthetic
aaaggacaacacauguuuuaaucu

SEQ ID NO: 650405 - RNA, 18 nt, Artificial Sequence
  Synthetic
cauuguuauuuuuaaucu

SEQ ID NO: 650406 - RNA, 19 nt, Artificial Sequence
  Synthetic
ucauuguuauuuuuaaucu

SEQ ID NO: 650407 - RNA, 20 nt, Artificial Sequence
  Synthetic
uucauuguuauuuuuaaucu

SEQ ID NO: 650408 - RNA, 21 nt, Artificial Sequence
  Synthetic
cuucauuguuauuuuuaaucu

SEQ ID NO: 650409 - RNA, 22 nt, Artificial Sequence
  Synthetic
ccuucauuguuauuuuuaaucu

SEQ ID NO: 650410 - RNA, 23 nt, Artificial Sequence
  Synthetic
uccuucauuguuauuuuuaaucu

SEQ ID NO: 650411 - RNA, 24 nt, Artificial Sequence
  Synthetic
uuccuucauuguuauuuuuaaucu

SEQ ID NO: 650412 - RNA, 18 nt, Artificial Sequence
  Synthetic
gcaagucacauaacaucu

SEQ ID NO: 650413 - RNA, 19 nt, Artificial Sequence
  Synthetic
ggcaagucacauaacaucu

SEQ ID NO: 650414 - RNA, 20 nt, Artificial Sequence
  Synthetic
aggcaagucacauaacaucu

SEQ ID NO: 650415 - RNA, 21 nt, Artificial Sequence
  Synthetic
uaggcaagucacauaacaucu

SEQ ID NO: 650416 - RNA, 22 nt, Artificial Sequence
  Synthetic
uuaggcaagucacauaacaucu

SEQ ID NO: 650417 - RNA, 23 nt, Artificial Sequence
  Synthetic
cuuaggcaagucacauaacaucu

SEQ ID NO: 650418 - RNA, 24 nt, Artificial Sequence
  Synthetic
gcuuaggcaagucacauaacaucu

SEQ ID NO: 650419 - RNA, 18 nt, Artificial Sequence
  Synthetic
uucuggggauuaacaucu

SEQ ID NO: 650420 - RNA, 19 nt, Artificial Sequence
  Synthetic
guucuggggauuaacaucu

SEQ ID NO: 650421 - RNA, 20 nt, Artificial Sequence
  Synthetic
gguucuggggauuaacaucu

SEQ ID NO: 650422 - RNA, 21 nt, Artificial Sequence
  Synthetic
agguucuggggauuaacaucu

SEQ ID NO: 650423 - RNA, 22 nt, Artificial Sequence
  Synthetic
cagguucuggggauuaacaucu

SEQ ID NO: 650424 - RNA, 23 nt, Artificial Sequence
  Synthetic
acagguucuggggauuaacaucu

SEQ ID NO: 650425 - RNA, 24 nt, Artificial Sequence
  Synthetic
cacagguucuggggauuaacaucu

SEQ ID NO: 650426 - RNA, 18 nt, Artificial Sequence
  Synthetic
ggaugggacagcacaucu

SEQ ID NO: 650427 - RNA, 19 nt, Artificial Sequence
  Synthetic
aggaugggacagcacaucu

SEQ ID NO: 650428 - RNA, 20 nt, Artificial Sequence
  Synthetic
caggaugggacagcacaucu

SEQ ID NO: 650429 - RNA, 21 nt, Artificial Sequence
  Synthetic
acaggaugggacagcacaucu

SEQ ID NO: 650430 - RNA, 22 nt, Artificial Sequence
  Synthetic
cacaggaugggacagcacaucu

SEQ ID NO: 650431 - RNA, 23 nt, Artificial Sequence
  Synthetic
acacaggaugggacagcacaucu

SEQ ID NO: 650432 - RNA, 24 nt, Artificial Sequence
  Synthetic
gacacaggaugggacagcacaucu

SEQ ID NO: 650433 - RNA, 18 nt, Artificial Sequence
  Synthetic
auaauuuauggcacaucu

SEQ ID NO: 650434 - RNA, 19 nt, Artificial Sequence
  Synthetic
gauaauuuauggcacaucu

SEQ ID NO: 650435 - RNA, 20 nt, Artificial Sequence
  Synthetic
ggauaauuuauggcacaucu

SEQ ID NO: 650436 - RNA, 21 nt, Artificial Sequence
  Synthetic
uggauaauuuauggcacaucu

SEQ ID NO: 650437 - RNA, 22 nt, Artificial Sequence
  Synthetic
guggauaauuuauggcacaucu

SEQ ID NO: 650438 - RNA, 23 nt, Artificial Sequence
  Synthetic
uguggauaauuuauggcacaucu

SEQ ID NO: 650439 - RNA, 24 nt, Artificial Sequence
  Synthetic
uuguggauaauuuauggcacaucu

SEQ ID NO: 650440 - RNA, 18 nt, Artificial Sequence
  Synthetic
aacagcauauucacaucu

SEQ ID NO: 650441 - RNA, 19 nt, Artificial Sequence
  Synthetic
gaacagcauauucacaucu

SEQ ID NO: 650442 - RNA, 20 nt, Artificial Sequence
  Synthetic
ggaacagcauauucacaucu

SEQ ID NO: 650443 - RNA, 21 nt, Artificial Sequence
  Synthetic
uggaacagcauauucacaucu

SEQ ID NO: 650444 - RNA, 22 nt, Artificial Sequence
  Synthetic
cuggaacagcauauucacaucu

SEQ ID NO: 650445 - RNA, 23 nt, Artificial Sequence
  Synthetic
ccuggaacagcauauucacaucu

SEQ ID NO: 650446 - RNA, 24 nt, Artificial Sequence
  Synthetic
uccuggaacagcauauucacaucu

SEQ ID NO: 650447 - RNA, 18 nt, Artificial Sequence
  Synthetic
ucaaaaagagagacaucu

SEQ ID NO: 650448 - RNA, 19 nt, Artificial Sequence
  Synthetic
cucaaaaagagagacaucu

SEQ ID NO: 650449 - RNA, 20 nt, Artificial Sequence
  Synthetic
acucaaaaagagagacaucu

SEQ ID NO: 650450 - RNA, 21 nt, Artificial Sequence
  Synthetic
cacucaaaaagagagacaucu

SEQ ID NO: 650451 - RNA, 22 nt, Artificial Sequence
  Synthetic
acacucaaaaagagagacaucu

SEQ ID NO: 650452 - RNA, 23 nt, Artificial Sequence
  Synthetic
gacacucaaaaagagagacaucu

SEQ ID NO: 650453 - RNA, 24 nt, Artificial Sequence
  Synthetic
ugacacucaaaaagagagacaucu

SEQ ID NO: 650454 - RNA, 18 nt, Artificial Sequence
  Synthetic
acugggaauuugacaucu

SEQ ID NO: 650455 - RNA, 19 nt, Artificial Sequence
  Synthetic
uacugggaauuugacaucu

SEQ ID NO: 650456 - RNA, 20 nt, Artificial Sequence
  Synthetic
uuacugggaauuugacaucu

SEQ ID NO: 650457 - RNA, 21 nt, Artificial Sequence
  Synthetic
cuuacugggaauuugacaucu

SEQ ID NO: 650458 - RNA, 22 nt, Artificial Sequence
  Synthetic
acuuacugggaauuugacaucu

SEQ ID NO: 650459 - RNA, 23 nt, Artificial Sequence
  Synthetic
uacuuacugggaauuugacaucu

SEQ ID NO: 650460 - RNA, 24 nt, Artificial Sequence
  Synthetic
cuacuuacugggaauuugacaucu

SEQ ID NO: 650461 - RNA, 18 nt, Artificial Sequence
  Synthetic
aaacauauuuuuacaucu

SEQ ID NO: 650462 - RNA, 19 nt, Artificial Sequence
  Synthetic
uaaacauauuuuuacaucu

SEQ ID NO: 650463 - RNA, 20 nt, Artificial Sequence
  Synthetic
uuaaacauauuuuuacaucu

SEQ ID NO: 650464 - RNA, 21 nt, Artificial Sequence
  Synthetic
uuuaaacauauuuuuacaucu

SEQ ID NO: 650465 - RNA, 22 nt, Artificial Sequence
  Synthetic
auuuaaacauauuuuuacaucu

SEQ ID NO: 650466 - RNA, 23 nt, Artificial Sequence
  Synthetic
gauuuaaacauauuuuuacaucu

SEQ ID NO: 650467 - RNA, 24 nt, Artificial Sequence
  Synthetic
ugauuuaaacauauuuuuacaucu

SEQ ID NO: 650468 - RNA, 18 nt, Artificial Sequence
  Synthetic
ugucuuuaaaaaccaucu

SEQ ID NO: 650469 - RNA, 19 nt, Artificial Sequence
  Synthetic
augucuuuaaaaaccaucu

SEQ ID NO: 650470 - RNA, 20 nt, Artificial Sequence
  Synthetic
caugucuuuaaaaaccaucu

SEQ ID NO: 650471 - RNA, 21 nt, Artificial Sequence
  Synthetic
ccaugucuuuaaaaaccaucu

SEQ ID NO: 650472 - RNA, 22 nt, Artificial Sequence
  Synthetic
cccaugucuuuaaaaaccaucu

SEQ ID NO: 650473 - RNA, 23 nt, Artificial Sequence
  Synthetic
ucccaugucuuuaaaaaccaucu

SEQ ID NO: 650474 - RNA, 24 nt, Artificial Sequence
  Synthetic
gucccaugucuuuaaaaaccaucu

SEQ ID NO: 650475 - RNA, 18 nt, Artificial Sequence
  Synthetic
aguaaaacaggaccaucu

SEQ ID NO: 650476 - RNA, 19 nt, Artificial Sequence
  Synthetic
caguaaaacaggaccaucu

SEQ ID NO: 650477 - RNA, 20 nt, Artificial Sequence
  Synthetic
ucaguaaaacaggaccaucu

SEQ ID NO: 650478 - RNA, 21 nt, Artificial Sequence
  Synthetic
uucaguaaaacaggaccaucu

SEQ ID NO: 650479 - RNA, 22 nt, Artificial Sequence
  Synthetic
cuucaguaaaacaggaccaucu

SEQ ID NO: 650480 - RNA, 23 nt, Artificial Sequence
  Synthetic
ucuucaguaaaacaggaccaucu

SEQ ID NO: 650481 - RNA, 24 nt, Artificial Sequence
  Synthetic
aucuucaguaaaacaggaccaucu

SEQ ID NO: 650482 - RNA, 18 nt, Artificial Sequence
  Synthetic
aagaaaaaaauaccaucu

SEQ ID NO: 650483 - RNA, 19 nt, Artificial Sequence
  Synthetic
gaagaaaaaaauaccaucu

SEQ ID NO: 650484 - RNA, 20 nt, Artificial Sequence
  Synthetic
ugaagaaaaaaauaccaucu

SEQ ID NO: 650485 - RNA, 21 nt, Artificial Sequence
  Synthetic
augaagaaaaaaauaccaucu

SEQ ID NO: 650486 - RNA, 22 nt, Artificial Sequence
  Synthetic
aaugaagaaaaaaauaccaucu

SEQ ID NO: 650487 - RNA, 23 nt, Artificial Sequence
  Synthetic
caaugaagaaaaaaauaccaucu

SEQ ID NO: 650488 - RNA, 24 nt, Artificial Sequence
  Synthetic
ccaaugaagaaaaaaauaccaucu

SEQ ID NO: 650489 - RNA, 18 nt, Artificial Sequence
  Synthetic
accagaaauauaccaucu

SEQ ID NO: 650490 - RNA, 19 nt, Artificial Sequence
  Synthetic
aaccagaaauauaccaucu

SEQ ID NO: 650491 - RNA, 20 nt, Artificial Sequence
  Synthetic
aaaccagaaauauaccaucu

SEQ ID NO: 650492 - RNA, 21 nt, Artificial Sequence
  Synthetic
gaaaccagaaauauaccaucu

SEQ ID NO: 650493 - RNA, 22 nt, Artificial Sequence
  Synthetic
agaaaccagaaauauaccaucu

SEQ ID NO: 650494 - RNA, 23 nt, Artificial Sequence
  Synthetic
aagaaaccagaaauauaccaucu

SEQ ID NO: 650495 - RNA, 24 nt, Artificial Sequence
  Synthetic
aaagaaaccagaaauauaccaucu

SEQ ID NO: 650496 - RNA, 18 nt, Artificial Sequence
  Synthetic
caguuuuaucuaccaucu

SEQ ID NO: 650497 - RNA, 19 nt, Artificial Sequence
  Synthetic
acaguuuuaucuaccaucu

SEQ ID NO: 650498 - RNA, 20 nt, Artificial Sequence
  Synthetic
aacaguuuuaucuaccaucu

SEQ ID NO: 650499 - RNA, 21 nt, Artificial Sequence
  Synthetic
aaacaguuuuaucuaccaucu

SEQ ID NO: 650500 - RNA, 22 nt, Artificial Sequence
  Synthetic
aaaacaguuuuaucuaccaucu

SEQ ID NO: 650501 - RNA, 23 nt, Artificial Sequence
  Synthetic
gaaaacaguuuuaucuaccaucu

SEQ ID NO: 650502 - RNA, 24 nt, Artificial Sequence
  Synthetic
ggaaaacaguuuuaucuaccaucu

SEQ ID NO: 650503 - RNA, 18 nt, Artificial Sequence
  Synthetic
ccauaguccaacccaucu

SEQ ID NO: 650504 - RNA, 19 nt, Artificial Sequence
  Synthetic
uccauaguccaacccaucu

SEQ ID NO: 650505 - RNA, 20 nt, Artificial Sequence
  Synthetic
auccauaguccaacccaucu

SEQ ID NO: 650506 - RNA, 21 nt, Artificial Sequence
  Synthetic
uauccauaguccaacccaucu

SEQ ID NO: 650507 - RNA, 22 nt, Artificial Sequence
  Synthetic
auauccauaguccaacccaucu

SEQ ID NO: 650508 - RNA, 23 nt, Artificial Sequence
  Synthetic
cauauccauaguccaacccaucu

SEQ ID NO: 650509 - RNA, 24 nt, Artificial Sequence
  Synthetic
ucauauccauaguccaacccaucu

SEQ ID NO: 650510 - RNA, 18 nt, Artificial Sequence
  Synthetic
ccccugcccaccccaucu

SEQ ID NO: 650511 - RNA, 19 nt, Artificial Sequence
  Synthetic
cccccugcccaccccaucu

SEQ ID NO: 650512 - RNA, 20 nt, Artificial Sequence
  Synthetic
gcccccugcccaccccaucu

SEQ ID NO: 650513 - RNA, 21 nt, Artificial Sequence
  Synthetic
ugcccccugcccaccccaucu

SEQ ID NO: 650514 - RNA, 22 nt, Artificial Sequence
  Synthetic
gugcccccugcccaccccaucu

SEQ ID NO: 650515 - RNA, 23 nt, Artificial Sequence
  Synthetic
ugugcccccugcccaccccaucu

SEQ ID NO: 650516 - RNA, 24 nt, Artificial Sequence
  Synthetic
cugugcccccugcccaccccaucu

SEQ ID NO: 650517 - RNA, 18 nt, Artificial Sequence
  Synthetic
cuggggccugccccaucu

SEQ ID NO: 650518 - RNA, 19 nt, Artificial Sequence
  Synthetic
ccuggggccugccccaucu

SEQ ID NO: 650519 - RNA, 20 nt, Artificial Sequence
  Synthetic
gccuggggccugccccaucu

SEQ ID NO: 650520 - RNA, 21 nt, Artificial Sequence
  Synthetic
agccuggggccugccccaucu

SEQ ID NO: 650521 - RNA, 22 nt, Artificial Sequence
  Synthetic
cagccuggggccugccccaucu

SEQ ID NO: 650522 - RNA, 23 nt, Artificial Sequence
  Synthetic
gcagccuggggccugccccaucu

SEQ ID NO: 650523 - RNA, 24 nt, Artificial Sequence
  Synthetic
ugcagccuggggccugccccaucu

SEQ ID NO: 650524 - RNA, 18 nt, Artificial Sequence
  Synthetic
agcuagauggucccaucu

SEQ ID NO: 650525 - RNA, 19 nt, Artificial Sequence
  Synthetic
cagcuagauggucccaucu

SEQ ID NO: 650526 - RNA, 20 nt, Artificial Sequence
  Synthetic
gcagcuagauggucccaucu

SEQ ID NO: 650527 - RNA, 21 nt, Artificial Sequence
  Synthetic
ugcagcuagauggucccaucu

SEQ ID NO: 650528 - RNA, 22 nt, Artificial Sequence
  Synthetic
cugcagcuagauggucccaucu

SEQ ID NO: 650529 - RNA, 23 nt, Artificial Sequence
  Synthetic
ccugcagcuagauggucccaucu

SEQ ID NO: 650530 - RNA, 24 nt, Artificial Sequence
  Synthetic
uccugcagcuagauggucccaucu

SEQ ID NO: 650531 - RNA, 18 nt, Artificial Sequence
  Synthetic
guauccugauauccaucu

SEQ ID NO: 650532 - RNA, 19 nt, Artificial Sequence
  Synthetic
aguauccugauauccaucu

SEQ ID NO: 650533 - RNA, 20 nt, Artificial Sequence
  Synthetic
caguauccugauauccaucu

SEQ ID NO: 650534 - RNA, 21 nt, Artificial Sequence
  Synthetic
gcaguauccugauauccaucu

SEQ ID NO: 650535 - RNA, 22 nt, Artificial Sequence
  Synthetic
ugcaguauccugauauccaucu

SEQ ID NO: 650536 - RNA, 23 nt, Artificial Sequence
  Synthetic
cugcaguauccugauauccaucu

SEQ ID NO: 650537 - RNA, 24 nt, Artificial Sequence
  Synthetic
ucugcaguauccugauauccaucu

SEQ ID NO: 650538 - RNA, 18 nt, Artificial Sequence
  Synthetic
cagagugagacuccaucu

SEQ ID NO: 650539 - RNA, 21 nt, Artificial Sequence
  Synthetic
cgacagagugagacuccaucu

SEQ ID NO: 650540 - RNA, 22 nt, Artificial Sequence
  Synthetic
gcgacagagugagacuccaucu

SEQ ID NO: 650541 - RNA, 23 nt, Artificial Sequence
  Synthetic
ggcgacagagugagacuccaucu

SEQ ID NO: 650542 - RNA, 24 nt, Artificial Sequence
  Synthetic
gggcgacagagugagacuccaucu

SEQ ID NO: 650543 - RNA, 19 nt, Artificial Sequence
  Synthetic
gcagagugagacuccaucu

SEQ ID NO: 650544 - RNA, 20 nt, Artificial Sequence
  Synthetic
ugcagagugagacuccaucu

SEQ ID NO: 650545 - RNA, 21 nt, Artificial Sequence
  Synthetic
gugcagagugagacuccaucu

SEQ ID NO: 650546 - RNA, 22 nt, Artificial Sequence
  Synthetic
ggugcagagugagacuccaucu

SEQ ID NO: 650547 - RNA, 23 nt, Artificial Sequence
  Synthetic
gggugcagagugagacuccaucu

SEQ ID NO: 650548 - RNA, 24 nt, Artificial Sequence
  Synthetic
agggugcagagugagacuccaucu

SEQ ID NO: 650549 - RNA, 18 nt, Artificial Sequence
  Synthetic
cccucaguuucuccaucu

SEQ ID NO: 650550 - RNA, 19 nt, Artificial Sequence
  Synthetic
acccucaguuucuccaucu

SEQ ID NO: 650551 - RNA, 20 nt, Artificial Sequence
  Synthetic
aacccucaguuucuccaucu

SEQ ID NO: 650552 - RNA, 21 nt, Artificial Sequence
  Synthetic
caacccucaguuucuccaucu

SEQ ID NO: 650553 - RNA, 22 nt, Artificial Sequence
  Synthetic
ccaacccucaguuucuccaucu

SEQ ID NO: 650554 - RNA, 23 nt, Artificial Sequence
  Synthetic
uccaacccucaguuucuccaucu

SEQ ID NO: 650555 - RNA, 24 nt, Artificial Sequence
  Synthetic
cuccaacccucaguuucuccaucu

SEQ ID NO: 650556 - RNA, 18 nt, Artificial Sequence
  Synthetic
aaggacuuaaguccaucu

SEQ ID NO: 650557 - RNA, 19 nt, Artificial Sequence
  Synthetic
aaaggacuuaaguccaucu

SEQ ID NO: 650558 - RNA, 20 nt, Artificial Sequence
  Synthetic
gaaaggacuuaaguccaucu

SEQ ID NO: 650559 - RNA, 21 nt, Artificial Sequence
  Synthetic
ugaaaggacuuaaguccaucu

SEQ ID NO: 650560 - RNA, 22 nt, Artificial Sequence
  Synthetic
cugaaaggacuuaaguccaucu

SEQ ID NO: 650561 - RNA, 23 nt, Artificial Sequence
  Synthetic
ucugaaaggacuuaaguccaucu

SEQ ID NO: 650562 - RNA, 24 nt, Artificial Sequence
  Synthetic
aucugaaaggacuuaaguccaucu

SEQ ID NO: 650563 - RNA, 18 nt, Artificial Sequence
  Synthetic
gguuucugucuuccaucu

SEQ ID NO: 650564 - RNA, 19 nt, Artificial Sequence
  Synthetic
ugguuucugucuuccaucu

SEQ ID NO: 650565 - RNA, 20 nt, Artificial Sequence
  Synthetic
uugguuucugucuuccaucu

SEQ ID NO: 650566 - RNA, 21 nt, Artificial Sequence
  Synthetic
guugguuucugucuuccaucu

SEQ ID NO: 650567 - RNA, 22 nt, Artificial Sequence
  Synthetic
uguugguuucugucuuccaucu

SEQ ID NO: 650568 - RNA, 23 nt, Artificial Sequence
  Synthetic
auguugguuucugucuuccaucu

SEQ ID NO: 650569 - RNA, 24 nt, Artificial Sequence
  Synthetic
uauguugguuucugucuuccaucu

SEQ ID NO: 650570 - RNA, 18 nt, Artificial Sequence
  Synthetic
auggugugaguuccaucu

SEQ ID NO: 650571 - RNA, 19 nt, Artificial Sequence
  Synthetic
uauggugugaguuccaucu

SEQ ID NO: 650572 - RNA, 20 nt, Artificial Sequence
  Synthetic
uuauggugugaguuccaucu

SEQ ID NO: 650573 - RNA, 21 nt, Artificial Sequence
  Synthetic
uuuauggugugaguuccaucu

SEQ ID NO: 650574 - RNA, 22 nt, Artificial Sequence
  Synthetic
uuuuauggugugaguuccaucu

SEQ ID NO: 650575 - RNA, 23 nt, Artificial Sequence
  Synthetic
uuuuuauggugugaguuccaucu

SEQ ID NO: 650576 - RNA, 24 nt, Artificial Sequence
  Synthetic
auuuuuauggugugaguuccaucu

SEQ ID NO: 650577 - RNA, 18 nt, Artificial Sequence
  Synthetic
aggcagccuguuccaucu

SEQ ID NO: 650578 - RNA, 19 nt, Artificial Sequence
  Synthetic
aaggcagccuguuccaucu

SEQ ID NO: 650579 - RNA, 20 nt, Artificial Sequence
  Synthetic
caaggcagccuguuccaucu

SEQ ID NO: 650580 - RNA, 21 nt, Artificial Sequence
  Synthetic
acaaggcagccuguuccaucu

SEQ ID NO: 650581 - RNA, 22 nt, Artificial Sequence
  Synthetic
uacaaggcagccuguuccaucu

SEQ ID NO: 650582 - RNA, 23 nt, Artificial Sequence
  Synthetic
uuacaaggcagccuguuccaucu

SEQ ID NO: 650583 - RNA, 24 nt, Artificial Sequence
  Synthetic
uuuacaaggcagccuguuccaucu

SEQ ID NO: 650584 - RNA, 18 nt, Artificial Sequence
  Synthetic
agcucuuguccagcaucu

SEQ ID NO: 650585 - RNA, 19 nt, Artificial Sequence
  Synthetic
gagcucuuguccagcaucu

SEQ ID NO: 650586 - RNA, 20 nt, Artificial Sequence
  Synthetic
ugagcucuuguccagcaucu

SEQ ID NO: 650587 - RNA, 21 nt, Artificial Sequence
  Synthetic
cugagcucuuguccagcaucu

SEQ ID NO: 650588 - RNA, 22 nt, Artificial Sequence
  Synthetic
ccugagcucuuguccagcaucu

SEQ ID NO: 650589 - RNA, 23 nt, Artificial Sequence
  Synthetic
uccugagcucuuguccagcaucu

SEQ ID NO: 650590 - RNA, 24 nt, Artificial Sequence
  Synthetic
cuccugagcucuuguccagcaucu

SEQ ID NO: 650591 - RNA, 18 nt, Artificial Sequence
  Synthetic
ccuacugaaucagcaucu

SEQ ID NO: 650592 - RNA, 19 nt, Artificial Sequence
  Synthetic
accuacugaaucagcaucu

SEQ ID NO: 650593 - RNA, 20 nt, Artificial Sequence
  Synthetic
gaccuacugaaucagcaucu

SEQ ID NO: 650594 - RNA, 21 nt, Artificial Sequence
  Synthetic
ggaccuacugaaucagcaucu

SEQ ID NO: 650595 - RNA, 22 nt, Artificial Sequence
  Synthetic
gggaccuacugaaucagcaucu

SEQ ID NO: 650596 - RNA, 23 nt, Artificial Sequence
  Synthetic
ugggaccuacugaaucagcaucu

SEQ ID NO: 650597 - RNA, 24 nt, Artificial Sequence
  Synthetic
cugggaccuacugaaucagcaucu

SEQ ID NO: 650598 - RNA, 18 nt, Artificial Sequence
  Synthetic
agcaagggaagagcaucu

SEQ ID NO: 650599 - RNA, 19 nt, Artificial Sequence
  Synthetic
cagcaagggaagagcaucu

SEQ ID NO: 650600 - RNA, 20 nt, Artificial Sequence
  Synthetic
acagcaagggaagagcaucu

SEQ ID NO: 650601 - RNA, 21 nt, Artificial Sequence
  Synthetic
aacagcaagggaagagcaucu

SEQ ID NO: 650602 - RNA, 22 nt, Artificial Sequence
  Synthetic
aaacagcaagggaagagcaucu

SEQ ID NO: 650603 - RNA, 23 nt, Artificial Sequence
  Synthetic
caaacagcaagggaagagcaucu

SEQ ID NO: 650604 - RNA, 24 nt, Artificial Sequence
  Synthetic
ccaaacagcaagggaagagcaucu

SEQ ID NO: 650605 - RNA, 18 nt, Artificial Sequence
  Synthetic
uaacucauuaaggcaucu

SEQ ID NO: 650606 - RNA, 19 nt, Artificial Sequence
  Synthetic
auaacucauuaaggcaucu

SEQ ID NO: 650607 - RNA, 20 nt, Artificial Sequence
  Synthetic
aauaacucauuaaggcaucu

SEQ ID NO: 650608 - RNA, 21 nt, Artificial Sequence
  Synthetic
uaauaacucauuaaggcaucu

SEQ ID NO: 650609 - RNA, 22 nt, Artificial Sequence
  Synthetic
auaauaacucauuaaggcaucu

SEQ ID NO: 650610 - RNA, 23 nt, Artificial Sequence
  Synthetic
uauaauaacucauuaaggcaucu

SEQ ID NO: 650611 - RNA, 24 nt, Artificial Sequence
  Synthetic
uuauaauaacucauuaaggcaucu

SEQ ID NO: 650612 - RNA, 18 nt, Artificial Sequence
  Synthetic
cagcuaccccaggcaucu

SEQ ID NO: 650613 - RNA, 19 nt, Artificial Sequence
  Synthetic
ccagcuaccccaggcaucu

SEQ ID NO: 650614 - RNA, 20 nt, Artificial Sequence
  Synthetic
cccagcuaccccaggcaucu

SEQ ID NO: 650615 - RNA, 21 nt, Artificial Sequence
  Synthetic
acccagcuaccccaggcaucu

SEQ ID NO: 650616 - RNA, 22 nt, Artificial Sequence
  Synthetic
cacccagcuaccccaggcaucu

SEQ ID NO: 650617 - RNA, 23 nt, Artificial Sequence
  Synthetic
ucacccagcuaccccaggcaucu

SEQ ID NO: 650618 - RNA, 24 nt, Artificial Sequence
  Synthetic
aucacccagcuaccccaggcaucu

SEQ ID NO: 650619 - RNA, 18 nt, Artificial Sequence
  Synthetic
aggauagguccugcaucu

SEQ ID NO: 650620 - RNA, 19 nt, Artificial Sequence
  Synthetic
gaggauagguccugcaucu

SEQ ID NO: 650621 - RNA, 20 nt, Artificial Sequence
  Synthetic
ggaggauagguccugcaucu

SEQ ID NO: 650622 - RNA, 21 nt, Artificial Sequence
  Synthetic
aggaggauagguccugcaucu

SEQ ID NO: 650623 - RNA, 22 nt, Artificial Sequence
  Synthetic
gaggaggauagguccugcaucu

SEQ ID NO: 650624 - RNA, 23 nt, Artificial Sequence
  Synthetic
ggaggaggauagguccugcaucu

SEQ ID NO: 650625 - RNA, 24 nt, Artificial Sequence
  Synthetic
uggaggaggauagguccugcaucu

SEQ ID NO: 650626 - RNA, 18 nt, Artificial Sequence
  Synthetic
gaaaguggugaaucaucu

SEQ ID NO: 650627 - RNA, 19 nt, Artificial Sequence
  Synthetic
agaaaguggugaaucaucu

SEQ ID NO: 650628 - RNA, 20 nt, Artificial Sequence
  Synthetic
aagaaaguggugaaucaucu

SEQ ID NO: 650629 - RNA, 21 nt, Artificial Sequence
  Synthetic
aaagaaaguggugaaucaucu

SEQ ID NO: 650630 - RNA, 22 nt, Artificial Sequence
  Synthetic
caaagaaaguggugaaucaucu

SEQ ID NO: 650631 - RNA, 23 nt, Artificial Sequence
  Synthetic
acaaagaaaguggugaaucaucu

SEQ ID NO: 650632 - RNA, 24 nt, Artificial Sequence
  Synthetic
gacaaagaaaguggugaaucaucu

SEQ ID NO: 650633 - RNA, 18 nt, Artificial Sequence
  Synthetic
agaacauugccaucaucu

SEQ ID NO: 650634 - RNA, 19 nt, Artificial Sequence
  Synthetic
uagaacauugccaucaucu

SEQ ID NO: 650635 - RNA, 20 nt, Artificial Sequence
  Synthetic
auagaacauugccaucaucu

SEQ ID NO: 650636 - RNA, 21 nt, Artificial Sequence
  Synthetic
uauagaacauugccaucaucu

SEQ ID NO: 650637 - RNA, 22 nt, Artificial Sequence
  Synthetic
auauagaacauugccaucaucu

SEQ ID NO: 650638 - RNA, 23 nt, Artificial Sequence
  Synthetic
gauauagaacauugccaucaucu

SEQ ID NO: 650639 - RNA, 24 nt, Artificial Sequence
  Synthetic
agauauagaacauugccaucaucu

SEQ ID NO: 650640 - RNA, 18 nt, Artificial Sequence
  Synthetic
ggacuagccuacucaucu

SEQ ID NO: 650641 - RNA, 19 nt, Artificial Sequence
  Synthetic
uggacuagccuacucaucu

SEQ ID NO: 650642 - RNA, 20 nt, Artificial Sequence
  Synthetic
cuggacuagccuacucaucu

SEQ ID NO: 650643 - RNA, 21 nt, Artificial Sequence
  Synthetic
ucuggacuagccuacucaucu

SEQ ID NO: 650644 - RNA, 22 nt, Artificial Sequence
  Synthetic
cucuggacuagccuacucaucu

SEQ ID NO: 650645 - RNA, 23 nt, Artificial Sequence
  Synthetic
gcucuggacuagccuacucaucu

SEQ ID NO: 650646 - RNA, 24 nt, Artificial Sequence
  Synthetic
ugcucuggacuagccuacucaucu

SEQ ID NO: 650647 - RNA, 18 nt, Artificial Sequence
  Synthetic
cccuuuuguuccucaucu

SEQ ID NO: 650648 - RNA, 19 nt, Artificial Sequence
  Synthetic
ucccuuuuguuccucaucu

SEQ ID NO: 650649 - RNA, 20 nt, Artificial Sequence
  Synthetic
cucccuuuuguuccucaucu

SEQ ID NO: 650650 - RNA, 21 nt, Artificial Sequence
  Synthetic
ucucccuuuuguuccucaucu

SEQ ID NO: 650651 - RNA, 22 nt, Artificial Sequence
  Synthetic
uucucccuuuuguuccucaucu

SEQ ID NO: 650652 - RNA, 23 nt, Artificial Sequence
  Synthetic
uuucucccuuuuguuccucaucu

SEQ ID NO: 650653 - RNA, 24 nt, Artificial Sequence
  Synthetic
cuuucucccuuuuguuccucaucu

SEQ ID NO: 650654 - RNA, 18 nt, Artificial Sequence
  Synthetic
ucagucauuaucucaucu

SEQ ID NO: 650655 - RNA, 19 nt, Artificial Sequence
  Synthetic
uucagucauuaucucaucu

SEQ ID NO: 650656 - RNA, 20 nt, Artificial Sequence
  Synthetic
auucagucauuaucucaucu

SEQ ID NO: 650657 - RNA, 21 nt, Artificial Sequence
  Synthetic
cauucagucauuaucucaucu

SEQ ID NO: 650658 - RNA, 22 nt, Artificial Sequence
  Synthetic
ucauucagucauuaucucaucu

SEQ ID NO: 650659 - RNA, 23 nt, Artificial Sequence
  Synthetic
uucauucagucauuaucucaucu

SEQ ID NO: 650660 - RNA, 24 nt, Artificial Sequence
  Synthetic
guucauucagucauuaucucaucu

SEQ ID NO: 650661 - RNA, 18 nt, Artificial Sequence
  Synthetic
uaggcccucuucucaucu

SEQ ID NO: 650662 - RNA, 19 nt, Artificial Sequence
  Synthetic
cuaggcccucuucucaucu

SEQ ID NO: 650663 - RNA, 20 nt, Artificial Sequence
  Synthetic
ccuaggcccucuucucaucu

SEQ ID NO: 650664 - RNA, 21 nt, Artificial Sequence
  Synthetic
uccuaggcccucuucucaucu

SEQ ID NO: 650665 - RNA, 22 nt, Artificial Sequence
  Synthetic
cuccuaggcccucuucucaucu

SEQ ID NO: 650666 - RNA, 23 nt, Artificial Sequence
  Synthetic
acuccuaggcccucuucucaucu

SEQ ID NO: 650667 - RNA, 24 nt, Artificial Sequence
  Synthetic
cacuccuaggcccucuucucaucu

SEQ ID NO: 650668 - RNA, 18 nt, Artificial Sequence
  Synthetic
uguugcuggcagucaucu

SEQ ID NO: 650669 - RNA, 19 nt, Artificial Sequence
  Synthetic
uuguugcuggcagucaucu

SEQ ID NO: 650670 - RNA, 20 nt, Artificial Sequence
  Synthetic
uuuguugcuggcagucaucu

SEQ ID NO: 650671 - RNA, 21 nt, Artificial Sequence
  Synthetic
auuuguugcuggcagucaucu

SEQ ID NO: 650672 - RNA, 22 nt, Artificial Sequence
  Synthetic
cauuuguugcuggcagucaucu

SEQ ID NO: 650673 - RNA, 23 nt, Artificial Sequence
  Synthetic
ccauuuguugcuggcagucaucu

SEQ ID NO: 650674 - RNA, 24 nt, Artificial Sequence
  Synthetic
cccauuuguugcuggcagucaucu

SEQ ID NO: 650675 - RNA, 18 nt, Artificial Sequence
  Synthetic
caucuucauccgucaucu

SEQ ID NO: 650676 - RNA, 19 nt, Artificial Sequence
  Synthetic
ccaucuucauccgucaucu

SEQ ID NO: 650677 - RNA, 20 nt, Artificial Sequence
  Synthetic
accaucuucauccgucaucu

SEQ ID NO: 650678 - RNA, 21 nt, Artificial Sequence
  Synthetic
uaccaucuucauccgucaucu

SEQ ID NO: 650679 - RNA, 22 nt, Artificial Sequence
  Synthetic
uuaccaucuucauccgucaucu

SEQ ID NO: 650680 - RNA, 23 nt, Artificial Sequence
  Synthetic
cuuaccaucuucauccgucaucu

SEQ ID NO: 650681 - RNA, 24 nt, Artificial Sequence
  Synthetic
gcuuaccaucuucauccgucaucu

SEQ ID NO: 650682 - RNA, 18 nt, Artificial Sequence
  Synthetic
uaggucaugaggucaucu

SEQ ID NO: 650683 - RNA, 19 nt, Artificial Sequence
  Synthetic
guaggucaugaggucaucu

SEQ ID NO: 650684 - RNA, 20 nt, Artificial Sequence
  Synthetic
aguaggucaugaggucaucu

SEQ ID NO: 650685 - RNA, 21 nt, Artificial Sequence
  Synthetic
caguaggucaugaggucaucu

SEQ ID NO: 650686 - RNA, 22 nt, Artificial Sequence
  Synthetic
acaguaggucaugaggucaucu

SEQ ID NO: 650687 - RNA, 23 nt, Artificial Sequence
  Synthetic
cacaguaggucaugaggucaucu

SEQ ID NO: 650688 - RNA, 24 nt, Artificial Sequence
  Synthetic
ccacaguaggucaugaggucaucu

SEQ ID NO: 650689 - RNA, 18 nt, Artificial Sequence
  Synthetic
aaugcaaugaugucaucu

SEQ ID NO: 650690 - RNA, 19 nt, Artificial Sequence
  Synthetic
caaugcaaugaugucaucu

SEQ ID NO: 650691 - RNA, 20 nt, Artificial Sequence
  Synthetic
ccaaugcaaugaugucaucu

SEQ ID NO: 650692 - RNA, 21 nt, Artificial Sequence
  Synthetic
accaaugcaaugaugucaucu

SEQ ID NO: 650693 - RNA, 22 nt, Artificial Sequence
  Synthetic
caccaaugcaaugaugucaucu

SEQ ID NO: 650694 - RNA, 23 nt, Artificial Sequence
  Synthetic
acaccaaugcaaugaugucaucu

SEQ ID NO: 650695 - RNA, 24 nt, Artificial Sequence
  Synthetic
uacaccaaugcaaugaugucaucu

SEQ ID NO: 650696 - RNA, 18 nt, Artificial Sequence
  Synthetic
caauacccaauuucaucu

SEQ ID NO: 650697 - RNA, 19 nt, Artificial Sequence
  Synthetic
acaauacccaauuucaucu

SEQ ID NO: 650698 - RNA, 20 nt, Artificial Sequence
  Synthetic
aacaauacccaauuucaucu

SEQ ID NO: 650699 - RNA, 21 nt, Artificial Sequence
  Synthetic
aaacaauacccaauuucaucu

SEQ ID NO: 650700 - RNA, 22 nt, Artificial Sequence
  Synthetic
aaaacaauacccaauuucaucu

SEQ ID NO: 650701 - RNA, 23 nt, Artificial Sequence
  Synthetic
gaaaacaauacccaauuucaucu

SEQ ID NO: 650702 - RNA, 24 nt, Artificial Sequence
  Synthetic
agaaaacaauacccaauuucaucu

SEQ ID NO: 650703 - RNA, 18 nt, Artificial Sequence
  Synthetic
uuuauuuuccuuucaucu

SEQ ID NO: 650704 - RNA, 19 nt, Artificial Sequence
  Synthetic
cuuuauuuuccuuucaucu

SEQ ID NO: 650705 - RNA, 20 nt, Artificial Sequence
  Synthetic
ccuuuauuuuccuuucaucu

SEQ ID NO: 650706 - RNA, 21 nt, Artificial Sequence
  Synthetic
accuuuauuuuccuuucaucu

SEQ ID NO: 650707 - RNA, 22 nt, Artificial Sequence
  Synthetic
uaccuuuauuuuccuuucaucu

SEQ ID NO: 650708 - RNA, 23 nt, Artificial Sequence
  Synthetic
uuaccuuuauuuuccuuucaucu

SEQ ID NO: 650709 - RNA, 24 nt, Artificial Sequence
  Synthetic
auuaccuuuauuuuccuuucaucu

SEQ ID NO: 650710 - RNA, 18 nt, Artificial Sequence
  Synthetic
agccuggucuuuucaucu

SEQ ID NO: 650711 - RNA, 19 nt, Artificial Sequence
  Synthetic
gagccuggucuuuucaucu

SEQ ID NO: 650712 - RNA, 20 nt, Artificial Sequence
  Synthetic
agagccuggucuuuucaucu

SEQ ID NO: 650713 - RNA, 21 nt, Artificial Sequence
  Synthetic
cagagccuggucuuuucaucu

SEQ ID NO: 650714 - RNA, 22 nt, Artificial Sequence
  Synthetic
ucagagccuggucuuuucaucu

SEQ ID NO: 650715 - RNA, 23 nt, Artificial Sequence
  Synthetic
aucagagccuggucuuuucaucu

SEQ ID NO: 650716 - RNA, 24 nt, Artificial Sequence
  Synthetic
gaucagagccuggucuuuucaucu

SEQ ID NO: 650717 - RNA, 18 nt, Artificial Sequence
  Synthetic
aagucaaaaaaaagaucu

SEQ ID NO: 650718 - RNA, 19 nt, Artificial Sequence
  Synthetic
aaagucaaaaaaaagaucu

SEQ ID NO: 650719 - RNA, 20 nt, Artificial Sequence
  Synthetic
uaaagucaaaaaaaagaucu

SEQ ID NO: 650720 - RNA, 21 nt, Artificial Sequence
  Synthetic
uuaaagucaaaaaaaagaucu

SEQ ID NO: 650721 - RNA, 22 nt, Artificial Sequence
  Synthetic
guuaaagucaaaaaaaagaucu

SEQ ID NO: 650722 - RNA, 23 nt, Artificial Sequence
  Synthetic
gguuaaagucaaaaaaaagaucu

SEQ ID NO: 650723 - RNA, 24 nt, Artificial Sequence
  Synthetic
agguuaaagucaaaaaaaagaucu

SEQ ID NO: 650724 - RNA, 18 nt, Artificial Sequence
  Synthetic
guuuauucagaaagaucu

SEQ ID NO: 650725 - RNA, 19 nt, Artificial Sequence
  Synthetic
uguuuauucagaaagaucu

SEQ ID NO: 650726 - RNA, 20 nt, Artificial Sequence
  Synthetic
cuguuuauucagaaagaucu

SEQ ID NO: 650727 - RNA, 21 nt, Artificial Sequence
  Synthetic
ucuguuuauucagaaagaucu

SEQ ID NO: 650728 - RNA, 22 nt, Artificial Sequence
  Synthetic
cucuguuuauucagaaagaucu

SEQ ID NO: 650729 - RNA, 23 nt, Artificial Sequence
  Synthetic
acucuguuuauucagaaagaucu

SEQ ID NO: 650730 - RNA, 24 nt, Artificial Sequence
  Synthetic
aacucuguuuauucagaaagaucu

SEQ ID NO: 650731 - RNA, 18 nt, Artificial Sequence
  Synthetic
gggcuugaucacagaucu

SEQ ID NO: 650732 - RNA, 19 nt, Artificial Sequence
  Synthetic
agggcuugaucacagaucu

SEQ ID NO: 650733 - RNA, 20 nt, Artificial Sequence
  Synthetic
cagggcuugaucacagaucu

SEQ ID NO: 650734 - RNA, 21 nt, Artificial Sequence
  Synthetic
acagggcuugaucacagaucu

SEQ ID NO: 650735 - RNA, 22 nt, Artificial Sequence
  Synthetic
uacagggcuugaucacagaucu

SEQ ID NO: 650736 - RNA, 23 nt, Artificial Sequence
  Synthetic
cuacagggcuugaucacagaucu

SEQ ID NO: 650737 - RNA, 24 nt, Artificial Sequence
  Synthetic
ccuacagggcuugaucacagaucu

SEQ ID NO: 650738 - RNA, 18 nt, Artificial Sequence
  Synthetic
aacauugaaggcagaucu

SEQ ID NO: 650739 - RNA, 19 nt, Artificial Sequence
  Synthetic
caacauugaaggcagaucu

SEQ ID NO: 650740 - RNA, 20 nt, Artificial Sequence
  Synthetic
ccaacauugaaggcagaucu

SEQ ID NO: 650741 - RNA, 21 nt, Artificial Sequence
  Synthetic
uccaacauugaaggcagaucu

SEQ ID NO: 650742 - RNA, 22 nt, Artificial Sequence
  Synthetic
auccaacauugaaggcagaucu

SEQ ID NO: 650743 - RNA, 23 nt, Artificial Sequence
  Synthetic
uauccaacauugaaggcagaucu

SEQ ID NO: 650744 - RNA, 24 nt, Artificial Sequence
  Synthetic
guauccaacauugaaggcagaucu

SEQ ID NO: 650745 - RNA, 18 nt, Artificial Sequence
  Synthetic
cucuagacaggcagaucu

SEQ ID NO: 650746 - RNA, 19 nt, Artificial Sequence
  Synthetic
ucucuagacaggcagaucu

SEQ ID NO: 650747 - RNA, 20 nt, Artificial Sequence
  Synthetic
aucucuagacaggcagaucu

SEQ ID NO: 650748 - RNA, 21 nt, Artificial Sequence
  Synthetic
aaucucuagacaggcagaucu

SEQ ID NO: 650749 - RNA, 22 nt, Artificial Sequence
  Synthetic
aaaucucuagacaggcagaucu

SEQ ID NO: 650750 - RNA, 23 nt, Artificial Sequence
  Synthetic
uaaaucucuagacaggcagaucu

SEQ ID NO: 650751 - RNA, 24 nt, Artificial Sequence
  Synthetic
uuaaaucucuagacaggcagaucu

SEQ ID NO: 650752 - RNA, 18 nt, Artificial Sequence
  Synthetic
ccaaaggauggcagaucu

SEQ ID NO: 650753 - RNA, 19 nt, Artificial Sequence
  Synthetic
accaaaggauggcagaucu

SEQ ID NO: 650754 - RNA, 20 nt, Artificial Sequence
  Synthetic
caccaaaggauggcagaucu

SEQ ID NO: 650755 - RNA, 21 nt, Artificial Sequence
  Synthetic
ucaccaaaggauggcagaucu

SEQ ID NO: 650756 - RNA, 22 nt, Artificial Sequence
  Synthetic
cucaccaaaggauggcagaucu

SEQ ID NO: 650757 - RNA, 23 nt, Artificial Sequence
  Synthetic
ccucaccaaaggauggcagaucu

SEQ ID NO: 650758 - RNA, 24 nt, Artificial Sequence
  Synthetic
accucaccaaaggauggcagaucu

SEQ ID NO: 650759 - RNA, 18 nt, Artificial Sequence
  Synthetic
ugggugcaugucagaucu

SEQ ID NO: 650760 - RNA, 19 nt, Artificial Sequence
  Synthetic
augggugcaugucagaucu

SEQ ID NO: 650761 - RNA, 20 nt, Artificial Sequence
  Synthetic
aaugggugcaugucagaucu

SEQ ID NO: 650762 - RNA, 21 nt, Artificial Sequence
  Synthetic
caaugggugcaugucagaucu

SEQ ID NO: 650763 - RNA, 22 nt, Artificial Sequence
  Synthetic
gcaaugggugcaugucagaucu

SEQ ID NO: 650764 - RNA, 23 nt, Artificial Sequence
  Synthetic
ugcaaugggugcaugucagaucu

SEQ ID NO: 650765 - RNA, 24 nt, Artificial Sequence
  Synthetic
augcaaugggugcaugucagaucu

SEQ ID NO: 650766 - RNA, 18 nt, Artificial Sequence
  Synthetic
gaauaguuccagagaucu

SEQ ID NO: 650767 - RNA, 19 nt, Artificial Sequence
  Synthetic
ggaauaguuccagagaucu

SEQ ID NO: 650768 - RNA, 20 nt, Artificial Sequence
  Synthetic
uggaauaguuccagagaucu

SEQ ID NO: 650769 - RNA, 21 nt, Artificial Sequence
  Synthetic
auggaauaguuccagagaucu

SEQ ID NO: 650770 - RNA, 22 nt, Artificial Sequence
  Synthetic
gauggaauaguuccagagaucu

SEQ ID NO: 650771 - RNA, 23 nt, Artificial Sequence
  Synthetic
ggauggaauaguuccagagaucu

SEQ ID NO: 650772 - RNA, 24 nt, Artificial Sequence
  Synthetic
uggauggaauaguuccagagaucu

SEQ ID NO: 650773 - RNA, 18 nt, Artificial Sequence
  Synthetic
agaaaccgagagagaucu

SEQ ID NO: 650774 - RNA, 19 nt, Artificial Sequence
  Synthetic
aagaaaccgagagagaucu

SEQ ID NO: 650775 - RNA, 20 nt, Artificial Sequence
  Synthetic
gaagaaaccgagagagaucu

SEQ ID NO: 650776 - RNA, 21 nt, Artificial Sequence
  Synthetic
ugaagaaaccgagagagaucu

SEQ ID NO: 650777 - RNA, 22 nt, Artificial Sequence
  Synthetic
gugaagaaaccgagagagaucu

SEQ ID NO: 650778 - RNA, 23 nt, Artificial Sequence
  Synthetic
agugaagaaaccgagagagaucu

SEQ ID NO: 650779 - RNA, 24 nt, Artificial Sequence
  Synthetic
aagugaagaaaccgagagagaucu

SEQ ID NO: 650780 - RNA, 18 nt, Artificial Sequence
  Synthetic
ccccuguccgagagaucu

SEQ ID NO: 650781 - RNA, 19 nt, Artificial Sequence
  Synthetic
gccccuguccgagagaucu

SEQ ID NO: 650782 - RNA, 20 nt, Artificial Sequence
  Synthetic
ugccccuguccgagagaucu

SEQ ID NO: 650783 - RNA, 21 nt, Artificial Sequence
  Synthetic
uugccccuguccgagagaucu

SEQ ID NO: 650784 - RNA, 22 nt, Artificial Sequence
  Synthetic
uuugccccuguccgagagaucu

SEQ ID NO: 650785 - RNA, 23 nt, Artificial Sequence
  Synthetic
uuuugccccuguccgagagaucu

SEQ ID NO: 650786 - RNA, 24 nt, Artificial Sequence
  Synthetic
uuuuugccccuguccgagagaucu

SEQ ID NO: 650787 - RNA, 18 nt, Artificial Sequence
  Synthetic
acccugaccuagagaucu

SEQ ID NO: 650788 - RNA, 19 nt, Artificial Sequence
  Synthetic
gacccugaccuagagaucu

SEQ ID NO: 650789 - RNA, 20 nt, Artificial Sequence
  Synthetic
ugacccugaccuagagaucu

SEQ ID NO: 650790 - RNA, 21 nt, Artificial Sequence
  Synthetic
uugacccugaccuagagaucu

SEQ ID NO: 650791 - RNA, 22 nt, Artificial Sequence
  Synthetic
uuugacccugaccuagagaucu

SEQ ID NO: 650792 - RNA, 23 nt, Artificial Sequence
  Synthetic
uuuugacccugaccuagagaucu

SEQ ID NO: 650793 - RNA, 24 nt, Artificial Sequence
  Synthetic
auuuugacccugaccuagagaucu

SEQ ID NO: 650794 - RNA, 18 nt, Artificial Sequence
  Synthetic
agggaauacaguagaucu

SEQ ID NO: 650795 - RNA, 19 nt, Artificial Sequence
  Synthetic
uagggaauacaguagaucu

SEQ ID NO: 650796 - RNA, 20 nt, Artificial Sequence
  Synthetic
uuagggaauacaguagaucu

SEQ ID NO: 650797 - RNA, 21 nt, Artificial Sequence
  Synthetic
auuagggaauacaguagaucu

SEQ ID NO: 650798 - RNA, 22 nt, Artificial Sequence
  Synthetic
gauuagggaauacaguagaucu

SEQ ID NO: 650799 - RNA, 23 nt, Artificial Sequence
  Synthetic
ggauuagggaauacaguagaucu

SEQ ID NO: 650800 - RNA, 24 nt, Artificial Sequence
  Synthetic
aggauuagggaauacaguagaucu

SEQ ID NO: 650801 - RNA, 18 nt, Artificial Sequence
  Synthetic
uucaguucuaaaggaucu

SEQ ID NO: 650802 - RNA, 19 nt, Artificial Sequence
  Synthetic
auucaguucuaaaggaucu

SEQ ID NO: 650803 - RNA, 20 nt, Artificial Sequence
  Synthetic
aauucaguucuaaaggaucu

SEQ ID NO: 650804 - RNA, 21 nt, Artificial Sequence
  Synthetic
gaauucaguucuaaaggaucu

SEQ ID NO: 650805 - RNA, 22 nt, Artificial Sequence
  Synthetic
ggaauucaguucuaaaggaucu

SEQ ID NO: 650806 - RNA, 23 nt, Artificial Sequence
  Synthetic
gggaauucaguucuaaaggaucu

SEQ ID NO: 650807 - RNA, 24 nt, Artificial Sequence
  Synthetic
cgggaauucaguucuaaaggaucu

SEQ ID NO: 650808 - RNA, 18 nt, Artificial Sequence
  Synthetic
gccaugauuacaggaucu

SEQ ID NO: 650809 - RNA, 19 nt, Artificial Sequence
  Synthetic
agccaugauuacaggaucu

SEQ ID NO: 650810 - RNA, 20 nt, Artificial Sequence
  Synthetic
cagccaugauuacaggaucu

SEQ ID NO: 650811 - RNA, 21 nt, Artificial Sequence
  Synthetic
acagccaugauuacaggaucu

SEQ ID NO: 650812 - RNA, 22 nt, Artificial Sequence
  Synthetic
aacagccaugauuacaggaucu

SEQ ID NO: 650813 - RNA, 23 nt, Artificial Sequence
  Synthetic
aaacagccaugauuacaggaucu

SEQ ID NO: 650814 - RNA, 24 nt, Artificial Sequence
  Synthetic
uaaacagccaugauuacaggaucu

SEQ ID NO: 650815 - RNA, 18 nt, Artificial Sequence
  Synthetic
guacacugaugaggaucu

SEQ ID NO: 650816 - RNA, 19 nt, Artificial Sequence
  Synthetic
aguacacugaugaggaucu

SEQ ID NO: 650817 - RNA, 20 nt, Artificial Sequence
  Synthetic
gaguacacugaugaggaucu

SEQ ID NO: 650818 - RNA, 21 nt, Artificial Sequence
  Synthetic
agaguacacugaugaggaucu

SEQ ID NO: 650819 - RNA, 22 nt, Artificial Sequence
  Synthetic
aagaguacacugaugaggaucu

SEQ ID NO: 650820 - RNA, 23 nt, Artificial Sequence
  Synthetic
aaagaguacacugaugaggaucu

SEQ ID NO: 650821 - RNA, 24 nt, Artificial Sequence
  Synthetic
aaaagaguacacugaugaggaucu

SEQ ID NO: 650822 - RNA, 18 nt, Artificial Sequence
  Synthetic
gggaugcucugaggaucu

SEQ ID NO: 650823 - RNA, 19 nt, Artificial Sequence
  Synthetic
ggggaugcucugaggaucu

SEQ ID NO: 650824 - RNA, 20 nt, Artificial Sequence
  Synthetic
uggggaugcucugaggaucu

SEQ ID NO: 650825 - RNA, 21 nt, Artificial Sequence
  Synthetic
uuggggaugcucugaggaucu

SEQ ID NO: 650826 - RNA, 22 nt, Artificial Sequence
  Synthetic
guuggggaugcucugaggaucu

SEQ ID NO: 650827 - RNA, 23 nt, Artificial Sequence
  Synthetic
uguuggggaugcucugaggaucu

SEQ ID NO: 650828 - RNA, 24 nt, Artificial Sequence
  Synthetic
cuguuggggaugcucugaggaucu

SEQ ID NO: 650829 - RNA, 18 nt, Artificial Sequence
  Synthetic
ccuaauuuuauaggaucu

SEQ ID NO: 650830 - RNA, 19 nt, Artificial Sequence
  Synthetic
cccuaauuuuauaggaucu

SEQ ID NO: 650831 - RNA, 20 nt, Artificial Sequence
  Synthetic
ccccuaauuuuauaggaucu

SEQ ID NO: 650832 - RNA, 21 nt, Artificial Sequence
  Synthetic
uccccuaauuuuauaggaucu

SEQ ID NO: 650833 - RNA, 22 nt, Artificial Sequence
  Synthetic
guccccuaauuuuauaggaucu

SEQ ID NO: 650834 - RNA, 23 nt, Artificial Sequence
  Synthetic
uguccccuaauuuuauaggaucu

SEQ ID NO: 650835 - RNA, 24 nt, Artificial Sequence
  Synthetic
cuguccccuaauuuuauaggaucu

SEQ ID NO: 650836 - RNA, 18 nt, Artificial Sequence
  Synthetic
gugcugaggguaggaucu

SEQ ID NO: 650837 - RNA, 19 nt, Artificial Sequence
  Synthetic
agugcugaggguaggaucu

SEQ ID NO: 650838 - RNA, 20 nt, Artificial Sequence
  Synthetic
aagugcugaggguaggaucu

SEQ ID NO: 650839 - RNA, 21 nt, Artificial Sequence
  Synthetic
gaagugcugaggguaggaucu

SEQ ID NO: 650840 - RNA, 22 nt, Artificial Sequence
  Synthetic
agaagugcugaggguaggaucu

SEQ ID NO: 650841 - RNA, 23 nt, Artificial Sequence
  Synthetic
aagaagugcugaggguaggaucu

SEQ ID NO: 650842 - RNA, 24 nt, Artificial Sequence
  Synthetic
gaagaagugcugaggguaggaucu

SEQ ID NO: 650843 - RNA, 18 nt, Artificial Sequence
  Synthetic
auuuuggugucuggaucu

SEQ ID NO: 650844 - RNA, 19 nt, Artificial Sequence
  Synthetic
cauuuuggugucuggaucu

SEQ ID NO: 650845 - RNA, 20 nt, Artificial Sequence
  Synthetic
ccauuuuggugucuggaucu

SEQ ID NO: 650846 - RNA, 21 nt, Artificial Sequence
  Synthetic
gccauuuuggugucuggaucu

SEQ ID NO: 650847 - RNA, 22 nt, Artificial Sequence
  Synthetic
ggccauuuuggugucuggaucu

SEQ ID NO: 650848 - RNA, 23 nt, Artificial Sequence
  Synthetic
uggccauuuuggugucuggaucu

SEQ ID NO: 650849 - RNA, 24 nt, Artificial Sequence
  Synthetic
auggccauuuuggugucuggaucu

SEQ ID NO: 650850 - RNA, 18 nt, Artificial Sequence
  Synthetic
agguuagagauuggaucu

SEQ ID NO: 650851 - RNA, 19 nt, Artificial Sequence
  Synthetic
cagguuagagauuggaucu

SEQ ID NO: 650852 - RNA, 20 nt, Artificial Sequence
  Synthetic
acagguuagagauuggaucu

SEQ ID NO: 650853 - RNA, 21 nt, Artificial Sequence
  Synthetic
aacagguuagagauuggaucu

SEQ ID NO: 650854 - RNA, 22 nt, Artificial Sequence
  Synthetic
caacagguuagagauuggaucu

SEQ ID NO: 650855 - RNA, 23 nt, Artificial Sequence
  Synthetic
acaacagguuagagauuggaucu

SEQ ID NO: 650856 - RNA, 24 nt, Artificial Sequence
  Synthetic
aacaacagguuagagauuggaucu

SEQ ID NO: 650857 - RNA, 18 nt, Artificial Sequence
  Synthetic
aaagcaagagaaugaucu

SEQ ID NO: 650858 - RNA, 19 nt, Artificial Sequence
  Synthetic
aaaagcaagagaaugaucu

SEQ ID NO: 650859 - RNA, 20 nt, Artificial Sequence
  Synthetic
caaaagcaagagaaugaucu

SEQ ID NO: 650860 - RNA, 21 nt, Artificial Sequence
  Synthetic
ucaaaagcaagagaaugaucu

SEQ ID NO: 650861 - RNA, 22 nt, Artificial Sequence
  Synthetic
uucaaaagcaagagaaugaucu

SEQ ID NO: 650862 - RNA, 23 nt, Artificial Sequence
  Synthetic
uuucaaaagcaagagaaugaucu

SEQ ID NO: 650863 - RNA, 24 nt, Artificial Sequence
  Synthetic
auuucaaaagcaagagaaugaucu

SEQ ID NO: 650864 - RNA, 18 nt, Artificial Sequence
  Synthetic
ccucauucugcaugaucu

SEQ ID NO: 650865 - RNA, 19 nt, Artificial Sequence
  Synthetic
cccucauucugcaugaucu

SEQ ID NO: 650866 - RNA, 20 nt, Artificial Sequence
  Synthetic
ucccucauucugcaugaucu

SEQ ID NO: 650867 - RNA, 21 nt, Artificial Sequence
  Synthetic
uucccucauucugcaugaucu

SEQ ID NO: 650868 - RNA, 22 nt, Artificial Sequence
  Synthetic
cuucccucauucugcaugaucu

SEQ ID NO: 650869 - RNA, 23 nt, Artificial Sequence
  Synthetic
ucuucccucauucugcaugaucu

SEQ ID NO: 650870 - RNA, 24 nt, Artificial Sequence
  Synthetic
cucuucccucauucugcaugaucu

SEQ ID NO: 650871 - RNA, 18 nt, Artificial Sequence
  Synthetic
aucagcaugggaugaucu

SEQ ID NO: 650872 - RNA, 19 nt, Artificial Sequence
  Synthetic
aaucagcaugggaugaucu

SEQ ID NO: 650873 - RNA, 20 nt, Artificial Sequence
  Synthetic
aaaucagcaugggaugaucu

SEQ ID NO: 650874 - RNA, 21 nt, Artificial Sequence
  Synthetic
aaaaucagcaugggaugaucu

SEQ ID NO: 650875 - RNA, 22 nt, Artificial Sequence
  Synthetic
uaaaaucagcaugggaugaucu

SEQ ID NO: 650876 - RNA, 23 nt, Artificial Sequence
  Synthetic
guaaaaucagcaugggaugaucu

SEQ ID NO: 650877 - RNA, 24 nt, Artificial Sequence
  Synthetic
aguaaaaucagcaugggaugaucu

SEQ ID NO: 650878 - RNA, 18 nt, Artificial Sequence
  Synthetic
uuacuauggcccugaucu

SEQ ID NO: 650879 - RNA, 19 nt, Artificial Sequence
  Synthetic
uuuacuauggcccugaucu

SEQ ID NO: 650880 - RNA, 20 nt, Artificial Sequence
  Synthetic
uuuuacuauggcccugaucu

SEQ ID NO: 650881 - RNA, 21 nt, Artificial Sequence
  Synthetic
cuuuuacuauggcccugaucu

SEQ ID NO: 650882 - RNA, 22 nt, Artificial Sequence
  Synthetic
gcuuuuacuauggcccugaucu

SEQ ID NO: 650883 - RNA, 23 nt, Artificial Sequence
  Synthetic
agcuuuuacuauggcccugaucu

SEQ ID NO: 650884 - RNA, 24 nt, Artificial Sequence
  Synthetic
cagcuuuuacuauggcccugaucu

SEQ ID NO: 650885 - RNA, 18 nt, Artificial Sequence
  Synthetic
uucacuauuuccugaucu

SEQ ID NO: 650886 - RNA, 19 nt, Artificial Sequence
  Synthetic
cuucacuauuuccugaucu

SEQ ID NO: 650887 - RNA, 20 nt, Artificial Sequence
  Synthetic
ccuucacuauuuccugaucu

SEQ ID NO: 650888 - RNA, 21 nt, Artificial Sequence
  Synthetic
uccuucacuauuuccugaucu

SEQ ID NO: 650889 - RNA, 22 nt, Artificial Sequence
  Synthetic
auccuucacuauuuccugaucu

SEQ ID NO: 650890 - RNA, 23 nt, Artificial Sequence
  Synthetic
cauccuucacuauuuccugaucu

SEQ ID NO: 650891 - RNA, 24 nt, Artificial Sequence
  Synthetic
gcauccuucacuauuuccugaucu

SEQ ID NO: 650892 - RNA, 18 nt, Artificial Sequence
  Synthetic
cccacucuuaucugaucu

SEQ ID NO: 650893 - RNA, 19 nt, Artificial Sequence
  Synthetic
gcccacucuuaucugaucu

SEQ ID NO: 650894 - RNA, 20 nt, Artificial Sequence
  Synthetic
cgcccacucuuaucugaucu

SEQ ID NO: 650895 - RNA, 21 nt, Artificial Sequence
  Synthetic
gcgcccacucuuaucugaucu

SEQ ID NO: 650896 - RNA, 22 nt, Artificial Sequence
  Synthetic
cgcgcccacucuuaucugaucu

SEQ ID NO: 650897 - RNA, 23 nt, Artificial Sequence
  Synthetic
acgcgcccacucuuaucugaucu

SEQ ID NO: 650898 - RNA, 24 nt, Artificial Sequence
  Synthetic
aacgcgcccacucuuaucugaucu

SEQ ID NO: 650899 - RNA, 18 nt, Artificial Sequence
  Synthetic
cauucugauuucugaucu

SEQ ID NO: 650900 - RNA, 19 nt, Artificial Sequence
  Synthetic
ccauucugauuucugaucu

SEQ ID NO: 650901 - RNA, 20 nt, Artificial Sequence
  Synthetic
gccauucugauuucugaucu

SEQ ID NO: 650902 - RNA, 21 nt, Artificial Sequence
  Synthetic
agccauucugauuucugaucu

SEQ ID NO: 650903 - RNA, 22 nt, Artificial Sequence
  Synthetic
aagccauucugauuucugaucu

SEQ ID NO: 650904 - RNA, 23 nt, Artificial Sequence
  Synthetic
aaagccauucugauuucugaucu

SEQ ID NO: 650905 - RNA, 24 nt, Artificial Sequence
  Synthetic
caaagccauucugauuucugaucu

SEQ ID NO: 650906 - RNA, 18 nt, Artificial Sequence
  Synthetic
acucccuauaagugaucu

SEQ ID NO: 650907 - RNA, 19 nt, Artificial Sequence
  Synthetic
aacucccuauaagugaucu

SEQ ID NO: 650908 - RNA, 20 nt, Artificial Sequence
  Synthetic
gaacucccuauaagugaucu

SEQ ID NO: 650909 - RNA, 21 nt, Artificial Sequence
  Synthetic
agaacucccuauaagugaucu

SEQ ID NO: 650910 - RNA, 22 nt, Artificial Sequence
  Synthetic
cagaacucccuauaagugaucu

SEQ ID NO: 650911 - RNA, 23 nt, Artificial Sequence
  Synthetic
ccagaacucccuauaagugaucu

SEQ ID NO: 650912 - RNA, 24 nt, Artificial Sequence
  Synthetic
accagaacucccuauaagugaucu

SEQ ID NO: 650913 - RNA, 18 nt, Artificial Sequence
  Synthetic
acuuucucgaggugaucu

SEQ ID NO: 650914 - RNA, 19 nt, Artificial Sequence
  Synthetic
gacuuucucgaggugaucu

SEQ ID NO: 650915 - RNA, 20 nt, Artificial Sequence
  Synthetic
ugacuuucucgaggugaucu

SEQ ID NO: 650916 - RNA, 21 nt, Artificial Sequence
  Synthetic
uugacuuucucgaggugaucu

SEQ ID NO: 650917 - RNA, 22 nt, Artificial Sequence
  Synthetic
cuugacuuucucgaggugaucu

SEQ ID NO: 650918 - RNA, 23 nt, Artificial Sequence
  Synthetic
ccuugacuuucucgaggugaucu

SEQ ID NO: 650919 - RNA, 24 nt, Artificial Sequence
  Synthetic
accuugacuuucucgaggugaucu

SEQ ID NO: 650920 - RNA, 18 nt, Artificial Sequence
  Synthetic
uagcaugcuuggugaucu

SEQ ID NO: 650921 - RNA, 19 nt, Artificial Sequence
  Synthetic
uuagcaugcuuggugaucu

SEQ ID NO: 650922 - RNA, 20 nt, Artificial Sequence
  Synthetic
uuuagcaugcuuggugaucu

SEQ ID NO: 650923 - RNA, 21 nt, Artificial Sequence
  Synthetic
auuuagcaugcuuggugaucu

SEQ ID NO: 650924 - RNA, 22 nt, Artificial Sequence
  Synthetic
aauuuagcaugcuuggugaucu

SEQ ID NO: 650925 - RNA, 23 nt, Artificial Sequence
  Synthetic
caauuuagcaugcuuggugaucu

SEQ ID NO: 650926 - RNA, 24 nt, Artificial Sequence
  Synthetic
acaauuuagcaugcuuggugaucu

SEQ ID NO: 650927 - RNA, 18 nt, Artificial Sequence
  Synthetic
ccaggauggucuugaucu

SEQ ID NO: 650928 - RNA, 19 nt, Artificial Sequence
  Synthetic
gccaggauggucuugaucu

SEQ ID NO: 650929 - RNA, 20 nt, Artificial Sequence
  Synthetic
agccaggauggucuugaucu

SEQ ID NO: 650930 - RNA, 21 nt, Artificial Sequence
  Synthetic
uagccaggauggucuugaucu

SEQ ID NO: 650931 - RNA, 22 nt, Artificial Sequence
  Synthetic
uuagccaggauggucuugaucu

SEQ ID NO: 650932 - RNA, 23 nt, Artificial Sequence
  Synthetic
guuagccaggauggucuugaucu

SEQ ID NO: 650933 - RNA, 24 nt, Artificial Sequence
  Synthetic
uguuagccaggauggucuugaucu

SEQ ID NO: 650934 - RNA, 18 nt, Artificial Sequence
  Synthetic
gcuucaaucauuugaucu

SEQ ID NO: 650935 - RNA, 19 nt, Artificial Sequence
  Synthetic
ugcuucaaucauuugaucu

SEQ ID NO: 650936 - RNA, 20 nt, Artificial Sequence
  Synthetic
augcuucaaucauuugaucu

SEQ ID NO: 650937 - RNA, 21 nt, Artificial Sequence
  Synthetic
aaugcuucaaucauuugaucu

SEQ ID NO: 650938 - RNA, 22 nt, Artificial Sequence
  Synthetic
uaaugcuucaaucauuugaucu

SEQ ID NO: 650939 - RNA, 23 nt, Artificial Sequence
  Synthetic
uuaaugcuucaaucauuugaucu

SEQ ID NO: 650940 - RNA, 24 nt, Artificial Sequence
  Synthetic
uuuaaugcuucaaucauuugaucu

SEQ ID NO: 650941 - RNA, 18 nt, Artificial Sequence
  Synthetic
acccagauucuuugaucu

SEQ ID NO: 650942 - RNA, 19 nt, Artificial Sequence
  Synthetic
gacccagauucuuugaucu

SEQ ID NO: 650943 - RNA, 20 nt, Artificial Sequence
  Synthetic
ugacccagauucuuugaucu

SEQ ID NO: 650944 - RNA, 21 nt, Artificial Sequence
  Synthetic
uugacccagauucuuugaucu

SEQ ID NO: 650945 - RNA, 22 nt, Artificial Sequence
  Synthetic
auugacccagauucuuugaucu

SEQ ID NO: 650946 - RNA, 23 nt, Artificial Sequence
  Synthetic
uauugacccagauucuuugaucu

SEQ ID NO: 650947 - RNA, 24 nt, Artificial Sequence
  Synthetic
uuauugacccagauucuuugaucu

SEQ ID NO: 650948 - RNA, 18 nt, Artificial Sequence
  Synthetic
aacauacaauuuugaucu

SEQ ID NO: 650949 - RNA, 19 nt, Artificial Sequence
  Synthetic
uaacauacaauuuugaucu

SEQ ID NO: 650950 - RNA, 20 nt, Artificial Sequence
  Synthetic
cuaacauacaauuuugaucu

SEQ ID NO: 650951 - RNA, 21 nt, Artificial Sequence
  Synthetic
acuaacauacaauuuugaucu

SEQ ID NO: 650952 - RNA, 22 nt, Artificial Sequence
  Synthetic
gacuaacauacaauuuugaucu

SEQ ID NO: 650953 - RNA, 23 nt, Artificial Sequence
  Synthetic
agacuaacauacaauuuugaucu

SEQ ID NO: 650954 - RNA, 24 nt, Artificial Sequence
  Synthetic
uagacuaacauacaauuuugaucu

SEQ ID NO: 650955 - RNA, 18 nt, Artificial Sequence
  Synthetic
uauuaagucuuuugaucu

SEQ ID NO: 650956 - RNA, 19 nt, Artificial Sequence
  Synthetic
auauuaagucuuuugaucu

SEQ ID NO: 650957 - RNA, 20 nt, Artificial Sequence
  Synthetic
aauauuaagucuuuugaucu

SEQ ID NO: 650958 - RNA, 21 nt, Artificial Sequence
  Synthetic
uaauauuaagucuuuugaucu

SEQ ID NO: 650959 - RNA, 22 nt, Artificial Sequence
  Synthetic
auaauauuaagucuuuugaucu

SEQ ID NO: 650960 - RNA, 23 nt, Artificial Sequence
  Synthetic
aauaauauuaagucuuuugaucu

SEQ ID NO: 650961 - RNA, 24 nt, Artificial Sequence
  Synthetic
uaauaauauuaagucuuuugaucu

SEQ ID NO: 650962 - RNA, 18 nt, Artificial Sequence
  Synthetic
accaaauguuuuugaucu

SEQ ID NO: 650963 - RNA, 19 nt, Artificial Sequence
  Synthetic
aaccaaauguuuuugaucu

SEQ ID NO: 650964 - RNA, 20 nt, Artificial Sequence
  Synthetic
uaaccaaauguuuuugaucu

SEQ ID NO: 650965 - RNA, 21 nt, Artificial Sequence
  Synthetic
uuaaccaaauguuuuugaucu

SEQ ID NO: 650966 - RNA, 22 nt, Artificial Sequence
  Synthetic
uuuaaccaaauguuuuugaucu

SEQ ID NO: 650967 - RNA, 23 nt, Artificial Sequence
  Synthetic
uuuuaaccaaauguuuuugaucu

SEQ ID NO: 650968 - RNA, 24 nt, Artificial Sequence
  Synthetic
guuuuaaccaaauguuuuugaucu

SEQ ID NO: 650969 - RNA, 18 nt, Artificial Sequence
  Synthetic
uguacuucacaaauaucu

SEQ ID NO: 650970 - RNA, 19 nt, Artificial Sequence
  Synthetic
auguacuucacaaauaucu

SEQ ID NO: 650971 - RNA, 20 nt, Artificial Sequence
  Synthetic
cauguacuucacaaauaucu

SEQ ID NO: 650972 - RNA, 21 nt, Artificial Sequence
  Synthetic
ucauguacuucacaaauaucu

SEQ ID NO: 650973 - RNA, 22 nt, Artificial Sequence
  Synthetic
aucauguacuucacaaauaucu

SEQ ID NO: 650974 - RNA, 23 nt, Artificial Sequence
  Synthetic
uaucauguacuucacaaauaucu

SEQ ID NO: 650975 - RNA, 24 nt, Artificial Sequence
  Synthetic
auaucauguacuucacaaauaucu

SEQ ID NO: 650976 - RNA, 18 nt, Artificial Sequence
  Synthetic
cuauaaaaucaaauaucu

SEQ ID NO: 650977 - RNA, 19 nt, Artificial Sequence
  Synthetic
acuauaaaaucaaauaucu

SEQ ID NO: 650978 - RNA, 20 nt, Artificial Sequence
  Synthetic
uacuauaaaaucaaauaucu

SEQ ID NO: 650979 - RNA, 21 nt, Artificial Sequence
  Synthetic
guacuauaaaaucaaauaucu

SEQ ID NO: 650980 - RNA, 22 nt, Artificial Sequence
  Synthetic
gguacuauaaaaucaaauaucu

SEQ ID NO: 650981 - RNA, 23 nt, Artificial Sequence
  Synthetic
agguacuauaaaaucaaauaucu

SEQ ID NO: 650982 - RNA, 24 nt, Artificial Sequence
  Synthetic
gagguacuauaaaaucaaauaucu

SEQ ID NO: 650983 - RNA, 18 nt, Artificial Sequence
  Synthetic
aaauaaaaugaaauaucu

SEQ ID NO: 650984 - RNA, 19 nt, Artificial Sequence
  Synthetic
caaauaaaaugaaauaucu

SEQ ID NO: 650985 - RNA, 20 nt, Artificial Sequence
  Synthetic
gcaaauaaaaugaaauaucu

SEQ ID NO: 650986 - RNA, 21 nt, Artificial Sequence
  Synthetic
agcaaauaaaaugaaauaucu

SEQ ID NO: 650987 - RNA, 22 nt, Artificial Sequence
  Synthetic
aagcaaauaaaaugaaauaucu

SEQ ID NO: 650988 - RNA, 23 nt, Artificial Sequence
  Synthetic
caagcaaauaaaaugaaauaucu

SEQ ID NO: 650989 - RNA, 24 nt, Artificial Sequence
  Synthetic
gcaagcaaauaaaaugaaauaucu

SEQ ID NO: 650990 - RNA, 18 nt, Artificial Sequence
  Synthetic
uguacacagacaauaucu

SEQ ID NO: 650991 - RNA, 19 nt, Artificial Sequence
  Synthetic
uuguacacagacaauaucu

SEQ ID NO: 650992 - RNA, 20 nt, Artificial Sequence
  Synthetic
uuuguacacagacaauaucu

SEQ ID NO: 650993 - RNA, 21 nt, Artificial Sequence
  Synthetic
guuuguacacagacaauaucu

SEQ ID NO: 650994 - RNA, 22 nt, Artificial Sequence
  Synthetic
aguuuguacacagacaauaucu

SEQ ID NO: 650995 - RNA, 23 nt, Artificial Sequence
  Synthetic
aaguuuguacacagacaauaucu

SEQ ID NO: 650996 - RNA, 24 nt, Artificial Sequence
  Synthetic
uaaguuuguacacagacaauaucu

SEQ ID NO: 650997 - RNA, 18 nt, Artificial Sequence
  Synthetic
gaaaaugaaauaauaucu

SEQ ID NO: 650998 - RNA, 19 nt, Artificial Sequence
  Synthetic
agaaaaugaaauaauaucu

SEQ ID NO: 650999 - RNA, 20 nt, Artificial Sequence
  Synthetic
uagaaaaugaaauaauaucu

SEQ ID NO: 651000 - RNA, 21 nt, Artificial Sequence
  Synthetic
uuagaaaaugaaauaauaucu

SEQ ID NO: 651001 - RNA, 22 nt, Artificial Sequence
  Synthetic
cuuagaaaaugaaauaauaucu

SEQ ID NO: 651002 - RNA, 23 nt, Artificial Sequence
  Synthetic
ccuuagaaaaugaaauaauaucu

SEQ ID NO: 651003 - RNA, 24 nt, Artificial Sequence
  Synthetic
accuuagaaaaugaaauaauaucu

SEQ ID NO: 651004 - RNA, 18 nt, Artificial Sequence
  Synthetic
ugcauauaccuaauaucu

SEQ ID NO: 651005 - RNA, 19 nt, Artificial Sequence
  Synthetic
uugcauauaccuaauaucu

SEQ ID NO: 651006 - RNA, 20 nt, Artificial Sequence
  Synthetic
uuugcauauaccuaauaucu

SEQ ID NO: 651007 - RNA, 21 nt, Artificial Sequence
  Synthetic
auuugcauauaccuaauaucu

SEQ ID NO: 651008 - RNA, 22 nt, Artificial Sequence
  Synthetic
uauuugcauauaccuaauaucu

SEQ ID NO: 651009 - RNA, 23 nt, Artificial Sequence
  Synthetic
auauuugcauauaccuaauaucu

SEQ ID NO: 651010 - RNA, 24 nt, Artificial Sequence
  Synthetic
aauauuugcauauaccuaauaucu

SEQ ID NO: 651011 - RNA, 18 nt, Artificial Sequence
  Synthetic
ucccaauaacacauaucu

SEQ ID NO: 651012 - RNA, 19 nt, Artificial Sequence
  Synthetic
uucccaauaacacauaucu

SEQ ID NO: 651013 - RNA, 20 nt, Artificial Sequence
  Synthetic
uuucccaauaacacauaucu

SEQ ID NO: 651014 - RNA, 21 nt, Artificial Sequence
  Synthetic
uuuucccaauaacacauaucu

SEQ ID NO: 651015 - RNA, 22 nt, Artificial Sequence
  Synthetic
cuuuucccaauaacacauaucu

SEQ ID NO: 651016 - RNA, 23 nt, Artificial Sequence
  Synthetic
ucuuuucccaauaacacauaucu

SEQ ID NO: 651017 - RNA, 24 nt, Artificial Sequence
  Synthetic
aucuuuucccaauaacacauaucu

SEQ ID NO: 651018 - RNA, 18 nt, Artificial Sequence
  Synthetic
aagaggaagcacauaucu

SEQ ID NO: 651019 - RNA, 19 nt, Artificial Sequence
  Synthetic
uaagaggaagcacauaucu

SEQ ID NO: 651020 - RNA, 20 nt, Artificial Sequence
  Synthetic
auaagaggaagcacauaucu

SEQ ID NO: 651021 - RNA, 21 nt, Artificial Sequence
  Synthetic
cauaagaggaagcacauaucu

SEQ ID NO: 651022 - RNA, 22 nt, Artificial Sequence
  Synthetic
acauaagaggaagcacauaucu

SEQ ID NO: 651023 - RNA, 23 nt, Artificial Sequence
  Synthetic
gacauaagaggaagcacauaucu

SEQ ID NO: 651024 - RNA, 24 nt, Artificial Sequence
  Synthetic
agacauaagaggaagcacauaucu

SEQ ID NO: 651025 - RNA, 18 nt, Artificial Sequence
  Synthetic
gaacauuuggccauaucu

SEQ ID NO: 651026 - RNA, 19 nt, Artificial Sequence
  Synthetic
ugaacauuuggccauaucu

SEQ ID NO: 651027 - RNA, 20 nt, Artificial Sequence
  Synthetic
uugaacauuuggccauaucu

SEQ ID NO: 651028 - RNA, 21 nt, Artificial Sequence
  Synthetic
auugaacauuuggccauaucu

SEQ ID NO: 651029 - RNA, 22 nt, Artificial Sequence
  Synthetic
uauugaacauuuggccauaucu

SEQ ID NO: 651030 - RNA, 23 nt, Artificial Sequence
  Synthetic
uuauugaacauuuggccauaucu

SEQ ID NO: 651031 - RNA, 24 nt, Artificial Sequence
  Synthetic
auuauugaacauuuggccauaucu

SEQ ID NO: 651032 - RNA, 18 nt, Artificial Sequence
  Synthetic
acaucaaaauccauaucu

SEQ ID NO: 651033 - RNA, 19 nt, Artificial Sequence
  Synthetic
cacaucaaaauccauaucu

SEQ ID NO: 651034 - RNA, 20 nt, Artificial Sequence
  Synthetic
acacaucaaaauccauaucu

SEQ ID NO: 651035 - RNA, 21 nt, Artificial Sequence
  Synthetic
cacacaucaaaauccauaucu

SEQ ID NO: 651036 - RNA, 22 nt, Artificial Sequence
  Synthetic
ccacacaucaaaauccauaucu

SEQ ID NO: 651037 - RNA, 23 nt, Artificial Sequence
  Synthetic
uccacacaucaaaauccauaucu

SEQ ID NO: 651038 - RNA, 24 nt, Artificial Sequence
  Synthetic
uuccacacaucaaaauccauaucu

SEQ ID NO: 651039 - RNA, 18 nt, Artificial Sequence
  Synthetic
acaaccaaaaucauaucu

SEQ ID NO: 651040 - RNA, 19 nt, Artificial Sequence
  Synthetic
aacaaccaaaaucauaucu

SEQ ID NO: 651041 - RNA, 20 nt, Artificial Sequence
  Synthetic
aaacaaccaaaaucauaucu

SEQ ID NO: 651042 - RNA, 21 nt, Artificial Sequence
  Synthetic
caaacaaccaaaaucauaucu

SEQ ID NO: 651043 - RNA, 22 nt, Artificial Sequence
  Synthetic
acaaacaaccaaaaucauaucu

SEQ ID NO: 651044 - RNA, 23 nt, Artificial Sequence
  Synthetic
aacaaacaaccaaaaucauaucu

SEQ ID NO: 651045 - RNA, 24 nt, Artificial Sequence
  Synthetic
aaacaaacaaccaaaaucauaucu

SEQ ID NO: 651046 - RNA, 18 nt, Artificial Sequence
  Synthetic
gcuuuuggugucauaucu

SEQ ID NO: 651047 - RNA, 19 nt, Artificial Sequence
  Synthetic
ugcuuuuggugucauaucu

SEQ ID NO: 651048 - RNA, 20 nt, Artificial Sequence
  Synthetic
uugcuuuuggugucauaucu

SEQ ID NO: 651049 - RNA, 21 nt, Artificial Sequence
  Synthetic
uuugcuuuuggugucauaucu

SEQ ID NO: 651050 - RNA, 22 nt, Artificial Sequence
  Synthetic
uuuugcuuuuggugucauaucu

SEQ ID NO: 651051 - RNA, 23 nt, Artificial Sequence
  Synthetic
cuuuugcuuuuggugucauaucu

SEQ ID NO: 651052 - RNA, 24 nt, Artificial Sequence
  Synthetic
acuuuugcuuuuggugucauaucu

SEQ ID NO: 651053 - RNA, 18 nt, Artificial Sequence
  Synthetic
auuuugcaguucauaucu

SEQ ID NO: 651054 - RNA, 19 nt, Artificial Sequence
  Synthetic
cauuuugcaguucauaucu

SEQ ID NO: 651055 - RNA, 20 nt, Artificial Sequence
  Synthetic
ucauuuugcaguucauaucu

SEQ ID NO: 651056 - RNA, 21 nt, Artificial Sequence
  Synthetic
gucauuuugcaguucauaucu

SEQ ID NO: 651057 - RNA, 22 nt, Artificial Sequence
  Synthetic
ugucauuuugcaguucauaucu

SEQ ID NO: 651058 - RNA, 23 nt, Artificial Sequence
  Synthetic
cugucauuuugcaguucauaucu

SEQ ID NO: 651059 - RNA, 24 nt, Artificial Sequence
  Synthetic
gcugucauuuugcaguucauaucu

SEQ ID NO: 651060 - RNA, 18 nt, Artificial Sequence
  Synthetic
gccagcugucagauaucu

SEQ ID NO: 651061 - RNA, 19 nt, Artificial Sequence
  Synthetic
agccagcugucagauaucu

SEQ ID NO: 651062 - RNA, 20 nt, Artificial Sequence
  Synthetic
cagccagcugucagauaucu

SEQ ID NO: 651063 - RNA, 21 nt, Artificial Sequence
  Synthetic
acagccagcugucagauaucu

SEQ ID NO: 651064 - RNA, 22 nt, Artificial Sequence
  Synthetic
aacagccagcugucagauaucu

SEQ ID NO: 651065 - RNA, 23 nt, Artificial Sequence
  Synthetic
caacagccagcugucagauaucu

SEQ ID NO: 651066 - RNA, 24 nt, Artificial Sequence
  Synthetic
ccaacagccagcugucagauaucu

SEQ ID NO: 651067 - RNA, 18 nt, Artificial Sequence
  Synthetic
acagcacauuagauaucu

SEQ ID NO: 651068 - RNA, 19 nt, Artificial Sequence
  Synthetic
cacagcacauuagauaucu

SEQ ID NO: 651069 - RNA, 20 nt, Artificial Sequence
  Synthetic
ucacagcacauuagauaucu

SEQ ID NO: 651070 - RNA, 21 nt, Artificial Sequence
  Synthetic
cucacagcacauuagauaucu

SEQ ID NO: 651071 - RNA, 22 nt, Artificial Sequence
  Synthetic
ccucacagcacauuagauaucu

SEQ ID NO: 651072 - RNA, 23 nt, Artificial Sequence
  Synthetic
uccucacagcacauuagauaucu

SEQ ID NO: 651073 - RNA, 24 nt, Artificial Sequence
  Synthetic
uuccucacagcacauuagauaucu

SEQ ID NO: 651074 - RNA, 18 nt, Artificial Sequence
  Synthetic
aagguaauuaauauaucu

SEQ ID NO: 651075 - RNA, 19 nt, Artificial Sequence
  Synthetic
gaagguaauuaauauaucu

SEQ ID NO: 651076 - RNA, 20 nt, Artificial Sequence
  Synthetic
agaagguaauuaauauaucu

SEQ ID NO: 651077 - RNA, 21 nt, Artificial Sequence
  Synthetic
cagaagguaauuaauauaucu

SEQ ID NO: 651078 - RNA, 22 nt, Artificial Sequence
  Synthetic
acagaagguaauuaauauaucu

SEQ ID NO: 651079 - RNA, 23 nt, Artificial Sequence
  Synthetic
aacagaagguaauuaauauaucu

SEQ ID NO: 651080 - RNA, 24 nt, Artificial Sequence
  Synthetic
aaacagaagguaauuaauauaucu

SEQ ID NO: 651081 - RNA, 18 nt, Artificial Sequence
  Synthetic
acauugcuugcuauaucu

SEQ ID NO: 651082 - RNA, 19 nt, Artificial Sequence
  Synthetic
aacauugcuugcuauaucu

SEQ ID NO: 651083 - RNA, 20 nt, Artificial Sequence
  Synthetic
gaacauugcuugcuauaucu

SEQ ID NO: 651084 - RNA, 21 nt, Artificial Sequence
  Synthetic
agaacauugcuugcuauaucu

SEQ ID NO: 651085 - RNA, 22 nt, Artificial Sequence
  Synthetic
aagaacauugcuugcuauaucu

SEQ ID NO: 651086 - RNA, 23 nt, Artificial Sequence
  Synthetic
uaagaacauugcuugcuauaucu

SEQ ID NO: 651087 - RNA, 24 nt, Artificial Sequence
  Synthetic
auaagaacauugcuugcuauaucu

SEQ ID NO: 651088 - RNA, 18 nt, Artificial Sequence
  Synthetic
augcuguacaguauaucu

SEQ ID NO: 651089 - RNA, 19 nt, Artificial Sequence
  Synthetic
uaugcuguacaguauaucu

SEQ ID NO: 651090 - RNA, 20 nt, Artificial Sequence
  Synthetic
cuaugcuguacaguauaucu

SEQ ID NO: 651091 - RNA, 21 nt, Artificial Sequence
  Synthetic
acuaugcuguacaguauaucu

SEQ ID NO: 651092 - RNA, 22 nt, Artificial Sequence
  Synthetic
cacuaugcuguacaguauaucu

SEQ ID NO: 651093 - RNA, 23 nt, Artificial Sequence
  Synthetic
gcacuaugcuguacaguauaucu

SEQ ID NO: 651094 - RNA, 24 nt, Artificial Sequence
  Synthetic
ggcacuaugcuguacaguauaucu

SEQ ID NO: 651095 - RNA, 18 nt, Artificial Sequence
  Synthetic
aacugcuucuuuauaucu

SEQ ID NO: 651096 - RNA, 19 nt, Artificial Sequence
  Synthetic
uaacugcuucuuuauaucu

SEQ ID NO: 651097 - RNA, 20 nt, Artificial Sequence
  Synthetic
auaacugcuucuuuauaucu

SEQ ID NO: 651098 - RNA, 21 nt, Artificial Sequence
  Synthetic
aauaacugcuucuuuauaucu

SEQ ID NO: 651099 - RNA, 22 nt, Artificial Sequence
  Synthetic
uaauaacugcuucuuuauaucu

SEQ ID NO: 651100 - RNA, 23 nt, Artificial Sequence
  Synthetic
cuaauaacugcuucuuuauaucu

SEQ ID NO: 651101 - RNA, 24 nt, Artificial Sequence
  Synthetic
ucuaauaacugcuucuuuauaucu

SEQ ID NO: 651102 - RNA, 18 nt, Artificial Sequence
  Synthetic
gucuaccaugaacuaucu

SEQ ID NO: 651103 - RNA, 19 nt, Artificial Sequence
  Synthetic
ugucuaccaugaacuaucu

SEQ ID NO: 651104 - RNA, 20 nt, Artificial Sequence
  Synthetic
augucuaccaugaacuaucu

SEQ ID NO: 651105 - RNA, 21 nt, Artificial Sequence
  Synthetic
caugucuaccaugaacuaucu

SEQ ID NO: 651106 - RNA, 22 nt, Artificial Sequence
  Synthetic
ucaugucuaccaugaacuaucu

SEQ ID NO: 651107 - RNA, 23 nt, Artificial Sequence
  Synthetic
uucaugucuaccaugaacuaucu

SEQ ID NO: 651108 - RNA, 24 nt, Artificial Sequence
  Synthetic
auucaugucuaccaugaacuaucu

SEQ ID NO: 651109 - RNA, 18 nt, Artificial Sequence
  Synthetic
agugaaauuuaacuaucu

SEQ ID NO: 651110 - RNA, 19 nt, Artificial Sequence
  Synthetic
aagugaaauuuaacuaucu

SEQ ID NO: 651111 - RNA, 20 nt, Artificial Sequence
  Synthetic
aaagugaaauuuaacuaucu

SEQ ID NO: 651112 - RNA, 21 nt, Artificial Sequence
  Synthetic
aaaagugaaauuuaacuaucu

SEQ ID NO: 651113 - RNA, 22 nt, Artificial Sequence
  Synthetic
gaaaagugaaauuuaacuaucu

SEQ ID NO: 651114 - RNA, 23 nt, Artificial Sequence
  Synthetic
ggaaaagugaaauuuaacuaucu

SEQ ID NO: 651115 - RNA, 24 nt, Artificial Sequence
  Synthetic
aggaaaagugaaauuuaacuaucu

SEQ ID NO: 651116 - RNA, 18 nt, Artificial Sequence
  Synthetic
cacuuuuauccacuaucu

SEQ ID NO: 651117 - RNA, 19 nt, Artificial Sequence
  Synthetic
acacuuuuauccacuaucu

SEQ ID NO: 651118 - RNA, 20 nt, Artificial Sequence
  Synthetic
gacacuuuuauccacuaucu

SEQ ID NO: 651119 - RNA, 21 nt, Artificial Sequence
  Synthetic
ugacacuuuuauccacuaucu

SEQ ID NO: 651120 - RNA, 22 nt, Artificial Sequence
  Synthetic
uugacacuuuuauccacuaucu

SEQ ID NO: 651121 - RNA, 23 nt, Artificial Sequence
  Synthetic
auugacacuuuuauccacuaucu

SEQ ID NO: 651122 - RNA, 24 nt, Artificial Sequence
  Synthetic
uauugacacuuuuauccacuaucu

SEQ ID NO: 651123 - RNA, 18 nt, Artificial Sequence
  Synthetic
cuguaccacuuacuaucu

SEQ ID NO: 651124 - RNA, 19 nt, Artificial Sequence
  Synthetic
gcuguaccacuuacuaucu

SEQ ID NO: 651125 - RNA, 20 nt, Artificial Sequence
  Synthetic
agcuguaccacuuacuaucu

SEQ ID NO: 651126 - RNA, 21 nt, Artificial Sequence
  Synthetic
aagcuguaccacuuacuaucu

SEQ ID NO: 651127 - RNA, 22 nt, Artificial Sequence
  Synthetic
caagcuguaccacuuacuaucu

SEQ ID NO: 651128 - RNA, 23 nt, Artificial Sequence
  Synthetic
ucaagcuguaccacuuacuaucu

SEQ ID NO: 651129 - RNA, 24 nt, Artificial Sequence
  Synthetic
cucaagcuguaccacuuacuaucu

SEQ ID NO: 651130 - RNA, 18 nt, Artificial Sequence
  Synthetic
aauagagccucccuaucu

SEQ ID NO: 651131 - RNA, 19 nt, Artificial Sequence
  Synthetic
uaauagagccucccuaucu

SEQ ID NO: 651132 - RNA, 20 nt, Artificial Sequence
  Synthetic
cuaauagagccucccuaucu

SEQ ID NO: 651133 - RNA, 21 nt, Artificial Sequence
  Synthetic
gcuaauagagccucccuaucu

SEQ ID NO: 651134 - RNA, 22 nt, Artificial Sequence
  Synthetic
agcuaauagagccucccuaucu

SEQ ID NO: 651135 - RNA, 23 nt, Artificial Sequence
  Synthetic
aagcuaauagagccucccuaucu

SEQ ID NO: 651136 - RNA, 24 nt, Artificial Sequence
  Synthetic
aaagcuaauagagccucccuaucu

SEQ ID NO: 651137 - RNA, 18 nt, Artificial Sequence
  Synthetic
cgauucaaguagcuaucu

SEQ ID NO: 651138 - RNA, 19 nt, Artificial Sequence
  Synthetic
acgauucaaguagcuaucu

SEQ ID NO: 651139 - RNA, 20 nt, Artificial Sequence
  Synthetic
aacgauucaaguagcuaucu

SEQ ID NO: 651140 - RNA, 21 nt, Artificial Sequence
  Synthetic
gaacgauucaaguagcuaucu

SEQ ID NO: 651141 - RNA, 22 nt, Artificial Sequence
  Synthetic
ggaacgauucaaguagcuaucu

SEQ ID NO: 651142 - RNA, 23 nt, Artificial Sequence
  Synthetic
gggaacgauucaaguagcuaucu

SEQ ID NO: 651143 - RNA, 24 nt, Artificial Sequence
  Synthetic
agggaacgauucaaguagcuaucu

SEQ ID NO: 651144 - RNA, 18 nt, Artificial Sequence
  Synthetic
gaguacauaaggcuaucu

SEQ ID NO: 651145 - RNA, 19 nt, Artificial Sequence
  Synthetic
ggaguacauaaggcuaucu

SEQ ID NO: 651146 - RNA, 20 nt, Artificial Sequence
  Synthetic
gggaguacauaaggcuaucu

SEQ ID NO: 651147 - RNA, 21 nt, Artificial Sequence
  Synthetic
ggggaguacauaaggcuaucu

SEQ ID NO: 651148 - RNA, 22 nt, Artificial Sequence
  Synthetic
aggggaguacauaaggcuaucu

SEQ ID NO: 651149 - RNA, 23 nt, Artificial Sequence
  Synthetic
uaggggaguacauaaggcuaucu

SEQ ID NO: 651150 - RNA, 24 nt, Artificial Sequence
  Synthetic
uuaggggaguacauaaggcuaucu

SEQ ID NO: 651151 - RNA, 18 nt, Artificial Sequence
  Synthetic
ucuacacucaaucuaucu

SEQ ID NO: 651152 - RNA, 19 nt, Artificial Sequence
  Synthetic
cucuacacucaaucuaucu

SEQ ID NO: 651153 - RNA, 20 nt, Artificial Sequence
  Synthetic
ucucuacacucaaucuaucu

SEQ ID NO: 651154 - RNA, 21 nt, Artificial Sequence
  Synthetic
cucucuacacucaaucuaucu

SEQ ID NO: 651155 - RNA, 22 nt, Artificial Sequence
  Synthetic
ucucucuacacucaaucuaucu

SEQ ID NO: 651156 - RNA, 23 nt, Artificial Sequence
  Synthetic
cucucucuacacucaaucuaucu

SEQ ID NO: 651157 - RNA, 24 nt, Artificial Sequence
  Synthetic
ucucucucuacacucaaucuaucu

SEQ ID NO: 651158 - RNA, 18 nt, Artificial Sequence
  Synthetic
gcuaguacacaucuaucu

SEQ ID NO: 651159 - RNA, 19 nt, Artificial Sequence
  Synthetic
agcuaguacacaucuaucu

SEQ ID NO: 651160 - RNA, 20 nt, Artificial Sequence
  Synthetic
gagcuaguacacaucuaucu

SEQ ID NO: 651161 - RNA, 21 nt, Artificial Sequence
  Synthetic
ugagcuaguacacaucuaucu

SEQ ID NO: 651162 - RNA, 22 nt, Artificial Sequence
  Synthetic
uugagcuaguacacaucuaucu

SEQ ID NO: 651163 - RNA, 23 nt, Artificial Sequence
  Synthetic
cuugagcuaguacacaucuaucu

SEQ ID NO: 651164 - RNA, 24 nt, Artificial Sequence
  Synthetic
acuugagcuaguacacaucuaucu

SEQ ID NO: 651165 - RNA, 18 nt, Artificial Sequence
  Synthetic
guguuuauuacucuaucu

SEQ ID NO: 651166 - RNA, 19 nt, Artificial Sequence
  Synthetic
uguguuuauuacucuaucu

SEQ ID NO: 651167 - RNA, 20 nt, Artificial Sequence
  Synthetic
uuguguuuauuacucuaucu

SEQ ID NO: 651168 - RNA, 21 nt, Artificial Sequence
  Synthetic
guuguguuuauuacucuaucu

SEQ ID NO: 651169 - RNA, 22 nt, Artificial Sequence
  Synthetic
aguuguguuuauuacucuaucu

SEQ ID NO: 651170 - RNA, 23 nt, Artificial Sequence
  Synthetic
gaguuguguuuauuacucuaucu

SEQ ID NO: 651171 - RNA, 24 nt, Artificial Sequence
  Synthetic
ggaguuguguuuauuacucuaucu

SEQ ID NO: 651172 - RNA, 18 nt, Artificial Sequence
  Synthetic
guucucauaugucuaucu

SEQ ID NO: 651173 - RNA, 19 nt, Artificial Sequence
  Synthetic
uguucucauaugucuaucu

SEQ ID NO: 651174 - RNA, 20 nt, Artificial Sequence
  Synthetic
guguucucauaugucuaucu

SEQ ID NO: 651175 - RNA, 21 nt, Artificial Sequence
  Synthetic
gguguucucauaugucuaucu

SEQ ID NO: 651176 - RNA, 22 nt, Artificial Sequence
  Synthetic
agguguucucauaugucuaucu

SEQ ID NO: 651177 - RNA, 23 nt, Artificial Sequence
  Synthetic
uagguguucucauaugucuaucu

SEQ ID NO: 651178 - RNA, 24 nt, Artificial Sequence
  Synthetic
cuagguguucucauaugucuaucu

SEQ ID NO: 651179 - RNA, 18 nt, Artificial Sequence
  Synthetic
ggacuucugauucuaucu

SEQ ID NO: 651180 - RNA, 19 nt, Artificial Sequence
  Synthetic
gggacuucugauucuaucu

SEQ ID NO: 651181 - RNA, 20 nt, Artificial Sequence
  Synthetic
ggggacuucugauucuaucu

SEQ ID NO: 651182 - RNA, 21 nt, Artificial Sequence
  Synthetic
aggggacuucugauucuaucu

SEQ ID NO: 651183 - RNA, 22 nt, Artificial Sequence
  Synthetic
gaggggacuucugauucuaucu

SEQ ID NO: 651184 - RNA, 23 nt, Artificial Sequence
  Synthetic
agaggggacuucugauucuaucu

SEQ ID NO: 651185 - RNA, 24 nt, Artificial Sequence
  Synthetic
cagaggggacuucugauucuaucu

SEQ ID NO: 651186 - RNA, 18 nt, Artificial Sequence
  Synthetic
auuuugcauaaaguaucu

SEQ ID NO: 651187 - RNA, 19 nt, Artificial Sequence
  Synthetic
gauuuugcauaaaguaucu

SEQ ID NO: 651188 - RNA, 20 nt, Artificial Sequence
  Synthetic
ggauuuugcauaaaguaucu

SEQ ID NO: 651189 - RNA, 21 nt, Artificial Sequence
  Synthetic
aggauuuugcauaaaguaucu

SEQ ID NO: 651190 - RNA, 22 nt, Artificial Sequence
  Synthetic
uaggauuuugcauaaaguaucu

SEQ ID NO: 651191 - RNA, 23 nt, Artificial Sequence
  Synthetic
cuaggauuuugcauaaaguaucu

SEQ ID NO: 651192 - RNA, 24 nt, Artificial Sequence
  Synthetic
ccuaggauuuugcauaaaguaucu

SEQ ID NO: 651193 - RNA, 18 nt, Artificial Sequence
  Synthetic
caugaugaacaaguaucu

SEQ ID NO: 651194 - RNA, 19 nt, Artificial Sequence
  Synthetic
acaugaugaacaaguaucu

SEQ ID NO: 651195 - RNA, 20 nt, Artificial Sequence
  Synthetic
uacaugaugaacaaguaucu

SEQ ID NO: 651196 - RNA, 21 nt, Artificial Sequence
  Synthetic
guacaugaugaacaaguaucu

SEQ ID NO: 651197 - RNA, 22 nt, Artificial Sequence
  Synthetic
aguacaugaugaacaaguaucu

SEQ ID NO: 651198 - RNA, 23 nt, Artificial Sequence
  Synthetic
uaguacaugaugaacaaguaucu

SEQ ID NO: 651199 - RNA, 24 nt, Artificial Sequence
  Synthetic
cuaguacaugaugaacaaguaucu

SEQ ID NO: 651200 - RNA, 18 nt, Artificial Sequence
  Synthetic
aaggccuuuccaguaucu

SEQ ID NO: 651201 - RNA, 19 nt, Artificial Sequence
  Synthetic
aaaggccuuuccaguaucu

SEQ ID NO: 651202 - RNA, 20 nt, Artificial Sequence
  Synthetic
caaaggccuuuccaguaucu

SEQ ID NO: 651203 - RNA, 21 nt, Artificial Sequence
  Synthetic
gcaaaggccuuuccaguaucu

SEQ ID NO: 651204 - RNA, 22 nt, Artificial Sequence
  Synthetic
ugcaaaggccuuuccaguaucu

SEQ ID NO: 651205 - RNA, 23 nt, Artificial Sequence
  Synthetic
uugcaaaggccuuuccaguaucu

SEQ ID NO: 651206 - RNA, 24 nt, Artificial Sequence
  Synthetic
uuugcaaaggccuuuccaguaucu

SEQ ID NO: 651207 - RNA, 18 nt, Artificial Sequence
  Synthetic
cuggggugaagaguaucu

SEQ ID NO: 651208 - RNA, 19 nt, Artificial Sequence
  Synthetic
gcuggggugaagaguaucu

SEQ ID NO: 651209 - RNA, 20 nt, Artificial Sequence
  Synthetic
agcuggggugaagaguaucu

SEQ ID NO: 651210 - RNA, 21 nt, Artificial Sequence
  Synthetic
uagcuggggugaagaguaucu

SEQ ID NO: 651211 - RNA, 22 nt, Artificial Sequence
  Synthetic
auagcuggggugaagaguaucu

SEQ ID NO: 651212 - RNA, 23 nt, Artificial Sequence
  Synthetic
uauagcuggggugaagaguaucu

SEQ ID NO: 651213 - RNA, 24 nt, Artificial Sequence
  Synthetic
guauagcuggggugaagaguaucu

SEQ ID NO: 651214 - RNA, 18 nt, Artificial Sequence
  Synthetic
agggauuuuuuaguaucu

SEQ ID NO: 651215 - RNA, 19 nt, Artificial Sequence
  Synthetic
gagggauuuuuuaguaucu

SEQ ID NO: 651216 - RNA, 20 nt, Artificial Sequence
  Synthetic
agagggauuuuuuaguaucu

SEQ ID NO: 651217 - RNA, 21 nt, Artificial Sequence
  Synthetic
uagagggauuuuuuaguaucu

SEQ ID NO: 651218 - RNA, 22 nt, Artificial Sequence
  Synthetic
cuagagggauuuuuuaguaucu

SEQ ID NO: 651219 - RNA, 23 nt, Artificial Sequence
  Synthetic
ccuagagggauuuuuuaguaucu

SEQ ID NO: 651220 - RNA, 24 nt, Artificial Sequence
  Synthetic
accuagagggauuuuuuaguaucu

SEQ ID NO: 651221 - RNA, 18 nt, Artificial Sequence
  Synthetic
gguucucagaauguaucu

SEQ ID NO: 651222 - RNA, 19 nt, Artificial Sequence
  Synthetic
ugguucucagaauguaucu

SEQ ID NO: 651223 - RNA, 20 nt, Artificial Sequence
  Synthetic
uugguucucagaauguaucu

SEQ ID NO: 651224 - RNA, 21 nt, Artificial Sequence
  Synthetic
auugguucucagaauguaucu

SEQ ID NO: 651225 - RNA, 22 nt, Artificial Sequence
  Synthetic
uauugguucucagaauguaucu

SEQ ID NO: 651226 - RNA, 23 nt, Artificial Sequence
  Synthetic
auauugguucucagaauguaucu

SEQ ID NO: 651227 - RNA, 24 nt, Artificial Sequence
  Synthetic
aauauugguucucagaauguaucu

SEQ ID NO: 651228 - RNA, 18 nt, Artificial Sequence
  Synthetic
gaaugcagaaguguaucu

SEQ ID NO: 651229 - RNA, 19 nt, Artificial Sequence
  Synthetic
agaaugcagaaguguaucu

SEQ ID NO: 651230 - RNA, 20 nt, Artificial Sequence
  Synthetic
cagaaugcagaaguguaucu

SEQ ID NO: 651231 - RNA, 21 nt, Artificial Sequence
  Synthetic
ucagaaugcagaaguguaucu

SEQ ID NO: 651232 - RNA, 22 nt, Artificial Sequence
  Synthetic
uucagaaugcagaaguguaucu

SEQ ID NO: 651233 - RNA, 23 nt, Artificial Sequence
  Synthetic
auucagaaugcagaaguguaucu

SEQ ID NO: 651234 - RNA, 24 nt, Artificial Sequence
  Synthetic
uauucagaaugcagaaguguaucu

SEQ ID NO: 651235 - RNA, 18 nt, Artificial Sequence
  Synthetic
aaauacucgaguguaucu

SEQ ID NO: 651236 - RNA, 19 nt, Artificial Sequence
  Synthetic
gaaauacucgaguguaucu

SEQ ID NO: 651237 - RNA, 20 nt, Artificial Sequence
  Synthetic
ugaaauacucgaguguaucu

SEQ ID NO: 651238 - RNA, 21 nt, Artificial Sequence
  Synthetic
augaaauacucgaguguaucu

SEQ ID NO: 651239 - RNA, 22 nt, Artificial Sequence
  Synthetic
uaugaaauacucgaguguaucu

SEQ ID NO: 651240 - RNA, 23 nt, Artificial Sequence
  Synthetic
auaugaaauacucgaguguaucu

SEQ ID NO: 651241 - RNA, 24 nt, Artificial Sequence
  Synthetic
cauaugaaauacucgaguguaucu

SEQ ID NO: 651242 - RNA, 18 nt, Artificial Sequence
  Synthetic
gugucaugugaauuaucu

SEQ ID NO: 651243 - RNA, 19 nt, Artificial Sequence
  Synthetic
agugucaugugaauuaucu

SEQ ID NO: 651244 - RNA, 20 nt, Artificial Sequence
  Synthetic
aagugucaugugaauuaucu

SEQ ID NO: 651245 - RNA, 21 nt, Artificial Sequence
  Synthetic
aaagugucaugugaauuaucu

SEQ ID NO: 651246 - RNA, 22 nt, Artificial Sequence
  Synthetic
caaagugucaugugaauuaucu

SEQ ID NO: 651247 - RNA, 23 nt, Artificial Sequence
  Synthetic
acaaagugucaugugaauuaucu

SEQ ID NO: 651248 - RNA, 24 nt, Artificial Sequence
  Synthetic
aacaaagugucaugugaauuaucu

SEQ ID NO: 651249 - RNA, 18 nt, Artificial Sequence
  Synthetic
uugacaacaagauuaucu

SEQ ID NO: 651250 - RNA, 19 nt, Artificial Sequence
  Synthetic
uuugacaacaagauuaucu

SEQ ID NO: 651251 - RNA, 20 nt, Artificial Sequence
  Synthetic
guuugacaacaagauuaucu

SEQ ID NO: 651252 - RNA, 21 nt, Artificial Sequence
  Synthetic
uguuugacaacaagauuaucu

SEQ ID NO: 651253 - RNA, 22 nt, Artificial Sequence
  Synthetic
auguuugacaacaagauuaucu

SEQ ID NO: 651254 - RNA, 23 nt, Artificial Sequence
  Synthetic
aauguuugacaacaagauuaucu

SEQ ID NO: 651255 - RNA, 24 nt, Artificial Sequence
  Synthetic
gaauguuugacaacaagauuaucu

SEQ ID NO: 651256 - RNA, 18 nt, Artificial Sequence
  Synthetic
agucaaaggagauuaucu

SEQ ID NO: 651257 - RNA, 19 nt, Artificial Sequence
  Synthetic
gagucaaaggagauuaucu

SEQ ID NO: 651258 - RNA, 20 nt, Artificial Sequence
  Synthetic
agagucaaaggagauuaucu

SEQ ID NO: 651259 - RNA, 21 nt, Artificial Sequence
  Synthetic
cagagucaaaggagauuaucu

SEQ ID NO: 651260 - RNA, 22 nt, Artificial Sequence
  Synthetic
acagagucaaaggagauuaucu

SEQ ID NO: 651261 - RNA, 23 nt, Artificial Sequence
  Synthetic
cacagagucaaaggagauuaucu

SEQ ID NO: 651262 - RNA, 24 nt, Artificial Sequence
  Synthetic
acacagagucaaaggagauuaucu

SEQ ID NO: 651263 - RNA, 18 nt, Artificial Sequence
  Synthetic
gacuuuauuggauuaucu

SEQ ID NO: 651264 - RNA, 19 nt, Artificial Sequence
  Synthetic
ugacuuuauuggauuaucu

SEQ ID NO: 651265 - RNA, 20 nt, Artificial Sequence
  Synthetic
uugacuuuauuggauuaucu

SEQ ID NO: 651266 - RNA, 21 nt, Artificial Sequence
  Synthetic
uuugacuuuauuggauuaucu

SEQ ID NO: 651267 - RNA, 22 nt, Artificial Sequence
  Synthetic
auuugacuuuauuggauuaucu

SEQ ID NO: 651268 - RNA, 23 nt, Artificial Sequence
  Synthetic
gauuugacuuuauuggauuaucu

SEQ ID NO: 651269 - RNA, 24 nt, Artificial Sequence
  Synthetic
agauuugacuuuauuggauuaucu

SEQ ID NO: 651270 - RNA, 18 nt, Artificial Sequence
  Synthetic
agaaaacuacccuuaucu

SEQ ID NO: 651271 - RNA, 19 nt, Artificial Sequence
  Synthetic
aagaaaacuacccuuaucu

SEQ ID NO: 651272 - RNA, 20 nt, Artificial Sequence
  Synthetic
gaagaaaacuacccuuaucu

SEQ ID NO: 651273 - RNA, 21 nt, Artificial Sequence
  Synthetic
ugaagaaaacuacccuuaucu

SEQ ID NO: 651274 - RNA, 22 nt, Artificial Sequence
  Synthetic
uugaagaaaacuacccuuaucu

SEQ ID NO: 651275 - RNA, 23 nt, Artificial Sequence
  Synthetic
uuugaagaaaacuacccuuaucu

SEQ ID NO: 651276 - RNA, 24 nt, Artificial Sequence
  Synthetic
guuugaagaaaacuacccuuaucu

SEQ ID NO: 651277 - RNA, 18 nt, Artificial Sequence
  Synthetic
ucaaaagagugcuuaucu

SEQ ID NO: 651278 - RNA, 19 nt, Artificial Sequence
  Synthetic
gucaaaagagugcuuaucu

SEQ ID NO: 651279 - RNA, 20 nt, Artificial Sequence
  Synthetic
agucaaaagagugcuuaucu

SEQ ID NO: 651280 - RNA, 21 nt, Artificial Sequence
  Synthetic
aagucaaaagagugcuuaucu

SEQ ID NO: 651281 - RNA, 22 nt, Artificial Sequence
  Synthetic
gaagucaaaagagugcuuaucu

SEQ ID NO: 651282 - RNA, 23 nt, Artificial Sequence
  Synthetic
agaagucaaaagagugcuuaucu

SEQ ID NO: 651283 - RNA, 24 nt, Artificial Sequence
  Synthetic
uagaagucaaaagagugcuuaucu

SEQ ID NO: 651284 - RNA, 18 nt, Artificial Sequence
  Synthetic
gauuuagcaaucuuaucu

SEQ ID NO: 651285 - RNA, 19 nt, Artificial Sequence
  Synthetic
ugauuuagcaaucuuaucu

SEQ ID NO: 651286 - RNA, 20 nt, Artificial Sequence
  Synthetic
augauuuagcaaucuuaucu

SEQ ID NO: 651287 - RNA, 21 nt, Artificial Sequence
  Synthetic
uaugauuuagcaaucuuaucu

SEQ ID NO: 651288 - RNA, 22 nt, Artificial Sequence
  Synthetic
auaugauuuagcaaucuuaucu

SEQ ID NO: 651289 - RNA, 23 nt, Artificial Sequence
  Synthetic
cauaugauuuagcaaucuuaucu

SEQ ID NO: 651290 - RNA, 24 nt, Artificial Sequence
  Synthetic
ccauaugauuuagcaaucuuaucu

SEQ ID NO: 651291 - RNA, 18 nt, Artificial Sequence
  Synthetic
aauacagaaaauuuaucu

SEQ ID NO: 651292 - RNA, 19 nt, Artificial Sequence
  Synthetic
gaauacagaaaauuuaucu

SEQ ID NO: 651293 - RNA, 20 nt, Artificial Sequence
  Synthetic
agaauacagaaaauuuaucu

SEQ ID NO: 651294 - RNA, 21 nt, Artificial Sequence
  Synthetic
gagaauacagaaaauuuaucu

SEQ ID NO: 651295 - RNA, 22 nt, Artificial Sequence
  Synthetic
agagaauacagaaaauuuaucu

SEQ ID NO: 651296 - RNA, 23 nt, Artificial Sequence
  Synthetic
cagagaauacagaaaauuuaucu

SEQ ID NO: 651297 - RNA, 24 nt, Artificial Sequence
  Synthetic
ccagagaauacagaaaauuuaucu

SEQ ID NO: 651298 - RNA, 18 nt, Artificial Sequence
  Synthetic
aagagcacagauuuaucu

SEQ ID NO: 651299 - RNA, 19 nt, Artificial Sequence
  Synthetic
gaagagcacagauuuaucu

SEQ ID NO: 651300 - RNA, 20 nt, Artificial Sequence
  Synthetic
ugaagagcacagauuuaucu

SEQ ID NO: 651301 - RNA, 21 nt, Artificial Sequence
  Synthetic
gugaagagcacagauuuaucu

SEQ ID NO: 651302 - RNA, 22 nt, Artificial Sequence
  Synthetic
agugaagagcacagauuuaucu

SEQ ID NO: 651303 - RNA, 23 nt, Artificial Sequence
  Synthetic
aagugaagagcacagauuuaucu

SEQ ID NO: 651304 - RNA, 24 nt, Artificial Sequence
  Synthetic
caagugaagagcacagauuuaucu

SEQ ID NO: 651305 - RNA, 18 nt, Artificial Sequence
  Synthetic
uugggaagggauuuaucu

SEQ ID NO: 651306 - RNA, 19 nt, Artificial Sequence
  Synthetic
guugggaagggauuuaucu

SEQ ID NO: 651307 - RNA, 20 nt, Artificial Sequence
  Synthetic
aguugggaagggauuuaucu

SEQ ID NO: 651308 - RNA, 21 nt, Artificial Sequence
  Synthetic
aaguugggaagggauuuaucu

SEQ ID NO: 651309 - RNA, 22 nt, Artificial Sequence
  Synthetic
uaaguugggaagggauuuaucu

SEQ ID NO: 651310 - RNA, 23 nt, Artificial Sequence
  Synthetic
uuaaguugggaagggauuuaucu

SEQ ID NO: 651311 - RNA, 24 nt, Artificial Sequence
  Synthetic
auuaaguugggaagggauuuaucu

SEQ ID NO: 651312 - RNA, 18 nt, Artificial Sequence
  Synthetic
uucucugagucuuuaucu

SEQ ID NO: 651313 - RNA, 19 nt, Artificial Sequence
  Synthetic
cuucucugagucuuuaucu

SEQ ID NO: 651314 - RNA, 20 nt, Artificial Sequence
  Synthetic
acuucucugagucuuuaucu

SEQ ID NO: 651315 - RNA, 21 nt, Artificial Sequence
  Synthetic
cacuucucugagucuuuaucu

SEQ ID NO: 651316 - RNA, 22 nt, Artificial Sequence
  Synthetic
gcacuucucugagucuuuaucu

SEQ ID NO: 651317 - RNA, 23 nt, Artificial Sequence
  Synthetic
agcacuucucugagucuuuaucu

SEQ ID NO: 651318 - RNA, 24 nt, Artificial Sequence
  Synthetic
uagcacuucucugagucuuuaucu

SEQ ID NO: 651319 - RNA, 18 nt, Artificial Sequence
  Synthetic
ugugcuuccauuuuaucu

SEQ ID NO: 651320 - RNA, 19 nt, Artificial Sequence
  Synthetic
cugugcuuccauuuuaucu

SEQ ID NO: 651321 - RNA, 20 nt, Artificial Sequence
  Synthetic
ccugugcuuccauuuuaucu

SEQ ID NO: 651322 - RNA, 21 nt, Artificial Sequence
  Synthetic
gccugugcuuccauuuuaucu

SEQ ID NO: 651323 - RNA, 22 nt, Artificial Sequence
  Synthetic
ugccugugcuuccauuuuaucu

SEQ ID NO: 651324 - RNA, 23 nt, Artificial Sequence
  Synthetic
gugccugugcuuccauuuuaucu

SEQ ID NO: 651325 - RNA, 24 nt, Artificial Sequence
  Synthetic
agugccugugcuuccauuuuaucu

SEQ ID NO: 651326 - RNA, 18 nt, Artificial Sequence
  Synthetic
guacuaugacuuuuaucu

SEQ ID NO: 651327 - RNA, 19 nt, Artificial Sequence
  Synthetic
gguacuaugacuuuuaucu

SEQ ID NO: 651328 - RNA, 20 nt, Artificial Sequence
  Synthetic
agguacuaugacuuuuaucu

SEQ ID NO: 651329 - RNA, 21 nt, Artificial Sequence
  Synthetic
aagguacuaugacuuuuaucu

SEQ ID NO: 651330 - RNA, 22 nt, Artificial Sequence
  Synthetic
uaagguacuaugacuuuuaucu

SEQ ID NO: 651331 - RNA, 23 nt, Artificial Sequence
  Synthetic
guaagguacuaugacuuuuaucu

SEQ ID NO: 651332 - RNA, 24 nt, Artificial Sequence
  Synthetic
cguaagguacuaugacuuuuaucu

SEQ ID NO: 651333 - RNA, 18 nt, Artificial Sequence
  Synthetic
auuccaguacaaaacucu

SEQ ID NO: 651334 - RNA, 19 nt, Artificial Sequence
  Synthetic
cauuccaguacaaaacucu

SEQ ID NO: 651335 - RNA, 20 nt, Artificial Sequence
  Synthetic
ucauuccaguacaaaacucu

SEQ ID NO: 651336 - RNA, 21 nt, Artificial Sequence
  Synthetic
cucauuccaguacaaaacucu

SEQ ID NO: 651337 - RNA, 22 nt, Artificial Sequence
  Synthetic
ccucauuccaguacaaaacucu

SEQ ID NO: 651338 - RNA, 23 nt, Artificial Sequence
  Synthetic
gccucauuccaguacaaaacucu

SEQ ID NO: 651339 - RNA, 24 nt, Artificial Sequence
  Synthetic
ugccucauuccaguacaaaacucu

SEQ ID NO: 651340 - RNA, 18 nt, Artificial Sequence
  Synthetic
ccaauaaaauaaaacucu

SEQ ID NO: 651341 - RNA, 19 nt, Artificial Sequence
  Synthetic
accaauaaaauaaaacucu

SEQ ID NO: 651342 - RNA, 20 nt, Artificial Sequence
  Synthetic
caccaauaaaauaaaacucu

SEQ ID NO: 651343 - RNA, 21 nt, Artificial Sequence
  Synthetic
acaccaauaaaauaaaacucu

SEQ ID NO: 651344 - RNA, 22 nt, Artificial Sequence
  Synthetic
aacaccaauaaaauaaaacucu

SEQ ID NO: 651345 - RNA, 23 nt, Artificial Sequence
  Synthetic
gaacaccaauaaaauaaaacucu

SEQ ID NO: 651346 - RNA, 24 nt, Artificial Sequence
  Synthetic
agaacaccaauaaaauaaaacucu

SEQ ID NO: 651347 - RNA, 18 nt, Artificial Sequence
  Synthetic
aagugguuuagaaacucu

SEQ ID NO: 651348 - RNA, 19 nt, Artificial Sequence
  Synthetic
caagugguuuagaaacucu

SEQ ID NO: 651349 - RNA, 20 nt, Artificial Sequence
  Synthetic
ucaagugguuuagaaacucu

SEQ ID NO: 651350 - RNA, 21 nt, Artificial Sequence
  Synthetic
gucaagugguuuagaaacucu

SEQ ID NO: 651351 - RNA, 22 nt, Artificial Sequence
  Synthetic
agucaagugguuuagaaacucu

SEQ ID NO: 651352 - RNA, 23 nt, Artificial Sequence
  Synthetic
cagucaagugguuuagaaacucu

SEQ ID NO: 651353 - RNA, 24 nt, Artificial Sequence
  Synthetic
acagucaagugguuuagaaacucu

SEQ ID NO: 651354 - RNA, 18 nt, Artificial Sequence
  Synthetic
caggauuuaugaaacucu

SEQ ID NO: 651355 - RNA, 19 nt, Artificial Sequence
  Synthetic
ucaggauuuaugaaacucu

SEQ ID NO: 651356 - RNA, 20 nt, Artificial Sequence
  Synthetic
gucaggauuuaugaaacucu

SEQ ID NO: 651357 - RNA, 21 nt, Artificial Sequence
  Synthetic
agucaggauuuaugaaacucu

SEQ ID NO: 651358 - RNA, 22 nt, Artificial Sequence
  Synthetic
aagucaggauuuaugaaacucu

SEQ ID NO: 651359 - RNA, 23 nt, Artificial Sequence
  Synthetic
aaagucaggauuuaugaaacucu

SEQ ID NO: 651360 - RNA, 24 nt, Artificial Sequence
  Synthetic
caaagucaggauuuaugaaacucu

SEQ ID NO: 651361 - RNA, 18 nt, Artificial Sequence
  Synthetic
ugauaccaaauaaacucu

SEQ ID NO: 651362 - RNA, 19 nt, Artificial Sequence
  Synthetic
augauaccaaauaaacucu

SEQ ID NO: 651363 - RNA, 20 nt, Artificial Sequence
  Synthetic
gaugauaccaaauaaacucu

SEQ ID NO: 651364 - RNA, 21 nt, Artificial Sequence
  Synthetic
agaugauaccaaauaaacucu

SEQ ID NO: 651365 - RNA, 22 nt, Artificial Sequence
  Synthetic
uagaugauaccaaauaaacucu

SEQ ID NO: 651366 - RNA, 23 nt, Artificial Sequence
  Synthetic
guagaugauaccaaauaaacucu

SEQ ID NO: 651367 - RNA, 24 nt, Artificial Sequence
  Synthetic
uguagaugauaccaaauaaacucu

SEQ ID NO: 651368 - RNA, 18 nt, Artificial Sequence
  Synthetic
ucuauuugagacaacucu

SEQ ID NO: 651369 - RNA, 19 nt, Artificial Sequence
  Synthetic
aucuauuugagacaacucu

SEQ ID NO: 651370 - RNA, 20 nt, Artificial Sequence
  Synthetic
uaucuauuugagacaacucu

SEQ ID NO: 651371 - RNA, 21 nt, Artificial Sequence
  Synthetic
guaucuauuugagacaacucu

SEQ ID NO: 651372 - RNA, 22 nt, Artificial Sequence
  Synthetic
uguaucuauuugagacaacucu

SEQ ID NO: 651373 - RNA, 23 nt, Artificial Sequence
  Synthetic
auguaucuauuugagacaacucu

SEQ ID NO: 651374 - RNA, 24 nt, Artificial Sequence
  Synthetic
uauguaucuauuugagacaacucu

SEQ ID NO: 651375 - RNA, 18 nt, Artificial Sequence
  Synthetic
auccuuuacaccaacucu

SEQ ID NO: 651376 - RNA, 19 nt, Artificial Sequence
  Synthetic
aauccuuuacaccaacucu

SEQ ID NO: 651377 - RNA, 20 nt, Artificial Sequence
  Synthetic
aaauccuuuacaccaacucu

SEQ ID NO: 651378 - RNA, 21 nt, Artificial Sequence
  Synthetic
uaaauccuuuacaccaacucu

SEQ ID NO: 651379 - RNA, 22 nt, Artificial Sequence
  Synthetic
auaaauccuuuacaccaacucu

SEQ ID NO: 651380 - RNA, 23 nt, Artificial Sequence
  Synthetic
uauaaauccuuuacaccaacucu

SEQ ID NO: 651381 - RNA, 24 nt, Artificial Sequence
  Synthetic
uuauaaauccuuuacaccaacucu

SEQ ID NO: 651382 - RNA, 18 nt, Artificial Sequence
  Synthetic
aauucaaucuccaacucu

SEQ ID NO: 651383 - RNA, 19 nt, Artificial Sequence
  Synthetic
gaauucaaucuccaacucu

SEQ ID NO: 651384 - RNA, 20 nt, Artificial Sequence
  Synthetic
agaauucaaucuccaacucu

SEQ ID NO: 651385 - RNA, 21 nt, Artificial Sequence
  Synthetic
aagaauucaaucuccaacucu

SEQ ID NO: 651386 - RNA, 22 nt, Artificial Sequence
  Synthetic
aaagaauucaaucuccaacucu

SEQ ID NO: 651387 - RNA, 23 nt, Artificial Sequence
  Synthetic
caaagaauucaaucuccaacucu

SEQ ID NO: 651388 - RNA, 24 nt, Artificial Sequence
  Synthetic
ccaaagaauucaaucuccaacucu

SEQ ID NO: 651389 - RNA, 18 nt, Artificial Sequence
  Synthetic
uccagagauuucaacucu

SEQ ID NO: 651390 - RNA, 19 nt, Artificial Sequence
  Synthetic
guccagagauuucaacucu

SEQ ID NO: 651391 - RNA, 20 nt, Artificial Sequence
  Synthetic
aguccagagauuucaacucu

SEQ ID NO: 651392 - RNA, 21 nt, Artificial Sequence
  Synthetic
aaguccagagauuucaacucu

SEQ ID NO: 651393 - RNA, 22 nt, Artificial Sequence
  Synthetic
gaaguccagagauuucaacucu

SEQ ID NO: 651394 - RNA, 23 nt, Artificial Sequence
  Synthetic
ugaaguccagagauuucaacucu

SEQ ID NO: 651395 - RNA, 24 nt, Artificial Sequence
  Synthetic
uugaaguccagagauuucaacucu

SEQ ID NO: 651396 - RNA, 18 nt, Artificial Sequence
  Synthetic
uuuugaaucaggaacucu

SEQ ID NO: 651397 - RNA, 19 nt, Artificial Sequence
  Synthetic
auuuugaaucaggaacucu

SEQ ID NO: 651398 - RNA, 20 nt, Artificial Sequence
  Synthetic
cauuuugaaucaggaacucu

SEQ ID NO: 651399 - RNA, 21 nt, Artificial Sequence
  Synthetic
acauuuugaaucaggaacucu

SEQ ID NO: 651400 - RNA, 22 nt, Artificial Sequence
  Synthetic
gacauuuugaaucaggaacucu

SEQ ID NO: 651401 - RNA, 23 nt, Artificial Sequence
  Synthetic
agacauuuugaaucaggaacucu

SEQ ID NO: 651402 - RNA, 24 nt, Artificial Sequence
  Synthetic
cagacauuuugaaucaggaacucu

SEQ ID NO: 651403 - RNA, 18 nt, Artificial Sequence
  Synthetic
caaugaugaaugaacucu

SEQ ID NO: 651404 - RNA, 19 nt, Artificial Sequence
  Synthetic
gcaaugaugaaugaacucu

SEQ ID NO: 651405 - RNA, 20 nt, Artificial Sequence
  Synthetic
agcaaugaugaaugaacucu

SEQ ID NO: 651406 - RNA, 21 nt, Artificial Sequence
  Synthetic
cagcaaugaugaaugaacucu

SEQ ID NO: 651407 - RNA, 22 nt, Artificial Sequence
  Synthetic
ucagcaaugaugaaugaacucu

SEQ ID NO: 651408 - RNA, 23 nt, Artificial Sequence
  Synthetic
cucagcaaugaugaaugaacucu

SEQ ID NO: 651409 - RNA, 24 nt, Artificial Sequence
  Synthetic
acucagcaaugaugaaugaacucu

SEQ ID NO: 651410 - RNA, 18 nt, Artificial Sequence
  Synthetic
ugaacagaacauaacucu

SEQ ID NO: 651411 - RNA, 19 nt, Artificial Sequence
  Synthetic
gugaacagaacauaacucu

SEQ ID NO: 651412 - RNA, 20 nt, Artificial Sequence
  Synthetic
agugaacagaacauaacucu

SEQ ID NO: 651413 - RNA, 21 nt, Artificial Sequence
  Synthetic
gagugaacagaacauaacucu

SEQ ID NO: 651414 - RNA, 22 nt, Artificial Sequence
  Synthetic
agagugaacagaacauaacucu

SEQ ID NO: 651415 - RNA, 23 nt, Artificial Sequence
  Synthetic
cagagugaacagaacauaacucu

SEQ ID NO: 651416 - RNA, 24 nt, Artificial Sequence
  Synthetic
acagagugaacagaacauaacucu

SEQ ID NO: 651417 - RNA, 18 nt, Artificial Sequence
  Synthetic
ggaaaguuacuuaacucu

SEQ ID NO: 651418 - RNA, 19 nt, Artificial Sequence
  Synthetic
uggaaaguuacuuaacucu

SEQ ID NO: 651419 - RNA, 20 nt, Artificial Sequence
  Synthetic
cuggaaaguuacuuaacucu

SEQ ID NO: 651420 - RNA, 21 nt, Artificial Sequence
  Synthetic
ccuggaaaguuacuuaacucu

SEQ ID NO: 651421 - RNA, 22 nt, Artificial Sequence
  Synthetic
uccuggaaaguuacuuaacucu

SEQ ID NO: 651422 - RNA, 23 nt, Artificial Sequence
  Synthetic
cuccuggaaaguuacuuaacucu

SEQ ID NO: 651423 - RNA, 24 nt, Artificial Sequence
  Synthetic
ccuccuggaaaguuacuuaacucu

SEQ ID NO: 651424 - RNA, 18 nt, Artificial Sequence
  Synthetic
gcaccucaauuuaacucu

SEQ ID NO: 651425 - RNA, 19 nt, Artificial Sequence
  Synthetic
cgcaccucaauuuaacucu

SEQ ID NO: 651426 - RNA, 20 nt, Artificial Sequence
  Synthetic
ucgcaccucaauuuaacucu

SEQ ID NO: 651427 - RNA, 21 nt, Artificial Sequence
  Synthetic
uucgcaccucaauuuaacucu

SEQ ID NO: 651428 - RNA, 22 nt, Artificial Sequence
  Synthetic
uuucgcaccucaauuuaacucu

SEQ ID NO: 651429 - RNA, 23 nt, Artificial Sequence
  Synthetic
guuucgcaccucaauuuaacucu

SEQ ID NO: 651430 - RNA, 24 nt, Artificial Sequence
  Synthetic
uguuucgcaccucaauuuaacucu

SEQ ID NO: 651431 - RNA, 18 nt, Artificial Sequence
  Synthetic
augggaacaucacacucu

SEQ ID NO: 651432 - RNA, 19 nt, Artificial Sequence
  Synthetic
aaugggaacaucacacucu

SEQ ID NO: 651433 - RNA, 20 nt, Artificial Sequence
  Synthetic
gaaugggaacaucacacucu

SEQ ID NO: 651434 - RNA, 21 nt, Artificial Sequence
  Synthetic
ggaaugggaacaucacacucu

SEQ ID NO: 651435 - RNA, 22 nt, Artificial Sequence
  Synthetic
aggaaugggaacaucacacucu

SEQ ID NO: 651436 - RNA, 23 nt, Artificial Sequence
  Synthetic
caggaaugggaacaucacacucu

SEQ ID NO: 651437 - RNA, 24 nt, Artificial Sequence
  Synthetic
acaggaaugggaacaucacacucu

SEQ ID NO: 651438 - RNA, 18 nt, Artificial Sequence
  Synthetic
gcugcugggcuccacucu

SEQ ID NO: 651439 - RNA, 19 nt, Artificial Sequence
  Synthetic
ggcugcugggcuccacucu

SEQ ID NO: 651440 - RNA, 20 nt, Artificial Sequence
  Synthetic
aggcugcugggcuccacucu

SEQ ID NO: 651441 - RNA, 21 nt, Artificial Sequence
  Synthetic
caggcugcugggcuccacucu

SEQ ID NO: 651442 - RNA, 22 nt, Artificial Sequence
  Synthetic
acaggcugcugggcuccacucu

SEQ ID NO: 651443 - RNA, 23 nt, Artificial Sequence
  Synthetic
cacaggcugcugggcuccacucu

SEQ ID NO: 651444 - RNA, 24 nt, Artificial Sequence
  Synthetic
acacaggcugcugggcuccacucu

SEQ ID NO: 651445 - RNA, 18 nt, Artificial Sequence
  Synthetic
caaagcaguuuccacucu

SEQ ID NO: 651446 - RNA, 19 nt, Artificial Sequence
  Synthetic
ccaaagcaguuuccacucu

SEQ ID NO: 651447 - RNA, 20 nt, Artificial Sequence
  Synthetic
cccaaagcaguuuccacucu

SEQ ID NO: 651448 - RNA, 21 nt, Artificial Sequence
  Synthetic
ccccaaagcaguuuccacucu

SEQ ID NO: 651449 - RNA, 22 nt, Artificial Sequence
  Synthetic
accccaaagcaguuuccacucu

SEQ ID NO: 651450 - RNA, 23 nt, Artificial Sequence
  Synthetic
aaccccaaagcaguuuccacucu

SEQ ID NO: 651451 - RNA, 24 nt, Artificial Sequence
  Synthetic
uaaccccaaagcaguuuccacucu

SEQ ID NO: 651452 - RNA, 21 nt, Artificial Sequence
  Synthetic
cgccuguaaucccagcacucu

SEQ ID NO: 651453 - RNA, 22 nt, Artificial Sequence
  Synthetic
acgccuguaaucccagcacucu

SEQ ID NO: 651454 - RNA, 23 nt, Artificial Sequence
  Synthetic
cacgccuguaaucccagcacucu

SEQ ID NO: 651455 - RNA, 24 nt, Artificial Sequence
  Synthetic
ucacgccuguaaucccagcacucu

SEQ ID NO: 651456 - RNA, 18 nt, Artificial Sequence
  Synthetic
gcugcuacuccucacucu

SEQ ID NO: 651457 - RNA, 19 nt, Artificial Sequence
  Synthetic
ugcugcuacuccucacucu

SEQ ID NO: 651458 - RNA, 20 nt, Artificial Sequence
  Synthetic
gugcugcuacuccucacucu

SEQ ID NO: 651459 - RNA, 21 nt, Artificial Sequence
  Synthetic
cgugcugcuacuccucacucu

SEQ ID NO: 651460 - RNA, 22 nt, Artificial Sequence
  Synthetic
ccgugcugcuacuccucacucu

SEQ ID NO: 651461 - RNA, 23 nt, Artificial Sequence
  Synthetic
accgugcugcuacuccucacucu

SEQ ID NO: 651462 - RNA, 24 nt, Artificial Sequence
  Synthetic
uaccgugcugcuacuccucacucu

SEQ ID NO: 651463 - RNA, 18 nt, Artificial Sequence
  Synthetic
gauucacauagucacucu

SEQ ID NO: 651464 - RNA, 19 nt, Artificial Sequence
  Synthetic
agauucacauagucacucu

SEQ ID NO: 651465 - RNA, 20 nt, Artificial Sequence
  Synthetic
aagauucacauagucacucu

SEQ ID NO: 651466 - RNA, 21 nt, Artificial Sequence
  Synthetic
gaagauucacauagucacucu

SEQ ID NO: 651467 - RNA, 22 nt, Artificial Sequence
  Synthetic
ggaagauucacauagucacucu

SEQ ID NO: 651468 - RNA, 23 nt, Artificial Sequence
  Synthetic
uggaagauucacauagucacucu

SEQ ID NO: 651469 - RNA, 24 nt, Artificial Sequence
  Synthetic
auggaagauucacauagucacucu

SEQ ID NO: 651470 - RNA, 18 nt, Artificial Sequence
  Synthetic
aaacaguaaauucacucu

SEQ ID NO: 651471 - RNA, 19 nt, Artificial Sequence
  Synthetic
gaaacaguaaauucacucu

SEQ ID NO: 651472 - RNA, 20 nt, Artificial Sequence
  Synthetic
ggaaacaguaaauucacucu

SEQ ID NO: 651473 - RNA, 21 nt, Artificial Sequence
  Synthetic
aggaaacaguaaauucacucu

SEQ ID NO: 651474 - RNA, 22 nt, Artificial Sequence
  Synthetic
caggaaacaguaaauucacucu

SEQ ID NO: 651475 - RNA, 23 nt, Artificial Sequence
  Synthetic
ucaggaaacaguaaauucacucu

SEQ ID NO: 651476 - RNA, 24 nt, Artificial Sequence
  Synthetic
uucaggaaacaguaaauucacucu

SEQ ID NO: 651477 - RNA, 18 nt, Artificial Sequence
  Synthetic
cccugguuccuucacucu

SEQ ID NO: 651478 - RNA, 19 nt, Artificial Sequence
  Synthetic
ucccugguuccuucacucu

SEQ ID NO: 651479 - RNA, 20 nt, Artificial Sequence
  Synthetic
aucccugguuccuucacucu

SEQ ID NO: 651480 - RNA, 21 nt, Artificial Sequence
  Synthetic
aaucccugguuccuucacucu

SEQ ID NO: 651481 - RNA, 22 nt, Artificial Sequence
  Synthetic
gaaucccugguuccuucacucu

SEQ ID NO: 651482 - RNA, 23 nt, Artificial Sequence
  Synthetic
agaaucccugguuccuucacucu

SEQ ID NO: 651483 - RNA, 24 nt, Artificial Sequence
  Synthetic
aagaaucccugguuccuucacucu

SEQ ID NO: 651484 - RNA, 18 nt, Artificial Sequence
  Synthetic
ccaguucauuuucacucu

SEQ ID NO: 651485 - RNA, 19 nt, Artificial Sequence
  Synthetic
uccaguucauuuucacucu

SEQ ID NO: 651486 - RNA, 20 nt, Artificial Sequence
  Synthetic
cuccaguucauuuucacucu

SEQ ID NO: 651487 - RNA, 21 nt, Artificial Sequence
  Synthetic
acuccaguucauuuucacucu

SEQ ID NO: 651488 - RNA, 22 nt, Artificial Sequence
  Synthetic
aacuccaguucauuuucacucu

SEQ ID NO: 651489 - RNA, 23 nt, Artificial Sequence
  Synthetic
aaacuccaguucauuuucacucu

SEQ ID NO: 651490 - RNA, 24 nt, Artificial Sequence
  Synthetic
caaacuccaguucauuuucacucu

SEQ ID NO: 651491 - RNA, 18 nt, Artificial Sequence
  Synthetic
ugcuguaucaaagacucu

SEQ ID NO: 651492 - RNA, 19 nt, Artificial Sequence
  Synthetic
uugcuguaucaaagacucu

SEQ ID NO: 651493 - RNA, 20 nt, Artificial Sequence
  Synthetic
cuugcuguaucaaagacucu

SEQ ID NO: 651494 - RNA, 21 nt, Artificial Sequence
  Synthetic
ucuugcuguaucaaagacucu

SEQ ID NO: 651495 - RNA, 22 nt, Artificial Sequence
  Synthetic
uucuugcuguaucaaagacucu

SEQ ID NO: 651496 - RNA, 23 nt, Artificial Sequence
  Synthetic
guucuugcuguaucaaagacucu

SEQ ID NO: 651497 - RNA, 24 nt, Artificial Sequence
  Synthetic
uguucuugcuguaucaaagacucu

SEQ ID NO: 651498 - RNA, 18 nt, Artificial Sequence
  Synthetic
uuuguuaaccaagacucu

SEQ ID NO: 651499 - RNA, 19 nt, Artificial Sequence
  Synthetic
guuuguuaaccaagacucu

SEQ ID NO: 651500 - RNA, 20 nt, Artificial Sequence
  Synthetic
uguuuguuaaccaagacucu

SEQ ID NO: 651501 - RNA, 21 nt, Artificial Sequence
  Synthetic
auguuuguuaaccaagacucu

SEQ ID NO: 651502 - RNA, 22 nt, Artificial Sequence
  Synthetic
aauguuuguuaaccaagacucu

SEQ ID NO: 651503 - RNA, 23 nt, Artificial Sequence
  Synthetic
aaauguuuguuaaccaagacucu

SEQ ID NO: 651504 - RNA, 24 nt, Artificial Sequence
  Synthetic
caaauguuuguuaaccaagacucu

SEQ ID NO: 651505 - RNA, 18 nt, Artificial Sequence
  Synthetic
cucagaaucacagacucu

SEQ ID NO: 651506 - RNA, 19 nt, Artificial Sequence
  Synthetic
acucagaaucacagacucu

SEQ ID NO: 651507 - RNA, 20 nt, Artificial Sequence
  Synthetic
gacucagaaucacagacucu

SEQ ID NO: 651508 - RNA, 21 nt, Artificial Sequence
  Synthetic
agacucagaaucacagacucu

SEQ ID NO: 651509 - RNA, 22 nt, Artificial Sequence
  Synthetic
aagacucagaaucacagacucu

SEQ ID NO: 651510 - RNA, 23 nt, Artificial Sequence
  Synthetic
uaagacucagaaucacagacucu

SEQ ID NO: 651511 - RNA, 24 nt, Artificial Sequence
  Synthetic
auaagacucagaaucacagacucu

SEQ ID NO: 651512 - RNA, 18 nt, Artificial Sequence
  Synthetic
auaaauuauggggacucu

SEQ ID NO: 651513 - RNA, 19 nt, Artificial Sequence
  Synthetic
aauaaauuauggggacucu

SEQ ID NO: 651514 - RNA, 20 nt, Artificial Sequence
  Synthetic
gaauaaauuauggggacucu

SEQ ID NO: 651515 - RNA, 21 nt, Artificial Sequence
  Synthetic
ugaauaaauuauggggacucu

SEQ ID NO: 651516 - RNA, 22 nt, Artificial Sequence
  Synthetic
cugaauaaauuauggggacucu

SEQ ID NO: 651517 - RNA, 23 nt, Artificial Sequence
  Synthetic
gcugaauaaauuauggggacucu

SEQ ID NO: 651518 - RNA, 24 nt, Artificial Sequence
  Synthetic
ugcugaauaaauuauggggacucu

SEQ ID NO: 651519 - RNA, 18 nt, Artificial Sequence
  Synthetic
ggcaaauaucaugacucu

SEQ ID NO: 651520 - RNA, 19 nt, Artificial Sequence
  Synthetic
aggcaaauaucaugacucu

SEQ ID NO: 651521 - RNA, 20 nt, Artificial Sequence
  Synthetic
gaggcaaauaucaugacucu

SEQ ID NO: 651522 - RNA, 21 nt, Artificial Sequence
  Synthetic
ggaggcaaauaucaugacucu

SEQ ID NO: 651523 - RNA, 22 nt, Artificial Sequence
  Synthetic
aggaggcaaauaucaugacucu

SEQ ID NO: 651524 - RNA, 23 nt, Artificial Sequence
  Synthetic
caggaggcaaauaucaugacucu

SEQ ID NO: 651525 - RNA, 24 nt, Artificial Sequence
  Synthetic
gcaggaggcaaauaucaugacucu

SEQ ID NO: 651526 - RNA, 18 nt, Artificial Sequence
  Synthetic
cauuucugucuugacucu

SEQ ID NO: 651527 - RNA, 19 nt, Artificial Sequence
  Synthetic
gcauuucugucuugacucu

SEQ ID NO: 651528 - RNA, 20 nt, Artificial Sequence
  Synthetic
agcauuucugucuugacucu

SEQ ID NO: 651529 - RNA, 21 nt, Artificial Sequence
  Synthetic
cagcauuucugucuugacucu

SEQ ID NO: 651530 - RNA, 22 nt, Artificial Sequence
  Synthetic
acagcauuucugucuugacucu

SEQ ID NO: 651531 - RNA, 23 nt, Artificial Sequence
  Synthetic
cacagcauuucugucuugacucu

SEQ ID NO: 651532 - RNA, 24 nt, Artificial Sequence
  Synthetic
ucacagcauuucugucuugacucu

SEQ ID NO: 651533 - RNA, 18 nt, Artificial Sequence
  Synthetic
uuuaaacugacauacucu

SEQ ID NO: 651534 - RNA, 19 nt, Artificial Sequence
  Synthetic
guuuaaacugacauacucu

SEQ ID NO: 651535 - RNA, 20 nt, Artificial Sequence
  Synthetic
aguuuaaacugacauacucu

SEQ ID NO: 651536 - RNA, 21 nt, Artificial Sequence
  Synthetic
aaguuuaaacugacauacucu

SEQ ID NO: 651537 - RNA, 22 nt, Artificial Sequence
  Synthetic
uaaguuuaaacugacauacucu

SEQ ID NO: 651538 - RNA, 23 nt, Artificial Sequence
  Synthetic
auaaguuuaaacugacauacucu

SEQ ID NO: 651539 - RNA, 24 nt, Artificial Sequence
  Synthetic
aauaaguuuaaacugacauacucu

SEQ ID NO: 651540 - RNA, 18 nt, Artificial Sequence
  Synthetic
uguguguauguauacucu

SEQ ID NO: 651541 - RNA, 19 nt, Artificial Sequence
  Synthetic
guguguguauguauacucu

SEQ ID NO: 651542 - RNA, 20 nt, Artificial Sequence
  Synthetic
uguguguguauguauacucu

SEQ ID NO: 651543 - RNA, 21 nt, Artificial Sequence
  Synthetic
auguguguguauguauacucu

SEQ ID NO: 651544 - RNA, 22 nt, Artificial Sequence
  Synthetic
uauguguguguauguauacucu

SEQ ID NO: 651545 - RNA, 23 nt, Artificial Sequence
  Synthetic
guauguguguguauguauacucu

SEQ ID NO: 651546 - RNA, 24 nt, Artificial Sequence
  Synthetic
cguauguguguguauguauacucu

SEQ ID NO: 651547 - RNA, 18 nt, Artificial Sequence
  Synthetic
gaaaccuccugcuacucu

SEQ ID NO: 651548 - RNA, 19 nt, Artificial Sequence
  Synthetic
ggaaaccuccugcuacucu

SEQ ID NO: 651549 - RNA, 20 nt, Artificial Sequence
  Synthetic
gggaaaccuccugcuacucu

SEQ ID NO: 651550 - RNA, 21 nt, Artificial Sequence
  Synthetic
ggggaaaccuccugcuacucu

SEQ ID NO: 651551 - RNA, 22 nt, Artificial Sequence
  Synthetic
aggggaaaccuccugcuacucu

SEQ ID NO: 651552 - RNA, 23 nt, Artificial Sequence
  Synthetic
aaggggaaaccuccugcuacucu

SEQ ID NO: 651553 - RNA, 24 nt, Artificial Sequence
  Synthetic
gaaggggaaaccuccugcuacucu

SEQ ID NO: 651554 - RNA, 18 nt, Artificial Sequence
  Synthetic
cguuuuuaagucuacucu

SEQ ID NO: 651555 - RNA, 19 nt, Artificial Sequence
  Synthetic
ucguuuuuaagucuacucu

SEQ ID NO: 651556 - RNA, 20 nt, Artificial Sequence
  Synthetic
uucguuuuuaagucuacucu

SEQ ID NO: 651557 - RNA, 21 nt, Artificial Sequence
  Synthetic
auucguuuuuaagucuacucu

SEQ ID NO: 651558 - RNA, 22 nt, Artificial Sequence
  Synthetic
cauucguuuuuaagucuacucu

SEQ ID NO: 651559 - RNA, 23 nt, Artificial Sequence
  Synthetic
ucauucguuuuuaagucuacucu

SEQ ID NO: 651560 - RNA, 24 nt, Artificial Sequence
  Synthetic
uucauucguuuuuaagucuacucu

SEQ ID NO: 651561 - RNA, 18 nt, Artificial Sequence
  Synthetic
cagaucggugauuacucu

SEQ ID NO: 651562 - RNA, 19 nt, Artificial Sequence
  Synthetic
ucagaucggugauuacucu

SEQ ID NO: 651563 - RNA, 20 nt, Artificial Sequence
  Synthetic
aucagaucggugauuacucu

SEQ ID NO: 651564 - RNA, 21 nt, Artificial Sequence
  Synthetic
gaucagaucggugauuacucu

SEQ ID NO: 651565 - RNA, 22 nt, Artificial Sequence
  Synthetic
agaucagaucggugauuacucu

SEQ ID NO: 651566 - RNA, 23 nt, Artificial Sequence
  Synthetic
cagaucagaucggugauuacucu

SEQ ID NO: 651567 - RNA, 24 nt, Artificial Sequence
  Synthetic
acagaucagaucggugauuacucu

SEQ ID NO: 651568 - RNA, 18 nt, Artificial Sequence
  Synthetic
uaauuaucauauuacucu

SEQ ID NO: 651569 - RNA, 19 nt, Artificial Sequence
  Synthetic
guaauuaucauauuacucu

SEQ ID NO: 651570 - RNA, 20 nt, Artificial Sequence
  Synthetic
uguaauuaucauauuacucu

SEQ ID NO: 651571 - RNA, 21 nt, Artificial Sequence
  Synthetic
auguaauuaucauauuacucu

SEQ ID NO: 651572 - RNA, 22 nt, Artificial Sequence
  Synthetic
aauguaauuaucauauuacucu

SEQ ID NO: 651573 - RNA, 23 nt, Artificial Sequence
  Synthetic
caauguaauuaucauauuacucu

SEQ ID NO: 651574 - RNA, 24 nt, Artificial Sequence
  Synthetic
ucaauguaauuaucauauuacucu

SEQ ID NO: 651575 - RNA, 18 nt, Artificial Sequence
  Synthetic
uaaccccuuccaaccucu

SEQ ID NO: 651576 - RNA, 19 nt, Artificial Sequence
  Synthetic
uuaaccccuuccaaccucu

SEQ ID NO: 651577 - RNA, 20 nt, Artificial Sequence
  Synthetic
uuuaaccccuuccaaccucu

SEQ ID NO: 651578 - RNA, 21 nt, Artificial Sequence
  Synthetic
uuuuaaccccuuccaaccucu

SEQ ID NO: 651579 - RNA, 22 nt, Artificial Sequence
  Synthetic
uuuuuaaccccuuccaaccucu

SEQ ID NO: 651580 - RNA, 23 nt, Artificial Sequence
  Synthetic
guuuuuaaccccuuccaaccucu

SEQ ID NO: 651581 - RNA, 24 nt, Artificial Sequence
  Synthetic
uguuuuuaaccccuuccaaccucu

SEQ ID NO: 651582 - RNA, 18 nt, Artificial Sequence
  Synthetic
aacaauaaagcaaccucu

SEQ ID NO: 651583 - RNA, 19 nt, Artificial Sequence
  Synthetic
aaacaauaaagcaaccucu

SEQ ID NO: 651584 - RNA, 20 nt, Artificial Sequence
  Synthetic
aaaacaauaaagcaaccucu

SEQ ID NO: 651585 - RNA, 21 nt, Artificial Sequence
  Synthetic
uaaaacaauaaagcaaccucu

SEQ ID NO: 651586 - RNA, 22 nt, Artificial Sequence
  Synthetic
auaaaacaauaaagcaaccucu

SEQ ID NO: 651587 - RNA, 23 nt, Artificial Sequence
  Synthetic
aauaaaacaauaaagcaaccucu

SEQ ID NO: 651588 - RNA, 24 nt, Artificial Sequence
  Synthetic
aaauaaaacaauaaagcaaccucu

SEQ ID NO: 651589 - RNA, 18 nt, Artificial Sequence
  Synthetic
agaggccagucaaccucu

SEQ ID NO: 651590 - RNA, 19 nt, Artificial Sequence
  Synthetic
gagaggccagucaaccucu

SEQ ID NO: 651591 - RNA, 20 nt, Artificial Sequence
  Synthetic
ugagaggccagucaaccucu

SEQ ID NO: 651592 - RNA, 21 nt, Artificial Sequence
  Synthetic
cugagaggccagucaaccucu

SEQ ID NO: 651593 - RNA, 22 nt, Artificial Sequence
  Synthetic
ucugagaggccagucaaccucu

SEQ ID NO: 651594 - RNA, 23 nt, Artificial Sequence
  Synthetic
gucugagaggccagucaaccucu

SEQ ID NO: 651595 - RNA, 24 nt, Artificial Sequence
  Synthetic
ugucugagaggccagucaaccucu

SEQ ID NO: 651596 - RNA, 18 nt, Artificial Sequence
  Synthetic
aagacguagagcaccucu

SEQ ID NO: 651597 - RNA, 19 nt, Artificial Sequence
  Synthetic
aaagacguagagcaccucu

SEQ ID NO: 651598 - RNA, 20 nt, Artificial Sequence
  Synthetic
uaaagacguagagcaccucu

SEQ ID NO: 651599 - RNA, 21 nt, Artificial Sequence
  Synthetic
cuaaagacguagagcaccucu

SEQ ID NO: 651600 - RNA, 22 nt, Artificial Sequence
  Synthetic
acuaaagacguagagcaccucu

SEQ ID NO: 651601 - RNA, 23 nt, Artificial Sequence
  Synthetic
uacuaaagacguagagcaccucu

SEQ ID NO: 651602 - RNA, 24 nt, Artificial Sequence
  Synthetic
auacuaaagacguagagcaccucu

SEQ ID NO: 651603 - RNA, 18 nt, Artificial Sequence
  Synthetic
cuugagauguggaccucu

SEQ ID NO: 651604 - RNA, 19 nt, Artificial Sequence
  Synthetic
ucuugagauguggaccucu

SEQ ID NO: 651605 - RNA, 20 nt, Artificial Sequence
  Synthetic
cucuugagauguggaccucu

SEQ ID NO: 651606 - RNA, 21 nt, Artificial Sequence
  Synthetic
ccucuugagauguggaccucu

SEQ ID NO: 651607 - RNA, 22 nt, Artificial Sequence
  Synthetic
accucuugagauguggaccucu

SEQ ID NO: 651608 - RNA, 23 nt, Artificial Sequence
  Synthetic
uaccucuugagauguggaccucu

SEQ ID NO: 651609 - RNA, 24 nt, Artificial Sequence
  Synthetic
auaccucuugagauguggaccucu

SEQ ID NO: 651610 - RNA, 18 nt, Artificial Sequence
  Synthetic
ucauccauugugaccucu

SEQ ID NO: 651611 - RNA, 19 nt, Artificial Sequence
  Synthetic
aucauccauugugaccucu

SEQ ID NO: 651612 - RNA, 20 nt, Artificial Sequence
  Synthetic
caucauccauugugaccucu

SEQ ID NO: 651613 - RNA, 21 nt, Artificial Sequence
  Synthetic
acaucauccauugugaccucu

SEQ ID NO: 651614 - RNA, 22 nt, Artificial Sequence
  Synthetic
uacaucauccauugugaccucu

SEQ ID NO: 651615 - RNA, 23 nt, Artificial Sequence
  Synthetic
uuacaucauccauugugaccucu

SEQ ID NO: 651616 - RNA, 24 nt, Artificial Sequence
  Synthetic
auuacaucauccauugugaccucu

SEQ ID NO: 651617 - RNA, 18 nt, Artificial Sequence
  Synthetic
caguuuggaaauaccucu

SEQ ID NO: 651618 - RNA, 19 nt, Artificial Sequence
  Synthetic
gcaguuuggaaauaccucu

SEQ ID NO: 651619 - RNA, 20 nt, Artificial Sequence
  Synthetic
agcaguuuggaaauaccucu

SEQ ID NO: 651620 - RNA, 21 nt, Artificial Sequence
  Synthetic
aagcaguuuggaaauaccucu

SEQ ID NO: 651621 - RNA, 22 nt, Artificial Sequence
  Synthetic
aaagcaguuuggaaauaccucu

SEQ ID NO: 651622 - RNA, 23 nt, Artificial Sequence
  Synthetic
gaaagcaguuuggaaauaccucu

SEQ ID NO: 651623 - RNA, 24 nt, Artificial Sequence
  Synthetic
ggaaagcaguuuggaaauaccucu

SEQ ID NO: 651624 - RNA, 18 nt, Artificial Sequence
  Synthetic
acucaucgcaauaccucu

SEQ ID NO: 651625 - RNA, 19 nt, Artificial Sequence
  Synthetic
uacucaucgcaauaccucu

SEQ ID NO: 651626 - RNA, 20 nt, Artificial Sequence
  Synthetic
uuacucaucgcaauaccucu

SEQ ID NO: 651627 - RNA, 21 nt, Artificial Sequence
  Synthetic
uuuacucaucgcaauaccucu

SEQ ID NO: 651628 - RNA, 22 nt, Artificial Sequence
  Synthetic
auuuacucaucgcaauaccucu

SEQ ID NO: 651629 - RNA, 23 nt, Artificial Sequence
  Synthetic
uauuuacucaucgcaauaccucu

SEQ ID NO: 651630 - RNA, 24 nt, Artificial Sequence
  Synthetic
uuauuuacucaucgcaauaccucu

SEQ ID NO: 651631 - RNA, 18 nt, Artificial Sequence
  Synthetic
augacuucuuuuaccucu

SEQ ID NO: 651632 - RNA, 19 nt, Artificial Sequence
  Synthetic
aaugacuucuuuuaccucu

SEQ ID NO: 651633 - RNA, 20 nt, Artificial Sequence
  Synthetic
uaaugacuucuuuuaccucu

SEQ ID NO: 651634 - RNA, 21 nt, Artificial Sequence
  Synthetic
guaaugacuucuuuuaccucu

SEQ ID NO: 651635 - RNA, 22 nt, Artificial Sequence
  Synthetic
cguaaugacuucuuuuaccucu

SEQ ID NO: 651636 - RNA, 23 nt, Artificial Sequence
  Synthetic
gcguaaugacuucuuuuaccucu

SEQ ID NO: 651637 - RNA, 24 nt, Artificial Sequence
  Synthetic
ggcguaaugacuucuuuuaccucu

SEQ ID NO: 651638 - RNA, 18 nt, Artificial Sequence
  Synthetic
ccaauugacgaacccucu

SEQ ID NO: 651639 - RNA, 19 nt, Artificial Sequence
  Synthetic
gccaauugacgaacccucu

SEQ ID NO: 651640 - RNA, 20 nt, Artificial Sequence
  Synthetic
ugccaauugacgaacccucu

SEQ ID NO: 651641 - RNA, 21 nt, Artificial Sequence
  Synthetic
cugccaauugacgaacccucu

SEQ ID NO: 651642 - RNA, 22 nt, Artificial Sequence
  Synthetic
ccugccaauugacgaacccucu

SEQ ID NO: 651643 - RNA, 23 nt, Artificial Sequence
  Synthetic
accugccaauugacgaacccucu

SEQ ID NO: 651644 - RNA, 24 nt, Artificial Sequence
  Synthetic
uaccugccaauugacgaacccucu

SEQ ID NO: 651645 - RNA, 18 nt, Artificial Sequence
  Synthetic
cauugccucccacccucu

SEQ ID NO: 651646 - RNA, 19 nt, Artificial Sequence
  Synthetic
ucauugccucccacccucu

SEQ ID NO: 651647 - RNA, 20 nt, Artificial Sequence
  Synthetic
aucauugccucccacccucu

SEQ ID NO: 651648 - RNA, 21 nt, Artificial Sequence
  Synthetic
gaucauugccucccacccucu

SEQ ID NO: 651649 - RNA, 22 nt, Artificial Sequence
  Synthetic
agaucauugccucccacccucu

SEQ ID NO: 651650 - RNA, 23 nt, Artificial Sequence
  Synthetic
gagaucauugccucccacccucu

SEQ ID NO: 651651 - RNA, 24 nt, Artificial Sequence
  Synthetic
ugagaucauugccucccacccucu

SEQ ID NO: 651652 - RNA, 18 nt, Artificial Sequence
  Synthetic
cccagcagugcccccucu

SEQ ID NO: 651653 - RNA, 19 nt, Artificial Sequence
  Synthetic
ucccagcagugcccccucu

SEQ ID NO: 651654 - RNA, 20 nt, Artificial Sequence
  Synthetic
gucccagcagugcccccucu

SEQ ID NO: 651655 - RNA, 21 nt, Artificial Sequence
  Synthetic
ggucccagcagugcccccucu

SEQ ID NO: 651656 - RNA, 22 nt, Artificial Sequence
  Synthetic
aggucccagcagugcccccucu

SEQ ID NO: 651657 - RNA, 23 nt, Artificial Sequence
  Synthetic
caggucccagcagugcccccucu

SEQ ID NO: 651658 - RNA, 24 nt, Artificial Sequence
  Synthetic
ccaggucccagcagugcccccucu

SEQ ID NO: 651659 - RNA, 18 nt, Artificial Sequence
  Synthetic
uuuauuuccagccccucu

SEQ ID NO: 651660 - RNA, 19 nt, Artificial Sequence
  Synthetic
cuuuauuuccagccccucu

SEQ ID NO: 651661 - RNA, 20 nt, Artificial Sequence
  Synthetic
ccuuuauuuccagccccucu

SEQ ID NO: 651662 - RNA, 21 nt, Artificial Sequence
  Synthetic
cccuuuauuuccagccccucu

SEQ ID NO: 651663 - RNA, 22 nt, Artificial Sequence
  Synthetic
ccccuuuauuuccagccccucu

SEQ ID NO: 651664 - RNA, 23 nt, Artificial Sequence
  Synthetic
accccuuuauuuccagccccucu

SEQ ID NO: 651665 - RNA, 24 nt, Artificial Sequence
  Synthetic
aaccccuuuauuuccagccccucu

SEQ ID NO: 651666 - RNA, 18 nt, Artificial Sequence
  Synthetic
caugugagugagcccucu

SEQ ID NO: 651667 - RNA, 19 nt, Artificial Sequence
  Synthetic
gcaugugagugagcccucu

SEQ ID NO: 651668 - RNA, 20 nt, Artificial Sequence
  Synthetic
ggcaugugagugagcccucu

SEQ ID NO: 651669 - RNA, 21 nt, Artificial Sequence
  Synthetic
aggcaugugagugagcccucu

SEQ ID NO: 651670 - RNA, 22 nt, Artificial Sequence
  Synthetic
caggcaugugagugagcccucu

SEQ ID NO: 651671 - RNA, 23 nt, Artificial Sequence
  Synthetic
ccaggcaugugagugagcccucu

SEQ ID NO: 651672 - RNA, 24 nt, Artificial Sequence
  Synthetic
uccaggcaugugagugagcccucu

SEQ ID NO: 651673 - RNA, 18 nt, Artificial Sequence
  Synthetic
cgugcuucugcgcccucu

SEQ ID NO: 651674 - RNA, 19 nt, Artificial Sequence
  Synthetic
ccgugcuucugcgcccucu

SEQ ID NO: 651675 - RNA, 20 nt, Artificial Sequence
  Synthetic
accgugcuucugcgcccucu

SEQ ID NO: 651676 - RNA, 21 nt, Artificial Sequence
  Synthetic
caccgugcuucugcgcccucu

SEQ ID NO: 651677 - RNA, 22 nt, Artificial Sequence
  Synthetic
ccaccgugcuucugcgcccucu

SEQ ID NO: 651678 - RNA, 23 nt, Artificial Sequence
  Synthetic
cccaccgugcuucugcgcccucu

SEQ ID NO: 651679 - RNA, 24 nt, Artificial Sequence
  Synthetic
ucccaccgugcuucugcgcccucu

SEQ ID NO: 651680 - RNA, 18 nt, Artificial Sequence
  Synthetic
uguggugagaugcccucu

SEQ ID NO: 651681 - RNA, 19 nt, Artificial Sequence
  Synthetic
auguggugagaugcccucu

SEQ ID NO: 651682 - RNA, 20 nt, Artificial Sequence
  Synthetic
gauguggugagaugcccucu

SEQ ID NO: 651683 - RNA, 21 nt, Artificial Sequence
  Synthetic
agauguggugagaugcccucu

SEQ ID NO: 651684 - RNA, 22 nt, Artificial Sequence
  Synthetic
aagauguggugagaugcccucu

SEQ ID NO: 651685 - RNA, 23 nt, Artificial Sequence
  Synthetic
aaagauguggugagaugcccucu

SEQ ID NO: 651686 - RNA, 24 nt, Artificial Sequence
  Synthetic
caaagauguggugagaugcccucu

SEQ ID NO: 651687 - RNA, 18 nt, Artificial Sequence
  Synthetic
agagcuugcauucccucu

SEQ ID NO: 651688 - RNA, 19 nt, Artificial Sequence
  Synthetic
cagagcuugcauucccucu

SEQ ID NO: 651689 - RNA, 20 nt, Artificial Sequence
  Synthetic
gcagagcuugcauucccucu

SEQ ID NO: 651690 - RNA, 21 nt, Artificial Sequence
  Synthetic
ggcagagcuugcauucccucu

SEQ ID NO: 651691 - RNA, 22 nt, Artificial Sequence
  Synthetic
uggcagagcuugcauucccucu

SEQ ID NO: 651692 - RNA, 23 nt, Artificial Sequence
  Synthetic
uuggcagagcuugcauucccucu

SEQ ID NO: 651693 - RNA, 24 nt, Artificial Sequence
  Synthetic
guuggcagagcuugcauucccucu

SEQ ID NO: 651694 - RNA, 18 nt, Artificial Sequence
  Synthetic
uaacauccagaagccucu

SEQ ID NO: 651695 - RNA, 19 nt, Artificial Sequence
  Synthetic
guaacauccagaagccucu

SEQ ID NO: 651696 - RNA, 20 nt, Artificial Sequence
  Synthetic
aguaacauccagaagccucu

SEQ ID NO: 651697 - RNA, 21 nt, Artificial Sequence
  Synthetic
aaguaacauccagaagccucu

SEQ ID NO: 651698 - RNA, 22 nt, Artificial Sequence
  Synthetic
caaguaacauccagaagccucu

SEQ ID NO: 651699 - RNA, 23 nt, Artificial Sequence
  Synthetic
ucaaguaacauccagaagccucu

SEQ ID NO: 651700 - RNA, 24 nt, Artificial Sequence
  Synthetic
aucaaguaacauccagaagccucu

SEQ ID NO: 651701 - RNA, 18 nt, Artificial Sequence
  Synthetic
ugauuucuaacagccucu

SEQ ID NO: 651702 - RNA, 19 nt, Artificial Sequence
  Synthetic
cugauuucuaacagccucu

SEQ ID NO: 651703 - RNA, 20 nt, Artificial Sequence
  Synthetic
ucugauuucuaacagccucu

SEQ ID NO: 651704 - RNA, 21 nt, Artificial Sequence
  Synthetic
uucugauuucuaacagccucu

SEQ ID NO: 651705 - RNA, 22 nt, Artificial Sequence
  Synthetic
guucugauuucuaacagccucu

SEQ ID NO: 651706 - RNA, 23 nt, Artificial Sequence
  Synthetic
uguucugauuucuaacagccucu

SEQ ID NO: 651707 - RNA, 24 nt, Artificial Sequence
  Synthetic
cuguucugauuucuaacagccucu

SEQ ID NO: 651708 - RNA, 18 nt, Artificial Sequence
  Synthetic
aauaguauugcagccucu

SEQ ID NO: 651709 - RNA, 19 nt, Artificial Sequence
  Synthetic
aaauaguauugcagccucu

SEQ ID NO: 651710 - RNA, 20 nt, Artificial Sequence
  Synthetic
aaaauaguauugcagccucu

SEQ ID NO: 651711 - RNA, 21 nt, Artificial Sequence
  Synthetic
aaaaauaguauugcagccucu

SEQ ID NO: 651712 - RNA, 22 nt, Artificial Sequence
  Synthetic
caaaaauaguauugcagccucu

SEQ ID NO: 651713 - RNA, 23 nt, Artificial Sequence
  Synthetic
ucaaaaauaguauugcagccucu

SEQ ID NO: 651714 - RNA, 24 nt, Artificial Sequence
  Synthetic
aucaaaaauaguauugcagccucu

SEQ ID NO: 651715 - RNA, 18 nt, Artificial Sequence
  Synthetic
ucucaugccucagccucu

SEQ ID NO: 651716 - RNA, 19 nt, Artificial Sequence
  Synthetic
uucucaugccucagccucu

SEQ ID NO: 651717 - RNA, 20 nt, Artificial Sequence
  Synthetic
auucucaugccucagccucu

SEQ ID NO: 651718 - RNA, 21 nt, Artificial Sequence
  Synthetic
aauucucaugccucagccucu

SEQ ID NO: 651719 - RNA, 22 nt, Artificial Sequence
  Synthetic
caauucucaugccucagccucu

SEQ ID NO: 651720 - RNA, 23 nt, Artificial Sequence
  Synthetic
gcaauucucaugccucagccucu

SEQ ID NO: 651721 - RNA, 24 nt, Artificial Sequence
  Synthetic
agcaauucucaugccucagccucu

SEQ ID NO: 651722 - RNA, 18 nt, Artificial Sequence
  Synthetic
acuguaaucucagccucu

SEQ ID NO: 651723 - RNA, 19 nt, Artificial Sequence
  Synthetic
gacuguaaucucagccucu

SEQ ID NO: 651724 - RNA, 20 nt, Artificial Sequence
  Synthetic
ugacuguaaucucagccucu

SEQ ID NO: 651725 - RNA, 21 nt, Artificial Sequence
  Synthetic
gugacuguaaucucagccucu

SEQ ID NO: 651726 - RNA, 22 nt, Artificial Sequence
  Synthetic
ggugacuguaaucucagccucu

SEQ ID NO: 651727 - RNA, 23 nt, Artificial Sequence
  Synthetic
gggugacuguaaucucagccucu

SEQ ID NO: 651728 - RNA, 24 nt, Artificial Sequence
  Synthetic
ugggugacuguaaucucagccucu

SEQ ID NO: 651729 - RNA, 18 nt, Artificial Sequence
  Synthetic
ucacacaccggggccucu

SEQ ID NO: 651730 - RNA, 19 nt, Artificial Sequence
  Synthetic
aucacacaccggggccucu

SEQ ID NO: 651731 - RNA, 20 nt, Artificial Sequence
  Synthetic
caucacacaccggggccucu

SEQ ID NO: 651732 - RNA, 21 nt, Artificial Sequence
  Synthetic
acaucacacaccggggccucu

SEQ ID NO: 651733 - RNA, 22 nt, Artificial Sequence
  Synthetic
aacaucacacaccggggccucu

SEQ ID NO: 651734 - RNA, 23 nt, Artificial Sequence
  Synthetic
gaacaucacacaccggggccucu

SEQ ID NO: 651735 - RNA, 24 nt, Artificial Sequence
  Synthetic
ggaacaucacacaccggggccucu

SEQ ID NO: 651736 - RNA, 18 nt, Artificial Sequence
  Synthetic
gugaguuuccuggccucu

SEQ ID NO: 651737 - RNA, 19 nt, Artificial Sequence
  Synthetic
ggugaguuuccuggccucu

SEQ ID NO: 651738 - RNA, 20 nt, Artificial Sequence
  Synthetic
aggugaguuuccuggccucu

SEQ ID NO: 651739 - RNA, 21 nt, Artificial Sequence
  Synthetic
uaggugaguuuccuggccucu

SEQ ID NO: 651740 - RNA, 22 nt, Artificial Sequence
  Synthetic
cuaggugaguuuccuggccucu

SEQ ID NO: 651741 - RNA, 23 nt, Artificial Sequence
  Synthetic
ucuaggugaguuuccuggccucu

SEQ ID NO: 651742 - RNA, 24 nt, Artificial Sequence
  Synthetic
uucuaggugaguuuccuggccucu

SEQ ID NO: 651743 - RNA, 18 nt, Artificial Sequence
  Synthetic
auagaaauuaaugccucu

SEQ ID NO: 651744 - RNA, 19 nt, Artificial Sequence
  Synthetic
cauagaaauuaaugccucu

SEQ ID NO: 651745 - RNA, 20 nt, Artificial Sequence
  Synthetic
gcauagaaauuaaugccucu

SEQ ID NO: 651746 - RNA, 21 nt, Artificial Sequence
  Synthetic
ggcauagaaauuaaugccucu

SEQ ID NO: 651747 - RNA, 22 nt, Artificial Sequence
  Synthetic
aggcauagaaauuaaugccucu

SEQ ID NO: 651748 - RNA, 23 nt, Artificial Sequence
  Synthetic
aaggcauagaaauuaaugccucu

SEQ ID NO: 651749 - RNA, 24 nt, Artificial Sequence
  Synthetic
aaaggcauagaaauuaaugccucu

SEQ ID NO: 651750 - RNA, 18 nt, Artificial Sequence
  Synthetic
uccccuuuuucugccucu

SEQ ID NO: 651751 - RNA, 19 nt, Artificial Sequence
  Synthetic
uuccccuuuuucugccucu

SEQ ID NO: 651752 - RNA, 20 nt, Artificial Sequence
  Synthetic
guuccccuuuuucugccucu

SEQ ID NO: 651753 - RNA, 21 nt, Artificial Sequence
  Synthetic
aguuccccuuuuucugccucu

SEQ ID NO: 651754 - RNA, 22 nt, Artificial Sequence
  Synthetic
caguuccccuuuuucugccucu

SEQ ID NO: 651755 - RNA, 23 nt, Artificial Sequence
  Synthetic
acaguuccccuuuuucugccucu

SEQ ID NO: 651756 - RNA, 24 nt, Artificial Sequence
  Synthetic
cacaguuccccuuuuucugccucu

SEQ ID NO: 651757 - RNA, 18 nt, Artificial Sequence
  Synthetic
ccacagacuguugccucu

SEQ ID NO: 651758 - RNA, 19 nt, Artificial Sequence
  Synthetic
accacagacuguugccucu

SEQ ID NO: 651759 - RNA, 20 nt, Artificial Sequence
  Synthetic
aaccacagacuguugccucu

SEQ ID NO: 651760 - RNA, 21 nt, Artificial Sequence
  Synthetic
gaaccacagacuguugccucu

SEQ ID NO: 651761 - RNA, 22 nt, Artificial Sequence
  Synthetic
ggaaccacagacuguugccucu

SEQ ID NO: 651762 - RNA, 23 nt, Artificial Sequence
  Synthetic
aggaaccacagacuguugccucu

SEQ ID NO: 651763 - RNA, 24 nt, Artificial Sequence
  Synthetic
caggaaccacagacuguugccucu

SEQ ID NO: 651764 - RNA, 18 nt, Artificial Sequence
  Synthetic
cuacagcaugaauccucu

SEQ ID NO: 651765 - RNA, 19 nt, Artificial Sequence
  Synthetic
ccuacagcaugaauccucu

SEQ ID NO: 651766 - RNA, 20 nt, Artificial Sequence
  Synthetic
cccuacagcaugaauccucu

SEQ ID NO: 651767 - RNA, 21 nt, Artificial Sequence
  Synthetic
ucccuacagcaugaauccucu

SEQ ID NO: 651768 - RNA, 22 nt, Artificial Sequence
  Synthetic
uucccuacagcaugaauccucu

SEQ ID NO: 651769 - RNA, 23 nt, Artificial Sequence
  Synthetic
guucccuacagcaugaauccucu

SEQ ID NO: 651770 - RNA, 24 nt, Artificial Sequence
  Synthetic
aguucccuacagcaugaauccucu

SEQ ID NO: 651771 - RNA, 18 nt, Artificial Sequence
  Synthetic
acggcccuuccauccucu

SEQ ID NO: 651772 - RNA, 19 nt, Artificial Sequence
  Synthetic
uacggcccuuccauccucu

SEQ ID NO: 651773 - RNA, 20 nt, Artificial Sequence
  Synthetic
uuacggcccuuccauccucu

SEQ ID NO: 651774 - RNA, 21 nt, Artificial Sequence
  Synthetic
uuuacggcccuuccauccucu

SEQ ID NO: 651775 - RNA, 22 nt, Artificial Sequence
  Synthetic
cuuuacggcccuuccauccucu

SEQ ID NO: 651776 - RNA, 23 nt, Artificial Sequence
  Synthetic
ccuuuacggcccuuccauccucu

SEQ ID NO: 651777 - RNA, 24 nt, Artificial Sequence
  Synthetic
accuuuacggcccuuccauccucu

SEQ ID NO: 651778 - RNA, 18 nt, Artificial Sequence
  Synthetic
aaguuuguaagauccucu

SEQ ID NO: 651779 - RNA, 19 nt, Artificial Sequence
  Synthetic
aaaguuuguaagauccucu

SEQ ID NO: 651780 - RNA, 20 nt, Artificial Sequence
  Synthetic
aaaaguuuguaagauccucu

SEQ ID NO: 651781 - RNA, 21 nt, Artificial Sequence
  Synthetic
caaaaguuuguaagauccucu

SEQ ID NO: 651782 - RNA, 22 nt, Artificial Sequence
  Synthetic
ucaaaaguuuguaagauccucu

SEQ ID NO: 651783 - RNA, 23 nt, Artificial Sequence
  Synthetic
aucaaaaguuuguaagauccucu

SEQ ID NO: 651784 - RNA, 24 nt, Artificial Sequence
  Synthetic
gaucaaaaguuuguaagauccucu

SEQ ID NO: 651785 - RNA, 18 nt, Artificial Sequence
  Synthetic
uauaauauacuauccucu

SEQ ID NO: 651786 - RNA, 19 nt, Artificial Sequence
  Synthetic
cuauaauauacuauccucu

SEQ ID NO: 651787 - RNA, 20 nt, Artificial Sequence
  Synthetic
ccuauaauauacuauccucu

SEQ ID NO: 651788 - RNA, 21 nt, Artificial Sequence
  Synthetic
uccuauaauauacuauccucu

SEQ ID NO: 651789 - RNA, 22 nt, Artificial Sequence
  Synthetic
cuccuauaauauacuauccucu

SEQ ID NO: 651790 - RNA, 23 nt, Artificial Sequence
  Synthetic
ucuccuauaauauacuauccucu

SEQ ID NO: 651791 - RNA, 24 nt, Artificial Sequence
  Synthetic
uucuccuauaauauacuauccucu

SEQ ID NO: 651792 - RNA, 18 nt, Artificial Sequence
  Synthetic
ccuaaagaauuauccucu

SEQ ID NO: 651793 - RNA, 19 nt, Artificial Sequence
  Synthetic
uccuaaagaauuauccucu

SEQ ID NO: 651794 - RNA, 20 nt, Artificial Sequence
  Synthetic
uuccuaaagaauuauccucu

SEQ ID NO: 651795 - RNA, 21 nt, Artificial Sequence
  Synthetic
auuccuaaagaauuauccucu

SEQ ID NO: 651796 - RNA, 22 nt, Artificial Sequence
  Synthetic
cauuccuaaagaauuauccucu

SEQ ID NO: 651797 - RNA, 23 nt, Artificial Sequence
  Synthetic
ccauuccuaaagaauuauccucu

SEQ ID NO: 651798 - RNA, 24 nt, Artificial Sequence
  Synthetic
accauuccuaaagaauuauccucu

SEQ ID NO: 651799 - RNA, 18 nt, Artificial Sequence
  Synthetic
cuggaacaacauuccucu

SEQ ID NO: 651800 - RNA, 19 nt, Artificial Sequence
  Synthetic
acuggaacaacauuccucu

SEQ ID NO: 651801 - RNA, 20 nt, Artificial Sequence
  Synthetic
uacuggaacaacauuccucu

SEQ ID NO: 651802 - RNA, 21 nt, Artificial Sequence
  Synthetic
guacuggaacaacauuccucu

SEQ ID NO: 651803 - RNA, 22 nt, Artificial Sequence
  Synthetic
gguacuggaacaacauuccucu

SEQ ID NO: 651804 - RNA, 23 nt, Artificial Sequence
  Synthetic
agguacuggaacaacauuccucu

SEQ ID NO: 651805 - RNA, 24 nt, Artificial Sequence
  Synthetic
uagguacuggaacaacauuccucu

SEQ ID NO: 651806 - RNA, 18 nt, Artificial Sequence
  Synthetic
uucauauugucuuccucu

SEQ ID NO: 651807 - RNA, 19 nt, Artificial Sequence
  Synthetic
auucauauugucuuccucu

SEQ ID NO: 651808 - RNA, 20 nt, Artificial Sequence
  Synthetic
cauucauauugucuuccucu

SEQ ID NO: 651809 - RNA, 21 nt, Artificial Sequence
  Synthetic
acauucauauugucuuccucu

SEQ ID NO: 651810 - RNA, 22 nt, Artificial Sequence
  Synthetic
uacauucauauugucuuccucu

SEQ ID NO: 651811 - RNA, 23 nt, Artificial Sequence
  Synthetic
auacauucauauugucuuccucu

SEQ ID NO: 651812 - RNA, 24 nt, Artificial Sequence
  Synthetic
aauacauucauauugucuuccucu

SEQ ID NO: 651813 - RNA, 18 nt, Artificial Sequence
  Synthetic
agggguuuuauuuccucu

SEQ ID NO: 651814 - RNA, 19 nt, Artificial Sequence
  Synthetic
gagggguuuuauuuccucu

SEQ ID NO: 651815 - RNA, 20 nt, Artificial Sequence
  Synthetic
ggagggguuuuauuuccucu

SEQ ID NO: 651816 - RNA, 21 nt, Artificial Sequence
  Synthetic
uggagggguuuuauuuccucu

SEQ ID NO: 651817 - RNA, 22 nt, Artificial Sequence
  Synthetic
uuggagggguuuuauuuccucu

SEQ ID NO: 651818 - RNA, 23 nt, Artificial Sequence
  Synthetic
cuuggagggguuuuauuuccucu

SEQ ID NO: 651819 - RNA, 24 nt, Artificial Sequence
  Synthetic
gcuuggagggguuuuauuuccucu

SEQ ID NO: 651820 - RNA, 18 nt, Artificial Sequence
  Synthetic
gauccucacaaaagcucu

SEQ ID NO: 651821 - RNA, 19 nt, Artificial Sequence
  Synthetic
agauccucacaaaagcucu

SEQ ID NO: 651822 - RNA, 20 nt, Artificial Sequence
  Synthetic
aagauccucacaaaagcucu

SEQ ID NO: 651823 - RNA, 21 nt, Artificial Sequence
  Synthetic
uaagauccucacaaaagcucu

SEQ ID NO: 651824 - RNA, 22 nt, Artificial Sequence
  Synthetic
auaagauccucacaaaagcucu

SEQ ID NO: 651825 - RNA, 23 nt, Artificial Sequence
  Synthetic
uauaagauccucacaaaagcucu

SEQ ID NO: 651826 - RNA, 24 nt, Artificial Sequence
  Synthetic
uuauaagauccucacaaaagcucu

SEQ ID NO: 651827 - RNA, 18 nt, Artificial Sequence
  Synthetic
agauugucccaaagcucu

SEQ ID NO: 651828 - RNA, 19 nt, Artificial Sequence
  Synthetic
aagauugucccaaagcucu

SEQ ID NO: 651829 - RNA, 20 nt, Artificial Sequence
  Synthetic
gaagauugucccaaagcucu

SEQ ID NO: 651830 - RNA, 21 nt, Artificial Sequence
  Synthetic
ugaagauugucccaaagcucu

SEQ ID NO: 651831 - RNA, 22 nt, Artificial Sequence
  Synthetic
cugaagauugucccaaagcucu

SEQ ID NO: 651832 - RNA, 23 nt, Artificial Sequence
  Synthetic
gcugaagauugucccaaagcucu

SEQ ID NO: 651833 - RNA, 24 nt, Artificial Sequence
  Synthetic
agcugaagauugucccaaagcucu

SEQ ID NO: 651834 - RNA, 18 nt, Artificial Sequence
  Synthetic
cgcuuuuuuggaagcucu

SEQ ID NO: 651835 - RNA, 19 nt, Artificial Sequence
  Synthetic
acgcuuuuuuggaagcucu

SEQ ID NO: 651836 - RNA, 20 nt, Artificial Sequence
  Synthetic
uacgcuuuuuuggaagcucu

SEQ ID NO: 651837 - RNA, 21 nt, Artificial Sequence
  Synthetic
auacgcuuuuuuggaagcucu

SEQ ID NO: 651838 - RNA, 22 nt, Artificial Sequence
  Synthetic
aauacgcuuuuuuggaagcucu

SEQ ID NO: 651839 - RNA, 23 nt, Artificial Sequence
  Synthetic
aaauacgcuuuuuuggaagcucu

SEQ ID NO: 651840 - RNA, 24 nt, Artificial Sequence
  Synthetic
aaaauacgcuuuuuuggaagcucu

SEQ ID NO: 651841 - RNA, 18 nt, Artificial Sequence
  Synthetic
aguuugagacuaagcucu

SEQ ID NO: 651842 - RNA, 19 nt, Artificial Sequence
  Synthetic
gaguuugagacuaagcucu

SEQ ID NO: 651843 - RNA, 20 nt, Artificial Sequence
  Synthetic
agaguuugagacuaagcucu

SEQ ID NO: 651844 - RNA, 21 nt, Artificial Sequence
  Synthetic
aagaguuugagacuaagcucu

SEQ ID NO: 651845 - RNA, 22 nt, Artificial Sequence
  Synthetic
aaagaguuugagacuaagcucu

SEQ ID NO: 651846 - RNA, 23 nt, Artificial Sequence
  Synthetic
caaagaguuugagacuaagcucu

SEQ ID NO: 651847 - RNA, 24 nt, Artificial Sequence
  Synthetic
acaaagaguuugagacuaagcucu

SEQ ID NO: 651848 - RNA, 18 nt, Artificial Sequence
  Synthetic
gauugaacaaacagcucu

SEQ ID NO: 651849 - RNA, 19 nt, Artificial Sequence
  Synthetic
ugauugaacaaacagcucu

SEQ ID NO: 651850 - RNA, 20 nt, Artificial Sequence
  Synthetic
gugauugaacaaacagcucu

SEQ ID NO: 651851 - RNA, 21 nt, Artificial Sequence
  Synthetic
ggugauugaacaaacagcucu

SEQ ID NO: 651852 - RNA, 22 nt, Artificial Sequence
  Synthetic
aggugauugaacaaacagcucu

SEQ ID NO: 651853 - RNA, 23 nt, Artificial Sequence
  Synthetic
uaggugauugaacaaacagcucu

SEQ ID NO: 651854 - RNA, 24 nt, Artificial Sequence
  Synthetic
auaggugauugaacaaacagcucu

SEQ ID NO: 651855 - RNA, 18 nt, Artificial Sequence
  Synthetic
caauugggaaacagcucu

SEQ ID NO: 651856 - RNA, 19 nt, Artificial Sequence
  Synthetic
ucaauugggaaacagcucu

SEQ ID NO: 651857 - RNA, 20 nt, Artificial Sequence
  Synthetic
gucaauugggaaacagcucu

SEQ ID NO: 651858 - RNA, 21 nt, Artificial Sequence
  Synthetic
ggucaauugggaaacagcucu

SEQ ID NO: 651859 - RNA, 22 nt, Artificial Sequence
  Synthetic
uggucaauugggaaacagcucu

SEQ ID NO: 651860 - RNA, 23 nt, Artificial Sequence
  Synthetic
uuggucaauugggaaacagcucu

SEQ ID NO: 651861 - RNA, 24 nt, Artificial Sequence
  Synthetic
uuuggucaauugggaaacagcucu

SEQ ID NO: 651862 - RNA, 18 nt, Artificial Sequence
  Synthetic
accuguaaucccagcucu

SEQ ID NO: 651863 - RNA, 19 nt, Artificial Sequence
  Synthetic
caccuguaaucccagcucu

SEQ ID NO: 651864 - RNA, 20 nt, Artificial Sequence
  Synthetic
acaccuguaaucccagcucu

SEQ ID NO: 651865 - RNA, 21 nt, Artificial Sequence
  Synthetic
cacaccuguaaucccagcucu

SEQ ID NO: 651866 - RNA, 22 nt, Artificial Sequence
  Synthetic
ucacaccuguaaucccagcucu

SEQ ID NO: 651867 - RNA, 23 nt, Artificial Sequence
  Synthetic
cucacaccuguaaucccagcucu

SEQ ID NO: 651868 - RNA, 24 nt, Artificial Sequence
  Synthetic
gcucacaccuguaaucccagcucu

SEQ ID NO: 651869 - RNA, 18 nt, Artificial Sequence
  Synthetic
ggaguguaagccagcucu

SEQ ID NO: 651870 - RNA, 19 nt, Artificial Sequence
  Synthetic
uggaguguaagccagcucu

SEQ ID NO: 651871 - RNA, 20 nt, Artificial Sequence
  Synthetic
uuggaguguaagccagcucu

SEQ ID NO: 651872 - RNA, 21 nt, Artificial Sequence
  Synthetic
guuggaguguaagccagcucu

SEQ ID NO: 651873 - RNA, 22 nt, Artificial Sequence
  Synthetic
aguuggaguguaagccagcucu

SEQ ID NO: 651874 - RNA, 23 nt, Artificial Sequence
  Synthetic
aaguuggaguguaagccagcucu

SEQ ID NO: 651875 - RNA, 24 nt, Artificial Sequence
  Synthetic
caaguuggaguguaagccagcucu

SEQ ID NO: 651876 - RNA, 18 nt, Artificial Sequence
  Synthetic
aguccuaagaucagcucu

SEQ ID NO: 651877 - RNA, 19 nt, Artificial Sequence
  Synthetic
uaguccuaagaucagcucu

SEQ ID NO: 651878 - RNA, 20 nt, Artificial Sequence
  Synthetic
cuaguccuaagaucagcucu

SEQ ID NO: 651879 - RNA, 21 nt, Artificial Sequence
  Synthetic
acuaguccuaagaucagcucu

SEQ ID NO: 651880 - RNA, 22 nt, Artificial Sequence
  Synthetic
aacuaguccuaagaucagcucu

SEQ ID NO: 651881 - RNA, 23 nt, Artificial Sequence
  Synthetic
caacuaguccuaagaucagcucu

SEQ ID NO: 651882 - RNA, 24 nt, Artificial Sequence
  Synthetic
acaacuaguccuaagaucagcucu

SEQ ID NO: 651883 - RNA, 18 nt, Artificial Sequence
  Synthetic
ggaacagaacagagcucu

SEQ ID NO: 651884 - RNA, 19 nt, Artificial Sequence
  Synthetic
uggaacagaacagagcucu

SEQ ID NO: 651885 - RNA, 20 nt, Artificial Sequence
  Synthetic
auggaacagaacagagcucu

SEQ ID NO: 651886 - RNA, 21 nt, Artificial Sequence
  Synthetic
aauggaacagaacagagcucu

SEQ ID NO: 651887 - RNA, 22 nt, Artificial Sequence
  Synthetic
caauggaacagaacagagcucu

SEQ ID NO: 651888 - RNA, 23 nt, Artificial Sequence
  Synthetic
ccaauggaacagaacagagcucu

SEQ ID NO: 651889 - RNA, 24 nt, Artificial Sequence
  Synthetic
accaauggaacagaacagagcucu

SEQ ID NO: 651890 - RNA, 18 nt, Artificial Sequence
  Synthetic
gccuccccugagagcucu

SEQ ID NO: 651891 - RNA, 19 nt, Artificial Sequence
  Synthetic
ugccuccccugagagcucu

SEQ ID NO: 651892 - RNA, 20 nt, Artificial Sequence
  Synthetic
gugccuccccugagagcucu

SEQ ID NO: 651893 - RNA, 21 nt, Artificial Sequence
  Synthetic
ugugccuccccugagagcucu

SEQ ID NO: 651894 - RNA, 22 nt, Artificial Sequence
  Synthetic
gugugccuccccugagagcucu

SEQ ID NO: 651895 - RNA, 23 nt, Artificial Sequence
  Synthetic
ugugugccuccccugagagcucu

SEQ ID NO: 651896 - RNA, 24 nt, Artificial Sequence
  Synthetic
uugugugccuccccugagagcucu

SEQ ID NO: 651897 - RNA, 18 nt, Artificial Sequence
  Synthetic
aauuaagagacuagcucu

SEQ ID NO: 651898 - RNA, 19 nt, Artificial Sequence
  Synthetic
caauuaagagacuagcucu

SEQ ID NO: 651899 - RNA, 20 nt, Artificial Sequence
  Synthetic
ucaauuaagagacuagcucu

SEQ ID NO: 651900 - RNA, 21 nt, Artificial Sequence
  Synthetic
aucaauuaagagacuagcucu

SEQ ID NO: 651901 - RNA, 22 nt, Artificial Sequence
  Synthetic
aaucaauuaagagacuagcucu

SEQ ID NO: 651902 - RNA, 23 nt, Artificial Sequence
  Synthetic
gaaucaauuaagagacuagcucu

SEQ ID NO: 651903 - RNA, 24 nt, Artificial Sequence
  Synthetic
ggaaucaauuaagagacuagcucu

SEQ ID NO: 651904 - RNA, 18 nt, Artificial Sequence
  Synthetic
uugugaacauguagcucu

SEQ ID NO: 651905 - RNA, 19 nt, Artificial Sequence
  Synthetic
auugugaacauguagcucu

SEQ ID NO: 651906 - RNA, 20 nt, Artificial Sequence
  Synthetic
aauugugaacauguagcucu

SEQ ID NO: 651907 - RNA, 21 nt, Artificial Sequence
  Synthetic
caauugugaacauguagcucu

SEQ ID NO: 651908 - RNA, 22 nt, Artificial Sequence
  Synthetic
acaauugugaacauguagcucu

SEQ ID NO: 651909 - RNA, 23 nt, Artificial Sequence
  Synthetic
uacaauugugaacauguagcucu

SEQ ID NO: 651910 - RNA, 24 nt, Artificial Sequence
  Synthetic
uuacaauugugaacauguagcucu

SEQ ID NO: 651911 - RNA, 18 nt, Artificial Sequence
  Synthetic
aagcaaaagccccgcucu

SEQ ID NO: 651912 - RNA, 19 nt, Artificial Sequence
  Synthetic
aaagcaaaagccccgcucu

SEQ ID NO: 651913 - RNA, 20 nt, Artificial Sequence
  Synthetic
gaaagcaaaagccccgcucu

SEQ ID NO: 651914 - RNA, 21 nt, Artificial Sequence
  Synthetic
agaaagcaaaagccccgcucu

SEQ ID NO: 651915 - RNA, 22 nt, Artificial Sequence
  Synthetic
cagaaagcaaaagccccgcucu

SEQ ID NO: 651916 - RNA, 23 nt, Artificial Sequence
  Synthetic
ccagaaagcaaaagccccgcucu

SEQ ID NO: 651917 - RNA, 24 nt, Artificial Sequence
  Synthetic
uccagaaagcaaaagccccgcucu

SEQ ID NO: 651918 - RNA, 18 nt, Artificial Sequence
  Synthetic
cugauacaaaaaggcucu

SEQ ID NO: 651919 - RNA, 19 nt, Artificial Sequence
  Synthetic
ucugauacaaaaaggcucu

SEQ ID NO: 651920 - RNA, 20 nt, Artificial Sequence
  Synthetic
gucugauacaaaaaggcucu

SEQ ID NO: 651921 - RNA, 21 nt, Artificial Sequence
  Synthetic
agucugauacaaaaaggcucu

SEQ ID NO: 651922 - RNA, 22 nt, Artificial Sequence
  Synthetic
aagucugauacaaaaaggcucu

SEQ ID NO: 651923 - RNA, 23 nt, Artificial Sequence
  Synthetic
caagucugauacaaaaaggcucu

SEQ ID NO: 651924 - RNA, 24 nt, Artificial Sequence
  Synthetic
acaagucugauacaaaaaggcucu

SEQ ID NO: 651925 - RNA, 18 nt, Artificial Sequence
  Synthetic
gaugacaaggcaggcucu

SEQ ID NO: 651926 - RNA, 19 nt, Artificial Sequence
  Synthetic
agaugacaaggcaggcucu

SEQ ID NO: 651927 - RNA, 20 nt, Artificial Sequence
  Synthetic
gagaugacaaggcaggcucu

SEQ ID NO: 651928 - RNA, 21 nt, Artificial Sequence
  Synthetic
ggagaugacaaggcaggcucu

SEQ ID NO: 651929 - RNA, 22 nt, Artificial Sequence
  Synthetic
uggagaugacaaggcaggcucu

SEQ ID NO: 651930 - RNA, 23 nt, Artificial Sequence
  Synthetic
uuggagaugacaaggcaggcucu

SEQ ID NO: 651931 - RNA, 24 nt, Artificial Sequence
  Synthetic
uuuggagaugacaaggcaggcucu

SEQ ID NO: 651932 - RNA, 18 nt, Artificial Sequence
  Synthetic
gagguuuucagaggcucu

SEQ ID NO: 651933 - RNA, 19 nt, Artificial Sequence
  Synthetic
ugagguuuucagaggcucu

SEQ ID NO: 651934 - RNA, 20 nt, Artificial Sequence
  Synthetic
uugagguuuucagaggcucu

SEQ ID NO: 651935 - RNA, 21 nt, Artificial Sequence
  Synthetic
guugagguuuucagaggcucu

SEQ ID NO: 651936 - RNA, 22 nt, Artificial Sequence
  Synthetic
uguugagguuuucagaggcucu

SEQ ID NO: 651937 - RNA, 23 nt, Artificial Sequence
  Synthetic
auguugagguuuucagaggcucu

SEQ ID NO: 651938 - RNA, 24 nt, Artificial Sequence
  Synthetic
aauguugagguuuucagaggcucu

SEQ ID NO: 651939 - RNA, 18 nt, Artificial Sequence
  Synthetic
guauugcagguaggcucu

SEQ ID NO: 651940 - RNA, 19 nt, Artificial Sequence
  Synthetic
cguauugcagguaggcucu

SEQ ID NO: 651941 - RNA, 20 nt, Artificial Sequence
  Synthetic
ucguauugcagguaggcucu

SEQ ID NO: 651942 - RNA, 21 nt, Artificial Sequence
  Synthetic
uucguauugcagguaggcucu

SEQ ID NO: 651943 - RNA, 22 nt, Artificial Sequence
  Synthetic
uuucguauugcagguaggcucu

SEQ ID NO: 651944 - RNA, 23 nt, Artificial Sequence
  Synthetic
uuuucguauugcagguaggcucu

SEQ ID NO: 651945 - RNA, 24 nt, Artificial Sequence
  Synthetic
guuuucguauugcagguaggcucu

SEQ ID NO: 651946 - RNA, 18 nt, Artificial Sequence
  Synthetic
ucaucuugguuaggcucu

SEQ ID NO: 651947 - RNA, 19 nt, Artificial Sequence
  Synthetic
uucaucuugguuaggcucu

SEQ ID NO: 651948 - RNA, 20 nt, Artificial Sequence
  Synthetic
cuucaucuugguuaggcucu

SEQ ID NO: 651949 - RNA, 21 nt, Artificial Sequence
  Synthetic
ccuucaucuugguuaggcucu

SEQ ID NO: 651950 - RNA, 22 nt, Artificial Sequence
  Synthetic
cccuucaucuugguuaggcucu

SEQ ID NO: 651951 - RNA, 23 nt, Artificial Sequence
  Synthetic
ucccuucaucuugguuaggcucu

SEQ ID NO: 651952 - RNA, 24 nt, Artificial Sequence
  Synthetic
gucccuucaucuugguuaggcucu

SEQ ID NO: 651953 - RNA, 18 nt, Artificial Sequence
  Synthetic
aagucuuccuggggcucu

SEQ ID NO: 651954 - RNA, 19 nt, Artificial Sequence
  Synthetic
uaagucuuccuggggcucu

SEQ ID NO: 651955 - RNA, 20 nt, Artificial Sequence
  Synthetic
cuaagucuuccuggggcucu

SEQ ID NO: 651956 - RNA, 21 nt, Artificial Sequence
  Synthetic
gcuaagucuuccuggggcucu

SEQ ID NO: 651957 - RNA, 22 nt, Artificial Sequence
  Synthetic
ggcuaagucuuccuggggcucu

SEQ ID NO: 651958 - RNA, 23 nt, Artificial Sequence
  Synthetic
gggcuaagucuuccuggggcucu

SEQ ID NO: 651959 - RNA, 24 nt, Artificial Sequence
  Synthetic
agggcuaagucuuccuggggcucu

SEQ ID NO: 651960 - RNA, 18 nt, Artificial Sequence
  Synthetic
ugcaaaugccugggcucu

SEQ ID NO: 651961 - RNA, 19 nt, Artificial Sequence
  Synthetic
uugcaaaugccugggcucu

SEQ ID NO: 651962 - RNA, 20 nt, Artificial Sequence
  Synthetic
uuugcaaaugccugggcucu

SEQ ID NO: 651963 - RNA, 21 nt, Artificial Sequence
  Synthetic
guuugcaaaugccugggcucu

SEQ ID NO: 651964 - RNA, 22 nt, Artificial Sequence
  Synthetic
uguuugcaaaugccugggcucu

SEQ ID NO: 651965 - RNA, 23 nt, Artificial Sequence
  Synthetic
guguuugcaaaugccugggcucu

SEQ ID NO: 651966 - RNA, 24 nt, Artificial Sequence
  Synthetic
uguguuugcaaaugccugggcucu

SEQ ID NO: 651967 - RNA, 18 nt, Artificial Sequence
  Synthetic
ucuuuuuuucugggcucu

SEQ ID NO: 651968 - RNA, 19 nt, Artificial Sequence
  Synthetic
uucuuuuuuucugggcucu

SEQ ID NO: 651969 - RNA, 20 nt, Artificial Sequence
  Synthetic
uuucuuuuuuucugggcucu

SEQ ID NO: 651970 - RNA, 21 nt, Artificial Sequence
  Synthetic
uuuucuuuuuuucugggcucu

SEQ ID NO: 651971 - RNA, 22 nt, Artificial Sequence
  Synthetic
uuuuucuuuuuuucugggcucu

SEQ ID NO: 651972 - RNA, 23 nt, Artificial Sequence
  Synthetic
uuuuuucuuuuuuucugggcucu

SEQ ID NO: 651973 - RNA, 24 nt, Artificial Sequence
  Synthetic
uuuuuuucuuuuuuucugggcucu

SEQ ID NO: 651974 - RNA, 18 nt, Artificial Sequence
  Synthetic
uuacuacucuauggcucu

SEQ ID NO: 651975 - RNA, 19 nt, Artificial Sequence
  Synthetic
uuuacuacucuauggcucu

SEQ ID NO: 651976 - RNA, 20 nt, Artificial Sequence
  Synthetic
uuuuacuacucuauggcucu

SEQ ID NO: 651977 - RNA, 21 nt, Artificial Sequence
  Synthetic
guuuuacuacucuauggcucu

SEQ ID NO: 651978 - RNA, 22 nt, Artificial Sequence
  Synthetic
gguuuuacuacucuauggcucu

SEQ ID NO: 651979 - RNA, 23 nt, Artificial Sequence
  Synthetic
agguuuuacuacucuauggcucu

SEQ ID NO: 651980 - RNA, 24 nt, Artificial Sequence
  Synthetic
cagguuuuacuacucuauggcucu

SEQ ID NO: 651981 - RNA, 18 nt, Artificial Sequence
  Synthetic
ugucaaauaacuggcucu

SEQ ID NO: 651982 - RNA, 19 nt, Artificial Sequence
  Synthetic
augucaaauaacuggcucu

SEQ ID NO: 651983 - RNA, 20 nt, Artificial Sequence
  Synthetic
aaugucaaauaacuggcucu

SEQ ID NO: 651984 - RNA, 21 nt, Artificial Sequence
  Synthetic
aaaugucaaauaacuggcucu

SEQ ID NO: 651985 - RNA, 22 nt, Artificial Sequence
  Synthetic
uaaaugucaaauaacuggcucu

SEQ ID NO: 651986 - RNA, 23 nt, Artificial Sequence
  Synthetic
guaaaugucaaauaacuggcucu

SEQ ID NO: 651987 - RNA, 24 nt, Artificial Sequence
  Synthetic
aguaaaugucaaauaacuggcucu

SEQ ID NO: 651988 - RNA, 18 nt, Artificial Sequence
  Synthetic
auuccucccccuggcucu

SEQ ID NO: 651989 - RNA, 19 nt, Artificial Sequence
  Synthetic
uauuccucccccuggcucu

SEQ ID NO: 651990 - RNA, 20 nt, Artificial Sequence
  Synthetic
uuauuccucccccuggcucu

SEQ ID NO: 651991 - RNA, 21 nt, Artificial Sequence
  Synthetic
guuauuccucccccuggcucu

SEQ ID NO: 651992 - RNA, 22 nt, Artificial Sequence
  Synthetic
aguuauuccucccccuggcucu

SEQ ID NO: 651993 - RNA, 23 nt, Artificial Sequence
  Synthetic
uaguuauuccucccccuggcucu

SEQ ID NO: 651994 - RNA, 24 nt, Artificial Sequence
  Synthetic
uuaguuauuccucccccuggcucu

SEQ ID NO: 651995 - RNA, 18 nt, Artificial Sequence
  Synthetic
augguuacuuuuggcucu

SEQ ID NO: 651996 - RNA, 19 nt, Artificial Sequence
  Synthetic
aaugguuacuuuuggcucu

SEQ ID NO: 651997 - RNA, 20 nt, Artificial Sequence
  Synthetic
uaaugguuacuuuuggcucu

SEQ ID NO: 651998 - RNA, 21 nt, Artificial Sequence
  Synthetic
auaaugguuacuuuuggcucu

SEQ ID NO: 651999 - RNA, 22 nt, Artificial Sequence
  Synthetic
gauaaugguuacuuuuggcucu

SEQ ID NO: 652000 - RNA, 23 nt, Artificial Sequence
  Synthetic
agauaaugguuacuuuuggcucu

SEQ ID NO: 652001 - RNA, 24 nt, Artificial Sequence
  Synthetic
aagauaaugguuacuuuuggcucu

SEQ ID NO: 652002 - RNA, 18 nt, Artificial Sequence
  Synthetic
gaaaaauggaaaugcucu

SEQ ID NO: 652003 - RNA, 19 nt, Artificial Sequence
  Synthetic
agaaaaauggaaaugcucu

SEQ ID NO: 652004 - RNA, 20 nt, Artificial Sequence
  Synthetic
aagaaaaauggaaaugcucu

SEQ ID NO: 652005 - RNA, 21 nt, Artificial Sequence
  Synthetic
aaagaaaaauggaaaugcucu

SEQ ID NO: 652006 - RNA, 22 nt, Artificial Sequence
  Synthetic
aaaagaaaaauggaaaugcucu

SEQ ID NO: 652007 - RNA, 23 nt, Artificial Sequence
  Synthetic
uaaaagaaaaauggaaaugcucu

SEQ ID NO: 652008 - RNA, 24 nt, Artificial Sequence
  Synthetic
uuaaaagaaaaauggaaaugcucu

SEQ ID NO: 652009 - RNA, 18 nt, Artificial Sequence
  Synthetic
uuacagcugggaugcucu

SEQ ID NO: 652010 - RNA, 19 nt, Artificial Sequence
  Synthetic
cuuacagcugggaugcucu

SEQ ID NO: 652011 - RNA, 20 nt, Artificial Sequence
  Synthetic
ucuuacagcugggaugcucu

SEQ ID NO: 652012 - RNA, 21 nt, Artificial Sequence
  Synthetic
cucuuacagcugggaugcucu

SEQ ID NO: 652013 - RNA, 22 nt, Artificial Sequence
  Synthetic
gcucuuacagcugggaugcucu

SEQ ID NO: 652014 - RNA, 23 nt, Artificial Sequence
  Synthetic
agcucuuacagcugggaugcucu

SEQ ID NO: 652015 - RNA, 24 nt, Artificial Sequence
  Synthetic
uagcucuuacagcugggaugcucu

SEQ ID NO: 652016 - RNA, 18 nt, Artificial Sequence
  Synthetic
caccauauuaacugcucu

SEQ ID NO: 652017 - RNA, 19 nt, Artificial Sequence
  Synthetic
ucaccauauuaacugcucu

SEQ ID NO: 652018 - RNA, 20 nt, Artificial Sequence
  Synthetic
gucaccauauuaacugcucu

SEQ ID NO: 652019 - RNA, 21 nt, Artificial Sequence
  Synthetic
agucaccauauuaacugcucu

SEQ ID NO: 652020 - RNA, 22 nt, Artificial Sequence
  Synthetic
aagucaccauauuaacugcucu

SEQ ID NO: 652021 - RNA, 23 nt, Artificial Sequence
  Synthetic
aaagucaccauauuaacugcucu

SEQ ID NO: 652022 - RNA, 24 nt, Artificial Sequence
  Synthetic
gaaagucaccauauuaacugcucu

SEQ ID NO: 652023 - RNA, 18 nt, Artificial Sequence
  Synthetic
uuuaagaaucacugcucu

SEQ ID NO: 652024 - RNA, 19 nt, Artificial Sequence
  Synthetic
guuuaagaaucacugcucu

SEQ ID NO: 652025 - RNA, 20 nt, Artificial Sequence
  Synthetic
aguuuaagaaucacugcucu

SEQ ID NO: 652026 - RNA, 21 nt, Artificial Sequence
  Synthetic
aaguuuaagaaucacugcucu

SEQ ID NO: 652027 - RNA, 22 nt, Artificial Sequence
  Synthetic
uaaguuuaagaaucacugcucu

SEQ ID NO: 652028 - RNA, 23 nt, Artificial Sequence
  Synthetic
auaaguuuaagaaucacugcucu

SEQ ID NO: 652029 - RNA, 24 nt, Artificial Sequence
  Synthetic
aauaaguuuaagaaucacugcucu

SEQ ID NO: 652030 - RNA, 18 nt, Artificial Sequence
  Synthetic
aagugguacugcugcucu

SEQ ID NO: 652031 - RNA, 19 nt, Artificial Sequence
  Synthetic
caagugguacugcugcucu

SEQ ID NO: 652032 - RNA, 20 nt, Artificial Sequence
  Synthetic
ccaagugguacugcugcucu

SEQ ID NO: 652033 - RNA, 21 nt, Artificial Sequence
  Synthetic
cccaagugguacugcugcucu

SEQ ID NO: 652034 - RNA, 22 nt, Artificial Sequence
  Synthetic
ucccaagugguacugcugcucu

SEQ ID NO: 652035 - RNA, 23 nt, Artificial Sequence
  Synthetic
cucccaagugguacugcugcucu

SEQ ID NO: 652036 - RNA, 24 nt, Artificial Sequence
  Synthetic
gcucccaagugguacugcugcucu

SEQ ID NO: 652037 - RNA, 18 nt, Artificial Sequence
  Synthetic
ccuuaggauaauugcucu

SEQ ID NO: 652038 - RNA, 19 nt, Artificial Sequence
  Synthetic
cccuuaggauaauugcucu

SEQ ID NO: 652039 - RNA, 20 nt, Artificial Sequence
  Synthetic
ucccuuaggauaauugcucu

SEQ ID NO: 652040 - RNA, 21 nt, Artificial Sequence
  Synthetic
gucccuuaggauaauugcucu

SEQ ID NO: 652041 - RNA, 22 nt, Artificial Sequence
  Synthetic
ugucccuuaggauaauugcucu

SEQ ID NO: 652042 - RNA, 23 nt, Artificial Sequence
  Synthetic
uugucccuuaggauaauugcucu

SEQ ID NO: 652043 - RNA, 24 nt, Artificial Sequence
  Synthetic
cuugucccuuaggauaauugcucu

SEQ ID NO: 652044 - RNA, 18 nt, Artificial Sequence
  Synthetic
uauuaucugacuugcucu

SEQ ID NO: 652045 - RNA, 19 nt, Artificial Sequence
  Synthetic
auauuaucugacuugcucu

SEQ ID NO: 652046 - RNA, 20 nt, Artificial Sequence
  Synthetic
uauauuaucugacuugcucu

SEQ ID NO: 652047 - RNA, 21 nt, Artificial Sequence
  Synthetic
guauauuaucugacuugcucu

SEQ ID NO: 652048 - RNA, 22 nt, Artificial Sequence
  Synthetic
uguauauuaucugacuugcucu

SEQ ID NO: 652049 - RNA, 23 nt, Artificial Sequence
  Synthetic
uuguauauuaucugacuugcucu

SEQ ID NO: 652050 - RNA, 24 nt, Artificial Sequence
  Synthetic
uuuguauauuaucugacuugcucu

SEQ ID NO: 652051 - RNA, 18 nt, Artificial Sequence
  Synthetic
uucuggaagucuugcucu

SEQ ID NO: 652052 - RNA, 19 nt, Artificial Sequence
  Synthetic
auucuggaagucuugcucu

SEQ ID NO: 652053 - RNA, 20 nt, Artificial Sequence
  Synthetic
aauucuggaagucuugcucu

SEQ ID NO: 652054 - RNA, 21 nt, Artificial Sequence
  Synthetic
uaauucuggaagucuugcucu

SEQ ID NO: 652055 - RNA, 22 nt, Artificial Sequence
  Synthetic
auaauucuggaagucuugcucu

SEQ ID NO: 652056 - RNA, 23 nt, Artificial Sequence
  Synthetic
cauaauucuggaagucuugcucu

SEQ ID NO: 652057 - RNA, 24 nt, Artificial Sequence
  Synthetic
acauaauucuggaagucuugcucu

SEQ ID NO: 652058 - RNA, 18 nt, Artificial Sequence
  Synthetic
ugacauuaucuuugcucu

SEQ ID NO: 652059 - RNA, 19 nt, Artificial Sequence
  Synthetic
gugacauuaucuuugcucu

SEQ ID NO: 652060 - RNA, 20 nt, Artificial Sequence
  Synthetic
ggugacauuaucuuugcucu

SEQ ID NO: 652061 - RNA, 21 nt, Artificial Sequence
  Synthetic
uggugacauuaucuuugcucu

SEQ ID NO: 652062 - RNA, 22 nt, Artificial Sequence
  Synthetic
cuggugacauuaucuuugcucu

SEQ ID NO: 652063 - RNA, 23 nt, Artificial Sequence
  Synthetic
ucuggugacauuaucuuugcucu

SEQ ID NO: 652064 - RNA, 24 nt, Artificial Sequence
  Synthetic
uucuggugacauuaucuuugcucu

SEQ ID NO: 652065 - RNA, 18 nt, Artificial Sequence
  Synthetic
uaugauuuauuuugcucu

SEQ ID NO: 652066 - RNA, 19 nt, Artificial Sequence
  Synthetic
uuaugauuuauuuugcucu

SEQ ID NO: 652067 - RNA, 20 nt, Artificial Sequence
  Synthetic
uuuaugauuuauuuugcucu

SEQ ID NO: 652068 - RNA, 21 nt, Artificial Sequence
  Synthetic
guuuaugauuuauuuugcucu

SEQ ID NO: 652069 - RNA, 22 nt, Artificial Sequence
  Synthetic
gguuuaugauuuauuuugcucu

SEQ ID NO: 652070 - RNA, 23 nt, Artificial Sequence
  Synthetic
ugguuuaugauuuauuuugcucu

SEQ ID NO: 652071 - RNA, 24 nt, Artificial Sequence
  Synthetic
uugguuuaugauuuauuuugcucu

SEQ ID NO: 652072 - RNA, 18 nt, Artificial Sequence
  Synthetic
aacgccuacuaaaucucu

SEQ ID NO: 652073 - RNA, 19 nt, Artificial Sequence
  Synthetic
aaacgccuacuaaaucucu

SEQ ID NO: 652074 - RNA, 20 nt, Artificial Sequence
  Synthetic
caaacgccuacuaaaucucu

SEQ ID NO: 652075 - RNA, 21 nt, Artificial Sequence
  Synthetic
ccaaacgccuacuaaaucucu

SEQ ID NO: 652076 - RNA, 22 nt, Artificial Sequence
  Synthetic
gccaaacgccuacuaaaucucu

SEQ ID NO: 652077 - RNA, 23 nt, Artificial Sequence
  Synthetic
agccaaacgccuacuaaaucucu

SEQ ID NO: 652078 - RNA, 24 nt, Artificial Sequence
  Synthetic
gagccaaacgccuacuaaaucucu

SEQ ID NO: 652079 - RNA, 18 nt, Artificial Sequence
  Synthetic
caaagccagccaaucucu

SEQ ID NO: 652080 - RNA, 19 nt, Artificial Sequence
  Synthetic
acaaagccagccaaucucu

SEQ ID NO: 652081 - RNA, 20 nt, Artificial Sequence
  Synthetic
uacaaagccagccaaucucu

SEQ ID NO: 652082 - RNA, 21 nt, Artificial Sequence
  Synthetic
auacaaagccagccaaucucu

SEQ ID NO: 652083 - RNA, 22 nt, Artificial Sequence
  Synthetic
aauacaaagccagccaaucucu

SEQ ID NO: 652084 - RNA, 23 nt, Artificial Sequence
  Synthetic
caauacaaagccagccaaucucu

SEQ ID NO: 652085 - RNA, 24 nt, Artificial Sequence
  Synthetic
acaauacaaagccagccaaucucu

SEQ ID NO: 652086 - RNA, 18 nt, Artificial Sequence
  Synthetic
cacguugaaagaaucucu

SEQ ID NO: 652087 - RNA, 19 nt, Artificial Sequence
  Synthetic
gcacguugaaagaaucucu

SEQ ID NO: 652088 - RNA, 20 nt, Artificial Sequence
  Synthetic
ugcacguugaaagaaucucu

SEQ ID NO: 652089 - RNA, 21 nt, Artificial Sequence
  Synthetic
augcacguugaaagaaucucu

SEQ ID NO: 652090 - RNA, 22 nt, Artificial Sequence
  Synthetic
uaugcacguugaaagaaucucu

SEQ ID NO: 652091 - RNA, 23 nt, Artificial Sequence
  Synthetic
uuaugcacguugaaagaaucucu

SEQ ID NO: 652092 - RNA, 24 nt, Artificial Sequence
  Synthetic
uuuaugcacguugaaagaaucucu

SEQ ID NO: 652093 - RNA, 18 nt, Artificial Sequence
  Synthetic
uuucugaggagaaucucu

SEQ ID NO: 652094 - RNA, 19 nt, Artificial Sequence
  Synthetic
auuucugaggagaaucucu

SEQ ID NO: 652095 - RNA, 20 nt, Artificial Sequence
  Synthetic
cauuucugaggagaaucucu

SEQ ID NO: 652096 - RNA, 21 nt, Artificial Sequence
  Synthetic
ucauuucugaggagaaucucu

SEQ ID NO: 652097 - RNA, 22 nt, Artificial Sequence
  Synthetic
cucauuucugaggagaaucucu

SEQ ID NO: 652098 - RNA, 23 nt, Artificial Sequence
  Synthetic
ccucauuucugaggagaaucucu

SEQ ID NO: 652099 - RNA, 24 nt, Artificial Sequence
  Synthetic
accucauuucugaggagaaucucu

SEQ ID NO: 652100 - RNA, 18 nt, Artificial Sequence
  Synthetic
agaaagaaaaucaucucu

SEQ ID NO: 652101 - RNA, 19 nt, Artificial Sequence
  Synthetic
aagaaagaaaaucaucucu

SEQ ID NO: 652102 - RNA, 20 nt, Artificial Sequence
  Synthetic
aaagaaagaaaaucaucucu

SEQ ID NO: 652103 - RNA, 21 nt, Artificial Sequence
  Synthetic
aaaagaaagaaaaucaucucu

SEQ ID NO: 652104 - RNA, 22 nt, Artificial Sequence
  Synthetic
aaaaagaaagaaaaucaucucu

SEQ ID NO: 652105 - RNA, 23 nt, Artificial Sequence
  Synthetic
aaaaaagaaagaaaaucaucucu

SEQ ID NO: 652106 - RNA, 24 nt, Artificial Sequence
  Synthetic
caaaaaagaaagaaaaucaucucu

SEQ ID NO: 652107 - RNA, 18 nt, Artificial Sequence
  Synthetic
gaagaaauugagaucucu

SEQ ID NO: 652108 - RNA, 19 nt, Artificial Sequence
  Synthetic
agaagaaauugagaucucu

SEQ ID NO: 652109 - RNA, 20 nt, Artificial Sequence
  Synthetic
gagaagaaauugagaucucu

SEQ ID NO: 652110 - RNA, 21 nt, Artificial Sequence
  Synthetic
ugagaagaaauugagaucucu

SEQ ID NO: 652111 - RNA, 22 nt, Artificial Sequence
  Synthetic
gugagaagaaauugagaucucu

SEQ ID NO: 652112 - RNA, 23 nt, Artificial Sequence
  Synthetic
ugugagaagaaauugagaucucu

SEQ ID NO: 652113 - RNA, 24 nt, Artificial Sequence
  Synthetic
gugugagaagaaauugagaucucu

SEQ ID NO: 652114 - RNA, 18 nt, Artificial Sequence
  Synthetic
uauuuaaagacgaucucu

SEQ ID NO: 652115 - RNA, 19 nt, Artificial Sequence
  Synthetic
auauuuaaagacgaucucu

SEQ ID NO: 652116 - RNA, 20 nt, Artificial Sequence
  Synthetic
uauauuuaaagacgaucucu

SEQ ID NO: 652117 - RNA, 21 nt, Artificial Sequence
  Synthetic
cuauauuuaaagacgaucucu

SEQ ID NO: 652118 - RNA, 22 nt, Artificial Sequence
  Synthetic
ccuauauuuaaagacgaucucu

SEQ ID NO: 652119 - RNA, 23 nt, Artificial Sequence
  Synthetic
accuauauuuaaagacgaucucu

SEQ ID NO: 652120 - RNA, 24 nt, Artificial Sequence
  Synthetic
gaccuauauuuaaagacgaucucu

SEQ ID NO: 652121 - RNA, 18 nt, Artificial Sequence
  Synthetic
aauauuacaaugaucucu

SEQ ID NO: 652122 - RNA, 19 nt, Artificial Sequence
  Synthetic
uaauauuacaaugaucucu

SEQ ID NO: 652123 - RNA, 20 nt, Artificial Sequence
  Synthetic
cuaauauuacaaugaucucu

SEQ ID NO: 652124 - RNA, 21 nt, Artificial Sequence
  Synthetic
gcuaauauuacaaugaucucu

SEQ ID NO: 652125 - RNA, 22 nt, Artificial Sequence
  Synthetic
agcuaauauuacaaugaucucu

SEQ ID NO: 652126 - RNA, 23 nt, Artificial Sequence
  Synthetic
aagcuaauauuacaaugaucucu

SEQ ID NO: 652127 - RNA, 24 nt, Artificial Sequence
  Synthetic
caagcuaauauuacaaugaucucu

SEQ ID NO: 652128 - RNA, 18 nt, Artificial Sequence
  Synthetic
guauccuuaaugaucucu

SEQ ID NO: 652129 - RNA, 19 nt, Artificial Sequence
  Synthetic
gguauccuuaaugaucucu

SEQ ID NO: 652130 - RNA, 20 nt, Artificial Sequence
  Synthetic
agguauccuuaaugaucucu

SEQ ID NO: 652131 - RNA, 21 nt, Artificial Sequence
  Synthetic
aagguauccuuaaugaucucu

SEQ ID NO: 652132 - RNA, 22 nt, Artificial Sequence
  Synthetic
gaagguauccuuaaugaucucu

SEQ ID NO: 652133 - RNA, 23 nt, Artificial Sequence
  Synthetic
ugaagguauccuuaaugaucucu

SEQ ID NO: 652134 - RNA, 24 nt, Artificial Sequence
  Synthetic
uugaagguauccuuaaugaucucu

SEQ ID NO: 652135 - RNA, 18 nt, Artificial Sequence
  Synthetic
gacuuccugcauaucucu

SEQ ID NO: 652136 - RNA, 19 nt, Artificial Sequence
  Synthetic
agacuuccugcauaucucu

SEQ ID NO: 652137 - RNA, 20 nt, Artificial Sequence
  Synthetic
uagacuuccugcauaucucu

SEQ ID NO: 652138 - RNA, 21 nt, Artificial Sequence
  Synthetic
guagacuuccugcauaucucu

SEQ ID NO: 652139 - RNA, 22 nt, Artificial Sequence
  Synthetic
gguagacuuccugcauaucucu

SEQ ID NO: 652140 - RNA, 23 nt, Artificial Sequence
  Synthetic
ggguagacuuccugcauaucucu

SEQ ID NO: 652141 - RNA, 24 nt, Artificial Sequence
  Synthetic
gggguagacuuccugcauaucucu

SEQ ID NO: 652142 - RNA, 18 nt, Artificial Sequence
  Synthetic
cagccuuauacuaucucu

SEQ ID NO: 652143 - RNA, 19 nt, Artificial Sequence
  Synthetic
gcagccuuauacuaucucu

SEQ ID NO: 652144 - RNA, 20 nt, Artificial Sequence
  Synthetic
ugcagccuuauacuaucucu

SEQ ID NO: 652145 - RNA, 21 nt, Artificial Sequence
  Synthetic
uugcagccuuauacuaucucu

SEQ ID NO: 652146 - RNA, 22 nt, Artificial Sequence
  Synthetic
guugcagccuuauacuaucucu

SEQ ID NO: 652147 - RNA, 23 nt, Artificial Sequence
  Synthetic
gguugcagccuuauacuaucucu

SEQ ID NO: 652148 - RNA, 24 nt, Artificial Sequence
  Synthetic
ugguugcagccuuauacuaucucu

SEQ ID NO: 652149 - RNA, 18 nt, Artificial Sequence
  Synthetic
uuguacaugauuaucucu

SEQ ID NO: 652150 - RNA, 19 nt, Artificial Sequence
  Synthetic
uuuguacaugauuaucucu

SEQ ID NO: 652151 - RNA, 20 nt, Artificial Sequence
  Synthetic
uuuuguacaugauuaucucu

SEQ ID NO: 652152 - RNA, 21 nt, Artificial Sequence
  Synthetic
auuuuguacaugauuaucucu

SEQ ID NO: 652153 - RNA, 22 nt, Artificial Sequence
  Synthetic
aauuuuguacaugauuaucucu

SEQ ID NO: 652154 - RNA, 23 nt, Artificial Sequence
  Synthetic
gaauuuuguacaugauuaucucu

SEQ ID NO: 652155 - RNA, 24 nt, Artificial Sequence
  Synthetic
ggaauuuuguacaugauuaucucu

SEQ ID NO: 652156 - RNA, 18 nt, Artificial Sequence
  Synthetic
uuguaaaauuuacucucu

SEQ ID NO: 652157 - RNA, 19 nt, Artificial Sequence
  Synthetic
guuguaaaauuuacucucu

SEQ ID NO: 652158 - RNA, 20 nt, Artificial Sequence
  Synthetic
aguuguaaaauuuacucucu

SEQ ID NO: 652159 - RNA, 21 nt, Artificial Sequence
  Synthetic
aaguuguaaaauuuacucucu

SEQ ID NO: 652160 - RNA, 22 nt, Artificial Sequence
  Synthetic
caaguuguaaaauuuacucucu

SEQ ID NO: 652161 - RNA, 23 nt, Artificial Sequence
  Synthetic
gcaaguuguaaaauuuacucucu

SEQ ID NO: 652162 - RNA, 24 nt, Artificial Sequence
  Synthetic
ugcaaguuguaaaauuuacucucu

SEQ ID NO: 652163 - RNA, 18 nt, Artificial Sequence
  Synthetic
gcuaucucccaccucucu

SEQ ID NO: 652164 - RNA, 19 nt, Artificial Sequence
  Synthetic
ugcuaucucccaccucucu

SEQ ID NO: 652165 - RNA, 20 nt, Artificial Sequence
  Synthetic
uugcuaucucccaccucucu

SEQ ID NO: 652166 - RNA, 21 nt, Artificial Sequence
  Synthetic
auugcuaucucccaccucucu

SEQ ID NO: 652167 - RNA, 22 nt, Artificial Sequence
  Synthetic
uauugcuaucucccaccucucu

SEQ ID NO: 652168 - RNA, 23 nt, Artificial Sequence
  Synthetic
uuauugcuaucucccaccucucu

SEQ ID NO: 652169 - RNA, 24 nt, Artificial Sequence
  Synthetic
uuuauugcuaucucccaccucucu

SEQ ID NO: 652170 - RNA, 18 nt, Artificial Sequence
  Synthetic
auuucagcgacccucucu

SEQ ID NO: 652171 - RNA, 19 nt, Artificial Sequence
  Synthetic
gauuucagcgacccucucu

SEQ ID NO: 652172 - RNA, 20 nt, Artificial Sequence
  Synthetic
agauuucagcgacccucucu

SEQ ID NO: 652173 - RNA, 21 nt, Artificial Sequence
  Synthetic
gagauuucagcgacccucucu

SEQ ID NO: 652174 - RNA, 22 nt, Artificial Sequence
  Synthetic
ugagauuucagcgacccucucu

SEQ ID NO: 652175 - RNA, 23 nt, Artificial Sequence
  Synthetic
gugagauuucagcgacccucucu

SEQ ID NO: 652176 - RNA, 24 nt, Artificial Sequence
  Synthetic
ggugagauuucagcgacccucucu

SEQ ID NO: 652177 - RNA, 18 nt, Artificial Sequence
  Synthetic
cuuccacccgcccucucu

SEQ ID NO: 652178 - RNA, 19 nt, Artificial Sequence
  Synthetic
gcuuccacccgcccucucu

SEQ ID NO: 652179 - RNA, 20 nt, Artificial Sequence
  Synthetic
agcuuccacccgcccucucu

SEQ ID NO: 652180 - RNA, 21 nt, Artificial Sequence
  Synthetic
uagcuuccacccgcccucucu

SEQ ID NO: 652181 - RNA, 22 nt, Artificial Sequence
  Synthetic
guagcuuccacccgcccucucu

SEQ ID NO: 652182 - RNA, 23 nt, Artificial Sequence
  Synthetic
uguagcuuccacccgcccucucu

SEQ ID NO: 652183 - RNA, 24 nt, Artificial Sequence
  Synthetic
uuguagcuuccacccgcccucucu

SEQ ID NO: 652184 - RNA, 18 nt, Artificial Sequence
  Synthetic
ccaacuucuugccucucu

SEQ ID NO: 652185 - RNA, 19 nt, Artificial Sequence
  Synthetic
uccaacuucuugccucucu

SEQ ID NO: 652186 - RNA, 20 nt, Artificial Sequence
  Synthetic
uuccaacuucuugccucucu

SEQ ID NO: 652187 - RNA, 21 nt, Artificial Sequence
  Synthetic
guuccaacuucuugccucucu

SEQ ID NO: 652188 - RNA, 22 nt, Artificial Sequence
  Synthetic
uguuccaacuucuugccucucu

SEQ ID NO: 652189 - RNA, 23 nt, Artificial Sequence
  Synthetic
guguuccaacuucuugccucucu

SEQ ID NO: 652190 - RNA, 24 nt, Artificial Sequence
  Synthetic
uguguuccaacuucuugccucucu

SEQ ID NO: 652191 - RNA, 18 nt, Artificial Sequence
  Synthetic
caaugcauuugccucucu

SEQ ID NO: 652192 - RNA, 19 nt, Artificial Sequence
  Synthetic
ucaaugcauuugccucucu

SEQ ID NO: 652193 - RNA, 20 nt, Artificial Sequence
  Synthetic
uucaaugcauuugccucucu

SEQ ID NO: 652194 - RNA, 21 nt, Artificial Sequence
  Synthetic
auucaaugcauuugccucucu

SEQ ID NO: 652195 - RNA, 22 nt, Artificial Sequence
  Synthetic
gauucaaugcauuugccucucu

SEQ ID NO: 652196 - RNA, 23 nt, Artificial Sequence
  Synthetic
ggauucaaugcauuugccucucu

SEQ ID NO: 652197 - RNA, 24 nt, Artificial Sequence
  Synthetic
uggauucaaugcauuugccucucu

SEQ ID NO: 652198 - RNA, 18 nt, Artificial Sequence
  Synthetic
uucccacaacaucucucu

SEQ ID NO: 652199 - RNA, 19 nt, Artificial Sequence
  Synthetic
auucccacaacaucucucu

SEQ ID NO: 652200 - RNA, 20 nt, Artificial Sequence
  Synthetic
aauucccacaacaucucucu

SEQ ID NO: 652201 - RNA, 21 nt, Artificial Sequence
  Synthetic
aaauucccacaacaucucucu

SEQ ID NO: 652202 - RNA, 22 nt, Artificial Sequence
  Synthetic
uaaauucccacaacaucucucu

SEQ ID NO: 652203 - RNA, 23 nt, Artificial Sequence
  Synthetic
auaaauucccacaacaucucucu

SEQ ID NO: 652204 - RNA, 24 nt, Artificial Sequence
  Synthetic
uauaaauucccacaacaucucucu

SEQ ID NO: 652205 - RNA, 18 nt, Artificial Sequence
  Synthetic
uuucauaucgcucucucu

SEQ ID NO: 652206 - RNA, 19 nt, Artificial Sequence
  Synthetic
uuuucauaucgcucucucu

SEQ ID NO: 652207 - RNA, 20 nt, Artificial Sequence
  Synthetic
auuuucauaucgcucucucu

SEQ ID NO: 652208 - RNA, 21 nt, Artificial Sequence
  Synthetic
uauuuucauaucgcucucucu

SEQ ID NO: 652209 - RNA, 22 nt, Artificial Sequence
  Synthetic
uuauuuucauaucgcucucucu

SEQ ID NO: 652210 - RNA, 23 nt, Artificial Sequence
  Synthetic
cuuauuuucauaucgcucucucu

SEQ ID NO: 652211 - RNA, 24 nt, Artificial Sequence
  Synthetic
ccuuauuuucauaucgcucucucu

SEQ ID NO: 652212 - RNA, 18 nt, Artificial Sequence
  Synthetic
aguggaggaagucucucu

SEQ ID NO: 652213 - RNA, 19 nt, Artificial Sequence
  Synthetic
caguggaggaagucucucu

SEQ ID NO: 652214 - RNA, 20 nt, Artificial Sequence
  Synthetic
gcaguggaggaagucucucu

SEQ ID NO: 652215 - RNA, 21 nt, Artificial Sequence
  Synthetic
ggcaguggaggaagucucucu

SEQ ID NO: 652216 - RNA, 22 nt, Artificial Sequence
  Synthetic
uggcaguggaggaagucucucu

SEQ ID NO: 652217 - RNA, 23 nt, Artificial Sequence
  Synthetic
cuggcaguggaggaagucucucu

SEQ ID NO: 652218 - RNA, 24 nt, Artificial Sequence
  Synthetic
ucuggcaguggaggaagucucucu

SEQ ID NO: 652219 - RNA, 18 nt, Artificial Sequence
  Synthetic
acuuugacuggucucucu

SEQ ID NO: 652220 - RNA, 19 nt, Artificial Sequence
  Synthetic
gacuuugacuggucucucu

SEQ ID NO: 652221 - RNA, 20 nt, Artificial Sequence
  Synthetic
agacuuugacuggucucucu

SEQ ID NO: 652222 - RNA, 21 nt, Artificial Sequence
  Synthetic
gagacuuugacuggucucucu

SEQ ID NO: 652223 - RNA, 22 nt, Artificial Sequence
  Synthetic
ugagacuuugacuggucucucu

SEQ ID NO: 652224 - RNA, 23 nt, Artificial Sequence
  Synthetic
augagacuuugacuggucucucu

SEQ ID NO: 652225 - RNA, 24 nt, Artificial Sequence
  Synthetic
aaugagacuuugacuggucucucu

SEQ ID NO: 652226 - RNA, 18 nt, Artificial Sequence
  Synthetic
caucaccuccuucucucu

SEQ ID NO: 652227 - RNA, 19 nt, Artificial Sequence
  Synthetic
ucaucaccuccuucucucu

SEQ ID NO: 652228 - RNA, 20 nt, Artificial Sequence
  Synthetic
aucaucaccuccuucucucu

SEQ ID NO: 652229 - RNA, 21 nt, Artificial Sequence
  Synthetic
uaucaucaccuccuucucucu

SEQ ID NO: 652230 - RNA, 22 nt, Artificial Sequence
  Synthetic
guaucaucaccuccuucucucu

SEQ ID NO: 652231 - RNA, 23 nt, Artificial Sequence
  Synthetic
uguaucaucaccuccuucucucu

SEQ ID NO: 652232 - RNA, 24 nt, Artificial Sequence
  Synthetic
uuguaucaucaccuccuucucucu

SEQ ID NO: 652233 - RNA, 18 nt, Artificial Sequence
  Synthetic
ucuaauuuuuuucucucu

SEQ ID NO: 652234 - RNA, 19 nt, Artificial Sequence
  Synthetic
uucuaauuuuuuucucucu

SEQ ID NO: 652235 - RNA, 20 nt, Artificial Sequence
  Synthetic
uuucuaauuuuuuucucucu

SEQ ID NO: 652236 - RNA, 21 nt, Artificial Sequence
  Synthetic
uuuucuaauuuuuuucucucu

SEQ ID NO: 652237 - RNA, 22 nt, Artificial Sequence
  Synthetic
cuuuucuaauuuuuuucucucu

SEQ ID NO: 652238 - RNA, 23 nt, Artificial Sequence
  Synthetic
ucuuuucuaauuuuuuucucucu

SEQ ID NO: 652239 - RNA, 24 nt, Artificial Sequence
  Synthetic
aucuuuucuaauuuuuuucucucu

SEQ ID NO: 652240 - RNA, 18 nt, Artificial Sequence
  Synthetic
agugcauuugaagucucu

SEQ ID NO: 652241 - RNA, 19 nt, Artificial Sequence
  Synthetic
uagugcauuugaagucucu

SEQ ID NO: 652242 - RNA, 20 nt, Artificial Sequence
  Synthetic
uuagugcauuugaagucucu

SEQ ID NO: 652243 - RNA, 21 nt, Artificial Sequence
  Synthetic
uuuagugcauuugaagucucu

SEQ ID NO: 652244 - RNA, 22 nt, Artificial Sequence
  Synthetic
auuuagugcauuugaagucucu

SEQ ID NO: 652245 - RNA, 23 nt, Artificial Sequence
  Synthetic
aauuuagugcauuugaagucucu

SEQ ID NO: 652246 - RNA, 24 nt, Artificial Sequence
  Synthetic
aaauuuagugcauuugaagucucu

SEQ ID NO: 652247 - RNA, 18 nt, Artificial Sequence
  Synthetic
gacgauaagggagucucu

SEQ ID NO: 652248 - RNA, 19 nt, Artificial Sequence
  Synthetic
agacgauaagggagucucu

SEQ ID NO: 652249 - RNA, 20 nt, Artificial Sequence
  Synthetic
gagacgauaagggagucucu

SEQ ID NO: 652250 - RNA, 21 nt, Artificial Sequence
  Synthetic
ugagacgauaagggagucucu

SEQ ID NO: 652251 - RNA, 22 nt, Artificial Sequence
  Synthetic
gugagacgauaagggagucucu

SEQ ID NO: 652252 - RNA, 23 nt, Artificial Sequence
  Synthetic
ggugagacgauaagggagucucu

SEQ ID NO: 652253 - RNA, 24 nt, Artificial Sequence
  Synthetic
aggugagacgauaagggagucucu

SEQ ID NO: 652254 - RNA, 18 nt, Artificial Sequence
  Synthetic
auuuuaaucugagucucu

SEQ ID NO: 652255 - RNA, 19 nt, Artificial Sequence
  Synthetic
gauuuuaaucugagucucu

SEQ ID NO: 652256 - RNA, 20 nt, Artificial Sequence
  Synthetic
ugauuuuaaucugagucucu

SEQ ID NO: 652257 - RNA, 21 nt, Artificial Sequence
  Synthetic
cugauuuuaaucugagucucu

SEQ ID NO: 652258 - RNA, 22 nt, Artificial Sequence
  Synthetic
ccugauuuuaaucugagucucu

SEQ ID NO: 652259 - RNA, 23 nt, Artificial Sequence
  Synthetic
uccugauuuuaaucugagucucu

SEQ ID NO: 652260 - RNA, 24 nt, Artificial Sequence
  Synthetic
uuccugauuuuaaucugagucucu

SEQ ID NO: 652261 - RNA, 18 nt, Artificial Sequence
  Synthetic
aauauauuuaaggucucu

SEQ ID NO: 652262 - RNA, 19 nt, Artificial Sequence
  Synthetic
uaauauauuuaaggucucu

SEQ ID NO: 652263 - RNA, 20 nt, Artificial Sequence
  Synthetic
uuaauauauuuaaggucucu

SEQ ID NO: 652264 - RNA, 21 nt, Artificial Sequence
  Synthetic
cuuaauauauuuaaggucucu

SEQ ID NO: 652265 - RNA, 22 nt, Artificial Sequence
  Synthetic
acuuaauauauuuaaggucucu

SEQ ID NO: 652266 - RNA, 23 nt, Artificial Sequence
  Synthetic
cacuuaauauauuuaaggucucu

SEQ ID NO: 652267 - RNA, 24 nt, Artificial Sequence
  Synthetic
ucacuuaauauauuuaaggucucu

SEQ ID NO: 652268 - RNA, 18 nt, Artificial Sequence
  Synthetic
cuguaaucccaggucucu

SEQ ID NO: 652269 - RNA, 19 nt, Artificial Sequence
  Synthetic
ccuguaaucccaggucucu

SEQ ID NO: 652270 - RNA, 20 nt, Artificial Sequence
  Synthetic
gccuguaaucccaggucucu

SEQ ID NO: 652271 - RNA, 21 nt, Artificial Sequence
  Synthetic
cgccuguaaucccaggucucu

SEQ ID NO: 652272 - RNA, 22 nt, Artificial Sequence
  Synthetic
acgccuguaaucccaggucucu

SEQ ID NO: 652273 - RNA, 23 nt, Artificial Sequence
  Synthetic
cacgccuguaaucccaggucucu

SEQ ID NO: 652274 - RNA, 24 nt, Artificial Sequence
  Synthetic
ucacgccuguaaucccaggucucu

SEQ ID NO: 652275 - RNA, 18 nt, Artificial Sequence
  Synthetic
gucucuuuguaggucucu

SEQ ID NO: 652276 - RNA, 19 nt, Artificial Sequence
  Synthetic
agucucuuuguaggucucu

SEQ ID NO: 652277 - RNA, 20 nt, Artificial Sequence
  Synthetic
aagucucuuuguaggucucu

SEQ ID NO: 652278 - RNA, 21 nt, Artificial Sequence
  Synthetic
uaagucucuuuguaggucucu

SEQ ID NO: 652279 - RNA, 22 nt, Artificial Sequence
  Synthetic
guaagucucuuuguaggucucu

SEQ ID NO: 652280 - RNA, 23 nt, Artificial Sequence
  Synthetic
uguaagucucuuuguaggucucu

SEQ ID NO: 652281 - RNA, 24 nt, Artificial Sequence
  Synthetic
guguaagucucuuuguaggucucu

SEQ ID NO: 652282 - RNA, 19 nt, Artificial Sequence
  Synthetic
ugucucuuuguaggucucu

SEQ ID NO: 652283 - RNA, 20 nt, Artificial Sequence
  Synthetic
augucucuuuguaggucucu

SEQ ID NO: 652284 - RNA, 21 nt, Artificial Sequence
  Synthetic
uaugucucuuuguaggucucu

SEQ ID NO: 652285 - RNA, 22 nt, Artificial Sequence
  Synthetic
cuaugucucuuuguaggucucu

SEQ ID NO: 652286 - RNA, 23 nt, Artificial Sequence
  Synthetic
ucuaugucucuuuguaggucucu

SEQ ID NO: 652287 - RNA, 24 nt, Artificial Sequence
  Synthetic
aucuaugucucuuuguaggucucu

SEQ ID NO: 652288 - RNA, 18 nt, Artificial Sequence
  Synthetic
uucagugguagggucucu

SEQ ID NO: 652289 - RNA, 19 nt, Artificial Sequence
  Synthetic
uuucagugguagggucucu

SEQ ID NO: 652290 - RNA, 20 nt, Artificial Sequence
  Synthetic
guuucagugguagggucucu

SEQ ID NO: 652291 - RNA, 21 nt, Artificial Sequence
  Synthetic
gguuucagugguagggucucu

SEQ ID NO: 652292 - RNA, 22 nt, Artificial Sequence
  Synthetic
ggguuucagugguagggucucu

SEQ ID NO: 652293 - RNA, 23 nt, Artificial Sequence
  Synthetic
aggguuucagugguagggucucu

SEQ ID NO: 652294 - RNA, 24 nt, Artificial Sequence
  Synthetic
gaggguuucagugguagggucucu

SEQ ID NO: 652295 - RNA, 18 nt, Artificial Sequence
  Synthetic
cagugagacucugucucu

SEQ ID NO: 652296 - RNA, 19 nt, Artificial Sequence
  Synthetic
acagugagacucugucucu

SEQ ID NO: 652297 - RNA, 20 nt, Artificial Sequence
  Synthetic
gacagugagacucugucucu

SEQ ID NO: 652298 - RNA, 21 nt, Artificial Sequence
  Synthetic
ugacagugagacucugucucu

SEQ ID NO: 652299 - RNA, 22 nt, Artificial Sequence
  Synthetic
gugacagugagacucugucucu

SEQ ID NO: 652300 - RNA, 23 nt, Artificial Sequence
  Synthetic
ggugacagugagacucugucucu

SEQ ID NO: 652301 - RNA, 24 nt, Artificial Sequence
  Synthetic
gggugacagugagacucugucucu

SEQ ID NO: 652302 - RNA, 18 nt, Artificial Sequence
  Synthetic
ucccuucguucugucucu

SEQ ID NO: 652303 - RNA, 19 nt, Artificial Sequence
  Synthetic
cucccuucguucugucucu

SEQ ID NO: 652304 - RNA, 20 nt, Artificial Sequence
  Synthetic
ucucccuucguucugucucu

SEQ ID NO: 652305 - RNA, 21 nt, Artificial Sequence
  Synthetic
uucucccuucguucugucucu

SEQ ID NO: 652306 - RNA, 22 nt, Artificial Sequence
  Synthetic
cuucucccuucguucugucucu

SEQ ID NO: 652307 - RNA, 23 nt, Artificial Sequence
  Synthetic
ccuucucccuucguucugucucu

SEQ ID NO: 652308 - RNA, 24 nt, Artificial Sequence
  Synthetic
cccuucucccuucguucugucucu

SEQ ID NO: 652309 - RNA, 18 nt, Artificial Sequence
  Synthetic
uuuaugaaacuugucucu

SEQ ID NO: 652310 - RNA, 19 nt, Artificial Sequence
  Synthetic
cuuuaugaaacuugucucu

SEQ ID NO: 652311 - RNA, 20 nt, Artificial Sequence
  Synthetic
acuuuaugaaacuugucucu

SEQ ID NO: 652312 - RNA, 21 nt, Artificial Sequence
  Synthetic
aacuuuaugaaacuugucucu

SEQ ID NO: 652313 - RNA, 22 nt, Artificial Sequence
  Synthetic
aaacuuuaugaaacuugucucu

SEQ ID NO: 652314 - RNA, 23 nt, Artificial Sequence
  Synthetic
caaacuuuaugaaacuugucucu

SEQ ID NO: 652315 - RNA, 24 nt, Artificial Sequence
  Synthetic
ucaaacuuuaugaaacuugucucu

SEQ ID NO: 652316 - RNA, 18 nt, Artificial Sequence
  Synthetic
uucauuuuuacauucucu

SEQ ID NO: 652317 - RNA, 19 nt, Artificial Sequence
  Synthetic
auucauuuuuacauucucu

SEQ ID NO: 652318 - RNA, 20 nt, Artificial Sequence
  Synthetic
aauucauuuuuacauucucu

SEQ ID NO: 652319 - RNA, 21 nt, Artificial Sequence
  Synthetic
caauucauuuuuacauucucu

SEQ ID NO: 652320 - RNA, 22 nt, Artificial Sequence
  Synthetic
ucaauucauuuuuacauucucu

SEQ ID NO: 652321 - RNA, 23 nt, Artificial Sequence
  Synthetic
uucaauucauuuuuacauucucu

SEQ ID NO: 652322 - RNA, 24 nt, Artificial Sequence
  Synthetic
cuucaauucauuuuuacauucucu

SEQ ID NO: 652323 - RNA, 18 nt, Artificial Sequence
  Synthetic
uguaauuuuccauucucu

SEQ ID NO: 652324 - RNA, 19 nt, Artificial Sequence
  Synthetic
auguaauuuuccauucucu

SEQ ID NO: 652325 - RNA, 20 nt, Artificial Sequence
  Synthetic
uauguaauuuuccauucucu

SEQ ID NO: 652326 - RNA, 21 nt, Artificial Sequence
  Synthetic
auauguaauuuuccauucucu

SEQ ID NO: 652327 - RNA, 22 nt, Artificial Sequence
  Synthetic
uauauguaauuuuccauucucu

SEQ ID NO: 652328 - RNA, 23 nt, Artificial Sequence
  Synthetic
uuauauguaauuuuccauucucu

SEQ ID NO: 652329 - RNA, 24 nt, Artificial Sequence
  Synthetic
uuuauauguaauuuuccauucucu

SEQ ID NO: 652330 - RNA, 18 nt, Artificial Sequence
  Synthetic
aaaauaaaaucauucucu

SEQ ID NO: 652331 - RNA, 19 nt, Artificial Sequence
  Synthetic
gaaaauaaaaucauucucu

SEQ ID NO: 652332 - RNA, 20 nt, Artificial Sequence
  Synthetic
ugaaaauaaaaucauucucu

SEQ ID NO: 652333 - RNA, 21 nt, Artificial Sequence
  Synthetic
augaaaauaaaaucauucucu

SEQ ID NO: 652334 - RNA, 22 nt, Artificial Sequence
  Synthetic
uaugaaaauaaaaucauucucu

SEQ ID NO: 652335 - RNA, 23 nt, Artificial Sequence
  Synthetic
guaugaaaauaaaaucauucucu

SEQ ID NO: 652336 - RNA, 24 nt, Artificial Sequence
  Synthetic
gguaugaaaauaaaaucauucucu

SEQ ID NO: 652337 - RNA, 18 nt, Artificial Sequence
  Synthetic
uucacucaaauauucucu

SEQ ID NO: 652338 - RNA, 19 nt, Artificial Sequence
  Synthetic
uuucacucaaauauucucu

SEQ ID NO: 652339 - RNA, 20 nt, Artificial Sequence
  Synthetic
uuuucacucaaauauucucu

SEQ ID NO: 652340 - RNA, 21 nt, Artificial Sequence
  Synthetic
cuuuucacucaaauauucucu

SEQ ID NO: 652341 - RNA, 22 nt, Artificial Sequence
  Synthetic
acuuuucacucaaauauucucu

SEQ ID NO: 652342 - RNA, 23 nt, Artificial Sequence
  Synthetic
gacuuuucacucaaauauucucu

SEQ ID NO: 652343 - RNA, 24 nt, Artificial Sequence
  Synthetic
agacuuuucacucaaauauucucu

SEQ ID NO: 652344 - RNA, 18 nt, Artificial Sequence
  Synthetic
uuggaauaguuauucucu

SEQ ID NO: 652345 - RNA, 19 nt, Artificial Sequence
  Synthetic
guuggaauaguuauucucu

SEQ ID NO: 652346 - RNA, 20 nt, Artificial Sequence
  Synthetic
aguuggaauaguuauucucu

SEQ ID NO: 652347 - RNA, 21 nt, Artificial Sequence
  Synthetic
uaguuggaauaguuauucucu

SEQ ID NO: 652348 - RNA, 22 nt, Artificial Sequence
  Synthetic
auaguuggaauaguuauucucu

SEQ ID NO: 652349 - RNA, 23 nt, Artificial Sequence
  Synthetic
gauaguuggaauaguuauucucu

SEQ ID NO: 652350 - RNA, 24 nt, Artificial Sequence
  Synthetic
agauaguuggaauaguuauucucu

SEQ ID NO: 652351 - RNA, 23 nt, Artificial Sequence
  Synthetic
cauuccuagguauuuuauucucu

SEQ ID NO: 652352 - RNA, 24 nt, Artificial Sequence
  Synthetic
gcauuccuagguauuuuauucucu

SEQ ID NO: 652353 - RNA, 23 nt, Artificial Sequence
  Synthetic
uauuccuagguauuuuauucucu

SEQ ID NO: 652354 - RNA, 24 nt, Artificial Sequence
  Synthetic
guauuccuagguauuuuauucucu

SEQ ID NO: 652355 - RNA, 18 nt, Artificial Sequence
  Synthetic
uccccaaaagacuucucu

SEQ ID NO: 652356 - RNA, 19 nt, Artificial Sequence
  Synthetic
uuccccaaaagacuucucu

SEQ ID NO: 652357 - RNA, 20 nt, Artificial Sequence
  Synthetic
uuuccccaaaagacuucucu

SEQ ID NO: 652358 - RNA, 21 nt, Artificial Sequence
  Synthetic
cuuuccccaaaagacuucucu

SEQ ID NO: 652359 - RNA, 22 nt, Artificial Sequence
  Synthetic
gcuuuccccaaaagacuucucu

SEQ ID NO: 652360 - RNA, 23 nt, Artificial Sequence
  Synthetic
ugcuuuccccaaaagacuucucu

SEQ ID NO: 652361 - RNA, 24 nt, Artificial Sequence
  Synthetic
uugcuuuccccaaaagacuucucu

SEQ ID NO: 652362 - RNA, 18 nt, Artificial Sequence
  Synthetic
gcaaaugucaccuucucu

SEQ ID NO: 652363 - RNA, 19 nt, Artificial Sequence
  Synthetic
ugcaaaugucaccuucucu

SEQ ID NO: 652364 - RNA, 20 nt, Artificial Sequence
  Synthetic
uugcaaaugucaccuucucu

SEQ ID NO: 652365 - RNA, 21 nt, Artificial Sequence
  Synthetic
uuugcaaaugucaccuucucu

SEQ ID NO: 652366 - RNA, 22 nt, Artificial Sequence
  Synthetic
uuuugcaaaugucaccuucucu

SEQ ID NO: 652367 - RNA, 23 nt, Artificial Sequence
  Synthetic
cuuuugcaaaugucaccuucucu

SEQ ID NO: 652368 - RNA, 24 nt, Artificial Sequence
  Synthetic
ucuuuugcaaaugucaccuucucu

SEQ ID NO: 652369 - RNA, 18 nt, Artificial Sequence
  Synthetic
guaucucuuuccuucucu

SEQ ID NO: 652370 - RNA, 19 nt, Artificial Sequence
  Synthetic
uguaucucuuuccuucucu

SEQ ID NO: 652371 - RNA, 20 nt, Artificial Sequence
  Synthetic
cuguaucucuuuccuucucu

SEQ ID NO: 652372 - RNA, 21 nt, Artificial Sequence
  Synthetic
ucuguaucucuuuccuucucu

SEQ ID NO: 652373 - RNA, 22 nt, Artificial Sequence
  Synthetic
aucuguaucucuuuccuucucu

SEQ ID NO: 652374 - RNA, 23 nt, Artificial Sequence
  Synthetic
uaucuguaucucuuuccuucucu

SEQ ID NO: 652375 - RNA, 24 nt, Artificial Sequence
  Synthetic
uuaucuguaucucuuuccuucucu

SEQ ID NO: 652376 - RNA, 18 nt, Artificial Sequence
  Synthetic
ccacucugaggcuucucu

SEQ ID NO: 652377 - RNA, 19 nt, Artificial Sequence
  Synthetic
gccacucugaggcuucucu

SEQ ID NO: 652378 - RNA, 20 nt, Artificial Sequence
  Synthetic
ggccacucugaggcuucucu

SEQ ID NO: 652379 - RNA, 21 nt, Artificial Sequence
  Synthetic
uggccacucugaggcuucucu

SEQ ID NO: 652380 - RNA, 22 nt, Artificial Sequence
  Synthetic
cuggccacucugaggcuucucu

SEQ ID NO: 652381 - RNA, 23 nt, Artificial Sequence
  Synthetic
ccuggccacucugaggcuucucu

SEQ ID NO: 652382 - RNA, 24 nt, Artificial Sequence
  Synthetic
accuggccacucugaggcuucucu

SEQ ID NO: 652383 - RNA, 18 nt, Artificial Sequence
  Synthetic
auucagauuugcuucucu

SEQ ID NO: 652384 - RNA, 19 nt, Artificial Sequence
  Synthetic
cauucagauuugcuucucu

SEQ ID NO: 652385 - RNA, 20 nt, Artificial Sequence
  Synthetic
ccauucagauuugcuucucu

SEQ ID NO: 652386 - RNA, 21 nt, Artificial Sequence
  Synthetic
uccauucagauuugcuucucu

SEQ ID NO: 652387 - RNA, 22 nt, Artificial Sequence
  Synthetic
guccauucagauuugcuucucu

SEQ ID NO: 652388 - RNA, 23 nt, Artificial Sequence
  Synthetic
uguccauucagauuugcuucucu

SEQ ID NO: 652389 - RNA, 24 nt, Artificial Sequence
  Synthetic
uuguccauucagauuugcuucucu

SEQ ID NO: 652390 - RNA, 18 nt, Artificial Sequence
  Synthetic
uagaucacugucuucucu

SEQ ID NO: 652391 - RNA, 19 nt, Artificial Sequence
  Synthetic
uuagaucacugucuucucu

SEQ ID NO: 652392 - RNA, 20 nt, Artificial Sequence
  Synthetic
auuagaucacugucuucucu

SEQ ID NO: 652393 - RNA, 21 nt, Artificial Sequence
  Synthetic
aauuagaucacugucuucucu

SEQ ID NO: 652394 - RNA, 22 nt, Artificial Sequence
  Synthetic
uaauuagaucacugucuucucu

SEQ ID NO: 652395 - RNA, 23 nt, Artificial Sequence
  Synthetic
auaauuagaucacugucuucucu

SEQ ID NO: 652396 - RNA, 24 nt, Artificial Sequence
  Synthetic
aauaauuagaucacugucuucucu

SEQ ID NO: 652397 - RNA, 18 nt, Artificial Sequence
  Synthetic
gaaggcauaauguucucu

SEQ ID NO: 652398 - RNA, 19 nt, Artificial Sequence
  Synthetic
cgaaggcauaauguucucu

SEQ ID NO: 652399 - RNA, 20 nt, Artificial Sequence
  Synthetic
ucgaaggcauaauguucucu

SEQ ID NO: 652400 - RNA, 21 nt, Artificial Sequence
  Synthetic
cucgaaggcauaauguucucu

SEQ ID NO: 652401 - RNA, 22 nt, Artificial Sequence
  Synthetic
ucucgaaggcauaauguucucu

SEQ ID NO: 652402 - RNA, 23 nt, Artificial Sequence
  Synthetic
gucucgaaggcauaauguucucu

SEQ ID NO: 652403 - RNA, 24 nt, Artificial Sequence
  Synthetic
agucucgaaggcauaauguucucu

SEQ ID NO: 652404 - RNA, 18 nt, Artificial Sequence
  Synthetic
cucugucuccuguucucu

SEQ ID NO: 652405 - RNA, 19 nt, Artificial Sequence
  Synthetic
ccucugucuccuguucucu

SEQ ID NO: 652406 - RNA, 20 nt, Artificial Sequence
  Synthetic
uccucugucuccuguucucu

SEQ ID NO: 652407 - RNA, 21 nt, Artificial Sequence
  Synthetic
guccucugucuccuguucucu

SEQ ID NO: 652408 - RNA, 22 nt, Artificial Sequence
  Synthetic
aguccucugucuccuguucucu

SEQ ID NO: 652409 - RNA, 23 nt, Artificial Sequence
  Synthetic
aaguccucugucuccuguucucu

SEQ ID NO: 652410 - RNA, 24 nt, Artificial Sequence
  Synthetic
uaaguccucugucuccuguucucu

SEQ ID NO: 652411 - RNA, 18 nt, Artificial Sequence
  Synthetic
ggcaauuuuguguucucu

SEQ ID NO: 652412 - RNA, 19 nt, Artificial Sequence
  Synthetic
uggcaauuuuguguucucu

SEQ ID NO: 652413 - RNA, 20 nt, Artificial Sequence
  Synthetic
uuggcaauuuuguguucucu

SEQ ID NO: 652414 - RNA, 21 nt, Artificial Sequence
  Synthetic
guuggcaauuuuguguucucu

SEQ ID NO: 652415 - RNA, 22 nt, Artificial Sequence
  Synthetic
gguuggcaauuuuguguucucu

SEQ ID NO: 652416 - RNA, 23 nt, Artificial Sequence
  Synthetic
ugguuggcaauuuuguguucucu

SEQ ID NO: 652417 - RNA, 24 nt, Artificial Sequence
  Synthetic
uugguuggcaauuuuguguucucu

SEQ ID NO: 652418 - RNA, 18 nt, Artificial Sequence
  Synthetic
agcaacuucacuuucucu

SEQ ID NO: 652419 - RNA, 19 nt, Artificial Sequence
  Synthetic
uagcaacuucacuuucucu

SEQ ID NO: 652420 - RNA, 20 nt, Artificial Sequence
  Synthetic
uuagcaacuucacuuucucu

SEQ ID NO: 652421 - RNA, 21 nt, Artificial Sequence
  Synthetic
cuuagcaacuucacuuucucu

SEQ ID NO: 652422 - RNA, 22 nt, Artificial Sequence
  Synthetic
ucuuagcaacuucacuuucucu

SEQ ID NO: 652423 - RNA, 23 nt, Artificial Sequence
  Synthetic
cucuuagcaacuucacuuucucu

SEQ ID NO: 652424 - RNA, 24 nt, Artificial Sequence
  Synthetic
gcucuuagcaacuucacuuucucu

SEQ ID NO: 652425 - RNA, 18 nt, Artificial Sequence
  Synthetic
ucgaaaucuuguuucucu

SEQ ID NO: 652426 - RNA, 19 nt, Artificial Sequence
  Synthetic
uucgaaaucuuguuucucu

SEQ ID NO: 652427 - RNA, 20 nt, Artificial Sequence
  Synthetic
uuucgaaaucuuguuucucu

SEQ ID NO: 652428 - RNA, 21 nt, Artificial Sequence
  Synthetic
cuuucgaaaucuuguuucucu

SEQ ID NO: 652429 - RNA, 22 nt, Artificial Sequence
  Synthetic
ccuuucgaaaucuuguuucucu

SEQ ID NO: 652430 - RNA, 23 nt, Artificial Sequence
  Synthetic
uccuuucgaaaucuuguuucucu

SEQ ID NO: 652431 - RNA, 24 nt, Artificial Sequence
  Synthetic
uuccuuucgaaaucuuguuucucu

SEQ ID NO: 652432 - RNA, 18 nt, Artificial Sequence
  Synthetic
gaaaguaguguuuucucu

SEQ ID NO: 652433 - RNA, 19 nt, Artificial Sequence
  Synthetic
agaaaguaguguuuucucu

SEQ ID NO: 652434 - RNA, 20 nt, Artificial Sequence
  Synthetic
uagaaaguaguguuuucucu

SEQ ID NO: 652435 - RNA, 21 nt, Artificial Sequence
  Synthetic
uuagaaaguaguguuuucucu

SEQ ID NO: 652436 - RNA, 22 nt, Artificial Sequence
  Synthetic
uuuagaaaguaguguuuucucu

SEQ ID NO: 652437 - RNA, 23 nt, Artificial Sequence
  Synthetic
uuuuagaaaguaguguuuucucu

SEQ ID NO: 652438 - RNA, 24 nt, Artificial Sequence
  Synthetic
uuuuuagaaaguaguguuuucucu

SEQ ID NO: 652439 - RNA, 18 nt, Artificial Sequence
  Synthetic
uaaaauuuuguuuucucu

SEQ ID NO: 652440 - RNA, 19 nt, Artificial Sequence
  Synthetic
auaaaauuuuguuuucucu

SEQ ID NO: 652441 - RNA, 20 nt, Artificial Sequence
  Synthetic
uauaaaauuuuguuuucucu

SEQ ID NO: 652442 - RNA, 21 nt, Artificial Sequence
  Synthetic
auauaaaauuuuguuuucucu

SEQ ID NO: 652443 - RNA, 22 nt, Artificial Sequence
  Synthetic
uauauaaaauuuuguuuucucu

SEQ ID NO: 652444 - RNA, 23 nt, Artificial Sequence
  Synthetic
uuauauaaaauuuuguuuucucu

SEQ ID NO: 652445 - RNA, 24 nt, Artificial Sequence
  Synthetic
uuuauauaaaauuuuguuuucucu

SEQ ID NO: 652446 - RNA, 18 nt, Artificial Sequence
  Synthetic
aucaacacauuuuucucu

SEQ ID NO: 652447 - RNA, 19 nt, Artificial Sequence
  Synthetic
gaucaacacauuuuucucu

SEQ ID NO: 652448 - RNA, 20 nt, Artificial Sequence
  Synthetic
ugaucaacacauuuuucucu

SEQ ID NO: 652449 - RNA, 21 nt, Artificial Sequence
  Synthetic
augaucaacacauuuuucucu

SEQ ID NO: 652450 - RNA, 22 nt, Artificial Sequence
  Synthetic
aaugaucaacacauuuuucucu

SEQ ID NO: 652451 - RNA, 23 nt, Artificial Sequence
  Synthetic
aaaugaucaacacauuuuucucu

SEQ ID NO: 652452 - RNA, 24 nt, Artificial Sequence
  Synthetic
aaaaugaucaacacauuuuucucu

SEQ ID NO: 652453 - RNA, 18 nt, Artificial Sequence
  Synthetic
auggauauauuuuucucu

SEQ ID NO: 652454 - RNA, 19 nt, Artificial Sequence
  Synthetic
aauggauauauuuuucucu

SEQ ID NO: 652455 - RNA, 20 nt, Artificial Sequence
  Synthetic
uaauggauauauuuuucucu

SEQ ID NO: 652456 - RNA, 21 nt, Artificial Sequence
  Synthetic
cuaauggauauauuuuucucu

SEQ ID NO: 652457 - RNA, 22 nt, Artificial Sequence
  Synthetic
acuaauggauauauuuuucucu

SEQ ID NO: 652458 - RNA, 23 nt, Artificial Sequence
  Synthetic
gacuaauggauauauuuuucucu

SEQ ID NO: 652459 - RNA, 24 nt, Artificial Sequence
  Synthetic
ugacuaauggauauauuuuucucu

SEQ ID NO: 652460 - RNA, 18 nt, Artificial Sequence
  Synthetic
uuuuuuucuuuuuucucu

SEQ ID NO: 652461 - RNA, 19 nt, Artificial Sequence
  Synthetic
auuuuuuucuuuuuucucu

SEQ ID NO: 652462 - RNA, 20 nt, Artificial Sequence
  Synthetic
cauuuuuuucuuuuuucucu

SEQ ID NO: 652463 - RNA, 21 nt, Artificial Sequence
  Synthetic
ucauuuuuuucuuuuuucucu

SEQ ID NO: 652464 - RNA, 22 nt, Artificial Sequence
  Synthetic
aucauuuuuuucuuuuuucucu

SEQ ID NO: 652465 - RNA, 23 nt, Artificial Sequence
  Synthetic
caucauuuuuuucuuuuuucucu

SEQ ID NO: 652466 - RNA, 24 nt, Artificial Sequence
  Synthetic
ucaucauuuuuuucuuuuuucucu

SEQ ID NO: 652467 - RNA, 18 nt, Artificial Sequence
  Synthetic
gcugaguggaaaaagucu

SEQ ID NO: 652468 - RNA, 19 nt, Artificial Sequence
  Synthetic
agcugaguggaaaaagucu

SEQ ID NO: 652469 - RNA, 20 nt, Artificial Sequence
  Synthetic
gagcugaguggaaaaagucu

SEQ ID NO: 652470 - RNA, 21 nt, Artificial Sequence
  Synthetic
agagcugaguggaaaaagucu

SEQ ID NO: 652471 - RNA, 22 nt, Artificial Sequence
  Synthetic
gagagcugaguggaaaaagucu

SEQ ID NO: 652472 - RNA, 23 nt, Artificial Sequence
  Synthetic
agagagcugaguggaaaaagucu

SEQ ID NO: 652473 - RNA, 24 nt, Artificial Sequence
  Synthetic
aagagagcugaguggaaaaagucu

SEQ ID NO: 652474 - RNA, 18 nt, Artificial Sequence
  Synthetic
ccauaaggcauaaagucu

SEQ ID NO: 652475 - RNA, 19 nt, Artificial Sequence
  Synthetic
accauaaggcauaaagucu

SEQ ID NO: 652476 - RNA, 20 nt, Artificial Sequence
  Synthetic
caccauaaggcauaaagucu

SEQ ID NO: 652477 - RNA, 21 nt, Artificial Sequence
  Synthetic
acaccauaaggcauaaagucu

SEQ ID NO: 652478 - RNA, 22 nt, Artificial Sequence
  Synthetic
uacaccauaaggcauaaagucu

SEQ ID NO: 652479 - RNA, 23 nt, Artificial Sequence
  Synthetic
auacaccauaaggcauaaagucu

SEQ ID NO: 652480 - RNA, 24 nt, Artificial Sequence
  Synthetic
cauacaccauaaggcauaaagucu

SEQ ID NO: 652481 - RNA, 18 nt, Artificial Sequence
  Synthetic
auaucaugcaucaagucu

SEQ ID NO: 652482 - RNA, 19 nt, Artificial Sequence
  Synthetic
aauaucaugcaucaagucu

SEQ ID NO: 652483 - RNA, 20 nt, Artificial Sequence
  Synthetic
aaauaucaugcaucaagucu

SEQ ID NO: 652484 - RNA, 21 nt, Artificial Sequence
  Synthetic
uaaauaucaugcaucaagucu

SEQ ID NO: 652485 - RNA, 22 nt, Artificial Sequence
  Synthetic
guaaauaucaugcaucaagucu

SEQ ID NO: 652486 - RNA, 23 nt, Artificial Sequence
  Synthetic
uguaaauaucaugcaucaagucu

SEQ ID NO: 652487 - RNA, 24 nt, Artificial Sequence
  Synthetic
auguaaauaucaugcaucaagucu

SEQ ID NO: 652488 - RNA, 18 nt, Artificial Sequence
  Synthetic
ccuccuugugggaagucu

SEQ ID NO: 652489 - RNA, 19 nt, Artificial Sequence
  Synthetic
uccuccuugugggaagucu

SEQ ID NO: 652490 - RNA, 20 nt, Artificial Sequence
  Synthetic
auccuccuugugggaagucu

SEQ ID NO: 652491 - RNA, 21 nt, Artificial Sequence
  Synthetic
cauccuccuugugggaagucu

SEQ ID NO: 652492 - RNA, 22 nt, Artificial Sequence
  Synthetic
ccauccuccuugugggaagucu

SEQ ID NO: 652493 - RNA, 23 nt, Artificial Sequence
  Synthetic
uccauccuccuugugggaagucu

SEQ ID NO: 652494 - RNA, 24 nt, Artificial Sequence
  Synthetic
cuccauccuccuugugggaagucu

SEQ ID NO: 652495 - RNA, 18 nt, Artificial Sequence
  Synthetic
uuauuuuucuggaagucu

SEQ ID NO: 652496 - RNA, 19 nt, Artificial Sequence
  Synthetic
uuuauuuuucuggaagucu

SEQ ID NO: 652497 - RNA, 20 nt, Artificial Sequence
  Synthetic
auuuauuuuucuggaagucu

SEQ ID NO: 652498 - RNA, 21 nt, Artificial Sequence
  Synthetic
gauuuauuuuucuggaagucu

SEQ ID NO: 652499 - RNA, 22 nt, Artificial Sequence
  Synthetic
agauuuauuuuucuggaagucu

SEQ ID NO: 652500 - RNA, 23 nt, Artificial Sequence
  Synthetic
gagauuuauuuuucuggaagucu

SEQ ID NO: 652501 - RNA, 24 nt, Artificial Sequence
  Synthetic
ugagauuuauuuuucuggaagucu

SEQ ID NO: 652502 - RNA, 18 nt, Artificial Sequence
  Synthetic
auggcagugaauaagucu

SEQ ID NO: 652503 - RNA, 19 nt, Artificial Sequence
  Synthetic
uauggcagugaauaagucu

SEQ ID NO: 652504 - RNA, 20 nt, Artificial Sequence
  Synthetic
uuauggcagugaauaagucu

SEQ ID NO: 652505 - RNA, 21 nt, Artificial Sequence
  Synthetic
cuuauggcagugaauaagucu

SEQ ID NO: 652506 - RNA, 22 nt, Artificial Sequence
  Synthetic
ccuuauggcagugaauaagucu

SEQ ID NO: 652507 - RNA, 23 nt, Artificial Sequence
  Synthetic
uccuuauggcagugaauaagucu

SEQ ID NO: 652508 - RNA, 24 nt, Artificial Sequence
  Synthetic
guccuuauggcagugaauaagucu

SEQ ID NO: 652509 - RNA, 18 nt, Artificial Sequence
  Synthetic
cagaagcuugauaagucu

SEQ ID NO: 652510 - RNA, 19 nt, Artificial Sequence
  Synthetic
acagaagcuugauaagucu

SEQ ID NO: 652511 - RNA, 20 nt, Artificial Sequence
  Synthetic
aacagaagcuugauaagucu

SEQ ID NO: 652512 - RNA, 21 nt, Artificial Sequence
  Synthetic
aaacagaagcuugauaagucu

SEQ ID NO: 652513 - RNA, 22 nt, Artificial Sequence
  Synthetic
caaacagaagcuugauaagucu

SEQ ID NO: 652514 - RNA, 23 nt, Artificial Sequence
  Synthetic
acaaacagaagcuugauaagucu

SEQ ID NO: 652515 - RNA, 24 nt, Artificial Sequence
  Synthetic
uacaaacagaagcuugauaagucu

SEQ ID NO: 652516 - RNA, 18 nt, Artificial Sequence
  Synthetic
ugcccuagggguaagucu

SEQ ID NO: 652517 - RNA, 19 nt, Artificial Sequence
  Synthetic
uugcccuagggguaagucu

SEQ ID NO: 652518 - RNA, 20 nt, Artificial Sequence
  Synthetic
guugcccuagggguaagucu

SEQ ID NO: 652519 - RNA, 21 nt, Artificial Sequence
  Synthetic
uguugcccuagggguaagucu

SEQ ID NO: 652520 - RNA, 22 nt, Artificial Sequence
  Synthetic
auguugcccuagggguaagucu

SEQ ID NO: 652521 - RNA, 23 nt, Artificial Sequence
  Synthetic
cauguugcccuagggguaagucu

SEQ ID NO: 652522 - RNA, 24 nt, Artificial Sequence
  Synthetic
ucauguugcccuagggguaagucu

SEQ ID NO: 652523 - RNA, 18 nt, Artificial Sequence
  Synthetic
ugaacagaaauuaagucu

SEQ ID NO: 652524 - RNA, 19 nt, Artificial Sequence
  Synthetic
augaacagaaauuaagucu

SEQ ID NO: 652525 - RNA, 20 nt, Artificial Sequence
  Synthetic
uaugaacagaaauuaagucu

SEQ ID NO: 652526 - RNA, 21 nt, Artificial Sequence
  Synthetic
auaugaacagaaauuaagucu

SEQ ID NO: 652527 - RNA, 22 nt, Artificial Sequence
  Synthetic
aauaugaacagaaauuaagucu

SEQ ID NO: 652528 - RNA, 23 nt, Artificial Sequence
  Synthetic
gaauaugaacagaaauuaagucu

SEQ ID NO: 652529 - RNA, 24 nt, Artificial Sequence
  Synthetic
ugaauaugaacagaaauuaagucu

SEQ ID NO: 652530 - RNA, 18 nt, Artificial Sequence
  Synthetic
aaagaaacacuuaagucu

SEQ ID NO: 652531 - RNA, 19 nt, Artificial Sequence
  Synthetic
gaaagaaacacuuaagucu

SEQ ID NO: 652532 - RNA, 20 nt, Artificial Sequence
  Synthetic
agaaagaaacacuuaagucu

SEQ ID NO: 652533 - RNA, 21 nt, Artificial Sequence
  Synthetic
gagaaagaaacacuuaagucu

SEQ ID NO: 652534 - RNA, 22 nt, Artificial Sequence
  Synthetic
ggagaaagaaacacuuaagucu

SEQ ID NO: 652535 - RNA, 23 nt, Artificial Sequence
  Synthetic
uggagaaagaaacacuuaagucu

SEQ ID NO: 652536 - RNA, 24 nt, Artificial Sequence
  Synthetic
uuggagaaagaaacacuuaagucu

SEQ ID NO: 652537 - RNA, 18 nt, Artificial Sequence
  Synthetic
cuccugcuaccacagucu

SEQ ID NO: 652538 - RNA, 19 nt, Artificial Sequence
  Synthetic
ccuccugcuaccacagucu

SEQ ID NO: 652539 - RNA, 20 nt, Artificial Sequence
  Synthetic
uccuccugcuaccacagucu

SEQ ID NO: 652540 - RNA, 21 nt, Artificial Sequence
  Synthetic
cuccuccugcuaccacagucu

SEQ ID NO: 652541 - RNA, 22 nt, Artificial Sequence
  Synthetic
ccuccuccugcuaccacagucu

SEQ ID NO: 652542 - RNA, 23 nt, Artificial Sequence
  Synthetic
cccuccuccugcuaccacagucu

SEQ ID NO: 652543 - RNA, 24 nt, Artificial Sequence
  Synthetic
acccuccuccugcuaccacagucu

SEQ ID NO: 652544 - RNA, 18 nt, Artificial Sequence
  Synthetic
aggaaaauuggacagucu

SEQ ID NO: 652545 - RNA, 19 nt, Artificial Sequence
  Synthetic
caggaaaauuggacagucu

SEQ ID NO: 652546 - RNA, 20 nt, Artificial Sequence
  Synthetic
ucaggaaaauuggacagucu

SEQ ID NO: 652547 - RNA, 21 nt, Artificial Sequence
  Synthetic
uucaggaaaauuggacagucu

SEQ ID NO: 652548 - RNA, 22 nt, Artificial Sequence
  Synthetic
uuucaggaaaauuggacagucu

SEQ ID NO: 652549 - RNA, 23 nt, Artificial Sequence
  Synthetic
guuucaggaaaauuggacagucu

SEQ ID NO: 652550 - RNA, 24 nt, Artificial Sequence
  Synthetic
aguuucaggaaaauuggacagucu

SEQ ID NO: 652551 - RNA, 18 nt, Artificial Sequence
  Synthetic
aaaacggauugacagucu

SEQ ID NO: 652552 - RNA, 19 nt, Artificial Sequence
  Synthetic
aaaaacggauugacagucu

SEQ ID NO: 652553 - RNA, 20 nt, Artificial Sequence
  Synthetic
gaaaaacggauugacagucu

SEQ ID NO: 652554 - RNA, 21 nt, Artificial Sequence
  Synthetic
agaaaaacggauugacagucu

SEQ ID NO: 652555 - RNA, 22 nt, Artificial Sequence
  Synthetic
uagaaaaacggauugacagucu

SEQ ID NO: 652556 - RNA, 23 nt, Artificial Sequence
  Synthetic
auagaaaaacggauugacagucu

SEQ ID NO: 652557 - RNA, 24 nt, Artificial Sequence
  Synthetic
uauagaaaaacggauugacagucu

SEQ ID NO: 652558 - RNA, 18 nt, Artificial Sequence
  Synthetic
gaaauaucuguacagucu

SEQ ID NO: 652559 - RNA, 19 nt, Artificial Sequence
  Synthetic
agaaauaucuguacagucu

SEQ ID NO: 652560 - RNA, 20 nt, Artificial Sequence
  Synthetic
gagaaauaucuguacagucu

SEQ ID NO: 652561 - RNA, 21 nt, Artificial Sequence
  Synthetic
ggagaaauaucuguacagucu

SEQ ID NO: 652562 - RNA, 22 nt, Artificial Sequence
  Synthetic
aggagaaauaucuguacagucu

SEQ ID NO: 652563 - RNA, 23 nt, Artificial Sequence
  Synthetic
gaggagaaauaucuguacagucu

SEQ ID NO: 652564 - RNA, 24 nt, Artificial Sequence
  Synthetic
ggaggagaaauaucuguacagucu

SEQ ID NO: 652565 - RNA, 18 nt, Artificial Sequence
  Synthetic
ugguggguguaccagucu

SEQ ID NO: 652566 - RNA, 19 nt, Artificial Sequence
  Synthetic
gugguggguguaccagucu

SEQ ID NO: 652567 - RNA, 20 nt, Artificial Sequence
  Synthetic
agugguggguguaccagucu

SEQ ID NO: 652568 - RNA, 21 nt, Artificial Sequence
  Synthetic
aagugguggguguaccagucu

SEQ ID NO: 652569 - RNA, 22 nt, Artificial Sequence
  Synthetic
gaagugguggguguaccagucu

SEQ ID NO: 652570 - RNA, 23 nt, Artificial Sequence
  Synthetic
ugaagugguggguguaccagucu

SEQ ID NO: 652571 - RNA, 24 nt, Artificial Sequence
  Synthetic
augaagugguggguguaccagucu

SEQ ID NO: 652572 - RNA, 18 nt, Artificial Sequence
  Synthetic
aauaaauuaccccagucu

SEQ ID NO: 652573 - RNA, 19 nt, Artificial Sequence
  Synthetic
aaauaaauuaccccagucu

SEQ ID NO: 652574 - RNA, 20 nt, Artificial Sequence
  Synthetic
uaaauaaauuaccccagucu

SEQ ID NO: 652575 - RNA, 21 nt, Artificial Sequence
  Synthetic
uuaaauaaauuaccccagucu

SEQ ID NO: 652576 - RNA, 22 nt, Artificial Sequence
  Synthetic
uuuaaauaaauuaccccagucu

SEQ ID NO: 652577 - RNA, 23 nt, Artificial Sequence
  Synthetic
cuuuaaauaaauuaccccagucu

SEQ ID NO: 652578 - RNA, 24 nt, Artificial Sequence
  Synthetic
ucuuuaaauaaauuaccccagucu

SEQ ID NO: 652579 - RNA, 18 nt, Artificial Sequence
  Synthetic
guaaaguguagucagucu

SEQ ID NO: 652580 - RNA, 19 nt, Artificial Sequence
  Synthetic
gguaaaguguagucagucu

SEQ ID NO: 652581 - RNA, 20 nt, Artificial Sequence
  Synthetic
agguaaaguguagucagucu

SEQ ID NO: 652582 - RNA, 21 nt, Artificial Sequence
  Synthetic
aagguaaaguguagucagucu

SEQ ID NO: 652583 - RNA, 22 nt, Artificial Sequence
  Synthetic
aaagguaaaguguagucagucu

SEQ ID NO: 652584 - RNA, 23 nt, Artificial Sequence
  Synthetic
gaaagguaaaguguagucagucu

SEQ ID NO: 652585 - RNA, 24 nt, Artificial Sequence
  Synthetic
agaaagguaaaguguagucagucu

SEQ ID NO: 652586 - RNA, 18 nt, Artificial Sequence
  Synthetic
gagacgauaagggagucu

SEQ ID NO: 652587 - RNA, 19 nt, Artificial Sequence
  Synthetic
ugagacgauaagggagucu

SEQ ID NO: 652588 - RNA, 20 nt, Artificial Sequence
  Synthetic
gugagacgauaagggagucu

SEQ ID NO: 652589 - RNA, 21 nt, Artificial Sequence
  Synthetic
ggugagacgauaagggagucu

SEQ ID NO: 652590 - RNA, 22 nt, Artificial Sequence
  Synthetic
aggugagacgauaagggagucu

SEQ ID NO: 652591 - RNA, 23 nt, Artificial Sequence
  Synthetic
gaggugagacgauaagggagucu

SEQ ID NO: 652592 - RNA, 24 nt, Artificial Sequence
  Synthetic
ugaggugagacgauaagggagucu

SEQ ID NO: 652593 - RNA, 18 nt, Artificial Sequence
  Synthetic
caccagauuguggagucu

SEQ ID NO: 652594 - RNA, 19 nt, Artificial Sequence
  Synthetic
ucaccagauuguggagucu

SEQ ID NO: 652595 - RNA, 20 nt, Artificial Sequence
  Synthetic
uucaccagauuguggagucu

SEQ ID NO: 652596 - RNA, 21 nt, Artificial Sequence
  Synthetic
cuucaccagauuguggagucu

SEQ ID NO: 652597 - RNA, 22 nt, Artificial Sequence
  Synthetic
ccuucaccagauuguggagucu

SEQ ID NO: 652598 - RNA, 23 nt, Artificial Sequence
  Synthetic
uccuucaccagauuguggagucu

SEQ ID NO: 652599 - RNA, 24 nt, Artificial Sequence
  Synthetic
cuccuucaccagauuguggagucu

SEQ ID NO: 652600 - RNA, 18 nt, Artificial Sequence
  Synthetic
ugauuuuaaucugagucu

SEQ ID NO: 652601 - RNA, 19 nt, Artificial Sequence
  Synthetic
cugauuuuaaucugagucu

SEQ ID NO: 652602 - RNA, 20 nt, Artificial Sequence
  Synthetic
ccugauuuuaaucugagucu

SEQ ID NO: 652603 - RNA, 21 nt, Artificial Sequence
  Synthetic
uccugauuuuaaucugagucu

SEQ ID NO: 652604 - RNA, 22 nt, Artificial Sequence
  Synthetic
uuccugauuuuaaucugagucu

SEQ ID NO: 652605 - RNA, 23 nt, Artificial Sequence
  Synthetic
cuuccugauuuuaaucugagucu

SEQ ID NO: 652606 - RNA, 24 nt, Artificial Sequence
  Synthetic
gcuuccugauuuuaaucugagucu

SEQ ID NO: 652607 - RNA, 18 nt, Artificial Sequence
  Synthetic
agugagagacuugagucu

SEQ ID NO: 652608 - RNA, 19 nt, Artificial Sequence
  Synthetic
aagugagagacuugagucu

SEQ ID NO: 652609 - RNA, 20 nt, Artificial Sequence
  Synthetic
caagugagagacuugagucu

SEQ ID NO: 652610 - RNA, 21 nt, Artificial Sequence
  Synthetic
ucaagugagagacuugagucu

SEQ ID NO: 652611 - RNA, 22 nt, Artificial Sequence
  Synthetic
aucaagugagagacuugagucu

SEQ ID NO: 652612 - RNA, 23 nt, Artificial Sequence
  Synthetic
caucaagugagagacuugagucu

SEQ ID NO: 652613 - RNA, 24 nt, Artificial Sequence
  Synthetic
gcaucaagugagagacuugagucu

SEQ ID NO: 652614 - RNA, 18 nt, Artificial Sequence
  Synthetic
ucccuucagcuugagucu

SEQ ID NO: 652615 - RNA, 19 nt, Artificial Sequence
  Synthetic
gucccuucagcuugagucu

SEQ ID NO: 652616 - RNA, 20 nt, Artificial Sequence
  Synthetic
ugucccuucagcuugagucu

SEQ ID NO: 652617 - RNA, 21 nt, Artificial Sequence
  Synthetic
augucccuucagcuugagucu

SEQ ID NO: 652618 - RNA, 22 nt, Artificial Sequence
  Synthetic
gaugucccuucagcuugagucu

SEQ ID NO: 652619 - RNA, 23 nt, Artificial Sequence
  Synthetic
ugaugucccuucagcuugagucu

SEQ ID NO: 652620 - RNA, 24 nt, Artificial Sequence
  Synthetic
cugaugucccuucagcuugagucu

SEQ ID NO: 652621 - RNA, 18 nt, Artificial Sequence
  Synthetic
uugugcaaaguugagucu

SEQ ID NO: 652622 - RNA, 19 nt, Artificial Sequence
  Synthetic
uuugugcaaaguugagucu

SEQ ID NO: 652623 - RNA, 20 nt, Artificial Sequence
  Synthetic
auuugugcaaaguugagucu

SEQ ID NO: 652624 - RNA, 21 nt, Artificial Sequence
  Synthetic
aauuugugcaaaguugagucu

SEQ ID NO: 652625 - RNA, 22 nt, Artificial Sequence
  Synthetic
caauuugugcaaaguugagucu

SEQ ID NO: 652626 - RNA, 23 nt, Artificial Sequence
  Synthetic
acaauuugugcaaaguugagucu

SEQ ID NO: 652627 - RNA, 24 nt, Artificial Sequence
  Synthetic
cacaauuugugcaaaguugagucu

SEQ ID NO: 652628 - RNA, 18 nt, Artificial Sequence
  Synthetic
auucaaauucaauagucu

SEQ ID NO: 652629 - RNA, 19 nt, Artificial Sequence
  Synthetic
aauucaaauucaauagucu

SEQ ID NO: 652630 - RNA, 20 nt, Artificial Sequence
  Synthetic
aaauucaaauucaauagucu

SEQ ID NO: 652631 - RNA, 21 nt, Artificial Sequence
  Synthetic
aaaauucaaauucaauagucu

SEQ ID NO: 652632 - RNA, 22 nt, Artificial Sequence
  Synthetic
aaaaauucaaauucaauagucu

SEQ ID NO: 652633 - RNA, 23 nt, Artificial Sequence
  Synthetic
aaaaaauucaaauucaauagucu

SEQ ID NO: 652634 - RNA, 24 nt, Artificial Sequence
  Synthetic
uaaaaaauucaaauucaauagucu

SEQ ID NO: 652635 - RNA, 18 nt, Artificial Sequence
  Synthetic
agggcaucugaauagucu

SEQ ID NO: 652636 - RNA, 19 nt, Artificial Sequence
  Synthetic
gagggcaucugaauagucu

SEQ ID NO: 652637 - RNA, 20 nt, Artificial Sequence
  Synthetic
agagggcaucugaauagucu

SEQ ID NO: 652638 - RNA, 21 nt, Artificial Sequence
  Synthetic
gagagggcaucugaauagucu

SEQ ID NO: 652639 - RNA, 22 nt, Artificial Sequence
  Synthetic
agagagggcaucugaauagucu

SEQ ID NO: 652640 - RNA, 23 nt, Artificial Sequence
  Synthetic
gagagagggcaucugaauagucu

SEQ ID NO: 652641 - RNA, 24 nt, Artificial Sequence
  Synthetic
agagagagggcaucugaauagucu

SEQ ID NO: 652642 - RNA, 18 nt, Artificial Sequence
  Synthetic
uucacaccuuaauagucu

SEQ ID NO: 652643 - RNA, 19 nt, Artificial Sequence
  Synthetic
guucacaccuuaauagucu

SEQ ID NO: 652644 - RNA, 20 nt, Artificial Sequence
  Synthetic
aguucacaccuuaauagucu

SEQ ID NO: 652645 - RNA, 21 nt, Artificial Sequence
  Synthetic
gaguucacaccuuaauagucu

SEQ ID NO: 652646 - RNA, 22 nt, Artificial Sequence
  Synthetic
agaguucacaccuuaauagucu

SEQ ID NO: 652647 - RNA, 23 nt, Artificial Sequence
  Synthetic
uagaguucacaccuuaauagucu

SEQ ID NO: 652648 - RNA, 24 nt, Artificial Sequence
  Synthetic
auagaguucacaccuuaauagucu

SEQ ID NO: 652649 - RNA, 18 nt, Artificial Sequence
  Synthetic
uuccauguuuaauagucu

SEQ ID NO: 652650 - RNA, 19 nt, Artificial Sequence
  Synthetic
guuccauguuuaauagucu

SEQ ID NO: 652651 - RNA, 20 nt, Artificial Sequence
  Synthetic
uguuccauguuuaauagucu

SEQ ID NO: 652652 - RNA, 21 nt, Artificial Sequence
  Synthetic
auguuccauguuuaauagucu

SEQ ID NO: 652653 - RNA, 22 nt, Artificial Sequence
  Synthetic
gauguuccauguuuaauagucu

SEQ ID NO: 652654 - RNA, 23 nt, Artificial Sequence
  Synthetic
ggauguuccauguuuaauagucu

SEQ ID NO: 652655 - RNA, 24 nt, Artificial Sequence
  Synthetic
aggauguuccauguuuaauagucu

SEQ ID NO: 652656 - RNA, 18 nt, Artificial Sequence
  Synthetic
cauccuucucucuagucu

SEQ ID NO: 652657 - RNA, 19 nt, Artificial Sequence
  Synthetic
gcauccuucucucuagucu

SEQ ID NO: 652658 - RNA, 20 nt, Artificial Sequence
  Synthetic
ugcauccuucucucuagucu

SEQ ID NO: 652659 - RNA, 21 nt, Artificial Sequence
  Synthetic
uugcauccuucucucuagucu

SEQ ID NO: 652660 - RNA, 22 nt, Artificial Sequence
  Synthetic
cuugcauccuucucucuagucu

SEQ ID NO: 652661 - RNA, 23 nt, Artificial Sequence
  Synthetic
ucuugcauccuucucucuagucu

SEQ ID NO: 652662 - RNA, 24 nt, Artificial Sequence
  Synthetic
aucuugcauccuucucucuagucu

SEQ ID NO: 652663 - RNA, 18 nt, Artificial Sequence
  Synthetic
ugaugcaaugucuagucu

SEQ ID NO: 652664 - RNA, 19 nt, Artificial Sequence
  Synthetic
cugaugcaaugucuagucu

SEQ ID NO: 652665 - RNA, 20 nt, Artificial Sequence
  Synthetic
acugaugcaaugucuagucu

SEQ ID NO: 652666 - RNA, 21 nt, Artificial Sequence
  Synthetic
gacugaugcaaugucuagucu

SEQ ID NO: 652667 - RNA, 22 nt, Artificial Sequence
  Synthetic
agacugaugcaaugucuagucu

SEQ ID NO: 652668 - RNA, 23 nt, Artificial Sequence
  Synthetic
cagacugaugcaaugucuagucu

SEQ ID NO: 652669 - RNA, 24 nt, Artificial Sequence
  Synthetic
gcagacugaugcaaugucuagucu

SEQ ID NO: 652670 - RNA, 18 nt, Artificial Sequence
  Synthetic
aguuauaucuucuagucu

SEQ ID NO: 652671 - RNA, 19 nt, Artificial Sequence
  Synthetic
aaguuauaucuucuagucu

SEQ ID NO: 652672 - RNA, 20 nt, Artificial Sequence
  Synthetic
caaguuauaucuucuagucu

SEQ ID NO: 652673 - RNA, 21 nt, Artificial Sequence
  Synthetic
acaaguuauaucuucuagucu

SEQ ID NO: 652674 - RNA, 22 nt, Artificial Sequence
  Synthetic
cacaaguuauaucuucuagucu

SEQ ID NO: 652675 - RNA, 23 nt, Artificial Sequence
  Synthetic
ucacaaguuauaucuucuagucu

SEQ ID NO: 652676 - RNA, 24 nt, Artificial Sequence
  Synthetic
uucacaaguuauaucuucuagucu

SEQ ID NO: 652677 - RNA, 18 nt, Artificial Sequence
  Synthetic
auuauuucauaguagucu

SEQ ID NO: 652678 - RNA, 19 nt, Artificial Sequence
  Synthetic
cauuauuucauaguagucu

SEQ ID NO: 652679 - RNA, 20 nt, Artificial Sequence
  Synthetic
acauuauuucauaguagucu

SEQ ID NO: 652680 - RNA, 21 nt, Artificial Sequence
  Synthetic
aacauuauuucauaguagucu

SEQ ID NO: 652681 - RNA, 22 nt, Artificial Sequence
  Synthetic
uaacauuauuucauaguagucu

SEQ ID NO: 652682 - RNA, 23 nt, Artificial Sequence
  Synthetic
auaacauuauuucauaguagucu

SEQ ID NO: 652683 - RNA, 24 nt, Artificial Sequence
  Synthetic
aauaacauuauuucauaguagucu

SEQ ID NO: 652684 - RNA, 18 nt, Artificial Sequence
  Synthetic
caugccuugagguagucu

SEQ ID NO: 652685 - RNA, 19 nt, Artificial Sequence
  Synthetic
gcaugccuugagguagucu

SEQ ID NO: 652686 - RNA, 20 nt, Artificial Sequence
  Synthetic
ugcaugccuugagguagucu

SEQ ID NO: 652687 - RNA, 21 nt, Artificial Sequence
  Synthetic
uugcaugccuugagguagucu

SEQ ID NO: 652688 - RNA, 22 nt, Artificial Sequence
  Synthetic
auugcaugccuugagguagucu

SEQ ID NO: 652689 - RNA, 23 nt, Artificial Sequence
  Synthetic
uauugcaugccuugagguagucu

SEQ ID NO: 652690 - RNA, 24 nt, Artificial Sequence
  Synthetic
uuauugcaugccuugagguagucu

SEQ ID NO: 652691 - RNA, 18 nt, Artificial Sequence
  Synthetic
guucuacccucuuagucu

SEQ ID NO: 652692 - RNA, 19 nt, Artificial Sequence
  Synthetic
uguucuacccucuuagucu

SEQ ID NO: 652693 - RNA, 20 nt, Artificial Sequence
  Synthetic
cuguucuacccucuuagucu

SEQ ID NO: 652694 - RNA, 21 nt, Artificial Sequence
  Synthetic
acuguucuacccucuuagucu

SEQ ID NO: 652695 - RNA, 22 nt, Artificial Sequence
  Synthetic
aacuguucuacccucuuagucu

SEQ ID NO: 652696 - RNA, 23 nt, Artificial Sequence
  Synthetic
gaacuguucuacccucuuagucu

SEQ ID NO: 652697 - RNA, 24 nt, Artificial Sequence
  Synthetic
ugaacuguucuacccucuuagucu

SEQ ID NO: 652698 - RNA, 18 nt, Artificial Sequence
  Synthetic
uucuuccugguuuagucu

SEQ ID NO: 652699 - RNA, 19 nt, Artificial Sequence
  Synthetic
uuucuuccugguuuagucu

SEQ ID NO: 652700 - RNA, 20 nt, Artificial Sequence
  Synthetic
auuucuuccugguuuagucu

SEQ ID NO: 652701 - RNA, 21 nt, Artificial Sequence
  Synthetic
gauuucuuccugguuuagucu

SEQ ID NO: 652702 - RNA, 22 nt, Artificial Sequence
  Synthetic
cgauuucuuccugguuuagucu

SEQ ID NO: 652703 - RNA, 23 nt, Artificial Sequence
  Synthetic
ucgauuucuuccugguuuagucu

SEQ ID NO: 652704 - RNA, 24 nt, Artificial Sequence
  Synthetic
uucgauuucuuccugguuuagucu

SEQ ID NO: 652705 - RNA, 18 nt, Artificial Sequence
  Synthetic
gcagcaccagcaacgucu

SEQ ID NO: 652706 - RNA, 19 nt, Artificial Sequence
  Synthetic
agcagcaccagcaacgucu

SEQ ID NO: 652707 - RNA, 20 nt, Artificial Sequence
  Synthetic
cagcagcaccagcaacgucu

SEQ ID NO: 652708 - RNA, 21 nt, Artificial Sequence
  Synthetic
ccagcagcaccagcaacgucu

SEQ ID NO: 652709 - RNA, 22 nt, Artificial Sequence
  Synthetic
accagcagcaccagcaacgucu

SEQ ID NO: 652710 - RNA, 23 nt, Artificial Sequence
  Synthetic
gaccagcagcaccagcaacgucu

SEQ ID NO: 652711 - RNA, 24 nt, Artificial Sequence
  Synthetic
ggaccagcagcaccagcaacgucu

SEQ ID NO: 652712 - RNA, 18 nt, Artificial Sequence
  Synthetic
gaauaccugccaccgucu

SEQ ID NO: 652713 - RNA, 19 nt, Artificial Sequence
  Synthetic
ugaauaccugccaccgucu

SEQ ID NO: 652714 - RNA, 20 nt, Artificial Sequence
  Synthetic
uugaauaccugccaccgucu

SEQ ID NO: 652715 - RNA, 21 nt, Artificial Sequence
  Synthetic
cuugaauaccugccaccgucu

SEQ ID NO: 652716 - RNA, 22 nt, Artificial Sequence
  Synthetic
gcuugaauaccugccaccgucu

SEQ ID NO: 652717 - RNA, 23 nt, Artificial Sequence
  Synthetic
ugcuugaauaccugccaccgucu

SEQ ID NO: 652718 - RNA, 24 nt, Artificial Sequence
  Synthetic
augcuugaauaccugccaccgucu

SEQ ID NO: 652719 - RNA, 18 nt, Artificial Sequence
  Synthetic
augguagcauaagcgucu

SEQ ID NO: 652720 - RNA, 19 nt, Artificial Sequence
  Synthetic
gaugguagcauaagcgucu

SEQ ID NO: 652721 - RNA, 20 nt, Artificial Sequence
  Synthetic
agaugguagcauaagcgucu

SEQ ID NO: 652722 - RNA, 21 nt, Artificial Sequence
  Synthetic
cagaugguagcauaagcgucu

SEQ ID NO: 652723 - RNA, 22 nt, Artificial Sequence
  Synthetic
ucagaugguagcauaagcgucu

SEQ ID NO: 652724 - RNA, 23 nt, Artificial Sequence
  Synthetic
uucagaugguagcauaagcgucu

SEQ ID NO: 652725 - RNA, 24 nt, Artificial Sequence
  Synthetic
auucagaugguagcauaagcgucu

SEQ ID NO: 652726 - RNA, 18 nt, Artificial Sequence
  Synthetic
uauacacuagguucgucu

SEQ ID NO: 652727 - RNA, 19 nt, Artificial Sequence
  Synthetic
uuauacacuagguucgucu

SEQ ID NO: 652728 - RNA, 20 nt, Artificial Sequence
  Synthetic
auuauacacuagguucgucu

SEQ ID NO: 652729 - RNA, 21 nt, Artificial Sequence
  Synthetic
gauuauacacuagguucgucu

SEQ ID NO: 652730 - RNA, 22 nt, Artificial Sequence
  Synthetic
agauuauacacuagguucgucu

SEQ ID NO: 652731 - RNA, 23 nt, Artificial Sequence
  Synthetic
gagauuauacacuagguucgucu

SEQ ID NO: 652732 - RNA, 24 nt, Artificial Sequence
  Synthetic
ggagauuauacacuagguucgucu

SEQ ID NO: 652733 - RNA, 18 nt, Artificial Sequence
  Synthetic
uuucguagcaccaggucu

SEQ ID NO: 652734 - RNA, 19 nt, Artificial Sequence
  Synthetic
uuuucguagcaccaggucu

SEQ ID NO: 652735 - RNA, 20 nt, Artificial Sequence
  Synthetic
auuuucguagcaccaggucu

SEQ ID NO: 652736 - RNA, 21 nt, Artificial Sequence
  Synthetic
uauuuucguagcaccaggucu

SEQ ID NO: 652737 - RNA, 22 nt, Artificial Sequence
  Synthetic
guauuuucguagcaccaggucu

SEQ ID NO: 652738 - RNA, 23 nt, Artificial Sequence
  Synthetic
aguauuuucguagcaccaggucu

SEQ ID NO: 652739 - RNA, 24 nt, Artificial Sequence
  Synthetic
gaguauuuucguagcaccaggucu

SEQ ID NO: 652740 - RNA, 18 nt, Artificial Sequence
  Synthetic
cccccuccccccaggucu

SEQ ID NO: 652741 - RNA, 19 nt, Artificial Sequence
  Synthetic
ucccccuccccccaggucu

SEQ ID NO: 652742 - RNA, 20 nt, Artificial Sequence
  Synthetic
aucccccuccccccaggucu

SEQ ID NO: 652743 - RNA, 21 nt, Artificial Sequence
  Synthetic
caucccccuccccccaggucu

SEQ ID NO: 652744 - RNA, 22 nt, Artificial Sequence
  Synthetic
acaucccccuccccccaggucu

SEQ ID NO: 652745 - RNA, 23 nt, Artificial Sequence
  Synthetic
uacaucccccuccccccaggucu

SEQ ID NO: 652746 - RNA, 24 nt, Artificial Sequence
  Synthetic
cuacaucccccuccccccaggucu

SEQ ID NO: 652747 - RNA, 18 nt, Artificial Sequence
  Synthetic
gccuguaaucccaggucu

SEQ ID NO: 652748 - RNA, 19 nt, Artificial Sequence
  Synthetic
cgccuguaaucccaggucu

SEQ ID NO: 652749 - RNA, 20 nt, Artificial Sequence
  Synthetic
acgccuguaaucccaggucu

SEQ ID NO: 652750 - RNA, 21 nt, Artificial Sequence
  Synthetic
cacgccuguaaucccaggucu

SEQ ID NO: 652751 - RNA, 22 nt, Artificial Sequence
  Synthetic
ucacgccuguaaucccaggucu

SEQ ID NO: 652752 - RNA, 23 nt, Artificial Sequence
  Synthetic
cucacgccuguaaucccaggucu

SEQ ID NO: 652753 - RNA, 24 nt, Artificial Sequence
  Synthetic
gcucacgccuguaaucccaggucu

SEQ ID NO: 652754 - RNA, 18 nt, Artificial Sequence
  Synthetic
gcugauuucuccaggucu

SEQ ID NO: 652755 - RNA, 19 nt, Artificial Sequence
  Synthetic
ugcugauuucuccaggucu

SEQ ID NO: 652756 - RNA, 20 nt, Artificial Sequence
  Synthetic
augcugauuucuccaggucu

SEQ ID NO: 652757 - RNA, 21 nt, Artificial Sequence
  Synthetic
caugcugauuucuccaggucu

SEQ ID NO: 652758 - RNA, 22 nt, Artificial Sequence
  Synthetic
ucaugcugauuucuccaggucu

SEQ ID NO: 652759 - RNA, 23 nt, Artificial Sequence
  Synthetic
cucaugcugauuucuccaggucu

SEQ ID NO: 652760 - RNA, 24 nt, Artificial Sequence
  Synthetic
ucucaugcugauuucuccaggucu

SEQ ID NO: 652761 - RNA, 18 nt, Artificial Sequence
  Synthetic
aacaacggcuucaggucu

SEQ ID NO: 652762 - RNA, 19 nt, Artificial Sequence
  Synthetic
caacaacggcuucaggucu

SEQ ID NO: 652763 - RNA, 20 nt, Artificial Sequence
  Synthetic
ccaacaacggcuucaggucu

SEQ ID NO: 652764 - RNA, 21 nt, Artificial Sequence
  Synthetic
cccaacaacggcuucaggucu

SEQ ID NO: 652765 - RNA, 22 nt, Artificial Sequence
  Synthetic
ccccaacaacggcuucaggucu

SEQ ID NO: 652766 - RNA, 23 nt, Artificial Sequence
  Synthetic
uccccaacaacggcuucaggucu

SEQ ID NO: 652767 - RNA, 24 nt, Artificial Sequence
  Synthetic
cuccccaacaacggcuucaggucu

SEQ ID NO: 652768 - RNA, 18 nt, Artificial Sequence
  Synthetic
ucacagacccagaggucu

SEQ ID NO: 652769 - RNA, 19 nt, Artificial Sequence
  Synthetic
aucacagacccagaggucu

SEQ ID NO: 652770 - RNA, 20 nt, Artificial Sequence
  Synthetic
caucacagacccagaggucu

SEQ ID NO: 652771 - RNA, 21 nt, Artificial Sequence
  Synthetic
ccaucacagacccagaggucu

SEQ ID NO: 652772 - RNA, 22 nt, Artificial Sequence
  Synthetic
cccaucacagacccagaggucu

SEQ ID NO: 652773 - RNA, 23 nt, Artificial Sequence
  Synthetic
ucccaucacagacccagaggucu

SEQ ID NO: 652774 - RNA, 24 nt, Artificial Sequence
  Synthetic
cucccaucacagacccagaggucu

SEQ ID NO: 652775 - RNA, 18 nt, Artificial Sequence
  Synthetic
aacuuaaaagcgaggucu

SEQ ID NO: 652776 - RNA, 19 nt, Artificial Sequence
  Synthetic
uaacuuaaaagcgaggucu

SEQ ID NO: 652777 - RNA, 20 nt, Artificial Sequence
  Synthetic
uuaacuuaaaagcgaggucu

SEQ ID NO: 652778 - RNA, 21 nt, Artificial Sequence
  Synthetic
guuaacuuaaaagcgaggucu

SEQ ID NO: 652779 - RNA, 22 nt, Artificial Sequence
  Synthetic
aguuaacuuaaaagcgaggucu

SEQ ID NO: 652780 - RNA, 23 nt, Artificial Sequence
  Synthetic
caguuaacuuaaaagcgaggucu

SEQ ID NO: 652781 - RNA, 24 nt, Artificial Sequence
  Synthetic
ucaguuaacuuaaaagcgaggucu

SEQ ID NO: 652782 - RNA, 18 nt, Artificial Sequence
  Synthetic
uuuucaucuccuaggucu

SEQ ID NO: 652783 - RNA, 19 nt, Artificial Sequence
  Synthetic
uuuuucaucuccuaggucu

SEQ ID NO: 652784 - RNA, 20 nt, Artificial Sequence
  Synthetic
cuuuuucaucuccuaggucu

SEQ ID NO: 652785 - RNA, 21 nt, Artificial Sequence
  Synthetic
gcuuuuucaucuccuaggucu

SEQ ID NO: 652786 - RNA, 22 nt, Artificial Sequence
  Synthetic
ggcuuuuucaucuccuaggucu

SEQ ID NO: 652787 - RNA, 23 nt, Artificial Sequence
  Synthetic
aggcuuuuucaucuccuaggucu

SEQ ID NO: 652788 - RNA, 24 nt, Artificial Sequence
  Synthetic
uaggcuuuuucaucuccuaggucu

SEQ ID NO: 652789 - RNA, 18 nt, Artificial Sequence
  Synthetic
gauuuggaaauagggucu

SEQ ID NO: 652790 - RNA, 19 nt, Artificial Sequence
  Synthetic
agauuuggaaauagggucu

SEQ ID NO: 652791 - RNA, 20 nt, Artificial Sequence
  Synthetic
cagauuuggaaauagggucu

SEQ ID NO: 652792 - RNA, 21 nt, Artificial Sequence
  Synthetic
ccagauuuggaaauagggucu

SEQ ID NO: 652793 - RNA, 22 nt, Artificial Sequence
  Synthetic
accagauuuggaaauagggucu

SEQ ID NO: 652794 - RNA, 23 nt, Artificial Sequence
  Synthetic
caccagauuuggaaauagggucu

SEQ ID NO: 652795 - RNA, 24 nt, Artificial Sequence
  Synthetic
ucaccagauuuggaaauagggucu

SEQ ID NO: 652796 - RNA, 18 nt, Artificial Sequence
  Synthetic
caaguugggcuagggucu

SEQ ID NO: 652797 - RNA, 19 nt, Artificial Sequence
  Synthetic
gcaaguugggcuagggucu

SEQ ID NO: 652798 - RNA, 20 nt, Artificial Sequence
  Synthetic
ugcaaguugggcuagggucu

SEQ ID NO: 652799 - RNA, 21 nt, Artificial Sequence
  Synthetic
uugcaaguugggcuagggucu

SEQ ID NO: 652800 - RNA, 22 nt, Artificial Sequence
  Synthetic
guugcaaguugggcuagggucu

SEQ ID NO: 652801 - RNA, 23 nt, Artificial Sequence
  Synthetic
gguugcaaguugggcuagggucu

SEQ ID NO: 652802 - RNA, 24 nt, Artificial Sequence
  Synthetic
ggguugcaaguugggcuagggucu

SEQ ID NO: 652803 - RNA, 18 nt, Artificial Sequence
  Synthetic
uacuagacucuagggucu

SEQ ID NO: 652804 - RNA, 19 nt, Artificial Sequence
  Synthetic
uuacuagacucuagggucu

SEQ ID NO: 652805 - RNA, 20 nt, Artificial Sequence
  Synthetic
uuuacuagacucuagggucu

SEQ ID NO: 652806 - RNA, 21 nt, Artificial Sequence
  Synthetic
cuuuacuagacucuagggucu

SEQ ID NO: 652807 - RNA, 22 nt, Artificial Sequence
  Synthetic
acuuuacuagacucuagggucu

SEQ ID NO: 652808 - RNA, 23 nt, Artificial Sequence
  Synthetic
cacuuuacuagacucuagggucu

SEQ ID NO: 652809 - RNA, 24 nt, Artificial Sequence
  Synthetic
acacuuuacuagacucuagggucu

SEQ ID NO: 652810 - RNA, 18 nt, Artificial Sequence
  Synthetic
guuucagugguagggucu

SEQ ID NO: 652811 - RNA, 19 nt, Artificial Sequence
  Synthetic
gguuucagugguagggucu

SEQ ID NO: 652812 - RNA, 20 nt, Artificial Sequence
  Synthetic
ggguuucagugguagggucu

SEQ ID NO: 652813 - RNA, 21 nt, Artificial Sequence
  Synthetic
aggguuucagugguagggucu

SEQ ID NO: 652814 - RNA, 22 nt, Artificial Sequence
  Synthetic
gaggguuucagugguagggucu

SEQ ID NO: 652815 - RNA, 23 nt, Artificial Sequence
  Synthetic
ugaggguuucagugguagggucu

SEQ ID NO: 652816 - RNA, 24 nt, Artificial Sequence
  Synthetic
cugaggguuucagugguagggucu

SEQ ID NO: 652817 - RNA, 18 nt, Artificial Sequence
  Synthetic
caauuuuuuaaggggucu

SEQ ID NO: 652818 - RNA, 19 nt, Artificial Sequence
  Synthetic
acaauuuuuuaaggggucu

SEQ ID NO: 652819 - RNA, 20 nt, Artificial Sequence
  Synthetic
cacaauuuuuuaaggggucu

SEQ ID NO: 652820 - RNA, 21 nt, Artificial Sequence
  Synthetic
ucacaauuuuuuaaggggucu

SEQ ID NO: 652821 - RNA, 22 nt, Artificial Sequence
  Synthetic
cucacaauuuuuuaaggggucu

SEQ ID NO: 652822 - RNA, 23 nt, Artificial Sequence
  Synthetic
ccucacaauuuuuuaaggggucu

SEQ ID NO: 652823 - RNA, 24 nt, Artificial Sequence
  Synthetic
accucacaauuuuuuaaggggucu

SEQ ID NO: 652824 - RNA, 18 nt, Artificial Sequence
  Synthetic
uccucugaaauggggucu

SEQ ID NO: 652825 - RNA, 19 nt, Artificial Sequence
  Synthetic
auccucugaaauggggucu

SEQ ID NO: 652826 - RNA, 20 nt, Artificial Sequence
  Synthetic
gauccucugaaauggggucu

SEQ ID NO: 652827 - RNA, 21 nt, Artificial Sequence
  Synthetic
agauccucugaaauggggucu

SEQ ID NO: 652828 - RNA, 22 nt, Artificial Sequence
  Synthetic
gagauccucugaaauggggucu

SEQ ID NO: 652829 - RNA, 23 nt, Artificial Sequence
  Synthetic
ugagauccucugaaauggggucu

SEQ ID NO: 652830 - RNA, 24 nt, Artificial Sequence
  Synthetic
uugagauccucugaaauggggucu

SEQ ID NO: 652831 - RNA, 18 nt, Artificial Sequence
  Synthetic
aaagcacuaaaugggucu

SEQ ID NO: 652832 - RNA, 19 nt, Artificial Sequence
  Synthetic
aaaagcacuaaaugggucu

SEQ ID NO: 652833 - RNA, 20 nt, Artificial Sequence
  Synthetic
gaaaagcacuaaaugggucu

SEQ ID NO: 652834 - RNA, 21 nt, Artificial Sequence
  Synthetic
cgaaaagcacuaaaugggucu

SEQ ID NO: 652835 - RNA, 22 nt, Artificial Sequence
  Synthetic
ccgaaaagcacuaaaugggucu

SEQ ID NO: 652836 - RNA, 23 nt, Artificial Sequence
  Synthetic
accgaaaagcacuaaaugggucu

SEQ ID NO: 652837 - RNA, 24 nt, Artificial Sequence
  Synthetic
gaccgaaaagcacuaaaugggucu

SEQ ID NO: 652838 - RNA, 18 nt, Artificial Sequence
  Synthetic
uaaaugaccacugggucu

SEQ ID NO: 652839 - RNA, 19 nt, Artificial Sequence
  Synthetic
cuaaaugaccacugggucu

SEQ ID NO: 652840 - RNA, 20 nt, Artificial Sequence
  Synthetic
acuaaaugaccacugggucu

SEQ ID NO: 652841 - RNA, 21 nt, Artificial Sequence
  Synthetic
uacuaaaugaccacugggucu

SEQ ID NO: 652842 - RNA, 22 nt, Artificial Sequence
  Synthetic
cuacuaaaugaccacugggucu

SEQ ID NO: 652843 - RNA, 23 nt, Artificial Sequence
  Synthetic
gcuacuaaaugaccacugggucu

SEQ ID NO: 652844 - RNA, 24 nt, Artificial Sequence
  Synthetic
ugcuacuaaaugaccacugggucu

SEQ ID NO: 652845 - RNA, 18 nt, Artificial Sequence
  Synthetic
gaagagcauucugggucu

SEQ ID NO: 652846 - RNA, 19 nt, Artificial Sequence
  Synthetic
ggaagagcauucugggucu

SEQ ID NO: 652847 - RNA, 20 nt, Artificial Sequence
  Synthetic
aggaagagcauucugggucu

SEQ ID NO: 652848 - RNA, 21 nt, Artificial Sequence
  Synthetic
aaggaagagcauucugggucu

SEQ ID NO: 652849 - RNA, 22 nt, Artificial Sequence
  Synthetic
aaaggaagagcauucugggucu

SEQ ID NO: 652850 - RNA, 23 nt, Artificial Sequence
  Synthetic
aaaaggaagagcauucugggucu

SEQ ID NO: 652851 - RNA, 24 nt, Artificial Sequence
  Synthetic
gaaaaggaagagcauucugggucu

SEQ ID NO: 652852 - RNA, 18 nt, Artificial Sequence
  Synthetic
agggguggcauugggucu

SEQ ID NO: 652853 - RNA, 19 nt, Artificial Sequence
  Synthetic
gagggguggcauugggucu

SEQ ID NO: 652854 - RNA, 20 nt, Artificial Sequence
  Synthetic
agagggguggcauugggucu

SEQ ID NO: 652855 - RNA, 21 nt, Artificial Sequence
  Synthetic
aagagggguggcauugggucu

SEQ ID NO: 652856 - RNA, 22 nt, Artificial Sequence
  Synthetic
aaagagggguggcauugggucu

SEQ ID NO: 652857 - RNA, 23 nt, Artificial Sequence
  Synthetic
aaaagagggguggcauugggucu

SEQ ID NO: 652858 - RNA, 24 nt, Artificial Sequence
  Synthetic
gaaaagagggguggcauugggucu

SEQ ID NO: 652859 - RNA, 18 nt, Artificial Sequence
  Synthetic
guugguugcguugggucu

SEQ ID NO: 652860 - RNA, 19 nt, Artificial Sequence
  Synthetic
uguugguugcguugggucu

SEQ ID NO: 652861 - RNA, 20 nt, Artificial Sequence
  Synthetic
auguugguugcguugggucu

SEQ ID NO: 652862 - RNA, 21 nt, Artificial Sequence
  Synthetic
aauguugguugcguugggucu

SEQ ID NO: 652863 - RNA, 22 nt, Artificial Sequence
  Synthetic
uaauguugguugcguugggucu

SEQ ID NO: 652864 - RNA, 23 nt, Artificial Sequence
  Synthetic
auaauguugguugcguugggucu

SEQ ID NO: 652865 - RNA, 24 nt, Artificial Sequence
  Synthetic
uauaauguugguugcguugggucu

SEQ ID NO: 652866 - RNA, 18 nt, Artificial Sequence
  Synthetic
acuggugggaaauggucu

SEQ ID NO: 652867 - RNA, 19 nt, Artificial Sequence
  Synthetic
aacuggugggaaauggucu

SEQ ID NO: 652868 - RNA, 20 nt, Artificial Sequence
  Synthetic
gaacuggugggaaauggucu

SEQ ID NO: 652869 - RNA, 21 nt, Artificial Sequence
  Synthetic
agaacuggugggaaauggucu

SEQ ID NO: 652870 - RNA, 22 nt, Artificial Sequence
  Synthetic
aagaacuggugggaaauggucu

SEQ ID NO: 652871 - RNA, 23 nt, Artificial Sequence
  Synthetic
uaagaacuggugggaaauggucu

SEQ ID NO: 652872 - RNA, 24 nt, Artificial Sequence
  Synthetic
cuaagaacuggugggaaauggucu

SEQ ID NO: 652873 - RNA, 18 nt, Artificial Sequence
  Synthetic
gcaaccagauccuggucu

SEQ ID NO: 652874 - RNA, 19 nt, Artificial Sequence
  Synthetic
agcaaccagauccuggucu

SEQ ID NO: 652875 - RNA, 20 nt, Artificial Sequence
  Synthetic
uagcaaccagauccuggucu

SEQ ID NO: 652876 - RNA, 21 nt, Artificial Sequence
  Synthetic
uuagcaaccagauccuggucu

SEQ ID NO: 652877 - RNA, 22 nt, Artificial Sequence
  Synthetic
cuuagcaaccagauccuggucu

SEQ ID NO: 652878 - RNA, 23 nt, Artificial Sequence
  Synthetic
gcuuagcaaccagauccuggucu

SEQ ID NO: 652879 - RNA, 24 nt, Artificial Sequence
  Synthetic
ugcuuagcaaccagauccuggucu

SEQ ID NO: 652880 - RNA, 18 nt, Artificial Sequence
  Synthetic
uucauuaacuucuggucu

SEQ ID NO: 652881 - RNA, 19 nt, Artificial Sequence
  Synthetic
uuucauuaacuucuggucu

SEQ ID NO: 652882 - RNA, 20 nt, Artificial Sequence
  Synthetic
uuuucauuaacuucuggucu

SEQ ID NO: 652883 - RNA, 21 nt, Artificial Sequence
  Synthetic
uuuuucauuaacuucuggucu

SEQ ID NO: 652884 - RNA, 22 nt, Artificial Sequence
  Synthetic
auuuuucauuaacuucuggucu

SEQ ID NO: 652885 - RNA, 23 nt, Artificial Sequence
  Synthetic
uauuuuucauuaacuucuggucu

SEQ ID NO: 652886 - RNA, 24 nt, Artificial Sequence
  Synthetic
cuauuuuucauuaacuucuggucu

SEQ ID NO: 652887 - RNA, 18 nt, Artificial Sequence
  Synthetic
ccccacugucaguggucu

SEQ ID NO: 652888 - RNA, 19 nt, Artificial Sequence
  Synthetic
accccacugucaguggucu

SEQ ID NO: 652889 - RNA, 20 nt, Artificial Sequence
  Synthetic
uaccccacugucaguggucu

SEQ ID NO: 652890 - RNA, 21 nt, Artificial Sequence
  Synthetic
cuaccccacugucaguggucu

SEQ ID NO: 652891 - RNA, 22 nt, Artificial Sequence
  Synthetic
ccuaccccacugucaguggucu

SEQ ID NO: 652892 - RNA, 23 nt, Artificial Sequence
  Synthetic
uccuaccccacugucaguggucu

SEQ ID NO: 652893 - RNA, 24 nt, Artificial Sequence
  Synthetic
guccuaccccacugucaguggucu

SEQ ID NO: 652894 - RNA, 18 nt, Artificial Sequence
  Synthetic
uccagacugagguggucu

SEQ ID NO: 652895 - RNA, 19 nt, Artificial Sequence
  Synthetic
guccagacugagguggucu

SEQ ID NO: 652896 - RNA, 20 nt, Artificial Sequence
  Synthetic
aguccagacugagguggucu

SEQ ID NO: 652897 - RNA, 21 nt, Artificial Sequence
  Synthetic
aaguccagacugagguggucu

SEQ ID NO: 652898 - RNA, 22 nt, Artificial Sequence
  Synthetic
aaaguccagacugagguggucu

SEQ ID NO: 652899 - RNA, 23 nt, Artificial Sequence
  Synthetic
uaaaguccagacugagguggucu

SEQ ID NO: 652900 - RNA, 24 nt, Artificial Sequence
  Synthetic
auaaaguccagacugagguggucu

SEQ ID NO: 652901 - RNA, 18 nt, Artificial Sequence
  Synthetic
uuuccuuaaauguggucu

SEQ ID NO: 652902 - RNA, 19 nt, Artificial Sequence
  Synthetic
auuuccuuaaauguggucu

SEQ ID NO: 652903 - RNA, 20 nt, Artificial Sequence
  Synthetic
uauuuccuuaaauguggucu

SEQ ID NO: 652904 - RNA, 21 nt, Artificial Sequence
  Synthetic
guauuuccuuaaauguggucu

SEQ ID NO: 652905 - RNA, 22 nt, Artificial Sequence
  Synthetic
aguauuuccuuaaauguggucu

SEQ ID NO: 652906 - RNA, 23 nt, Artificial Sequence
  Synthetic
caguauuuccuuaaauguggucu

SEQ ID NO: 652907 - RNA, 24 nt, Artificial Sequence
  Synthetic
acaguauuuccuuaaauguggucu

SEQ ID NO: 652908 - RNA, 18 nt, Artificial Sequence
  Synthetic
uugauuguacuguggucu

SEQ ID NO: 652909 - RNA, 19 nt, Artificial Sequence
  Synthetic
uuugauuguacuguggucu

SEQ ID NO: 652910 - RNA, 20 nt, Artificial Sequence
  Synthetic
auuugauuguacuguggucu

SEQ ID NO: 652911 - RNA, 21 nt, Artificial Sequence
  Synthetic
aauuugauuguacuguggucu

SEQ ID NO: 652912 - RNA, 22 nt, Artificial Sequence
  Synthetic
uaauuugauuguacuguggucu

SEQ ID NO: 652913 - RNA, 23 nt, Artificial Sequence
  Synthetic
cuaauuugauuguacuguggucu

SEQ ID NO: 652914 - RNA, 24 nt, Artificial Sequence
  Synthetic
ucuaauuugauuguacuguggucu

SEQ ID NO: 652915 - RNA, 18 nt, Artificial Sequence
  Synthetic
cugugaauucuguggucu

SEQ ID NO: 652916 - RNA, 19 nt, Artificial Sequence
  Synthetic
acugugaauucuguggucu

SEQ ID NO: 652917 - RNA, 20 nt, Artificial Sequence
  Synthetic
gacugugaauucuguggucu

SEQ ID NO: 652918 - RNA, 21 nt, Artificial Sequence
  Synthetic
ugacugugaauucuguggucu

SEQ ID NO: 652919 - RNA, 22 nt, Artificial Sequence
  Synthetic
augacugugaauucuguggucu

SEQ ID NO: 652920 - RNA, 23 nt, Artificial Sequence
  Synthetic
aaugacugugaauucuguggucu

SEQ ID NO: 652921 - RNA, 24 nt, Artificial Sequence
  Synthetic
uaaugacugugaauucuguggucu

SEQ ID NO: 652922 - RNA, 18 nt, Artificial Sequence
  Synthetic
aguauuuuaauuuggucu

SEQ ID NO: 652923 - RNA, 19 nt, Artificial Sequence
  Synthetic
aaguauuuuaauuuggucu

SEQ ID NO: 652924 - RNA, 20 nt, Artificial Sequence
  Synthetic
caaguauuuuaauuuggucu

SEQ ID NO: 652925 - RNA, 21 nt, Artificial Sequence
  Synthetic
ucaaguauuuuaauuuggucu

SEQ ID NO: 652926 - RNA, 22 nt, Artificial Sequence
  Synthetic
uucaaguauuuuaauuuggucu

SEQ ID NO: 652927 - RNA, 23 nt, Artificial Sequence
  Synthetic
auucaaguauuuuaauuuggucu

SEQ ID NO: 652928 - RNA, 24 nt, Artificial Sequence
  Synthetic
gauucaaguauuuuaauuuggucu

SEQ ID NO: 652929 - RNA, 18 nt, Artificial Sequence
  Synthetic
aauguaucacaaaugucu

SEQ ID NO: 652930 - RNA, 19 nt, Artificial Sequence
  Synthetic
caauguaucacaaaugucu

SEQ ID NO: 652931 - RNA, 20 nt, Artificial Sequence
  Synthetic
ccaauguaucacaaaugucu

SEQ ID NO: 652932 - RNA, 21 nt, Artificial Sequence
  Synthetic
accaauguaucacaaaugucu

SEQ ID NO: 652933 - RNA, 22 nt, Artificial Sequence
  Synthetic
uaccaauguaucacaaaugucu

SEQ ID NO: 652934 - RNA, 23 nt, Artificial Sequence
  Synthetic
cuaccaauguaucacaaaugucu

SEQ ID NO: 652935 - RNA, 24 nt, Artificial Sequence
  Synthetic
acuaccaauguaucacaaaugucu

SEQ ID NO: 652936 - RNA, 18 nt, Artificial Sequence
  Synthetic
ucagagaugcaaaugucu

SEQ ID NO: 652937 - RNA, 19 nt, Artificial Sequence
  Synthetic
aucagagaugcaaaugucu

SEQ ID NO: 652938 - RNA, 20 nt, Artificial Sequence
  Synthetic
gaucagagaugcaaaugucu

SEQ ID NO: 652939 - RNA, 21 nt, Artificial Sequence
  Synthetic
ugaucagagaugcaaaugucu

SEQ ID NO: 652940 - RNA, 22 nt, Artificial Sequence
  Synthetic
uugaucagagaugcaaaugucu

SEQ ID NO: 652941 - RNA, 23 nt, Artificial Sequence
  Synthetic
uuugaucagagaugcaaaugucu

SEQ ID NO: 652942 - RNA, 24 nt, Artificial Sequence
  Synthetic
uuuugaucagagaugcaaaugucu

SEQ ID NO: 652943 - RNA, 18 nt, Artificial Sequence
  Synthetic
uugauuacaacaaugucu

SEQ ID NO: 652944 - RNA, 19 nt, Artificial Sequence
  Synthetic
auugauuacaacaaugucu

SEQ ID NO: 652945 - RNA, 20 nt, Artificial Sequence
  Synthetic
uauugauuacaacaaugucu

SEQ ID NO: 652946 - RNA, 21 nt, Artificial Sequence
  Synthetic
uuauugauuacaacaaugucu

SEQ ID NO: 652947 - RNA, 22 nt, Artificial Sequence
  Synthetic
guuauugauuacaacaaugucu

SEQ ID NO: 652948 - RNA, 23 nt, Artificial Sequence
  Synthetic
cguuauugauuacaacaaugucu

SEQ ID NO: 652949 - RNA, 24 nt, Artificial Sequence
  Synthetic
acguuauugauuacaacaaugucu

SEQ ID NO: 652950 - RNA, 18 nt, Artificial Sequence
  Synthetic
agauaaggaacaaugucu

SEQ ID NO: 652951 - RNA, 19 nt, Artificial Sequence
  Synthetic
gagauaaggaacaaugucu

SEQ ID NO: 652952 - RNA, 20 nt, Artificial Sequence
  Synthetic
ggagauaaggaacaaugucu

SEQ ID NO: 652953 - RNA, 21 nt, Artificial Sequence
  Synthetic
gggagauaaggaacaaugucu

SEQ ID NO: 652954 - RNA, 22 nt, Artificial Sequence
  Synthetic
agggagauaaggaacaaugucu

SEQ ID NO: 652955 - RNA, 23 nt, Artificial Sequence
  Synthetic
uagggagauaaggaacaaugucu

SEQ ID NO: 652956 - RNA, 24 nt, Artificial Sequence
  Synthetic
auagggagauaaggaacaaugucu

SEQ ID NO: 652957 - RNA, 18 nt, Artificial Sequence
  Synthetic
cuuaguauuuacaugucu

SEQ ID NO: 652958 - RNA, 19 nt, Artificial Sequence
  Synthetic
gcuuaguauuuacaugucu

SEQ ID NO: 652959 - RNA, 20 nt, Artificial Sequence
  Synthetic
ugcuuaguauuuacaugucu

SEQ ID NO: 652960 - RNA, 21 nt, Artificial Sequence
  Synthetic
augcuuaguauuuacaugucu

SEQ ID NO: 652961 - RNA, 22 nt, Artificial Sequence
  Synthetic
aaugcuuaguauuuacaugucu

SEQ ID NO: 652962 - RNA, 23 nt, Artificial Sequence
  Synthetic
gaaugcuuaguauuuacaugucu

SEQ ID NO: 652963 - RNA, 24 nt, Artificial Sequence
  Synthetic
ugaaugcuuaguauuuacaugucu

SEQ ID NO: 652964 - RNA, 18 nt, Artificial Sequence
  Synthetic
ugcuugugacucaugucu

SEQ ID NO: 652965 - RNA, 19 nt, Artificial Sequence
  Synthetic
augcuugugacucaugucu

SEQ ID NO: 652966 - RNA, 20 nt, Artificial Sequence
  Synthetic
aaugcuugugacucaugucu

SEQ ID NO: 652967 - RNA, 21 nt, Artificial Sequence
  Synthetic
aaaugcuugugacucaugucu

SEQ ID NO: 652968 - RNA, 22 nt, Artificial Sequence
  Synthetic
uaaaugcuugugacucaugucu

SEQ ID NO: 652969 - RNA, 23 nt, Artificial Sequence
  Synthetic
auaaaugcuugugacucaugucu

SEQ ID NO: 652970 - RNA, 24 nt, Artificial Sequence
  Synthetic
aauaaaugcuugugacucaugucu

SEQ ID NO: 652971 - RNA, 18 nt, Artificial Sequence
  Synthetic
cgaagacaagggaugucu

SEQ ID NO: 652972 - RNA, 19 nt, Artificial Sequence
  Synthetic
ucgaagacaagggaugucu

SEQ ID NO: 652973 - RNA, 20 nt, Artificial Sequence
  Synthetic
uucgaagacaagggaugucu

SEQ ID NO: 652974 - RNA, 21 nt, Artificial Sequence
  Synthetic
auucgaagacaagggaugucu

SEQ ID NO: 652975 - RNA, 22 nt, Artificial Sequence
  Synthetic
gauucgaagacaagggaugucu

SEQ ID NO: 652976 - RNA, 23 nt, Artificial Sequence
  Synthetic
agauucgaagacaagggaugucu

SEQ ID NO: 652977 - RNA, 24 nt, Artificial Sequence
  Synthetic
cagauucgaagacaagggaugucu

SEQ ID NO: 652978 - RNA, 18 nt, Artificial Sequence
  Synthetic
auucaauaggggaugucu

SEQ ID NO: 652979 - RNA, 19 nt, Artificial Sequence
  Synthetic
uauucaauaggggaugucu

SEQ ID NO: 652980 - RNA, 20 nt, Artificial Sequence
  Synthetic
cuauucaauaggggaugucu

SEQ ID NO: 652981 - RNA, 21 nt, Artificial Sequence
  Synthetic
ccuauucaauaggggaugucu

SEQ ID NO: 652982 - RNA, 22 nt, Artificial Sequence
  Synthetic
uccuauucaauaggggaugucu

SEQ ID NO: 652983 - RNA, 23 nt, Artificial Sequence
  Synthetic
uuccuauucaauaggggaugucu

SEQ ID NO: 652984 - RNA, 24 nt, Artificial Sequence
  Synthetic
cuuccuauucaauaggggaugucu

SEQ ID NO: 652985 - RNA, 18 nt, Artificial Sequence
  Synthetic
uucuggauccugaugucu

SEQ ID NO: 652986 - RNA, 19 nt, Artificial Sequence
  Synthetic
auucuggauccugaugucu

SEQ ID NO: 652987 - RNA, 20 nt, Artificial Sequence
  Synthetic
uauucuggauccugaugucu

SEQ ID NO: 652988 - RNA, 21 nt, Artificial Sequence
  Synthetic
uuauucuggauccugaugucu

SEQ ID NO: 652989 - RNA, 22 nt, Artificial Sequence
  Synthetic
auuauucuggauccugaugucu

SEQ ID NO: 652990 - RNA, 23 nt, Artificial Sequence
  Synthetic
aauuauucuggauccugaugucu

SEQ ID NO: 652991 - RNA, 24 nt, Artificial Sequence
  Synthetic
caauuauucuggauccugaugucu

SEQ ID NO: 652992 - RNA, 18 nt, Artificial Sequence
  Synthetic
ugguccccaaauaugucu

SEQ ID NO: 652993 - RNA, 19 nt, Artificial Sequence
  Synthetic
augguccccaaauaugucu

SEQ ID NO: 652994 - RNA, 20 nt, Artificial Sequence
  Synthetic
uaugguccccaaauaugucu

SEQ ID NO: 652995 - RNA, 21 nt, Artificial Sequence
  Synthetic
cuaugguccccaaauaugucu

SEQ ID NO: 652996 - RNA, 22 nt, Artificial Sequence
  Synthetic
acuaugguccccaaauaugucu

SEQ ID NO: 652997 - RNA, 23 nt, Artificial Sequence
  Synthetic
gacuaugguccccaaauaugucu

SEQ ID NO: 652998 - RNA, 24 nt, Artificial Sequence
  Synthetic
agacuaugguccccaaauaugucu

SEQ ID NO: 652999 - RNA, 18 nt, Artificial Sequence
  Synthetic
uuaaguguauauaugucu

SEQ ID NO: 653000 - RNA, 19 nt, Artificial Sequence
  Synthetic
cuuaaguguauauaugucu

SEQ ID NO: 653001 - RNA, 20 nt, Artificial Sequence
  Synthetic
acuuaaguguauauaugucu

SEQ ID NO: 653002 - RNA, 21 nt, Artificial Sequence
  Synthetic
aacuuaaguguauauaugucu

SEQ ID NO: 653003 - RNA, 22 nt, Artificial Sequence
  Synthetic
uaacuuaaguguauauaugucu

SEQ ID NO: 653004 - RNA, 23 nt, Artificial Sequence
  Synthetic
auaacuuaaguguauauaugucu

SEQ ID NO: 653005 - RNA, 24 nt, Artificial Sequence
  Synthetic
cauaacuuaaguguauauaugucu

SEQ ID NO: 653006 - RNA, 18 nt, Artificial Sequence
  Synthetic
gugauagacucuaugucu

SEQ ID NO: 653007 - RNA, 19 nt, Artificial Sequence
  Synthetic
ugugauagacucuaugucu

SEQ ID NO: 653008 - RNA, 20 nt, Artificial Sequence
  Synthetic
cugugauagacucuaugucu

SEQ ID NO: 653009 - RNA, 21 nt, Artificial Sequence
  Synthetic
ucugugauagacucuaugucu

SEQ ID NO: 653010 - RNA, 22 nt, Artificial Sequence
  Synthetic
cucugugauagacucuaugucu

SEQ ID NO: 653011 - RNA, 23 nt, Artificial Sequence
  Synthetic
gcucugugauagacucuaugucu

SEQ ID NO: 653012 - RNA, 24 nt, Artificial Sequence
  Synthetic
ugcucugugauagacucuaugucu

SEQ ID NO: 653013 - RNA, 18 nt, Artificial Sequence
  Synthetic
gucuuagagucuaugucu

SEQ ID NO: 653014 - RNA, 19 nt, Artificial Sequence
  Synthetic
ugucuuagagucuaugucu

SEQ ID NO: 653015 - RNA, 20 nt, Artificial Sequence
  Synthetic
cugucuuagagucuaugucu

SEQ ID NO: 653016 - RNA, 21 nt, Artificial Sequence
  Synthetic
ucugucuuagagucuaugucu

SEQ ID NO: 653017 - RNA, 22 nt, Artificial Sequence
  Synthetic
cucugucuuagagucuaugucu

SEQ ID NO: 653018 - RNA, 23 nt, Artificial Sequence
  Synthetic
ucucugucuuagagucuaugucu

SEQ ID NO: 653019 - RNA, 24 nt, Artificial Sequence
  Synthetic
aucucugucuuagagucuaugucu

SEQ ID NO: 653020 - RNA, 18 nt, Artificial Sequence
  Synthetic
uugucaugugguaugucu

SEQ ID NO: 653021 - RNA, 19 nt, Artificial Sequence
  Synthetic
auugucaugugguaugucu

SEQ ID NO: 653022 - RNA, 20 nt, Artificial Sequence
  Synthetic
gauugucaugugguaugucu

SEQ ID NO: 653023 - RNA, 21 nt, Artificial Sequence
  Synthetic
ugauugucaugugguaugucu

SEQ ID NO: 653024 - RNA, 22 nt, Artificial Sequence
  Synthetic
augauugucaugugguaugucu

SEQ ID NO: 653025 - RNA, 23 nt, Artificial Sequence
  Synthetic
aaugauugucaugugguaugucu

SEQ ID NO: 653026 - RNA, 24 nt, Artificial Sequence
  Synthetic
aaaugauugucaugugguaugucu

SEQ ID NO: 653027 - RNA, 18 nt, Artificial Sequence
  Synthetic
acucaaaaaacacugucu

SEQ ID NO: 653028 - RNA, 19 nt, Artificial Sequence
  Synthetic
aacucaaaaaacacugucu

SEQ ID NO: 653029 - RNA, 20 nt, Artificial Sequence
  Synthetic
uaacucaaaaaacacugucu

SEQ ID NO: 653030 - RNA, 21 nt, Artificial Sequence
  Synthetic
guaacucaaaaaacacugucu

SEQ ID NO: 653031 - RNA, 22 nt, Artificial Sequence
  Synthetic
cguaacucaaaaaacacugucu

SEQ ID NO: 653032 - RNA, 23 nt, Artificial Sequence
  Synthetic
acguaacucaaaaaacacugucu

SEQ ID NO: 653033 - RNA, 24 nt, Artificial Sequence
  Synthetic
cacguaacucaaaaaacacugucu

SEQ ID NO: 653034 - RNA, 18 nt, Artificial Sequence
  Synthetic
guaaagggaauacugucu

SEQ ID NO: 653035 - RNA, 19 nt, Artificial Sequence
  Synthetic
aguaaagggaauacugucu

SEQ ID NO: 653036 - RNA, 20 nt, Artificial Sequence
  Synthetic
gaguaaagggaauacugucu

SEQ ID NO: 653037 - RNA, 21 nt, Artificial Sequence
  Synthetic
ggaguaaagggaauacugucu

SEQ ID NO: 653038 - RNA, 22 nt, Artificial Sequence
  Synthetic
uggaguaaagggaauacugucu

SEQ ID NO: 653039 - RNA, 23 nt, Artificial Sequence
  Synthetic
uuggaguaaagggaauacugucu

SEQ ID NO: 653040 - RNA, 24 nt, Artificial Sequence
  Synthetic
guuggaguaaagggaauacugucu

SEQ ID NO: 653041 - RNA, 18 nt, Artificial Sequence
  Synthetic
cgaccccugcuacugucu

SEQ ID NO: 653042 - RNA, 19 nt, Artificial Sequence
  Synthetic
ccgaccccugcuacugucu

SEQ ID NO: 653043 - RNA, 20 nt, Artificial Sequence
  Synthetic
cccgaccccugcuacugucu

SEQ ID NO: 653044 - RNA, 21 nt, Artificial Sequence
  Synthetic
gcccgaccccugcuacugucu

SEQ ID NO: 653045 - RNA, 22 nt, Artificial Sequence
  Synthetic
ugcccgaccccugcuacugucu

SEQ ID NO: 653046 - RNA, 23 nt, Artificial Sequence
  Synthetic
cugcccgaccccugcuacugucu

SEQ ID NO: 653047 - RNA, 24 nt, Artificial Sequence
  Synthetic
ucugcccgaccccugcuacugucu

SEQ ID NO: 653048 - RNA, 18 nt, Artificial Sequence
  Synthetic
cagcuguuauuccugucu

SEQ ID NO: 653049 - RNA, 19 nt, Artificial Sequence
  Synthetic
ucagcuguuauuccugucu

SEQ ID NO: 653050 - RNA, 20 nt, Artificial Sequence
  Synthetic
cucagcuguuauuccugucu

SEQ ID NO: 653051 - RNA, 21 nt, Artificial Sequence
  Synthetic
ccucagcuguuauuccugucu

SEQ ID NO: 653052 - RNA, 22 nt, Artificial Sequence
  Synthetic
uccucagcuguuauuccugucu

SEQ ID NO: 653053 - RNA, 23 nt, Artificial Sequence
  Synthetic
guccucagcuguuauuccugucu

SEQ ID NO: 653054 - RNA, 24 nt, Artificial Sequence
  Synthetic
aguccucagcuguuauuccugucu

SEQ ID NO: 653055 - RNA, 18 nt, Artificial Sequence
  Synthetic
ggggcuucucagcugucu

SEQ ID NO: 653056 - RNA, 19 nt, Artificial Sequence
  Synthetic
uggggcuucucagcugucu

SEQ ID NO: 653057 - RNA, 20 nt, Artificial Sequence
  Synthetic
guggggcuucucagcugucu

SEQ ID NO: 653058 - RNA, 21 nt, Artificial Sequence
  Synthetic
cguggggcuucucagcugucu

SEQ ID NO: 653059 - RNA, 22 nt, Artificial Sequence
  Synthetic
ccguggggcuucucagcugucu

SEQ ID NO: 653060 - RNA, 23 nt, Artificial Sequence
  Synthetic
cccguggggcuucucagcugucu

SEQ ID NO: 653061 - RNA, 24 nt, Artificial Sequence
  Synthetic
ucccguggggcuucucagcugucu

SEQ ID NO: 653062 - RNA, 18 nt, Artificial Sequence
  Synthetic
uccuaugaggugcugucu

SEQ ID NO: 653063 - RNA, 19 nt, Artificial Sequence
  Synthetic
auccuaugaggugcugucu

SEQ ID NO: 653064 - RNA, 20 nt, Artificial Sequence
  Synthetic
cauccuaugaggugcugucu

SEQ ID NO: 653065 - RNA, 21 nt, Artificial Sequence
  Synthetic
ccauccuaugaggugcugucu

SEQ ID NO: 653066 - RNA, 22 nt, Artificial Sequence
  Synthetic
gccauccuaugaggugcugucu

SEQ ID NO: 653067 - RNA, 23 nt, Artificial Sequence
  Synthetic
ggccauccuaugaggugcugucu

SEQ ID NO: 653068 - RNA, 24 nt, Artificial Sequence
  Synthetic
aggccauccuaugaggugcugucu

SEQ ID NO: 653069 - RNA, 18 nt, Artificial Sequence
  Synthetic
aacacaaaggaagugucu

SEQ ID NO: 653070 - RNA, 19 nt, Artificial Sequence
  Synthetic
gaacacaaaggaagugucu

SEQ ID NO: 653071 - RNA, 20 nt, Artificial Sequence
  Synthetic
ugaacacaaaggaagugucu

SEQ ID NO: 653072 - RNA, 21 nt, Artificial Sequence
  Synthetic
uugaacacaaaggaagugucu

SEQ ID NO: 653073 - RNA, 22 nt, Artificial Sequence
  Synthetic
auugaacacaaaggaagugucu

SEQ ID NO: 653074 - RNA, 23 nt, Artificial Sequence
  Synthetic
uauugaacacaaaggaagugucu

SEQ ID NO: 653075 - RNA, 24 nt, Artificial Sequence
  Synthetic
uuauugaacacaaaggaagugucu

SEQ ID NO: 653076 - RNA, 18 nt, Artificial Sequence
  Synthetic
acugaaccuucagugucu

SEQ ID NO: 653077 - RNA, 19 nt, Artificial Sequence
  Synthetic
aacugaaccuucagugucu

SEQ ID NO: 653078 - RNA, 20 nt, Artificial Sequence
  Synthetic
gaacugaaccuucagugucu

SEQ ID NO: 653079 - RNA, 21 nt, Artificial Sequence
  Synthetic
ggaacugaaccuucagugucu

SEQ ID NO: 653080 - RNA, 22 nt, Artificial Sequence
  Synthetic
uggaacugaaccuucagugucu

SEQ ID NO: 653081 - RNA, 23 nt, Artificial Sequence
  Synthetic
cuggaacugaaccuucagugucu

SEQ ID NO: 653082 - RNA, 24 nt, Artificial Sequence
  Synthetic
ucuggaacugaaccuucagugucu

SEQ ID NO: 653083 - RNA, 18 nt, Artificial Sequence
  Synthetic
cuaaacaucugagugucu

SEQ ID NO: 653084 - RNA, 19 nt, Artificial Sequence
  Synthetic
ucuaaacaucugagugucu

SEQ ID NO: 653085 - RNA, 20 nt, Artificial Sequence
  Synthetic
uucuaaacaucugagugucu

SEQ ID NO: 653086 - RNA, 21 nt, Artificial Sequence
  Synthetic
cuucuaaacaucugagugucu

SEQ ID NO: 653087 - RNA, 22 nt, Artificial Sequence
  Synthetic
acuucuaaacaucugagugucu

SEQ ID NO: 653088 - RNA, 23 nt, Artificial Sequence
  Synthetic
cacuucuaaacaucugagugucu

SEQ ID NO: 653089 - RNA, 24 nt, Artificial Sequence
  Synthetic
ccacuucuaaacaucugagugucu

SEQ ID NO: 653090 - RNA, 18 nt, Artificial Sequence
  Synthetic
guaugugugcaugugucu

SEQ ID NO: 653091 - RNA, 19 nt, Artificial Sequence
  Synthetic
uguaugugugcaugugucu

SEQ ID NO: 653092 - RNA, 20 nt, Artificial Sequence
  Synthetic
guguaugugugcaugugucu

SEQ ID NO: 653093 - RNA, 21 nt, Artificial Sequence
  Synthetic
uguguaugugugcaugugucu

SEQ ID NO: 653094 - RNA, 22 nt, Artificial Sequence
  Synthetic
guguguaugugugcaugugucu

SEQ ID NO: 653095 - RNA, 23 nt, Artificial Sequence
  Synthetic
uguguguaugugugcaugugucu

SEQ ID NO: 653096 - RNA, 24 nt, Artificial Sequence
  Synthetic
auguguguaugugugcaugugucu

SEQ ID NO: 653097 - RNA, 18 nt, Artificial Sequence
  Synthetic
gaaacaauauaugugucu

SEQ ID NO: 653098 - RNA, 19 nt, Artificial Sequence
  Synthetic
ugaaacaauauaugugucu

SEQ ID NO: 653099 - RNA, 20 nt, Artificial Sequence
  Synthetic
cugaaacaauauaugugucu

SEQ ID NO: 653100 - RNA, 21 nt, Artificial Sequence
  Synthetic
acugaaacaauauaugugucu

SEQ ID NO: 653101 - RNA, 22 nt, Artificial Sequence
  Synthetic
cacugaaacaauauaugugucu

SEQ ID NO: 653102 - RNA, 23 nt, Artificial Sequence
  Synthetic
ccacugaaacaauauaugugucu

SEQ ID NO: 653103 - RNA, 24 nt, Artificial Sequence
  Synthetic
accacugaaacaauauaugugucu

SEQ ID NO: 653104 - RNA, 18 nt, Artificial Sequence
  Synthetic
aaaguuuaaugugugucu

SEQ ID NO: 653105 - RNA, 19 nt, Artificial Sequence
  Synthetic
gaaaguuuaaugugugucu

SEQ ID NO: 653106 - RNA, 20 nt, Artificial Sequence
  Synthetic
ggaaaguuuaaugugugucu

SEQ ID NO: 653107 - RNA, 21 nt, Artificial Sequence
  Synthetic
aggaaaguuuaaugugugucu

SEQ ID NO: 653108 - RNA, 22 nt, Artificial Sequence
  Synthetic
uaggaaaguuuaaugugugucu

SEQ ID NO: 653109 - RNA, 23 nt, Artificial Sequence
  Synthetic
guaggaaaguuuaaugugugucu

SEQ ID NO: 653110 - RNA, 24 nt, Artificial Sequence
  Synthetic
gguaggaaaguuuaaugugugucu

SEQ ID NO: 653111 - RNA, 21 nt, Artificial Sequence
  Synthetic
aauuucaauauuguugugucu

SEQ ID NO: 653112 - RNA, 22 nt, Artificial Sequence
  Synthetic
uaauuucaauauuguugugucu

SEQ ID NO: 653113 - RNA, 23 nt, Artificial Sequence
  Synthetic
auaauuucaauauuguugugucu

SEQ ID NO: 653114 - RNA, 24 nt, Artificial Sequence
  Synthetic
cauaauuucaauauuguugugucu

SEQ ID NO: 653115 - RNA, 18 nt, Artificial Sequence
  Synthetic
uccuguauuuuugugucu

SEQ ID NO: 653116 - RNA, 19 nt, Artificial Sequence
  Synthetic
auccuguauuuuugugucu

SEQ ID NO: 653117 - RNA, 20 nt, Artificial Sequence
  Synthetic
aauccuguauuuuugugucu

SEQ ID NO: 653118 - RNA, 21 nt, Artificial Sequence
  Synthetic
aaauccuguauuuuugugucu

SEQ ID NO: 653119 - RNA, 22 nt, Artificial Sequence
  Synthetic
uaaauccuguauuuuugugucu

SEQ ID NO: 653120 - RNA, 23 nt, Artificial Sequence
  Synthetic
auaaauccuguauuuuugugucu

SEQ ID NO: 653121 - RNA, 24 nt, Artificial Sequence
  Synthetic
uauaaauccuguauuuuugugucu

SEQ ID NO: 653122 - RNA, 18 nt, Artificial Sequence
  Synthetic
cacagccaaagauugucu

SEQ ID NO: 653123 - RNA, 19 nt, Artificial Sequence
  Synthetic
acacagccaaagauugucu

SEQ ID NO: 653124 - RNA, 20 nt, Artificial Sequence
  Synthetic
aacacagccaaagauugucu

SEQ ID NO: 653125 - RNA, 21 nt, Artificial Sequence
  Synthetic
aaacacagccaaagauugucu

SEQ ID NO: 653126 - RNA, 22 nt, Artificial Sequence
  Synthetic
caaacacagccaaagauugucu

SEQ ID NO: 653127 - RNA, 23 nt, Artificial Sequence
  Synthetic
gcaaacacagccaaagauugucu

SEQ ID NO: 653128 - RNA, 24 nt, Artificial Sequence
  Synthetic
ugcaaacacagccaaagauugucu

SEQ ID NO: 653129 - RNA, 18 nt, Artificial Sequence
  Synthetic
uaauuuaucagauugucu

SEQ ID NO: 653130 - RNA, 19 nt, Artificial Sequence
  Synthetic
auaauuuaucagauugucu

SEQ ID NO: 653131 - RNA, 20 nt, Artificial Sequence
  Synthetic
gauaauuuaucagauugucu

SEQ ID NO: 653132 - RNA, 21 nt, Artificial Sequence
  Synthetic
ugauaauuuaucagauugucu

SEQ ID NO: 653133 - RNA, 22 nt, Artificial Sequence
  Synthetic
cugauaauuuaucagauugucu

SEQ ID NO: 653134 - RNA, 23 nt, Artificial Sequence
  Synthetic
ucugauaauuuaucagauugucu

SEQ ID NO: 653135 - RNA, 24 nt, Artificial Sequence
  Synthetic
aucugauaauuuaucagauugucu

SEQ ID NO: 653136 - RNA, 18 nt, Artificial Sequence
  Synthetic
ccagccacuuccuugucu

SEQ ID NO: 653137 - RNA, 19 nt, Artificial Sequence
  Synthetic
gccagccacuuccuugucu

SEQ ID NO: 653138 - RNA, 20 nt, Artificial Sequence
  Synthetic
ugccagccacuuccuugucu

SEQ ID NO: 653139 - RNA, 21 nt, Artificial Sequence
  Synthetic
cugccagccacuuccuugucu

SEQ ID NO: 653140 - RNA, 22 nt, Artificial Sequence
  Synthetic
acugccagccacuuccuugucu

SEQ ID NO: 653141 - RNA, 23 nt, Artificial Sequence
  Synthetic
cacugccagccacuuccuugucu

SEQ ID NO: 653142 - RNA, 24 nt, Artificial Sequence
  Synthetic
acacugccagccacuuccuugucu

SEQ ID NO: 653143 - RNA, 18 nt, Artificial Sequence
  Synthetic
cuauagcuacucuugucu

SEQ ID NO: 653144 - RNA, 19 nt, Artificial Sequence
  Synthetic
ucuauagcuacucuugucu

SEQ ID NO: 653145 - RNA, 20 nt, Artificial Sequence
  Synthetic
gucuauagcuacucuugucu

SEQ ID NO: 653146 - RNA, 21 nt, Artificial Sequence
  Synthetic
ugucuauagcuacucuugucu

SEQ ID NO: 653147 - RNA, 22 nt, Artificial Sequence
  Synthetic
uugucuauagcuacucuugucu

SEQ ID NO: 653148 - RNA, 23 nt, Artificial Sequence
  Synthetic
guugucuauagcuacucuugucu

SEQ ID NO: 653149 - RNA, 24 nt, Artificial Sequence
  Synthetic
aguugucuauagcuacucuugucu

SEQ ID NO: 653150 - RNA, 18 nt, Artificial Sequence
  Synthetic
auaaaaguggucuugucu

SEQ ID NO: 653151 - RNA, 19 nt, Artificial Sequence
  Synthetic
uauaaaaguggucuugucu

SEQ ID NO: 653152 - RNA, 20 nt, Artificial Sequence
  Synthetic
auauaaaaguggucuugucu

SEQ ID NO: 653153 - RNA, 21 nt, Artificial Sequence
  Synthetic
cauauaaaaguggucuugucu

SEQ ID NO: 653154 - RNA, 22 nt, Artificial Sequence
  Synthetic
ucauauaaaaguggucuugucu

SEQ ID NO: 653155 - RNA, 23 nt, Artificial Sequence
  Synthetic
uucauauaaaaguggucuugucu

SEQ ID NO: 653156 - RNA, 24 nt, Artificial Sequence
  Synthetic
auucauauaaaaguggucuugucu

SEQ ID NO: 653157 - RNA, 18 nt, Artificial Sequence
  Synthetic
uuuucucagcaguugucu

SEQ ID NO: 653158 - RNA, 19 nt, Artificial Sequence
  Synthetic
auuuucucagcaguugucu

SEQ ID NO: 653159 - RNA, 20 nt, Artificial Sequence
  Synthetic
cauuuucucagcaguugucu

SEQ ID NO: 653160 - RNA, 21 nt, Artificial Sequence
  Synthetic
acauuuucucagcaguugucu

SEQ ID NO: 653161 - RNA, 22 nt, Artificial Sequence
  Synthetic
uacauuuucucagcaguugucu

SEQ ID NO: 653162 - RNA, 23 nt, Artificial Sequence
  Synthetic
guacauuuucucagcaguugucu

SEQ ID NO: 653163 - RNA, 24 nt, Artificial Sequence
  Synthetic
uguacauuuucucagcaguugucu

SEQ ID NO: 653164 - RNA, 18 nt, Artificial Sequence
  Synthetic
uauaaaacaauguugucu

SEQ ID NO: 653165 - RNA, 19 nt, Artificial Sequence
  Synthetic
cuauaaaacaauguugucu

SEQ ID NO: 653166 - RNA, 20 nt, Artificial Sequence
  Synthetic
acuauaaaacaauguugucu

SEQ ID NO: 653167 - RNA, 21 nt, Artificial Sequence
  Synthetic
uacuauaaaacaauguugucu

SEQ ID NO: 653168 - RNA, 22 nt, Artificial Sequence
  Synthetic
cuacuauaaaacaauguugucu

SEQ ID NO: 653169 - RNA, 23 nt, Artificial Sequence
  Synthetic
ccuacuauaaaacaauguugucu

SEQ ID NO: 653170 - RNA, 24 nt, Artificial Sequence
  Synthetic
cccuacuauaaaacaauguugucu

SEQ ID NO: 653171 - RNA, 18 nt, Artificial Sequence
  Synthetic
cccuagcuagcuuugucu

SEQ ID NO: 653172 - RNA, 19 nt, Artificial Sequence
  Synthetic
ccccuagcuagcuuugucu

SEQ ID NO: 653173 - RNA, 20 nt, Artificial Sequence
  Synthetic
uccccuagcuagcuuugucu

SEQ ID NO: 653174 - RNA, 21 nt, Artificial Sequence
  Synthetic
cuccccuagcuagcuuugucu

SEQ ID NO: 653175 - RNA, 22 nt, Artificial Sequence
  Synthetic
gcuccccuagcuagcuuugucu

SEQ ID NO: 653176 - RNA, 23 nt, Artificial Sequence
  Synthetic
agcuccccuagcuagcuuugucu

SEQ ID NO: 653177 - RNA, 24 nt, Artificial Sequence
  Synthetic
uagcuccccuagcuagcuuugucu

SEQ ID NO: 653178 - RNA, 18 nt, Artificial Sequence
  Synthetic
aaugaauguauuuugucu

SEQ ID NO: 653179 - RNA, 19 nt, Artificial Sequence
  Synthetic
aaaugaauguauuuugucu

SEQ ID NO: 653180 - RNA, 20 nt, Artificial Sequence
  Synthetic
gaaaugaauguauuuugucu

SEQ ID NO: 653181 - RNA, 21 nt, Artificial Sequence
  Synthetic
ugaaaugaauguauuuugucu

SEQ ID NO: 653182 - RNA, 22 nt, Artificial Sequence
  Synthetic
augaaaugaauguauuuugucu

SEQ ID NO: 653183 - RNA, 23 nt, Artificial Sequence
  Synthetic
gaugaaaugaauguauuuugucu

SEQ ID NO: 653184 - RNA, 24 nt, Artificial Sequence
  Synthetic
ggaugaaaugaauguauuuugucu

SEQ ID NO: 653185 - RNA, 18 nt, Artificial Sequence
  Synthetic
gugugcaacuuuuugucu

SEQ ID NO: 653186 - RNA, 19 nt, Artificial Sequence
  Synthetic
ugugugcaacuuuuugucu

SEQ ID NO: 653187 - RNA, 20 nt, Artificial Sequence
  Synthetic
cugugugcaacuuuuugucu

SEQ ID NO: 653188 - RNA, 21 nt, Artificial Sequence
  Synthetic
ucugugugcaacuuuuugucu

SEQ ID NO: 653189 - RNA, 22 nt, Artificial Sequence
  Synthetic
uucugugugcaacuuuuugucu

SEQ ID NO: 653190 - RNA, 23 nt, Artificial Sequence
  Synthetic
uuucugugugcaacuuuuugucu

SEQ ID NO: 653191 - RNA, 24 nt, Artificial Sequence
  Synthetic
cuuucugugugcaacuuuuugucu

SEQ ID NO: 653192 - RNA, 18 nt, Artificial Sequence
  Synthetic
uacccuggaaaaaauucu

SEQ ID NO: 653193 - RNA, 19 nt, Artificial Sequence
  Synthetic
cuacccuggaaaaaauucu

SEQ ID NO: 653194 - RNA, 20 nt, Artificial Sequence
  Synthetic
ucuacccuggaaaaaauucu

SEQ ID NO: 653195 - RNA, 21 nt, Artificial Sequence
  Synthetic
uucuacccuggaaaaaauucu

SEQ ID NO: 653196 - RNA, 22 nt, Artificial Sequence
  Synthetic
auucuacccuggaaaaaauucu

SEQ ID NO: 653197 - RNA, 23 nt, Artificial Sequence
  Synthetic
uauucuacccuggaaaaaauucu

SEQ ID NO: 653198 - RNA, 24 nt, Artificial Sequence
  Synthetic
auauucuacccuggaaaaaauucu

SEQ ID NO: 653199 - RNA, 18 nt, Artificial Sequence
  Synthetic
gaaguguacaaaaauucu

SEQ ID NO: 653200 - RNA, 19 nt, Artificial Sequence
  Synthetic
ggaaguguacaaaaauucu

SEQ ID NO: 653201 - RNA, 20 nt, Artificial Sequence
  Synthetic
gggaaguguacaaaaauucu

SEQ ID NO: 653202 - RNA, 21 nt, Artificial Sequence
  Synthetic
agggaaguguacaaaaauucu

SEQ ID NO: 653203 - RNA, 22 nt, Artificial Sequence
  Synthetic
aagggaaguguacaaaaauucu

SEQ ID NO: 653204 - RNA, 23 nt, Artificial Sequence
  Synthetic
aaagggaaguguacaaaaauucu

SEQ ID NO: 653205 - RNA, 24 nt, Artificial Sequence
  Synthetic
uaaagggaaguguacaaaaauucu

SEQ ID NO: 653206 - RNA, 18 nt, Artificial Sequence
  Synthetic
ucauuucugccaaauucu

SEQ ID NO: 653207 - RNA, 19 nt, Artificial Sequence
  Synthetic
cucauuucugccaaauucu

SEQ ID NO: 653208 - RNA, 20 nt, Artificial Sequence
  Synthetic
ccucauuucugccaaauucu

SEQ ID NO: 653209 - RNA, 21 nt, Artificial Sequence
  Synthetic
cccucauuucugccaaauucu

SEQ ID NO: 653210 - RNA, 22 nt, Artificial Sequence
  Synthetic
ucccucauuucugccaaauucu

SEQ ID NO: 653211 - RNA, 23 nt, Artificial Sequence
  Synthetic
gucccucauuucugccaaauucu

SEQ ID NO: 653212 - RNA, 24 nt, Artificial Sequence
  Synthetic
agucccucauuucugccaaauucu

SEQ ID NO: 653213 - RNA, 18 nt, Artificial Sequence
  Synthetic
acuaguuauggaaauucu

SEQ ID NO: 653214 - RNA, 19 nt, Artificial Sequence
  Synthetic
aacuaguuauggaaauucu

SEQ ID NO: 653215 - RNA, 20 nt, Artificial Sequence
  Synthetic
aaacuaguuauggaaauucu

SEQ ID NO: 653216 - RNA, 21 nt, Artificial Sequence
  Synthetic
aaaacuaguuauggaaauucu

SEQ ID NO: 653217 - RNA, 22 nt, Artificial Sequence
  Synthetic
caaaacuaguuauggaaauucu

SEQ ID NO: 653218 - RNA, 23 nt, Artificial Sequence
  Synthetic
acaaaacuaguuauggaaauucu

SEQ ID NO: 653219 - RNA, 24 nt, Artificial Sequence
  Synthetic
aacaaaacuaguuauggaaauucu

SEQ ID NO: 653220 - RNA, 18 nt, Artificial Sequence
  Synthetic
uuuuauaucauaaauucu

SEQ ID NO: 653221 - RNA, 19 nt, Artificial Sequence
  Synthetic
cuuuuauaucauaaauucu

SEQ ID NO: 653222 - RNA, 20 nt, Artificial Sequence
  Synthetic
acuuuuauaucauaaauucu

SEQ ID NO: 653223 - RNA, 21 nt, Artificial Sequence
  Synthetic
uacuuuuauaucauaaauucu

SEQ ID NO: 653224 - RNA, 22 nt, Artificial Sequence
  Synthetic
uuacuuuuauaucauaaauucu

SEQ ID NO: 653225 - RNA, 23 nt, Artificial Sequence
  Synthetic
auuacuuuuauaucauaaauucu

SEQ ID NO: 653226 - RNA, 24 nt, Artificial Sequence
  Synthetic
cauuacuuuuauaucauaaauucu

SEQ ID NO: 653227 - RNA, 18 nt, Artificial Sequence
  Synthetic
gguuccacuguaaauucu

SEQ ID NO: 653228 - RNA, 19 nt, Artificial Sequence
  Synthetic
ugguuccacuguaaauucu

SEQ ID NO: 653229 - RNA, 20 nt, Artificial Sequence
  Synthetic
cugguuccacuguaaauucu

SEQ ID NO: 653230 - RNA, 21 nt, Artificial Sequence
  Synthetic
ucugguuccacuguaaauucu

SEQ ID NO: 653231 - RNA, 22 nt, Artificial Sequence
  Synthetic
cucugguuccacuguaaauucu

SEQ ID NO: 653232 - RNA, 23 nt, Artificial Sequence
  Synthetic
gcucugguuccacuguaaauucu

SEQ ID NO: 653233 - RNA, 24 nt, Artificial Sequence
  Synthetic
ggcucugguuccacuguaaauucu

SEQ ID NO: 653234 - RNA, 18 nt, Artificial Sequence
  Synthetic
gcucacauuaacaauucu

SEQ ID NO: 653235 - RNA, 19 nt, Artificial Sequence
  Synthetic
ggcucacauuaacaauucu

SEQ ID NO: 653236 - RNA, 20 nt, Artificial Sequence
  Synthetic
gggcucacauuaacaauucu

SEQ ID NO: 653237 - RNA, 21 nt, Artificial Sequence
  Synthetic
ugggcucacauuaacaauucu

SEQ ID NO: 653238 - RNA, 22 nt, Artificial Sequence
  Synthetic
uugggcucacauuaacaauucu

SEQ ID NO: 653239 - RNA, 23 nt, Artificial Sequence
  Synthetic
auugggcucacauuaacaauucu

SEQ ID NO: 653240 - RNA, 24 nt, Artificial Sequence
  Synthetic
uauugggcucacauuaacaauucu

SEQ ID NO: 653241 - RNA, 18 nt, Artificial Sequence
  Synthetic
uggggagcuaccaauucu

SEQ ID NO: 653242 - RNA, 19 nt, Artificial Sequence
  Synthetic
cuggggagcuaccaauucu

SEQ ID NO: 653243 - RNA, 20 nt, Artificial Sequence
  Synthetic
ucuggggagcuaccaauucu

SEQ ID NO: 653244 - RNA, 21 nt, Artificial Sequence
  Synthetic
cucuggggagcuaccaauucu

SEQ ID NO: 653245 - RNA, 22 nt, Artificial Sequence
  Synthetic
ucucuggggagcuaccaauucu

SEQ ID NO: 653246 - RNA, 23 nt, Artificial Sequence
  Synthetic
gucucuggggagcuaccaauucu

SEQ ID NO: 653247 - RNA, 24 nt, Artificial Sequence
  Synthetic
agucucuggggagcuaccaauucu

SEQ ID NO: 653248 - RNA, 18 nt, Artificial Sequence
  Synthetic
uagcauguucccaauucu

SEQ ID NO: 653249 - RNA, 19 nt, Artificial Sequence
  Synthetic
uuagcauguucccaauucu

SEQ ID NO: 653250 - RNA, 20 nt, Artificial Sequence
  Synthetic
uuuagcauguucccaauucu

SEQ ID NO: 653251 - RNA, 21 nt, Artificial Sequence
  Synthetic
auuuagcauguucccaauucu

SEQ ID NO: 653252 - RNA, 22 nt, Artificial Sequence
  Synthetic
uauuuagcauguucccaauucu

SEQ ID NO: 653253 - RNA, 23 nt, Artificial Sequence
  Synthetic
guauuuagcauguucccaauucu

SEQ ID NO: 653254 - RNA, 24 nt, Artificial Sequence
  Synthetic
uguauuuagcauguucccaauucu

SEQ ID NO: 653255 - RNA, 21 nt, Artificial Sequence
  Synthetic
aaaguaguuuuuuccaauucu

SEQ ID NO: 653256 - RNA, 22 nt, Artificial Sequence
  Synthetic
uaaaguaguuuuuuccaauucu

SEQ ID NO: 653257 - RNA, 23 nt, Artificial Sequence
  Synthetic
uuaaaguaguuuuuuccaauucu

SEQ ID NO: 653258 - RNA, 24 nt, Artificial Sequence
  Synthetic
uuuaaaguaguuuuuuccaauucu

SEQ ID NO: 653259 - RNA, 18 nt, Artificial Sequence
  Synthetic
aauaccucuuucaauucu

SEQ ID NO: 653260 - RNA, 19 nt, Artificial Sequence
  Synthetic
uaauaccucuuucaauucu

SEQ ID NO: 653261 - RNA, 20 nt, Artificial Sequence
  Synthetic
uuaauaccucuuucaauucu

SEQ ID NO: 653262 - RNA, 21 nt, Artificial Sequence
  Synthetic
cuuaauaccucuuucaauucu

SEQ ID NO: 653263 - RNA, 22 nt, Artificial Sequence
  Synthetic
acuuaauaccucuuucaauucu

SEQ ID NO: 653264 - RNA, 23 nt, Artificial Sequence
  Synthetic
aacuuaauaccucuuucaauucu

SEQ ID NO: 653265 - RNA, 24 nt, Artificial Sequence
  Synthetic
uaacuuaauaccucuuucaauucu

SEQ ID NO: 653266 - RNA, 18 nt, Artificial Sequence
  Synthetic
uuguugacaaagaauucu

SEQ ID NO: 653267 - RNA, 19 nt, Artificial Sequence
  Synthetic
uuuguugacaaagaauucu

SEQ ID NO: 653268 - RNA, 20 nt, Artificial Sequence
  Synthetic
cuuuguugacaaagaauucu

SEQ ID NO: 653269 - RNA, 21 nt, Artificial Sequence
  Synthetic
acuuuguugacaaagaauucu

SEQ ID NO: 653270 - RNA, 22 nt, Artificial Sequence
  Synthetic
uacuuuguugacaaagaauucu

SEQ ID NO: 653271 - RNA, 23 nt, Artificial Sequence
  Synthetic
guacuuuguugacaaagaauucu

SEQ ID NO: 653272 - RNA, 24 nt, Artificial Sequence
  Synthetic
aguacuuuguugacaaagaauucu

SEQ ID NO: 653273 - RNA, 18 nt, Artificial Sequence
  Synthetic
cagaaauggaugaauucu

SEQ ID NO: 653274 - RNA, 19 nt, Artificial Sequence
  Synthetic
acagaaauggaugaauucu

SEQ ID NO: 653275 - RNA, 20 nt, Artificial Sequence
  Synthetic
aacagaaauggaugaauucu

SEQ ID NO: 653276 - RNA, 21 nt, Artificial Sequence
  Synthetic
uaacagaaauggaugaauucu

SEQ ID NO: 653277 - RNA, 22 nt, Artificial Sequence
  Synthetic
cuaacagaaauggaugaauucu

SEQ ID NO: 653278 - RNA, 23 nt, Artificial Sequence
  Synthetic
ccuaacagaaauggaugaauucu

SEQ ID NO: 653279 - RNA, 24 nt, Artificial Sequence
  Synthetic
uccuaacagaaauggaugaauucu

SEQ ID NO: 653280 - RNA, 18 nt, Artificial Sequence
  Synthetic
uuuacucagcauaauucu

SEQ ID NO: 653281 - RNA, 19 nt, Artificial Sequence
  Synthetic
uuuuacucagcauaauucu

SEQ ID NO: 653282 - RNA, 20 nt, Artificial Sequence
  Synthetic
uuuuuacucagcauaauucu

SEQ ID NO: 653283 - RNA, 21 nt, Artificial Sequence
  Synthetic
guuuuuacucagcauaauucu

SEQ ID NO: 653284 - RNA, 22 nt, Artificial Sequence
  Synthetic
uguuuuuacucagcauaauucu

SEQ ID NO: 653285 - RNA, 23 nt, Artificial Sequence
  Synthetic
cuguuuuuacucagcauaauucu

SEQ ID NO: 653286 - RNA, 24 nt, Artificial Sequence
  Synthetic
gcuguuuuuacucagcauaauucu

SEQ ID NO: 653287 - RNA, 18 nt, Artificial Sequence
  Synthetic
auaguuuuuuauaauucu

SEQ ID NO: 653288 - RNA, 19 nt, Artificial Sequence
  Synthetic
gauaguuuuuuauaauucu

SEQ ID NO: 653289 - RNA, 20 nt, Artificial Sequence
  Synthetic
ggauaguuuuuuauaauucu

SEQ ID NO: 653290 - RNA, 21 nt, Artificial Sequence
  Synthetic
aggauaguuuuuuauaauucu

SEQ ID NO: 653291 - RNA, 22 nt, Artificial Sequence
  Synthetic
uaggauaguuuuuuauaauucu

SEQ ID NO: 653292 - RNA, 23 nt, Artificial Sequence
  Synthetic
uuaggauaguuuuuuauaauucu

SEQ ID NO: 653293 - RNA, 24 nt, Artificial Sequence
  Synthetic
uuuaggauaguuuuuuauaauucu

SEQ ID NO: 653294 - RNA, 18 nt, Artificial Sequence
  Synthetic
caacuuaaauguaauucu

SEQ ID NO: 653295 - RNA, 19 nt, Artificial Sequence
  Synthetic
acaacuuaaauguaauucu

SEQ ID NO: 653296 - RNA, 20 nt, Artificial Sequence
  Synthetic
aacaacuuaaauguaauucu

SEQ ID NO: 653297 - RNA, 21 nt, Artificial Sequence
  Synthetic
aaacaacuuaaauguaauucu

SEQ ID NO: 653298 - RNA, 22 nt, Artificial Sequence
  Synthetic
gaaacaacuuaaauguaauucu

SEQ ID NO: 653299 - RNA, 23 nt, Artificial Sequence
  Synthetic
ugaaacaacuuaaauguaauucu

SEQ ID NO: 653300 - RNA, 24 nt, Artificial Sequence
  Synthetic
augaaacaacuuaaauguaauucu

SEQ ID NO: 653301 - RNA, 18 nt, Artificial Sequence
  Synthetic
ugcaguaaauuuaauucu

SEQ ID NO: 653302 - RNA, 19 nt, Artificial Sequence
  Synthetic
augcaguaaauuuaauucu

SEQ ID NO: 653303 - RNA, 20 nt, Artificial Sequence
  Synthetic
gaugcaguaaauuuaauucu

SEQ ID NO: 653304 - RNA, 21 nt, Artificial Sequence
  Synthetic
cgaugcaguaaauuuaauucu

SEQ ID NO: 653305 - RNA, 22 nt, Artificial Sequence
  Synthetic
ucgaugcaguaaauuuaauucu

SEQ ID NO: 653306 - RNA, 23 nt, Artificial Sequence
  Synthetic
aucgaugcaguaaauuuaauucu

SEQ ID NO: 653307 - RNA, 24 nt, Artificial Sequence
  Synthetic
caucgaugcaguaaauuuaauucu

SEQ ID NO: 653308 - RNA, 18 nt, Artificial Sequence
  Synthetic
gauucugguuuuaauucu

SEQ ID NO: 653309 - RNA, 19 nt, Artificial Sequence
  Synthetic
agauucugguuuuaauucu

SEQ ID NO: 653310 - RNA, 20 nt, Artificial Sequence
  Synthetic
gagauucugguuuuaauucu

SEQ ID NO: 653311 - RNA, 21 nt, Artificial Sequence
  Synthetic
ugagauucugguuuuaauucu

SEQ ID NO: 653312 - RNA, 22 nt, Artificial Sequence
  Synthetic
uugagauucugguuuuaauucu

SEQ ID NO: 653313 - RNA, 23 nt, Artificial Sequence
  Synthetic
uuugagauucugguuuuaauucu

SEQ ID NO: 653314 - RNA, 24 nt, Artificial Sequence
  Synthetic
uuuugagauucugguuuuaauucu

SEQ ID NO: 653315 - RNA, 18 nt, Artificial Sequence
  Synthetic
cauuuaagacaacauucu

SEQ ID NO: 653316 - RNA, 19 nt, Artificial Sequence
  Synthetic
acauuuaagacaacauucu

SEQ ID NO: 653317 - RNA, 20 nt, Artificial Sequence
  Synthetic
gacauuuaagacaacauucu

SEQ ID NO: 653318 - RNA, 21 nt, Artificial Sequence
  Synthetic
agacauuuaagacaacauucu

SEQ ID NO: 653319 - RNA, 22 nt, Artificial Sequence
  Synthetic
aagacauuuaagacaacauucu

SEQ ID NO: 653320 - RNA, 23 nt, Artificial Sequence
  Synthetic
caagacauuuaagacaacauucu

SEQ ID NO: 653321 - RNA, 24 nt, Artificial Sequence
  Synthetic
ccaagacauuuaagacaacauucu

SEQ ID NO: 653322 - RNA, 18 nt, Artificial Sequence
  Synthetic
ugcagcaaagaacauucu

SEQ ID NO: 653323 - RNA, 19 nt, Artificial Sequence
  Synthetic
augcagcaaagaacauucu

SEQ ID NO: 653324 - RNA, 20 nt, Artificial Sequence
  Synthetic
gaugcagcaaagaacauucu

SEQ ID NO: 653325 - RNA, 21 nt, Artificial Sequence
  Synthetic
agaugcagcaaagaacauucu

SEQ ID NO: 653326 - RNA, 22 nt, Artificial Sequence
  Synthetic
gagaugcagcaaagaacauucu

SEQ ID NO: 653327 - RNA, 23 nt, Artificial Sequence
  Synthetic
agagaugcagcaaagaacauucu

SEQ ID NO: 653328 - RNA, 24 nt, Artificial Sequence
  Synthetic
aagagaugcagcaaagaacauucu

SEQ ID NO: 653329 - RNA, 18 nt, Artificial Sequence
  Synthetic
accucauacuaacauucu

SEQ ID NO: 653330 - RNA, 19 nt, Artificial Sequence
  Synthetic
aaccucauacuaacauucu

SEQ ID NO: 653331 - RNA, 20 nt, Artificial Sequence
  Synthetic
aaaccucauacuaacauucu

SEQ ID NO: 653332 - RNA, 21 nt, Artificial Sequence
  Synthetic
aaaaccucauacuaacauucu

SEQ ID NO: 653333 - RNA, 22 nt, Artificial Sequence
  Synthetic
gaaaaccucauacuaacauucu

SEQ ID NO: 653334 - RNA, 23 nt, Artificial Sequence
  Synthetic
agaaaaccucauacuaacauucu

SEQ ID NO: 653335 - RNA, 24 nt, Artificial Sequence
  Synthetic
aagaaaaccucauacuaacauucu

SEQ ID NO: 653336 - RNA, 18 nt, Artificial Sequence
  Synthetic
ugacaacuuucacauucu

SEQ ID NO: 653337 - RNA, 19 nt, Artificial Sequence
  Synthetic
cugacaacuuucacauucu

SEQ ID NO: 653338 - RNA, 20 nt, Artificial Sequence
  Synthetic
acugacaacuuucacauucu

SEQ ID NO: 653339 - RNA, 21 nt, Artificial Sequence
  Synthetic
gacugacaacuuucacauucu

SEQ ID NO: 653340 - RNA, 22 nt, Artificial Sequence
  Synthetic
agacugacaacuuucacauucu

SEQ ID NO: 653341 - RNA, 23 nt, Artificial Sequence
  Synthetic
uagacugacaacuuucacauucu

SEQ ID NO: 653342 - RNA, 24 nt, Artificial Sequence
  Synthetic
auagacugacaacuuucacauucu

SEQ ID NO: 653343 - RNA, 18 nt, Artificial Sequence
  Synthetic
aggaccauuagacauucu

SEQ ID NO: 653344 - RNA, 19 nt, Artificial Sequence
  Synthetic
gaggaccauuagacauucu

SEQ ID NO: 653345 - RNA, 20 nt, Artificial Sequence
  Synthetic
ugaggaccauuagacauucu

SEQ ID NO: 653346 - RNA, 21 nt, Artificial Sequence
  Synthetic
augaggaccauuagacauucu

SEQ ID NO: 653347 - RNA, 22 nt, Artificial Sequence
  Synthetic
aaugaggaccauuagacauucu

SEQ ID NO: 653348 - RNA, 23 nt, Artificial Sequence
  Synthetic
aaaugaggaccauuagacauucu

SEQ ID NO: 653349 - RNA, 24 nt, Artificial Sequence
  Synthetic
gaaaugaggaccauuagacauucu

SEQ ID NO: 653350 - RNA, 18 nt, Artificial Sequence
  Synthetic
agaugaaaaauacauucu

SEQ ID NO: 653351 - RNA, 19 nt, Artificial Sequence
  Synthetic
aagaugaaaaauacauucu

SEQ ID NO: 653352 - RNA, 20 nt, Artificial Sequence
  Synthetic
gaagaugaaaaauacauucu

SEQ ID NO: 653353 - RNA, 21 nt, Artificial Sequence
  Synthetic
cgaagaugaaaaauacauucu

SEQ ID NO: 653354 - RNA, 22 nt, Artificial Sequence
  Synthetic
acgaagaugaaaaauacauucu

SEQ ID NO: 653355 - RNA, 23 nt, Artificial Sequence
  Synthetic
uacgaagaugaaaaauacauucu

SEQ ID NO: 653356 - RNA, 24 nt, Artificial Sequence
  Synthetic
cuacgaagaugaaaaauacauucu

SEQ ID NO: 653357 - RNA, 18 nt, Artificial Sequence
  Synthetic
augacaggaauacauucu

SEQ ID NO: 653358 - RNA, 19 nt, Artificial Sequence
  Synthetic
aaugacaggaauacauucu

SEQ ID NO: 653359 - RNA, 20 nt, Artificial Sequence
  Synthetic
uaaugacaggaauacauucu

SEQ ID NO: 653360 - RNA, 21 nt, Artificial Sequence
  Synthetic
uuaaugacaggaauacauucu

SEQ ID NO: 653361 - RNA, 22 nt, Artificial Sequence
  Synthetic
cuuaaugacaggaauacauucu

SEQ ID NO: 653362 - RNA, 23 nt, Artificial Sequence
  Synthetic
acuuaaugacaggaauacauucu

SEQ ID NO: 653363 - RNA, 24 nt, Artificial Sequence
  Synthetic
cacuuaaugacaggaauacauucu

SEQ ID NO: 653364 - RNA, 18 nt, Artificial Sequence
  Synthetic
uaaauggauuuacauucu

SEQ ID NO: 653365 - RNA, 19 nt, Artificial Sequence
  Synthetic
uuaaauggauuuacauucu

SEQ ID NO: 653366 - RNA, 20 nt, Artificial Sequence
  Synthetic
guuaaauggauuuacauucu

SEQ ID NO: 653367 - RNA, 21 nt, Artificial Sequence
  Synthetic
uguuaaauggauuuacauucu

SEQ ID NO: 653368 - RNA, 22 nt, Artificial Sequence
  Synthetic
auguuaaauggauuuacauucu

SEQ ID NO: 653369 - RNA, 23 nt, Artificial Sequence
  Synthetic
uauguuaaauggauuuacauucu

SEQ ID NO: 653370 - RNA, 24 nt, Artificial Sequence
  Synthetic
auauguuaaauggauuuacauucu

SEQ ID NO: 653371 - RNA, 18 nt, Artificial Sequence
  Synthetic
aauucauuuuuacauucu

SEQ ID NO: 653372 - RNA, 19 nt, Artificial Sequence
  Synthetic
caauucauuuuuacauucu

SEQ ID NO: 653373 - RNA, 20 nt, Artificial Sequence
  Synthetic
ucaauucauuuuuacauucu

SEQ ID NO: 653374 - RNA, 21 nt, Artificial Sequence
  Synthetic
uucaauucauuuuuacauucu

SEQ ID NO: 653375 - RNA, 22 nt, Artificial Sequence
  Synthetic
cuucaauucauuuuuacauucu

SEQ ID NO: 653376 - RNA, 23 nt, Artificial Sequence
  Synthetic
ccuucaauucauuuuuacauucu

SEQ ID NO: 653377 - RNA, 24 nt, Artificial Sequence
  Synthetic
gccuucaauucauuuuuacauucu

SEQ ID NO: 653378 - RNA, 18 nt, Artificial Sequence
  Synthetic
aauugcccugaccauucu

SEQ ID NO: 653379 - RNA, 19 nt, Artificial Sequence
  Synthetic
aaauugcccugaccauucu

SEQ ID NO: 653380 - RNA, 20 nt, Artificial Sequence
  Synthetic
uaaauugcccugaccauucu

SEQ ID NO: 653381 - RNA, 21 nt, Artificial Sequence
  Synthetic
uuaaauugcccugaccauucu

SEQ ID NO: 653382 - RNA, 22 nt, Artificial Sequence
  Synthetic
guuaaauugcccugaccauucu

SEQ ID NO: 653383 - RNA, 23 nt, Artificial Sequence
  Synthetic
cguuaaauugcccugaccauucu

SEQ ID NO: 653384 - RNA, 24 nt, Artificial Sequence
  Synthetic
ucguuaaauugcccugaccauucu

SEQ ID NO: 653385 - RNA, 18 nt, Artificial Sequence
  Synthetic
gguagaaacaagcauucu

SEQ ID NO: 653386 - RNA, 19 nt, Artificial Sequence
  Synthetic
agguagaaacaagcauucu

SEQ ID NO: 653387 - RNA, 20 nt, Artificial Sequence
  Synthetic
aagguagaaacaagcauucu

SEQ ID NO: 653388 - RNA, 21 nt, Artificial Sequence
  Synthetic
aaagguagaaacaagcauucu

SEQ ID NO: 653389 - RNA, 22 nt, Artificial Sequence
  Synthetic
uaaagguagaaacaagcauucu

SEQ ID NO: 653390 - RNA, 23 nt, Artificial Sequence
  Synthetic
uuaaagguagaaacaagcauucu

SEQ ID NO: 653391 - RNA, 24 nt, Artificial Sequence
  Synthetic
uuuaaagguagaaacaagcauucu

SEQ ID NO: 653392 - RNA, 18 nt, Artificial Sequence
  Synthetic
uuacuauaauagcauucu

SEQ ID NO: 653393 - RNA, 19 nt, Artificial Sequence
  Synthetic
guuacuauaauagcauucu

SEQ ID NO: 653394 - RNA, 20 nt, Artificial Sequence
  Synthetic
uguuacuauaauagcauucu

SEQ ID NO: 653395 - RNA, 21 nt, Artificial Sequence
  Synthetic
guguuacuauaauagcauucu

SEQ ID NO: 653396 - RNA, 22 nt, Artificial Sequence
  Synthetic
aguguuacuauaauagcauucu

SEQ ID NO: 653397 - RNA, 23 nt, Artificial Sequence
  Synthetic
gaguguuacuauaauagcauucu

SEQ ID NO: 653398 - RNA, 24 nt, Artificial Sequence
  Synthetic
agaguguuacuauaauagcauucu

SEQ ID NO: 653399 - RNA, 18 nt, Artificial Sequence
  Synthetic
agcuccuuggugcauucu

SEQ ID NO: 653400 - RNA, 19 nt, Artificial Sequence
  Synthetic
uagcuccuuggugcauucu

SEQ ID NO: 653401 - RNA, 20 nt, Artificial Sequence
  Synthetic
auagcuccuuggugcauucu

SEQ ID NO: 653402 - RNA, 21 nt, Artificial Sequence
  Synthetic
aauagcuccuuggugcauucu

SEQ ID NO: 653403 - RNA, 22 nt, Artificial Sequence
  Synthetic
uaauagcuccuuggugcauucu

SEQ ID NO: 653404 - RNA, 23 nt, Artificial Sequence
  Synthetic
auaauagcuccuuggugcauucu

SEQ ID NO: 653405 - RNA, 24 nt, Artificial Sequence
  Synthetic
gauaauagcuccuuggugcauucu

SEQ ID NO: 653406 - RNA, 18 nt, Artificial Sequence
  Synthetic
uccucccuaaaucauucu

SEQ ID NO: 653407 - RNA, 19 nt, Artificial Sequence
  Synthetic
auccucccuaaaucauucu

SEQ ID NO: 653408 - RNA, 20 nt, Artificial Sequence
  Synthetic
aauccucccuaaaucauucu

SEQ ID NO: 653409 - RNA, 21 nt, Artificial Sequence
  Synthetic
gaauccucccuaaaucauucu

SEQ ID NO: 653410 - RNA, 22 nt, Artificial Sequence
  Synthetic
ggaauccucccuaaaucauucu

SEQ ID NO: 653411 - RNA, 23 nt, Artificial Sequence
  Synthetic
gggaauccucccuaaaucauucu

SEQ ID NO: 653412 - RNA, 24 nt, Artificial Sequence
  Synthetic
agggaauccucccuaaaucauucu

SEQ ID NO: 653413 - RNA, 18 nt, Artificial Sequence
  Synthetic
aaccccaugccucauucu

SEQ ID NO: 653414 - RNA, 19 nt, Artificial Sequence
  Synthetic
caaccccaugccucauucu

SEQ ID NO: 653415 - RNA, 20 nt, Artificial Sequence
  Synthetic
ucaaccccaugccucauucu

SEQ ID NO: 653416 - RNA, 21 nt, Artificial Sequence
  Synthetic
uucaaccccaugccucauucu

SEQ ID NO: 653417 - RNA, 22 nt, Artificial Sequence
  Synthetic
auucaaccccaugccucauucu

SEQ ID NO: 653418 - RNA, 23 nt, Artificial Sequence
  Synthetic
gauucaaccccaugccucauucu

SEQ ID NO: 653419 - RNA, 24 nt, Artificial Sequence
  Synthetic
ugauucaaccccaugccucauucu

SEQ ID NO: 653420 - RNA, 18 nt, Artificial Sequence
  Synthetic
gguacauuuccucauucu

SEQ ID NO: 653421 - RNA, 19 nt, Artificial Sequence
  Synthetic
agguacauuuccucauucu

SEQ ID NO: 653422 - RNA, 20 nt, Artificial Sequence
  Synthetic
aagguacauuuccucauucu

SEQ ID NO: 653423 - RNA, 21 nt, Artificial Sequence
  Synthetic
uaagguacauuuccucauucu

SEQ ID NO: 653424 - RNA, 22 nt, Artificial Sequence
  Synthetic
cuaagguacauuuccucauucu

SEQ ID NO: 653425 - RNA, 23 nt, Artificial Sequence
  Synthetic
gcuaagguacauuuccucauucu

SEQ ID NO: 653426 - RNA, 24 nt, Artificial Sequence
  Synthetic
ugcuaagguacauuuccucauucu

SEQ ID NO: 653427 - RNA, 18 nt, Artificial Sequence
  Synthetic
ugaagcaucucucauucu

SEQ ID NO: 653428 - RNA, 19 nt, Artificial Sequence
  Synthetic
cugaagcaucucucauucu

SEQ ID NO: 653429 - RNA, 20 nt, Artificial Sequence
  Synthetic
ucugaagcaucucucauucu

SEQ ID NO: 653430 - RNA, 21 nt, Artificial Sequence
  Synthetic
uucugaagcaucucucauucu

SEQ ID NO: 653431 - RNA, 22 nt, Artificial Sequence
  Synthetic
uuucugaagcaucucucauucu

SEQ ID NO: 653432 - RNA, 23 nt, Artificial Sequence
  Synthetic
auuucugaagcaucucucauucu

SEQ ID NO: 653433 - RNA, 24 nt, Artificial Sequence
  Synthetic
aauuucugaagcaucucucauucu

SEQ ID NO: 653434 - RNA, 18 nt, Artificial Sequence
  Synthetic
auguuguugauagauucu

SEQ ID NO: 653435 - RNA, 19 nt, Artificial Sequence
  Synthetic
aauguuguugauagauucu

SEQ ID NO: 653436 - RNA, 20 nt, Artificial Sequence
  Synthetic
uaauguuguugauagauucu

SEQ ID NO: 653437 - RNA, 21 nt, Artificial Sequence
  Synthetic
uuaauguuguugauagauucu

SEQ ID NO: 653438 - RNA, 22 nt, Artificial Sequence
  Synthetic
auuaauguuguugauagauucu

SEQ ID NO: 653439 - RNA, 23 nt, Artificial Sequence
  Synthetic
aauuaauguuguugauagauucu

SEQ ID NO: 653440 - RNA, 24 nt, Artificial Sequence
  Synthetic
caauuaauguuguugauagauucu

SEQ ID NO: 653441 - RNA, 18 nt, Artificial Sequence
  Synthetic
aaaucaugucuagauucu

SEQ ID NO: 653442 - RNA, 19 nt, Artificial Sequence
  Synthetic
gaaaucaugucuagauucu

SEQ ID NO: 653443 - RNA, 20 nt, Artificial Sequence
  Synthetic
ugaaaucaugucuagauucu

SEQ ID NO: 653444 - RNA, 21 nt, Artificial Sequence
  Synthetic
uugaaaucaugucuagauucu

SEQ ID NO: 653445 - RNA, 22 nt, Artificial Sequence
  Synthetic
uuugaaaucaugucuagauucu

SEQ ID NO: 653446 - RNA, 23 nt, Artificial Sequence
  Synthetic
auuugaaaucaugucuagauucu

SEQ ID NO: 653447 - RNA, 24 nt, Artificial Sequence
  Synthetic
aauuugaaaucaugucuagauucu

SEQ ID NO: 653448 - RNA, 18 nt, Artificial Sequence
  Synthetic
acaaaugaagccgauucu

SEQ ID NO: 653449 - RNA, 19 nt, Artificial Sequence
  Synthetic
cacaaaugaagccgauucu

SEQ ID NO: 653450 - RNA, 20 nt, Artificial Sequence
  Synthetic
gcacaaaugaagccgauucu

SEQ ID NO: 653451 - RNA, 21 nt, Artificial Sequence
  Synthetic
ggcacaaaugaagccgauucu

SEQ ID NO: 653452 - RNA, 22 nt, Artificial Sequence
  Synthetic
uggcacaaaugaagccgauucu

SEQ ID NO: 653453 - RNA, 23 nt, Artificial Sequence
  Synthetic
auggcacaaaugaagccgauucu

SEQ ID NO: 653454 - RNA, 24 nt, Artificial Sequence
  Synthetic
cauggcacaaaugaagccgauucu

SEQ ID NO: 653455 - RNA, 18 nt, Artificial Sequence
  Synthetic
cuacccuaaugggauucu

SEQ ID NO: 653456 - RNA, 19 nt, Artificial Sequence
  Synthetic
ccuacccuaaugggauucu

SEQ ID NO: 653457 - RNA, 20 nt, Artificial Sequence
  Synthetic
uccuacccuaaugggauucu

SEQ ID NO: 653458 - RNA, 21 nt, Artificial Sequence
  Synthetic
auccuacccuaaugggauucu

SEQ ID NO: 653459 - RNA, 22 nt, Artificial Sequence
  Synthetic
uauccuacccuaaugggauucu

SEQ ID NO: 653460 - RNA, 23 nt, Artificial Sequence
  Synthetic
auauccuacccuaaugggauucu

SEQ ID NO: 653461 - RNA, 24 nt, Artificial Sequence
  Synthetic
cauauccuacccuaaugggauucu

SEQ ID NO: 653462 - RNA, 18 nt, Artificial Sequence
  Synthetic
aauacacuacuggauucu

SEQ ID NO: 653463 - RNA, 19 nt, Artificial Sequence
  Synthetic
caauacacuacuggauucu

SEQ ID NO: 653464 - RNA, 20 nt, Artificial Sequence
  Synthetic
ucaauacacuacuggauucu

SEQ ID NO: 653465 - RNA, 21 nt, Artificial Sequence
  Synthetic
uucaauacacuacuggauucu

SEQ ID NO: 653466 - RNA, 22 nt, Artificial Sequence
  Synthetic
auucaauacacuacuggauucu

SEQ ID NO: 653467 - RNA, 23 nt, Artificial Sequence
  Synthetic
aauucaauacacuacuggauucu

SEQ ID NO: 653468 - RNA, 24 nt, Artificial Sequence
  Synthetic
caauucaauacacuacuggauucu

SEQ ID NO: 653469 - RNA, 18 nt, Artificial Sequence
  Synthetic
auucuuucugaugauucu

SEQ ID NO: 653470 - RNA, 19 nt, Artificial Sequence
  Synthetic
uauucuuucugaugauucu

SEQ ID NO: 653471 - RNA, 20 nt, Artificial Sequence
  Synthetic
uuauucuuucugaugauucu

SEQ ID NO: 653472 - RNA, 21 nt, Artificial Sequence
  Synthetic
uuuauucuuucugaugauucu

SEQ ID NO: 653473 - RNA, 22 nt, Artificial Sequence
  Synthetic
cuuuauucuuucugaugauucu

SEQ ID NO: 653474 - RNA, 23 nt, Artificial Sequence
  Synthetic
gcuuuauucuuucugaugauucu

SEQ ID NO: 653475 - RNA, 24 nt, Artificial Sequence
  Synthetic
ugcuuuauucuuucugaugauucu

SEQ ID NO: 653476 - RNA, 18 nt, Artificial Sequence
  Synthetic
ucccauuuuacugauucu

SEQ ID NO: 653477 - RNA, 19 nt, Artificial Sequence
  Synthetic
gucccauuuuacugauucu

SEQ ID NO: 653478 - RNA, 20 nt, Artificial Sequence
  Synthetic
ugucccauuuuacugauucu

SEQ ID NO: 653479 - RNA, 21 nt, Artificial Sequence
  Synthetic
gugucccauuuuacugauucu

SEQ ID NO: 653480 - RNA, 22 nt, Artificial Sequence
  Synthetic
ugugucccauuuuacugauucu

SEQ ID NO: 653481 - RNA, 23 nt, Artificial Sequence
  Synthetic
gugugucccauuuuacugauucu

SEQ ID NO: 653482 - RNA, 24 nt, Artificial Sequence
  Synthetic
agugugucccauuuuacugauucu

SEQ ID NO: 653483 - RNA, 18 nt, Artificial Sequence
  Synthetic
gcuggagagauugauucu

SEQ ID NO: 653484 - RNA, 19 nt, Artificial Sequence
  Synthetic
ggcuggagagauugauucu

SEQ ID NO: 653485 - RNA, 20 nt, Artificial Sequence
  Synthetic
gggcuggagagauugauucu

SEQ ID NO: 653486 - RNA, 21 nt, Artificial Sequence
  Synthetic
agggcuggagagauugauucu

SEQ ID NO: 653487 - RNA, 22 nt, Artificial Sequence
  Synthetic
uagggcuggagagauugauucu

SEQ ID NO: 653488 - RNA, 23 nt, Artificial Sequence
  Synthetic
uuagggcuggagagauugauucu

SEQ ID NO: 653489 - RNA, 24 nt, Artificial Sequence
  Synthetic
uuuagggcuggagagauugauucu

SEQ ID NO: 653490 - RNA, 18 nt, Artificial Sequence
  Synthetic
uucuguaguauugauucu

SEQ ID NO: 653491 - RNA, 19 nt, Artificial Sequence
  Synthetic
uuucuguaguauugauucu

SEQ ID NO: 653492 - RNA, 20 nt, Artificial Sequence
  Synthetic
auuucuguaguauugauucu

SEQ ID NO: 653493 - RNA, 21 nt, Artificial Sequence
  Synthetic
uauuucuguaguauugauucu

SEQ ID NO: 653494 - RNA, 22 nt, Artificial Sequence
  Synthetic
uuauuucuguaguauugauucu

SEQ ID NO: 653495 - RNA, 23 nt, Artificial Sequence
  Synthetic
uuuauuucuguaguauugauucu

SEQ ID NO: 653496 - RNA, 24 nt, Artificial Sequence
  Synthetic
uuuuauuucuguaguauugauucu

SEQ ID NO: 653497 - RNA, 18 nt, Artificial Sequence
  Synthetic
aaacaaaauguugauucu

SEQ ID NO: 653498 - RNA, 19 nt, Artificial Sequence
  Synthetic
gaaacaaaauguugauucu

SEQ ID NO: 653499 - RNA, 20 nt, Artificial Sequence
  Synthetic
ugaaacaaaauguugauucu

SEQ ID NO: 653500 - RNA, 21 nt, Artificial Sequence
  Synthetic
augaaacaaaauguugauucu

SEQ ID NO: 653501 - RNA, 22 nt, Artificial Sequence
  Synthetic
aaugaaacaaaauguugauucu

SEQ ID NO: 653502 - RNA, 23 nt, Artificial Sequence
  Synthetic
caaugaaacaaaauguugauucu

SEQ ID NO: 653503 - RNA, 24 nt, Artificial Sequence
  Synthetic
ucaaugaaacaaaauguugauucu

SEQ ID NO: 653504 - RNA, 18 nt, Artificial Sequence
  Synthetic
cuaaaaauuaaauauucu

SEQ ID NO: 653505 - RNA, 19 nt, Artificial Sequence
  Synthetic
acuaaaaauuaaauauucu

SEQ ID NO: 653506 - RNA, 20 nt, Artificial Sequence
  Synthetic
cacuaaaaauuaaauauucu

SEQ ID NO: 653507 - RNA, 21 nt, Artificial Sequence
  Synthetic
acacuaaaaauuaaauauucu

SEQ ID NO: 653508 - RNA, 22 nt, Artificial Sequence
  Synthetic
aacacuaaaaauuaaauauucu

SEQ ID NO: 653509 - RNA, 23 nt, Artificial Sequence
  Synthetic
aaacacuaaaaauuaaauauucu

SEQ ID NO: 653510 - RNA, 24 nt, Artificial Sequence
  Synthetic
uaaacacuaaaaauuaaauauucu

SEQ ID NO: 653511 - RNA, 18 nt, Artificial Sequence
  Synthetic
aaggaagggacauauucu

SEQ ID NO: 653512 - RNA, 19 nt, Artificial Sequence
  Synthetic
aaaggaagggacauauucu

SEQ ID NO: 653513 - RNA, 20 nt, Artificial Sequence
  Synthetic
uaaaggaagggacauauucu

SEQ ID NO: 653514 - RNA, 21 nt, Artificial Sequence
  Synthetic
uuaaaggaagggacauauucu

SEQ ID NO: 653515 - RNA, 22 nt, Artificial Sequence
  Synthetic
uuuaaaggaagggacauauucu

SEQ ID NO: 653516 - RNA, 23 nt, Artificial Sequence
  Synthetic
uuuuaaaggaagggacauauucu

SEQ ID NO: 653517 - RNA, 24 nt, Artificial Sequence
  Synthetic
cuuuuaaaggaagggacauauucu

SEQ ID NO: 653518 - RNA, 18 nt, Artificial Sequence
  Synthetic
cuggaccaauuauauucu

SEQ ID NO: 653519 - RNA, 19 nt, Artificial Sequence
  Synthetic
ccuggaccaauuauauucu

SEQ ID NO: 653520 - RNA, 20 nt, Artificial Sequence
  Synthetic
cccuggaccaauuauauucu

SEQ ID NO: 653521 - RNA, 21 nt, Artificial Sequence
  Synthetic
gcccuggaccaauuauauucu

SEQ ID NO: 653522 - RNA, 22 nt, Artificial Sequence
  Synthetic
ggcccuggaccaauuauauucu

SEQ ID NO: 653523 - RNA, 23 nt, Artificial Sequence
  Synthetic
uggcccuggaccaauuauauucu

SEQ ID NO: 653524 - RNA, 24 nt, Artificial Sequence
  Synthetic
cuggcccuggaccaauuauauucu

SEQ ID NO: 653525 - RNA, 18 nt, Artificial Sequence
  Synthetic
aaaauaguuuuauauucu

SEQ ID NO: 653526 - RNA, 19 nt, Artificial Sequence
  Synthetic
caaaauaguuuuauauucu

SEQ ID NO: 653527 - RNA, 20 nt, Artificial Sequence
  Synthetic
ccaaaauaguuuuauauucu

SEQ ID NO: 653528 - RNA, 21 nt, Artificial Sequence
  Synthetic
gccaaaauaguuuuauauucu

SEQ ID NO: 653529 - RNA, 22 nt, Artificial Sequence
  Synthetic
ugccaaaauaguuuuauauucu

SEQ ID NO: 653530 - RNA, 23 nt, Artificial Sequence
  Synthetic
gugccaaaauaguuuuauauucu

SEQ ID NO: 653531 - RNA, 24 nt, Artificial Sequence
  Synthetic
ggugccaaaauaguuuuauauucu

SEQ ID NO: 653532 - RNA, 18 nt, Artificial Sequence
  Synthetic
agcacuaggcacuauucu

SEQ ID NO: 653533 - RNA, 19 nt, Artificial Sequence
  Synthetic
cagcacuaggcacuauucu

SEQ ID NO: 653534 - RNA, 20 nt, Artificial Sequence
  Synthetic
ucagcacuaggcacuauucu

SEQ ID NO: 653535 - RNA, 21 nt, Artificial Sequence
  Synthetic
uucagcacuaggcacuauucu

SEQ ID NO: 653536 - RNA, 22 nt, Artificial Sequence
  Synthetic
uuucagcacuaggcacuauucu

SEQ ID NO: 653537 - RNA, 23 nt, Artificial Sequence
  Synthetic
uuuucagcacuaggcacuauucu

SEQ ID NO: 653538 - RNA, 24 nt, Artificial Sequence
  Synthetic
uuuuucagcacuaggcacuauucu

SEQ ID NO: 653539 - RNA, 18 nt, Artificial Sequence
  Synthetic
acaccuacauccuauucu

SEQ ID NO: 653540 - RNA, 19 nt, Artificial Sequence
  Synthetic
cacaccuacauccuauucu

SEQ ID NO: 653541 - RNA, 20 nt, Artificial Sequence
  Synthetic
acacaccuacauccuauucu

SEQ ID NO: 653542 - RNA, 21 nt, Artificial Sequence
  Synthetic
cacacaccuacauccuauucu

SEQ ID NO: 653543 - RNA, 22 nt, Artificial Sequence
  Synthetic
acacacaccuacauccuauucu

SEQ ID NO: 653544 - RNA, 23 nt, Artificial Sequence
  Synthetic
cacacacaccuacauccuauucu

SEQ ID NO: 653545 - RNA, 24 nt, Artificial Sequence
  Synthetic
acacacacaccuacauccuauucu

SEQ ID NO: 653546 - RNA, 18 nt, Artificial Sequence
  Synthetic
uguuuguaaagcuauucu

SEQ ID NO: 653547 - RNA, 19 nt, Artificial Sequence
  Synthetic
guguuuguaaagcuauucu

SEQ ID NO: 653548 - RNA, 20 nt, Artificial Sequence
  Synthetic
uguguuuguaaagcuauucu

SEQ ID NO: 653549 - RNA, 21 nt, Artificial Sequence
  Synthetic
cuguguuuguaaagcuauucu

SEQ ID NO: 653550 - RNA, 22 nt, Artificial Sequence
  Synthetic
gcuguguuuguaaagcuauucu

SEQ ID NO: 653551 - RNA, 23 nt, Artificial Sequence
  Synthetic
cgcuguguuuguaaagcuauucu

SEQ ID NO: 653552 - RNA, 24 nt, Artificial Sequence
  Synthetic
gcgcuguguuuguaaagcuauucu

SEQ ID NO: 653553 - RNA, 18 nt, Artificial Sequence
  Synthetic
auacuauaaaucuauucu

SEQ ID NO: 653554 - RNA, 19 nt, Artificial Sequence
  Synthetic
aauacuauaaaucuauucu

SEQ ID NO: 653555 - RNA, 20 nt, Artificial Sequence
  Synthetic
aaauacuauaaaucuauucu

SEQ ID NO: 653556 - RNA, 21 nt, Artificial Sequence
  Synthetic
aaaauacuauaaaucuauucu

SEQ ID NO: 653557 - RNA, 22 nt, Artificial Sequence
  Synthetic
uaaaauacuauaaaucuauucu

SEQ ID NO: 653558 - RNA, 23 nt, Artificial Sequence
  Synthetic
cuaaaauacuauaaaucuauucu

SEQ ID NO: 653559 - RNA, 24 nt, Artificial Sequence
  Synthetic
ccuaaaauacuauaaaucuauucu

SEQ ID NO: 653560 - RNA, 18 nt, Artificial Sequence
  Synthetic
guaaggaaggucuauucu

SEQ ID NO: 653561 - RNA, 19 nt, Artificial Sequence
  Synthetic
aguaaggaaggucuauucu

SEQ ID NO: 653562 - RNA, 20 nt, Artificial Sequence
  Synthetic
gaguaaggaaggucuauucu

SEQ ID NO: 653563 - RNA, 21 nt, Artificial Sequence
  Synthetic
ugaguaaggaaggucuauucu

SEQ ID NO: 653564 - RNA, 22 nt, Artificial Sequence
  Synthetic
cugaguaaggaaggucuauucu

SEQ ID NO: 653565 - RNA, 23 nt, Artificial Sequence
  Synthetic
acugaguaaggaaggucuauucu

SEQ ID NO: 653566 - RNA, 24 nt, Artificial Sequence
  Synthetic
aacugaguaaggaaggucuauucu

SEQ ID NO: 653567 - RNA, 18 nt, Artificial Sequence
  Synthetic
uuaaaaagaaaguauucu

SEQ ID NO: 653568 - RNA, 19 nt, Artificial Sequence
  Synthetic
cuuaaaaagaaaguauucu

SEQ ID NO: 653569 - RNA, 20 nt, Artificial Sequence
  Synthetic
ccuuaaaaagaaaguauucu

SEQ ID NO: 653570 - RNA, 21 nt, Artificial Sequence
  Synthetic
gccuuaaaaagaaaguauucu

SEQ ID NO: 653571 - RNA, 22 nt, Artificial Sequence
  Synthetic
ugccuuaaaaagaaaguauucu

SEQ ID NO: 653572 - RNA, 23 nt, Artificial Sequence
  Synthetic
uugccuuaaaaagaaaguauucu

SEQ ID NO: 653573 - RNA, 24 nt, Artificial Sequence
  Synthetic
uuugccuuaaaaagaaaguauucu

SEQ ID NO: 653574 - RNA, 18 nt, Artificial Sequence
  Synthetic
uuauggaaccuguauucu

SEQ ID NO: 653575 - RNA, 19 nt, Artificial Sequence
  Synthetic
guuauggaaccuguauucu

SEQ ID NO: 653576 - RNA, 20 nt, Artificial Sequence
  Synthetic
aguuauggaaccuguauucu

SEQ ID NO: 653577 - RNA, 21 nt, Artificial Sequence
  Synthetic
aaguuauggaaccuguauucu

SEQ ID NO: 653578 - RNA, 22 nt, Artificial Sequence
  Synthetic
uaaguuauggaaccuguauucu

SEQ ID NO: 653579 - RNA, 23 nt, Artificial Sequence
  Synthetic
guaaguuauggaaccuguauucu

SEQ ID NO: 653580 - RNA, 24 nt, Artificial Sequence
  Synthetic
aguaaguuauggaaccuguauucu

SEQ ID NO: 653581 - RNA, 18 nt, Artificial Sequence
  Synthetic
aaacaaagauuguauucu

SEQ ID NO: 653582 - RNA, 19 nt, Artificial Sequence
  Synthetic
aaaacaaagauuguauucu

SEQ ID NO: 653583 - RNA, 20 nt, Artificial Sequence
  Synthetic
gaaaacaaagauuguauucu

SEQ ID NO: 653584 - RNA, 21 nt, Artificial Sequence
  Synthetic
ugaaaacaaagauuguauucu

SEQ ID NO: 653585 - RNA, 22 nt, Artificial Sequence
  Synthetic
uugaaaacaaagauuguauucu

SEQ ID NO: 653586 - RNA, 23 nt, Artificial Sequence
  Synthetic
uuugaaaacaaagauuguauucu

SEQ ID NO: 653587 - RNA, 24 nt, Artificial Sequence
  Synthetic
cuuugaaaacaaagauuguauucu

SEQ ID NO: 653588 - RNA, 18 nt, Artificial Sequence
  Synthetic
uuuagacaacauuauucu

SEQ ID NO: 653589 - RNA, 19 nt, Artificial Sequence
  Synthetic
auuuagacaacauuauucu

SEQ ID NO: 653590 - RNA, 20 nt, Artificial Sequence
  Synthetic
cauuuagacaacauuauucu

SEQ ID NO: 653591 - RNA, 21 nt, Artificial Sequence
  Synthetic
gcauuuagacaacauuauucu

SEQ ID NO: 653592 - RNA, 22 nt, Artificial Sequence
  Synthetic
ggcauuuagacaacauuauucu

SEQ ID NO: 653593 - RNA, 23 nt, Artificial Sequence
  Synthetic
uggcauuuagacaacauuauucu

SEQ ID NO: 653594 - RNA, 24 nt, Artificial Sequence
  Synthetic
auggcauuuagacaacauuauucu

SEQ ID NO: 653595 - RNA, 18 nt, Artificial Sequence
  Synthetic
aauaaaauauauuauucu

SEQ ID NO: 653596 - RNA, 19 nt, Artificial Sequence
  Synthetic
aaauaaaauauauuauucu

SEQ ID NO: 653597 - RNA, 20 nt, Artificial Sequence
  Synthetic
aaaauaaaauauauuauucu

SEQ ID NO: 653598 - RNA, 21 nt, Artificial Sequence
  Synthetic
gaaaauaaaauauauuauucu

SEQ ID NO: 653599 - RNA, 22 nt, Artificial Sequence
  Synthetic
agaaaauaaaauauauuauucu

SEQ ID NO: 653600 - RNA, 23 nt, Artificial Sequence
  Synthetic
gagaaaauaaaauauauuauucu

SEQ ID NO: 653601 - RNA, 24 nt, Artificial Sequence
  Synthetic
agagaaaauaaaauauauuauucu

SEQ ID NO: 653602 - RNA, 18 nt, Artificial Sequence
  Synthetic
aaauaaauagguuauucu

SEQ ID NO: 653603 - RNA, 19 nt, Artificial Sequence
  Synthetic
gaaauaaauagguuauucu

SEQ ID NO: 653604 - RNA, 20 nt, Artificial Sequence
  Synthetic
ugaaauaaauagguuauucu

SEQ ID NO: 653605 - RNA, 21 nt, Artificial Sequence
  Synthetic
cugaaauaaauagguuauucu

SEQ ID NO: 653606 - RNA, 22 nt, Artificial Sequence
  Synthetic
acugaaauaaauagguuauucu

SEQ ID NO: 653607 - RNA, 23 nt, Artificial Sequence
  Synthetic
uacugaaauaaauagguuauucu

SEQ ID NO: 653608 - RNA, 24 nt, Artificial Sequence
  Synthetic
auacugaaauaaauagguuauucu

SEQ ID NO: 653609 - RNA, 18 nt, Artificial Sequence
  Synthetic
ucaugguuguuuuauucu

SEQ ID NO: 653610 - RNA, 19 nt, Artificial Sequence
  Synthetic
cucaugguuguuuuauucu

SEQ ID NO: 653611 - RNA, 20 nt, Artificial Sequence
  Synthetic
ccucaugguuguuuuauucu

SEQ ID NO: 653612 - RNA, 21 nt, Artificial Sequence
  Synthetic
accucaugguuguuuuauucu

SEQ ID NO: 653613 - RNA, 22 nt, Artificial Sequence
  Synthetic
aaccucaugguuguuuuauucu

SEQ ID NO: 653614 - RNA, 23 nt, Artificial Sequence
  Synthetic
aaaccucaugguuguuuuauucu

SEQ ID NO: 653615 - RNA, 24 nt, Artificial Sequence
  Synthetic
caaaccucaugguuguuuuauucu

SEQ ID NO: 653616 - RNA, 18 nt, Artificial Sequence
  Synthetic
uaaauuaaaaaaacuucu

SEQ ID NO: 653617 - RNA, 19 nt, Artificial Sequence
  Synthetic
auaaauuaaaaaaacuucu

SEQ ID NO: 653618 - RNA, 20 nt, Artificial Sequence
  Synthetic
aauaaauuaaaaaaacuucu

SEQ ID NO: 653619 - RNA, 21 nt, Artificial Sequence
  Synthetic
caauaaauuaaaaaaacuucu

SEQ ID NO: 653620 - RNA, 22 nt, Artificial Sequence
  Synthetic
acaauaaauuaaaaaaacuucu

SEQ ID NO: 653621 - RNA, 23 nt, Artificial Sequence
  Synthetic
uacaauaaauuaaaaaaacuucu

SEQ ID NO: 653622 - RNA, 24 nt, Artificial Sequence
  Synthetic
auacaauaaauuaaaaaaacuucu

SEQ ID NO: 653623 - RNA, 18 nt, Artificial Sequence
  Synthetic
auaaaagcagaaacuucu

SEQ ID NO: 653624 - RNA, 19 nt, Artificial Sequence
  Synthetic
aauaaaagcagaaacuucu

SEQ ID NO: 653625 - RNA, 20 nt, Artificial Sequence
  Synthetic
aaauaaaagcagaaacuucu

SEQ ID NO: 653626 - RNA, 21 nt, Artificial Sequence
  Synthetic
uaaauaaaagcagaaacuucu

SEQ ID NO: 653627 - RNA, 22 nt, Artificial Sequence
  Synthetic
cuaaauaaaagcagaaacuucu

SEQ ID NO: 653628 - RNA, 23 nt, Artificial Sequence
  Synthetic
ucuaaauaaaagcagaaacuucu

SEQ ID NO: 653629 - RNA, 24 nt, Artificial Sequence
  Synthetic
gucuaaauaaaagcagaaacuucu

SEQ ID NO: 653630 - RNA, 18 nt, Artificial Sequence
  Synthetic
guacugguauaaacuucu

SEQ ID NO: 653631 - RNA, 19 nt, Artificial Sequence
  Synthetic
uguacugguauaaacuucu

SEQ ID NO: 653632 - RNA, 20 nt, Artificial Sequence
  Synthetic
auguacugguauaaacuucu

SEQ ID NO: 653633 - RNA, 21 nt, Artificial Sequence
  Synthetic
cauguacugguauaaacuucu

SEQ ID NO: 653634 - RNA, 22 nt, Artificial Sequence
  Synthetic
acauguacugguauaaacuucu

SEQ ID NO: 653635 - RNA, 23 nt, Artificial Sequence
  Synthetic
aacauguacugguauaaacuucu

SEQ ID NO: 653636 - RNA, 24 nt, Artificial Sequence
  Synthetic
uaacauguacugguauaaacuucu

SEQ ID NO: 653637 - RNA, 18 nt, Artificial Sequence
  Synthetic
gaaguacaaggaacuucu

SEQ ID NO: 653638 - RNA, 19 nt, Artificial Sequence
  Synthetic
ggaaguacaaggaacuucu

SEQ ID NO: 653639 - RNA, 20 nt, Artificial Sequence
  Synthetic
aggaaguacaaggaacuucu

SEQ ID NO: 653640 - RNA, 21 nt, Artificial Sequence
  Synthetic
gaggaaguacaaggaacuucu

SEQ ID NO: 653641 - RNA, 22 nt, Artificial Sequence
  Synthetic
agaggaaguacaaggaacuucu

SEQ ID NO: 653642 - RNA, 23 nt, Artificial Sequence
  Synthetic
aagaggaaguacaaggaacuucu

SEQ ID NO: 653643 - RNA, 24 nt, Artificial Sequence
  Synthetic
aaagaggaaguacaaggaacuucu

SEQ ID NO: 653644 - RNA, 18 nt, Artificial Sequence
  Synthetic
caaggggaaaugacuucu

SEQ ID NO: 653645 - RNA, 19 nt, Artificial Sequence
  Synthetic
ccaaggggaaaugacuucu

SEQ ID NO: 653646 - RNA, 20 nt, Artificial Sequence
  Synthetic
accaaggggaaaugacuucu

SEQ ID NO: 653647 - RNA, 21 nt, Artificial Sequence
  Synthetic
aaccaaggggaaaugacuucu

SEQ ID NO: 653648 - RNA, 22 nt, Artificial Sequence
  Synthetic
aaaccaaggggaaaugacuucu

SEQ ID NO: 653649 - RNA, 23 nt, Artificial Sequence
  Synthetic
caaaccaaggggaaaugacuucu

SEQ ID NO: 653650 - RNA, 24 nt, Artificial Sequence
  Synthetic
ccaaaccaaggggaaaugacuucu

SEQ ID NO: 653651 - RNA, 18 nt, Artificial Sequence
  Synthetic
ccaaauuuggugacuucu

SEQ ID NO: 653652 - RNA, 19 nt, Artificial Sequence
  Synthetic
accaaauuuggugacuucu

SEQ ID NO: 653653 - RNA, 20 nt, Artificial Sequence
  Synthetic
uaccaaauuuggugacuucu

SEQ ID NO: 653654 - RNA, 21 nt, Artificial Sequence
  Synthetic
cuaccaaauuuggugacuucu

SEQ ID NO: 653655 - RNA, 22 nt, Artificial Sequence
  Synthetic
ccuaccaaauuuggugacuucu

SEQ ID NO: 653656 - RNA, 23 nt, Artificial Sequence
  Synthetic
gccuaccaaauuuggugacuucu

SEQ ID NO: 653657 - RNA, 24 nt, Artificial Sequence
  Synthetic
agccuaccaaauuuggugacuucu

SEQ ID NO: 653658 - RNA, 18 nt, Artificial Sequence
  Synthetic
agcaucacugugacuucu

SEQ ID NO: 653659 - RNA, 19 nt, Artificial Sequence
  Synthetic
aagcaucacugugacuucu

SEQ ID NO: 653660 - RNA, 20 nt, Artificial Sequence
  Synthetic
caagcaucacugugacuucu

SEQ ID NO: 653661 - RNA, 21 nt, Artificial Sequence
  Synthetic
ucaagcaucacugugacuucu

SEQ ID NO: 653662 - RNA, 22 nt, Artificial Sequence
  Synthetic
uucaagcaucacugugacuucu

SEQ ID NO: 653663 - RNA, 23 nt, Artificial Sequence
  Synthetic
guucaagcaucacugugacuucu

SEQ ID NO: 653664 - RNA, 24 nt, Artificial Sequence
  Synthetic
cguucaagcaucacugugacuucu

SEQ ID NO: 653665 - RNA, 18 nt, Artificial Sequence
  Synthetic
aaucacucaaauacuucu

SEQ ID NO: 653666 - RNA, 19 nt, Artificial Sequence
  Synthetic
uaaucacucaaauacuucu

SEQ ID NO: 653667 - RNA, 20 nt, Artificial Sequence
  Synthetic
uuaaucacucaaauacuucu

SEQ ID NO: 653668 - RNA, 21 nt, Artificial Sequence
  Synthetic
auuaaucacucaaauacuucu

SEQ ID NO: 653669 - RNA, 22 nt, Artificial Sequence
  Synthetic
uauuaaucacucaaauacuucu

SEQ ID NO: 653670 - RNA, 23 nt, Artificial Sequence
  Synthetic
uuauuaaucacucaaauacuucu

SEQ ID NO: 653671 - RNA, 24 nt, Artificial Sequence
  Synthetic
auuauuaaucacucaaauacuucu

SEQ ID NO: 653672 - RNA, 18 nt, Artificial Sequence
  Synthetic
caauaacagaguacuucu

SEQ ID NO: 653673 - RNA, 19 nt, Artificial Sequence
  Synthetic
ccaauaacagaguacuucu

SEQ ID NO: 653674 - RNA, 20 nt, Artificial Sequence
  Synthetic
accaauaacagaguacuucu

SEQ ID NO: 653675 - RNA, 21 nt, Artificial Sequence
  Synthetic
aaccaauaacagaguacuucu

SEQ ID NO: 653676 - RNA, 22 nt, Artificial Sequence
  Synthetic
aaaccaauaacagaguacuucu

SEQ ID NO: 653677 - RNA, 23 nt, Artificial Sequence
  Synthetic
uaaaccaauaacagaguacuucu

SEQ ID NO: 653678 - RNA, 24 nt, Artificial Sequence
  Synthetic
cuaaaccaauaacagaguacuucu

SEQ ID NO: 653679 - RNA, 21 nt, Artificial Sequence
  Synthetic
uagauaugcggcguuacuucu

SEQ ID NO: 653680 - RNA, 22 nt, Artificial Sequence
  Synthetic
guagauaugcggcguuacuucu

SEQ ID NO: 653681 - RNA, 23 nt, Artificial Sequence
  Synthetic
gguagauaugcggcguuacuucu

SEQ ID NO: 653682 - RNA, 24 nt, Artificial Sequence
  Synthetic
ugguagauaugcggcguuacuucu

SEQ ID NO: 653683 - RNA, 18 nt, Artificial Sequence
  Synthetic
gacccaacuuuuacuucu

SEQ ID NO: 653684 - RNA, 19 nt, Artificial Sequence
  Synthetic
agacccaacuuuuacuucu

SEQ ID NO: 653685 - RNA, 20 nt, Artificial Sequence
  Synthetic
aagacccaacuuuuacuucu

SEQ ID NO: 653686 - RNA, 21 nt, Artificial Sequence
  Synthetic
aaagacccaacuuuuacuucu

SEQ ID NO: 653687 - RNA, 22 nt, Artificial Sequence
  Synthetic
aaaagacccaacuuuuacuucu

SEQ ID NO: 653688 - RNA, 23 nt, Artificial Sequence
  Synthetic
aaaaagacccaacuuuuacuucu

SEQ ID NO: 653689 - RNA, 24 nt, Artificial Sequence
  Synthetic
uaaaaagacccaacuuuuacuucu

SEQ ID NO: 653690 - RNA, 18 nt, Artificial Sequence
  Synthetic
uuuucgcauuaaccuucu

SEQ ID NO: 653691 - RNA, 19 nt, Artificial Sequence
  Synthetic
cuuuucgcauuaaccuucu

SEQ ID NO: 653692 - RNA, 20 nt, Artificial Sequence
  Synthetic
ucuuuucgcauuaaccuucu

SEQ ID NO: 653693 - RNA, 21 nt, Artificial Sequence
  Synthetic
uucuuuucgcauuaaccuucu

SEQ ID NO: 653694 - RNA, 22 nt, Artificial Sequence
  Synthetic
cuucuuuucgcauuaaccuucu

SEQ ID NO: 653695 - RNA, 23 nt, Artificial Sequence
  Synthetic
ccuucuuuucgcauuaaccuucu

SEQ ID NO: 653696 - RNA, 24 nt, Artificial Sequence
  Synthetic
gccuucuuuucgcauuaaccuucu

SEQ ID NO: 653697 - RNA, 18 nt, Artificial Sequence
  Synthetic
aaauuuaaagcaccuucu

SEQ ID NO: 653698 - RNA, 19 nt, Artificial Sequence
  Synthetic
uaaauuuaaagcaccuucu

SEQ ID NO: 653699 - RNA, 20 nt, Artificial Sequence
  Synthetic
uuaaauuuaaagcaccuucu

SEQ ID NO: 653700 - RNA, 21 nt, Artificial Sequence
  Synthetic
uuuaaauuuaaagcaccuucu

SEQ ID NO: 653701 - RNA, 22 nt, Artificial Sequence
  Synthetic
uuuuaaauuuaaagcaccuucu

SEQ ID NO: 653702 - RNA, 23 nt, Artificial Sequence
  Synthetic
uuuuuaaauuuaaagcaccuucu

SEQ ID NO: 653703 - RNA, 24 nt, Artificial Sequence
  Synthetic
cuuuuuaaauuuaaagcaccuucu

SEQ ID NO: 653704 - RNA, 18 nt, Artificial Sequence
  Synthetic
gggagcuuacuaccuucu

SEQ ID NO: 653705 - RNA, 19 nt, Artificial Sequence
  Synthetic
ugggagcuuacuaccuucu

SEQ ID NO: 653706 - RNA, 20 nt, Artificial Sequence
  Synthetic
uugggagcuuacuaccuucu

SEQ ID NO: 653707 - RNA, 21 nt, Artificial Sequence
  Synthetic
auugggagcuuacuaccuucu

SEQ ID NO: 653708 - RNA, 22 nt, Artificial Sequence
  Synthetic
uauugggagcuuacuaccuucu

SEQ ID NO: 653709 - RNA, 23 nt, Artificial Sequence
  Synthetic
guauugggagcuuacuaccuucu

SEQ ID NO: 653710 - RNA, 24 nt, Artificial Sequence
  Synthetic
uguauugggagcuuacuaccuucu

SEQ ID NO: 653711 - RNA, 18 nt, Artificial Sequence
  Synthetic
cuauuugaaagcccuucu

SEQ ID NO: 653712 - RNA, 19 nt, Artificial Sequence
  Synthetic
acuauuugaaagcccuucu

SEQ ID NO: 653713 - RNA, 20 nt, Artificial Sequence
  Synthetic
cacuauuugaaagcccuucu

SEQ ID NO: 653714 - RNA, 21 nt, Artificial Sequence
  Synthetic
gcacuauuugaaagcccuucu

SEQ ID NO: 653715 - RNA, 22 nt, Artificial Sequence
  Synthetic
cgcacuauuugaaagcccuucu

SEQ ID NO: 653716 - RNA, 23 nt, Artificial Sequence
  Synthetic
ucgcacuauuugaaagcccuucu

SEQ ID NO: 653717 - RNA, 24 nt, Artificial Sequence
  Synthetic
cucgcacuauuugaaagcccuucu

SEQ ID NO: 653718 - RNA, 18 nt, Artificial Sequence
  Synthetic
aaaucaucccucccuucu

SEQ ID NO: 653719 - RNA, 19 nt, Artificial Sequence
  Synthetic
uaaaucaucccucccuucu

SEQ ID NO: 653720 - RNA, 20 nt, Artificial Sequence
  Synthetic
guaaaucaucccucccuucu

SEQ ID NO: 653721 - RNA, 21 nt, Artificial Sequence
  Synthetic
gguaaaucaucccucccuucu

SEQ ID NO: 653722 - RNA, 22 nt, Artificial Sequence
  Synthetic
agguaaaucaucccucccuucu

SEQ ID NO: 653723 - RNA, 23 nt, Artificial Sequence
  Synthetic
uagguaaaucaucccucccuucu

SEQ ID NO: 653724 - RNA, 24 nt, Artificial Sequence
  Synthetic
cuagguaaaucaucccucccuucu

SEQ ID NO: 653725 - RNA, 18 nt, Artificial Sequence
  Synthetic
uugaaaaacuucccuucu

SEQ ID NO: 653726 - RNA, 19 nt, Artificial Sequence
  Synthetic
uuugaaaaacuucccuucu

SEQ ID NO: 653727 - RNA, 20 nt, Artificial Sequence
  Synthetic
guuugaaaaacuucccuucu

SEQ ID NO: 653728 - RNA, 21 nt, Artificial Sequence
  Synthetic
uguuugaaaaacuucccuucu

SEQ ID NO: 653729 - RNA, 22 nt, Artificial Sequence
  Synthetic
guguuugaaaaacuucccuucu

SEQ ID NO: 653730 - RNA, 23 nt, Artificial Sequence
  Synthetic
aguguuugaaaaacuucccuucu

SEQ ID NO: 653731 - RNA, 24 nt, Artificial Sequence
  Synthetic
caguguuugaaaaacuucccuucu

SEQ ID NO: 653732 - RNA, 18 nt, Artificial Sequence
  Synthetic
uuaaaucccuauccuucu

SEQ ID NO: 653733 - RNA, 19 nt, Artificial Sequence
  Synthetic
auuaaaucccuauccuucu

SEQ ID NO: 653734 - RNA, 20 nt, Artificial Sequence
  Synthetic
uauuaaaucccuauccuucu

SEQ ID NO: 653735 - RNA, 21 nt, Artificial Sequence
  Synthetic
uuauuaaaucccuauccuucu

SEQ ID NO: 653736 - RNA, 22 nt, Artificial Sequence
  Synthetic
auuauuaaaucccuauccuucu

SEQ ID NO: 653737 - RNA, 23 nt, Artificial Sequence
  Synthetic
gauuauuaaaucccuauccuucu

SEQ ID NO: 653738 - RNA, 24 nt, Artificial Sequence
  Synthetic
agauuauuaaaucccuauccuucu

SEQ ID NO: 653739 - RNA, 18 nt, Artificial Sequence
  Synthetic
ggagauaucauuccuucu

SEQ ID NO: 653740 - RNA, 19 nt, Artificial Sequence
  Synthetic
aggagauaucauuccuucu

SEQ ID NO: 653741 - RNA, 20 nt, Artificial Sequence
  Synthetic
aaggagauaucauuccuucu

SEQ ID NO: 653742 - RNA, 21 nt, Artificial Sequence
  Synthetic
aaaggagauaucauuccuucu

SEQ ID NO: 653743 - RNA, 22 nt, Artificial Sequence
  Synthetic
gaaaggagauaucauuccuucu

SEQ ID NO: 653744 - RNA, 23 nt, Artificial Sequence
  Synthetic
ugaaaggagauaucauuccuucu

SEQ ID NO: 653745 - RNA, 24 nt, Artificial Sequence
  Synthetic
augaaaggagauaucauuccuucu

SEQ ID NO: 653746 - RNA, 18 nt, Artificial Sequence
  Synthetic
cuugucucucaagcuucu

SEQ ID NO: 653747 - RNA, 19 nt, Artificial Sequence
  Synthetic
ucuugucucucaagcuucu

SEQ ID NO: 653748 - RNA, 20 nt, Artificial Sequence
  Synthetic
uucuugucucucaagcuucu

SEQ ID NO: 653749 - RNA, 21 nt, Artificial Sequence
  Synthetic
uuucuugucucucaagcuucu

SEQ ID NO: 653750 - RNA, 22 nt, Artificial Sequence
  Synthetic
guuucuugucucucaagcuucu

SEQ ID NO: 653751 - RNA, 23 nt, Artificial Sequence
  Synthetic
uguuucuugucucucaagcuucu

SEQ ID NO: 653752 - RNA, 24 nt, Artificial Sequence
  Synthetic
auguuucuugucucucaagcuucu

SEQ ID NO: 653753 - RNA, 18 nt, Artificial Sequence
  Synthetic
caccuccaauaagcuucu

SEQ ID NO: 653754 - RNA, 19 nt, Artificial Sequence
  Synthetic
ucaccuccaauaagcuucu

SEQ ID NO: 653755 - RNA, 20 nt, Artificial Sequence
  Synthetic
aucaccuccaauaagcuucu

SEQ ID NO: 653756 - RNA, 21 nt, Artificial Sequence
  Synthetic
uaucaccuccaauaagcuucu

SEQ ID NO: 653757 - RNA, 22 nt, Artificial Sequence
  Synthetic
auaucaccuccaauaagcuucu

SEQ ID NO: 653758 - RNA, 23 nt, Artificial Sequence
  Synthetic
cauaucaccuccaauaagcuucu

SEQ ID NO: 653759 - RNA, 24 nt, Artificial Sequence
  Synthetic
ucauaucaccuccaauaagcuucu

SEQ ID NO: 653760 - RNA, 18 nt, Artificial Sequence
  Synthetic
agcuguacuuuggcuucu

SEQ ID NO: 653761 - RNA, 19 nt, Artificial Sequence
  Synthetic
gagcuguacuuuggcuucu

SEQ ID NO: 653762 - RNA, 20 nt, Artificial Sequence
  Synthetic
ugagcuguacuuuggcuucu

SEQ ID NO: 653763 - RNA, 21 nt, Artificial Sequence
  Synthetic
cugagcuguacuuuggcuucu

SEQ ID NO: 653764 - RNA, 22 nt, Artificial Sequence
  Synthetic
ccugagcuguacuuuggcuucu

SEQ ID NO: 653765 - RNA, 23 nt, Artificial Sequence
  Synthetic
gccugagcuguacuuuggcuucu

SEQ ID NO: 653766 - RNA, 24 nt, Artificial Sequence
  Synthetic
agccugagcuguacuuuggcuucu

SEQ ID NO: 653767 - RNA, 18 nt, Artificial Sequence
  Synthetic
uuuucucguuuggcuucu

SEQ ID NO: 653768 - RNA, 19 nt, Artificial Sequence
  Synthetic
cuuuucucguuuggcuucu

SEQ ID NO: 653769 - RNA, 20 nt, Artificial Sequence
  Synthetic
ucuuuucucguuuggcuucu

SEQ ID NO: 653770 - RNA, 21 nt, Artificial Sequence
  Synthetic
aucuuuucucguuuggcuucu

SEQ ID NO: 653771 - RNA, 22 nt, Artificial Sequence
  Synthetic
gaucuuuucucguuuggcuucu

SEQ ID NO: 653772 - RNA, 23 nt, Artificial Sequence
  Synthetic
ugaucuuuucucguuuggcuucu

SEQ ID NO: 653773 - RNA, 24 nt, Artificial Sequence
  Synthetic
uugaucuuuucucguuuggcuucu

SEQ ID NO: 653774 - RNA, 18 nt, Artificial Sequence
  Synthetic
auugaaaauaaugcuucu

SEQ ID NO: 653775 - RNA, 19 nt, Artificial Sequence
  Synthetic
aauugaaaauaaugcuucu

SEQ ID NO: 653776 - RNA, 20 nt, Artificial Sequence
  Synthetic
aaauugaaaauaaugcuucu

SEQ ID NO: 653777 - RNA, 21 nt, Artificial Sequence
  Synthetic
gaaauugaaaauaaugcuucu

SEQ ID NO: 653778 - RNA, 22 nt, Artificial Sequence
  Synthetic
agaaauugaaaauaaugcuucu

SEQ ID NO: 653779 - RNA, 23 nt, Artificial Sequence
  Synthetic
aagaaauugaaaauaaugcuucu

SEQ ID NO: 653780 - RNA, 24 nt, Artificial Sequence
  Synthetic
gaagaaauugaaaauaaugcuucu

SEQ ID NO: 653781 - RNA, 18 nt, Artificial Sequence
  Synthetic
cguccauuuacugcuucu

SEQ ID NO: 653782 - RNA, 19 nt, Artificial Sequence
  Synthetic
ccguccauuuacugcuucu

SEQ ID NO: 653783 - RNA, 20 nt, Artificial Sequence
  Synthetic
accguccauuuacugcuucu

SEQ ID NO: 653784 - RNA, 21 nt, Artificial Sequence
  Synthetic
caccguccauuuacugcuucu

SEQ ID NO: 653785 - RNA, 22 nt, Artificial Sequence
  Synthetic
ccaccguccauuuacugcuucu

SEQ ID NO: 653786 - RNA, 23 nt, Artificial Sequence
  Synthetic
accaccguccauuuacugcuucu

SEQ ID NO: 653787 - RNA, 24 nt, Artificial Sequence
  Synthetic
gaccaccguccauuuacugcuucu

SEQ ID NO: 653788 - RNA, 18 nt, Artificial Sequence
  Synthetic
cuacgaucacaaucuucu

SEQ ID NO: 653789 - RNA, 19 nt, Artificial Sequence
  Synthetic
ucuacgaucacaaucuucu

SEQ ID NO: 653790 - RNA, 20 nt, Artificial Sequence
  Synthetic
gucuacgaucacaaucuucu

SEQ ID NO: 653791 - RNA, 21 nt, Artificial Sequence
  Synthetic
ugucuacgaucacaaucuucu

SEQ ID NO: 653792 - RNA, 22 nt, Artificial Sequence
  Synthetic
augucuacgaucacaaucuucu

SEQ ID NO: 653793 - RNA, 23 nt, Artificial Sequence
  Synthetic
aaugucuacgaucacaaucuucu

SEQ ID NO: 653794 - RNA, 24 nt, Artificial Sequence
  Synthetic
uaaugucuacgaucacaaucuucu

SEQ ID NO: 653795 - RNA, 18 nt, Artificial Sequence
  Synthetic
ucuguaaucccaucuucu

SEQ ID NO: 653796 - RNA, 19 nt, Artificial Sequence
  Synthetic
cucuguaaucccaucuucu

SEQ ID NO: 653797 - RNA, 20 nt, Artificial Sequence
  Synthetic
ccucuguaaucccaucuucu

SEQ ID NO: 653798 - RNA, 21 nt, Artificial Sequence
  Synthetic
gccucuguaaucccaucuucu

SEQ ID NO: 653799 - RNA, 22 nt, Artificial Sequence
  Synthetic
ugccucuguaaucccaucuucu

SEQ ID NO: 653800 - RNA, 23 nt, Artificial Sequence
  Synthetic
gugccucuguaaucccaucuucu

SEQ ID NO: 653801 - RNA, 24 nt, Artificial Sequence
  Synthetic
ugugccucuguaaucccaucuucu

SEQ ID NO: 653802 - RNA, 18 nt, Artificial Sequence
  Synthetic
cagucucuuccaucuucu

SEQ ID NO: 653803 - RNA, 19 nt, Artificial Sequence
  Synthetic
ccagucucuuccaucuucu

SEQ ID NO: 653804 - RNA, 20 nt, Artificial Sequence
  Synthetic
uccagucucuuccaucuucu

SEQ ID NO: 653805 - RNA, 21 nt, Artificial Sequence
  Synthetic
uuccagucucuuccaucuucu

SEQ ID NO: 653806 - RNA, 22 nt, Artificial Sequence
  Synthetic
guuccagucucuuccaucuucu

SEQ ID NO: 653807 - RNA, 23 nt, Artificial Sequence
  Synthetic
uguuccagucucuuccaucuucu

SEQ ID NO: 653808 - RNA, 24 nt, Artificial Sequence
  Synthetic
auguuccagucucuuccaucuucu

SEQ ID NO: 653809 - RNA, 18 nt, Artificial Sequence
  Synthetic
gaacacaaaagaucuucu

SEQ ID NO: 653810 - RNA, 19 nt, Artificial Sequence
  Synthetic
ugaacacaaaagaucuucu

SEQ ID NO: 653811 - RNA, 20 nt, Artificial Sequence
  Synthetic
gugaacacaaaagaucuucu

SEQ ID NO: 653812 - RNA, 21 nt, Artificial Sequence
  Synthetic
ugugaacacaaaagaucuucu

SEQ ID NO: 653813 - RNA, 22 nt, Artificial Sequence
  Synthetic
cugugaacacaaaagaucuucu

SEQ ID NO: 653814 - RNA, 23 nt, Artificial Sequence
  Synthetic
ccugugaacacaaaagaucuucu

SEQ ID NO: 653815 - RNA, 24 nt, Artificial Sequence
  Synthetic
gccugugaacacaaaagaucuucu

SEQ ID NO: 653816 - RNA, 18 nt, Artificial Sequence
  Synthetic
auaaguuacugaucuucu

SEQ ID NO: 653817 - RNA, 19 nt, Artificial Sequence
  Synthetic
gauaaguuacugaucuucu

SEQ ID NO: 653818 - RNA, 20 nt, Artificial Sequence
  Synthetic
agauaaguuacugaucuucu

SEQ ID NO: 653819 - RNA, 21 nt, Artificial Sequence
  Synthetic
uagauaaguuacugaucuucu

SEQ ID NO: 653820 - RNA, 22 nt, Artificial Sequence
  Synthetic
uuagauaaguuacugaucuucu

SEQ ID NO: 653821 - RNA, 23 nt, Artificial Sequence
  Synthetic
uuuagauaaguuacugaucuucu

SEQ ID NO: 653822 - RNA, 24 nt, Artificial Sequence
  Synthetic
uuuuagauaaguuacugaucuucu

SEQ ID NO: 653823 - RNA, 18 nt, Artificial Sequence
  Synthetic
cccuuuuuacacucuucu

SEQ ID NO: 653824 - RNA, 19 nt, Artificial Sequence
  Synthetic
gcccuuuuuacacucuucu

SEQ ID NO: 653825 - RNA, 20 nt, Artificial Sequence
  Synthetic
ugcccuuuuuacacucuucu

SEQ ID NO: 653826 - RNA, 21 nt, Artificial Sequence
  Synthetic
uugcccuuuuuacacucuucu

SEQ ID NO: 653827 - RNA, 22 nt, Artificial Sequence
  Synthetic
guugcccuuuuuacacucuucu

SEQ ID NO: 653828 - RNA, 23 nt, Artificial Sequence
  Synthetic
aguugcccuuuuuacacucuucu

SEQ ID NO: 653829 - RNA, 24 nt, Artificial Sequence
  Synthetic
aaguugcccuuuuuacacucuucu

SEQ ID NO: 653830 - RNA, 18 nt, Artificial Sequence
  Synthetic
aaagcuacuugcucuucu

SEQ ID NO: 653831 - RNA, 19 nt, Artificial Sequence
  Synthetic
uaaagcuacuugcucuucu

SEQ ID NO: 653832 - RNA, 20 nt, Artificial Sequence
  Synthetic
uuaaagcuacuugcucuucu

SEQ ID NO: 653833 - RNA, 21 nt, Artificial Sequence
  Synthetic
uuuaaagcuacuugcucuucu

SEQ ID NO: 653834 - RNA, 22 nt, Artificial Sequence
  Synthetic
auuuaaagcuacuugcucuucu

SEQ ID NO: 653835 - RNA, 23 nt, Artificial Sequence
  Synthetic
uauuuaaagcuacuugcucuucu

SEQ ID NO: 653836 - RNA, 24 nt, Artificial Sequence
  Synthetic
uuauuuaaagcuacuugcucuucu

SEQ ID NO: 653837 - RNA, 18 nt, Artificial Sequence
  Synthetic
gccauuucuaugucuucu

SEQ ID NO: 653838 - RNA, 19 nt, Artificial Sequence
  Synthetic
ggccauuucuaugucuucu

SEQ ID NO: 653839 - RNA, 20 nt, Artificial Sequence
  Synthetic
uggccauuucuaugucuucu

SEQ ID NO: 653840 - RNA, 21 nt, Artificial Sequence
  Synthetic
uuggccauuucuaugucuucu

SEQ ID NO: 653841 - RNA, 22 nt, Artificial Sequence
  Synthetic
guuggccauuucuaugucuucu

SEQ ID NO: 653842 - RNA, 23 nt, Artificial Sequence
  Synthetic
uguuggccauuucuaugucuucu

SEQ ID NO: 653843 - RNA, 24 nt, Artificial Sequence
  Synthetic
cuguuggccauuucuaugucuucu

SEQ ID NO: 653844 - RNA, 18 nt, Artificial Sequence
  Synthetic
ccugcauucuauucuucu

SEQ ID NO: 653845 - RNA, 19 nt, Artificial Sequence
  Synthetic
cccugcauucuauucuucu

SEQ ID NO: 653846 - RNA, 20 nt, Artificial Sequence
  Synthetic
acccugcauucuauucuucu

SEQ ID NO: 653847 - RNA, 21 nt, Artificial Sequence
  Synthetic
uacccugcauucuauucuucu

SEQ ID NO: 653848 - RNA, 22 nt, Artificial Sequence
  Synthetic
uuacccugcauucuauucuucu

SEQ ID NO: 653849 - RNA, 23 nt, Artificial Sequence
  Synthetic
guuacccugcauucuauucuucu

SEQ ID NO: 653850 - RNA, 24 nt, Artificial Sequence
  Synthetic
aguuacccugcauucuauucuucu

SEQ ID NO: 653851 - RNA, 18 nt, Artificial Sequence
  Synthetic
ggaaauuuuacuucuucu

SEQ ID NO: 653852 - RNA, 19 nt, Artificial Sequence
  Synthetic
aggaaauuuuacuucuucu

SEQ ID NO: 653853 - RNA, 20 nt, Artificial Sequence
  Synthetic
aaggaaauuuuacuucuucu

SEQ ID NO: 653854 - RNA, 21 nt, Artificial Sequence
  Synthetic
caaggaaauuuuacuucuucu

SEQ ID NO: 653855 - RNA, 22 nt, Artificial Sequence
  Synthetic
ucaaggaaauuuuacuucuucu

SEQ ID NO: 653856 - RNA, 23 nt, Artificial Sequence
  Synthetic
cucaaggaaauuuuacuucuucu

SEQ ID NO: 653857 - RNA, 24 nt, Artificial Sequence
  Synthetic
ccucaaggaaauuuuacuucuucu

SEQ ID NO: 653858 - RNA, 18 nt, Artificial Sequence
  Synthetic
cauuaaucuauuucuucu

SEQ ID NO: 653859 - RNA, 19 nt, Artificial Sequence
  Synthetic
acauuaaucuauuucuucu

SEQ ID NO: 653860 - RNA, 20 nt, Artificial Sequence
  Synthetic
aacauuaaucuauuucuucu

SEQ ID NO: 653861 - RNA, 21 nt, Artificial Sequence
  Synthetic
caacauuaaucuauuucuucu

SEQ ID NO: 653862 - RNA, 22 nt, Artificial Sequence
  Synthetic
ucaacauuaaucuauuucuucu

SEQ ID NO: 653863 - RNA, 23 nt, Artificial Sequence
  Synthetic
aucaacauuaaucuauuucuucu

SEQ ID NO: 653864 - RNA, 24 nt, Artificial Sequence
  Synthetic
gaucaacauuaaucuauuucuucu

SEQ ID NO: 653865 - RNA, 18 nt, Artificial Sequence
  Synthetic
ggucgaauucuuucuucu

SEQ ID NO: 653866 - RNA, 19 nt, Artificial Sequence
  Synthetic
uggucgaauucuuucuucu

SEQ ID NO: 653867 - RNA, 20 nt, Artificial Sequence
  Synthetic
uuggucgaauucuuucuucu

SEQ ID NO: 653868 - RNA, 21 nt, Artificial Sequence
  Synthetic
cuuggucgaauucuuucuucu

SEQ ID NO: 653869 - RNA, 22 nt, Artificial Sequence
  Synthetic
ccuuggucgaauucuuucuucu

SEQ ID NO: 653870 - RNA, 23 nt, Artificial Sequence
  Synthetic
uccuuggucgaauucuuucuucu

SEQ ID NO: 653871 - RNA, 24 nt, Artificial Sequence
  Synthetic
cuccuuggucgaauucuuucuucu

SEQ ID NO: 653872 - RNA, 18 nt, Artificial Sequence
  Synthetic
uucuguaguguuucuucu

SEQ ID NO: 653873 - RNA, 19 nt, Artificial Sequence
  Synthetic
auucuguaguguuucuucu

SEQ ID NO: 653874 - RNA, 20 nt, Artificial Sequence
  Synthetic
cauucuguaguguuucuucu

SEQ ID NO: 653875 - RNA, 21 nt, Artificial Sequence
  Synthetic
ucauucuguaguguuucuucu

SEQ ID NO: 653876 - RNA, 22 nt, Artificial Sequence
  Synthetic
aucauucuguaguguuucuucu

SEQ ID NO: 653877 - RNA, 23 nt, Artificial Sequence
  Synthetic
gaucauucuguaguguuucuucu

SEQ ID NO: 653878 - RNA, 24 nt, Artificial Sequence
  Synthetic
ugaucauucuguaguguuucuucu

SEQ ID NO: 653879 - RNA, 18 nt, Artificial Sequence
  Synthetic
acuuauggcuuuucuucu

SEQ ID NO: 653880 - RNA, 19 nt, Artificial Sequence
  Synthetic
aacuuauggcuuuucuucu

SEQ ID NO: 653881 - RNA, 20 nt, Artificial Sequence
  Synthetic
gaacuuauggcuuuucuucu

SEQ ID NO: 653882 - RNA, 21 nt, Artificial Sequence
  Synthetic
ggaacuuauggcuuuucuucu

SEQ ID NO: 653883 - RNA, 22 nt, Artificial Sequence
  Synthetic
aggaacuuauggcuuuucuucu

SEQ ID NO: 653884 - RNA, 23 nt, Artificial Sequence
  Synthetic
gaggaacuuauggcuuuucuucu

SEQ ID NO: 653885 - RNA, 24 nt, Artificial Sequence
  Synthetic
agaggaacuuauggcuuuucuucu

SEQ ID NO: 653886 - RNA, 18 nt, Artificial Sequence
  Synthetic
cucaugguguuuucuucu

SEQ ID NO: 653887 - RNA, 19 nt, Artificial Sequence
  Synthetic
acucaugguguuuucuucu

SEQ ID NO: 653888 - RNA, 20 nt, Artificial Sequence
  Synthetic
aacucaugguguuuucuucu

SEQ ID NO: 653889 - RNA, 21 nt, Artificial Sequence
  Synthetic
gaacucaugguguuuucuucu

SEQ ID NO: 653890 - RNA, 22 nt, Artificial Sequence
  Synthetic
agaacucaugguguuuucuucu

SEQ ID NO: 653891 - RNA, 23 nt, Artificial Sequence
  Synthetic
cagaacucaugguguuuucuucu

SEQ ID NO: 653892 - RNA, 24 nt, Artificial Sequence
  Synthetic
acagaacucaugguguuuucuucu

SEQ ID NO: 653893 - RNA, 18 nt, Artificial Sequence
  Synthetic
ugaauuaauaaaaguucu

SEQ ID NO: 653894 - RNA, 19 nt, Artificial Sequence
  Synthetic
cugaauuaauaaaaguucu

SEQ ID NO: 653895 - RNA, 20 nt, Artificial Sequence
  Synthetic
gcugaauuaauaaaaguucu

SEQ ID NO: 653896 - RNA, 21 nt, Artificial Sequence
  Synthetic
cgcugaauuaauaaaaguucu

SEQ ID NO: 653897 - RNA, 22 nt, Artificial Sequence
  Synthetic
acgcugaauuaauaaaaguucu

SEQ ID NO: 653898 - RNA, 23 nt, Artificial Sequence
  Synthetic
uacgcugaauuaauaaaaguucu

SEQ ID NO: 653899 - RNA, 24 nt, Artificial Sequence
  Synthetic
auacgcugaauuaauaaaaguucu

SEQ ID NO: 653900 - RNA, 18 nt, Artificial Sequence
  Synthetic
acuuuuauggaaaguucu

SEQ ID NO: 653901 - RNA, 19 nt, Artificial Sequence
  Synthetic
aacuuuuauggaaaguucu

SEQ ID NO: 653902 - RNA, 20 nt, Artificial Sequence
  Synthetic
aaacuuuuauggaaaguucu

SEQ ID NO: 653903 - RNA, 21 nt, Artificial Sequence
  Synthetic
aaaacuuuuauggaaaguucu

SEQ ID NO: 653904 - RNA, 22 nt, Artificial Sequence
  Synthetic
aaaaacuuuuauggaaaguucu

SEQ ID NO: 653905 - RNA, 23 nt, Artificial Sequence
  Synthetic
aaaaaacuuuuauggaaaguucu

SEQ ID NO: 653906 - RNA, 24 nt, Artificial Sequence
  Synthetic
aaaaaaacuuuuauggaaaguucu

SEQ ID NO: 653907 - RNA, 18 nt, Artificial Sequence
  Synthetic
ucuuccacaagaaguucu

SEQ ID NO: 653908 - RNA, 19 nt, Artificial Sequence
  Synthetic
aucuuccacaagaaguucu

SEQ ID NO: 653909 - RNA, 20 nt, Artificial Sequence
  Synthetic
caucuuccacaagaaguucu

SEQ ID NO: 653910 - RNA, 21 nt, Artificial Sequence
  Synthetic
acaucuuccacaagaaguucu

SEQ ID NO: 653911 - RNA, 22 nt, Artificial Sequence
  Synthetic
aacaucuuccacaagaaguucu

SEQ ID NO: 653912 - RNA, 23 nt, Artificial Sequence
  Synthetic
uaacaucuuccacaagaaguucu

SEQ ID NO: 653913 - RNA, 24 nt, Artificial Sequence
  Synthetic
guaacaucuuccacaagaaguucu

SEQ ID NO: 653914 - RNA, 18 nt, Artificial Sequence
  Synthetic
aaugauaguggaaguucu

SEQ ID NO: 653915 - RNA, 19 nt, Artificial Sequence
  Synthetic
caaugauaguggaaguucu

SEQ ID NO: 653916 - RNA, 20 nt, Artificial Sequence
  Synthetic
gcaaugauaguggaaguucu

SEQ ID NO: 653917 - RNA, 21 nt, Artificial Sequence
  Synthetic
agcaaugauaguggaaguucu

SEQ ID NO: 653918 - RNA, 22 nt, Artificial Sequence
  Synthetic
aagcaaugauaguggaaguucu

SEQ ID NO: 653919 - RNA, 23 nt, Artificial Sequence
  Synthetic
caagcaaugauaguggaaguucu

SEQ ID NO: 653920 - RNA, 24 nt, Artificial Sequence
  Synthetic
ucaagcaaugauaguggaaguucu

SEQ ID NO: 653921 - RNA, 18 nt, Artificial Sequence
  Synthetic
uacuagaguguaaguucu

SEQ ID NO: 653922 - RNA, 19 nt, Artificial Sequence
  Synthetic
cuacuagaguguaaguucu

SEQ ID NO: 653923 - RNA, 20 nt, Artificial Sequence
  Synthetic
acuacuagaguguaaguucu

SEQ ID NO: 653924 - RNA, 21 nt, Artificial Sequence
  Synthetic
cacuacuagaguguaaguucu

SEQ ID NO: 653925 - RNA, 22 nt, Artificial Sequence
  Synthetic
ucacuacuagaguguaaguucu

SEQ ID NO: 653926 - RNA, 23 nt, Artificial Sequence
  Synthetic
cucacuacuagaguguaaguucu

SEQ ID NO: 653927 - RNA, 24 nt, Artificial Sequence
  Synthetic
gcucacuacuagaguguaaguucu

SEQ ID NO: 653928 - RNA, 18 nt, Artificial Sequence
  Synthetic
cuaauagguguaaguucu

SEQ ID NO: 653929 - RNA, 19 nt, Artificial Sequence
  Synthetic
ucuaauagguguaaguucu

SEQ ID NO: 653930 - RNA, 20 nt, Artificial Sequence
  Synthetic
gucuaauagguguaaguucu

SEQ ID NO: 653931 - RNA, 21 nt, Artificial Sequence
  Synthetic
ugucuaauagguguaaguucu

SEQ ID NO: 653932 - RNA, 22 nt, Artificial Sequence
  Synthetic
uugucuaauagguguaaguucu

SEQ ID NO: 653933 - RNA, 23 nt, Artificial Sequence
  Synthetic
uuugucuaauagguguaaguucu

SEQ ID NO: 653934 - RNA, 24 nt, Artificial Sequence
  Synthetic
cuuugucuaauagguguaaguucu

SEQ ID NO: 653935 - RNA, 18 nt, Artificial Sequence
  Synthetic
uuuuaaauuuuaaguucu

SEQ ID NO: 653936 - RNA, 19 nt, Artificial Sequence
  Synthetic
uuuuuaaauuuuaaguucu

SEQ ID NO: 653937 - RNA, 20 nt, Artificial Sequence
  Synthetic
uuuuuuaaauuuuaaguucu

SEQ ID NO: 653938 - RNA, 21 nt, Artificial Sequence
  Synthetic
guuuuuuaaauuuuaaguucu

SEQ ID NO: 653939 - RNA, 22 nt, Artificial Sequence
  Synthetic
aguuuuuuaaauuuuaaguucu

SEQ ID NO: 653940 - RNA, 23 nt, Artificial Sequence
  Synthetic
aaguuuuuuaaauuuuaaguucu

SEQ ID NO: 653941 - RNA, 24 nt, Artificial Sequence
  Synthetic
aaaguuuuuuaaauuuuaaguucu

SEQ ID NO: 653942 - RNA, 18 nt, Artificial Sequence
  Synthetic
aguucuauuuuaaguucu

SEQ ID NO: 653943 - RNA, 19 nt, Artificial Sequence
  Synthetic
uaguucuauuuuaaguucu

SEQ ID NO: 653944 - RNA, 20 nt, Artificial Sequence
  Synthetic
auaguucuauuuuaaguucu

SEQ ID NO: 653945 - RNA, 21 nt, Artificial Sequence
  Synthetic
gauaguucuauuuuaaguucu

SEQ ID NO: 653946 - RNA, 22 nt, Artificial Sequence
  Synthetic
ugauaguucuauuuuaaguucu

SEQ ID NO: 653947 - RNA, 23 nt, Artificial Sequence
  Synthetic
augauaguucuauuuuaaguucu

SEQ ID NO: 653948 - RNA, 24 nt, Artificial Sequence
  Synthetic
aaugauaguucuauuuuaaguucu

SEQ ID NO: 653949 - RNA, 18 nt, Artificial Sequence
  Synthetic
agcucucuuuuaaguucu

SEQ ID NO: 653950 - RNA, 19 nt, Artificial Sequence
  Synthetic
cagcucucuuuuaaguucu

SEQ ID NO: 653951 - RNA, 20 nt, Artificial Sequence
  Synthetic
gcagcucucuuuuaaguucu

SEQ ID NO: 653952 - RNA, 21 nt, Artificial Sequence
  Synthetic
ggcagcucucuuuuaaguucu

SEQ ID NO: 653953 - RNA, 22 nt, Artificial Sequence
  Synthetic
uggcagcucucuuuuaaguucu

SEQ ID NO: 653954 - RNA, 23 nt, Artificial Sequence
  Synthetic
auggcagcucucuuuuaaguucu

SEQ ID NO: 653955 - RNA, 24 nt, Artificial Sequence
  Synthetic
aauggcagcucucuuuuaaguucu

SEQ ID NO: 653956 - RNA, 18 nt, Artificial Sequence
  Synthetic
aagagaaguugcaguucu

SEQ ID NO: 653957 - RNA, 19 nt, Artificial Sequence
  Synthetic
caagagaaguugcaguucu

SEQ ID NO: 653958 - RNA, 20 nt, Artificial Sequence
  Synthetic
ccaagagaaguugcaguucu

SEQ ID NO: 653959 - RNA, 21 nt, Artificial Sequence
  Synthetic
accaagagaaguugcaguucu

SEQ ID NO: 653960 - RNA, 22 nt, Artificial Sequence
  Synthetic
aaccaagagaaguugcaguucu

SEQ ID NO: 653961 - RNA, 23 nt, Artificial Sequence
  Synthetic
aaaccaagagaaguugcaguucu

SEQ ID NO: 653962 - RNA, 24 nt, Artificial Sequence
  Synthetic
uaaaccaagagaaguugcaguucu

SEQ ID NO: 653963 - RNA, 18 nt, Artificial Sequence
  Synthetic
aaagccacugucaguucu

SEQ ID NO: 653964 - RNA, 19 nt, Artificial Sequence
  Synthetic
gaaagccacugucaguucu

SEQ ID NO: 653965 - RNA, 20 nt, Artificial Sequence
  Synthetic
ugaaagccacugucaguucu

SEQ ID NO: 653966 - RNA, 21 nt, Artificial Sequence
  Synthetic
augaaagccacugucaguucu

SEQ ID NO: 653967 - RNA, 22 nt, Artificial Sequence
  Synthetic
aaugaaagccacugucaguucu

SEQ ID NO: 653968 - RNA, 23 nt, Artificial Sequence
  Synthetic
gaaugaaagccacugucaguucu

SEQ ID NO: 653969 - RNA, 24 nt, Artificial Sequence
  Synthetic
ugaaugaaagccacugucaguucu

SEQ ID NO: 653970 - RNA, 18 nt, Artificial Sequence
  Synthetic
cucauuuucuucaguucu

SEQ ID NO: 653971 - RNA, 19 nt, Artificial Sequence
  Synthetic
acucauuuucuucaguucu

SEQ ID NO: 653972 - RNA, 20 nt, Artificial Sequence
  Synthetic
cacucauuuucuucaguucu

SEQ ID NO: 653973 - RNA, 21 nt, Artificial Sequence
  Synthetic
acacucauuuucuucaguucu

SEQ ID NO: 653974 - RNA, 22 nt, Artificial Sequence
  Synthetic
gacacucauuuucuucaguucu

SEQ ID NO: 653975 - RNA, 23 nt, Artificial Sequence
  Synthetic
ggacacucauuuucuucaguucu

SEQ ID NO: 653976 - RNA, 24 nt, Artificial Sequence
  Synthetic
uggacacucauuuucuucaguucu

SEQ ID NO: 653977 - RNA, 18 nt, Artificial Sequence
  Synthetic
uaccuccuauagaguucu

SEQ ID NO: 653978 - RNA, 19 nt, Artificial Sequence
  Synthetic
uuaccuccuauagaguucu

SEQ ID NO: 653979 - RNA, 20 nt, Artificial Sequence
  Synthetic
cuuaccuccuauagaguucu

SEQ ID NO: 653980 - RNA, 21 nt, Artificial Sequence
  Synthetic
acuuaccuccuauagaguucu

SEQ ID NO: 653981 - RNA, 22 nt, Artificial Sequence
  Synthetic
cacuuaccuccuauagaguucu

SEQ ID NO: 653982 - RNA, 23 nt, Artificial Sequence
  Synthetic
ucacuuaccuccuauagaguucu

SEQ ID NO: 653983 - RNA, 24 nt, Artificial Sequence
  Synthetic
uucacuuaccuccuauagaguucu

SEQ ID NO: 653984 - RNA, 18 nt, Artificial Sequence
  Synthetic
aguguuuuccugaguucu

SEQ ID NO: 653985 - RNA, 19 nt, Artificial Sequence
  Synthetic
gaguguuuuccugaguucu

SEQ ID NO: 653986 - RNA, 20 nt, Artificial Sequence
  Synthetic
cgaguguuuuccugaguucu

SEQ ID NO: 653987 - RNA, 21 nt, Artificial Sequence
  Synthetic
gcgaguguuuuccugaguucu

SEQ ID NO: 653988 - RNA, 22 nt, Artificial Sequence
  Synthetic
agcgaguguuuuccugaguucu

SEQ ID NO: 653989 - RNA, 23 nt, Artificial Sequence
  Synthetic
aagcgaguguuuuccugaguucu

SEQ ID NO: 653990 - RNA, 24 nt, Artificial Sequence
  Synthetic
aaagcgaguguuuuccugaguucu

SEQ ID NO: 653991 - RNA, 18 nt, Artificial Sequence
  Synthetic
ugaugaugagugaguucu

SEQ ID NO: 653992 - RNA, 19 nt, Artificial Sequence
  Synthetic
augaugaugagugaguucu

SEQ ID NO: 653993 - RNA, 20 nt, Artificial Sequence
  Synthetic
caugaugaugagugaguucu

SEQ ID NO: 653994 - RNA, 21 nt, Artificial Sequence
  Synthetic
ucaugaugaugagugaguucu

SEQ ID NO: 653995 - RNA, 22 nt, Artificial Sequence
  Synthetic
cucaugaugaugagugaguucu

SEQ ID NO: 653996 - RNA, 23 nt, Artificial Sequence
  Synthetic
ccucaugaugaugagugaguucu

SEQ ID NO: 653997 - RNA, 24 nt, Artificial Sequence
  Synthetic
uccucaugaugaugagugaguucu

SEQ ID NO: 653998 - RNA, 18 nt, Artificial Sequence
  Synthetic
aaugaaacaaauaguucu

SEQ ID NO: 653999 - RNA, 19 nt, Artificial Sequence
  Synthetic
aaaugaaacaaauaguucu

SEQ ID NO: 654000 - RNA, 20 nt, Artificial Sequence
  Synthetic
uaaaugaaacaaauaguucu

SEQ ID NO: 654001 - RNA, 21 nt, Artificial Sequence
  Synthetic
auaaaugaaacaaauaguucu

SEQ ID NO: 654002 - RNA, 22 nt, Artificial Sequence
  Synthetic
uauaaaugaaacaaauaguucu

SEQ ID NO: 654003 - RNA, 23 nt, Artificial Sequence
  Synthetic
auauaaaugaaacaaauaguucu

SEQ ID NO: 654004 - RNA, 24 nt, Artificial Sequence
  Synthetic
aauauaaaugaaacaaauaguucu

SEQ ID NO: 654005 - RNA, 18 nt, Artificial Sequence
  Synthetic
gauuuggacuauaguucu

SEQ ID NO: 654006 - RNA, 19 nt, Artificial Sequence
  Synthetic
ugauuuggacuauaguucu

SEQ ID NO: 654007 - RNA, 20 nt, Artificial Sequence
  Synthetic
augauuuggacuauaguucu

SEQ ID NO: 654008 - RNA, 21 nt, Artificial Sequence
  Synthetic
uaugauuuggacuauaguucu

SEQ ID NO: 654009 - RNA, 22 nt, Artificial Sequence
  Synthetic
guaugauuuggacuauaguucu

SEQ ID NO: 654010 - RNA, 23 nt, Artificial Sequence
  Synthetic
gguaugauuuggacuauaguucu

SEQ ID NO: 654011 - RNA, 24 nt, Artificial Sequence
  Synthetic
ggguaugauuuggacuauaguucu

SEQ ID NO: 654012 - RNA, 18 nt, Artificial Sequence
  Synthetic
auauggaaaaguaguucu

SEQ ID NO: 654013 - RNA, 19 nt, Artificial Sequence
  Synthetic
aauauggaaaaguaguucu

SEQ ID NO: 654014 - RNA, 20 nt, Artificial Sequence
  Synthetic
aaauauggaaaaguaguucu

SEQ ID NO: 654015 - RNA, 21 nt, Artificial Sequence
  Synthetic
uaaauauggaaaaguaguucu

SEQ ID NO: 654016 - RNA, 22 nt, Artificial Sequence
  Synthetic
guaaauauggaaaaguaguucu

SEQ ID NO: 654017 - RNA, 23 nt, Artificial Sequence
  Synthetic
gguaaauauggaaaaguaguucu

SEQ ID NO: 654018 - RNA, 24 nt, Artificial Sequence
  Synthetic
agguaaauauggaaaaguaguucu

SEQ ID NO: 654019 - RNA, 18 nt, Artificial Sequence
  Synthetic
gagcuaagagguaguucu

SEQ ID NO: 654020 - RNA, 19 nt, Artificial Sequence
  Synthetic
ggagcuaagagguaguucu

SEQ ID NO: 654021 - RNA, 20 nt, Artificial Sequence
  Synthetic
aggagcuaagagguaguucu

SEQ ID NO: 654022 - RNA, 21 nt, Artificial Sequence
  Synthetic
caggagcuaagagguaguucu

SEQ ID NO: 654023 - RNA, 22 nt, Artificial Sequence
  Synthetic
gcaggagcuaagagguaguucu

SEQ ID NO: 654024 - RNA, 23 nt, Artificial Sequence
  Synthetic
ggcaggagcuaagagguaguucu

SEQ ID NO: 654025 - RNA, 24 nt, Artificial Sequence
  Synthetic
aggcaggagcuaagagguaguucu

SEQ ID NO: 654026 - RNA, 18 nt, Artificial Sequence
  Synthetic
ucuucucucuguaguucu

SEQ ID NO: 654027 - RNA, 19 nt, Artificial Sequence
  Synthetic
uucuucucucuguaguucu

SEQ ID NO: 654028 - RNA, 20 nt, Artificial Sequence
  Synthetic
auucuucucucuguaguucu

SEQ ID NO: 654029 - RNA, 21 nt, Artificial Sequence
  Synthetic
aauucuucucucuguaguucu

SEQ ID NO: 654030 - RNA, 22 nt, Artificial Sequence
  Synthetic
uaauucuucucucuguaguucu

SEQ ID NO: 654031 - RNA, 23 nt, Artificial Sequence
  Synthetic
cuaauucuucucucuguaguucu

SEQ ID NO: 654032 - RNA, 24 nt, Artificial Sequence
  Synthetic
ucuaauucuucucucuguaguucu

SEQ ID NO: 654033 - RNA, 18 nt, Artificial Sequence
  Synthetic
guauugcugauuaguucu

SEQ ID NO: 654034 - RNA, 19 nt, Artificial Sequence
  Synthetic
aguauugcugauuaguucu

SEQ ID NO: 654035 - RNA, 20 nt, Artificial Sequence
  Synthetic
aaguauugcugauuaguucu

SEQ ID NO: 654036 - RNA, 21 nt, Artificial Sequence
  Synthetic
aaaguauugcugauuaguucu

SEQ ID NO: 654037 - RNA, 22 nt, Artificial Sequence
  Synthetic
caaaguauugcugauuaguucu

SEQ ID NO: 654038 - RNA, 23 nt, Artificial Sequence
  Synthetic
ccaaaguauugcugauuaguucu

SEQ ID NO: 654039 - RNA, 24 nt, Artificial Sequence
  Synthetic
cccaaaguauugcugauuaguucu

SEQ ID NO: 654040 - RNA, 18 nt, Artificial Sequence
  Synthetic
agcugaaauauacguucu

SEQ ID NO: 654041 - RNA, 19 nt, Artificial Sequence
  Synthetic
aagcugaaauauacguucu

SEQ ID NO: 654042 - RNA, 20 nt, Artificial Sequence
  Synthetic
uaagcugaaauauacguucu

SEQ ID NO: 654043 - RNA, 21 nt, Artificial Sequence
  Synthetic
uuaagcugaaauauacguucu

SEQ ID NO: 654044 - RNA, 22 nt, Artificial Sequence
  Synthetic
auuaagcugaaauauacguucu

SEQ ID NO: 654045 - RNA, 23 nt, Artificial Sequence
  Synthetic
uauuaagcugaaauauacguucu

SEQ ID NO: 654046 - RNA, 24 nt, Artificial Sequence
  Synthetic
cuauuaagcugaaauauacguucu

SEQ ID NO: 654047 - RNA, 18 nt, Artificial Sequence
  Synthetic
aauuagaugaaagguucu

SEQ ID NO: 654048 - RNA, 19 nt, Artificial Sequence
  Synthetic
aaauuagaugaaagguucu

SEQ ID NO: 654049 - RNA, 20 nt, Artificial Sequence
  Synthetic
uaaauuagaugaaagguucu

SEQ ID NO: 654050 - RNA, 21 nt, Artificial Sequence
  Synthetic
guaaauuagaugaaagguucu

SEQ ID NO: 654051 - RNA, 22 nt, Artificial Sequence
  Synthetic
aguaaauuagaugaaagguucu

SEQ ID NO: 654052 - RNA, 23 nt, Artificial Sequence
  Synthetic
uaguaaauuagaugaaagguucu

SEQ ID NO: 654053 - RNA, 24 nt, Artificial Sequence
  Synthetic
uuaguaaauuagaugaaagguucu

SEQ ID NO: 654054 - RNA, 18 nt, Artificial Sequence
  Synthetic
cacuauaauagagguucu

SEQ ID NO: 654055 - RNA, 19 nt, Artificial Sequence
  Synthetic
ccacuauaauagagguucu

SEQ ID NO: 654056 - RNA, 20 nt, Artificial Sequence
  Synthetic
gccacuauaauagagguucu

SEQ ID NO: 654057 - RNA, 21 nt, Artificial Sequence
  Synthetic
ugccacuauaauagagguucu

SEQ ID NO: 654058 - RNA, 22 nt, Artificial Sequence
  Synthetic
augccacuauaauagagguucu

SEQ ID NO: 654059 - RNA, 23 nt, Artificial Sequence
  Synthetic
aaugccacuauaauagagguucu

SEQ ID NO: 654060 - RNA, 24 nt, Artificial Sequence
  Synthetic
gaaugccacuauaauagagguucu

SEQ ID NO: 654061 - RNA, 18 nt, Artificial Sequence
  Synthetic
uuggcugagggagguucu

SEQ ID NO: 654062 - RNA, 19 nt, Artificial Sequence
  Synthetic
uuuggcugagggagguucu

SEQ ID NO: 654063 - RNA, 20 nt, Artificial Sequence
  Synthetic
uuuuggcugagggagguucu

SEQ ID NO: 654064 - RNA, 21 nt, Artificial Sequence
  Synthetic
cuuuuggcugagggagguucu

SEQ ID NO: 654065 - RNA, 22 nt, Artificial Sequence
  Synthetic
ccuuuuggcugagggagguucu

SEQ ID NO: 654066 - RNA, 23 nt, Artificial Sequence
  Synthetic
uccuuuuggcugagggagguucu

SEQ ID NO: 654067 - RNA, 24 nt, Artificial Sequence
  Synthetic
uuccuuuuggcugagggagguucu

SEQ ID NO: 654068 - RNA, 18 nt, Artificial Sequence
  Synthetic
cagcuugcuaaggguucu

SEQ ID NO: 654069 - RNA, 19 nt, Artificial Sequence
  Synthetic
ucagcuugcuaaggguucu

SEQ ID NO: 654070 - RNA, 20 nt, Artificial Sequence
  Synthetic
cucagcuugcuaaggguucu

SEQ ID NO: 654071 - RNA, 21 nt, Artificial Sequence
  Synthetic
ucucagcuugcuaaggguucu

SEQ ID NO: 654072 - RNA, 22 nt, Artificial Sequence
  Synthetic
uucucagcuugcuaaggguucu

SEQ ID NO: 654073 - RNA, 23 nt, Artificial Sequence
  Synthetic
uuucucagcuugcuaaggguucu

SEQ ID NO: 654074 - RNA, 24 nt, Artificial Sequence
  Synthetic
guuucucagcuugcuaaggguucu

SEQ ID NO: 654075 - RNA, 18 nt, Artificial Sequence
  Synthetic
gcauuuaaacaggguucu

SEQ ID NO: 654076 - RNA, 19 nt, Artificial Sequence
  Synthetic
ggcauuuaaacaggguucu

SEQ ID NO: 654077 - RNA, 20 nt, Artificial Sequence
  Synthetic
aggcauuuaaacaggguucu

SEQ ID NO: 654078 - RNA, 21 nt, Artificial Sequence
  Synthetic
aaggcauuuaaacaggguucu

SEQ ID NO: 654079 - RNA, 22 nt, Artificial Sequence
  Synthetic
caaggcauuuaaacaggguucu

SEQ ID NO: 654080 - RNA, 23 nt, Artificial Sequence
  Synthetic
acaaggcauuuaaacaggguucu

SEQ ID NO: 654081 - RNA, 24 nt, Artificial Sequence
  Synthetic
cacaaggcauuuaaacaggguucu

SEQ ID NO: 654082 - RNA, 18 nt, Artificial Sequence
  Synthetic
aagcagguuucggguucu

SEQ ID NO: 654083 - RNA, 19 nt, Artificial Sequence
  Synthetic
caagcagguuucggguucu

SEQ ID NO: 654084 - RNA, 20 nt, Artificial Sequence
  Synthetic
acaagcagguuucggguucu

SEQ ID NO: 654085 - RNA, 21 nt, Artificial Sequence
  Synthetic
aacaagcagguuucggguucu

SEQ ID NO: 654086 - RNA, 22 nt, Artificial Sequence
  Synthetic
aaacaagcagguuucggguucu

SEQ ID NO: 654087 - RNA, 23 nt, Artificial Sequence
  Synthetic
uaaacaagcagguuucggguucu

SEQ ID NO: 654088 - RNA, 24 nt, Artificial Sequence
  Synthetic
cuaaacaagcagguuucggguucu

SEQ ID NO: 654089 - RNA, 18 nt, Artificial Sequence
  Synthetic
uuggauuucuaugguucu

SEQ ID NO: 654090 - RNA, 19 nt, Artificial Sequence
  Synthetic
uuuggauuucuaugguucu

SEQ ID NO: 654091 - RNA, 20 nt, Artificial Sequence
  Synthetic
guuuggauuucuaugguucu

SEQ ID NO: 654092 - RNA, 21 nt, Artificial Sequence
  Synthetic
aguuuggauuucuaugguucu

SEQ ID NO: 654093 - RNA, 22 nt, Artificial Sequence
  Synthetic
aaguuuggauuucuaugguucu

SEQ ID NO: 654094 - RNA, 23 nt, Artificial Sequence
  Synthetic
caaguuuggauuucuaugguucu

SEQ ID NO: 654095 - RNA, 24 nt, Artificial Sequence
  Synthetic
ccaaguuuggauuucuaugguucu

SEQ ID NO: 654096 - RNA, 18 nt, Artificial Sequence
  Synthetic
gacccaugcagugguucu

SEQ ID NO: 654097 - RNA, 19 nt, Artificial Sequence
  Synthetic
agacccaugcagugguucu

SEQ ID NO: 654098 - RNA, 20 nt, Artificial Sequence
  Synthetic
gagacccaugcagugguucu

SEQ ID NO: 654099 - RNA, 21 nt, Artificial Sequence
  Synthetic
ugagacccaugcagugguucu

SEQ ID NO: 654100 - RNA, 22 nt, Artificial Sequence
  Synthetic
cugagacccaugcagugguucu

SEQ ID NO: 654101 - RNA, 23 nt, Artificial Sequence
  Synthetic
ccugagacccaugcagugguucu

SEQ ID NO: 654102 - RNA, 24 nt, Artificial Sequence
  Synthetic
cccugagacccaugcagugguucu

SEQ ID NO: 654103 - RNA, 18 nt, Artificial Sequence
  Synthetic
cuuuuuaaacuugguucu

SEQ ID NO: 654104 - RNA, 19 nt, Artificial Sequence
  Synthetic
acuuuuuaaacuugguucu

SEQ ID NO: 654105 - RNA, 20 nt, Artificial Sequence
  Synthetic
aacuuuuuaaacuugguucu

SEQ ID NO: 654106 - RNA, 21 nt, Artificial Sequence
  Synthetic
aaacuuuuuaaacuugguucu

SEQ ID NO: 654107 - RNA, 22 nt, Artificial Sequence
  Synthetic
aaaacuuuuuaaacuugguucu

SEQ ID NO: 654108 - RNA, 23 nt, Artificial Sequence
  Synthetic
caaaacuuuuuaaacuugguucu

SEQ ID NO: 654109 - RNA, 24 nt, Artificial Sequence
  Synthetic
acaaaacuuuuuaaacuugguucu

SEQ ID NO: 654110 - RNA, 18 nt, Artificial Sequence
  Synthetic
uuauuuaguuuugguucu

SEQ ID NO: 654111 - RNA, 19 nt, Artificial Sequence
  Synthetic
uuuauuuaguuuugguucu

SEQ ID NO: 654112 - RNA, 20 nt, Artificial Sequence
  Synthetic
auuuauuuaguuuugguucu

SEQ ID NO: 654113 - RNA, 21 nt, Artificial Sequence
  Synthetic
cauuuauuuaguuuugguucu

SEQ ID NO: 654114 - RNA, 22 nt, Artificial Sequence
  Synthetic
acauuuauuuaguuuugguucu

SEQ ID NO: 654115 - RNA, 23 nt, Artificial Sequence
  Synthetic
cacauuuauuuaguuuugguucu

SEQ ID NO: 654116 - RNA, 24 nt, Artificial Sequence
  Synthetic
gcacauuuauuuaguuuugguucu

SEQ ID NO: 654117 - RNA, 18 nt, Artificial Sequence
  Synthetic
gauacugucaaauguucu

SEQ ID NO: 654118 - RNA, 19 nt, Artificial Sequence
  Synthetic
agauacugucaaauguucu

SEQ ID NO: 654119 - RNA, 20 nt, Artificial Sequence
  Synthetic
gagauacugucaaauguucu

SEQ ID NO: 654120 - RNA, 21 nt, Artificial Sequence
  Synthetic
ugagauacugucaaauguucu

SEQ ID NO: 654121 - RNA, 22 nt, Artificial Sequence
  Synthetic
uugagauacugucaaauguucu

SEQ ID NO: 654122 - RNA, 23 nt, Artificial Sequence
  Synthetic
cuugagauacugucaaauguucu

SEQ ID NO: 654123 - RNA, 24 nt, Artificial Sequence
  Synthetic
ucuugagauacugucaaauguucu

SEQ ID NO: 654124 - RNA, 18 nt, Artificial Sequence
  Synthetic
uugaggucacaauguucu

SEQ ID NO: 654125 - RNA, 19 nt, Artificial Sequence
  Synthetic
uuugaggucacaauguucu

SEQ ID NO: 654126 - RNA, 20 nt, Artificial Sequence
  Synthetic
auuugaggucacaauguucu

SEQ ID NO: 654127 - RNA, 21 nt, Artificial Sequence
  Synthetic
cauuugaggucacaauguucu

SEQ ID NO: 654128 - RNA, 22 nt, Artificial Sequence
  Synthetic
gcauuugaggucacaauguucu

SEQ ID NO: 654129 - RNA, 23 nt, Artificial Sequence
  Synthetic
agcauuugaggucacaauguucu

SEQ ID NO: 654130 - RNA, 24 nt, Artificial Sequence
  Synthetic
aagcauuugaggucacaauguucu

SEQ ID NO: 654131 - RNA, 18 nt, Artificial Sequence
  Synthetic
auuaaugcagaauguucu

SEQ ID NO: 654132 - RNA, 19 nt, Artificial Sequence
  Synthetic
aauuaaugcagaauguucu

SEQ ID NO: 654133 - RNA, 20 nt, Artificial Sequence
  Synthetic
aaauuaaugcagaauguucu

SEQ ID NO: 654134 - RNA, 21 nt, Artificial Sequence
  Synthetic
gaaauuaaugcagaauguucu

SEQ ID NO: 654135 - RNA, 22 nt, Artificial Sequence
  Synthetic
ugaaauuaaugcagaauguucu

SEQ ID NO: 654136 - RNA, 23 nt, Artificial Sequence
  Synthetic
cugaaauuaaugcagaauguucu

SEQ ID NO: 654137 - RNA, 24 nt, Artificial Sequence
  Synthetic
gcugaaauuaaugcagaauguucu

SEQ ID NO: 654138 - RNA, 18 nt, Artificial Sequence
  Synthetic
cagaaauaaagauguucu

SEQ ID NO: 654139 - RNA, 19 nt, Artificial Sequence
  Synthetic
gcagaaauaaagauguucu

SEQ ID NO: 654140 - RNA, 20 nt, Artificial Sequence
  Synthetic
ggcagaaauaaagauguucu

SEQ ID NO: 654141 - RNA, 21 nt, Artificial Sequence
  Synthetic
aggcagaaauaaagauguucu

SEQ ID NO: 654142 - RNA, 22 nt, Artificial Sequence
  Synthetic
aaggcagaaauaaagauguucu

SEQ ID NO: 654143 - RNA, 23 nt, Artificial Sequence
  Synthetic
gaaggcagaaauaaagauguucu

SEQ ID NO: 654144 - RNA, 24 nt, Artificial Sequence
  Synthetic
ugaaggcagaaauaaagauguucu

SEQ ID NO: 654145 - RNA, 18 nt, Artificial Sequence
  Synthetic
uugacauacagauguucu

SEQ ID NO: 654146 - RNA, 19 nt, Artificial Sequence
  Synthetic
uuugacauacagauguucu

SEQ ID NO: 654147 - RNA, 20 nt, Artificial Sequence
  Synthetic
auuugacauacagauguucu

SEQ ID NO: 654148 - RNA, 21 nt, Artificial Sequence
  Synthetic
uauuugacauacagauguucu

SEQ ID NO: 654149 - RNA, 22 nt, Artificial Sequence
  Synthetic
guauuugacauacagauguucu

SEQ ID NO: 654150 - RNA, 23 nt, Artificial Sequence
  Synthetic
uguauuugacauacagauguucu

SEQ ID NO: 654151 - RNA, 24 nt, Artificial Sequence
  Synthetic
guguauuugacauacagauguucu

SEQ ID NO: 654152 - RNA, 18 nt, Artificial Sequence
  Synthetic
auacugacgagauguucu

SEQ ID NO: 654153 - RNA, 19 nt, Artificial Sequence
  Synthetic
aauacugacgagauguucu

SEQ ID NO: 654154 - RNA, 20 nt, Artificial Sequence
  Synthetic
uaauacugacgagauguucu

SEQ ID NO: 654155 - RNA, 21 nt, Artificial Sequence
  Synthetic
cuaauacugacgagauguucu

SEQ ID NO: 654156 - RNA, 22 nt, Artificial Sequence
  Synthetic
ccuaauacugacgagauguucu

SEQ ID NO: 654157 - RNA, 23 nt, Artificial Sequence
  Synthetic
uccuaauacugacgagauguucu

SEQ ID NO: 654158 - RNA, 24 nt, Artificial Sequence
  Synthetic
uuccuaauacugacgagauguucu

SEQ ID NO: 654159 - RNA, 18 nt, Artificial Sequence
  Synthetic
aauggagacauauguucu

SEQ ID NO: 654160 - RNA, 19 nt, Artificial Sequence
  Synthetic
gaauggagacauauguucu

SEQ ID NO: 654161 - RNA, 20 nt, Artificial Sequence
  Synthetic
ugaauggagacauauguucu

SEQ ID NO: 654162 - RNA, 21 nt, Artificial Sequence
  Synthetic
uugaauggagacauauguucu

SEQ ID NO: 654163 - RNA, 22 nt, Artificial Sequence
  Synthetic
uuugaauggagacauauguucu

SEQ ID NO: 654164 - RNA, 23 nt, Artificial Sequence
  Synthetic
uuuugaauggagacauauguucu

SEQ ID NO: 654165 - RNA, 24 nt, Artificial Sequence
  Synthetic
cuuuugaauggagacauauguucu

SEQ ID NO: 654166 - RNA, 18 nt, Artificial Sequence
  Synthetic
uugguuucauuauguucu

SEQ ID NO: 654167 - RNA, 19 nt, Artificial Sequence
  Synthetic
cuugguuucauuauguucu

SEQ ID NO: 654168 - RNA, 20 nt, Artificial Sequence
  Synthetic
gcuugguuucauuauguucu

SEQ ID NO: 654169 - RNA, 21 nt, Artificial Sequence
  Synthetic
agcuugguuucauuauguucu

SEQ ID NO: 654170 - RNA, 22 nt, Artificial Sequence
  Synthetic
uagcuugguuucauuauguucu

SEQ ID NO: 654171 - RNA, 23 nt, Artificial Sequence
  Synthetic
cuagcuugguuucauuauguucu

SEQ ID NO: 654172 - RNA, 24 nt, Artificial Sequence
  Synthetic
ucuagcuugguuucauuauguucu

SEQ ID NO: 654173 - RNA, 18 nt, Artificial Sequence
  Synthetic
cggccgaguaacuguucu

SEQ ID NO: 654174 - RNA, 19 nt, Artificial Sequence
  Synthetic
ccggccgaguaacuguucu

SEQ ID NO: 654175 - RNA, 20 nt, Artificial Sequence
  Synthetic
cccggccgaguaacuguucu

SEQ ID NO: 654176 - RNA, 21 nt, Artificial Sequence
  Synthetic
gcccggccgaguaacuguucu

SEQ ID NO: 654177 - RNA, 22 nt, Artificial Sequence
  Synthetic
cgcccggccgaguaacuguucu

SEQ ID NO: 654178 - RNA, 23 nt, Artificial Sequence
  Synthetic
gcgcccggccgaguaacuguucu

SEQ ID NO: 654179 - RNA, 24 nt, Artificial Sequence
  Synthetic
cgcgcccggccgaguaacuguucu

SEQ ID NO: 654180 - RNA, 18 nt, Artificial Sequence
  Synthetic
auuccagaacacuguucu

SEQ ID NO: 654181 - RNA, 19 nt, Artificial Sequence
  Synthetic
uauuccagaacacuguucu

SEQ ID NO: 654182 - RNA, 20 nt, Artificial Sequence
  Synthetic
uuauuccagaacacuguucu

SEQ ID NO: 654183 - RNA, 21 nt, Artificial Sequence
  Synthetic
auuauuccagaacacuguucu

SEQ ID NO: 654184 - RNA, 22 nt, Artificial Sequence
  Synthetic
aauuauuccagaacacuguucu

SEQ ID NO: 654185 - RNA, 23 nt, Artificial Sequence
  Synthetic
aaauuauuccagaacacuguucu

SEQ ID NO: 654186 - RNA, 24 nt, Artificial Sequence
  Synthetic
aaaauuauuccagaacacuguucu

SEQ ID NO: 654187 - RNA, 18 nt, Artificial Sequence
  Synthetic
aguaaggcucacuguucu

SEQ ID NO: 654188 - RNA, 19 nt, Artificial Sequence
  Synthetic
uaguaaggcucacuguucu

SEQ ID NO: 654189 - RNA, 20 nt, Artificial Sequence
  Synthetic
guaguaaggcucacuguucu

SEQ ID NO: 654190 - RNA, 21 nt, Artificial Sequence
  Synthetic
aguaguaaggcucacuguucu

SEQ ID NO: 654191 - RNA, 22 nt, Artificial Sequence
  Synthetic
gaguaguaaggcucacuguucu

SEQ ID NO: 654192 - RNA, 23 nt, Artificial Sequence
  Synthetic
ggaguaguaaggcucacuguucu

SEQ ID NO: 654193 - RNA, 24 nt, Artificial Sequence
  Synthetic
aggaguaguaaggcucacuguucu

SEQ ID NO: 654194 - RNA, 18 nt, Artificial Sequence
  Synthetic
auagcaguagacuguucu

SEQ ID NO: 654195 - RNA, 19 nt, Artificial Sequence
  Synthetic
aauagcaguagacuguucu

SEQ ID NO: 654196 - RNA, 20 nt, Artificial Sequence
  Synthetic
aaauagcaguagacuguucu

SEQ ID NO: 654197 - RNA, 21 nt, Artificial Sequence
  Synthetic
gaaauagcaguagacuguucu

SEQ ID NO: 654198 - RNA, 22 nt, Artificial Sequence
  Synthetic
agaaauagcaguagacuguucu

SEQ ID NO: 654199 - RNA, 23 nt, Artificial Sequence
  Synthetic
gagaaauagcaguagacuguucu

SEQ ID NO: 654200 - RNA, 24 nt, Artificial Sequence
  Synthetic
ggagaaauagcaguagacuguucu

SEQ ID NO: 654201 - RNA, 18 nt, Artificial Sequence
  Synthetic
ugaugcacugacuguucu

SEQ ID NO: 654202 - RNA, 19 nt, Artificial Sequence
  Synthetic
gugaugcacugacuguucu

SEQ ID NO: 654203 - RNA, 20 nt, Artificial Sequence
  Synthetic
agugaugcacugacuguucu

SEQ ID NO: 654204 - RNA, 21 nt, Artificial Sequence
  Synthetic
cagugaugcacugacuguucu

SEQ ID NO: 654205 - RNA, 22 nt, Artificial Sequence
  Synthetic
acagugaugcacugacuguucu

SEQ ID NO: 654206 - RNA, 23 nt, Artificial Sequence
  Synthetic
gacagugaugcacugacuguucu

SEQ ID NO: 654207 - RNA, 24 nt, Artificial Sequence
  Synthetic
ugacagugaugcacugacuguucu

SEQ ID NO: 654208 - RNA, 18 nt, Artificial Sequence
  Synthetic
gaggacagaggcuguucu

SEQ ID NO: 654209 - RNA, 19 nt, Artificial Sequence
  Synthetic
agaggacagaggcuguucu

SEQ ID NO: 654210 - RNA, 20 nt, Artificial Sequence
  Synthetic
cagaggacagaggcuguucu

SEQ ID NO: 654211 - RNA, 21 nt, Artificial Sequence
  Synthetic
gcagaggacagaggcuguucu

SEQ ID NO: 654212 - RNA, 22 nt, Artificial Sequence
  Synthetic
agcagaggacagaggcuguucu

SEQ ID NO: 654213 - RNA, 23 nt, Artificial Sequence
  Synthetic
aagcagaggacagaggcuguucu

SEQ ID NO: 654214 - RNA, 24 nt, Artificial Sequence
  Synthetic
uaagcagaggacagaggcuguucu

SEQ ID NO: 654215 - RNA, 18 nt, Artificial Sequence
  Synthetic
uuuuuuugcugcuguucu

SEQ ID NO: 654216 - RNA, 19 nt, Artificial Sequence
  Synthetic
auuuuuuugcugcuguucu

SEQ ID NO: 654217 - RNA, 20 nt, Artificial Sequence
  Synthetic
uauuuuuuugcugcuguucu

SEQ ID NO: 654218 - RNA, 21 nt, Artificial Sequence
  Synthetic
guauuuuuuugcugcuguucu

SEQ ID NO: 654219 - RNA, 22 nt, Artificial Sequence
  Synthetic
uguauuuuuuugcugcuguucu

SEQ ID NO: 654220 - RNA, 23 nt, Artificial Sequence
  Synthetic
uuguauuuuuuugcugcuguucu

SEQ ID NO: 654221 - RNA, 24 nt, Artificial Sequence
  Synthetic
uuuguauuuuuuugcugcuguucu

SEQ ID NO: 654222 - RNA, 18 nt, Artificial Sequence
  Synthetic
agaggccaugaguguucu

SEQ ID NO: 654223 - RNA, 19 nt, Artificial Sequence
  Synthetic
cagaggccaugaguguucu

SEQ ID NO: 654224 - RNA, 20 nt, Artificial Sequence
  Synthetic
gcagaggccaugaguguucu

SEQ ID NO: 654225 - RNA, 21 nt, Artificial Sequence
  Synthetic
agcagaggccaugaguguucu

SEQ ID NO: 654226 - RNA, 22 nt, Artificial Sequence
  Synthetic
gagcagaggccaugaguguucu

SEQ ID NO: 654227 - RNA, 23 nt, Artificial Sequence
  Synthetic
ggagcagaggccaugaguguucu

SEQ ID NO: 654228 - RNA, 24 nt, Artificial Sequence
  Synthetic
aggagcagaggccaugaguguucu

SEQ ID NO: 654229 - RNA, 18 nt, Artificial Sequence
  Synthetic
cacuauacuugguguucu

SEQ ID NO: 654230 - RNA, 19 nt, Artificial Sequence
  Synthetic
ccacuauacuugguguucu

SEQ ID NO: 654231 - RNA, 20 nt, Artificial Sequence
  Synthetic
uccacuauacuugguguucu

SEQ ID NO: 654232 - RNA, 21 nt, Artificial Sequence
  Synthetic
uuccacuauacuugguguucu

SEQ ID NO: 654233 - RNA, 22 nt, Artificial Sequence
  Synthetic
uuuccacuauacuugguguucu

SEQ ID NO: 654234 - RNA, 23 nt, Artificial Sequence
  Synthetic
cuuuccacuauacuugguguucu

SEQ ID NO: 654235 - RNA, 24 nt, Artificial Sequence
  Synthetic
ucuuuccacuauacuugguguucu

SEQ ID NO: 654236 - RNA, 18 nt, Artificial Sequence
  Synthetic
cuagaaauuugguguucu

SEQ ID NO: 654237 - RNA, 19 nt, Artificial Sequence
  Synthetic
acuagaaauuugguguucu

SEQ ID NO: 654238 - RNA, 20 nt, Artificial Sequence
  Synthetic
aacuagaaauuugguguucu

SEQ ID NO: 654239 - RNA, 21 nt, Artificial Sequence
  Synthetic
uaacuagaaauuugguguucu

SEQ ID NO: 654240 - RNA, 22 nt, Artificial Sequence
  Synthetic
uuaacuagaaauuugguguucu

SEQ ID NO: 654241 - RNA, 23 nt, Artificial Sequence
  Synthetic
uuuaacuagaaauuugguguucu

SEQ ID NO: 654242 - RNA, 24 nt, Artificial Sequence
  Synthetic
guuuaacuagaaauuugguguucu

SEQ ID NO: 654243 - RNA, 18 nt, Artificial Sequence
  Synthetic
uuggcaauuuuguguucu

SEQ ID NO: 654244 - RNA, 19 nt, Artificial Sequence
  Synthetic
guuggcaauuuuguguucu

SEQ ID NO: 654245 - RNA, 20 nt, Artificial Sequence
  Synthetic
gguuggcaauuuuguguucu

SEQ ID NO: 654246 - RNA, 21 nt, Artificial Sequence
  Synthetic
ugguuggcaauuuuguguucu

SEQ ID NO: 654247 - RNA, 22 nt, Artificial Sequence
  Synthetic
uugguuggcaauuuuguguucu

SEQ ID NO: 654248 - RNA, 23 nt, Artificial Sequence
  Synthetic
cuugguuggcaauuuuguguucu

SEQ ID NO: 654249 - RNA, 24 nt, Artificial Sequence
  Synthetic
ucuugguuggcaauuuuguguucu

SEQ ID NO: 654250 - RNA, 18 nt, Artificial Sequence
  Synthetic
uacuaaacaaauuguucu

SEQ ID NO: 654251 - RNA, 19 nt, Artificial Sequence
  Synthetic
guacuaaacaaauuguucu

SEQ ID NO: 654252 - RNA, 20 nt, Artificial Sequence
  Synthetic
gguacuaaacaaauuguucu

SEQ ID NO: 654253 - RNA, 21 nt, Artificial Sequence
  Synthetic
cgguacuaaacaaauuguucu

SEQ ID NO: 654254 - RNA, 22 nt, Artificial Sequence
  Synthetic
ucgguacuaaacaaauuguucu

SEQ ID NO: 654255 - RNA, 23 nt, Artificial Sequence
  Synthetic
aucgguacuaaacaaauuguucu

SEQ ID NO: 654256 - RNA, 24 nt, Artificial Sequence
  Synthetic
uaucgguacuaaacaaauuguucu

SEQ ID NO: 654257 - RNA, 18 nt, Artificial Sequence
  Synthetic
ucaagauaauauuguucu

SEQ ID NO: 654258 - RNA, 19 nt, Artificial Sequence
  Synthetic
uucaagauaauauuguucu

SEQ ID NO: 654259 - RNA, 20 nt, Artificial Sequence
  Synthetic
auucaagauaauauuguucu

SEQ ID NO: 654260 - RNA, 21 nt, Artificial Sequence
  Synthetic
uauucaagauaauauuguucu

SEQ ID NO: 654261 - RNA, 22 nt, Artificial Sequence
  Synthetic
auauucaagauaauauuguucu

SEQ ID NO: 654262 - RNA, 23 nt, Artificial Sequence
  Synthetic
gauauucaagauaauauuguucu

SEQ ID NO: 654263 - RNA, 24 nt, Artificial Sequence
  Synthetic
agauauucaagauaauauuguucu

SEQ ID NO: 654264 - RNA, 18 nt, Artificial Sequence
  Synthetic
aggucuucaucuuguucu

SEQ ID NO: 654265 - RNA, 19 nt, Artificial Sequence
  Synthetic
aaggucuucaucuuguucu

SEQ ID NO: 654266 - RNA, 20 nt, Artificial Sequence
  Synthetic
uaaggucuucaucuuguucu

SEQ ID NO: 654267 - RNA, 21 nt, Artificial Sequence
  Synthetic
uuaaggucuucaucuuguucu

SEQ ID NO: 654268 - RNA, 22 nt, Artificial Sequence
  Synthetic
auuaaggucuucaucuuguucu

SEQ ID NO: 654269 - RNA, 23 nt, Artificial Sequence
  Synthetic
aauuaaggucuucaucuuguucu

SEQ ID NO: 654270 - RNA, 24 nt, Artificial Sequence
  Synthetic
gaauuaaggucuucaucuuguucu

SEQ ID NO: 654271 - RNA, 18 nt, Artificial Sequence
  Synthetic
aguuucucaacaauuucu

SEQ ID NO: 654272 - RNA, 19 nt, Artificial Sequence
  Synthetic
aaguuucucaacaauuucu

SEQ ID NO: 654273 - RNA, 20 nt, Artificial Sequence
  Synthetic
uaaguuucucaacaauuucu

SEQ ID NO: 654274 - RNA, 21 nt, Artificial Sequence
  Synthetic
uuaaguuucucaacaauuucu

SEQ ID NO: 654275 - RNA, 22 nt, Artificial Sequence
  Synthetic
cuuaaguuucucaacaauuucu

SEQ ID NO: 654276 - RNA, 23 nt, Artificial Sequence
  Synthetic
ucuuaaguuucucaacaauuucu

SEQ ID NO: 654277 - RNA, 24 nt, Artificial Sequence
  Synthetic
cucuuaaguuucucaacaauuucu

SEQ ID NO: 654278 - RNA, 18 nt, Artificial Sequence
  Synthetic
uuccaauaagcaauuucu

SEQ ID NO: 654279 - RNA, 19 nt, Artificial Sequence
  Synthetic
guuccaauaagcaauuucu

SEQ ID NO: 654280 - RNA, 20 nt, Artificial Sequence
  Synthetic
uguuccaauaagcaauuucu

SEQ ID NO: 654281 - RNA, 21 nt, Artificial Sequence
  Synthetic
auguuccaauaagcaauuucu

SEQ ID NO: 654282 - RNA, 22 nt, Artificial Sequence
  Synthetic
aauguuccaauaagcaauuucu

SEQ ID NO: 654283 - RNA, 23 nt, Artificial Sequence
  Synthetic
aaauguuccaauaagcaauuucu

SEQ ID NO: 654284 - RNA, 24 nt, Artificial Sequence
  Synthetic
caaauguuccaauaagcaauuucu

SEQ ID NO: 654285 - RNA, 18 nt, Artificial Sequence
  Synthetic
uacugaaucagaauuucu

SEQ ID NO: 654286 - RNA, 19 nt, Artificial Sequence
  Synthetic
cuacugaaucagaauuucu

SEQ ID NO: 654287 - RNA, 20 nt, Artificial Sequence
  Synthetic
ucuacugaaucagaauuucu

SEQ ID NO: 654288 - RNA, 21 nt, Artificial Sequence
  Synthetic
gucuacugaaucagaauuucu

SEQ ID NO: 654289 - RNA, 22 nt, Artificial Sequence
  Synthetic
agucuacugaaucagaauuucu

SEQ ID NO: 654290 - RNA, 23 nt, Artificial Sequence
  Synthetic
aagucuacugaaucagaauuucu

SEQ ID NO: 654291 - RNA, 24 nt, Artificial Sequence
  Synthetic
uaagucuacugaaucagaauuucu

SEQ ID NO: 654292 - RNA, 18 nt, Artificial Sequence
  Synthetic
uuuuuauguagaauuucu

SEQ ID NO: 654293 - RNA, 19 nt, Artificial Sequence
  Synthetic
auuuuuauguagaauuucu

SEQ ID NO: 654294 - RNA, 20 nt, Artificial Sequence
  Synthetic
aauuuuuauguagaauuucu

SEQ ID NO: 654295 - RNA, 21 nt, Artificial Sequence
  Synthetic
uaauuuuuauguagaauuucu

SEQ ID NO: 654296 - RNA, 22 nt, Artificial Sequence
  Synthetic
cuaauuuuuauguagaauuucu

SEQ ID NO: 654297 - RNA, 23 nt, Artificial Sequence
  Synthetic
gcuaauuuuuauguagaauuucu

SEQ ID NO: 654298 - RNA, 24 nt, Artificial Sequence
  Synthetic
ggcuaauuuuuauguagaauuucu

SEQ ID NO: 654299 - RNA, 18 nt, Artificial Sequence
  Synthetic
uugaaucaagacauuucu

SEQ ID NO: 654300 - RNA, 19 nt, Artificial Sequence
  Synthetic
uuugaaucaagacauuucu

SEQ ID NO: 654301 - RNA, 20 nt, Artificial Sequence
  Synthetic
guuugaaucaagacauuucu

SEQ ID NO: 654302 - RNA, 21 nt, Artificial Sequence
  Synthetic
cguuugaaucaagacauuucu

SEQ ID NO: 654303 - RNA, 22 nt, Artificial Sequence
  Synthetic
acguuugaaucaagacauuucu

SEQ ID NO: 654304 - RNA, 23 nt, Artificial Sequence
  Synthetic
aacguuugaaucaagacauuucu

SEQ ID NO: 654305 - RNA, 24 nt, Artificial Sequence
  Synthetic
gaacguuugaaucaagacauuucu

SEQ ID NO: 654306 - RNA, 18 nt, Artificial Sequence
  Synthetic
guguauucauacauuucu

SEQ ID NO: 654307 - RNA, 19 nt, Artificial Sequence
  Synthetic
uguguauucauacauuucu

SEQ ID NO: 654308 - RNA, 20 nt, Artificial Sequence
  Synthetic
uuguguauucauacauuucu

SEQ ID NO: 654309 - RNA, 21 nt, Artificial Sequence
  Synthetic
auuguguauucauacauuucu

SEQ ID NO: 654310 - RNA, 22 nt, Artificial Sequence
  Synthetic
uauuguguauucauacauuucu

SEQ ID NO: 654311 - RNA, 23 nt, Artificial Sequence
  Synthetic
auauuguguauucauacauuucu

SEQ ID NO: 654312 - RNA, 24 nt, Artificial Sequence
  Synthetic
uauauuguguauucauacauuucu

SEQ ID NO: 654313 - RNA, 18 nt, Artificial Sequence
  Synthetic
ucaagaauuugcauuucu

SEQ ID NO: 654314 - RNA, 19 nt, Artificial Sequence
  Synthetic
cucaagaauuugcauuucu

SEQ ID NO: 654315 - RNA, 20 nt, Artificial Sequence
  Synthetic
acucaagaauuugcauuucu

SEQ ID NO: 654316 - RNA, 21 nt, Artificial Sequence
  Synthetic
aacucaagaauuugcauuucu

SEQ ID NO: 654317 - RNA, 22 nt, Artificial Sequence
  Synthetic
gaacucaagaauuugcauuucu

SEQ ID NO: 654318 - RNA, 23 nt, Artificial Sequence
  Synthetic
agaacucaagaauuugcauuucu

SEQ ID NO: 654319 - RNA, 24 nt, Artificial Sequence
  Synthetic
uagaacucaagaauuugcauuucu

SEQ ID NO: 654320 - RNA, 18 nt, Artificial Sequence
  Synthetic
gacuuggaccucauuucu

SEQ ID NO: 654321 - RNA, 19 nt, Artificial Sequence
  Synthetic
ugacuuggaccucauuucu

SEQ ID NO: 654322 - RNA, 20 nt, Artificial Sequence
  Synthetic
cugacuuggaccucauuucu

SEQ ID NO: 654323 - RNA, 21 nt, Artificial Sequence
  Synthetic
gcugacuuggaccucauuucu

SEQ ID NO: 654324 - RNA, 22 nt, Artificial Sequence
  Synthetic
agcugacuuggaccucauuucu

SEQ ID NO: 654325 - RNA, 23 nt, Artificial Sequence
  Synthetic
gagcugacuuggaccucauuucu

SEQ ID NO: 654326 - RNA, 24 nt, Artificial Sequence
  Synthetic
agagcugacuuggaccucauuucu

SEQ ID NO: 654327 - RNA, 18 nt, Artificial Sequence
  Synthetic
uagguggcucucauuucu

SEQ ID NO: 654328 - RNA, 19 nt, Artificial Sequence
  Synthetic
auagguggcucucauuucu

SEQ ID NO: 654329 - RNA, 20 nt, Artificial Sequence
  Synthetic
cauagguggcucucauuucu

SEQ ID NO: 654330 - RNA, 21 nt, Artificial Sequence
  Synthetic
acauagguggcucucauuucu

SEQ ID NO: 654331 - RNA, 22 nt, Artificial Sequence
  Synthetic
uacauagguggcucucauuucu

SEQ ID NO: 654332 - RNA, 23 nt, Artificial Sequence
  Synthetic
uuacauagguggcucucauuucu

SEQ ID NO: 654333 - RNA, 24 nt, Artificial Sequence
  Synthetic
auuacauagguggcucucauuucu

SEQ ID NO: 654334 - RNA, 18 nt, Artificial Sequence
  Synthetic
cacauaacuuucauuucu

SEQ ID NO: 654335 - RNA, 19 nt, Artificial Sequence
  Synthetic
gcacauaacuuucauuucu

SEQ ID NO: 654336 - RNA, 20 nt, Artificial Sequence
  Synthetic
agcacauaacuuucauuucu

SEQ ID NO: 654337 - RNA, 21 nt, Artificial Sequence
  Synthetic
gagcacauaacuuucauuucu

SEQ ID NO: 654338 - RNA, 22 nt, Artificial Sequence
  Synthetic
ggagcacauaacuuucauuucu

SEQ ID NO: 654339 - RNA, 23 nt, Artificial Sequence
  Synthetic
aggagcacauaacuuucauuucu

SEQ ID NO: 654340 - RNA, 24 nt, Artificial Sequence
  Synthetic
gaggagcacauaacuuucauuucu

SEQ ID NO: 654341 - RNA, 18 nt, Artificial Sequence
  Synthetic
uucucaguuuucauuucu

SEQ ID NO: 654342 - RNA, 19 nt, Artificial Sequence
  Synthetic
uuucucaguuuucauuucu

SEQ ID NO: 654343 - RNA, 20 nt, Artificial Sequence
  Synthetic
guuucucaguuuucauuucu

SEQ ID NO: 654344 - RNA, 21 nt, Artificial Sequence
  Synthetic
gguuucucaguuuucauuucu

SEQ ID NO: 654345 - RNA, 22 nt, Artificial Sequence
  Synthetic
ugguuucucaguuuucauuucu

SEQ ID NO: 654346 - RNA, 23 nt, Artificial Sequence
  Synthetic
augguuucucaguuuucauuucu

SEQ ID NO: 654347 - RNA, 24 nt, Artificial Sequence
  Synthetic
aaugguuucucaguuuucauuucu

SEQ ID NO: 654348 - RNA, 18 nt, Artificial Sequence
  Synthetic
acacaacauaagauuucu

SEQ ID NO: 654349 - RNA, 19 nt, Artificial Sequence
  Synthetic
aacacaacauaagauuucu

SEQ ID NO: 654350 - RNA, 20 nt, Artificial Sequence
  Synthetic
gaacacaacauaagauuucu

SEQ ID NO: 654351 - RNA, 21 nt, Artificial Sequence
  Synthetic
agaacacaacauaagauuucu

SEQ ID NO: 654352 - RNA, 22 nt, Artificial Sequence
  Synthetic
aagaacacaacauaagauuucu

SEQ ID NO: 654353 - RNA, 23 nt, Artificial Sequence
  Synthetic
uaagaacacaacauaagauuucu

SEQ ID NO: 654354 - RNA, 24 nt, Artificial Sequence
  Synthetic
guaagaacacaacauaagauuucu

SEQ ID NO: 654355 - RNA, 18 nt, Artificial Sequence
  Synthetic
uuuugaaaauagauuucu

SEQ ID NO: 654356 - RNA, 19 nt, Artificial Sequence
  Synthetic
uuuuugaaaauagauuucu

SEQ ID NO: 654357 - RNA, 20 nt, Artificial Sequence
  Synthetic
auuuuugaaaauagauuucu

SEQ ID NO: 654358 - RNA, 21 nt, Artificial Sequence
  Synthetic
uauuuuugaaaauagauuucu

SEQ ID NO: 654359 - RNA, 22 nt, Artificial Sequence
  Synthetic
auauuuuugaaaauagauuucu

SEQ ID NO: 654360 - RNA, 23 nt, Artificial Sequence
  Synthetic
uauauuuuugaaaauagauuucu

SEQ ID NO: 654361 - RNA, 24 nt, Artificial Sequence
  Synthetic
guauauuuuugaaaauagauuucu

SEQ ID NO: 654362 - RNA, 18 nt, Artificial Sequence
  Synthetic
ggcaguagauggauuucu

SEQ ID NO: 654363 - RNA, 19 nt, Artificial Sequence
  Synthetic
uggcaguagauggauuucu

SEQ ID NO: 654364 - RNA, 20 nt, Artificial Sequence
  Synthetic
auggcaguagauggauuucu

SEQ ID NO: 654365 - RNA, 21 nt, Artificial Sequence
  Synthetic
aauggcaguagauggauuucu

SEQ ID NO: 654366 - RNA, 22 nt, Artificial Sequence
  Synthetic
gaauggcaguagauggauuucu

SEQ ID NO: 654367 - RNA, 23 nt, Artificial Sequence
  Synthetic
agaauggcaguagauggauuucu

SEQ ID NO: 654368 - RNA, 24 nt, Artificial Sequence
  Synthetic
cagaauggcaguagauggauuucu

SEQ ID NO: 654369 - RNA, 18 nt, Artificial Sequence
  Synthetic
aaaaguggucugauuucu

SEQ ID NO: 654370 - RNA, 19 nt, Artificial Sequence
  Synthetic
aaaaaguggucugauuucu

SEQ ID NO: 654371 - RNA, 20 nt, Artificial Sequence
  Synthetic
aaaaaaguggucugauuucu

SEQ ID NO: 654372 - RNA, 21 nt, Artificial Sequence
  Synthetic
aaaaaaaguggucugauuucu

SEQ ID NO: 654373 - RNA, 22 nt, Artificial Sequence
  Synthetic
gaaaaaaaguggucugauuucu

SEQ ID NO: 654374 - RNA, 23 nt, Artificial Sequence
  Synthetic
ggaaaaaaaguggucugauuucu

SEQ ID NO: 654375 - RNA, 24 nt, Artificial Sequence
  Synthetic
gggaaaaaaaguggucugauuucu

SEQ ID NO: 654376 - RNA, 18 nt, Artificial Sequence
  Synthetic
gaaaaauacuugauuucu

SEQ ID NO: 654377 - RNA, 19 nt, Artificial Sequence
  Synthetic
agaaaaauacuugauuucu

SEQ ID NO: 654378 - RNA, 20 nt, Artificial Sequence
  Synthetic
aagaaaaauacuugauuucu

SEQ ID NO: 654379 - RNA, 21 nt, Artificial Sequence
  Synthetic
aaagaaaaauacuugauuucu

SEQ ID NO: 654380 - RNA, 22 nt, Artificial Sequence
  Synthetic
aaaagaaaaauacuugauuucu

SEQ ID NO: 654381 - RNA, 23 nt, Artificial Sequence
  Synthetic
aaaaagaaaaauacuugauuucu

SEQ ID NO: 654382 - RNA, 24 nt, Artificial Sequence
  Synthetic
gaaaaagaaaaauacuugauuucu

SEQ ID NO: 654383 - RNA, 18 nt, Artificial Sequence
  Synthetic
gccuucuguaauauuucu

SEQ ID NO: 654384 - RNA, 19 nt, Artificial Sequence
  Synthetic
ugccuucuguaauauuucu

SEQ ID NO: 654385 - RNA, 20 nt, Artificial Sequence
  Synthetic
uugccuucuguaauauuucu

SEQ ID NO: 654386 - RNA, 21 nt, Artificial Sequence
  Synthetic
uuugccuucuguaauauuucu

SEQ ID NO: 654387 - RNA, 22 nt, Artificial Sequence
  Synthetic
uuuugccuucuguaauauuucu

SEQ ID NO: 654388 - RNA, 23 nt, Artificial Sequence
  Synthetic
uuuuugccuucuguaauauuucu

SEQ ID NO: 654389 - RNA, 24 nt, Artificial Sequence
  Synthetic
auuuuugccuucuguaauauuucu

SEQ ID NO: 654390 - RNA, 18 nt, Artificial Sequence
  Synthetic
ugaaccugauauauuucu

SEQ ID NO: 654391 - RNA, 19 nt, Artificial Sequence
  Synthetic
augaaccugauauauuucu

SEQ ID NO: 654392 - RNA, 20 nt, Artificial Sequence
  Synthetic
aaugaaccugauauauuucu

SEQ ID NO: 654393 - RNA, 21 nt, Artificial Sequence
  Synthetic
uaaugaaccugauauauuucu

SEQ ID NO: 654394 - RNA, 22 nt, Artificial Sequence
  Synthetic
guaaugaaccugauauauuucu

SEQ ID NO: 654395 - RNA, 23 nt, Artificial Sequence
  Synthetic
uguaaugaaccugauauauuucu

SEQ ID NO: 654396 - RNA, 24 nt, Artificial Sequence
  Synthetic
auguaaugaaccugauauauuucu

SEQ ID NO: 654397 - RNA, 18 nt, Artificial Sequence
  Synthetic
cuucucuccuauauuucu

SEQ ID NO: 654398 - RNA, 19 nt, Artificial Sequence
  Synthetic
acuucucuccuauauuucu

SEQ ID NO: 654399 - RNA, 20 nt, Artificial Sequence
  Synthetic
uacuucucuccuauauuucu

SEQ ID NO: 654400 - RNA, 21 nt, Artificial Sequence
  Synthetic
uuacuucucuccuauauuucu

SEQ ID NO: 654401 - RNA, 22 nt, Artificial Sequence
  Synthetic
auuacuucucuccuauauuucu

SEQ ID NO: 654402 - RNA, 23 nt, Artificial Sequence
  Synthetic
aauuacuucucuccuauauuucu

SEQ ID NO: 654403 - RNA, 24 nt, Artificial Sequence
  Synthetic
aaauuacuucucuccuauauuucu

SEQ ID NO: 654404 - RNA, 18 nt, Artificial Sequence
  Synthetic
gguaguacuccuauuucu

SEQ ID NO: 654405 - RNA, 19 nt, Artificial Sequence
  Synthetic
agguaguacuccuauuucu

SEQ ID NO: 654406 - RNA, 20 nt, Artificial Sequence
  Synthetic
cagguaguacuccuauuucu

SEQ ID NO: 654407 - RNA, 21 nt, Artificial Sequence
  Synthetic
ucagguaguacuccuauuucu

SEQ ID NO: 654408 - RNA, 22 nt, Artificial Sequence
  Synthetic
uucagguaguacuccuauuucu

SEQ ID NO: 654409 - RNA, 23 nt, Artificial Sequence
  Synthetic
cuucagguaguacuccuauuucu

SEQ ID NO: 654410 - RNA, 24 nt, Artificial Sequence
  Synthetic
ucuucagguaguacuccuauuucu

SEQ ID NO: 654411 - RNA, 18 nt, Artificial Sequence
  Synthetic
ggaaucaaugcuauuucu

SEQ ID NO: 654412 - RNA, 19 nt, Artificial Sequence
  Synthetic
aggaaucaaugcuauuucu

SEQ ID NO: 654413 - RNA, 20 nt, Artificial Sequence
  Synthetic
aaggaaucaaugcuauuucu

SEQ ID NO: 654414 - RNA, 21 nt, Artificial Sequence
  Synthetic
gaaggaaucaaugcuauuucu

SEQ ID NO: 654415 - RNA, 22 nt, Artificial Sequence
  Synthetic
ggaaggaaucaaugcuauuucu

SEQ ID NO: 654416 - RNA, 23 nt, Artificial Sequence
  Synthetic
aggaaggaaucaaugcuauuucu

SEQ ID NO: 654417 - RNA, 24 nt, Artificial Sequence
  Synthetic
aaggaaggaaucaaugcuauuucu

SEQ ID NO: 654418 - RNA, 18 nt, Artificial Sequence
  Synthetic
cagauucuacguauuucu

SEQ ID NO: 654419 - RNA, 19 nt, Artificial Sequence
  Synthetic
ccagauucuacguauuucu

SEQ ID NO: 654420 - RNA, 20 nt, Artificial Sequence
  Synthetic
cccagauucuacguauuucu

SEQ ID NO: 654421 - RNA, 21 nt, Artificial Sequence
  Synthetic
acccagauucuacguauuucu

SEQ ID NO: 654422 - RNA, 22 nt, Artificial Sequence
  Synthetic
gacccagauucuacguauuucu

SEQ ID NO: 654423 - RNA, 23 nt, Artificial Sequence
  Synthetic
agacccagauucuacguauuucu

SEQ ID NO: 654424 - RNA, 24 nt, Artificial Sequence
  Synthetic
aagacccagauucuacguauuucu

SEQ ID NO: 654425 - RNA, 18 nt, Artificial Sequence
  Synthetic
cagccagcuuguauuucu

SEQ ID NO: 654426 - RNA, 19 nt, Artificial Sequence
  Synthetic
gcagccagcuuguauuucu

SEQ ID NO: 654427 - RNA, 20 nt, Artificial Sequence
  Synthetic
ugcagccagcuuguauuucu

SEQ ID NO: 654428 - RNA, 21 nt, Artificial Sequence
  Synthetic
cugcagccagcuuguauuucu

SEQ ID NO: 654429 - RNA, 22 nt, Artificial Sequence
  Synthetic
ucugcagccagcuuguauuucu

SEQ ID NO: 654430 - RNA, 23 nt, Artificial Sequence
  Synthetic
uucugcagccagcuuguauuucu

SEQ ID NO: 654431 - RNA, 24 nt, Artificial Sequence
  Synthetic
guucugcagccagcuuguauuucu

SEQ ID NO: 654432 - RNA, 18 nt, Artificial Sequence
  Synthetic
acgguaguuuguauuucu

SEQ ID NO: 654433 - RNA, 19 nt, Artificial Sequence
  Synthetic
gacgguaguuuguauuucu

SEQ ID NO: 654434 - RNA, 20 nt, Artificial Sequence
  Synthetic
ugacgguaguuuguauuucu

SEQ ID NO: 654435 - RNA, 21 nt, Artificial Sequence
  Synthetic
cugacgguaguuuguauuucu

SEQ ID NO: 654436 - RNA, 22 nt, Artificial Sequence
  Synthetic
ucugacgguaguuuguauuucu

SEQ ID NO: 654437 - RNA, 23 nt, Artificial Sequence
  Synthetic
cucugacgguaguuuguauuucu

SEQ ID NO: 654438 - RNA, 24 nt, Artificial Sequence
  Synthetic
ucucugacgguaguuuguauuucu

SEQ ID NO: 654439 - RNA, 21 nt, Artificial Sequence
  Synthetic
cugaugguaguuuguauuucu

SEQ ID NO: 654440 - RNA, 22 nt, Artificial Sequence
  Synthetic
ucugaugguaguuuguauuucu

SEQ ID NO: 654441 - RNA, 23 nt, Artificial Sequence
  Synthetic
cucugaugguaguuuguauuucu

SEQ ID NO: 654442 - RNA, 24 nt, Artificial Sequence
  Synthetic
ucucugaugguaguuuguauuucu

SEQ ID NO: 654443 - RNA, 21 nt, Artificial Sequence
  Synthetic
uagauaugcggcauuauuucu

SEQ ID NO: 654444 - RNA, 22 nt, Artificial Sequence
  Synthetic
guagauaugcggcauuauuucu

SEQ ID NO: 654445 - RNA, 23 nt, Artificial Sequence
  Synthetic
uguagauaugcggcauuauuucu

SEQ ID NO: 654446 - RNA, 24 nt, Artificial Sequence
  Synthetic
uuguagauaugcggcauuauuucu

SEQ ID NO: 654447 - RNA, 18 nt, Artificial Sequence
  Synthetic
aggucaugacuuauuucu

SEQ ID NO: 654448 - RNA, 19 nt, Artificial Sequence
  Synthetic
aaggucaugacuuauuucu

SEQ ID NO: 654449 - RNA, 20 nt, Artificial Sequence
  Synthetic
caaggucaugacuuauuucu

SEQ ID NO: 654450 - RNA, 21 nt, Artificial Sequence
  Synthetic
acaaggucaugacuuauuucu

SEQ ID NO: 654451 - RNA, 22 nt, Artificial Sequence
  Synthetic
cacaaggucaugacuuauuucu

SEQ ID NO: 654452 - RNA, 23 nt, Artificial Sequence
  Synthetic
gcacaaggucaugacuuauuucu

SEQ ID NO: 654453 - RNA, 24 nt, Artificial Sequence
  Synthetic
ugcacaaggucaugacuuauuucu

SEQ ID NO: 654454 - RNA, 18 nt, Artificial Sequence
  Synthetic
aaucccuaaguuauuucu

SEQ ID NO: 654455 - RNA, 19 nt, Artificial Sequence
  Synthetic
caaucccuaaguuauuucu

SEQ ID NO: 654456 - RNA, 20 nt, Artificial Sequence
  Synthetic
ccaaucccuaaguuauuucu

SEQ ID NO: 654457 - RNA, 21 nt, Artificial Sequence
  Synthetic
accaaucccuaaguuauuucu

SEQ ID NO: 654458 - RNA, 22 nt, Artificial Sequence
  Synthetic
aaccaaucccuaaguuauuucu

SEQ ID NO: 654459 - RNA, 23 nt, Artificial Sequence
  Synthetic
aaaccaaucccuaaguuauuucu

SEQ ID NO: 654460 - RNA, 24 nt, Artificial Sequence
  Synthetic
uaaaccaaucccuaaguuauuucu

SEQ ID NO: 654461 - RNA, 18 nt, Artificial Sequence
  Synthetic
guauguggcguuauuucu

SEQ ID NO: 654462 - RNA, 19 nt, Artificial Sequence
  Synthetic
gguauguggcguuauuucu

SEQ ID NO: 654463 - RNA, 20 nt, Artificial Sequence
  Synthetic
agguauguggcguuauuucu

SEQ ID NO: 654464 - RNA, 21 nt, Artificial Sequence
  Synthetic
uagguauguggcguuauuucu

SEQ ID NO: 654465 - RNA, 22 nt, Artificial Sequence
  Synthetic
guagguauguggcguuauuucu

SEQ ID NO: 654466 - RNA, 23 nt, Artificial Sequence
  Synthetic
uguagguauguggcguuauuucu

SEQ ID NO: 654467 - RNA, 24 nt, Artificial Sequence
  Synthetic
uuguagguauguggcguuauuucu

SEQ ID NO: 654468 - RNA, 18 nt, Artificial Sequence
  Synthetic
uuagcaacuucacuuucu

SEQ ID NO: 654469 - RNA, 19 nt, Artificial Sequence
  Synthetic
cuuagcaacuucacuuucu

SEQ ID NO: 654470 - RNA, 20 nt, Artificial Sequence
  Synthetic
ucuuagcaacuucacuuucu

SEQ ID NO: 654471 - RNA, 21 nt, Artificial Sequence
  Synthetic
cucuuagcaacuucacuuucu

SEQ ID NO: 654472 - RNA, 22 nt, Artificial Sequence
  Synthetic
gcucuuagcaacuucacuuucu

SEQ ID NO: 654473 - RNA, 23 nt, Artificial Sequence
  Synthetic
ugcucuuagcaacuucacuuucu

SEQ ID NO: 654474 - RNA, 24 nt, Artificial Sequence
  Synthetic
uugcucuuagcaacuucacuuucu

SEQ ID NO: 654475 - RNA, 18 nt, Artificial Sequence
  Synthetic
uacuuuaauagacuuucu

SEQ ID NO: 654476 - RNA, 19 nt, Artificial Sequence
  Synthetic
auacuuuaauagacuuucu

SEQ ID NO: 654477 - RNA, 20 nt, Artificial Sequence
  Synthetic
aauacuuuaauagacuuucu

SEQ ID NO: 654478 - RNA, 21 nt, Artificial Sequence
  Synthetic
caauacuuuaauagacuuucu

SEQ ID NO: 654479 - RNA, 22 nt, Artificial Sequence
  Synthetic
ucaauacuuuaauagacuuucu

SEQ ID NO: 654480 - RNA, 23 nt, Artificial Sequence
  Synthetic
aucaauacuuuaauagacuuucu

SEQ ID NO: 654481 - RNA, 24 nt, Artificial Sequence
  Synthetic
aaucaauacuuuaauagacuuucu

SEQ ID NO: 654482 - RNA, 18 nt, Artificial Sequence
  Synthetic
uaagugucacuacuuucu

SEQ ID NO: 654483 - RNA, 19 nt, Artificial Sequence
  Synthetic
uuaagugucacuacuuucu

SEQ ID NO: 654484 - RNA, 20 nt, Artificial Sequence
  Synthetic
uuuaagugucacuacuuucu

SEQ ID NO: 654485 - RNA, 21 nt, Artificial Sequence
  Synthetic
uuuuaagugucacuacuuucu

SEQ ID NO: 654486 - RNA, 22 nt, Artificial Sequence
  Synthetic
auuuuaagugucacuacuuucu

SEQ ID NO: 654487 - RNA, 23 nt, Artificial Sequence
  Synthetic
cauuuuaagugucacuacuuucu

SEQ ID NO: 654488 - RNA, 24 nt, Artificial Sequence
  Synthetic
ccauuuuaagugucacuacuuucu

SEQ ID NO: 654489 - RNA, 18 nt, Artificial Sequence
  Synthetic
uuugaaaagcaccuuucu

SEQ ID NO: 654490 - RNA, 19 nt, Artificial Sequence
  Synthetic
uuuugaaaagcaccuuucu

SEQ ID NO: 654491 - RNA, 20 nt, Artificial Sequence
  Synthetic
uuuuugaaaagcaccuuucu

SEQ ID NO: 654492 - RNA, 21 nt, Artificial Sequence
  Synthetic
guuuuugaaaagcaccuuucu

SEQ ID NO: 654493 - RNA, 22 nt, Artificial Sequence
  Synthetic
uguuuuugaaaagcaccuuucu

SEQ ID NO: 654494 - RNA, 23 nt, Artificial Sequence
  Synthetic
cuguuuuugaaaagcaccuuucu

SEQ ID NO: 654495 - RNA, 24 nt, Artificial Sequence
  Synthetic
acuguuuuugaaaagcaccuuucu

SEQ ID NO: 654496 - RNA, 18 nt, Artificial Sequence
  Synthetic
auaguuauuugccuuucu

SEQ ID NO: 654497 - RNA, 19 nt, Artificial Sequence
  Synthetic
aauaguuauuugccuuucu

SEQ ID NO: 654498 - RNA, 20 nt, Artificial Sequence
  Synthetic
aaauaguuauuugccuuucu

SEQ ID NO: 654499 - RNA, 21 nt, Artificial Sequence
  Synthetic
gaaauaguuauuugccuuucu

SEQ ID NO: 654500 - RNA, 22 nt, Artificial Sequence
  Synthetic
ugaaauaguuauuugccuuucu

SEQ ID NO: 654501 - RNA, 23 nt, Artificial Sequence
  Synthetic
uugaaauaguuauuugccuuucu

SEQ ID NO: 654502 - RNA, 24 nt, Artificial Sequence
  Synthetic
guugaaauaguuauuugccuuucu

SEQ ID NO: 654503 - RNA, 18 nt, Artificial Sequence
  Synthetic
gaaaccaagaggcuuucu

SEQ ID NO: 654504 - RNA, 19 nt, Artificial Sequence
  Synthetic
ggaaaccaagaggcuuucu

SEQ ID NO: 654505 - RNA, 20 nt, Artificial Sequence
  Synthetic
uggaaaccaagaggcuuucu

SEQ ID NO: 654506 - RNA, 21 nt, Artificial Sequence
  Synthetic
guggaaaccaagaggcuuucu

SEQ ID NO: 654507 - RNA, 22 nt, Artificial Sequence
  Synthetic
uguggaaaccaagaggcuuucu

SEQ ID NO: 654508 - RNA, 23 nt, Artificial Sequence
  Synthetic
cuguggaaaccaagaggcuuucu

SEQ ID NO: 654509 - RNA, 24 nt, Artificial Sequence
  Synthetic
ccuguggaaaccaagaggcuuucu

SEQ ID NO: 654510 - RNA, 18 nt, Artificial Sequence
  Synthetic
uuuaggacauggcuuucu

SEQ ID NO: 654511 - RNA, 19 nt, Artificial Sequence
  Synthetic
uuuuaggacauggcuuucu

SEQ ID NO: 654512 - RNA, 20 nt, Artificial Sequence
  Synthetic
cuuuuaggacauggcuuucu

SEQ ID NO: 654513 - RNA, 21 nt, Artificial Sequence
  Synthetic
ucuuuuaggacauggcuuucu

SEQ ID NO: 654514 - RNA, 22 nt, Artificial Sequence
  Synthetic
aucuuuuaggacauggcuuucu

SEQ ID NO: 654515 - RNA, 23 nt, Artificial Sequence
  Synthetic
caucuuuuaggacauggcuuucu

SEQ ID NO: 654516 - RNA, 24 nt, Artificial Sequence
  Synthetic
ucaucuuuuaggacauggcuuucu

SEQ ID NO: 654517 - RNA, 18 nt, Artificial Sequence
  Synthetic
ucucagaaucugcuuucu

SEQ ID NO: 654518 - RNA, 19 nt, Artificial Sequence
  Synthetic
uucucagaaucugcuuucu

SEQ ID NO: 654519 - RNA, 20 nt, Artificial Sequence
  Synthetic
uuucucagaaucugcuuucu

SEQ ID NO: 654520 - RNA, 21 nt, Artificial Sequence
  Synthetic
cuuucucagaaucugcuuucu

SEQ ID NO: 654521 - RNA, 22 nt, Artificial Sequence
  Synthetic
acuuucucagaaucugcuuucu

SEQ ID NO: 654522 - RNA, 23 nt, Artificial Sequence
  Synthetic
cacuuucucagaaucugcuuucu

SEQ ID NO: 654523 - RNA, 24 nt, Artificial Sequence
  Synthetic
ucacuuucucagaaucugcuuucu

SEQ ID NO: 654524 - RNA, 18 nt, Artificial Sequence
  Synthetic
ucugaaauucugcuuucu

SEQ ID NO: 654525 - RNA, 19 nt, Artificial Sequence
  Synthetic
cucugaaauucugcuuucu

SEQ ID NO: 654526 - RNA, 20 nt, Artificial Sequence
  Synthetic
acucugaaauucugcuuucu

SEQ ID NO: 654527 - RNA, 21 nt, Artificial Sequence
  Synthetic
cacucugaaauucugcuuucu

SEQ ID NO: 654528 - RNA, 22 nt, Artificial Sequence
  Synthetic
ccacucugaaauucugcuuucu

SEQ ID NO: 654529 - RNA, 23 nt, Artificial Sequence
  Synthetic
cccacucugaaauucugcuuucu

SEQ ID NO: 654530 - RNA, 24 nt, Artificial Sequence
  Synthetic
acccacucugaaauucugcuuucu

SEQ ID NO: 654531 - RNA, 18 nt, Artificial Sequence
  Synthetic
uacaugcugaaucuuucu

SEQ ID NO: 654532 - RNA, 19 nt, Artificial Sequence
  Synthetic
guacaugcugaaucuuucu

SEQ ID NO: 654533 - RNA, 20 nt, Artificial Sequence
  Synthetic
uguacaugcugaaucuuucu

SEQ ID NO: 654534 - RNA, 21 nt, Artificial Sequence
  Synthetic
auguacaugcugaaucuuucu

SEQ ID NO: 654535 - RNA, 22 nt, Artificial Sequence
  Synthetic
cauguacaugcugaaucuuucu

SEQ ID NO: 654536 - RNA, 23 nt, Artificial Sequence
  Synthetic
acauguacaugcugaaucuuucu

SEQ ID NO: 654537 - RNA, 24 nt, Artificial Sequence
  Synthetic
cacauguacaugcugaaucuuucu

SEQ ID NO: 654538 - RNA, 18 nt, Artificial Sequence
  Synthetic
aauaacccuuaucuuucu

SEQ ID NO: 654539 - RNA, 19 nt, Artificial Sequence
  Synthetic
aaauaacccuuaucuuucu

SEQ ID NO: 654540 - RNA, 20 nt, Artificial Sequence
  Synthetic
uaaauaacccuuaucuuucu

SEQ ID NO: 654541 - RNA, 21 nt, Artificial Sequence
  Synthetic
uuaaauaacccuuaucuuucu

SEQ ID NO: 654542 - RNA, 22 nt, Artificial Sequence
  Synthetic
uuuaaauaacccuuaucuuucu

SEQ ID NO: 654543 - RNA, 23 nt, Artificial Sequence
  Synthetic
auuuaaauaacccuuaucuuucu

SEQ ID NO: 654544 - RNA, 24 nt, Artificial Sequence
  Synthetic
aauuuaaauaacccuuaucuuucu

SEQ ID NO: 654545 - RNA, 18 nt, Artificial Sequence
  Synthetic
cuuaaucguugucuuucu

SEQ ID NO: 654546 - RNA, 19 nt, Artificial Sequence
  Synthetic
acuuaaucguugucuuucu

SEQ ID NO: 654547 - RNA, 20 nt, Artificial Sequence
  Synthetic
uacuuaaucguugucuuucu

SEQ ID NO: 654548 - RNA, 21 nt, Artificial Sequence
  Synthetic
cuacuuaaucguugucuuucu

SEQ ID NO: 654549 - RNA, 22 nt, Artificial Sequence
  Synthetic
ucuacuuaaucguugucuuucu

SEQ ID NO: 654550 - RNA, 23 nt, Artificial Sequence
  Synthetic
uucuacuuaaucguugucuuucu

SEQ ID NO: 654551 - RNA, 24 nt, Artificial Sequence
  Synthetic
cuucuacuuaaucguugucuuucu

SEQ ID NO: 654552 - RNA, 18 nt, Artificial Sequence
  Synthetic
aauugucuucaaguuucu

SEQ ID NO: 654553 - RNA, 19 nt, Artificial Sequence
  Synthetic
caauugucuucaaguuucu

SEQ ID NO: 654554 - RNA, 20 nt, Artificial Sequence
  Synthetic
ccaauugucuucaaguuucu

SEQ ID NO: 654555 - RNA, 21 nt, Artificial Sequence
  Synthetic
uccaauugucuucaaguuucu

SEQ ID NO: 654556 - RNA, 22 nt, Artificial Sequence
  Synthetic
uuccaauugucuucaaguuucu

SEQ ID NO: 654557 - RNA, 23 nt, Artificial Sequence
  Synthetic
auuccaauugucuucaaguuucu

SEQ ID NO: 654558 - RNA, 24 nt, Artificial Sequence
  Synthetic
aauuccaauugucuucaaguuucu

SEQ ID NO: 654559 - RNA, 18 nt, Artificial Sequence
  Synthetic
aaaauaaagagaguuucu

SEQ ID NO: 654560 - RNA, 19 nt, Artificial Sequence
  Synthetic
uaaaauaaagagaguuucu

SEQ ID NO: 654561 - RNA, 20 nt, Artificial Sequence
  Synthetic
auaaaauaaagagaguuucu

SEQ ID NO: 654562 - RNA, 21 nt, Artificial Sequence
  Synthetic
gauaaaauaaagagaguuucu

SEQ ID NO: 654563 - RNA, 22 nt, Artificial Sequence
  Synthetic
ugauaaaauaaagagaguuucu

SEQ ID NO: 654564 - RNA, 23 nt, Artificial Sequence
  Synthetic
uugauaaaauaaagagaguuucu

SEQ ID NO: 654565 - RNA, 24 nt, Artificial Sequence
  Synthetic
auugauaaaauaaagagaguuucu

SEQ ID NO: 654566 - RNA, 18 nt, Artificial Sequence
  Synthetic
auucuauaaugaguuucu

SEQ ID NO: 654567 - RNA, 19 nt, Artificial Sequence
  Synthetic
aauucuauaaugaguuucu

SEQ ID NO: 654568 - RNA, 20 nt, Artificial Sequence
  Synthetic
gaauucuauaaugaguuucu

SEQ ID NO: 654569 - RNA, 21 nt, Artificial Sequence
  Synthetic
ugaauucuauaaugaguuucu

SEQ ID NO: 654570 - RNA, 22 nt, Artificial Sequence
  Synthetic
augaauucuauaaugaguuucu

SEQ ID NO: 654571 - RNA, 23 nt, Artificial Sequence
  Synthetic
caugaauucuauaaugaguuucu

SEQ ID NO: 654572 - RNA, 24 nt, Artificial Sequence
  Synthetic
acaugaauucuauaaugaguuucu

SEQ ID NO: 654573 - RNA, 18 nt, Artificial Sequence
  Synthetic
acucuuaccuccguuucu

SEQ ID NO: 654574 - RNA, 19 nt, Artificial Sequence
  Synthetic
gacucuuaccuccguuucu

SEQ ID NO: 654575 - RNA, 20 nt, Artificial Sequence
  Synthetic
ggacucuuaccuccguuucu

SEQ ID NO: 654576 - RNA, 21 nt, Artificial Sequence
  Synthetic
aggacucuuaccuccguuucu

SEQ ID NO: 654577 - RNA, 22 nt, Artificial Sequence
  Synthetic
uaggacucuuaccuccguuucu

SEQ ID NO: 654578 - RNA, 23 nt, Artificial Sequence
  Synthetic
auaggacucuuaccuccguuucu

SEQ ID NO: 654579 - RNA, 24 nt, Artificial Sequence
  Synthetic
gauaggacucuuaccuccguuucu

SEQ ID NO: 654580 - RNA, 18 nt, Artificial Sequence
  Synthetic
ucaagauaauggguuucu

SEQ ID NO: 654581 - RNA, 19 nt, Artificial Sequence
  Synthetic
uucaagauaauggguuucu

SEQ ID NO: 654582 - RNA, 20 nt, Artificial Sequence
  Synthetic
auucaagauaauggguuucu

SEQ ID NO: 654583 - RNA, 21 nt, Artificial Sequence
  Synthetic
cauucaagauaauggguuucu

SEQ ID NO: 654584 - RNA, 22 nt, Artificial Sequence
  Synthetic
acauucaagauaauggguuucu

SEQ ID NO: 654585 - RNA, 23 nt, Artificial Sequence
  Synthetic
aacauucaagauaauggguuucu

SEQ ID NO: 654586 - RNA, 24 nt, Artificial Sequence
  Synthetic
aaacauucaagauaauggguuucu

SEQ ID NO: 654587 - RNA, 18 nt, Artificial Sequence
  Synthetic
agcacugcugugguuucu

SEQ ID NO: 654588 - RNA, 19 nt, Artificial Sequence
  Synthetic
gagcacugcugugguuucu

SEQ ID NO: 654589 - RNA, 20 nt, Artificial Sequence
  Synthetic
ugagcacugcugugguuucu

SEQ ID NO: 654590 - RNA, 21 nt, Artificial Sequence
  Synthetic
uugagcacugcugugguuucu

SEQ ID NO: 654591 - RNA, 22 nt, Artificial Sequence
  Synthetic
auugagcacugcugugguuucu

SEQ ID NO: 654592 - RNA, 23 nt, Artificial Sequence
  Synthetic
aauugagcacugcugugguuucu

SEQ ID NO: 654593 - RNA, 24 nt, Artificial Sequence
  Synthetic
caauugagcacugcugugguuucu

SEQ ID NO: 654594 - RNA, 18 nt, Artificial Sequence
  Synthetic
gcagagggaaauguuucu

SEQ ID NO: 654595 - RNA, 19 nt, Artificial Sequence
  Synthetic
ggcagagggaaauguuucu

SEQ ID NO: 654596 - RNA, 20 nt, Artificial Sequence
  Synthetic
aggcagagggaaauguuucu

SEQ ID NO: 654597 - RNA, 21 nt, Artificial Sequence
  Synthetic
gaggcagagggaaauguuucu

SEQ ID NO: 654598 - RNA, 22 nt, Artificial Sequence
  Synthetic
ugaggcagagggaaauguuucu

SEQ ID NO: 654599 - RNA, 23 nt, Artificial Sequence
  Synthetic
augaggcagagggaaauguuucu

SEQ ID NO: 654600 - RNA, 24 nt, Artificial Sequence
  Synthetic
caugaggcagagggaaauguuucu

SEQ ID NO: 654601 - RNA, 18 nt, Artificial Sequence
  Synthetic
uucuguuccuauguuucu

SEQ ID NO: 654602 - RNA, 19 nt, Artificial Sequence
  Synthetic
auucuguuccuauguuucu

SEQ ID NO: 654603 - RNA, 20 nt, Artificial Sequence
  Synthetic
cauucuguuccuauguuucu

SEQ ID NO: 654604 - RNA, 21 nt, Artificial Sequence
  Synthetic
ucauucuguuccuauguuucu

SEQ ID NO: 654605 - RNA, 22 nt, Artificial Sequence
  Synthetic
gucauucuguuccuauguuucu

SEQ ID NO: 654606 - RNA, 23 nt, Artificial Sequence
  Synthetic
ggucauucuguuccuauguuucu

SEQ ID NO: 654607 - RNA, 24 nt, Artificial Sequence
  Synthetic
gggucauucuguuccuauguuucu

SEQ ID NO: 654608 - RNA, 18 nt, Artificial Sequence
  Synthetic
ggaauauaaccuguuucu

SEQ ID NO: 654609 - RNA, 19 nt, Artificial Sequence
  Synthetic
uggaauauaaccuguuucu

SEQ ID NO: 654610 - RNA, 20 nt, Artificial Sequence
  Synthetic
uuggaauauaaccuguuucu

SEQ ID NO: 654611 - RNA, 21 nt, Artificial Sequence
  Synthetic
uuuggaauauaaccuguuucu

SEQ ID NO: 654612 - RNA, 22 nt, Artificial Sequence
  Synthetic
auuuggaauauaaccuguuucu

SEQ ID NO: 654613 - RNA, 23 nt, Artificial Sequence
  Synthetic
cauuuggaauauaaccuguuucu

SEQ ID NO: 654614 - RNA, 24 nt, Artificial Sequence
  Synthetic
ucauuuggaauauaaccuguuucu

SEQ ID NO: 654615 - RNA, 18 nt, Artificial Sequence
  Synthetic
gaaauaauuuuuguuucu

SEQ ID NO: 654616 - RNA, 19 nt, Artificial Sequence
  Synthetic
ggaaauaauuuuuguuucu

SEQ ID NO: 654617 - RNA, 20 nt, Artificial Sequence
  Synthetic
uggaaauaauuuuuguuucu

SEQ ID NO: 654618 - RNA, 21 nt, Artificial Sequence
  Synthetic
auggaaauaauuuuuguuucu

SEQ ID NO: 654619 - RNA, 22 nt, Artificial Sequence
  Synthetic
uauggaaauaauuuuuguuucu

SEQ ID NO: 654620 - RNA, 23 nt, Artificial Sequence
  Synthetic
uuauggaaauaauuuuuguuucu

SEQ ID NO: 654621 - RNA, 24 nt, Artificial Sequence
  Synthetic
uuuauggaaauaauuuuuguuucu

SEQ ID NO: 654622 - RNA, 18 nt, Artificial Sequence
  Synthetic
uguauuccuacauuuucu

SEQ ID NO: 654623 - RNA, 19 nt, Artificial Sequence
  Synthetic
uuguauuccuacauuuucu

SEQ ID NO: 654624 - RNA, 20 nt, Artificial Sequence
  Synthetic
auuguauuccuacauuuucu

SEQ ID NO: 654625 - RNA, 21 nt, Artificial Sequence
  Synthetic
cauuguauuccuacauuuucu

SEQ ID NO: 654626 - RNA, 22 nt, Artificial Sequence
  Synthetic
ccauuguauuccuacauuuucu

SEQ ID NO: 654627 - RNA, 23 nt, Artificial Sequence
  Synthetic
uccauuguauuccuacauuuucu

SEQ ID NO: 654628 - RNA, 24 nt, Artificial Sequence
  Synthetic
auccauuguauuccuacauuuucu

SEQ ID NO: 654629 - RNA, 18 nt, Artificial Sequence
  Synthetic
ugugugauuccauuuucu

SEQ ID NO: 654630 - RNA, 19 nt, Artificial Sequence
  Synthetic
cugugugauuccauuuucu

SEQ ID NO: 654631 - RNA, 20 nt, Artificial Sequence
  Synthetic
gcugugugauuccauuuucu

SEQ ID NO: 654632 - RNA, 21 nt, Artificial Sequence
  Synthetic
ggcugugugauuccauuuucu

SEQ ID NO: 654633 - RNA, 22 nt, Artificial Sequence
  Synthetic
uggcugugugauuccauuuucu

SEQ ID NO: 654634 - RNA, 23 nt, Artificial Sequence
  Synthetic
uuggcugugugauuccauuuucu

SEQ ID NO: 654635 - RNA, 24 nt, Artificial Sequence
  Synthetic
auuggcugugugauuccauuuucu

SEQ ID NO: 654636 - RNA, 18 nt, Artificial Sequence
  Synthetic
aagaaaaacucauuuucu

SEQ ID NO: 654637 - RNA, 19 nt, Artificial Sequence
  Synthetic
aaagaaaaacucauuuucu

SEQ ID NO: 654638 - RNA, 20 nt, Artificial Sequence
  Synthetic
aaaagaaaaacucauuuucu

SEQ ID NO: 654639 - RNA, 21 nt, Artificial Sequence
  Synthetic
gaaaagaaaaacucauuuucu

SEQ ID NO: 654640 - RNA, 22 nt, Artificial Sequence
  Synthetic
agaaaagaaaaacucauuuucu

SEQ ID NO: 654641 - RNA, 23 nt, Artificial Sequence
  Synthetic
uagaaaagaaaaacucauuuucu

SEQ ID NO: 654642 - RNA, 24 nt, Artificial Sequence
  Synthetic
auagaaaagaaaaacucauuuucu

SEQ ID NO: 654643 - RNA, 18 nt, Artificial Sequence
  Synthetic
uuucauuucggauuuucu

SEQ ID NO: 654644 - RNA, 19 nt, Artificial Sequence
  Synthetic
auuucauuucggauuuucu

SEQ ID NO: 654645 - RNA, 20 nt, Artificial Sequence
  Synthetic
uauuucauuucggauuuucu

SEQ ID NO: 654646 - RNA, 21 nt, Artificial Sequence
  Synthetic
uuauuucauuucggauuuucu

SEQ ID NO: 654647 - RNA, 22 nt, Artificial Sequence
  Synthetic
auuauuucauuucggauuuucu

SEQ ID NO: 654648 - RNA, 23 nt, Artificial Sequence
  Synthetic
cauuauuucauuucggauuuucu

SEQ ID NO: 654649 - RNA, 24 nt, Artificial Sequence
  Synthetic
ucauuauuucauuucggauuuucu

SEQ ID NO: 654650 - RNA, 18 nt, Artificial Sequence
  Synthetic
cuaauguauauauuuucu

SEQ ID NO: 654651 - RNA, 19 nt, Artificial Sequence
  Synthetic
ccuaauguauauauuuucu

SEQ ID NO: 654652 - RNA, 20 nt, Artificial Sequence
  Synthetic
accuaauguauauauuuucu

SEQ ID NO: 654653 - RNA, 21 nt, Artificial Sequence
  Synthetic
caccuaauguauauauuuucu

SEQ ID NO: 654654 - RNA, 22 nt, Artificial Sequence
  Synthetic
acaccuaauguauauauuuucu

SEQ ID NO: 654655 - RNA, 23 nt, Artificial Sequence
  Synthetic
aacaccuaauguauauauuuucu

SEQ ID NO: 654656 - RNA, 24 nt, Artificial Sequence
  Synthetic
uaacaccuaauguauauauuuucu

SEQ ID NO: 654657 - RNA, 18 nt, Artificial Sequence
  Synthetic
gucaucuacuacuuuucu

SEQ ID NO: 654658 - RNA, 19 nt, Artificial Sequence
  Synthetic
agucaucuacuacuuuucu

SEQ ID NO: 654659 - RNA, 20 nt, Artificial Sequence
  Synthetic
uagucaucuacuacuuuucu

SEQ ID NO: 654660 - RNA, 21 nt, Artificial Sequence
  Synthetic
auagucaucuacuacuuuucu

SEQ ID NO: 654661 - RNA, 22 nt, Artificial Sequence
  Synthetic
uauagucaucuacuacuuuucu

SEQ ID NO: 654662 - RNA, 23 nt, Artificial Sequence
  Synthetic
uuauagucaucuacuacuuuucu

SEQ ID NO: 654663 - RNA, 24 nt, Artificial Sequence
  Synthetic
auuauagucaucuacuacuuuucu

SEQ ID NO: 654664 - RNA, 18 nt, Artificial Sequence
  Synthetic
auauuguucaccuuuucu

SEQ ID NO: 654665 - RNA, 19 nt, Artificial Sequence
  Synthetic
aauauuguucaccuuuucu

SEQ ID NO: 654666 - RNA, 20 nt, Artificial Sequence
  Synthetic
aaauauuguucaccuuuucu

SEQ ID NO: 654667 - RNA, 21 nt, Artificial Sequence
  Synthetic
aaaauauuguucaccuuuucu

SEQ ID NO: 654668 - RNA, 22 nt, Artificial Sequence
  Synthetic
uaaaauauuguucaccuuuucu

SEQ ID NO: 654669 - RNA, 23 nt, Artificial Sequence
  Synthetic
uuaaaauauuguucaccuuuucu

SEQ ID NO: 654670 - RNA, 24 nt, Artificial Sequence
  Synthetic
auuaaaauauuguucaccuuuucu

SEQ ID NO: 654671 - RNA, 18 nt, Artificial Sequence
  Synthetic
gaaaccacuaccuuuucu

SEQ ID NO: 654672 - RNA, 19 nt, Artificial Sequence
  Synthetic
agaaaccacuaccuuuucu

SEQ ID NO: 654673 - RNA, 20 nt, Artificial Sequence
  Synthetic
aagaaaccacuaccuuuucu

SEQ ID NO: 654674 - RNA, 21 nt, Artificial Sequence
  Synthetic
aaagaaaccacuaccuuuucu

SEQ ID NO: 654675 - RNA, 22 nt, Artificial Sequence
  Synthetic
aaaagaaaccacuaccuuuucu

SEQ ID NO: 654676 - RNA, 23 nt, Artificial Sequence
  Synthetic
aaaaagaaaccacuaccuuuucu

SEQ ID NO: 654677 - RNA, 24 nt, Artificial Sequence
  Synthetic
gaaaaagaaaccacuaccuuuucu

SEQ ID NO: 654678 - RNA, 18 nt, Artificial Sequence
  Synthetic
auaagcauucccuuuucu

SEQ ID NO: 654679 - RNA, 19 nt, Artificial Sequence
  Synthetic
uauaagcauucccuuuucu

SEQ ID NO: 654680 - RNA, 20 nt, Artificial Sequence
  Synthetic
guauaagcauucccuuuucu

SEQ ID NO: 654681 - RNA, 21 nt, Artificial Sequence
  Synthetic
uguauaagcauucccuuuucu

SEQ ID NO: 654682 - RNA, 22 nt, Artificial Sequence
  Synthetic
guguauaagcauucccuuuucu

SEQ ID NO: 654683 - RNA, 23 nt, Artificial Sequence
  Synthetic
aguguauaagcauucccuuuucu

SEQ ID NO: 654684 - RNA, 24 nt, Artificial Sequence
  Synthetic
caguguauaagcauucccuuuucu

SEQ ID NO: 654685 - RNA, 18 nt, Artificial Sequence
  Synthetic
gaauauuaugccuuuucu

SEQ ID NO: 654686 - RNA, 19 nt, Artificial Sequence
  Synthetic
agaauauuaugccuuuucu

SEQ ID NO: 654687 - RNA, 20 nt, Artificial Sequence
  Synthetic
uagaauauuaugccuuuucu

SEQ ID NO: 654688 - RNA, 21 nt, Artificial Sequence
  Synthetic
auagaauauuaugccuuuucu

SEQ ID NO: 654689 - RNA, 22 nt, Artificial Sequence
  Synthetic
aauagaauauuaugccuuuucu

SEQ ID NO: 654690 - RNA, 23 nt, Artificial Sequence
  Synthetic
uaauagaauauuaugccuuuucu

SEQ ID NO: 654691 - RNA, 24 nt, Artificial Sequence
  Synthetic
uuaauagaauauuaugccuuuucu

SEQ ID NO: 654692 - RNA, 18 nt, Artificial Sequence
  Synthetic
accugaccuuccuuuucu

SEQ ID NO: 654693 - RNA, 19 nt, Artificial Sequence
  Synthetic
gaccugaccuuccuuuucu

SEQ ID NO: 654694 - RNA, 20 nt, Artificial Sequence
  Synthetic
agaccugaccuuccuuuucu

SEQ ID NO: 654695 - RNA, 21 nt, Artificial Sequence
  Synthetic
uagaccugaccuuccuuuucu

SEQ ID NO: 654696 - RNA, 22 nt, Artificial Sequence
  Synthetic
uuagaccugaccuuccuuuucu

SEQ ID NO: 654697 - RNA, 23 nt, Artificial Sequence
  Synthetic
uuuagaccugaccuuccuuuucu

SEQ ID NO: 654698 - RNA, 24 nt, Artificial Sequence
  Synthetic
cuuuagaccugaccuuccuuuucu

SEQ ID NO: 654699 - RNA, 18 nt, Artificial Sequence
  Synthetic
uuagcuuugcucuuuucu

SEQ ID NO: 654700 - RNA, 19 nt, Artificial Sequence
  Synthetic
uuuagcuuugcucuuuucu

SEQ ID NO: 654701 - RNA, 20 nt, Artificial Sequence
  Synthetic
cuuuagcuuugcucuuuucu

SEQ ID NO: 654702 - RNA, 21 nt, Artificial Sequence
  Synthetic
gcuuuagcuuugcucuuuucu

SEQ ID NO: 654703 - RNA, 22 nt, Artificial Sequence
  Synthetic
cgcuuuagcuuugcucuuuucu

SEQ ID NO: 654704 - RNA, 23 nt, Artificial Sequence
  Synthetic
acgcuuuagcuuugcucuuuucu

SEQ ID NO: 654705 - RNA, 24 nt, Artificial Sequence
  Synthetic
uacgcuuuagcuuugcucuuuucu

SEQ ID NO: 654706 - RNA, 18 nt, Artificial Sequence
  Synthetic
cauugagcuauguuuucu

SEQ ID NO: 654707 - RNA, 19 nt, Artificial Sequence
  Synthetic
ucauugagcuauguuuucu

SEQ ID NO: 654708 - RNA, 20 nt, Artificial Sequence
  Synthetic
uucauugagcuauguuuucu

SEQ ID NO: 654709 - RNA, 21 nt, Artificial Sequence
  Synthetic
cuucauugagcuauguuuucu

SEQ ID NO: 654710 - RNA, 22 nt, Artificial Sequence
  Synthetic
acuucauugagcuauguuuucu

SEQ ID NO: 654711 - RNA, 23 nt, Artificial Sequence
  Synthetic
aacuucauugagcuauguuuucu

SEQ ID NO: 654712 - RNA, 24 nt, Artificial Sequence
  Synthetic
uaacuucauugagcuauguuuucu

SEQ ID NO: 654713 - RNA, 18 nt, Artificial Sequence
  Synthetic
aggcaaucuguguuuucu

SEQ ID NO: 654714 - RNA, 19 nt, Artificial Sequence
  Synthetic
gaggcaaucuguguuuucu

SEQ ID NO: 654715 - RNA, 20 nt, Artificial Sequence
  Synthetic
ggaggcaaucuguguuuucu

SEQ ID NO: 654716 - RNA, 21 nt, Artificial Sequence
  Synthetic
aggaggcaaucuguguuuucu

SEQ ID NO: 654717 - RNA, 22 nt, Artificial Sequence
  Synthetic
uaggaggcaaucuguguuuucu

SEQ ID NO: 654718 - RNA, 23 nt, Artificial Sequence
  Synthetic
cuaggaggcaaucuguguuuucu

SEQ ID NO: 654719 - RNA, 24 nt, Artificial Sequence
  Synthetic
gcuaggaggcaaucuguguuuucu

SEQ ID NO: 654720 - RNA, 18 nt, Artificial Sequence
  Synthetic
uauguguguguguuuucu

SEQ ID NO: 654721 - RNA, 19 nt, Artificial Sequence
  Synthetic
guauguguguguguuuucu

SEQ ID NO: 654722 - RNA, 20 nt, Artificial Sequence
  Synthetic
uguauguguguguguuuucu

SEQ ID NO: 654723 - RNA, 21 nt, Artificial Sequence
  Synthetic
guguauguguguguguuuucu

SEQ ID NO: 654724 - RNA, 22 nt, Artificial Sequence
  Synthetic
uguguauguguguguguuuucu

SEQ ID NO: 654725 - RNA, 23 nt, Artificial Sequence
  Synthetic
guguguauguguguguguuuucu

SEQ ID NO: 654726 - RNA, 24 nt, Artificial Sequence
  Synthetic
uguguguauguguguguguuuucu

SEQ ID NO: 654727 - RNA, 18 nt, Artificial Sequence
  Synthetic
gaaaaacucaauuuuucu

SEQ ID NO: 654728 - RNA, 19 nt, Artificial Sequence
  Synthetic
ugaaaaacucaauuuuucu

SEQ ID NO: 654729 - RNA, 20 nt, Artificial Sequence
  Synthetic
uugaaaaacucaauuuuucu

SEQ ID NO: 654730 - RNA, 21 nt, Artificial Sequence
  Synthetic
guugaaaaacucaauuuuucu

SEQ ID NO: 654731 - RNA, 22 nt, Artificial Sequence
  Synthetic
uguugaaaaacucaauuuuucu

SEQ ID NO: 654732 - RNA, 23 nt, Artificial Sequence
  Synthetic
guguugaaaaacucaauuuuucu

SEQ ID NO: 654733 - RNA, 24 nt, Artificial Sequence
  Synthetic
uguguugaaaaacucaauuuuucu

SEQ ID NO: 654734 - RNA, 18 nt, Artificial Sequence
  Synthetic
cauguuugugauuuuucu

SEQ ID NO: 654735 - RNA, 19 nt, Artificial Sequence
  Synthetic
acauguuugugauuuuucu

SEQ ID NO: 654736 - RNA, 20 nt, Artificial Sequence
  Synthetic
gacauguuugugauuuuucu

SEQ ID NO: 654737 - RNA, 21 nt, Artificial Sequence
  Synthetic
agacauguuugugauuuuucu

SEQ ID NO: 654738 - RNA, 22 nt, Artificial Sequence
  Synthetic
gagacauguuugugauuuuucu

SEQ ID NO: 654739 - RNA, 23 nt, Artificial Sequence
  Synthetic
agagacauguuugugauuuuucu

SEQ ID NO: 654740 - RNA, 24 nt, Artificial Sequence
  Synthetic
aagagacauguuugugauuuuucu

SEQ ID NO: 654741 - RNA, 18 nt, Artificial Sequence
  Synthetic
uagaccugauauuuuucu

SEQ ID NO: 654742 - RNA, 19 nt, Artificial Sequence
  Synthetic
cuagaccugauauuuuucu

SEQ ID NO: 654743 - RNA, 20 nt, Artificial Sequence
  Synthetic
acuagaccugauauuuuucu

SEQ ID NO: 654744 - RNA, 21 nt, Artificial Sequence
  Synthetic
cacuagaccugauauuuuucu

SEQ ID NO: 654745 - RNA, 22 nt, Artificial Sequence
  Synthetic
gcacuagaccugauauuuuucu

SEQ ID NO: 654746 - RNA, 23 nt, Artificial Sequence
  Synthetic
ugcacuagaccugauauuuuucu

SEQ ID NO: 654747 - RNA, 24 nt, Artificial Sequence
  Synthetic
cugcacuagaccugauauuuuucu

SEQ ID NO: 654748 - RNA, 18 nt, Artificial Sequence
  Synthetic
agaccuguuacuuuuucu

SEQ ID NO: 654749 - RNA, 19 nt, Artificial Sequence
  Synthetic
uagaccuguuacuuuuucu

SEQ ID NO: 654750 - RNA, 20 nt, Artificial Sequence
  Synthetic
guagaccuguuacuuuuucu

SEQ ID NO: 654751 - RNA, 21 nt, Artificial Sequence
  Synthetic
aguagaccuguuacuuuuucu

SEQ ID NO: 654752 - RNA, 22 nt, Artificial Sequence
  Synthetic
gaguagaccuguuacuuuuucu

SEQ ID NO: 654753 - RNA, 23 nt, Artificial Sequence
  Synthetic
agaguagaccuguuacuuuuucu

SEQ ID NO: 654754 - RNA, 24 nt, Artificial Sequence
  Synthetic
aagaguagaccuguuacuuuuucu

SEQ ID NO: 654755 - RNA, 18 nt, Artificial Sequence
  Synthetic
augaaagacucuuuuucu

SEQ ID NO: 654756 - RNA, 19 nt, Artificial Sequence
  Synthetic
caugaaagacucuuuuucu

SEQ ID NO: 654757 - RNA, 20 nt, Artificial Sequence
  Synthetic
acaugaaagacucuuuuucu

SEQ ID NO: 654758 - RNA, 21 nt, Artificial Sequence
  Synthetic
cacaugaaagacucuuuuucu

SEQ ID NO: 654759 - RNA, 22 nt, Artificial Sequence
  Synthetic
ucacaugaaagacucuuuuucu

SEQ ID NO: 654760 - RNA, 23 nt, Artificial Sequence
  Synthetic
uucacaugaaagacucuuuuucu

SEQ ID NO: 654761 - RNA, 24 nt, Artificial Sequence
  Synthetic
uuucacaugaaagacucuuuuucu

SEQ ID NO: 654762 - RNA, 18 nt, Artificial Sequence
  Synthetic
guucaauuuucuuuuucu

SEQ ID NO: 654763 - RNA, 19 nt, Artificial Sequence
  Synthetic
uguucaauuuucuuuuucu

SEQ ID NO: 654764 - RNA, 20 nt, Artificial Sequence
  Synthetic
auguucaauuuucuuuuucu

SEQ ID NO: 654765 - RNA, 21 nt, Artificial Sequence
  Synthetic
aauguucaauuuucuuuuucu

SEQ ID NO: 654766 - RNA, 22 nt, Artificial Sequence
  Synthetic
aaauguucaauuuucuuuuucu

SEQ ID NO: 654767 - RNA, 23 nt, Artificial Sequence
  Synthetic
caaauguucaauuuucuuuuucu

SEQ ID NO: 654768 - RNA, 24 nt, Artificial Sequence
  Synthetic
ucaaauguucaauuuucuuuuucu

SEQ ID NO: 654769 - RNA, 18 nt, Artificial Sequence
  Synthetic
ccaguucuacguuuuucu

SEQ ID NO: 654770 - RNA, 19 nt, Artificial Sequence
  Synthetic
accaguucuacguuuuucu

SEQ ID NO: 654771 - RNA, 20 nt, Artificial Sequence
  Synthetic
gaccaguucuacguuuuucu

SEQ ID NO: 654772 - RNA, 21 nt, Artificial Sequence
  Synthetic
cgaccaguucuacguuuuucu

SEQ ID NO: 654773 - RNA, 22 nt, Artificial Sequence
  Synthetic
ucgaccaguucuacguuuuucu

SEQ ID NO: 654774 - RNA, 23 nt, Artificial Sequence
  Synthetic
cucgaccaguucuacguuuuucu

SEQ ID NO: 654775 - RNA, 24 nt, Artificial Sequence
  Synthetic
ccucgaccaguucuacguuuuucu

SEQ ID NO: 654776 - RNA, 18 nt, Artificial Sequence
  Synthetic
gaguccuuaauuuuuucu

SEQ ID NO: 654777 - RNA, 19 nt, Artificial Sequence
  Synthetic
ggaguccuuaauuuuuucu

SEQ ID NO: 654778 - RNA, 20 nt, Artificial Sequence
  Synthetic
aggaguccuuaauuuuuucu

SEQ ID NO: 654779 - RNA, 21 nt, Artificial Sequence
  Synthetic
aaggaguccuuaauuuuuucu

SEQ ID NO: 654780 - RNA, 22 nt, Artificial Sequence
  Synthetic
aaaggaguccuuaauuuuuucu

SEQ ID NO: 654781 - RNA, 23 nt, Artificial Sequence
  Synthetic
aaaaggaguccuuaauuuuuucu

SEQ ID NO: 654782 - RNA, 24 nt, Artificial Sequence
  Synthetic
aaaaaggaguccuuaauuuuuucu

SEQ ID NO: 654783 - RNA, 18 nt, Artificial Sequence
  Synthetic
auaguaccucuuuuuucu

SEQ ID NO: 654784 - RNA, 19 nt, Artificial Sequence
  Synthetic
cauaguaccucuuuuuucu

SEQ ID NO: 654785 - RNA, 20 nt, Artificial Sequence
  Synthetic
gcauaguaccucuuuuuucu

SEQ ID NO: 654786 - RNA, 21 nt, Artificial Sequence
  Synthetic
ugcauaguaccucuuuuuucu

SEQ ID NO: 654787 - RNA, 22 nt, Artificial Sequence
  Synthetic
uugcauaguaccucuuuuuucu

SEQ ID NO: 654788 - RNA, 23 nt, Artificial Sequence
  Synthetic
uuugcauaguaccucuuuuuucu

SEQ ID NO: 654789 - RNA, 24 nt, Artificial Sequence
  Synthetic
auuugcauaguaccucuuuuuucu

SEQ ID NO: 654790 - RNA, 18 nt, Artificial Sequence
  Synthetic
guagauuuuuuuuuuucu

SEQ ID NO: 654791 - RNA, 19 nt, Artificial Sequence
  Synthetic
cguagauuuuuuuuuuucu

SEQ ID NO: 654792 - RNA, 20 nt, Artificial Sequence
  Synthetic
gcguagauuuuuuuuuuucu

SEQ ID NO: 654793 - RNA, 21 nt, Artificial Sequence
  Synthetic
ugcguagauuuuuuuuuuucu

SEQ ID NO: 654794 - RNA, 22 nt, Artificial Sequence
  Synthetic
augcguagauuuuuuuuuuucu

SEQ ID NO: 654795 - RNA, 23 nt, Artificial Sequence
  Synthetic
caugcguagauuuuuuuuuuucu

SEQ ID NO: 654796 - RNA, 24 nt, Artificial Sequence
  Synthetic
gcaugcguagauuuuuuuuuuucu

SEQ ID NO: 654797 - RNA, 18 nt, Artificial Sequence
  Synthetic
aaaaaaaaaaaaaaaagu

SEQ ID NO: 654798 - RNA, 19 nt, Artificial Sequence
  Synthetic
aaaaaaaaaaaaaaaaagu

SEQ ID NO: 654799 - RNA, 20 nt, Artificial Sequence
  Synthetic
aaaaaaaaaaaaaaaaaagu

SEQ ID NO: 654800 - RNA, 21 nt, Artificial Sequence
  Synthetic
aaaaaaaaaaaaaaaaaaagu

SEQ ID NO: 654801 - RNA, 22 nt, Artificial Sequence
  Synthetic
aaaaaaaaaaaaaaaaaaaagu

SEQ ID NO: 654802 - RNA, 23 nt, Artificial Sequence
  Synthetic
aaaaaaaaaaaaaaaaaaaaagu

SEQ ID NO: 654803 - RNA, 24 nt, Artificial Sequence
  Synthetic
aaaaaaaaaaaaaaaaaaaaaagu

SEQ ID NO: 654804 - RNA, 18 nt, Artificial Sequence
  Synthetic
ugucuuuggaaaaaaagu

SEQ ID NO: 654805 - RNA, 19 nt, Artificial Sequence
  Synthetic
augucuuuggaaaaaaagu

SEQ ID NO: 654806 - RNA, 20 nt, Artificial Sequence
  Synthetic
aaugucuuuggaaaaaaagu

SEQ ID NO: 654807 - RNA, 21 nt, Artificial Sequence
  Synthetic
aaaugucuuuggaaaaaaagu

SEQ ID NO: 654808 - RNA, 22 nt, Artificial Sequence
  Synthetic
caaaugucuuuggaaaaaaagu

SEQ ID NO: 654809 - RNA, 23 nt, Artificial Sequence
  Synthetic
gcaaaugucuuuggaaaaaaagu

SEQ ID NO: 654810 - RNA, 24 nt, Artificial Sequence
  Synthetic
ugcaaaugucuuuggaaaaaaagu

SEQ ID NO: 654811 - RNA, 18 nt, Artificial Sequence
  Synthetic
cagagccaggaaaaaagu

SEQ ID NO: 654812 - RNA, 19 nt, Artificial Sequence
  Synthetic
acagagccaggaaaaaagu

SEQ ID NO: 654813 - RNA, 20 nt, Artificial Sequence
  Synthetic
aacagagccaggaaaaaagu

SEQ ID NO: 654814 - RNA, 21 nt, Artificial Sequence
  Synthetic
aaacagagccaggaaaaaagu

SEQ ID NO: 654815 - RNA, 22 nt, Artificial Sequence
  Synthetic
aaaacagagccaggaaaaaagu

SEQ ID NO: 654816 - RNA, 23 nt, Artificial Sequence
  Synthetic
caaaacagagccaggaaaaaagu

SEQ ID NO: 654817 - RNA, 24 nt, Artificial Sequence
  Synthetic
gcaaaacagagccaggaaaaaagu

SEQ ID NO: 654818 - RNA, 18 nt, Artificial Sequence
  Synthetic
guagaaaaaacaaaaagu

SEQ ID NO: 654819 - RNA, 19 nt, Artificial Sequence
  Synthetic
aguagaaaaaacaaaaagu

SEQ ID NO: 654820 - RNA, 20 nt, Artificial Sequence
  Synthetic
gaguagaaaaaacaaaaagu

SEQ ID NO: 654821 - RNA, 21 nt, Artificial Sequence
  Synthetic
ugaguagaaaaaacaaaaagu

SEQ ID NO: 654822 - RNA, 22 nt, Artificial Sequence
  Synthetic
uugaguagaaaaaacaaaaagu

SEQ ID NO: 654823 - RNA, 23 nt, Artificial Sequence
  Synthetic
guugaguagaaaaaacaaaaagu

SEQ ID NO: 654824 - RNA, 24 nt, Artificial Sequence
  Synthetic
aguugaguagaaaaaacaaaaagu

SEQ ID NO: 654825 - RNA, 18 nt, Artificial Sequence
  Synthetic
ucucauaauucaaaaagu

SEQ ID NO: 654826 - RNA, 19 nt, Artificial Sequence
  Synthetic
uucucauaauucaaaaagu

SEQ ID NO: 654827 - RNA, 20 nt, Artificial Sequence
  Synthetic
cuucucauaauucaaaaagu

SEQ ID NO: 654828 - RNA, 21 nt, Artificial Sequence
  Synthetic
ucuucucauaauucaaaaagu

SEQ ID NO: 654829 - RNA, 22 nt, Artificial Sequence
  Synthetic
uucuucucauaauucaaaaagu

SEQ ID NO: 654830 - RNA, 23 nt, Artificial Sequence
  Synthetic
auucuucucauaauucaaaaagu

SEQ ID NO: 654831 - RNA, 24 nt, Artificial Sequence
  Synthetic
aauucuucucauaauucaaaaagu

SEQ ID NO: 654832 - RNA, 18 nt, Artificial Sequence
  Synthetic
gggguuggaggaaaaagu

SEQ ID NO: 654833 - RNA, 19 nt, Artificial Sequence
  Synthetic
ugggguuggaggaaaaagu

SEQ ID NO: 654834 - RNA, 20 nt, Artificial Sequence
  Synthetic
cugggguuggaggaaaaagu

SEQ ID NO: 654835 - RNA, 21 nt, Artificial Sequence
  Synthetic
acugggguuggaggaaaaagu

SEQ ID NO: 654836 - RNA, 22 nt, Artificial Sequence
  Synthetic
gacugggguuggaggaaaaagu

SEQ ID NO: 654837 - RNA, 23 nt, Artificial Sequence
  Synthetic
ugacugggguuggaggaaaaagu

SEQ ID NO: 654838 - RNA, 24 nt, Artificial Sequence
  Synthetic
augacugggguuggaggaaaaagu

SEQ ID NO: 654839 - RNA, 18 nt, Artificial Sequence
  Synthetic
aaauaccuaugaaaaagu

SEQ ID NO: 654840 - RNA, 19 nt, Artificial Sequence
  Synthetic
aaaauaccuaugaaaaagu

SEQ ID NO: 654841 - RNA, 20 nt, Artificial Sequence
  Synthetic
aaaaauaccuaugaaaaagu

SEQ ID NO: 654842 - RNA, 21 nt, Artificial Sequence
  Synthetic
aaaaaauaccuaugaaaaagu

SEQ ID NO: 654843 - RNA, 22 nt, Artificial Sequence
  Synthetic
uaaaaaauaccuaugaaaaagu

SEQ ID NO: 654844 - RNA, 23 nt, Artificial Sequence
  Synthetic
uuaaaaaauaccuaugaaaaagu

SEQ ID NO: 654845 - RNA, 24 nt, Artificial Sequence
  Synthetic
auuaaaaaauaccuaugaaaaagu

SEQ ID NO: 654846 - RNA, 18 nt, Artificial Sequence
  Synthetic
cccaccaccugaaaaagu

SEQ ID NO: 654847 - RNA, 19 nt, Artificial Sequence
  Synthetic
gcccaccaccugaaaaagu

SEQ ID NO: 654848 - RNA, 20 nt, Artificial Sequence
  Synthetic
ugcccaccaccugaaaaagu

SEQ ID NO: 654849 - RNA, 21 nt, Artificial Sequence
  Synthetic
uugcccaccaccugaaaaagu

SEQ ID NO: 654850 - RNA, 22 nt, Artificial Sequence
  Synthetic
guugcccaccaccugaaaaagu

SEQ ID NO: 654851 - RNA, 23 nt, Artificial Sequence
  Synthetic
aguugcccaccaccugaaaaagu

SEQ ID NO: 654852 - RNA, 24 nt, Artificial Sequence
  Synthetic
caguugcccaccaccugaaaaagu

SEQ ID NO: 654853 - RNA, 18 nt, Artificial Sequence
  Synthetic
cauauuuuaauaaaaagu

SEQ ID NO: 654854 - RNA, 19 nt, Artificial Sequence
  Synthetic
ucauauuuuaauaaaaagu

SEQ ID NO: 654855 - RNA, 20 nt, Artificial Sequence
  Synthetic
cucauauuuuaauaaaaagu

SEQ ID NO: 654856 - RNA, 21 nt, Artificial Sequence
  Synthetic
ccucauauuuuaauaaaaagu

SEQ ID NO: 654857 - RNA, 22 nt, Artificial Sequence
  Synthetic
accucauauuuuaauaaaaagu

SEQ ID NO: 654858 - RNA, 23 nt, Artificial Sequence
  Synthetic
caccucauauuuuaauaaaaagu

SEQ ID NO: 654859 - RNA, 24 nt, Artificial Sequence
  Synthetic
acaccucauauuuuaauaaaaagu

SEQ ID NO: 654860 - RNA, 21 nt, Artificial Sequence
  Synthetic
gaauggcgaucauuaaaaagu

SEQ ID NO: 654861 - RNA, 22 nt, Artificial Sequence
  Synthetic
agaauggcgaucauuaaaaagu

SEQ ID NO: 654862 - RNA, 23 nt, Artificial Sequence
  Synthetic
uagaauggcgaucauuaaaaagu

SEQ ID NO: 654863 - RNA, 24 nt, Artificial Sequence
  Synthetic
uuagaauggcgaucauuaaaaagu

SEQ ID NO: 654864 - RNA, 18 nt, Artificial Sequence
  Synthetic
uggugaucauuaaaaagu

SEQ ID NO: 654865 - RNA, 19 nt, Artificial Sequence
  Synthetic
auggugaucauuaaaaagu

SEQ ID NO: 654866 - RNA, 20 nt, Artificial Sequence
  Synthetic
aauggugaucauuaaaaagu

SEQ ID NO: 654867 - RNA, 21 nt, Artificial Sequence
  Synthetic
gaauggugaucauuaaaaagu

SEQ ID NO: 654868 - RNA, 22 nt, Artificial Sequence
  Synthetic
agaauggugaucauuaaaaagu

SEQ ID NO: 654869 - RNA, 23 nt, Artificial Sequence
  Synthetic
uagaauggugaucauuaaaaagu

SEQ ID NO: 654870 - RNA, 24 nt, Artificial Sequence
  Synthetic
uuagaauggugaucauuaaaaagu

SEQ ID NO: 654871 - RNA, 18 nt, Artificial Sequence
  Synthetic
aagauagaaaagaaaagu

SEQ ID NO: 654872 - RNA, 19 nt, Artificial Sequence
  Synthetic
uaagauagaaaagaaaagu

SEQ ID NO: 654873 - RNA, 20 nt, Artificial Sequence
  Synthetic
uuaagauagaaaagaaaagu

SEQ ID NO: 654874 - RNA, 21 nt, Artificial Sequence
  Synthetic
uuuaagauagaaaagaaaagu

SEQ ID NO: 654875 - RNA, 22 nt, Artificial Sequence
  Synthetic
auuuaagauagaaaagaaaagu

SEQ ID NO: 654876 - RNA, 23 nt, Artificial Sequence
  Synthetic
gauuuaagauagaaaagaaaagu

SEQ ID NO: 654877 - RNA, 24 nt, Artificial Sequence
  Synthetic
ugauuuaagauagaaaagaaaagu

SEQ ID NO: 654878 - RNA, 18 nt, Artificial Sequence
  Synthetic
aaauuguagaagaaaagu

SEQ ID NO: 654879 - RNA, 19 nt, Artificial Sequence
  Synthetic
gaaauuguagaagaaaagu

SEQ ID NO: 654880 - RNA, 20 nt, Artificial Sequence
  Synthetic
ggaaauuguagaagaaaagu

SEQ ID NO: 654881 - RNA, 21 nt, Artificial Sequence
  Synthetic
aggaaauuguagaagaaaagu

SEQ ID NO: 654882 - RNA, 22 nt, Artificial Sequence
  Synthetic
gaggaaauuguagaagaaaagu

SEQ ID NO: 654883 - RNA, 23 nt, Artificial Sequence
  Synthetic
ugaggaaauuguagaagaaaagu

SEQ ID NO: 654884 - RNA, 24 nt, Artificial Sequence
  Synthetic
gugaggaaauuguagaagaaaagu

SEQ ID NO: 654885 - RNA, 18 nt, Artificial Sequence
  Synthetic
acaugaaucuagaaaagu

SEQ ID NO: 654886 - RNA, 19 nt, Artificial Sequence
  Synthetic
aacaugaaucuagaaaagu

SEQ ID NO: 654887 - RNA, 20 nt, Artificial Sequence
  Synthetic
aaacaugaaucuagaaaagu

SEQ ID NO: 654888 - RNA, 21 nt, Artificial Sequence
  Synthetic
aaaacaugaaucuagaaaagu

SEQ ID NO: 654889 - RNA, 22 nt, Artificial Sequence
  Synthetic
gaaaacaugaaucuagaaaagu

SEQ ID NO: 654890 - RNA, 23 nt, Artificial Sequence
  Synthetic
ggaaaacaugaaucuagaaaagu

SEQ ID NO: 654891 - RNA, 24 nt, Artificial Sequence
  Synthetic
gggaaaacaugaaucuagaaaagu

SEQ ID NO: 654892 - RNA, 18 nt, Artificial Sequence
  Synthetic
aggaaaauguggaaaagu

SEQ ID NO: 654893 - RNA, 19 nt, Artificial Sequence
  Synthetic
caggaaaauguggaaaagu

SEQ ID NO: 654894 - RNA, 20 nt, Artificial Sequence
  Synthetic
acaggaaaauguggaaaagu

SEQ ID NO: 654895 - RNA, 21 nt, Artificial Sequence
  Synthetic
gacaggaaaauguggaaaagu

SEQ ID NO: 654896 - RNA, 22 nt, Artificial Sequence
  Synthetic
agacaggaaaauguggaaaagu

SEQ ID NO: 654897 - RNA, 23 nt, Artificial Sequence
  Synthetic
aagacaggaaaauguggaaaagu

SEQ ID NO: 654898 - RNA, 24 nt, Artificial Sequence
  Synthetic
gaagacaggaaaauguggaaaagu

SEQ ID NO: 654899 - RNA, 18 nt, Artificial Sequence
  Synthetic
gucacagagcauaaaagu

SEQ ID NO: 654900 - RNA, 19 nt, Artificial Sequence
  Synthetic
ggucacagagcauaaaagu

SEQ ID NO: 654901 - RNA, 20 nt, Artificial Sequence
  Synthetic
aggucacagagcauaaaagu

SEQ ID NO: 654902 - RNA, 21 nt, Artificial Sequence
  Synthetic
gaggucacagagcauaaaagu

SEQ ID NO: 654903 - RNA, 22 nt, Artificial Sequence
  Synthetic
agaggucacagagcauaaaagu

SEQ ID NO: 654904 - RNA, 23 nt, Artificial Sequence
  Synthetic
aagaggucacagagcauaaaagu

SEQ ID NO: 654905 - RNA, 24 nt, Artificial Sequence
  Synthetic
caagaggucacagagcauaaaagu

SEQ ID NO: 654906 - RNA, 18 nt, Artificial Sequence
  Synthetic
caagugcaguauaaaagu

SEQ ID NO: 654907 - RNA, 19 nt, Artificial Sequence
  Synthetic
gcaagugcaguauaaaagu

SEQ ID NO: 654908 - RNA, 20 nt, Artificial Sequence
  Synthetic
ugcaagugcaguauaaaagu

SEQ ID NO: 654909 - RNA, 21 nt, Artificial Sequence
  Synthetic
cugcaagugcaguauaaaagu

SEQ ID NO: 654910 - RNA, 22 nt, Artificial Sequence
  Synthetic
ucugcaagugcaguauaaaagu

SEQ ID NO: 654911 - RNA, 23 nt, Artificial Sequence
  Synthetic
uucugcaagugcaguauaaaagu

SEQ ID NO: 654912 - RNA, 24 nt, Artificial Sequence
  Synthetic
uuucugcaagugcaguauaaaagu

SEQ ID NO: 654913 - RNA, 18 nt, Artificial Sequence
  Synthetic
gaaaauuagccuaaaagu

SEQ ID NO: 654914 - RNA, 19 nt, Artificial Sequence
  Synthetic
ugaaaauuagccuaaaagu

SEQ ID NO: 654915 - RNA, 20 nt, Artificial Sequence
  Synthetic
augaaaauuagccuaaaagu

SEQ ID NO: 654916 - RNA, 21 nt, Artificial Sequence
  Synthetic
gaugaaaauuagccuaaaagu

SEQ ID NO: 654917 - RNA, 22 nt, Artificial Sequence
  Synthetic
agaugaaaauuagccuaaaagu

SEQ ID NO: 654918 - RNA, 23 nt, Artificial Sequence
  Synthetic
uagaugaaaauuagccuaaaagu

SEQ ID NO: 654919 - RNA, 24 nt, Artificial Sequence
  Synthetic
auagaugaaaauuagccuaaaagu

SEQ ID NO: 654920 - RNA, 18 nt, Artificial Sequence
  Synthetic
aagucauuuucuaaaagu

SEQ ID NO: 654921 - RNA, 19 nt, Artificial Sequence
  Synthetic
gaagucauuuucuaaaagu

SEQ ID NO: 654922 - RNA, 20 nt, Artificial Sequence
  Synthetic
ggaagucauuuucuaaaagu

SEQ ID NO: 654923 - RNA, 21 nt, Artificial Sequence
  Synthetic
gggaagucauuuucuaaaagu

SEQ ID NO: 654924 - RNA, 22 nt, Artificial Sequence
  Synthetic
ugggaagucauuuucuaaaagu

SEQ ID NO: 654925 - RNA, 23 nt, Artificial Sequence
  Synthetic
uugggaagucauuuucuaaaagu

SEQ ID NO: 654926 - RNA, 24 nt, Artificial Sequence
  Synthetic
uuugggaagucauuuucuaaaagu

SEQ ID NO: 654927 - RNA, 18 nt, Artificial Sequence
  Synthetic
auguucucgcuuaaaagu

SEQ ID NO: 654928 - RNA, 19 nt, Artificial Sequence
  Synthetic
cauguucucgcuuaaaagu

SEQ ID NO: 654929 - RNA, 20 nt, Artificial Sequence
  Synthetic
gcauguucucgcuuaaaagu

SEQ ID NO: 654930 - RNA, 21 nt, Artificial Sequence
  Synthetic
ugcauguucucgcuuaaaagu

SEQ ID NO: 654931 - RNA, 22 nt, Artificial Sequence
  Synthetic
cugcauguucucgcuuaaaagu

SEQ ID NO: 654932 - RNA, 23 nt, Artificial Sequence
  Synthetic
acugcauguucucgcuuaaaagu

SEQ ID NO: 654933 - RNA, 24 nt, Artificial Sequence
  Synthetic
uacugcauguucucgcuuaaaagu

SEQ ID NO: 654934 - RNA, 18 nt, Artificial Sequence
  Synthetic
aucugaaauguuaaaagu

SEQ ID NO: 654935 - RNA, 19 nt, Artificial Sequence
  Synthetic
uaucugaaauguuaaaagu

SEQ ID NO: 654936 - RNA, 20 nt, Artificial Sequence
  Synthetic
guaucugaaauguuaaaagu

SEQ ID NO: 654937 - RNA, 21 nt, Artificial Sequence
  Synthetic
aguaucugaaauguuaaaagu

SEQ ID NO: 654938 - RNA, 22 nt, Artificial Sequence
  Synthetic
aaguaucugaaauguuaaaagu

SEQ ID NO: 654939 - RNA, 23 nt, Artificial Sequence
  Synthetic
aaaguaucugaaauguuaaaagu

SEQ ID NO: 654940 - RNA, 24 nt, Artificial Sequence
  Synthetic
caaaguaucugaaauguuaaaagu

SEQ ID NO: 654941 - RNA, 18 nt, Artificial Sequence
  Synthetic
aaaauauuuugacaaagu

SEQ ID NO: 654942 - RNA, 19 nt, Artificial Sequence
  Synthetic
caaaauauuuugacaaagu

SEQ ID NO: 654943 - RNA, 20 nt, Artificial Sequence
  Synthetic
ucaaaauauuuugacaaagu

SEQ ID NO: 654944 - RNA, 21 nt, Artificial Sequence
  Synthetic
aucaaaauauuuugacaaagu

SEQ ID NO: 654945 - RNA, 22 nt, Artificial Sequence
  Synthetic
caucaaaauauuuugacaaagu

SEQ ID NO: 654946 - RNA, 23 nt, Artificial Sequence
  Synthetic
acaucaaaauauuuugacaaagu

SEQ ID NO: 654947 - RNA, 24 nt, Artificial Sequence
  Synthetic
gacaucaaaauauuuugacaaagu

SEQ ID NO: 654948 - RNA, 18 nt, Artificial Sequence
  Synthetic
guccaaccacuacaaagu

SEQ ID NO: 654949 - RNA, 19 nt, Artificial Sequence
  Synthetic
uguccaaccacuacaaagu

SEQ ID NO: 654950 - RNA, 20 nt, Artificial Sequence
  Synthetic
uuguccaaccacuacaaagu

SEQ ID NO: 654951 - RNA, 21 nt, Artificial Sequence
  Synthetic
uuuguccaaccacuacaaagu

SEQ ID NO: 654952 - RNA, 22 nt, Artificial Sequence
  Synthetic
uuuuguccaaccacuacaaagu

SEQ ID NO: 654953 - RNA, 23 nt, Artificial Sequence
  Synthetic
uuuuuguccaaccacuacaaagu

SEQ ID NO: 654954 - RNA, 24 nt, Artificial Sequence
  Synthetic
auuuuuguccaaccacuacaaagu

SEQ ID NO: 654955 - RNA, 18 nt, Artificial Sequence
  Synthetic
accuauuagguacaaagu

SEQ ID NO: 654956 - RNA, 19 nt, Artificial Sequence
  Synthetic
aaccuauuagguacaaagu

SEQ ID NO: 654957 - RNA, 20 nt, Artificial Sequence
  Synthetic
gaaccuauuagguacaaagu

SEQ ID NO: 654958 - RNA, 21 nt, Artificial Sequence
  Synthetic
ugaaccuauuagguacaaagu

SEQ ID NO: 654959 - RNA, 22 nt, Artificial Sequence
  Synthetic
uugaaccuauuagguacaaagu

SEQ ID NO: 654960 - RNA, 23 nt, Artificial Sequence
  Synthetic
uuugaaccuauuagguacaaagu

SEQ ID NO: 654961 - RNA, 24 nt, Artificial Sequence
  Synthetic
uuuugaaccuauuagguacaaagu

SEQ ID NO: 654962 - RNA, 18 nt, Artificial Sequence
  Synthetic
guuacagaagcccaaagu

SEQ ID NO: 654963 - RNA, 19 nt, Artificial Sequence
  Synthetic
uguuacagaagcccaaagu

SEQ ID NO: 654964 - RNA, 20 nt, Artificial Sequence
  Synthetic
guguuacagaagcccaaagu

SEQ ID NO: 654965 - RNA, 21 nt, Artificial Sequence
  Synthetic
aguguuacagaagcccaaagu

SEQ ID NO: 654966 - RNA, 22 nt, Artificial Sequence
  Synthetic
uaguguuacagaagcccaaagu

SEQ ID NO: 654967 - RNA, 23 nt, Artificial Sequence
  Synthetic
cuaguguuacagaagcccaaagu

SEQ ID NO: 654968 - RNA, 24 nt, Artificial Sequence
  Synthetic
acuaguguuacagaagcccaaagu

SEQ ID NO: 654969 - RNA, 18 nt, Artificial Sequence
  Synthetic
aaugucucugcccaaagu

SEQ ID NO: 654970 - RNA, 19 nt, Artificial Sequence
  Synthetic
aaaugucucugcccaaagu

SEQ ID NO: 654971 - RNA, 20 nt, Artificial Sequence
  Synthetic
caaaugucucugcccaaagu

SEQ ID NO: 654972 - RNA, 21 nt, Artificial Sequence
  Synthetic
ucaaaugucucugcccaaagu

SEQ ID NO: 654973 - RNA, 22 nt, Artificial Sequence
  Synthetic
uucaaaugucucugcccaaagu

SEQ ID NO: 654974 - RNA, 23 nt, Artificial Sequence
  Synthetic
uuucaaaugucucugcccaaagu

SEQ ID NO: 654975 - RNA, 24 nt, Artificial Sequence
  Synthetic
uuuucaaaugucucugcccaaagu

SEQ ID NO: 654976 - RNA, 18 nt, Artificial Sequence
  Synthetic
gaaaacguuauccaaagu

SEQ ID NO: 654977 - RNA, 19 nt, Artificial Sequence
  Synthetic
ggaaaacguuauccaaagu

SEQ ID NO: 654978 - RNA, 20 nt, Artificial Sequence
  Synthetic
aggaaaacguuauccaaagu

SEQ ID NO: 654979 - RNA, 21 nt, Artificial Sequence
  Synthetic
uaggaaaacguuauccaaagu

SEQ ID NO: 654980 - RNA, 22 nt, Artificial Sequence
  Synthetic
auaggaaaacguuauccaaagu

SEQ ID NO: 654981 - RNA, 23 nt, Artificial Sequence
  Synthetic
gauaggaaaacguuauccaaagu

SEQ ID NO: 654982 - RNA, 24 nt, Artificial Sequence
  Synthetic
agauaggaaaacguuauccaaagu

SEQ ID NO: 654983 - RNA, 18 nt, Artificial Sequence
  Synthetic
caguaagcaaggcaaagu

SEQ ID NO: 654984 - RNA, 19 nt, Artificial Sequence
  Synthetic
gcaguaagcaaggcaaagu

SEQ ID NO: 654985 - RNA, 20 nt, Artificial Sequence
  Synthetic
agcaguaagcaaggcaaagu

SEQ ID NO: 654986 - RNA, 21 nt, Artificial Sequence
  Synthetic
aagcaguaagcaaggcaaagu

SEQ ID NO: 654987 - RNA, 22 nt, Artificial Sequence
  Synthetic
uaagcaguaagcaaggcaaagu

SEQ ID NO: 654988 - RNA, 23 nt, Artificial Sequence
  Synthetic
auaagcaguaagcaaggcaaagu

SEQ ID NO: 654989 - RNA, 24 nt, Artificial Sequence
  Synthetic
aauaagcaguaagcaaggcaaagu

SEQ ID NO: 654990 - RNA, 23 nt, Artificial Sequence
  Synthetic
guaagcaguaagcaaggcaaagu

SEQ ID NO: 654991 - RNA, 24 nt, Artificial Sequence
  Synthetic
aguaagcaguaagcaaggcaaagu

SEQ ID NO: 654992 - RNA, 18 nt, Artificial Sequence
  Synthetic
ggaaguuggaggcaaagu

SEQ ID NO: 654993 - RNA, 19 nt, Artificial Sequence
  Synthetic
aggaaguuggaggcaaagu

SEQ ID NO: 654994 - RNA, 20 nt, Artificial Sequence
  Synthetic
gaggaaguuggaggcaaagu

SEQ ID NO: 654995 - RNA, 21 nt, Artificial Sequence
  Synthetic
agaggaaguuggaggcaaagu

SEQ ID NO: 654996 - RNA, 22 nt, Artificial Sequence
  Synthetic
gagaggaaguuggaggcaaagu

SEQ ID NO: 654997 - RNA, 23 nt, Artificial Sequence
  Synthetic
agagaggaaguuggaggcaaagu

SEQ ID NO: 654998 - RNA, 24 nt, Artificial Sequence
  Synthetic
cagagaggaaguuggaggcaaagu

SEQ ID NO: 654999 - RNA, 18 nt, Artificial Sequence
  Synthetic
ucugaugcacaucaaagu

SEQ ID NO: 655000 - RNA, 19 nt, Artificial Sequence
  Synthetic
uucugaugcacaucaaagu

SEQ ID NO: 655001 - RNA, 20 nt, Artificial Sequence
  Synthetic
auucugaugcacaucaaagu

SEQ ID NO: 655002 - RNA, 21 nt, Artificial Sequence
  Synthetic
gauucugaugcacaucaaagu

SEQ ID NO: 655003 - RNA, 22 nt, Artificial Sequence
  Synthetic
ugauucugaugcacaucaaagu

SEQ ID NO: 655004 - RNA, 23 nt, Artificial Sequence
  Synthetic
gugauucugaugcacaucaaagu

SEQ ID NO: 655005 - RNA, 24 nt, Artificial Sequence
  Synthetic
ggugauucugaugcacaucaaagu

SEQ ID NO: 655006 - RNA, 18 nt, Artificial Sequence
  Synthetic
uggcuguuuauucaaagu

SEQ ID NO: 655007 - RNA, 19 nt, Artificial Sequence
  Synthetic
uuggcuguuuauucaaagu

SEQ ID NO: 655008 - RNA, 20 nt, Artificial Sequence
  Synthetic
uuuggcuguuuauucaaagu

SEQ ID NO: 655009 - RNA, 21 nt, Artificial Sequence
  Synthetic
uuuuggcuguuuauucaaagu

SEQ ID NO: 655010 - RNA, 22 nt, Artificial Sequence
  Synthetic
guuuuggcuguuuauucaaagu

SEQ ID NO: 655011 - RNA, 23 nt, Artificial Sequence
  Synthetic
uguuuuggcuguuuauucaaagu

SEQ ID NO: 655012 - RNA, 24 nt, Artificial Sequence
  Synthetic
guguuuuggcuguuuauucaaagu

SEQ ID NO: 655013 - RNA, 18 nt, Artificial Sequence
  Synthetic
ucagcucaguuucaaagu

SEQ ID NO: 655014 - RNA, 19 nt, Artificial Sequence
  Synthetic
cucagcucaguuucaaagu

SEQ ID NO: 655015 - RNA, 20 nt, Artificial Sequence
  Synthetic
ccucagcucaguuucaaagu

SEQ ID NO: 655016 - RNA, 21 nt, Artificial Sequence
  Synthetic
accucagcucaguuucaaagu

SEQ ID NO: 655017 - RNA, 22 nt, Artificial Sequence
  Synthetic
aaccucagcucaguuucaaagu

SEQ ID NO: 655018 - RNA, 23 nt, Artificial Sequence
  Synthetic
uaaccucagcucaguuucaaagu

SEQ ID NO: 655019 - RNA, 24 nt, Artificial Sequence
  Synthetic
auaaccucagcucaguuucaaagu

SEQ ID NO: 655020 - RNA, 18 nt, Artificial Sequence
  Synthetic
gggagucaaaaagaaagu

SEQ ID NO: 655021 - RNA, 19 nt, Artificial Sequence
  Synthetic
ggggagucaaaaagaaagu

SEQ ID NO: 655022 - RNA, 20 nt, Artificial Sequence
  Synthetic
gggggagucaaaaagaaagu

SEQ ID NO: 655023 - RNA, 21 nt, Artificial Sequence
  Synthetic
ggggggagucaaaaagaaagu

SEQ ID NO: 655024 - RNA, 22 nt, Artificial Sequence
  Synthetic
gggggggagucaaaaagaaagu

SEQ ID NO: 655025 - RNA, 23 nt, Artificial Sequence
  Synthetic
ugggggggagucaaaaagaaagu

SEQ ID NO: 655026 - RNA, 24 nt, Artificial Sequence
  Synthetic
augggggggagucaaaaagaaagu

SEQ ID NO: 655027 - RNA, 18 nt, Artificial Sequence
  Synthetic
aguagagaacaagaaagu

SEQ ID NO: 655028 - RNA, 19 nt, Artificial Sequence
  Synthetic
aaguagagaacaagaaagu

SEQ ID NO: 655029 - RNA, 20 nt, Artificial Sequence
  Synthetic
gaaguagagaacaagaaagu

SEQ ID NO: 655030 - RNA, 21 nt, Artificial Sequence
  Synthetic
agaaguagagaacaagaaagu

SEQ ID NO: 655031 - RNA, 22 nt, Artificial Sequence
  Synthetic
aagaaguagagaacaagaaagu

SEQ ID NO: 655032 - RNA, 23 nt, Artificial Sequence
  Synthetic
gaagaaguagagaacaagaaagu

SEQ ID NO: 655033 - RNA, 24 nt, Artificial Sequence
  Synthetic
agaagaaguagagaacaagaaagu

SEQ ID NO: 655034 - RNA, 18 nt, Artificial Sequence
  Synthetic
agaaggaaagaagaaagu

SEQ ID NO: 655035 - RNA, 19 nt, Artificial Sequence
  Synthetic
aagaaggaaagaagaaagu

SEQ ID NO: 655036 - RNA, 20 nt, Artificial Sequence
  Synthetic
gaagaaggaaagaagaaagu

SEQ ID NO: 655037 - RNA, 21 nt, Artificial Sequence
  Synthetic
ggaagaaggaaagaagaaagu

SEQ ID NO: 655038 - RNA, 22 nt, Artificial Sequence
  Synthetic
aggaagaaggaaagaagaaagu

SEQ ID NO: 655039 - RNA, 23 nt, Artificial Sequence
  Synthetic
aaggaagaaggaaagaagaaagu

SEQ ID NO: 655040 - RNA, 24 nt, Artificial Sequence
  Synthetic
aaaggaagaaggaaagaagaaagu

SEQ ID NO: 655041 - RNA, 18 nt, Artificial Sequence
  Synthetic
gcuuuccuguaagaaagu

SEQ ID NO: 655042 - RNA, 19 nt, Artificial Sequence
  Synthetic
ugcuuuccuguaagaaagu

SEQ ID NO: 655043 - RNA, 20 nt, Artificial Sequence
  Synthetic
uugcuuuccuguaagaaagu

SEQ ID NO: 655044 - RNA, 21 nt, Artificial Sequence
  Synthetic
auugcuuuccuguaagaaagu

SEQ ID NO: 655045 - RNA, 22 nt, Artificial Sequence
  Synthetic
cauugcuuuccuguaagaaagu

SEQ ID NO: 655046 - RNA, 23 nt, Artificial Sequence
  Synthetic
acauugcuuuccuguaagaaagu

SEQ ID NO: 655047 - RNA, 24 nt, Artificial Sequence
  Synthetic
uacauugcuuuccuguaagaaagu

SEQ ID NO: 655048 - RNA, 18 nt, Artificial Sequence
  Synthetic
ugagauguuuuagaaagu

SEQ ID NO: 655049 - RNA, 19 nt, Artificial Sequence
  Synthetic
cugagauguuuuagaaagu

SEQ ID NO: 655050 - RNA, 20 nt, Artificial Sequence
  Synthetic
ccugagauguuuuagaaagu

SEQ ID NO: 655051 - RNA, 21 nt, Artificial Sequence
  Synthetic
cccugagauguuuuagaaagu

SEQ ID NO: 655052 - RNA, 22 nt, Artificial Sequence
  Synthetic
gcccugagauguuuuagaaagu

SEQ ID NO: 655053 - RNA, 23 nt, Artificial Sequence
  Synthetic
ggcccugagauguuuuagaaagu

SEQ ID NO: 655054 - RNA, 24 nt, Artificial Sequence
  Synthetic
aggcccugagauguuuuagaaagu

SEQ ID NO: 655055 - RNA, 18 nt, Artificial Sequence
  Synthetic
caaguaaauuacgaaagu

SEQ ID NO: 655056 - RNA, 19 nt, Artificial Sequence
  Synthetic
acaaguaaauuacgaaagu

SEQ ID NO: 655057 - RNA, 20 nt, Artificial Sequence
  Synthetic
aacaaguaaauuacgaaagu

SEQ ID NO: 655058 - RNA, 21 nt, Artificial Sequence
  Synthetic
aaacaaguaaauuacgaaagu

SEQ ID NO: 655059 - RNA, 22 nt, Artificial Sequence
  Synthetic
uaaacaaguaaauuacgaaagu

SEQ ID NO: 655060 - RNA, 23 nt, Artificial Sequence
  Synthetic
uuaaacaaguaaauuacgaaagu

SEQ ID NO: 655061 - RNA, 24 nt, Artificial Sequence
  Synthetic
guuaaacaaguaaauuacgaaagu

SEQ ID NO: 655062 - RNA, 18 nt, Artificial Sequence
  Synthetic
uguauucacagcgaaagu

SEQ ID NO: 655063 - RNA, 19 nt, Artificial Sequence
  Synthetic
uuguauucacagcgaaagu

SEQ ID NO: 655064 - RNA, 20 nt, Artificial Sequence
  Synthetic
auuguauucacagcgaaagu

SEQ ID NO: 655065 - RNA, 21 nt, Artificial Sequence
  Synthetic
aauuguauucacagcgaaagu

SEQ ID NO: 655066 - RNA, 22 nt, Artificial Sequence
  Synthetic
aaauuguauucacagcgaaagu

SEQ ID NO: 655067 - RNA, 23 nt, Artificial Sequence
  Synthetic
aaaauuguauucacagcgaaagu

SEQ ID NO: 655068 - RNA, 24 nt, Artificial Sequence
  Synthetic
caaaauuguauucacagcgaaagu

SEQ ID NO: 655069 - RNA, 18 nt, Artificial Sequence
  Synthetic
cagagaaaacaggaaagu

SEQ ID NO: 655070 - RNA, 19 nt, Artificial Sequence
  Synthetic
ucagagaaaacaggaaagu

SEQ ID NO: 655071 - RNA, 20 nt, Artificial Sequence
  Synthetic
cucagagaaaacaggaaagu

SEQ ID NO: 655072 - RNA, 21 nt, Artificial Sequence
  Synthetic
ccucagagaaaacaggaaagu

SEQ ID NO: 655073 - RNA, 22 nt, Artificial Sequence
  Synthetic
cccucagagaaaacaggaaagu

SEQ ID NO: 655074 - RNA, 23 nt, Artificial Sequence
  Synthetic
ucccucagagaaaacaggaaagu

SEQ ID NO: 655075 - RNA, 24 nt, Artificial Sequence
  Synthetic
uucccucagagaaaacaggaaagu

SEQ ID NO: 655076 - RNA, 18 nt, Artificial Sequence
  Synthetic
agaagaagacaggaaagu

SEQ ID NO: 655077 - RNA, 19 nt, Artificial Sequence
  Synthetic
cagaagaagacaggaaagu

SEQ ID NO: 655078 - RNA, 20 nt, Artificial Sequence
  Synthetic
ucagaagaagacaggaaagu

SEQ ID NO: 655079 - RNA, 21 nt, Artificial Sequence
  Synthetic
cucagaagaagacaggaaagu

SEQ ID NO: 655080 - RNA, 22 nt, Artificial Sequence
  Synthetic
acucagaagaagacaggaaagu

SEQ ID NO: 655081 - RNA, 23 nt, Artificial Sequence
  Synthetic
gacucagaagaagacaggaaagu

SEQ ID NO: 655082 - RNA, 24 nt, Artificial Sequence
  Synthetic
ggacucagaagaagacaggaaagu

SEQ ID NO: 655083 - RNA, 18 nt, Artificial Sequence
  Synthetic
agucuaauuggggaaagu

SEQ ID NO: 655084 - RNA, 19 nt, Artificial Sequence
  Synthetic
aagucuaauuggggaaagu

SEQ ID NO: 655085 - RNA, 20 nt, Artificial Sequence
  Synthetic
caagucuaauuggggaaagu

SEQ ID NO: 655086 - RNA, 21 nt, Artificial Sequence
  Synthetic
acaagucuaauuggggaaagu

SEQ ID NO: 655087 - RNA, 22 nt, Artificial Sequence
  Synthetic
uacaagucuaauuggggaaagu

SEQ ID NO: 655088 - RNA, 23 nt, Artificial Sequence
  Synthetic
uuacaagucuaauuggggaaagu

SEQ ID NO: 655089 - RNA, 24 nt, Artificial Sequence
  Synthetic
cuuacaagucuaauuggggaaagu

SEQ ID NO: 655090 - RNA, 18 nt, Artificial Sequence
  Synthetic
aggaagaugugggaaagu

SEQ ID NO: 655091 - RNA, 19 nt, Artificial Sequence
  Synthetic
caggaagaugugggaaagu

SEQ ID NO: 655092 - RNA, 20 nt, Artificial Sequence
  Synthetic
acaggaagaugugggaaagu

SEQ ID NO: 655093 - RNA, 21 nt, Artificial Sequence
  Synthetic
gacaggaagaugugggaaagu

SEQ ID NO: 655094 - RNA, 22 nt, Artificial Sequence
  Synthetic
agacaggaagaugugggaaagu

SEQ ID NO: 655095 - RNA, 23 nt, Artificial Sequence
  Synthetic
aagacaggaagaugugggaaagu

SEQ ID NO: 655096 - RNA, 24 nt, Artificial Sequence
  Synthetic
gaagacaggaagaugugggaaagu

SEQ ID NO: 655097 - RNA, 18 nt, Artificial Sequence
  Synthetic
gauugaauccuggaaagu

SEQ ID NO: 655098 - RNA, 19 nt, Artificial Sequence
  Synthetic
ugauugaauccuggaaagu

SEQ ID NO: 655099 - RNA, 20 nt, Artificial Sequence
  Synthetic
gugauugaauccuggaaagu

SEQ ID NO: 655100 - RNA, 21 nt, Artificial Sequence
  Synthetic
ugugauugaauccuggaaagu

SEQ ID NO: 655101 - RNA, 22 nt, Artificial Sequence
  Synthetic
uugugauugaauccuggaaagu

SEQ ID NO: 655102 - RNA, 23 nt, Artificial Sequence
  Synthetic
auugugauugaauccuggaaagu

SEQ ID NO: 655103 - RNA, 24 nt, Artificial Sequence
  Synthetic
aauugugauugaauccuggaaagu

SEQ ID NO: 655104 - RNA, 18 nt, Artificial Sequence
  Synthetic
uuuauucacuuggaaagu

SEQ ID NO: 655105 - RNA, 19 nt, Artificial Sequence
  Synthetic
uuuuauucacuuggaaagu

SEQ ID NO: 655106 - RNA, 20 nt, Artificial Sequence
  Synthetic
uuuuuauucacuuggaaagu

SEQ ID NO: 655107 - RNA, 21 nt, Artificial Sequence
  Synthetic
auuuuuauucacuuggaaagu

SEQ ID NO: 655108 - RNA, 22 nt, Artificial Sequence
  Synthetic
uauuuuuauucacuuggaaagu

SEQ ID NO: 655109 - RNA, 23 nt, Artificial Sequence
  Synthetic
uuauuuuuauucacuuggaaagu

SEQ ID NO: 655110 - RNA, 24 nt, Artificial Sequence
  Synthetic
auuauuuuuauucacuuggaaagu

SEQ ID NO: 655111 - RNA, 18 nt, Artificial Sequence
  Synthetic
uacuaauaaaaugaaagu

SEQ ID NO: 655112 - RNA, 19 nt, Artificial Sequence
  Synthetic
auacuaauaaaaugaaagu

SEQ ID NO: 655113 - RNA, 20 nt, Artificial Sequence
  Synthetic
cauacuaauaaaaugaaagu

SEQ ID NO: 655114 - RNA, 21 nt, Artificial Sequence
  Synthetic
acauacuaauaaaaugaaagu

SEQ ID NO: 655115 - RNA, 22 nt, Artificial Sequence
  Synthetic
cacauacuaauaaaaugaaagu

SEQ ID NO: 655116 - RNA, 23 nt, Artificial Sequence
  Synthetic
ucacauacuaauaaaaugaaagu

SEQ ID NO: 655117 - RNA, 24 nt, Artificial Sequence
  Synthetic
uucacauacuaauaaaaugaaagu

SEQ ID NO: 655118 - RNA, 18 nt, Artificial Sequence
  Synthetic
guaaugggaaaugaaagu

SEQ ID NO: 655119 - RNA, 19 nt, Artificial Sequence
  Synthetic
gguaaugggaaaugaaagu

SEQ ID NO: 655120 - RNA, 20 nt, Artificial Sequence
  Synthetic
ugguaaugggaaaugaaagu

SEQ ID NO: 655121 - RNA, 21 nt, Artificial Sequence
  Synthetic
uugguaaugggaaaugaaagu

SEQ ID NO: 655122 - RNA, 22 nt, Artificial Sequence
  Synthetic
uuugguaaugggaaaugaaagu

SEQ ID NO: 655123 - RNA, 23 nt, Artificial Sequence
  Synthetic
uuuugguaaugggaaaugaaagu

SEQ ID NO: 655124 - RNA, 24 nt, Artificial Sequence
  Synthetic
auuuugguaaugggaaaugaaagu

SEQ ID NO: 655125 - RNA, 18 nt, Artificial Sequence
  Synthetic
agagggugagaugaaagu

SEQ ID NO: 655126 - RNA, 19 nt, Artificial Sequence
  Synthetic
gagagggugagaugaaagu

SEQ ID NO: 655127 - RNA, 20 nt, Artificial Sequence
  Synthetic
ugagagggugagaugaaagu

SEQ ID NO: 655128 - RNA, 21 nt, Artificial Sequence
  Synthetic
uugagagggugagaugaaagu

SEQ ID NO: 655129 - RNA, 22 nt, Artificial Sequence
  Synthetic
cuugagagggugagaugaaagu

SEQ ID NO: 655130 - RNA, 23 nt, Artificial Sequence
  Synthetic
ucuugagagggugagaugaaagu

SEQ ID NO: 655131 - RNA, 24 nt, Artificial Sequence
  Synthetic
aucuugagagggugagaugaaagu

SEQ ID NO: 655132 - RNA, 18 nt, Artificial Sequence
  Synthetic
ucaaauauauuugaaagu

SEQ ID NO: 655133 - RNA, 19 nt, Artificial Sequence
  Synthetic
uucaaauauauuugaaagu

SEQ ID NO: 655134 - RNA, 20 nt, Artificial Sequence
  Synthetic
uuucaaauauauuugaaagu

SEQ ID NO: 655135 - RNA, 21 nt, Artificial Sequence
  Synthetic
auuucaaauauauuugaaagu

SEQ ID NO: 655136 - RNA, 22 nt, Artificial Sequence
  Synthetic
gauuucaaauauauuugaaagu

SEQ ID NO: 655137 - RNA, 23 nt, Artificial Sequence
  Synthetic
agauuucaaauauauuugaaagu

SEQ ID NO: 655138 - RNA, 24 nt, Artificial Sequence
  Synthetic
aagauuucaaauauauuugaaagu

SEQ ID NO: 655139 - RNA, 18 nt, Artificial Sequence
  Synthetic
agaacguacacauaaagu

SEQ ID NO: 655140 - RNA, 19 nt, Artificial Sequence
  Synthetic
uagaacguacacauaaagu

SEQ ID NO: 655141 - RNA, 20 nt, Artificial Sequence
  Synthetic
auagaacguacacauaaagu

SEQ ID NO: 655142 - RNA, 21 nt, Artificial Sequence
  Synthetic
cauagaacguacacauaaagu

SEQ ID NO: 655143 - RNA, 22 nt, Artificial Sequence
  Synthetic
acauagaacguacacauaaagu

SEQ ID NO: 655144 - RNA, 23 nt, Artificial Sequence
  Synthetic
uacauagaacguacacauaaagu

SEQ ID NO: 655145 - RNA, 24 nt, Artificial Sequence
  Synthetic
uuacauagaacguacacauaaagu

SEQ ID NO: 655146 - RNA, 18 nt, Artificial Sequence
  Synthetic
uacuuuaagacauaaagu

SEQ ID NO: 655147 - RNA, 19 nt, Artificial Sequence
  Synthetic
uuacuuuaagacauaaagu

SEQ ID NO: 655148 - RNA, 20 nt, Artificial Sequence
  Synthetic
uuuacuuuaagacauaaagu

SEQ ID NO: 655149 - RNA, 21 nt, Artificial Sequence
  Synthetic
guuuacuuuaagacauaaagu

SEQ ID NO: 655150 - RNA, 22 nt, Artificial Sequence
  Synthetic
uguuuacuuuaagacauaaagu

SEQ ID NO: 655151 - RNA, 23 nt, Artificial Sequence
  Synthetic
cuguuuacuuuaagacauaaagu

SEQ ID NO: 655152 - RNA, 24 nt, Artificial Sequence
  Synthetic
acuguuuacuuuaagacauaaagu

SEQ ID NO: 655153 - RNA, 18 nt, Artificial Sequence
  Synthetic
auaccguacuuauaaagu

SEQ ID NO: 655154 - RNA, 19 nt, Artificial Sequence
  Synthetic
uauaccguacuuauaaagu

SEQ ID NO: 655155 - RNA, 20 nt, Artificial Sequence
  Synthetic
auauaccguacuuauaaagu

SEQ ID NO: 655156 - RNA, 21 nt, Artificial Sequence
  Synthetic
aauauaccguacuuauaaagu

SEQ ID NO: 655157 - RNA, 22 nt, Artificial Sequence
  Synthetic
aaauauaccguacuuauaaagu

SEQ ID NO: 655158 - RNA, 23 nt, Artificial Sequence
  Synthetic
aaaauauaccguacuuauaaagu

SEQ ID NO: 655159 - RNA, 24 nt, Artificial Sequence
  Synthetic
aaaaauauaccguacuuauaaagu

SEQ ID NO: 655160 - RNA, 18 nt, Artificial Sequence
  Synthetic
aauccagauaccuaaagu

SEQ ID NO: 655161 - RNA, 19 nt, Artificial Sequence
  Synthetic
aaauccagauaccuaaagu

SEQ ID NO: 655162 - RNA, 20 nt, Artificial Sequence
  Synthetic
gaaauccagauaccuaaagu

SEQ ID NO: 655163 - RNA, 21 nt, Artificial Sequence
  Synthetic
ugaaauccagauaccuaaagu

SEQ ID NO: 655164 - RNA, 22 nt, Artificial Sequence
  Synthetic
augaaauccagauaccuaaagu

SEQ ID NO: 655165 - RNA, 23 nt, Artificial Sequence
  Synthetic
gaugaaauccagauaccuaaagu

SEQ ID NO: 655166 - RNA, 24 nt, Artificial Sequence
  Synthetic
agaugaaauccagauaccuaaagu

SEQ ID NO: 655167 - RNA, 18 nt, Artificial Sequence
  Synthetic
uacaguguuaccuaaagu

SEQ ID NO: 655168 - RNA, 19 nt, Artificial Sequence
  Synthetic
auacaguguuaccuaaagu

SEQ ID NO: 655169 - RNA, 20 nt, Artificial Sequence
  Synthetic
aauacaguguuaccuaaagu

SEQ ID NO: 655170 - RNA, 21 nt, Artificial Sequence
  Synthetic
caauacaguguuaccuaaagu

SEQ ID NO: 655171 - RNA, 22 nt, Artificial Sequence
  Synthetic
ucaauacaguguuaccuaaagu

SEQ ID NO: 655172 - RNA, 23 nt, Artificial Sequence
  Synthetic
uucaauacaguguuaccuaaagu

SEQ ID NO: 655173 - RNA, 24 nt, Artificial Sequence
  Synthetic
auucaauacaguguuaccuaaagu

SEQ ID NO: 655174 - RNA, 18 nt, Artificial Sequence
  Synthetic
uuccaguggagcuaaagu

SEQ ID NO: 655175 - RNA, 19 nt, Artificial Sequence
  Synthetic
auuccaguggagcuaaagu

SEQ ID NO: 655176 - RNA, 20 nt, Artificial Sequence
  Synthetic
gauuccaguggagcuaaagu

SEQ ID NO: 655177 - RNA, 21 nt, Artificial Sequence
  Synthetic
agauuccaguggagcuaaagu

SEQ ID NO: 655178 - RNA, 22 nt, Artificial Sequence
  Synthetic
gagauuccaguggagcuaaagu

SEQ ID NO: 655179 - RNA, 23 nt, Artificial Sequence
  Synthetic
ggagauuccaguggagcuaaagu

SEQ ID NO: 655180 - RNA, 24 nt, Artificial Sequence
  Synthetic
aggagauuccaguggagcuaaagu

SEQ ID NO: 655181 - RNA, 18 nt, Artificial Sequence
  Synthetic
aaauuacucugcuaaagu

SEQ ID NO: 655182 - RNA, 19 nt, Artificial Sequence
  Synthetic
uaaauuacucugcuaaagu

SEQ ID NO: 655183 - RNA, 20 nt, Artificial Sequence
  Synthetic
uuaaauuacucugcuaaagu

SEQ ID NO: 655184 - RNA, 21 nt, Artificial Sequence
  Synthetic
auuaaauuacucugcuaaagu

SEQ ID NO: 655185 - RNA, 22 nt, Artificial Sequence
  Synthetic
aauuaaauuacucugcuaaagu

SEQ ID NO: 655186 - RNA, 23 nt, Artificial Sequence
  Synthetic
gaauuaaauuacucugcuaaagu

SEQ ID NO: 655187 - RNA, 24 nt, Artificial Sequence
  Synthetic
ugaauuaaauuacucugcuaaagu

SEQ ID NO: 655188 - RNA, 18 nt, Artificial Sequence
  Synthetic
agaguuggauucuaaagu

SEQ ID NO: 655189 - RNA, 19 nt, Artificial Sequence
  Synthetic
gagaguuggauucuaaagu

SEQ ID NO: 655190 - RNA, 20 nt, Artificial Sequence
  Synthetic
ugagaguuggauucuaaagu

SEQ ID NO: 655191 - RNA, 21 nt, Artificial Sequence
  Synthetic
uugagaguuggauucuaaagu

SEQ ID NO: 655192 - RNA, 22 nt, Artificial Sequence
  Synthetic
guugagaguuggauucuaaagu

SEQ ID NO: 655193 - RNA, 23 nt, Artificial Sequence
  Synthetic
aguugagaguuggauucuaaagu

SEQ ID NO: 655194 - RNA, 24 nt, Artificial Sequence
  Synthetic
uaguugagaguuggauucuaaagu

SEQ ID NO: 655195 - RNA, 18 nt, Artificial Sequence
  Synthetic
uauucauaucaguaaagu

SEQ ID NO: 655196 - RNA, 19 nt, Artificial Sequence
  Synthetic
guauucauaucaguaaagu

SEQ ID NO: 655197 - RNA, 20 nt, Artificial Sequence
  Synthetic
uguauucauaucaguaaagu

SEQ ID NO: 655198 - RNA, 21 nt, Artificial Sequence
  Synthetic
auguauucauaucaguaaagu

SEQ ID NO: 655199 - RNA, 22 nt, Artificial Sequence
  Synthetic
aauguauucauaucaguaaagu

SEQ ID NO: 655200 - RNA, 23 nt, Artificial Sequence
  Synthetic
aaauguauucauaucaguaaagu

SEQ ID NO: 655201 - RNA, 24 nt, Artificial Sequence
  Synthetic
aaaauguauucauaucaguaaagu

SEQ ID NO: 655202 - RNA, 18 nt, Artificial Sequence
  Synthetic
agcacaucuaauuaaagu

SEQ ID NO: 655203 - RNA, 19 nt, Artificial Sequence
  Synthetic
gagcacaucuaauuaaagu

SEQ ID NO: 655204 - RNA, 20 nt, Artificial Sequence
  Synthetic
agagcacaucuaauuaaagu

SEQ ID NO: 655205 - RNA, 21 nt, Artificial Sequence
  Synthetic
aagagcacaucuaauuaaagu

SEQ ID NO: 655206 - RNA, 22 nt, Artificial Sequence
  Synthetic
gaagagcacaucuaauuaaagu

SEQ ID NO: 655207 - RNA, 23 nt, Artificial Sequence
  Synthetic
agaagagcacaucuaauuaaagu

SEQ ID NO: 655208 - RNA, 24 nt, Artificial Sequence
  Synthetic
gagaagagcacaucuaauuaaagu

SEQ ID NO: 655209 - RNA, 18 nt, Artificial Sequence
  Synthetic
uggcgcuaacauuaaagu

SEQ ID NO: 655210 - RNA, 19 nt, Artificial Sequence
  Synthetic
uuggcgcuaacauuaaagu

SEQ ID NO: 655211 - RNA, 20 nt, Artificial Sequence
  Synthetic
auuggcgcuaacauuaaagu

SEQ ID NO: 655212 - RNA, 21 nt, Artificial Sequence
  Synthetic
cauuggcgcuaacauuaaagu

SEQ ID NO: 655213 - RNA, 22 nt, Artificial Sequence
  Synthetic
ucauuggcgcuaacauuaaagu

SEQ ID NO: 655214 - RNA, 23 nt, Artificial Sequence
  Synthetic
cucauuggcgcuaacauuaaagu

SEQ ID NO: 655215 - RNA, 24 nt, Artificial Sequence
  Synthetic
gcucauuggcgcuaacauuaaagu

SEQ ID NO: 655216 - RNA, 18 nt, Artificial Sequence
  Synthetic
ccugccguacauuaaagu

SEQ ID NO: 655217 - RNA, 19 nt, Artificial Sequence
  Synthetic
accugccguacauuaaagu

SEQ ID NO: 655218 - RNA, 20 nt, Artificial Sequence
  Synthetic
gaccugccguacauuaaagu

SEQ ID NO: 655219 - RNA, 21 nt, Artificial Sequence
  Synthetic
ggaccugccguacauuaaagu

SEQ ID NO: 655220 - RNA, 22 nt, Artificial Sequence
  Synthetic
aggaccugccguacauuaaagu

SEQ ID NO: 655221 - RNA, 23 nt, Artificial Sequence
  Synthetic
aaggaccugccguacauuaaagu

SEQ ID NO: 655222 - RNA, 24 nt, Artificial Sequence
  Synthetic
caaggaccugccguacauuaaagu

SEQ ID NO: 655223 - RNA, 18 nt, Artificial Sequence
  Synthetic
ucagcgcaaaguuaaagu

SEQ ID NO: 655224 - RNA, 19 nt, Artificial Sequence
  Synthetic
uucagcgcaaaguuaaagu

SEQ ID NO: 655225 - RNA, 20 nt, Artificial Sequence
  Synthetic
uuucagcgcaaaguuaaagu

SEQ ID NO: 655226 - RNA, 21 nt, Artificial Sequence
  Synthetic
auuucagcgcaaaguuaaagu

SEQ ID NO: 655227 - RNA, 22 nt, Artificial Sequence
  Synthetic
gauuucagcgcaaaguuaaagu

SEQ ID NO: 655228 - RNA, 23 nt, Artificial Sequence
  Synthetic
ugauuucagcgcaaaguuaaagu

SEQ ID NO: 655229 - RNA, 24 nt, Artificial Sequence
  Synthetic
augauuucagcgcaaaguuaaagu

SEQ ID NO: 655230 - RNA, 18 nt, Artificial Sequence
  Synthetic
uaucaugguaguuaaagu

SEQ ID NO: 655231 - RNA, 19 nt, Artificial Sequence
  Synthetic
auaucaugguaguuaaagu

SEQ ID NO: 655232 - RNA, 20 nt, Artificial Sequence
  Synthetic
gauaucaugguaguuaaagu

SEQ ID NO: 655233 - RNA, 21 nt, Artificial Sequence
  Synthetic
agauaucaugguaguuaaagu

SEQ ID NO: 655234 - RNA, 22 nt, Artificial Sequence
  Synthetic
gagauaucaugguaguuaaagu

SEQ ID NO: 655235 - RNA, 23 nt, Artificial Sequence
  Synthetic
ggagauaucaugguaguuaaagu

SEQ ID NO: 655236 - RNA, 24 nt, Artificial Sequence
  Synthetic
aggagauaucaugguaguuaaagu

SEQ ID NO: 655237 - RNA, 18 nt, Artificial Sequence
  Synthetic
uaauauugugguuaaagu

SEQ ID NO: 655238 - RNA, 19 nt, Artificial Sequence
  Synthetic
cuaauauugugguuaaagu

SEQ ID NO: 655239 - RNA, 20 nt, Artificial Sequence
  Synthetic
gcuaauauugugguuaaagu

SEQ ID NO: 655240 - RNA, 21 nt, Artificial Sequence
  Synthetic
agcuaauauugugguuaaagu

SEQ ID NO: 655241 - RNA, 22 nt, Artificial Sequence
  Synthetic
cagcuaauauugugguuaaagu

SEQ ID NO: 655242 - RNA, 23 nt, Artificial Sequence
  Synthetic
acagcuaauauugugguuaaagu

SEQ ID NO: 655243 - RNA, 24 nt, Artificial Sequence
  Synthetic
aacagcuaauauugugguuaaagu

SEQ ID NO: 655244 - RNA, 18 nt, Artificial Sequence
  Synthetic
cuuuccauaguuuaaagu

SEQ ID NO: 655245 - RNA, 19 nt, Artificial Sequence
  Synthetic
acuuuccauaguuuaaagu

SEQ ID NO: 655246 - RNA, 20 nt, Artificial Sequence
  Synthetic
cacuuuccauaguuuaaagu

SEQ ID NO: 655247 - RNA, 21 nt, Artificial Sequence
  Synthetic
gcacuuuccauaguuuaaagu

SEQ ID NO: 655248 - RNA, 22 nt, Artificial Sequence
  Synthetic
agcacuuuccauaguuuaaagu

SEQ ID NO: 655249 - RNA, 23 nt, Artificial Sequence
  Synthetic
uagcacuuuccauaguuuaaagu

SEQ ID NO: 655250 - RNA, 24 nt, Artificial Sequence
  Synthetic
guagcacuuuccauaguuuaaagu

SEQ ID NO: 655251 - RNA, 18 nt, Artificial Sequence
  Synthetic
cugaacaaauuuuaaagu

SEQ ID NO: 655252 - RNA, 19 nt, Artificial Sequence
  Synthetic
acugaacaaauuuuaaagu

SEQ ID NO: 655253 - RNA, 20 nt, Artificial Sequence
  Synthetic
uacugaacaaauuuuaaagu

SEQ ID NO: 655254 - RNA, 21 nt, Artificial Sequence
  Synthetic
guacugaacaaauuuuaaagu

SEQ ID NO: 655255 - RNA, 22 nt, Artificial Sequence
  Synthetic
aguacugaacaaauuuuaaagu

SEQ ID NO: 655256 - RNA, 23 nt, Artificial Sequence
  Synthetic
gaguacugaacaaauuuuaaagu

SEQ ID NO: 655257 - RNA, 24 nt, Artificial Sequence
  Synthetic
agaguacugaacaaauuuuaaagu

SEQ ID NO: 655258 - RNA, 18 nt, Artificial Sequence
  Synthetic
aauugggauuuuuaaagu

SEQ ID NO: 655259 - RNA, 19 nt, Artificial Sequence
  Synthetic
gaauugggauuuuuaaagu

SEQ ID NO: 655260 - RNA, 20 nt, Artificial Sequence
  Synthetic
ugaauugggauuuuuaaagu

SEQ ID NO: 655261 - RNA, 21 nt, Artificial Sequence
  Synthetic
augaauugggauuuuuaaagu

SEQ ID NO: 655262 - RNA, 22 nt, Artificial Sequence
  Synthetic
gaugaauugggauuuuuaaagu

SEQ ID NO: 655263 - RNA, 23 nt, Artificial Sequence
  Synthetic
ggaugaauugggauuuuuaaagu

SEQ ID NO: 655264 - RNA, 24 nt, Artificial Sequence
  Synthetic
gggaugaauugggauuuuuaaagu

SEQ ID NO: 655265 - RNA, 18 nt, Artificial Sequence
  Synthetic
ccgcuuugagaaacaagu

SEQ ID NO: 655266 - RNA, 19 nt, Artificial Sequence
  Synthetic
accgcuuugagaaacaagu

SEQ ID NO: 655267 - RNA, 20 nt, Artificial Sequence
  Synthetic
caccgcuuugagaaacaagu

SEQ ID NO: 655268 - RNA, 21 nt, Artificial Sequence
  Synthetic
ccaccgcuuugagaaacaagu

SEQ ID NO: 655269 - RNA, 22 nt, Artificial Sequence
  Synthetic
accaccgcuuugagaaacaagu

SEQ ID NO: 655270 - RNA, 23 nt, Artificial Sequence
  Synthetic
aaccaccgcuuugagaaacaagu

SEQ ID NO: 655271 - RNA, 24 nt, Artificial Sequence
  Synthetic
gaaccaccgcuuugagaaacaagu

SEQ ID NO: 655272 - RNA, 18 nt, Artificial Sequence
  Synthetic
uaaaaguguuaaacaagu

SEQ ID NO: 655273 - RNA, 19 nt, Artificial Sequence
  Synthetic
cuaaaaguguuaaacaagu

SEQ ID NO: 655274 - RNA, 20 nt, Artificial Sequence
  Synthetic
ccuaaaaguguuaaacaagu

SEQ ID NO: 655275 - RNA, 21 nt, Artificial Sequence
  Synthetic
uccuaaaaguguuaaacaagu

SEQ ID NO: 655276 - RNA, 22 nt, Artificial Sequence
  Synthetic
auccuaaaaguguuaaacaagu

SEQ ID NO: 655277 - RNA, 23 nt, Artificial Sequence
  Synthetic
aauccuaaaaguguuaaacaagu

SEQ ID NO: 655278 - RNA, 24 nt, Artificial Sequence
  Synthetic
aaauccuaaaaguguuaaacaagu

SEQ ID NO: 655279 - RNA, 18 nt, Artificial Sequence
  Synthetic
uuuacaugaagaacaagu

SEQ ID NO: 655280 - RNA, 19 nt, Artificial Sequence
  Synthetic
guuuacaugaagaacaagu

SEQ ID NO: 655281 - RNA, 20 nt, Artificial Sequence
  Synthetic
aguuuacaugaagaacaagu

SEQ ID NO: 655282 - RNA, 21 nt, Artificial Sequence
  Synthetic
caguuuacaugaagaacaagu

SEQ ID NO: 655283 - RNA, 22 nt, Artificial Sequence
  Synthetic
ccaguuuacaugaagaacaagu

SEQ ID NO: 655284 - RNA, 23 nt, Artificial Sequence
  Synthetic
accaguuuacaugaagaacaagu

SEQ ID NO: 655285 - RNA, 24 nt, Artificial Sequence
  Synthetic
aaccaguuuacaugaagaacaagu

SEQ ID NO: 655286 - RNA, 18 nt, Artificial Sequence
  Synthetic
uaaaucuauagaacaagu

SEQ ID NO: 655287 - RNA, 19 nt, Artificial Sequence
  Synthetic
uuaaaucuauagaacaagu

SEQ ID NO: 655288 - RNA, 20 nt, Artificial Sequence
  Synthetic
auuaaaucuauagaacaagu

SEQ ID NO: 655289 - RNA, 21 nt, Artificial Sequence
  Synthetic
cauuaaaucuauagaacaagu

SEQ ID NO: 655290 - RNA, 22 nt, Artificial Sequence
  Synthetic
gcauuaaaucuauagaacaagu

SEQ ID NO: 655291 - RNA, 23 nt, Artificial Sequence
  Synthetic
ugcauuaaaucuauagaacaagu

SEQ ID NO: 655292 - RNA, 24 nt, Artificial Sequence
  Synthetic
uugcauuaaaucuauagaacaagu

SEQ ID NO: 655293 - RNA, 18 nt, Artificial Sequence
  Synthetic
gaacaccugggaacaagu

SEQ ID NO: 655294 - RNA, 19 nt, Artificial Sequence
  Synthetic
ugaacaccugggaacaagu

SEQ ID NO: 655295 - RNA, 20 nt, Artificial Sequence
  Synthetic
augaacaccugggaacaagu

SEQ ID NO: 655296 - RNA, 21 nt, Artificial Sequence
  Synthetic
caugaacaccugggaacaagu

SEQ ID NO: 655297 - RNA, 22 nt, Artificial Sequence
  Synthetic
ucaugaacaccugggaacaagu

SEQ ID NO: 655298 - RNA, 23 nt, Artificial Sequence
  Synthetic
aucaugaacaccugggaacaagu

SEQ ID NO: 655299 - RNA, 24 nt, Artificial Sequence
  Synthetic
caucaugaacaccugggaacaagu

SEQ ID NO: 655300 - RNA, 18 nt, Artificial Sequence
  Synthetic
gaauuuuaaugaacaagu

SEQ ID NO: 655301 - RNA, 19 nt, Artificial Sequence
  Synthetic
ugaauuuuaaugaacaagu

SEQ ID NO: 655302 - RNA, 20 nt, Artificial Sequence
  Synthetic
uugaauuuuaaugaacaagu

SEQ ID NO: 655303 - RNA, 21 nt, Artificial Sequence
  Synthetic
uuugaauuuuaaugaacaagu

SEQ ID NO: 655304 - RNA, 22 nt, Artificial Sequence
  Synthetic
cuuugaauuuuaaugaacaagu

SEQ ID NO: 655305 - RNA, 23 nt, Artificial Sequence
  Synthetic
acuuugaauuuuaaugaacaagu

SEQ ID NO: 655306 - RNA, 24 nt, Artificial Sequence
  Synthetic
gacuuugaauuuuaaugaacaagu

SEQ ID NO: 655307 - RNA, 18 nt, Artificial Sequence
  Synthetic
uauuucaaaauaacaagu

SEQ ID NO: 655308 - RNA, 19 nt, Artificial Sequence
  Synthetic
guauuucaaaauaacaagu

SEQ ID NO: 655309 - RNA, 20 nt, Artificial Sequence
  Synthetic
uguauuucaaaauaacaagu

SEQ ID NO: 655310 - RNA, 21 nt, Artificial Sequence
  Synthetic
auguauuucaaaauaacaagu

SEQ ID NO: 655311 - RNA, 22 nt, Artificial Sequence
  Synthetic
uauguauuucaaaauaacaagu

SEQ ID NO: 655312 - RNA, 23 nt, Artificial Sequence
  Synthetic
auauguauuucaaaauaacaagu

SEQ ID NO: 655313 - RNA, 24 nt, Artificial Sequence
  Synthetic
uauauguauuucaaaauaacaagu

SEQ ID NO: 655314 - RNA, 18 nt, Artificial Sequence
  Synthetic
uaauuccaaauaacaagu

SEQ ID NO: 655315 - RNA, 19 nt, Artificial Sequence
  Synthetic
cuaauuccaaauaacaagu

SEQ ID NO: 655316 - RNA, 20 nt, Artificial Sequence
  Synthetic
ccuaauuccaaauaacaagu

SEQ ID NO: 655317 - RNA, 21 nt, Artificial Sequence
  Synthetic
accuaauuccaaauaacaagu

SEQ ID NO: 655318 - RNA, 22 nt, Artificial Sequence
  Synthetic
gaccuaauuccaaauaacaagu

SEQ ID NO: 655319 - RNA, 23 nt, Artificial Sequence
  Synthetic
ugaccuaauuccaaauaacaagu

SEQ ID NO: 655320 - RNA, 24 nt, Artificial Sequence
  Synthetic
cugaccuaauuccaaauaacaagu

SEQ ID NO: 655321 - RNA, 18 nt, Artificial Sequence
  Synthetic
cuugcuaugaacacaagu

SEQ ID NO: 655322 - RNA, 19 nt, Artificial Sequence
  Synthetic
gcuugcuaugaacacaagu

SEQ ID NO: 655323 - RNA, 20 nt, Artificial Sequence
  Synthetic
ugcuugcuaugaacacaagu

SEQ ID NO: 655324 - RNA, 21 nt, Artificial Sequence
  Synthetic
uugcuugcuaugaacacaagu

SEQ ID NO: 655325 - RNA, 22 nt, Artificial Sequence
  Synthetic
uuugcuugcuaugaacacaagu

SEQ ID NO: 655326 - RNA, 23 nt, Artificial Sequence
  Synthetic
uuuugcuugcuaugaacacaagu

SEQ ID NO: 655327 - RNA, 24 nt, Artificial Sequence
  Synthetic
cuuuugcuugcuaugaacacaagu

SEQ ID NO: 655328 - RNA, 18 nt, Artificial Sequence
  Synthetic
accauucaggacacaagu

SEQ ID NO: 655329 - RNA, 19 nt, Artificial Sequence
  Synthetic
uaccauucaggacacaagu

SEQ ID NO: 655330 - RNA, 20 nt, Artificial Sequence
  Synthetic
auaccauucaggacacaagu

SEQ ID NO: 655331 - RNA, 21 nt, Artificial Sequence
  Synthetic
aauaccauucaggacacaagu

SEQ ID NO: 655332 - RNA, 22 nt, Artificial Sequence
  Synthetic
caauaccauucaggacacaagu

SEQ ID NO: 655333 - RNA, 23 nt, Artificial Sequence
  Synthetic
gcaauaccauucaggacacaagu

SEQ ID NO: 655334 - RNA, 24 nt, Artificial Sequence
  Synthetic
ggcaauaccauucaggacacaagu

SEQ ID NO: 655335 - RNA, 18 nt, Artificial Sequence
  Synthetic
uagaucaaacccacaagu

SEQ ID NO: 655336 - RNA, 19 nt, Artificial Sequence
  Synthetic
uuagaucaaacccacaagu

SEQ ID NO: 655337 - RNA, 20 nt, Artificial Sequence
  Synthetic
uuuagaucaaacccacaagu

SEQ ID NO: 655338 - RNA, 21 nt, Artificial Sequence
  Synthetic
uuuuagaucaaacccacaagu

SEQ ID NO: 655339 - RNA, 22 nt, Artificial Sequence
  Synthetic
uuuuuagaucaaacccacaagu

SEQ ID NO: 655340 - RNA, 23 nt, Artificial Sequence
  Synthetic
auuuuuagaucaaacccacaagu

SEQ ID NO: 655341 - RNA, 24 nt, Artificial Sequence
  Synthetic
uauuuuuagaucaaacccacaagu

SEQ ID NO: 655342 - RNA, 18 nt, Artificial Sequence
  Synthetic
uagggggaguagacaagu

SEQ ID NO: 655343 - RNA, 19 nt, Artificial Sequence
  Synthetic
uuagggggaguagacaagu

SEQ ID NO: 655344 - RNA, 20 nt, Artificial Sequence
  Synthetic
guuagggggaguagacaagu

SEQ ID NO: 655345 - RNA, 21 nt, Artificial Sequence
  Synthetic
uguuagggggaguagacaagu

SEQ ID NO: 655346 - RNA, 22 nt, Artificial Sequence
  Synthetic
guguuagggggaguagacaagu

SEQ ID NO: 655347 - RNA, 23 nt, Artificial Sequence
  Synthetic
uguguuagggggaguagacaagu

SEQ ID NO: 655348 - RNA, 24 nt, Artificial Sequence
  Synthetic
guguguuagggggaguagacaagu

SEQ ID NO: 655349 - RNA, 18 nt, Artificial Sequence
  Synthetic
gcucaaagcaggacaagu

SEQ ID NO: 655350 - RNA, 19 nt, Artificial Sequence
  Synthetic
ggcucaaagcaggacaagu

SEQ ID NO: 655351 - RNA, 20 nt, Artificial Sequence
  Synthetic
uggcucaaagcaggacaagu

SEQ ID NO: 655352 - RNA, 21 nt, Artificial Sequence
  Synthetic
uuggcucaaagcaggacaagu

SEQ ID NO: 655353 - RNA, 22 nt, Artificial Sequence
  Synthetic
uuuggcucaaagcaggacaagu

SEQ ID NO: 655354 - RNA, 23 nt, Artificial Sequence
  Synthetic
auuuggcucaaagcaggacaagu

SEQ ID NO: 655355 - RNA, 24 nt, Artificial Sequence
  Synthetic
aauuuggcucaaagcaggacaagu

SEQ ID NO: 655356 - RNA, 18 nt, Artificial Sequence
  Synthetic
uuaaaauuuuggacaagu

SEQ ID NO: 655357 - RNA, 19 nt, Artificial Sequence
  Synthetic
guuaaaauuuuggacaagu

SEQ ID NO: 655358 - RNA, 20 nt, Artificial Sequence
  Synthetic
uguuaaaauuuuggacaagu

SEQ ID NO: 655359 - RNA, 21 nt, Artificial Sequence
  Synthetic
auguuaaaauuuuggacaagu

SEQ ID NO: 655360 - RNA, 22 nt, Artificial Sequence
  Synthetic
uauguuaaaauuuuggacaagu

SEQ ID NO: 655361 - RNA, 23 nt, Artificial Sequence
  Synthetic
auauguuaaaauuuuggacaagu

SEQ ID NO: 655362 - RNA, 24 nt, Artificial Sequence
  Synthetic
uauauguuaaaauuuuggacaagu

SEQ ID NO: 655363 - RNA, 18 nt, Artificial Sequence
  Synthetic
ugggaaaugcugacaagu

SEQ ID NO: 655364 - RNA, 19 nt, Artificial Sequence
  Synthetic
cugggaaaugcugacaagu

SEQ ID NO: 655365 - RNA, 20 nt, Artificial Sequence
  Synthetic
ccugggaaaugcugacaagu

SEQ ID NO: 655366 - RNA, 21 nt, Artificial Sequence
  Synthetic
uccugggaaaugcugacaagu

SEQ ID NO: 655367 - RNA, 22 nt, Artificial Sequence
  Synthetic
uuccugggaaaugcugacaagu

SEQ ID NO: 655368 - RNA, 23 nt, Artificial Sequence
  Synthetic
cuuccugggaaaugcugacaagu

SEQ ID NO: 655369 - RNA, 24 nt, Artificial Sequence
  Synthetic
ccuuccugggaaaugcugacaagu

SEQ ID NO: 655370 - RNA, 18 nt, Artificial Sequence
  Synthetic
cagucugcacauacaagu

SEQ ID NO: 655371 - RNA, 19 nt, Artificial Sequence
  Synthetic
acagucugcacauacaagu

SEQ ID NO: 655372 - RNA, 20 nt, Artificial Sequence
  Synthetic
uacagucugcacauacaagu

SEQ ID NO: 655373 - RNA, 21 nt, Artificial Sequence
  Synthetic
uuacagucugcacauacaagu

SEQ ID NO: 655374 - RNA, 22 nt, Artificial Sequence
  Synthetic
uuuacagucugcacauacaagu

SEQ ID NO: 655375 - RNA, 23 nt, Artificial Sequence
  Synthetic
auuuacagucugcacauacaagu

SEQ ID NO: 655376 - RNA, 24 nt, Artificial Sequence
  Synthetic
uauuuacagucugcacauacaagu

SEQ ID NO: 655377 - RNA, 18 nt, Artificial Sequence
  Synthetic
gggugcagagauacaagu

SEQ ID NO: 655378 - RNA, 19 nt, Artificial Sequence
  Synthetic
agggugcagagauacaagu

SEQ ID NO: 655379 - RNA, 20 nt, Artificial Sequence
  Synthetic
aagggugcagagauacaagu

SEQ ID NO: 655380 - RNA, 21 nt, Artificial Sequence
  Synthetic
gaagggugcagagauacaagu

SEQ ID NO: 655381 - RNA, 22 nt, Artificial Sequence
  Synthetic
agaagggugcagagauacaagu

SEQ ID NO: 655382 - RNA, 23 nt, Artificial Sequence
  Synthetic
cagaagggugcagagauacaagu

SEQ ID NO: 655383 - RNA, 24 nt, Artificial Sequence
  Synthetic
ucagaagggugcagagauacaagu

SEQ ID NO: 655384 - RNA, 18 nt, Artificial Sequence
  Synthetic
gcaguugcauauacaagu

SEQ ID NO: 655385 - RNA, 19 nt, Artificial Sequence
  Synthetic
agcaguugcauauacaagu

SEQ ID NO: 655386 - RNA, 20 nt, Artificial Sequence
  Synthetic
aagcaguugcauauacaagu

SEQ ID NO: 655387 - RNA, 21 nt, Artificial Sequence
  Synthetic
gaagcaguugcauauacaagu

SEQ ID NO: 655388 - RNA, 22 nt, Artificial Sequence
  Synthetic
ggaagcaguugcauauacaagu

SEQ ID NO: 655389 - RNA, 23 nt, Artificial Sequence
  Synthetic
uggaagcaguugcauauacaagu

SEQ ID NO: 655390 - RNA, 24 nt, Artificial Sequence
  Synthetic
auggaagcaguugcauauacaagu

SEQ ID NO: 655391 - RNA, 18 nt, Artificial Sequence
  Synthetic
agggcaauaucuacaagu

SEQ ID NO: 655392 - RNA, 19 nt, Artificial Sequence
  Synthetic
gagggcaauaucuacaagu

SEQ ID NO: 655393 - RNA, 20 nt, Artificial Sequence
  Synthetic
ggagggcaauaucuacaagu

SEQ ID NO: 655394 - RNA, 21 nt, Artificial Sequence
  Synthetic
aggagggcaauaucuacaagu

SEQ ID NO: 655395 - RNA, 22 nt, Artificial Sequence
  Synthetic
aaggagggcaauaucuacaagu

SEQ ID NO: 655396 - RNA, 23 nt, Artificial Sequence
  Synthetic
gaaggagggcaauaucuacaagu

SEQ ID NO: 655397 - RNA, 24 nt, Artificial Sequence
  Synthetic
agaaggagggcaauaucuacaagu

SEQ ID NO: 655398 - RNA, 18 nt, Artificial Sequence
  Synthetic
agcacugggauuacaagu

SEQ ID NO: 655399 - RNA, 19 nt, Artificial Sequence
  Synthetic
aagcacugggauuacaagu

SEQ ID NO: 655400 - RNA, 20 nt, Artificial Sequence
  Synthetic
aaagcacugggauuacaagu

SEQ ID NO: 655401 - RNA, 21 nt, Artificial Sequence
  Synthetic
caaagcacugggauuacaagu

SEQ ID NO: 655402 - RNA, 22 nt, Artificial Sequence
  Synthetic
ccaaagcacugggauuacaagu

SEQ ID NO: 655403 - RNA, 23 nt, Artificial Sequence
  Synthetic
cccaaagcacugggauuacaagu

SEQ ID NO: 655404 - RNA, 24 nt, Artificial Sequence
  Synthetic
ucccaaagcacugggauuacaagu

SEQ ID NO: 655405 - RNA, 18 nt, Artificial Sequence
  Synthetic
agugcugggauuacaagu

SEQ ID NO: 655406 - RNA, 19 nt, Artificial Sequence
  Synthetic
aagugcugggauuacaagu

SEQ ID NO: 655407 - RNA, 20 nt, Artificial Sequence
  Synthetic
aaagugcugggauuacaagu

SEQ ID NO: 655408 - RNA, 21 nt, Artificial Sequence
  Synthetic
caaagugcugggauuacaagu

SEQ ID NO: 655409 - RNA, 22 nt, Artificial Sequence
  Synthetic
gcaaagugcugggauuacaagu

SEQ ID NO: 655410 - RNA, 23 nt, Artificial Sequence
  Synthetic
cgcaaagugcugggauuacaagu

SEQ ID NO: 655411 - RNA, 24 nt, Artificial Sequence
  Synthetic
ucgcaaagugcugggauuacaagu

SEQ ID NO: 655412 - RNA, 18 nt, Artificial Sequence
  Synthetic
ggcacugauauuacaagu

SEQ ID NO: 655413 - RNA, 19 nt, Artificial Sequence
  Synthetic
uggcacugauauuacaagu

SEQ ID NO: 655414 - RNA, 20 nt, Artificial Sequence
  Synthetic
cuggcacugauauuacaagu

SEQ ID NO: 655415 - RNA, 21 nt, Artificial Sequence
  Synthetic
ccuggcacugauauuacaagu

SEQ ID NO: 655416 - RNA, 22 nt, Artificial Sequence
  Synthetic
uccuggcacugauauuacaagu

SEQ ID NO: 655417 - RNA, 23 nt, Artificial Sequence
  Synthetic
auccuggcacugauauuacaagu

SEQ ID NO: 655418 - RNA, 24 nt, Artificial Sequence
  Synthetic
cauccuggcacugauauuacaagu

SEQ ID NO: 655419 - RNA, 18 nt, Artificial Sequence
  Synthetic
uggagaauggaaccaagu

SEQ ID NO: 655420 - RNA, 19 nt, Artificial Sequence
  Synthetic
guggagaauggaaccaagu

SEQ ID NO: 655421 - RNA, 20 nt, Artificial Sequence
  Synthetic
uguggagaauggaaccaagu

SEQ ID NO: 655422 - RNA, 21 nt, Artificial Sequence
  Synthetic
auguggagaauggaaccaagu

SEQ ID NO: 655423 - RNA, 22 nt, Artificial Sequence
  Synthetic
gauguggagaauggaaccaagu

SEQ ID NO: 655424 - RNA, 23 nt, Artificial Sequence
  Synthetic
ugauguggagaauggaaccaagu

SEQ ID NO: 655425 - RNA, 24 nt, Artificial Sequence
  Synthetic
gugauguggagaauggaaccaagu

SEQ ID NO: 655426 - RNA, 18 nt, Artificial Sequence
  Synthetic
ucaguuguugaaccaagu

SEQ ID NO: 655427 - RNA, 19 nt, Artificial Sequence
  Synthetic
uucaguuguugaaccaagu

SEQ ID NO: 655428 - RNA, 20 nt, Artificial Sequence
  Synthetic
auucaguuguugaaccaagu

SEQ ID NO: 655429 - RNA, 21 nt, Artificial Sequence
  Synthetic
aauucaguuguugaaccaagu

SEQ ID NO: 655430 - RNA, 22 nt, Artificial Sequence
  Synthetic
aaauucaguuguugaaccaagu

SEQ ID NO: 655431 - RNA, 23 nt, Artificial Sequence
  Synthetic
uaaauucaguuguugaaccaagu

SEQ ID NO: 655432 - RNA, 24 nt, Artificial Sequence
  Synthetic
uuaaauucaguuguugaaccaagu

SEQ ID NO: 655433 - RNA, 18 nt, Artificial Sequence
  Synthetic
caagcacacuaaccaagu

SEQ ID NO: 655434 - RNA, 19 nt, Artificial Sequence
  Synthetic
gcaagcacacuaaccaagu

SEQ ID NO: 655435 - RNA, 20 nt, Artificial Sequence
  Synthetic
agcaagcacacuaaccaagu

SEQ ID NO: 655436 - RNA, 21 nt, Artificial Sequence
  Synthetic
gagcaagcacacuaaccaagu

SEQ ID NO: 655437 - RNA, 22 nt, Artificial Sequence
  Synthetic
ugagcaagcacacuaaccaagu

SEQ ID NO: 655438 - RNA, 23 nt, Artificial Sequence
  Synthetic
cugagcaagcacacuaaccaagu

SEQ ID NO: 655439 - RNA, 24 nt, Artificial Sequence
  Synthetic
ucugagcaagcacacuaaccaagu

SEQ ID NO: 655440 - RNA, 18 nt, Artificial Sequence
  Synthetic
acacgguagccaccaagu

SEQ ID NO: 655441 - RNA, 19 nt, Artificial Sequence
  Synthetic
uacacgguagccaccaagu

SEQ ID NO: 655442 - RNA, 20 nt, Artificial Sequence
  Synthetic
cuacacgguagccaccaagu

SEQ ID NO: 655443 - RNA, 21 nt, Artificial Sequence
  Synthetic
ucuacacgguagccaccaagu

SEQ ID NO: 655444 - RNA, 22 nt, Artificial Sequence
  Synthetic
uucuacacgguagccaccaagu

SEQ ID NO: 655445 - RNA, 23 nt, Artificial Sequence
  Synthetic
auucuacacgguagccaccaagu

SEQ ID NO: 655446 - RNA, 24 nt, Artificial Sequence
  Synthetic
uauucuacacgguagccaccaagu

SEQ ID NO: 655447 - RNA, 18 nt, Artificial Sequence
  Synthetic
agguuuaaaagaccaagu

SEQ ID NO: 655448 - RNA, 19 nt, Artificial Sequence
  Synthetic
cagguuuaaaagaccaagu

SEQ ID NO: 655449 - RNA, 20 nt, Artificial Sequence
  Synthetic
acagguuuaaaagaccaagu

SEQ ID NO: 655450 - RNA, 21 nt, Artificial Sequence
  Synthetic
aacagguuuaaaagaccaagu

SEQ ID NO: 655451 - RNA, 22 nt, Artificial Sequence
  Synthetic
uaacagguuuaaaagaccaagu

SEQ ID NO: 655452 - RNA, 23 nt, Artificial Sequence
  Synthetic
cuaacagguuuaaaagaccaagu

SEQ ID NO: 655453 - RNA, 24 nt, Artificial Sequence
  Synthetic
gcuaacagguuuaaaagaccaagu

SEQ ID NO: 655454 - RNA, 18 nt, Artificial Sequence
  Synthetic
gaauauaggagaccaagu

SEQ ID NO: 655455 - RNA, 19 nt, Artificial Sequence
  Synthetic
ggaauauaggagaccaagu

SEQ ID NO: 655456 - RNA, 20 nt, Artificial Sequence
  Synthetic
aggaauauaggagaccaagu

SEQ ID NO: 655457 - RNA, 21 nt, Artificial Sequence
  Synthetic
gaggaauauaggagaccaagu

SEQ ID NO: 655458 - RNA, 22 nt, Artificial Sequence
  Synthetic
ggaggaauauaggagaccaagu

SEQ ID NO: 655459 - RNA, 23 nt, Artificial Sequence
  Synthetic
uggaggaauauaggagaccaagu

SEQ ID NO: 655460 - RNA, 24 nt, Artificial Sequence
  Synthetic
uuggaggaauauaggagaccaagu

SEQ ID NO: 655461 - RNA, 18 nt, Artificial Sequence
  Synthetic
auuuacagcaacccaagu

SEQ ID NO: 655462 - RNA, 19 nt, Artificial Sequence
  Synthetic
aauuuacagcaacccaagu

SEQ ID NO: 655463 - RNA, 20 nt, Artificial Sequence
  Synthetic
gaauuuacagcaacccaagu

SEQ ID NO: 655464 - RNA, 21 nt, Artificial Sequence
  Synthetic
agaauuuacagcaacccaagu

SEQ ID NO: 655465 - RNA, 22 nt, Artificial Sequence
  Synthetic
gagaauuuacagcaacccaagu

SEQ ID NO: 655466 - RNA, 23 nt, Artificial Sequence
  Synthetic
agagaauuuacagcaacccaagu

SEQ ID NO: 655467 - RNA, 24 nt, Artificial Sequence
  Synthetic
gagagaauuuacagcaacccaagu

SEQ ID NO: 655468 - RNA, 18 nt, Artificial Sequence
  Synthetic
guugugcuuaugccaagu

SEQ ID NO: 655469 - RNA, 19 nt, Artificial Sequence
  Synthetic
uguugugcuuaugccaagu

SEQ ID NO: 655470 - RNA, 20 nt, Artificial Sequence
  Synthetic
guguugugcuuaugccaagu

SEQ ID NO: 655471 - RNA, 21 nt, Artificial Sequence
  Synthetic
aguguugugcuuaugccaagu

SEQ ID NO: 655472 - RNA, 22 nt, Artificial Sequence
  Synthetic
aaguguugugcuuaugccaagu

SEQ ID NO: 655473 - RNA, 23 nt, Artificial Sequence
  Synthetic
gaaguguugugcuuaugccaagu

SEQ ID NO: 655474 - RNA, 24 nt, Artificial Sequence
  Synthetic
ggaaguguugugcuuaugccaagu

SEQ ID NO: 655475 - RNA, 18 nt, Artificial Sequence
  Synthetic
aagaauccauugccaagu

SEQ ID NO: 655476 - RNA, 19 nt, Artificial Sequence
  Synthetic
aaagaauccauugccaagu

SEQ ID NO: 655477 - RNA, 20 nt, Artificial Sequence
  Synthetic
caaagaauccauugccaagu

SEQ ID NO: 655478 - RNA, 21 nt, Artificial Sequence
  Synthetic
ccaaagaauccauugccaagu

SEQ ID NO: 655479 - RNA, 22 nt, Artificial Sequence
  Synthetic
uccaaagaauccauugccaagu

SEQ ID NO: 655480 - RNA, 23 nt, Artificial Sequence
  Synthetic
uuccaaagaauccauugccaagu

SEQ ID NO: 655481 - RNA, 24 nt, Artificial Sequence
  Synthetic
uuuccaaagaauccauugccaagu

SEQ ID NO: 655482 - RNA, 18 nt, Artificial Sequence
  Synthetic
auuugcuaaggagcaagu

SEQ ID NO: 655483 - RNA, 19 nt, Artificial Sequence
  Synthetic
aauuugcuaaggagcaagu

SEQ ID NO: 655484 - RNA, 20 nt, Artificial Sequence
  Synthetic
gaauuugcuaaggagcaagu

SEQ ID NO: 655485 - RNA, 21 nt, Artificial Sequence
  Synthetic
ggaauuugcuaaggagcaagu

SEQ ID NO: 655486 - RNA, 22 nt, Artificial Sequence
  Synthetic
aggaauuugcuaaggagcaagu

SEQ ID NO: 655487 - RNA, 23 nt, Artificial Sequence
  Synthetic
uaggaauuugcuaaggagcaagu

SEQ ID NO: 655488 - RNA, 24 nt, Artificial Sequence
  Synthetic
guaggaauuugcuaaggagcaagu

SEQ ID NO: 655489 - RNA, 18 nt, Artificial Sequence
  Synthetic
aggguaaaaguagcaagu

SEQ ID NO: 655490 - RNA, 19 nt, Artificial Sequence
  Synthetic
gaggguaaaaguagcaagu

SEQ ID NO: 655491 - RNA, 20 nt, Artificial Sequence
  Synthetic
ugaggguaaaaguagcaagu

SEQ ID NO: 655492 - RNA, 21 nt, Artificial Sequence
  Synthetic
uugaggguaaaaguagcaagu

SEQ ID NO: 655493 - RNA, 22 nt, Artificial Sequence
  Synthetic
cuugaggguaaaaguagcaagu

SEQ ID NO: 655494 - RNA, 23 nt, Artificial Sequence
  Synthetic
ccuugaggguaaaaguagcaagu

SEQ ID NO: 655495 - RNA, 24 nt, Artificial Sequence
  Synthetic
cccuugaggguaaaaguagcaagu

SEQ ID NO: 655496 - RNA, 18 nt, Artificial Sequence
  Synthetic
gcgaugagaaaggcaagu

SEQ ID NO: 655497 - RNA, 19 nt, Artificial Sequence
  Synthetic
ugcgaugagaaaggcaagu

SEQ ID NO: 655498 - RNA, 20 nt, Artificial Sequence
  Synthetic
augcgaugagaaaggcaagu

SEQ ID NO: 655499 - RNA, 21 nt, Artificial Sequence
  Synthetic
aaugcgaugagaaaggcaagu

SEQ ID NO: 655500 - RNA, 22 nt, Artificial Sequence
  Synthetic
gaaugcgaugagaaaggcaagu

SEQ ID NO: 655501 - RNA, 23 nt, Artificial Sequence
  Synthetic
ugaaugcgaugagaaaggcaagu

SEQ ID NO: 655502 - RNA, 24 nt, Artificial Sequence
  Synthetic
gugaaugcgaugagaaaggcaagu

SEQ ID NO: 655503 - RNA, 18 nt, Artificial Sequence
  Synthetic
ugucagcuaaaggcaagu

SEQ ID NO: 655504 - RNA, 19 nt, Artificial Sequence
  Synthetic
cugucagcuaaaggcaagu

SEQ ID NO: 655505 - RNA, 20 nt, Artificial Sequence
  Synthetic
gcugucagcuaaaggcaagu

SEQ ID NO: 655506 - RNA, 21 nt, Artificial Sequence
  Synthetic
ugcugucagcuaaaggcaagu

SEQ ID NO: 655507 - RNA, 22 nt, Artificial Sequence
  Synthetic
augcugucagcuaaaggcaagu

SEQ ID NO: 655508 - RNA, 23 nt, Artificial Sequence
  Synthetic
gaugcugucagcuaaaggcaagu

SEQ ID NO: 655509 - RNA, 24 nt, Artificial Sequence
  Synthetic
ggaugcugucagcuaaaggcaagu

SEQ ID NO: 655510 - RNA, 18 nt, Artificial Sequence
  Synthetic
uuuaugauuuaggcaagu

SEQ ID NO: 655511 - RNA, 19 nt, Artificial Sequence
  Synthetic
uuuuaugauuuaggcaagu

SEQ ID NO: 655512 - RNA, 20 nt, Artificial Sequence
  Synthetic
cuuuuaugauuuaggcaagu

SEQ ID NO: 655513 - RNA, 21 nt, Artificial Sequence
  Synthetic
acuuuuaugauuuaggcaagu

SEQ ID NO: 655514 - RNA, 22 nt, Artificial Sequence
  Synthetic
aacuuuuaugauuuaggcaagu

SEQ ID NO: 655515 - RNA, 23 nt, Artificial Sequence
  Synthetic
uaacuuuuaugauuuaggcaagu

SEQ ID NO: 655516 - RNA, 24 nt, Artificial Sequence
  Synthetic
uuaacuuuuaugauuuaggcaagu

SEQ ID NO: 655517 - RNA, 18 nt, Artificial Sequence
  Synthetic
aaugucuccagggcaagu

SEQ ID NO: 655518 - RNA, 19 nt, Artificial Sequence
  Synthetic
aaaugucuccagggcaagu

SEQ ID NO: 655519 - RNA, 20 nt, Artificial Sequence
  Synthetic
aaaaugucuccagggcaagu

SEQ ID NO: 655520 - RNA, 21 nt, Artificial Sequence
  Synthetic
gaaaaugucuccagggcaagu

SEQ ID NO: 655521 - RNA, 22 nt, Artificial Sequence
  Synthetic
ggaaaaugucuccagggcaagu

SEQ ID NO: 655522 - RNA, 23 nt, Artificial Sequence
  Synthetic
gggaaaaugucuccagggcaagu

SEQ ID NO: 655523 - RNA, 24 nt, Artificial Sequence
  Synthetic
ggggaaaaugucuccagggcaagu

SEQ ID NO: 655524 - RNA, 18 nt, Artificial Sequence
  Synthetic
acucaaaguguggcaagu

SEQ ID NO: 655525 - RNA, 19 nt, Artificial Sequence
  Synthetic
aacucaaaguguggcaagu

SEQ ID NO: 655526 - RNA, 20 nt, Artificial Sequence
  Synthetic
aaacucaaaguguggcaagu

SEQ ID NO: 655527 - RNA, 21 nt, Artificial Sequence
  Synthetic
aaaacucaaaguguggcaagu

SEQ ID NO: 655528 - RNA, 22 nt, Artificial Sequence
  Synthetic
caaaacucaaaguguggcaagu

SEQ ID NO: 655529 - RNA, 23 nt, Artificial Sequence
  Synthetic
ccaaaacucaaaguguggcaagu

SEQ ID NO: 655530 - RNA, 24 nt, Artificial Sequence
  Synthetic
accaaaacucaaaguguggcaagu

SEQ ID NO: 655531 - RNA, 18 nt, Artificial Sequence
  Synthetic
gauuaacuuccugcaagu

SEQ ID NO: 655532 - RNA, 19 nt, Artificial Sequence
  Synthetic
ugauuaacuuccugcaagu

SEQ ID NO: 655533 - RNA, 20 nt, Artificial Sequence
  Synthetic
cugauuaacuuccugcaagu

SEQ ID NO: 655534 - RNA, 21 nt, Artificial Sequence
  Synthetic
ucugauuaacuuccugcaagu

SEQ ID NO: 655535 - RNA, 22 nt, Artificial Sequence
  Synthetic
uucugauuaacuuccugcaagu

SEQ ID NO: 655536 - RNA, 23 nt, Artificial Sequence
  Synthetic
uuucugauuaacuuccugcaagu

SEQ ID NO: 655537 - RNA, 24 nt, Artificial Sequence
  Synthetic
auuucugauuaacuuccugcaagu

SEQ ID NO: 655538 - RNA, 18 nt, Artificial Sequence
  Synthetic
ccagccugcucugcaagu

SEQ ID NO: 655539 - RNA, 19 nt, Artificial Sequence
  Synthetic
uccagccugcucugcaagu

SEQ ID NO: 655540 - RNA, 20 nt, Artificial Sequence
  Synthetic
uuccagccugcucugcaagu

SEQ ID NO: 655541 - RNA, 21 nt, Artificial Sequence
  Synthetic
cuuccagccugcucugcaagu

SEQ ID NO: 655542 - RNA, 22 nt, Artificial Sequence
  Synthetic
gcuuccagccugcucugcaagu

SEQ ID NO: 655543 - RNA, 23 nt, Artificial Sequence
  Synthetic
agcuuccagccugcucugcaagu

SEQ ID NO: 655544 - RNA, 24 nt, Artificial Sequence
  Synthetic
cagcuuccagccugcucugcaagu

SEQ ID NO: 655545 - RNA, 18 nt, Artificial Sequence
  Synthetic
aaagagaauguugcaagu

SEQ ID NO: 655546 - RNA, 19 nt, Artificial Sequence
  Synthetic
gaaagagaauguugcaagu

SEQ ID NO: 655547 - RNA, 20 nt, Artificial Sequence
  Synthetic
ggaaagagaauguugcaagu

SEQ ID NO: 655548 - RNA, 21 nt, Artificial Sequence
  Synthetic
aggaaagagaauguugcaagu

SEQ ID NO: 655549 - RNA, 22 nt, Artificial Sequence
  Synthetic
gaggaaagagaauguugcaagu

SEQ ID NO: 655550 - RNA, 23 nt, Artificial Sequence
  Synthetic
agaggaaagagaauguugcaagu

SEQ ID NO: 655551 - RNA, 24 nt, Artificial Sequence
  Synthetic
aagaggaaagagaauguugcaagu

SEQ ID NO: 655552 - RNA, 18 nt, Artificial Sequence
  Synthetic
gggaauacugcaucaagu

SEQ ID NO: 655553 - RNA, 19 nt, Artificial Sequence
  Synthetic
ugggaauacugcaucaagu

SEQ ID NO: 655554 - RNA, 20 nt, Artificial Sequence
  Synthetic
gugggaauacugcaucaagu

SEQ ID NO: 655555 - RNA, 21 nt, Artificial Sequence
  Synthetic
ggugggaauacugcaucaagu

SEQ ID NO: 655556 - RNA, 22 nt, Artificial Sequence
  Synthetic
gggugggaauacugcaucaagu

SEQ ID NO: 655557 - RNA, 23 nt, Artificial Sequence
  Synthetic
ggggugggaauacugcaucaagu

SEQ ID NO: 655558 - RNA, 24 nt, Artificial Sequence
  Synthetic
uggggugggaauacugcaucaagu

SEQ ID NO: 655559 - RNA, 18 nt, Artificial Sequence
  Synthetic
aaaguuauuauaucaagu

SEQ ID NO: 655560 - RNA, 19 nt, Artificial Sequence
  Synthetic
uaaaguuauuauaucaagu

SEQ ID NO: 655561 - RNA, 20 nt, Artificial Sequence
  Synthetic
guaaaguuauuauaucaagu

SEQ ID NO: 655562 - RNA, 21 nt, Artificial Sequence
  Synthetic
aguaaaguuauuauaucaagu

SEQ ID NO: 655563 - RNA, 22 nt, Artificial Sequence
  Synthetic
uaguaaaguuauuauaucaagu

SEQ ID NO: 655564 - RNA, 23 nt, Artificial Sequence
  Synthetic
cuaguaaaguuauuauaucaagu

SEQ ID NO: 655565 - RNA, 24 nt, Artificial Sequence
  Synthetic
acuaguaaaguuauuauaucaagu

SEQ ID NO: 655566 - RNA, 18 nt, Artificial Sequence
  Synthetic
guacccagccacucaagu

SEQ ID NO: 655567 - RNA, 19 nt, Artificial Sequence
  Synthetic
aguacccagccacucaagu

SEQ ID NO: 655568 - RNA, 20 nt, Artificial Sequence
  Synthetic
gaguacccagccacucaagu

SEQ ID NO: 655569 - RNA, 21 nt, Artificial Sequence
  Synthetic
ggaguacccagccacucaagu

SEQ ID NO: 655570 - RNA, 22 nt, Artificial Sequence
  Synthetic
uggaguacccagccacucaagu

SEQ ID NO: 655571 - RNA, 23 nt, Artificial Sequence
  Synthetic
auggaguacccagccacucaagu

SEQ ID NO: 655572 - RNA, 24 nt, Artificial Sequence
  Synthetic
uauggaguacccagccacucaagu

SEQ ID NO: 655573 - RNA, 18 nt, Artificial Sequence
  Synthetic
cuggagaaauacucaagu

SEQ ID NO: 655574 - RNA, 19 nt, Artificial Sequence
  Synthetic
ucuggagaaauacucaagu

SEQ ID NO: 655575 - RNA, 20 nt, Artificial Sequence
  Synthetic
aucuggagaaauacucaagu

SEQ ID NO: 655576 - RNA, 21 nt, Artificial Sequence
  Synthetic
uaucuggagaaauacucaagu

SEQ ID NO: 655577 - RNA, 22 nt, Artificial Sequence
  Synthetic
auaucuggagaaauacucaagu

SEQ ID NO: 655578 - RNA, 23 nt, Artificial Sequence
  Synthetic
uauaucuggagaaauacucaagu

SEQ ID NO: 655579 - RNA, 24 nt, Artificial Sequence
  Synthetic
cuauaucuggagaaauacucaagu

SEQ ID NO: 655580 - RNA, 18 nt, Artificial Sequence
  Synthetic
cuuuuaucaaggucaagu

SEQ ID NO: 655581 - RNA, 19 nt, Artificial Sequence
  Synthetic
ucuuuuaucaaggucaagu

SEQ ID NO: 655582 - RNA, 20 nt, Artificial Sequence
  Synthetic
gucuuuuaucaaggucaagu

SEQ ID NO: 655583 - RNA, 21 nt, Artificial Sequence
  Synthetic
ugucuuuuaucaaggucaagu

SEQ ID NO: 655584 - RNA, 22 nt, Artificial Sequence
  Synthetic
augucuuuuaucaaggucaagu

SEQ ID NO: 655585 - RNA, 23 nt, Artificial Sequence
  Synthetic
aaugucuuuuaucaaggucaagu

SEQ ID NO: 655586 - RNA, 24 nt, Artificial Sequence
  Synthetic
aaaugucuuuuaucaaggucaagu

SEQ ID NO: 655587 - RNA, 18 nt, Artificial Sequence
  Synthetic
auaagaaaaaugucaagu

SEQ ID NO: 655588 - RNA, 19 nt, Artificial Sequence
  Synthetic
gauaagaaaaaugucaagu

SEQ ID NO: 655589 - RNA, 20 nt, Artificial Sequence
  Synthetic
ggauaagaaaaaugucaagu

SEQ ID NO: 655590 - RNA, 21 nt, Artificial Sequence
  Synthetic
gggauaagaaaaaugucaagu

SEQ ID NO: 655591 - RNA, 22 nt, Artificial Sequence
  Synthetic
ggggauaagaaaaaugucaagu

SEQ ID NO: 655592 - RNA, 23 nt, Artificial Sequence
  Synthetic
aggggauaagaaaaaugucaagu

SEQ ID NO: 655593 - RNA, 24 nt, Artificial Sequence
  Synthetic
aaggggauaagaaaaaugucaagu

SEQ ID NO: 655594 - RNA, 18 nt, Artificial Sequence
  Synthetic
acccacauaaugucaagu

SEQ ID NO: 655595 - RNA, 19 nt, Artificial Sequence
  Synthetic
uacccacauaaugucaagu

SEQ ID NO: 655596 - RNA, 20 nt, Artificial Sequence
  Synthetic
uuacccacauaaugucaagu

SEQ ID NO: 655597 - RNA, 21 nt, Artificial Sequence
  Synthetic
auuacccacauaaugucaagu

SEQ ID NO: 655598 - RNA, 22 nt, Artificial Sequence
  Synthetic
gauuacccacauaaugucaagu

SEQ ID NO: 655599 - RNA, 23 nt, Artificial Sequence
  Synthetic
agauuacccacauaaugucaagu

SEQ ID NO: 655600 - RNA, 24 nt, Artificial Sequence
  Synthetic
aagauuacccacauaaugucaagu

SEQ ID NO: 655601 - RNA, 18 nt, Artificial Sequence
  Synthetic
gaaaguuguucuucaagu

SEQ ID NO: 655602 - RNA, 19 nt, Artificial Sequence
  Synthetic
ugaaaguuguucuucaagu

SEQ ID NO: 655603 - RNA, 20 nt, Artificial Sequence
  Synthetic
uugaaaguuguucuucaagu

SEQ ID NO: 655604 - RNA, 21 nt, Artificial Sequence
  Synthetic
uuugaaaguuguucuucaagu

SEQ ID NO: 655605 - RNA, 22 nt, Artificial Sequence
  Synthetic
guuugaaaguuguucuucaagu

SEQ ID NO: 655606 - RNA, 23 nt, Artificial Sequence
  Synthetic
uguuugaaaguuguucuucaagu

SEQ ID NO: 655607 - RNA, 24 nt, Artificial Sequence
  Synthetic
uuguuugaaaguuguucuucaagu

SEQ ID NO: 655608 - RNA, 18 nt, Artificial Sequence
  Synthetic
gagcgcagauuuucaagu

SEQ ID NO: 655609 - RNA, 19 nt, Artificial Sequence
  Synthetic
agagcgcagauuuucaagu

SEQ ID NO: 655610 - RNA, 20 nt, Artificial Sequence
  Synthetic
aagagcgcagauuuucaagu

SEQ ID NO: 655611 - RNA, 21 nt, Artificial Sequence
  Synthetic
aaagagcgcagauuuucaagu

SEQ ID NO: 655612 - RNA, 22 nt, Artificial Sequence
  Synthetic
gaaagagcgcagauuuucaagu

SEQ ID NO: 655613 - RNA, 23 nt, Artificial Sequence
  Synthetic
agaaagagcgcagauuuucaagu

SEQ ID NO: 655614 - RNA, 24 nt, Artificial Sequence
  Synthetic
uagaaagagcgcagauuuucaagu

SEQ ID NO: 655615 - RNA, 18 nt, Artificial Sequence
  Synthetic
aggaaauagaaaagaagu

SEQ ID NO: 655616 - RNA, 19 nt, Artificial Sequence
  Synthetic
gaggaaauagaaaagaagu

SEQ ID NO: 655617 - RNA, 20 nt, Artificial Sequence
  Synthetic
ugaggaaauagaaaagaagu

SEQ ID NO: 655618 - RNA, 21 nt, Artificial Sequence
  Synthetic
cugaggaaauagaaaagaagu

SEQ ID NO: 655619 - RNA, 22 nt, Artificial Sequence
  Synthetic
gcugaggaaauagaaaagaagu

SEQ ID NO: 655620 - RNA, 23 nt, Artificial Sequence
  Synthetic
ggcugaggaaauagaaaagaagu

SEQ ID NO: 655621 - RNA, 24 nt, Artificial Sequence
  Synthetic
uggcugaggaaauagaaaagaagu

SEQ ID NO: 655622 - RNA, 18 nt, Artificial Sequence
  Synthetic
auuacacuccaaagaagu

SEQ ID NO: 655623 - RNA, 19 nt, Artificial Sequence
  Synthetic
aauuacacuccaaagaagu

SEQ ID NO: 655624 - RNA, 20 nt, Artificial Sequence
  Synthetic
aaauuacacuccaaagaagu

SEQ ID NO: 655625 - RNA, 21 nt, Artificial Sequence
  Synthetic
aaaauuacacuccaaagaagu

SEQ ID NO: 655626 - RNA, 22 nt, Artificial Sequence
  Synthetic
uaaaauuacacuccaaagaagu

SEQ ID NO: 655627 - RNA, 23 nt, Artificial Sequence
  Synthetic
auaaaauuacacuccaaagaagu

SEQ ID NO: 655628 - RNA, 24 nt, Artificial Sequence
  Synthetic
uauaaaauuacacuccaaagaagu

SEQ ID NO: 655629 - RNA, 18 nt, Artificial Sequence
  Synthetic
uucugcucagaaagaagu

SEQ ID NO: 655630 - RNA, 19 nt, Artificial Sequence
  Synthetic
uuucugcucagaaagaagu

SEQ ID NO: 655631 - RNA, 20 nt, Artificial Sequence
  Synthetic
guuucugcucagaaagaagu

SEQ ID NO: 655632 - RNA, 21 nt, Artificial Sequence
  Synthetic
uguuucugcucagaaagaagu

SEQ ID NO: 655633 - RNA, 22 nt, Artificial Sequence
  Synthetic
cuguuucugcucagaaagaagu

SEQ ID NO: 655634 - RNA, 23 nt, Artificial Sequence
  Synthetic
acuguuucugcucagaaagaagu

SEQ ID NO: 655635 - RNA, 24 nt, Artificial Sequence
  Synthetic
aacuguuucugcucagaaagaagu

SEQ ID NO: 655636 - RNA, 18 nt, Artificial Sequence
  Synthetic
augaaagauucaagaagu

SEQ ID NO: 655637 - RNA, 19 nt, Artificial Sequence
  Synthetic
uaugaaagauucaagaagu

SEQ ID NO: 655638 - RNA, 20 nt, Artificial Sequence
  Synthetic
auaugaaagauucaagaagu

SEQ ID NO: 655639 - RNA, 21 nt, Artificial Sequence
  Synthetic
gauaugaaagauucaagaagu

SEQ ID NO: 655640 - RNA, 22 nt, Artificial Sequence
  Synthetic
ggauaugaaagauucaagaagu

SEQ ID NO: 655641 - RNA, 23 nt, Artificial Sequence
  Synthetic
gggauaugaaagauucaagaagu

SEQ ID NO: 655642 - RNA, 24 nt, Artificial Sequence
  Synthetic
ugggauaugaaagauucaagaagu

SEQ ID NO: 655643 - RNA, 18 nt, Artificial Sequence
  Synthetic
acaggaagcagaagaagu

SEQ ID NO: 655644 - RNA, 19 nt, Artificial Sequence
  Synthetic
gacaggaagcagaagaagu

SEQ ID NO: 655645 - RNA, 20 nt, Artificial Sequence
  Synthetic
agacaggaagcagaagaagu

SEQ ID NO: 655646 - RNA, 21 nt, Artificial Sequence
  Synthetic
aagacaggaagcagaagaagu

SEQ ID NO: 655647 - RNA, 22 nt, Artificial Sequence
  Synthetic
aaagacaggaagcagaagaagu

SEQ ID NO: 655648 - RNA, 23 nt, Artificial Sequence
  Synthetic
caaagacaggaagcagaagaagu

SEQ ID NO: 655649 - RNA, 24 nt, Artificial Sequence
  Synthetic
gcaaagacaggaagcagaagaagu

SEQ ID NO: 655650 - RNA, 18 nt, Artificial Sequence
  Synthetic
gcauuucuaauaagaagu

SEQ ID NO: 655651 - RNA, 19 nt, Artificial Sequence
  Synthetic
ggcauuucuaauaagaagu

SEQ ID NO: 655652 - RNA, 20 nt, Artificial Sequence
  Synthetic
uggcauuucuaauaagaagu

SEQ ID NO: 655653 - RNA, 21 nt, Artificial Sequence
  Synthetic
uuggcauuucuaauaagaagu

SEQ ID NO: 655654 - RNA, 22 nt, Artificial Sequence
  Synthetic
uuuggcauuucuaauaagaagu

SEQ ID NO: 655655 - RNA, 23 nt, Artificial Sequence
  Synthetic
auuuggcauuucuaauaagaagu

SEQ ID NO: 655656 - RNA, 24 nt, Artificial Sequence
  Synthetic
aauuuggcauuucuaauaagaagu

SEQ ID NO: 655657 - RNA, 18 nt, Artificial Sequence
  Synthetic
auaagaggggacagaagu

SEQ ID NO: 655658 - RNA, 19 nt, Artificial Sequence
  Synthetic
gauaagaggggacagaagu

SEQ ID NO: 655659 - RNA, 20 nt, Artificial Sequence
  Synthetic
agauaagaggggacagaagu

SEQ ID NO: 655660 - RNA, 21 nt, Artificial Sequence
  Synthetic
cagauaagaggggacagaagu

SEQ ID NO: 655661 - RNA, 22 nt, Artificial Sequence
  Synthetic
ucagauaagaggggacagaagu

SEQ ID NO: 655662 - RNA, 23 nt, Artificial Sequence
  Synthetic
gucagauaagaggggacagaagu

SEQ ID NO: 655663 - RNA, 24 nt, Artificial Sequence
  Synthetic
ggucagauaagaggggacagaagu

SEQ ID NO: 655664 - RNA, 18 nt, Artificial Sequence
  Synthetic
gaaaugaccuacagaagu

SEQ ID NO: 655665 - RNA, 19 nt, Artificial Sequence
  Synthetic
ggaaaugaccuacagaagu

SEQ ID NO: 655666 - RNA, 20 nt, Artificial Sequence
  Synthetic
uggaaaugaccuacagaagu

SEQ ID NO: 655667 - RNA, 21 nt, Artificial Sequence
  Synthetic
auggaaaugaccuacagaagu

SEQ ID NO: 655668 - RNA, 22 nt, Artificial Sequence
  Synthetic
uauggaaaugaccuacagaagu

SEQ ID NO: 655669 - RNA, 23 nt, Artificial Sequence
  Synthetic
cuauggaaaugaccuacagaagu

SEQ ID NO: 655670 - RNA, 24 nt, Artificial Sequence
  Synthetic
acuauggaaaugaccuacagaagu

SEQ ID NO: 655671 - RNA, 18 nt, Artificial Sequence
  Synthetic
guuuuggaagucagaagu

SEQ ID NO: 655672 - RNA, 19 nt, Artificial Sequence
  Synthetic
aguuuuggaagucagaagu

SEQ ID NO: 655673 - RNA, 20 nt, Artificial Sequence
  Synthetic
uaguuuuggaagucagaagu

SEQ ID NO: 655674 - RNA, 21 nt, Artificial Sequence
  Synthetic
auaguuuuggaagucagaagu

SEQ ID NO: 655675 - RNA, 22 nt, Artificial Sequence
  Synthetic
uauaguuuuggaagucagaagu

SEQ ID NO: 655676 - RNA, 23 nt, Artificial Sequence
  Synthetic
uuauaguuuuggaagucagaagu

SEQ ID NO: 655677 - RNA, 24 nt, Artificial Sequence
  Synthetic
cuuauaguuuuggaagucagaagu

SEQ ID NO: 655678 - RNA, 18 nt, Artificial Sequence
  Synthetic
ucaccugaggucagaagu

SEQ ID NO: 655679 - RNA, 19 nt, Artificial Sequence
  Synthetic
aucaccugaggucagaagu

SEQ ID NO: 655680 - RNA, 20 nt, Artificial Sequence
  Synthetic
gaucaccugaggucagaagu

SEQ ID NO: 655681 - RNA, 21 nt, Artificial Sequence
  Synthetic
ggaucaccugaggucagaagu

SEQ ID NO: 655682 - RNA, 22 nt, Artificial Sequence
  Synthetic
cggaucaccugaggucagaagu

SEQ ID NO: 655683 - RNA, 23 nt, Artificial Sequence
  Synthetic
acggaucaccugaggucagaagu

SEQ ID NO: 655684 - RNA, 24 nt, Artificial Sequence
  Synthetic
aacggaucaccugaggucagaagu

SEQ ID NO: 655685 - RNA, 22 nt, Artificial Sequence
  Synthetic
uggaucaccugaggucagaagu

SEQ ID NO: 655686 - RNA, 23 nt, Artificial Sequence
  Synthetic
guggaucaccugaggucagaagu

SEQ ID NO: 655687 - RNA, 24 nt, Artificial Sequence
  Synthetic
aguggaucaccugaggucagaagu

SEQ ID NO: 655688 - RNA, 18 nt, Artificial Sequence
  Synthetic
ucgcuugaggucagaagu

SEQ ID NO: 655689 - RNA, 19 nt, Artificial Sequence
  Synthetic
aucgcuugaggucagaagu

SEQ ID NO: 655690 - RNA, 20 nt, Artificial Sequence
  Synthetic
gaucgcuugaggucagaagu

SEQ ID NO: 655691 - RNA, 21 nt, Artificial Sequence
  Synthetic
ggaucgcuugaggucagaagu

SEQ ID NO: 655692 - RNA, 22 nt, Artificial Sequence
  Synthetic
uggaucgcuugaggucagaagu

SEQ ID NO: 655693 - RNA, 23 nt, Artificial Sequence
  Synthetic
guggaucgcuugaggucagaagu

SEQ ID NO: 655694 - RNA, 24 nt, Artificial Sequence
  Synthetic
gguggaucgcuugaggucagaagu

SEQ ID NO: 655695 - RNA, 18 nt, Artificial Sequence
  Synthetic
ggaacacugcagagaagu

SEQ ID NO: 655696 - RNA, 19 nt, Artificial Sequence
  Synthetic
aggaacacugcagagaagu

SEQ ID NO: 655697 - RNA, 20 nt, Artificial Sequence
  Synthetic
gaggaacacugcagagaagu

SEQ ID NO: 655698 - RNA, 21 nt, Artificial Sequence
  Synthetic
ugaggaacacugcagagaagu

SEQ ID NO: 655699 - RNA, 22 nt, Artificial Sequence
  Synthetic
cugaggaacacugcagagaagu

SEQ ID NO: 655700 - RNA, 23 nt, Artificial Sequence
  Synthetic
acugaggaacacugcagagaagu

SEQ ID NO: 655701 - RNA, 24 nt, Artificial Sequence
  Synthetic
gacugaggaacacugcagagaagu

SEQ ID NO: 655702 - RNA, 18 nt, Artificial Sequence
  Synthetic
guauggagucagagaagu

SEQ ID NO: 655703 - RNA, 19 nt, Artificial Sequence
  Synthetic
gguauggagucagagaagu

SEQ ID NO: 655704 - RNA, 20 nt, Artificial Sequence
  Synthetic
ugguauggagucagagaagu

SEQ ID NO: 655705 - RNA, 21 nt, Artificial Sequence
  Synthetic
uugguauggagucagagaagu

SEQ ID NO: 655706 - RNA, 22 nt, Artificial Sequence
  Synthetic
auugguauggagucagagaagu

SEQ ID NO: 655707 - RNA, 23 nt, Artificial Sequence
  Synthetic
uauugguauggagucagagaagu

SEQ ID NO: 655708 - RNA, 24 nt, Artificial Sequence
  Synthetic
guauugguauggagucagagaagu

SEQ ID NO: 655709 - RNA, 18 nt, Artificial Sequence
  Synthetic
cacaugacaucgagaagu

SEQ ID NO: 655710 - RNA, 19 nt, Artificial Sequence
  Synthetic
gcacaugacaucgagaagu

SEQ ID NO: 655711 - RNA, 20 nt, Artificial Sequence
  Synthetic
ugcacaugacaucgagaagu

SEQ ID NO: 655712 - RNA, 21 nt, Artificial Sequence
  Synthetic
uugcacaugacaucgagaagu

SEQ ID NO: 655713 - RNA, 22 nt, Artificial Sequence
  Synthetic
auugcacaugacaucgagaagu

SEQ ID NO: 655714 - RNA, 23 nt, Artificial Sequence
  Synthetic
uauugcacaugacaucgagaagu

SEQ ID NO: 655715 - RNA, 24 nt, Artificial Sequence
  Synthetic
guauugcacaugacaucgagaagu

SEQ ID NO: 655716 - RNA, 18 nt, Artificial Sequence
  Synthetic
gcuggccaggggagaagu

SEQ ID NO: 655717 - RNA, 19 nt, Artificial Sequence
  Synthetic
agcuggccaggggagaagu

SEQ ID NO: 655718 - RNA, 20 nt, Artificial Sequence
  Synthetic
cagcuggccaggggagaagu

SEQ ID NO: 655719 - RNA, 21 nt, Artificial Sequence
  Synthetic
gcagcuggccaggggagaagu

SEQ ID NO: 655720 - RNA, 22 nt, Artificial Sequence
  Synthetic
agcagcuggccaggggagaagu

SEQ ID NO: 655721 - RNA, 23 nt, Artificial Sequence
  Synthetic
uagcagcuggccaggggagaagu

SEQ ID NO: 655722 - RNA, 24 nt, Artificial Sequence
  Synthetic
guagcagcuggccaggggagaagu

SEQ ID NO: 655723 - RNA, 18 nt, Artificial Sequence
  Synthetic
uuaauauagcugagaagu

SEQ ID NO: 655724 - RNA, 19 nt, Artificial Sequence
  Synthetic
uuuaauauagcugagaagu

SEQ ID NO: 655725 - RNA, 20 nt, Artificial Sequence
  Synthetic
uuuuaauauagcugagaagu

SEQ ID NO: 655726 - RNA, 21 nt, Artificial Sequence
  Synthetic
auuuuaauauagcugagaagu

SEQ ID NO: 655727 - RNA, 22 nt, Artificial Sequence
  Synthetic
cauuuuaauauagcugagaagu

SEQ ID NO: 655728 - RNA, 23 nt, Artificial Sequence
  Synthetic
ccauuuuaauauagcugagaagu

SEQ ID NO: 655729 - RNA, 24 nt, Artificial Sequence
  Synthetic
cccauuuuaauauagcugagaagu

SEQ ID NO: 655730 - RNA, 18 nt, Artificial Sequence
  Synthetic
gcauugggucugagaagu

SEQ ID NO: 655731 - RNA, 19 nt, Artificial Sequence
  Synthetic
ggcauugggucugagaagu

SEQ ID NO: 655732 - RNA, 20 nt, Artificial Sequence
  Synthetic
uggcauugggucugagaagu

SEQ ID NO: 655733 - RNA, 21 nt, Artificial Sequence
  Synthetic
guggcauugggucugagaagu

SEQ ID NO: 655734 - RNA, 22 nt, Artificial Sequence
  Synthetic
gguggcauugggucugagaagu

SEQ ID NO: 655735 - RNA, 23 nt, Artificial Sequence
  Synthetic
ggguggcauugggucugagaagu

SEQ ID NO: 655736 - RNA, 24 nt, Artificial Sequence
  Synthetic
gggguggcauugggucugagaagu

SEQ ID NO: 655737 - RNA, 18 nt, Artificial Sequence
  Synthetic
aaaacccaaaauagaagu

SEQ ID NO: 655738 - RNA, 19 nt, Artificial Sequence
  Synthetic
aaaaacccaaaauagaagu

SEQ ID NO: 655739 - RNA, 20 nt, Artificial Sequence
  Synthetic
uaaaaacccaaaauagaagu

SEQ ID NO: 655740 - RNA, 21 nt, Artificial Sequence
  Synthetic
guaaaaacccaaaauagaagu

SEQ ID NO: 655741 - RNA, 22 nt, Artificial Sequence
  Synthetic
uguaaaaacccaaaauagaagu

SEQ ID NO: 655742 - RNA, 23 nt, Artificial Sequence
  Synthetic
auguaaaaacccaaaauagaagu

SEQ ID NO: 655743 - RNA, 24 nt, Artificial Sequence
  Synthetic
cauguaaaaacccaaaauagaagu

SEQ ID NO: 655744 - RNA, 18 nt, Artificial Sequence
  Synthetic
cguuuuuaaaauagaagu

SEQ ID NO: 655745 - RNA, 19 nt, Artificial Sequence
  Synthetic
ucguuuuuaaaauagaagu

SEQ ID NO: 655746 - RNA, 20 nt, Artificial Sequence
  Synthetic
cucguuuuuaaaauagaagu

SEQ ID NO: 655747 - RNA, 21 nt, Artificial Sequence
  Synthetic
ccucguuuuuaaaauagaagu

SEQ ID NO: 655748 - RNA, 22 nt, Artificial Sequence
  Synthetic
uccucguuuuuaaaauagaagu

SEQ ID NO: 655749 - RNA, 23 nt, Artificial Sequence
  Synthetic
uuccucguuuuuaaaauagaagu

SEQ ID NO: 655750 - RNA, 24 nt, Artificial Sequence
  Synthetic
guuccucguuuuuaaaauagaagu

SEQ ID NO: 655751 - RNA, 18 nt, Artificial Sequence
  Synthetic
gagcccgggaauagaagu

SEQ ID NO: 655752 - RNA, 19 nt, Artificial Sequence
  Synthetic
ggagcccgggaauagaagu

SEQ ID NO: 655753 - RNA, 20 nt, Artificial Sequence
  Synthetic
aggagcccgggaauagaagu

SEQ ID NO: 655754 - RNA, 21 nt, Artificial Sequence
  Synthetic
gaggagcccgggaauagaagu

SEQ ID NO: 655755 - RNA, 22 nt, Artificial Sequence
  Synthetic
ggaggagcccgggaauagaagu

SEQ ID NO: 655756 - RNA, 23 nt, Artificial Sequence
  Synthetic
uggaggagcccgggaauagaagu

SEQ ID NO: 655757 - RNA, 24 nt, Artificial Sequence
  Synthetic
uuggaggagcccgggaauagaagu

SEQ ID NO: 655758 - RNA, 18 nt, Artificial Sequence
  Synthetic
gaaaauaagcauagaagu

SEQ ID NO: 655759 - RNA, 19 nt, Artificial Sequence
  Synthetic
agaaaauaagcauagaagu

SEQ ID NO: 655760 - RNA, 20 nt, Artificial Sequence
  Synthetic
aagaaaauaagcauagaagu

SEQ ID NO: 655761 - RNA, 21 nt, Artificial Sequence
  Synthetic
gaagaaaauaagcauagaagu

SEQ ID NO: 655762 - RNA, 22 nt, Artificial Sequence
  Synthetic
ugaagaaaauaagcauagaagu

SEQ ID NO: 655763 - RNA, 23 nt, Artificial Sequence
  Synthetic
uugaagaaaauaagcauagaagu

SEQ ID NO: 655764 - RNA, 24 nt, Artificial Sequence
  Synthetic
auugaagaaaauaagcauagaagu

SEQ ID NO: 655765 - RNA, 18 nt, Artificial Sequence
  Synthetic
caaacauuuucuagaagu

SEQ ID NO: 655766 - RNA, 19 nt, Artificial Sequence
  Synthetic
ccaaacauuuucuagaagu

SEQ ID NO: 655767 - RNA, 20 nt, Artificial Sequence
  Synthetic
accaaacauuuucuagaagu

SEQ ID NO: 655768 - RNA, 21 nt, Artificial Sequence
  Synthetic
uaccaaacauuuucuagaagu

SEQ ID NO: 655769 - RNA, 22 nt, Artificial Sequence
  Synthetic
guaccaaacauuuucuagaagu

SEQ ID NO: 655770 - RNA, 23 nt, Artificial Sequence
  Synthetic
gguaccaaacauuuucuagaagu

SEQ ID NO: 655771 - RNA, 24 nt, Artificial Sequence
  Synthetic
ugguaccaaacauuuucuagaagu

SEQ ID NO: 655772 - RNA, 18 nt, Artificial Sequence
  Synthetic
uaucugaguaguagaagu

SEQ ID NO: 655773 - RNA, 19 nt, Artificial Sequence
  Synthetic
auaucugaguaguagaagu

SEQ ID NO: 655774 - RNA, 20 nt, Artificial Sequence
  Synthetic
cauaucugaguaguagaagu

SEQ ID NO: 655775 - RNA, 21 nt, Artificial Sequence
  Synthetic
acauaucugaguaguagaagu

SEQ ID NO: 655776 - RNA, 22 nt, Artificial Sequence
  Synthetic
gacauaucugaguaguagaagu

SEQ ID NO: 655777 - RNA, 23 nt, Artificial Sequence
  Synthetic
agacauaucugaguaguagaagu

SEQ ID NO: 655778 - RNA, 24 nt, Artificial Sequence
  Synthetic
uagacauaucugaguaguagaagu

SEQ ID NO: 655779 - RNA, 18 nt, Artificial Sequence
  Synthetic
cccaagauccuuagaagu

SEQ ID NO: 655780 - RNA, 19 nt, Artificial Sequence
  Synthetic
ucccaagauccuuagaagu

SEQ ID NO: 655781 - RNA, 20 nt, Artificial Sequence
  Synthetic
cucccaagauccuuagaagu

SEQ ID NO: 655782 - RNA, 21 nt, Artificial Sequence
  Synthetic
ccucccaagauccuuagaagu

SEQ ID NO: 655783 - RNA, 22 nt, Artificial Sequence
  Synthetic
uccucccaagauccuuagaagu

SEQ ID NO: 655784 - RNA, 23 nt, Artificial Sequence
  Synthetic
auccucccaagauccuuagaagu

SEQ ID NO: 655785 - RNA, 24 nt, Artificial Sequence
  Synthetic
aauccucccaagauccuuagaagu

SEQ ID NO: 655786 - RNA, 18 nt, Artificial Sequence
  Synthetic
aacccgucacaaggaagu

SEQ ID NO: 655787 - RNA, 19 nt, Artificial Sequence
  Synthetic
aaacccgucacaaggaagu

SEQ ID NO: 655788 - RNA, 20 nt, Artificial Sequence
  Synthetic
caaacccgucacaaggaagu

SEQ ID NO: 655789 - RNA, 21 nt, Artificial Sequence
  Synthetic
acaaacccgucacaaggaagu

SEQ ID NO: 655790 - RNA, 22 nt, Artificial Sequence
  Synthetic
cacaaacccgucacaaggaagu

SEQ ID NO: 655791 - RNA, 23 nt, Artificial Sequence
  Synthetic
ucacaaacccgucacaaggaagu

SEQ ID NO: 655792 - RNA, 24 nt, Artificial Sequence
  Synthetic
cucacaaacccgucacaaggaagu

SEQ ID NO: 655793 - RNA, 18 nt, Artificial Sequence
  Synthetic
ucauuauaagaaggaagu

SEQ ID NO: 655794 - RNA, 19 nt, Artificial Sequence
  Synthetic
aucauuauaagaaggaagu

SEQ ID NO: 655795 - RNA, 20 nt, Artificial Sequence
  Synthetic
gaucauuauaagaaggaagu

SEQ ID NO: 655796 - RNA, 21 nt, Artificial Sequence
  Synthetic
agaucauuauaagaaggaagu

SEQ ID NO: 655797 - RNA, 22 nt, Artificial Sequence
  Synthetic
uagaucauuauaagaaggaagu

SEQ ID NO: 655798 - RNA, 23 nt, Artificial Sequence
  Synthetic
auagaucauuauaagaaggaagu

SEQ ID NO: 655799 - RNA, 24 nt, Artificial Sequence
  Synthetic
cauagaucauuauaagaaggaagu

SEQ ID NO: 655800 - RNA, 18 nt, Artificial Sequence
  Synthetic
ggcaggaaggaaggaagu

SEQ ID NO: 655801 - RNA, 19 nt, Artificial Sequence
  Synthetic
aggcaggaaggaaggaagu

SEQ ID NO: 655802 - RNA, 20 nt, Artificial Sequence
  Synthetic
aaggcaggaaggaaggaagu

SEQ ID NO: 655803 - RNA, 21 nt, Artificial Sequence
  Synthetic
gaaggcaggaaggaaggaagu

SEQ ID NO: 655804 - RNA, 22 nt, Artificial Sequence
  Synthetic
ggaaggcaggaaggaaggaagu

SEQ ID NO: 655805 - RNA, 23 nt, Artificial Sequence
  Synthetic
aggaaggcaggaaggaaggaagu

SEQ ID NO: 655806 - RNA, 24 nt, Artificial Sequence
  Synthetic
caggaaggcaggaaggaaggaagu

SEQ ID NO: 655807 - RNA, 18 nt, Artificial Sequence
  Synthetic
uaaagaucugaaggaagu

SEQ ID NO: 655808 - RNA, 19 nt, Artificial Sequence
  Synthetic
auaaagaucugaaggaagu

SEQ ID NO: 655809 - RNA, 20 nt, Artificial Sequence
  Synthetic
aauaaagaucugaaggaagu

SEQ ID NO: 655810 - RNA, 21 nt, Artificial Sequence
  Synthetic
aaauaaagaucugaaggaagu

SEQ ID NO: 655811 - RNA, 22 nt, Artificial Sequence
  Synthetic
uaaauaaagaucugaaggaagu

SEQ ID NO: 655812 - RNA, 23 nt, Artificial Sequence
  Synthetic
uuaaauaaagaucugaaggaagu

SEQ ID NO: 655813 - RNA, 24 nt, Artificial Sequence
  Synthetic
uuuaaauaaagaucugaaggaagu

SEQ ID NO: 655814 - RNA, 18 nt, Artificial Sequence
  Synthetic
ggacugcugacaggaagu

SEQ ID NO: 655815 - RNA, 19 nt, Artificial Sequence
  Synthetic
uggacugcugacaggaagu

SEQ ID NO: 655816 - RNA, 20 nt, Artificial Sequence
  Synthetic
guggacugcugacaggaagu

SEQ ID NO: 655817 - RNA, 21 nt, Artificial Sequence
  Synthetic
uguggacugcugacaggaagu

SEQ ID NO: 655818 - RNA, 22 nt, Artificial Sequence
  Synthetic
cuguggacugcugacaggaagu

SEQ ID NO: 655819 - RNA, 23 nt, Artificial Sequence
  Synthetic
ccuguggacugcugacaggaagu

SEQ ID NO: 655820 - RNA, 24 nt, Artificial Sequence
  Synthetic
gccuguggacugcugacaggaagu

SEQ ID NO: 655821 - RNA, 18 nt, Artificial Sequence
  Synthetic
gaugcaaguacaggaagu

SEQ ID NO: 655822 - RNA, 19 nt, Artificial Sequence
  Synthetic
agaugcaaguacaggaagu

SEQ ID NO: 655823 - RNA, 20 nt, Artificial Sequence
  Synthetic
gagaugcaaguacaggaagu

SEQ ID NO: 655824 - RNA, 21 nt, Artificial Sequence
  Synthetic
agagaugcaaguacaggaagu

SEQ ID NO: 655825 - RNA, 22 nt, Artificial Sequence
  Synthetic
aagagaugcaaguacaggaagu

SEQ ID NO: 655826 - RNA, 23 nt, Artificial Sequence
  Synthetic
aaagagaugcaaguacaggaagu

SEQ ID NO: 655827 - RNA, 24 nt, Artificial Sequence
  Synthetic
caaagagaugcaaguacaggaagu

SEQ ID NO: 655828 - RNA, 18 nt, Artificial Sequence
  Synthetic
uccugcaagucaggaagu

SEQ ID NO: 655829 - RNA, 19 nt, Artificial Sequence
  Synthetic
uuccugcaagucaggaagu

SEQ ID NO: 655830 - RNA, 20 nt, Artificial Sequence
  Synthetic
cuuccugcaagucaggaagu

SEQ ID NO: 655831 - RNA, 21 nt, Artificial Sequence
  Synthetic
acuuccugcaagucaggaagu

SEQ ID NO: 655832 - RNA, 22 nt, Artificial Sequence
  Synthetic
aacuuccugcaagucaggaagu

SEQ ID NO: 655833 - RNA, 23 nt, Artificial Sequence
  Synthetic
uaacuuccugcaagucaggaagu

SEQ ID NO: 655834 - RNA, 24 nt, Artificial Sequence
  Synthetic
uuaacuuccugcaagucaggaagu

SEQ ID NO: 655835 - RNA, 18 nt, Artificial Sequence
  Synthetic
uuguagcagagaggaagu

SEQ ID NO: 655836 - RNA, 19 nt, Artificial Sequence
  Synthetic
uuuguagcagagaggaagu

SEQ ID NO: 655837 - RNA, 20 nt, Artificial Sequence
  Synthetic
auuuguagcagagaggaagu

SEQ ID NO: 655838 - RNA, 21 nt, Artificial Sequence
  Synthetic
aauuuguagcagagaggaagu

SEQ ID NO: 655839 - RNA, 22 nt, Artificial Sequence
  Synthetic
uaauuuguagcagagaggaagu

SEQ ID NO: 655840 - RNA, 23 nt, Artificial Sequence
  Synthetic
auaauuuguagcagagaggaagu

SEQ ID NO: 655841 - RNA, 24 nt, Artificial Sequence
  Synthetic
uauaauuuguagcagagaggaagu

SEQ ID NO: 655842 - RNA, 18 nt, Artificial Sequence
  Synthetic
ccaaaggccuccggaagu

SEQ ID NO: 655843 - RNA, 19 nt, Artificial Sequence
  Synthetic
accaaaggccuccggaagu

SEQ ID NO: 655844 - RNA, 20 nt, Artificial Sequence
  Synthetic
aaccaaaggccuccggaagu

SEQ ID NO: 655845 - RNA, 21 nt, Artificial Sequence
  Synthetic
uaaccaaaggccuccggaagu

SEQ ID NO: 655846 - RNA, 22 nt, Artificial Sequence
  Synthetic
uuaaccaaaggccuccggaagu

SEQ ID NO: 655847 - RNA, 23 nt, Artificial Sequence
  Synthetic
uuuaaccaaaggccuccggaagu

SEQ ID NO: 655848 - RNA, 24 nt, Artificial Sequence
  Synthetic
guuuaaccaaaggccuccggaagu

SEQ ID NO: 655849 - RNA, 18 nt, Artificial Sequence
  Synthetic
ugggaggcaaagggaagu

SEQ ID NO: 655850 - RNA, 19 nt, Artificial Sequence
  Synthetic
augggaggcaaagggaagu

SEQ ID NO: 655851 - RNA, 20 nt, Artificial Sequence
  Synthetic
gaugggaggcaaagggaagu

SEQ ID NO: 655852 - RNA, 21 nt, Artificial Sequence
  Synthetic
agaugggaggcaaagggaagu

SEQ ID NO: 655853 - RNA, 22 nt, Artificial Sequence
  Synthetic
cagaugggaggcaaagggaagu

SEQ ID NO: 655854 - RNA, 23 nt, Artificial Sequence
  Synthetic
gcagaugggaggcaaagggaagu

SEQ ID NO: 655855 - RNA, 24 nt, Artificial Sequence
  Synthetic
ugcagaugggaggcaaagggaagu

SEQ ID NO: 655856 - RNA, 18 nt, Artificial Sequence
  Synthetic
ucuaugaauaagggaagu

SEQ ID NO: 655857 - RNA, 19 nt, Artificial Sequence
  Synthetic
aucuaugaauaagggaagu

SEQ ID NO: 655858 - RNA, 20 nt, Artificial Sequence
  Synthetic
aaucuaugaauaagggaagu

SEQ ID NO: 655859 - RNA, 21 nt, Artificial Sequence
  Synthetic
gaaucuaugaauaagggaagu

SEQ ID NO: 655860 - RNA, 22 nt, Artificial Sequence
  Synthetic
ugaaucuaugaauaagggaagu

SEQ ID NO: 655861 - RNA, 23 nt, Artificial Sequence
  Synthetic
augaaucuaugaauaagggaagu

SEQ ID NO: 655862 - RNA, 24 nt, Artificial Sequence
  Synthetic
caugaaucuaugaauaagggaagu

SEQ ID NO: 655863 - RNA, 18 nt, Artificial Sequence
  Synthetic
gacacuccugagggaagu

SEQ ID NO: 655864 - RNA, 19 nt, Artificial Sequence
  Synthetic
agacacuccugagggaagu

SEQ ID NO: 655865 - RNA, 20 nt, Artificial Sequence
  Synthetic
uagacacuccugagggaagu

SEQ ID NO: 655866 - RNA, 21 nt, Artificial Sequence
  Synthetic
auagacacuccugagggaagu

SEQ ID NO: 655867 - RNA, 22 nt, Artificial Sequence
  Synthetic
aauagacacuccugagggaagu

SEQ ID NO: 655868 - RNA, 23 nt, Artificial Sequence
  Synthetic
uaauagacacuccugagggaagu

SEQ ID NO: 655869 - RNA, 24 nt, Artificial Sequence
  Synthetic
cuaauagacacuccugagggaagu

SEQ ID NO: 655870 - RNA, 18 nt, Artificial Sequence
  Synthetic
uggggcuuaacgggaagu

SEQ ID NO: 655871 - RNA, 19 nt, Artificial Sequence
  Synthetic
guggggcuuaacgggaagu

SEQ ID NO: 655872 - RNA, 20 nt, Artificial Sequence
  Synthetic
gguggggcuuaacgggaagu

SEQ ID NO: 655873 - RNA, 21 nt, Artificial Sequence
  Synthetic
agguggggcuuaacgggaagu

SEQ ID NO: 655874 - RNA, 22 nt, Artificial Sequence
  Synthetic
gagguggggcuuaacgggaagu

SEQ ID NO: 655875 - RNA, 23 nt, Artificial Sequence
  Synthetic
ggagguggggcuuaacgggaagu

SEQ ID NO: 655876 - RNA, 24 nt, Artificial Sequence
  Synthetic
uggagguggggcuuaacgggaagu

SEQ ID NO: 655877 - RNA, 18 nt, Artificial Sequence
  Synthetic
guccuuaaaaggggaagu

SEQ ID NO: 655878 - RNA, 19 nt, Artificial Sequence
  Synthetic
uguccuuaaaaggggaagu

SEQ ID NO: 655879 - RNA, 20 nt, Artificial Sequence
  Synthetic
cuguccuuaaaaggggaagu

SEQ ID NO: 655880 - RNA, 21 nt, Artificial Sequence
  Synthetic
ucuguccuuaaaaggggaagu

SEQ ID NO: 655881 - RNA, 22 nt, Artificial Sequence
  Synthetic
cucuguccuuaaaaggggaagu

SEQ ID NO: 655882 - RNA, 23 nt, Artificial Sequence
  Synthetic
acucuguccuuaaaaggggaagu

SEQ ID NO: 655883 - RNA, 24 nt, Artificial Sequence
  Synthetic
gacucuguccuuaaaaggggaagu

SEQ ID NO: 655884 - RNA, 18 nt, Artificial Sequence
  Synthetic
uaacaagaaaggggaagu

SEQ ID NO: 655885 - RNA, 19 nt, Artificial Sequence
  Synthetic
auaacaagaaaggggaagu

SEQ ID NO: 655886 - RNA, 20 nt, Artificial Sequence
  Synthetic
aauaacaagaaaggggaagu

SEQ ID NO: 655887 - RNA, 21 nt, Artificial Sequence
  Synthetic
uaauaacaagaaaggggaagu

SEQ ID NO: 655888 - RNA, 22 nt, Artificial Sequence
  Synthetic
auaauaacaagaaaggggaagu

SEQ ID NO: 655889 - RNA, 23 nt, Artificial Sequence
  Synthetic
aauaauaacaagaaaggggaagu

SEQ ID NO: 655890 - RNA, 24 nt, Artificial Sequence
  Synthetic
gaauaauaacaagaaaggggaagu

SEQ ID NO: 655891 - RNA, 18 nt, Artificial Sequence
  Synthetic
gguuagcaaaugggaagu

SEQ ID NO: 655892 - RNA, 19 nt, Artificial Sequence
  Synthetic
agguuagcaaaugggaagu

SEQ ID NO: 655893 - RNA, 20 nt, Artificial Sequence
  Synthetic
aagguuagcaaaugggaagu

SEQ ID NO: 655894 - RNA, 21 nt, Artificial Sequence
  Synthetic
uaagguuagcaaaugggaagu

SEQ ID NO: 655895 - RNA, 22 nt, Artificial Sequence
  Synthetic
auaagguuagcaaaugggaagu

SEQ ID NO: 655896 - RNA, 23 nt, Artificial Sequence
  Synthetic
cauaagguuagcaaaugggaagu

SEQ ID NO: 655897 - RNA, 24 nt, Artificial Sequence
  Synthetic
ccauaagguuagcaaaugggaagu

SEQ ID NO: 655898 - RNA, 18 nt, Artificial Sequence
  Synthetic
ucuuauaguuuuggaagu

SEQ ID NO: 655899 - RNA, 19 nt, Artificial Sequence
  Synthetic
aucuuauaguuuuggaagu

SEQ ID NO: 655900 - RNA, 20 nt, Artificial Sequence
  Synthetic
uaucuuauaguuuuggaagu

SEQ ID NO: 655901 - RNA, 21 nt, Artificial Sequence
  Synthetic
uuaucuuauaguuuuggaagu

SEQ ID NO: 655902 - RNA, 22 nt, Artificial Sequence
  Synthetic
auuaucuuauaguuuuggaagu

SEQ ID NO: 655903 - RNA, 23 nt, Artificial Sequence
  Synthetic
gauuaucuuauaguuuuggaagu

SEQ ID NO: 655904 - RNA, 24 nt, Artificial Sequence
  Synthetic
ugauuaucuuauaguuuuggaagu

SEQ ID NO: 655905 - RNA, 18 nt, Artificial Sequence
  Synthetic
cuauaggaaaaaugaagu

SEQ ID NO: 655906 - RNA, 19 nt, Artificial Sequence
  Synthetic
acuauaggaaaaaugaagu

SEQ ID NO: 655907 - RNA, 20 nt, Artificial Sequence
  Synthetic
cacuauaggaaaaaugaagu

SEQ ID NO: 655908 - RNA, 21 nt, Artificial Sequence
  Synthetic
ucacuauaggaaaaaugaagu

SEQ ID NO: 655909 - RNA, 22 nt, Artificial Sequence
  Synthetic
gucacuauaggaaaaaugaagu

SEQ ID NO: 655910 - RNA, 23 nt, Artificial Sequence
  Synthetic
agucacuauaggaaaaaugaagu

SEQ ID NO: 655911 - RNA, 24 nt, Artificial Sequence
  Synthetic
aagucacuauaggaaaaaugaagu

SEQ ID NO: 655912 - RNA, 18 nt, Artificial Sequence
  Synthetic
ucuaauguuaaaugaagu

SEQ ID NO: 655913 - RNA, 19 nt, Artificial Sequence
  Synthetic
gucuaauguuaaaugaagu

SEQ ID NO: 655914 - RNA, 20 nt, Artificial Sequence
  Synthetic
agucuaauguuaaaugaagu

SEQ ID NO: 655915 - RNA, 21 nt, Artificial Sequence
  Synthetic
aagucuaauguuaaaugaagu

SEQ ID NO: 655916 - RNA, 22 nt, Artificial Sequence
  Synthetic
caagucuaauguuaaaugaagu

SEQ ID NO: 655917 - RNA, 23 nt, Artificial Sequence
  Synthetic
acaagucuaauguuaaaugaagu

SEQ ID NO: 655918 - RNA, 24 nt, Artificial Sequence
  Synthetic
gacaagucuaauguuaaaugaagu

SEQ ID NO: 655919 - RNA, 18 nt, Artificial Sequence
  Synthetic
ugcaugcaugcaugaagu

SEQ ID NO: 655920 - RNA, 19 nt, Artificial Sequence
  Synthetic
cugcaugcaugcaugaagu

SEQ ID NO: 655921 - RNA, 20 nt, Artificial Sequence
  Synthetic
ucugcaugcaugcaugaagu

SEQ ID NO: 655922 - RNA, 21 nt, Artificial Sequence
  Synthetic
cucugcaugcaugcaugaagu

SEQ ID NO: 655923 - RNA, 22 nt, Artificial Sequence
  Synthetic
gcucugcaugcaugcaugaagu

SEQ ID NO: 655924 - RNA, 23 nt, Artificial Sequence
  Synthetic
cgcucugcaugcaugcaugaagu

SEQ ID NO: 655925 - RNA, 24 nt, Artificial Sequence
  Synthetic
ccgcucugcaugcaugcaugaagu

SEQ ID NO: 655926 - RNA, 18 nt, Artificial Sequence
  Synthetic
uguacuacgcccugaagu

SEQ ID NO: 655927 - RNA, 19 nt, Artificial Sequence
  Synthetic
guguacuacgcccugaagu

SEQ ID NO: 655928 - RNA, 20 nt, Artificial Sequence
  Synthetic
aguguacuacgcccugaagu

SEQ ID NO: 655929 - RNA, 21 nt, Artificial Sequence
  Synthetic
aaguguacuacgcccugaagu

SEQ ID NO: 655930 - RNA, 22 nt, Artificial Sequence
  Synthetic
aaaguguacuacgcccugaagu

SEQ ID NO: 655931 - RNA, 23 nt, Artificial Sequence
  Synthetic
aaaaguguacuacgcccugaagu

SEQ ID NO: 655932 - RNA, 24 nt, Artificial Sequence
  Synthetic
aaaaaguguacuacgcccugaagu

SEQ ID NO: 655933 - RNA, 18 nt, Artificial Sequence
  Synthetic
aagaugaaagccugaagu

SEQ ID NO: 655934 - RNA, 19 nt, Artificial Sequence
  Synthetic
uaagaugaaagccugaagu

SEQ ID NO: 655935 - RNA, 20 nt, Artificial Sequence
  Synthetic
uuaagaugaaagccugaagu

SEQ ID NO: 655936 - RNA, 21 nt, Artificial Sequence
  Synthetic
cuuaagaugaaagccugaagu

SEQ ID NO: 655937 - RNA, 22 nt, Artificial Sequence
  Synthetic
gcuuaagaugaaagccugaagu

SEQ ID NO: 655938 - RNA, 23 nt, Artificial Sequence
  Synthetic
ugcuuaagaugaaagccugaagu

SEQ ID NO: 655939 - RNA, 24 nt, Artificial Sequence
  Synthetic
uugcuuaagaugaaagccugaagu

SEQ ID NO: 655940 - RNA, 18 nt, Artificial Sequence
  Synthetic
ucacauuugagcugaagu

SEQ ID NO: 655941 - RNA, 19 nt, Artificial Sequence
  Synthetic
uucacauuugagcugaagu

SEQ ID NO: 655942 - RNA, 20 nt, Artificial Sequence
  Synthetic
auucacauuugagcugaagu

SEQ ID NO: 655943 - RNA, 21 nt, Artificial Sequence
  Synthetic
uauucacauuugagcugaagu

SEQ ID NO: 655944 - RNA, 22 nt, Artificial Sequence
  Synthetic
cuauucacauuugagcugaagu

SEQ ID NO: 655945 - RNA, 23 nt, Artificial Sequence
  Synthetic
gcuauucacauuugagcugaagu

SEQ ID NO: 655946 - RNA, 24 nt, Artificial Sequence
  Synthetic
ugcuauucacauuugagcugaagu

SEQ ID NO: 655947 - RNA, 18 nt, Artificial Sequence
  Synthetic
ugucuaaaaaucugaagu

SEQ ID NO: 655948 - RNA, 19 nt, Artificial Sequence
  Synthetic
augucuaaaaaucugaagu

SEQ ID NO: 655949 - RNA, 20 nt, Artificial Sequence
  Synthetic
aaugucuaaaaaucugaagu

SEQ ID NO: 655950 - RNA, 21 nt, Artificial Sequence
  Synthetic
aaaugucuaaaaaucugaagu

SEQ ID NO: 655951 - RNA, 22 nt, Artificial Sequence
  Synthetic
gaaaugucuaaaaaucugaagu

SEQ ID NO: 655952 - RNA, 23 nt, Artificial Sequence
  Synthetic
ggaaaugucuaaaaaucugaagu

SEQ ID NO: 655953 - RNA, 24 nt, Artificial Sequence
  Synthetic
gggaaaugucuaaaaaucugaagu

SEQ ID NO: 655954 - RNA, 18 nt, Artificial Sequence
  Synthetic
uaauauuggcucugaagu

SEQ ID NO: 655955 - RNA, 19 nt, Artificial Sequence
  Synthetic
uuaauauuggcucugaagu

SEQ ID NO: 655956 - RNA, 20 nt, Artificial Sequence
  Synthetic
guuaauauuggcucugaagu

SEQ ID NO: 655957 - RNA, 21 nt, Artificial Sequence
  Synthetic
uguuaauauuggcucugaagu

SEQ ID NO: 655958 - RNA, 22 nt, Artificial Sequence
  Synthetic
cuguuaauauuggcucugaagu

SEQ ID NO: 655959 - RNA, 23 nt, Artificial Sequence
  Synthetic
acuguuaauauuggcucugaagu

SEQ ID NO: 655960 - RNA, 24 nt, Artificial Sequence
  Synthetic
aacuguuaauauuggcucugaagu

SEQ ID NO: 655961 - RNA, 18 nt, Artificial Sequence
  Synthetic
agaggucuagucugaagu

SEQ ID NO: 655962 - RNA, 19 nt, Artificial Sequence
  Synthetic
cagaggucuagucugaagu

SEQ ID NO: 655963 - RNA, 20 nt, Artificial Sequence
  Synthetic
ccagaggucuagucugaagu

SEQ ID NO: 655964 - RNA, 21 nt, Artificial Sequence
  Synthetic
accagaggucuagucugaagu

SEQ ID NO: 655965 - RNA, 22 nt, Artificial Sequence
  Synthetic
gaccagaggucuagucugaagu

SEQ ID NO: 655966 - RNA, 23 nt, Artificial Sequence
  Synthetic
ggaccagaggucuagucugaagu

SEQ ID NO: 655967 - RNA, 24 nt, Artificial Sequence
  Synthetic
uggaccagaggucuagucugaagu

SEQ ID NO: 655968 - RNA, 18 nt, Artificial Sequence
  Synthetic
uugagauccacgugaagu

SEQ ID NO: 655969 - RNA, 19 nt, Artificial Sequence
  Synthetic
uuugagauccacgugaagu

SEQ ID NO: 655970 - RNA, 20 nt, Artificial Sequence
  Synthetic
auuugagauccacgugaagu

SEQ ID NO: 655971 - RNA, 21 nt, Artificial Sequence
  Synthetic
cauuugagauccacgugaagu

SEQ ID NO: 655972 - RNA, 22 nt, Artificial Sequence
  Synthetic
ccauuugagauccacgugaagu

SEQ ID NO: 655973 - RNA, 23 nt, Artificial Sequence
  Synthetic
uccauuugagauccacgugaagu

SEQ ID NO: 655974 - RNA, 24 nt, Artificial Sequence
  Synthetic
uuccauuugagauccacgugaagu

SEQ ID NO: 655975 - RNA, 18 nt, Artificial Sequence
  Synthetic
aaagaguacaugugaagu

SEQ ID NO: 655976 - RNA, 19 nt, Artificial Sequence
  Synthetic
caaagaguacaugugaagu

SEQ ID NO: 655977 - RNA, 20 nt, Artificial Sequence
  Synthetic
gcaaagaguacaugugaagu

SEQ ID NO: 655978 - RNA, 21 nt, Artificial Sequence
  Synthetic
ugcaaagaguacaugugaagu

SEQ ID NO: 655979 - RNA, 22 nt, Artificial Sequence
  Synthetic
uugcaaagaguacaugugaagu

SEQ ID NO: 655980 - RNA, 23 nt, Artificial Sequence
  Synthetic
cuugcaaagaguacaugugaagu

SEQ ID NO: 655981 - RNA, 24 nt, Artificial Sequence
  Synthetic
ucuugcaaagaguacaugugaagu

SEQ ID NO: 655982 - RNA, 18 nt, Artificial Sequence
  Synthetic
agaauuuucaugugaagu

SEQ ID NO: 655983 - RNA, 19 nt, Artificial Sequence
  Synthetic
gagaauuuucaugugaagu

SEQ ID NO: 655984 - RNA, 20 nt, Artificial Sequence
  Synthetic
ugagaauuuucaugugaagu

SEQ ID NO: 655985 - RNA, 21 nt, Artificial Sequence
  Synthetic
augagaauuuucaugugaagu

SEQ ID NO: 655986 - RNA, 22 nt, Artificial Sequence
  Synthetic
aaugagaauuuucaugugaagu

SEQ ID NO: 655987 - RNA, 23 nt, Artificial Sequence
  Synthetic
aaaugagaauuuucaugugaagu

SEQ ID NO: 655988 - RNA, 24 nt, Artificial Sequence
  Synthetic
aaaaugagaauuuucaugugaagu

SEQ ID NO: 655989 - RNA, 18 nt, Artificial Sequence
  Synthetic
gaaggagaaaauugaagu

SEQ ID NO: 655990 - RNA, 19 nt, Artificial Sequence
  Synthetic
ugaaggagaaaauugaagu

SEQ ID NO: 655991 - RNA, 20 nt, Artificial Sequence
  Synthetic
gugaaggagaaaauugaagu

SEQ ID NO: 655992 - RNA, 21 nt, Artificial Sequence
  Synthetic
agugaaggagaaaauugaagu

SEQ ID NO: 655993 - RNA, 22 nt, Artificial Sequence
  Synthetic
cagugaaggagaaaauugaagu

SEQ ID NO: 655994 - RNA, 23 nt, Artificial Sequence
  Synthetic
ucagugaaggagaaaauugaagu

SEQ ID NO: 655995 - RNA, 24 nt, Artificial Sequence
  Synthetic
uucagugaaggagaaaauugaagu

SEQ ID NO: 655996 - RNA, 18 nt, Artificial Sequence
  Synthetic
aauaaacucaauugaagu

SEQ ID NO: 655997 - RNA, 19 nt, Artificial Sequence
  Synthetic
gaauaaacucaauugaagu

SEQ ID NO: 655998 - RNA, 20 nt, Artificial Sequence
  Synthetic
agaauaaacucaauugaagu

SEQ ID NO: 655999 - RNA, 21 nt, Artificial Sequence
  Synthetic
aagaauaaacucaauugaagu

SEQ ID NO: 656000 - RNA, 22 nt, Artificial Sequence
  Synthetic
uaagaauaaacucaauugaagu

SEQ ID NO: 656001 - RNA, 23 nt, Artificial Sequence
  Synthetic
cuaagaauaaacucaauugaagu

SEQ ID NO: 656002 - RNA, 24 nt, Artificial Sequence
  Synthetic
acuaagaauaaacucaauugaagu

SEQ ID NO: 656003 - RNA, 18 nt, Artificial Sequence
  Synthetic
gaauucaagaauugaagu

SEQ ID NO: 656004 - RNA, 19 nt, Artificial Sequence
  Synthetic
agaauucaagaauugaagu

SEQ ID NO: 656005 - RNA, 20 nt, Artificial Sequence
  Synthetic
cagaauucaagaauugaagu

SEQ ID NO: 656006 - RNA, 21 nt, Artificial Sequence
  Synthetic
acagaauucaagaauugaagu

SEQ ID NO: 656007 - RNA, 22 nt, Artificial Sequence
  Synthetic
cacagaauucaagaauugaagu

SEQ ID NO: 656008 - RNA, 23 nt, Artificial Sequence
  Synthetic
acacagaauucaagaauugaagu

SEQ ID NO: 656009 - RNA, 24 nt, Artificial Sequence
  Synthetic
uacacagaauucaagaauugaagu

SEQ ID NO: 656010 - RNA, 18 nt, Artificial Sequence
  Synthetic
ccaaacauucauugaagu

SEQ ID NO: 656011 - RNA, 19 nt, Artificial Sequence
  Synthetic
uccaaacauucauugaagu

SEQ ID NO: 656012 - RNA, 20 nt, Artificial Sequence
  Synthetic
uuccaaacauucauugaagu

SEQ ID NO: 656013 - RNA, 21 nt, Artificial Sequence
  Synthetic
auuccaaacauucauugaagu

SEQ ID NO: 656014 - RNA, 22 nt, Artificial Sequence
  Synthetic
gauuccaaacauucauugaagu

SEQ ID NO: 656015 - RNA, 23 nt, Artificial Sequence
  Synthetic
agauuccaaacauucauugaagu

SEQ ID NO: 656016 - RNA, 24 nt, Artificial Sequence
  Synthetic
cagauuccaaacauucauugaagu

SEQ ID NO: 656017 - RNA, 18 nt, Artificial Sequence
  Synthetic
ccugugugggauugaagu

SEQ ID NO: 656018 - RNA, 19 nt, Artificial Sequence
  Synthetic
gccugugugggauugaagu

SEQ ID NO: 656019 - RNA, 20 nt, Artificial Sequence
  Synthetic
agccugugugggauugaagu

SEQ ID NO: 656020 - RNA, 21 nt, Artificial Sequence
  Synthetic
aagccugugugggauugaagu

SEQ ID NO: 656021 - RNA, 22 nt, Artificial Sequence
  Synthetic
uaagccugugugggauugaagu

SEQ ID NO: 656022 - RNA, 23 nt, Artificial Sequence
  Synthetic
uuaagccugugugggauugaagu

SEQ ID NO: 656023 - RNA, 24 nt, Artificial Sequence
  Synthetic
auuaagccugugugggauugaagu

SEQ ID NO: 656024 - RNA, 18 nt, Artificial Sequence
  Synthetic
gugaauggguauugaagu

SEQ ID NO: 656025 - RNA, 19 nt, Artificial Sequence
  Synthetic
ugugaauggguauugaagu

SEQ ID NO: 656026 - RNA, 20 nt, Artificial Sequence
  Synthetic
uugugaauggguauugaagu

SEQ ID NO: 656027 - RNA, 21 nt, Artificial Sequence
  Synthetic
uuugugaauggguauugaagu

SEQ ID NO: 656028 - RNA, 22 nt, Artificial Sequence
  Synthetic
uuuugugaauggguauugaagu

SEQ ID NO: 656029 - RNA, 23 nt, Artificial Sequence
  Synthetic
auuuugugaauggguauugaagu

SEQ ID NO: 656030 - RNA, 24 nt, Artificial Sequence
  Synthetic
uauuuugugaauggguauugaagu

SEQ ID NO: 656031 - RNA, 18 nt, Artificial Sequence
  Synthetic
gaaaggaauucuugaagu

SEQ ID NO: 656032 - RNA, 19 nt, Artificial Sequence
  Synthetic
agaaaggaauucuugaagu

SEQ ID NO: 656033 - RNA, 20 nt, Artificial Sequence
  Synthetic
aagaaaggaauucuugaagu

SEQ ID NO: 656034 - RNA, 21 nt, Artificial Sequence
  Synthetic
gaagaaaggaauucuugaagu

SEQ ID NO: 656035 - RNA, 22 nt, Artificial Sequence
  Synthetic
agaagaaaggaauucuugaagu

SEQ ID NO: 656036 - RNA, 23 nt, Artificial Sequence
  Synthetic
aagaagaaaggaauucuugaagu

SEQ ID NO: 656037 - RNA, 24 nt, Artificial Sequence
  Synthetic
aaagaagaaaggaauucuugaagu

SEQ ID NO: 656038 - RNA, 18 nt, Artificial Sequence
  Synthetic
uuuccacgcauuugaagu

SEQ ID NO: 656039 - RNA, 19 nt, Artificial Sequence
  Synthetic
auuuccacgcauuugaagu

SEQ ID NO: 656040 - RNA, 20 nt, Artificial Sequence
  Synthetic
aauuuccacgcauuugaagu

SEQ ID NO: 656041 - RNA, 21 nt, Artificial Sequence
  Synthetic
gaauuuccacgcauuugaagu

SEQ ID NO: 656042 - RNA, 22 nt, Artificial Sequence
  Synthetic
agaauuuccacgcauuugaagu

SEQ ID NO: 656043 - RNA, 23 nt, Artificial Sequence
  Synthetic
cagaauuuccacgcauuugaagu

SEQ ID NO: 656044 - RNA, 24 nt, Artificial Sequence
  Synthetic
ucagaauuuccacgcauuugaagu

SEQ ID NO: 656045 - RNA, 18 nt, Artificial Sequence
  Synthetic
acacaagaaaaaauaagu

SEQ ID NO: 656046 - RNA, 19 nt, Artificial Sequence
  Synthetic
aacacaagaaaaaauaagu

SEQ ID NO: 656047 - RNA, 20 nt, Artificial Sequence
  Synthetic
uaacacaagaaaaaauaagu

SEQ ID NO: 656048 - RNA, 21 nt, Artificial Sequence
  Synthetic
guaacacaagaaaaaauaagu

SEQ ID NO: 656049 - RNA, 22 nt, Artificial Sequence
  Synthetic
aguaacacaagaaaaaauaagu

SEQ ID NO: 656050 - RNA, 23 nt, Artificial Sequence
  Synthetic
aaguaacacaagaaaaaauaagu

SEQ ID NO: 656051 - RNA, 24 nt, Artificial Sequence
  Synthetic
aaaguaacacaagaaaaaauaagu

SEQ ID NO: 656052 - RNA, 18 nt, Artificial Sequence
  Synthetic
ucacaaggaaaaauaagu

SEQ ID NO: 656053 - RNA, 19 nt, Artificial Sequence
  Synthetic
uucacaaggaaaaauaagu

SEQ ID NO: 656054 - RNA, 20 nt, Artificial Sequence
  Synthetic
uuucacaaggaaaaauaagu

SEQ ID NO: 656055 - RNA, 21 nt, Artificial Sequence
  Synthetic
uuuucacaaggaaaaauaagu

SEQ ID NO: 656056 - RNA, 22 nt, Artificial Sequence
  Synthetic
auuuucacaaggaaaaauaagu

SEQ ID NO: 656057 - RNA, 23 nt, Artificial Sequence
  Synthetic
gauuuucacaaggaaaaauaagu

SEQ ID NO: 656058 - RNA, 24 nt, Artificial Sequence
  Synthetic
ugauuuucacaaggaaaaauaagu

SEQ ID NO: 656059 - RNA, 18 nt, Artificial Sequence
  Synthetic
accaaaaagaaaauaagu

SEQ ID NO: 656060 - RNA, 19 nt, Artificial Sequence
  Synthetic
aaccaaaaagaaaauaagu

SEQ ID NO: 656061 - RNA, 20 nt, Artificial Sequence
  Synthetic
gaaccaaaaagaaaauaagu

SEQ ID NO: 656062 - RNA, 21 nt, Artificial Sequence
  Synthetic
ggaaccaaaaagaaaauaagu

SEQ ID NO: 656063 - RNA, 22 nt, Artificial Sequence
  Synthetic
aggaaccaaaaagaaaauaagu

SEQ ID NO: 656064 - RNA, 23 nt, Artificial Sequence
  Synthetic
gaggaaccaaaaagaaaauaagu

SEQ ID NO: 656065 - RNA, 24 nt, Artificial Sequence
  Synthetic
ugaggaaccaaaaagaaaauaagu

SEQ ID NO: 656066 - RNA, 18 nt, Artificial Sequence
  Synthetic
ugaguuuuacaaauaagu

SEQ ID NO: 656067 - RNA, 19 nt, Artificial Sequence
  Synthetic
gugaguuuuacaaauaagu

SEQ ID NO: 656068 - RNA, 20 nt, Artificial Sequence
  Synthetic
ugugaguuuuacaaauaagu

SEQ ID NO: 656069 - RNA, 21 nt, Artificial Sequence
  Synthetic
uugugaguuuuacaaauaagu

SEQ ID NO: 656070 - RNA, 22 nt, Artificial Sequence
  Synthetic
cuugugaguuuuacaaauaagu

SEQ ID NO: 656071 - RNA, 23 nt, Artificial Sequence
  Synthetic
ccuugugaguuuuacaaauaagu

SEQ ID NO: 656072 - RNA, 24 nt, Artificial Sequence
  Synthetic
uccuugugaguuuuacaaauaagu

SEQ ID NO: 656073 - RNA, 18 nt, Artificial Sequence
  Synthetic
uauuugagauaaauaagu

SEQ ID NO: 656074 - RNA, 19 nt, Artificial Sequence
  Synthetic
uuauuugagauaaauaagu

SEQ ID NO: 656075 - RNA, 20 nt, Artificial Sequence
  Synthetic
guuauuugagauaaauaagu

SEQ ID NO: 656076 - RNA, 21 nt, Artificial Sequence
  Synthetic
aguuauuugagauaaauaagu

SEQ ID NO: 656077 - RNA, 22 nt, Artificial Sequence
  Synthetic
gaguuauuugagauaaauaagu

SEQ ID NO: 656078 - RNA, 23 nt, Artificial Sequence
  Synthetic
ugaguuauuugagauaaauaagu

SEQ ID NO: 656079 - RNA, 24 nt, Artificial Sequence
  Synthetic
uugaguuauuugagauaaauaagu

SEQ ID NO: 656080 - RNA, 18 nt, Artificial Sequence
  Synthetic
auuugauguagaauaagu

SEQ ID NO: 656081 - RNA, 19 nt, Artificial Sequence
  Synthetic
uauuugauguagaauaagu

SEQ ID NO: 656082 - RNA, 20 nt, Artificial Sequence
  Synthetic
uuauuugauguagaauaagu

SEQ ID NO: 656083 - RNA, 21 nt, Artificial Sequence
  Synthetic
auuauuugauguagaauaagu

SEQ ID NO: 656084 - RNA, 22 nt, Artificial Sequence
  Synthetic
uauuauuugauguagaauaagu

SEQ ID NO: 656085 - RNA, 23 nt, Artificial Sequence
  Synthetic
auauuauuugauguagaauaagu

SEQ ID NO: 656086 - RNA, 24 nt, Artificial Sequence
  Synthetic
gauauuauuugauguagaauaagu

SEQ ID NO: 656087 - RNA, 18 nt, Artificial Sequence
  Synthetic
uacccuccuguaauaagu

SEQ ID NO: 656088 - RNA, 19 nt, Artificial Sequence
  Synthetic
cuacccuccuguaauaagu

SEQ ID NO: 656089 - RNA, 20 nt, Artificial Sequence
  Synthetic
ucuacccuccuguaauaagu

SEQ ID NO: 656090 - RNA, 21 nt, Artificial Sequence
  Synthetic
uucuacccuccuguaauaagu

SEQ ID NO: 656091 - RNA, 22 nt, Artificial Sequence
  Synthetic
uuucuacccuccuguaauaagu

SEQ ID NO: 656092 - RNA, 23 nt, Artificial Sequence
  Synthetic
auuucuacccuccuguaauaagu

SEQ ID NO: 656093 - RNA, 24 nt, Artificial Sequence
  Synthetic
uauuucuacccuccuguaauaagu

SEQ ID NO: 656094 - RNA, 18 nt, Artificial Sequence
  Synthetic
aaagccccagccauaagu

SEQ ID NO: 656095 - RNA, 19 nt, Artificial Sequence
  Synthetic
uaaagccccagccauaagu

SEQ ID NO: 656096 - RNA, 20 nt, Artificial Sequence
  Synthetic
uuaaagccccagccauaagu

SEQ ID NO: 656097 - RNA, 21 nt, Artificial Sequence
  Synthetic
cuuaaagccccagccauaagu

SEQ ID NO: 656098 - RNA, 22 nt, Artificial Sequence
  Synthetic
gcuuaaagccccagccauaagu

SEQ ID NO: 656099 - RNA, 23 nt, Artificial Sequence
  Synthetic
ugcuuaaagccccagccauaagu

SEQ ID NO: 656100 - RNA, 24 nt, Artificial Sequence
  Synthetic
gugcuuaaagccccagccauaagu

SEQ ID NO: 656101 - RNA, 18 nt, Artificial Sequence
  Synthetic
cccuacucuugcauaagu

SEQ ID NO: 656102 - RNA, 19 nt, Artificial Sequence
  Synthetic
ccccuacucuugcauaagu

SEQ ID NO: 656103 - RNA, 20 nt, Artificial Sequence
  Synthetic
accccuacucuugcauaagu

SEQ ID NO: 656104 - RNA, 21 nt, Artificial Sequence
  Synthetic
caccccuacucuugcauaagu

SEQ ID NO: 656105 - RNA, 22 nt, Artificial Sequence
  Synthetic
acaccccuacucuugcauaagu

SEQ ID NO: 656106 - RNA, 23 nt, Artificial Sequence
  Synthetic
cacaccccuacucuugcauaagu

SEQ ID NO: 656107 - RNA, 24 nt, Artificial Sequence
  Synthetic
ucacaccccuacucuugcauaagu

SEQ ID NO: 656108 - RNA, 18 nt, Artificial Sequence
  Synthetic
auggucucacucauaagu

SEQ ID NO: 656109 - RNA, 19 nt, Artificial Sequence
  Synthetic
cauggucucacucauaagu

SEQ ID NO: 656110 - RNA, 20 nt, Artificial Sequence
  Synthetic
gcauggucucacucauaagu

SEQ ID NO: 656111 - RNA, 21 nt, Artificial Sequence
  Synthetic
ugcauggucucacucauaagu

SEQ ID NO: 656112 - RNA, 22 nt, Artificial Sequence
  Synthetic
cugcauggucucacucauaagu

SEQ ID NO: 656113 - RNA, 23 nt, Artificial Sequence
  Synthetic
acugcauggucucacucauaagu

SEQ ID NO: 656114 - RNA, 24 nt, Artificial Sequence
  Synthetic
cacugcauggucucacucauaagu

SEQ ID NO: 656115 - RNA, 18 nt, Artificial Sequence
  Synthetic
uauaaauaaccuauaagu

SEQ ID NO: 656116 - RNA, 19 nt, Artificial Sequence
  Synthetic
uuauaaauaaccuauaagu

SEQ ID NO: 656117 - RNA, 20 nt, Artificial Sequence
  Synthetic
cuuauaaauaaccuauaagu

SEQ ID NO: 656118 - RNA, 21 nt, Artificial Sequence
  Synthetic
acuuauaaauaaccuauaagu

SEQ ID NO: 656119 - RNA, 22 nt, Artificial Sequence
  Synthetic
aacuuauaaauaaccuauaagu

SEQ ID NO: 656120 - RNA, 23 nt, Artificial Sequence
  Synthetic
uaacuuauaaauaaccuauaagu

SEQ ID NO: 656121 - RNA, 24 nt, Artificial Sequence
  Synthetic
auaacuuauaaauaaccuauaagu

SEQ ID NO: 656122 - RNA, 18 nt, Artificial Sequence
  Synthetic
uuaggcccacuuauaagu

SEQ ID NO: 656123 - RNA, 19 nt, Artificial Sequence
  Synthetic
uuuaggcccacuuauaagu

SEQ ID NO: 656124 - RNA, 20 nt, Artificial Sequence
  Synthetic
guuuaggcccacuuauaagu

SEQ ID NO: 656125 - RNA, 21 nt, Artificial Sequence
  Synthetic
uguuuaggcccacuuauaagu

SEQ ID NO: 656126 - RNA, 22 nt, Artificial Sequence
  Synthetic
auguuuaggcccacuuauaagu

SEQ ID NO: 656127 - RNA, 23 nt, Artificial Sequence
  Synthetic
aauguuuaggcccacuuauaagu

SEQ ID NO: 656128 - RNA, 24 nt, Artificial Sequence
  Synthetic
caauguuuaggcccacuuauaagu

SEQ ID NO: 656129 - RNA, 18 nt, Artificial Sequence
  Synthetic
uagcucccacuuauaagu

SEQ ID NO: 656130 - RNA, 19 nt, Artificial Sequence
  Synthetic
guagcucccacuuauaagu

SEQ ID NO: 656131 - RNA, 20 nt, Artificial Sequence
  Synthetic
cguagcucccacuuauaagu

SEQ ID NO: 656132 - RNA, 21 nt, Artificial Sequence
  Synthetic
gcguagcucccacuuauaagu

SEQ ID NO: 656133 - RNA, 22 nt, Artificial Sequence
  Synthetic
agcguagcucccacuuauaagu

SEQ ID NO: 656134 - RNA, 23 nt, Artificial Sequence
  Synthetic
cagcguagcucccacuuauaagu

SEQ ID NO: 656135 - RNA, 24 nt, Artificial Sequence
  Synthetic
acagcguagcucccacuuauaagu

SEQ ID NO: 656136 - RNA, 20 nt, Artificial Sequence
  Synthetic
auauguucucacuuauaagu

SEQ ID NO: 656137 - RNA, 21 nt, Artificial Sequence
  Synthetic
uauauguucucacuuauaagu

SEQ ID NO: 656138 - RNA, 22 nt, Artificial Sequence
  Synthetic
cuauauguucucacuuauaagu

SEQ ID NO: 656139 - RNA, 23 nt, Artificial Sequence
  Synthetic
acuauauguucucacuuauaagu

SEQ ID NO: 656140 - RNA, 24 nt, Artificial Sequence
  Synthetic
cacuauauguucucacuuauaagu

SEQ ID NO: 656141 - RNA, 18 nt, Artificial Sequence
  Synthetic
ugucuuucacuuauaagu

SEQ ID NO: 656142 - RNA, 19 nt, Artificial Sequence
  Synthetic
uugucuuucacuuauaagu

SEQ ID NO: 656143 - RNA, 20 nt, Artificial Sequence
  Synthetic
uuugucuuucacuuauaagu

SEQ ID NO: 656144 - RNA, 21 nt, Artificial Sequence
  Synthetic
auuugucuuucacuuauaagu

SEQ ID NO: 656145 - RNA, 22 nt, Artificial Sequence
  Synthetic
uauuugucuuucacuuauaagu

SEQ ID NO: 656146 - RNA, 23 nt, Artificial Sequence
  Synthetic
uuauuugucuuucacuuauaagu

SEQ ID NO: 656147 - RNA, 24 nt, Artificial Sequence
  Synthetic
auuauuugucuuucacuuauaagu

SEQ ID NO: 656148 - RNA, 18 nt, Artificial Sequence
  Synthetic
ucucacuuacuuauaagu

SEQ ID NO: 656149 - RNA, 19 nt, Artificial Sequence
  Synthetic
uucucacuuacuuauaagu

SEQ ID NO: 656150 - RNA, 20 nt, Artificial Sequence
  Synthetic
guucucacuuacuuauaagu

SEQ ID NO: 656151 - RNA, 21 nt, Artificial Sequence
  Synthetic
uguucucacuuacuuauaagu

SEQ ID NO: 656152 - RNA, 22 nt, Artificial Sequence
  Synthetic
auguucucacuuacuuauaagu

SEQ ID NO: 656153 - RNA, 23 nt, Artificial Sequence
  Synthetic
cauguucucacuuacuuauaagu

SEQ ID NO: 656154 - RNA, 24 nt, Artificial Sequence
  Synthetic
acauguucucacuuacuuauaagu

SEQ ID NO: 656155 - RNA, 18 nt, Artificial Sequence
  Synthetic
aauauacaauuuauaagu

SEQ ID NO: 656156 - RNA, 19 nt, Artificial Sequence
  Synthetic
uaauauacaauuuauaagu

SEQ ID NO: 656157 - RNA, 20 nt, Artificial Sequence
  Synthetic
auaauauacaauuuauaagu

SEQ ID NO: 656158 - RNA, 21 nt, Artificial Sequence
  Synthetic
cauaauauacaauuuauaagu

SEQ ID NO: 656159 - RNA, 22 nt, Artificial Sequence
  Synthetic
ucauaauauacaauuuauaagu

SEQ ID NO: 656160 - RNA, 23 nt, Artificial Sequence
  Synthetic
aucauaauauacaauuuauaagu

SEQ ID NO: 656161 - RNA, 24 nt, Artificial Sequence
  Synthetic
gaucauaauauacaauuuauaagu

SEQ ID NO: 656162 - RNA, 18 nt, Artificial Sequence
  Synthetic
uagcuuccauuuauaagu

SEQ ID NO: 656163 - RNA, 19 nt, Artificial Sequence
  Synthetic
uuagcuuccauuuauaagu

SEQ ID NO: 656164 - RNA, 20 nt, Artificial Sequence
  Synthetic
uuuagcuuccauuuauaagu

SEQ ID NO: 656165 - RNA, 21 nt, Artificial Sequence
  Synthetic
auuuagcuuccauuuauaagu

SEQ ID NO: 656166 - RNA, 22 nt, Artificial Sequence
  Synthetic
cauuuagcuuccauuuauaagu

SEQ ID NO: 656167 - RNA, 23 nt, Artificial Sequence
  Synthetic
ucauuuagcuuccauuuauaagu

SEQ ID NO: 656168 - RNA, 24 nt, Artificial Sequence
  Synthetic
aucauuuagcuuccauuuauaagu

SEQ ID NO: 656169 - RNA, 18 nt, Artificial Sequence
  Synthetic
auguucucauuuauaagu

SEQ ID NO: 656170 - RNA, 19 nt, Artificial Sequence
  Synthetic
cauguucucauuuauaagu

SEQ ID NO: 656171 - RNA, 20 nt, Artificial Sequence
  Synthetic
ccauguucucauuuauaagu

SEQ ID NO: 656172 - RNA, 21 nt, Artificial Sequence
  Synthetic
cccauguucucauuuauaagu

SEQ ID NO: 656173 - RNA, 22 nt, Artificial Sequence
  Synthetic
ccccauguucucauuuauaagu

SEQ ID NO: 656174 - RNA, 23 nt, Artificial Sequence
  Synthetic
accccauguucucauuuauaagu

SEQ ID NO: 656175 - RNA, 24 nt, Artificial Sequence
  Synthetic
uaccccauguucucauuuauaagu

SEQ ID NO: 656176 - RNA, 18 nt, Artificial Sequence
  Synthetic
ggugcaauucaacuaagu

SEQ ID NO: 656177 - RNA, 19 nt, Artificial Sequence
  Synthetic
gggugcaauucaacuaagu

SEQ ID NO: 656178 - RNA, 20 nt, Artificial Sequence
  Synthetic
ugggugcaauucaacuaagu

SEQ ID NO: 656179 - RNA, 21 nt, Artificial Sequence
  Synthetic
cugggugcaauucaacuaagu

SEQ ID NO: 656180 - RNA, 22 nt, Artificial Sequence
  Synthetic
gcugggugcaauucaacuaagu

SEQ ID NO: 656181 - RNA, 23 nt, Artificial Sequence
  Synthetic
cgcugggugcaauucaacuaagu

SEQ ID NO: 656182 - RNA, 24 nt, Artificial Sequence
  Synthetic
acgcugggugcaauucaacuaagu

SEQ ID NO: 656183 - RNA, 18 nt, Artificial Sequence
  Synthetic
uacuuuaggacacuaagu

SEQ ID NO: 656184 - RNA, 19 nt, Artificial Sequence
  Synthetic
cuacuuuaggacacuaagu

SEQ ID NO: 656185 - RNA, 20 nt, Artificial Sequence
  Synthetic
gcuacuuuaggacacuaagu

SEQ ID NO: 656186 - RNA, 21 nt, Artificial Sequence
  Synthetic
ugcuacuuuaggacacuaagu

SEQ ID NO: 656187 - RNA, 22 nt, Artificial Sequence
  Synthetic
uugcuacuuuaggacacuaagu

SEQ ID NO: 656188 - RNA, 23 nt, Artificial Sequence
  Synthetic
auugcuacuuuaggacacuaagu

SEQ ID NO: 656189 - RNA, 24 nt, Artificial Sequence
  Synthetic
uauugcuacuuuaggacacuaagu

SEQ ID NO: 656190 - RNA, 18 nt, Artificial Sequence
  Synthetic
uccccuggaggacuaagu

SEQ ID NO: 656191 - RNA, 19 nt, Artificial Sequence
  Synthetic
uuccccuggaggacuaagu

SEQ ID NO: 656192 - RNA, 20 nt, Artificial Sequence
  Synthetic
auuccccuggaggacuaagu

SEQ ID NO: 656193 - RNA, 21 nt, Artificial Sequence
  Synthetic
cauuccccuggaggacuaagu

SEQ ID NO: 656194 - RNA, 22 nt, Artificial Sequence
  Synthetic
gcauuccccuggaggacuaagu

SEQ ID NO: 656195 - RNA, 23 nt, Artificial Sequence
  Synthetic
ugcauuccccuggaggacuaagu

SEQ ID NO: 656196 - RNA, 24 nt, Artificial Sequence
  Synthetic
augcauuccccuggaggacuaagu

SEQ ID NO: 656197 - RNA, 18 nt, Artificial Sequence
  Synthetic
gacuaguaaauacuaagu

SEQ ID NO: 656198 - RNA, 19 nt, Artificial Sequence
  Synthetic
ugacuaguaaauacuaagu

SEQ ID NO: 656199 - RNA, 20 nt, Artificial Sequence
  Synthetic
cugacuaguaaauacuaagu

SEQ ID NO: 656200 - RNA, 21 nt, Artificial Sequence
  Synthetic
acugacuaguaaauacuaagu

SEQ ID NO: 656201 - RNA, 22 nt, Artificial Sequence
  Synthetic
aacugacuaguaaauacuaagu

SEQ ID NO: 656202 - RNA, 23 nt, Artificial Sequence
  Synthetic
aaacugacuaguaaauacuaagu

SEQ ID NO: 656203 - RNA, 24 nt, Artificial Sequence
  Synthetic
caaacugacuaguaaauacuaagu

SEQ ID NO: 656204 - RNA, 18 nt, Artificial Sequence
  Synthetic
cacaagcaaacccuaagu

SEQ ID NO: 656205 - RNA, 19 nt, Artificial Sequence
  Synthetic
ccacaagcaaacccuaagu

SEQ ID NO: 656206 - RNA, 20 nt, Artificial Sequence
  Synthetic
accacaagcaaacccuaagu

SEQ ID NO: 656207 - RNA, 21 nt, Artificial Sequence
  Synthetic
caccacaagcaaacccuaagu

SEQ ID NO: 656208 - RNA, 22 nt, Artificial Sequence
  Synthetic
ccaccacaagcaaacccuaagu

SEQ ID NO: 656209 - RNA, 23 nt, Artificial Sequence
  Synthetic
uccaccacaagcaaacccuaagu

SEQ ID NO: 656210 - RNA, 24 nt, Artificial Sequence
  Synthetic
cuccaccacaagcaaacccuaagu

SEQ ID NO: 656211 - RNA, 18 nt, Artificial Sequence
  Synthetic
aauuugauaaagcuaagu

SEQ ID NO: 656212 - RNA, 19 nt, Artificial Sequence
  Synthetic
gaauuugauaaagcuaagu

SEQ ID NO: 656213 - RNA, 20 nt, Artificial Sequence
  Synthetic
ggaauuugauaaagcuaagu

SEQ ID NO: 656214 - RNA, 21 nt, Artificial Sequence
  Synthetic
aggaauuugauaaagcuaagu

SEQ ID NO: 656215 - RNA, 22 nt, Artificial Sequence
  Synthetic
uaggaauuugauaaagcuaagu

SEQ ID NO: 656216 - RNA, 23 nt, Artificial Sequence
  Synthetic
uuaggaauuugauaaagcuaagu

SEQ ID NO: 656217 - RNA, 24 nt, Artificial Sequence
  Synthetic
auuaggaauuugauaaagcuaagu

SEQ ID NO: 656218 - RNA, 18 nt, Artificial Sequence
  Synthetic
acuuuggggacucuaagu

SEQ ID NO: 656219 - RNA, 19 nt, Artificial Sequence
  Synthetic
gacuuuggggacucuaagu

SEQ ID NO: 656220 - RNA, 20 nt, Artificial Sequence
  Synthetic
ggacuuuggggacucuaagu

SEQ ID NO: 656221 - RNA, 21 nt, Artificial Sequence
  Synthetic
uggacuuuggggacucuaagu

SEQ ID NO: 656222 - RNA, 22 nt, Artificial Sequence
  Synthetic
auggacuuuggggacucuaagu

SEQ ID NO: 656223 - RNA, 23 nt, Artificial Sequence
  Synthetic
aauggacuuuggggacucuaagu

SEQ ID NO: 656224 - RNA, 24 nt, Artificial Sequence
  Synthetic
caauggacuuuggggacucuaagu

SEQ ID NO: 656225 - RNA, 18 nt, Artificial Sequence
  Synthetic
agcauuagcccucuaagu

SEQ ID NO: 656226 - RNA, 19 nt, Artificial Sequence
  Synthetic
aagcauuagcccucuaagu

SEQ ID NO: 656227 - RNA, 20 nt, Artificial Sequence
  Synthetic
aaagcauuagcccucuaagu

SEQ ID NO: 656228 - RNA, 21 nt, Artificial Sequence
  Synthetic
gaaagcauuagcccucuaagu

SEQ ID NO: 656229 - RNA, 22 nt, Artificial Sequence
  Synthetic
ggaaagcauuagcccucuaagu

SEQ ID NO: 656230 - RNA, 23 nt, Artificial Sequence
  Synthetic
aggaaagcauuagcccucuaagu

SEQ ID NO: 656231 - RNA, 24 nt, Artificial Sequence
  Synthetic
uaggaaagcauuagcccucuaagu

SEQ ID NO: 656232 - RNA, 18 nt, Artificial Sequence
  Synthetic
aaagugaggcaaguaagu

SEQ ID NO: 656233 - RNA, 19 nt, Artificial Sequence
  Synthetic
gaaagugaggcaaguaagu

SEQ ID NO: 656234 - RNA, 20 nt, Artificial Sequence
  Synthetic
ugaaagugaggcaaguaagu

SEQ ID NO: 656235 - RNA, 21 nt, Artificial Sequence
  Synthetic
uugaaagugaggcaaguaagu

SEQ ID NO: 656236 - RNA, 22 nt, Artificial Sequence
  Synthetic
cuugaaagugaggcaaguaagu

SEQ ID NO: 656237 - RNA, 23 nt, Artificial Sequence
  Synthetic
acuugaaagugaggcaaguaagu

SEQ ID NO: 656238 - RNA, 24 nt, Artificial Sequence
  Synthetic
aacuugaaagugaggcaaguaagu

SEQ ID NO: 656239 - RNA, 18 nt, Artificial Sequence
  Synthetic
aguuuggaagcaguaagu

SEQ ID NO: 656240 - RNA, 19 nt, Artificial Sequence
  Synthetic
uaguuuggaagcaguaagu

SEQ ID NO: 656241 - RNA, 20 nt, Artificial Sequence
  Synthetic
cuaguuuggaagcaguaagu

SEQ ID NO: 656242 - RNA, 21 nt, Artificial Sequence
  Synthetic
ucuaguuuggaagcaguaagu

SEQ ID NO: 656243 - RNA, 22 nt, Artificial Sequence
  Synthetic
uucuaguuuggaagcaguaagu

SEQ ID NO: 656244 - RNA, 23 nt, Artificial Sequence
  Synthetic
uuucuaguuuggaagcaguaagu

SEQ ID NO: 656245 - RNA, 24 nt, Artificial Sequence
  Synthetic
uuuucuaguuuggaagcaguaagu

SEQ ID NO: 656246 - RNA, 18 nt, Artificial Sequence
  Synthetic
auguucucacucguaagu

SEQ ID NO: 656247 - RNA, 19 nt, Artificial Sequence
  Synthetic
uauguucucacucguaagu

SEQ ID NO: 656248 - RNA, 20 nt, Artificial Sequence
  Synthetic
auauguucucacucguaagu

SEQ ID NO: 656249 - RNA, 21 nt, Artificial Sequence
  Synthetic
cauauguucucacucguaagu

SEQ ID NO: 656250 - RNA, 22 nt, Artificial Sequence
  Synthetic
ccauauguucucacucguaagu

SEQ ID NO: 656251 - RNA, 23 nt, Artificial Sequence
  Synthetic
accauauguucucacucguaagu

SEQ ID NO: 656252 - RNA, 24 nt, Artificial Sequence
  Synthetic
uaccauauguucucacucguaagu

SEQ ID NO: 656253 - RNA, 18 nt, Artificial Sequence
  Synthetic
caugaauuaaggguaagu

SEQ ID NO: 656254 - RNA, 19 nt, Artificial Sequence
  Synthetic
acaugaauuaaggguaagu

SEQ ID NO: 656255 - RNA, 20 nt, Artificial Sequence
  Synthetic
aacaugaauuaaggguaagu

SEQ ID NO: 656256 - RNA, 21 nt, Artificial Sequence
  Synthetic
aaacaugaauuaaggguaagu

SEQ ID NO: 656257 - RNA, 22 nt, Artificial Sequence
  Synthetic
aaaacaugaauuaaggguaagu

SEQ ID NO: 656258 - RNA, 23 nt, Artificial Sequence
  Synthetic
gaaaacaugaauuaaggguaagu

SEQ ID NO: 656259 - RNA, 24 nt, Artificial Sequence
  Synthetic
ugaaaacaugaauuaaggguaagu

SEQ ID NO: 656260 - RNA, 18 nt, Artificial Sequence
  Synthetic
gagaaauaugguguaagu

SEQ ID NO: 656261 - RNA, 19 nt, Artificial Sequence
  Synthetic
ggagaaauaugguguaagu

SEQ ID NO: 656262 - RNA, 20 nt, Artificial Sequence
  Synthetic
aggagaaauaugguguaagu

SEQ ID NO: 656263 - RNA, 21 nt, Artificial Sequence
  Synthetic
caggagaaauaugguguaagu

SEQ ID NO: 656264 - RNA, 22 nt, Artificial Sequence
  Synthetic
ccaggagaaauaugguguaagu

SEQ ID NO: 656265 - RNA, 23 nt, Artificial Sequence
  Synthetic
accaggagaaauaugguguaagu

SEQ ID NO: 656266 - RNA, 24 nt, Artificial Sequence
  Synthetic
caccaggagaaauaugguguaagu

SEQ ID NO: 656267 - RNA, 18 nt, Artificial Sequence
  Synthetic
uuuuaaucauuuguaagu

SEQ ID NO: 656268 - RNA, 19 nt, Artificial Sequence
  Synthetic
auuuuaaucauuuguaagu

SEQ ID NO: 656269 - RNA, 20 nt, Artificial Sequence
  Synthetic
cauuuuaaucauuuguaagu

SEQ ID NO: 656270 - RNA, 21 nt, Artificial Sequence
  Synthetic
gcauuuuaaucauuuguaagu

SEQ ID NO: 656271 - RNA, 22 nt, Artificial Sequence
  Synthetic
agcauuuuaaucauuuguaagu

SEQ ID NO: 656272 - RNA, 23 nt, Artificial Sequence
  Synthetic
aagcauuuuaaucauuuguaagu

SEQ ID NO: 656273 - RNA, 24 nt, Artificial Sequence
  Synthetic
gaagcauuuuaaucauuuguaagu

SEQ ID NO: 656274 - RNA, 18 nt, Artificial Sequence
  Synthetic
accugcuugaaauuaagu

SEQ ID NO: 656275 - RNA, 19 nt, Artificial Sequence
  Synthetic
aaccugcuugaaauuaagu

SEQ ID NO: 656276 - RNA, 20 nt, Artificial Sequence
  Synthetic
aaaccugcuugaaauuaagu

SEQ ID NO: 656277 - RNA, 21 nt, Artificial Sequence
  Synthetic
gaaaccugcuugaaauuaagu

SEQ ID NO: 656278 - RNA, 22 nt, Artificial Sequence
  Synthetic
agaaaccugcuugaaauuaagu

SEQ ID NO: 656279 - RNA, 23 nt, Artificial Sequence
  Synthetic
gagaaaccugcuugaaauuaagu

SEQ ID NO: 656280 - RNA, 24 nt, Artificial Sequence
  Synthetic
cgagaaaccugcuugaaauuaagu

SEQ ID NO: 656281 - RNA, 18 nt, Artificial Sequence
  Synthetic
auauugcgacaauuaagu

SEQ ID NO: 656282 - RNA, 19 nt, Artificial Sequence
  Synthetic
gauauugcgacaauuaagu

SEQ ID NO: 656283 - RNA, 20 nt, Artificial Sequence
  Synthetic
agauauugcgacaauuaagu

SEQ ID NO: 656284 - RNA, 21 nt, Artificial Sequence
  Synthetic
gagauauugcgacaauuaagu

SEQ ID NO: 656285 - RNA, 22 nt, Artificial Sequence
  Synthetic
ugagauauugcgacaauuaagu

SEQ ID NO: 656286 - RNA, 23 nt, Artificial Sequence
  Synthetic
cugagauauugcgacaauuaagu

SEQ ID NO: 656287 - RNA, 24 nt, Artificial Sequence
  Synthetic
acugagauauugcgacaauuaagu

SEQ ID NO: 656288 - RNA, 18 nt, Artificial Sequence
  Synthetic
caucugguaauauuaagu

SEQ ID NO: 656289 - RNA, 19 nt, Artificial Sequence
  Synthetic
acaucugguaauauuaagu

SEQ ID NO: 656290 - RNA, 20 nt, Artificial Sequence
  Synthetic
uacaucugguaauauuaagu

SEQ ID NO: 656291 - RNA, 21 nt, Artificial Sequence
  Synthetic
cuacaucugguaauauuaagu

SEQ ID NO: 656292 - RNA, 22 nt, Artificial Sequence
  Synthetic
gcuacaucugguaauauuaagu

SEQ ID NO: 656293 - RNA, 23 nt, Artificial Sequence
  Synthetic
ugcuacaucugguaauauuaagu

SEQ ID NO: 656294 - RNA, 24 nt, Artificial Sequence
  Synthetic
augcuacaucugguaauauuaagu

SEQ ID NO: 656295 - RNA, 18 nt, Artificial Sequence
  Synthetic
cgauggugucacuuaagu

SEQ ID NO: 656296 - RNA, 19 nt, Artificial Sequence
  Synthetic
acgauggugucacuuaagu

SEQ ID NO: 656297 - RNA, 20 nt, Artificial Sequence
  Synthetic
uacgauggugucacuuaagu

SEQ ID NO: 656298 - RNA, 21 nt, Artificial Sequence
  Synthetic
auacgauggugucacuuaagu

SEQ ID NO: 656299 - RNA, 22 nt, Artificial Sequence
  Synthetic
uauacgauggugucacuuaagu

SEQ ID NO: 656300 - RNA, 23 nt, Artificial Sequence
  Synthetic
uuauacgauggugucacuuaagu

SEQ ID NO: 656301 - RNA, 24 nt, Artificial Sequence
  Synthetic
uuuauacgauggugucacuuaagu

SEQ ID NO: 656302 - RNA, 18 nt, Artificial Sequence
  Synthetic
uacaaauauuacuuaagu

SEQ ID NO: 656303 - RNA, 19 nt, Artificial Sequence
  Synthetic
uuacaaauauuacuuaagu

SEQ ID NO: 656304 - RNA, 20 nt, Artificial Sequence
  Synthetic
guuacaaauauuacuuaagu

SEQ ID NO: 656305 - RNA, 21 nt, Artificial Sequence
  Synthetic
uguuacaaauauuacuuaagu

SEQ ID NO: 656306 - RNA, 22 nt, Artificial Sequence
  Synthetic
auguuacaaauauuacuuaagu

SEQ ID NO: 656307 - RNA, 23 nt, Artificial Sequence
  Synthetic
uauguuacaaauauuacuuaagu

SEQ ID NO: 656308 - RNA, 24 nt, Artificial Sequence
  Synthetic
uuauguuacaaauauuacuuaagu

SEQ ID NO: 656309 - RNA, 18 nt, Artificial Sequence
  Synthetic
gaacucaguuacuuaagu

SEQ ID NO: 656310 - RNA, 19 nt, Artificial Sequence
  Synthetic
ggaacucaguuacuuaagu

SEQ ID NO: 656311 - RNA, 20 nt, Artificial Sequence
  Synthetic
aggaacucaguuacuuaagu

SEQ ID NO: 656312 - RNA, 21 nt, Artificial Sequence
  Synthetic
caggaacucaguuacuuaagu

SEQ ID NO: 656313 - RNA, 22 nt, Artificial Sequence
  Synthetic
gcaggaacucaguuacuuaagu

SEQ ID NO: 656314 - RNA, 23 nt, Artificial Sequence
  Synthetic
ugcaggaacucaguuacuuaagu

SEQ ID NO: 656315 - RNA, 24 nt, Artificial Sequence
  Synthetic
gugcaggaacucaguuacuuaagu

SEQ ID NO: 656316 - RNA, 18 nt, Artificial Sequence
  Synthetic
ccacaccauagguuaagu

SEQ ID NO: 656317 - RNA, 19 nt, Artificial Sequence
  Synthetic
accacaccauagguuaagu

SEQ ID NO: 656318 - RNA, 20 nt, Artificial Sequence
  Synthetic
aaccacaccauagguuaagu

SEQ ID NO: 656319 - RNA, 21 nt, Artificial Sequence
  Synthetic
aaaccacaccauagguuaagu

SEQ ID NO: 656320 - RNA, 22 nt, Artificial Sequence
  Synthetic
gaaaccacaccauagguuaagu

SEQ ID NO: 656321 - RNA, 23 nt, Artificial Sequence
  Synthetic
agaaaccacaccauagguuaagu

SEQ ID NO: 656322 - RNA, 24 nt, Artificial Sequence
  Synthetic
cagaaaccacaccauagguuaagu

SEQ ID NO: 656323 - RNA, 18 nt, Artificial Sequence
  Synthetic
gaaaaaaaaauguuaagu

SEQ ID NO: 656324 - RNA, 19 nt, Artificial Sequence
  Synthetic
agaaaaaaaaauguuaagu

SEQ ID NO: 656325 - RNA, 20 nt, Artificial Sequence
  Synthetic
aagaaaaaaaaauguuaagu

SEQ ID NO: 656326 - RNA, 21 nt, Artificial Sequence
  Synthetic
uaagaaaaaaaaauguuaagu

SEQ ID NO: 656327 - RNA, 22 nt, Artificial Sequence
  Synthetic
uuaagaaaaaaaaauguuaagu

SEQ ID NO: 656328 - RNA, 23 nt, Artificial Sequence
  Synthetic
uuuaagaaaaaaaaauguuaagu

SEQ ID NO: 656329 - RNA, 24 nt, Artificial Sequence
  Synthetic
auuuaagaaaaaaaaauguuaagu

SEQ ID NO: 656330 - RNA, 18 nt, Artificial Sequence
  Synthetic
cagcucccacuuuuaagu

SEQ ID NO: 656331 - RNA, 19 nt, Artificial Sequence
  Synthetic
ucagcucccacuuuuaagu

SEQ ID NO: 656332 - RNA, 20 nt, Artificial Sequence
  Synthetic
uucagcucccacuuuuaagu

SEQ ID NO: 656333 - RNA, 21 nt, Artificial Sequence
  Synthetic
guucagcucccacuuuuaagu

SEQ ID NO: 656334 - RNA, 22 nt, Artificial Sequence
  Synthetic
uguucagcucccacuuuuaagu

SEQ ID NO: 656335 - RNA, 23 nt, Artificial Sequence
  Synthetic
uuguucagcucccacuuuuaagu

SEQ ID NO: 656336 - RNA, 24 nt, Artificial Sequence
  Synthetic
auuguucagcucccacuuuuaagu

SEQ ID NO: 656337 - RNA, 18 nt, Artificial Sequence
  Synthetic
auuuugcagcuuuuaagu

SEQ ID NO: 656338 - RNA, 19 nt, Artificial Sequence
  Synthetic
cauuuugcagcuuuuaagu

SEQ ID NO: 656339 - RNA, 20 nt, Artificial Sequence
  Synthetic
gcauuuugcagcuuuuaagu

SEQ ID NO: 656340 - RNA, 21 nt, Artificial Sequence
  Synthetic
agcauuuugcagcuuuuaagu

SEQ ID NO: 656341 - RNA, 22 nt, Artificial Sequence
  Synthetic
gagcauuuugcagcuuuuaagu

SEQ ID NO: 656342 - RNA, 23 nt, Artificial Sequence
  Synthetic
ugagcauuuugcagcuuuuaagu

SEQ ID NO: 656343 - RNA, 24 nt, Artificial Sequence
  Synthetic
augagcauuuugcagcuuuuaagu

SEQ ID NO: 656344 - RNA, 18 nt, Artificial Sequence
  Synthetic
uuguaucuucaaaacagu

SEQ ID NO: 656345 - RNA, 19 nt, Artificial Sequence
  Synthetic
uuuguaucuucaaaacagu

SEQ ID NO: 656346 - RNA, 20 nt, Artificial Sequence
  Synthetic
uuuuguaucuucaaaacagu

SEQ ID NO: 656347 - RNA, 21 nt, Artificial Sequence
  Synthetic
cuuuuguaucuucaaaacagu

SEQ ID NO: 656348 - RNA, 22 nt, Artificial Sequence
  Synthetic
ccuuuuguaucuucaaaacagu

SEQ ID NO: 656349 - RNA, 23 nt, Artificial Sequence
  Synthetic
uccuuuuguaucuucaaaacagu

SEQ ID NO: 656350 - RNA, 24 nt, Artificial Sequence
  Synthetic
uuccuuuuguaucuucaaaacagu

SEQ ID NO: 656351 - RNA, 18 nt, Artificial Sequence
  Synthetic
auuauuguggaaaacagu

SEQ ID NO: 656352 - RNA, 19 nt, Artificial Sequence
  Synthetic
aauuauuguggaaaacagu

SEQ ID NO: 656353 - RNA, 20 nt, Artificial Sequence
  Synthetic
uaauuauuguggaaaacagu

SEQ ID NO: 656354 - RNA, 21 nt, Artificial Sequence
  Synthetic
auaauuauuguggaaaacagu

SEQ ID NO: 656355 - RNA, 22 nt, Artificial Sequence
  Synthetic
uauaauuauuguggaaaacagu

SEQ ID NO: 656356 - RNA, 23 nt, Artificial Sequence
  Synthetic
guauaauuauuguggaaaacagu

SEQ ID NO: 656357 - RNA, 24 nt, Artificial Sequence
  Synthetic
aguauaauuauuguggaaaacagu

SEQ ID NO: 656358 - RNA, 18 nt, Artificial Sequence
  Synthetic
caucguucugaaaacagu

SEQ ID NO: 656359 - RNA, 19 nt, Artificial Sequence
  Synthetic
ucaucguucugaaaacagu

SEQ ID NO: 656360 - RNA, 20 nt, Artificial Sequence
  Synthetic
uucaucguucugaaaacagu

SEQ ID NO: 656361 - RNA, 21 nt, Artificial Sequence
  Synthetic
auucaucguucugaaaacagu

SEQ ID NO: 656362 - RNA, 22 nt, Artificial Sequence
  Synthetic
cauucaucguucugaaaacagu

SEQ ID NO: 656363 - RNA, 23 nt, Artificial Sequence
  Synthetic
ccauucaucguucugaaaacagu

SEQ ID NO: 656364 - RNA, 24 nt, Artificial Sequence
  Synthetic
gccauucaucguucugaaaacagu

SEQ ID NO: 656365 - RNA, 18 nt, Artificial Sequence
  Synthetic
cuuaccacuacaaacagu

SEQ ID NO: 656366 - RNA, 19 nt, Artificial Sequence
  Synthetic
acuuaccacuacaaacagu

SEQ ID NO: 656367 - RNA, 20 nt, Artificial Sequence
  Synthetic
cacuuaccacuacaaacagu

SEQ ID NO: 656368 - RNA, 21 nt, Artificial Sequence
  Synthetic
ucacuuaccacuacaaacagu

SEQ ID NO: 656369 - RNA, 22 nt, Artificial Sequence
  Synthetic
aucacuuaccacuacaaacagu

SEQ ID NO: 656370 - RNA, 23 nt, Artificial Sequence
  Synthetic
gaucacuuaccacuacaaacagu

SEQ ID NO: 656371 - RNA, 24 nt, Artificial Sequence
  Synthetic
agaucacuuaccacuacaaacagu

SEQ ID NO: 656372 - RNA, 18 nt, Artificial Sequence
  Synthetic
agcccuaaggcaaacagu

SEQ ID NO: 656373 - RNA, 19 nt, Artificial Sequence
  Synthetic
gagcccuaaggcaaacagu

SEQ ID NO: 656374 - RNA, 20 nt, Artificial Sequence
  Synthetic
agagcccuaaggcaaacagu

SEQ ID NO: 656375 - RNA, 21 nt, Artificial Sequence
  Synthetic
gagagcccuaaggcaaacagu

SEQ ID NO: 656376 - RNA, 22 nt, Artificial Sequence
  Synthetic
agagagcccuaaggcaaacagu

SEQ ID NO: 656377 - RNA, 23 nt, Artificial Sequence
  Synthetic
gagagagcccuaaggcaaacagu

SEQ ID NO: 656378 - RNA, 24 nt, Artificial Sequence
  Synthetic
agagagagcccuaaggcaaacagu

SEQ ID NO: 656379 - RNA, 18 nt, Artificial Sequence
  Synthetic
cagccacagugaaacagu

SEQ ID NO: 656380 - RNA, 19 nt, Artificial Sequence
  Synthetic
ucagccacagugaaacagu

SEQ ID NO: 656381 - RNA, 20 nt, Artificial Sequence
  Synthetic
uucagccacagugaaacagu

SEQ ID NO: 656382 - RNA, 21 nt, Artificial Sequence
  Synthetic
guucagccacagugaaacagu

SEQ ID NO: 656383 - RNA, 22 nt, Artificial Sequence
  Synthetic
aguucagccacagugaaacagu

SEQ ID NO: 656384 - RNA, 23 nt, Artificial Sequence
  Synthetic
uaguucagccacagugaaacagu

SEQ ID NO: 656385 - RNA, 24 nt, Artificial Sequence
  Synthetic
uuaguucagccacagugaaacagu

SEQ ID NO: 656386 - RNA, 18 nt, Artificial Sequence
  Synthetic
ggcagagguugaaacagu

SEQ ID NO: 656387 - RNA, 19 nt, Artificial Sequence
  Synthetic
aggcagagguugaaacagu

SEQ ID NO: 656388 - RNA, 20 nt, Artificial Sequence
  Synthetic
caggcagagguugaaacagu

SEQ ID NO: 656389 - RNA, 21 nt, Artificial Sequence
  Synthetic
acaggcagagguugaaacagu

SEQ ID NO: 656390 - RNA, 22 nt, Artificial Sequence
  Synthetic
aacaggcagagguugaaacagu

SEQ ID NO: 656391 - RNA, 23 nt, Artificial Sequence
  Synthetic
uaacaggcagagguugaaacagu

SEQ ID NO: 656392 - RNA, 24 nt, Artificial Sequence
  Synthetic
guaacaggcagagguugaaacagu

SEQ ID NO: 656393 - RNA, 18 nt, Artificial Sequence
  Synthetic
uagaacuguauaaacagu

SEQ ID NO: 656394 - RNA, 19 nt, Artificial Sequence
  Synthetic
auagaacuguauaaacagu

SEQ ID NO: 656395 - RNA, 20 nt, Artificial Sequence
  Synthetic
uauagaacuguauaaacagu

SEQ ID NO: 656396 - RNA, 21 nt, Artificial Sequence
  Synthetic
auauagaacuguauaaacagu

SEQ ID NO: 656397 - RNA, 22 nt, Artificial Sequence
  Synthetic
aauauagaacuguauaaacagu

SEQ ID NO: 656398 - RNA, 23 nt, Artificial Sequence
  Synthetic
caauauagaacuguauaaacagu

SEQ ID NO: 656399 - RNA, 24 nt, Artificial Sequence
  Synthetic
acaauauagaacuguauaaacagu

SEQ ID NO: 656400 - RNA, 18 nt, Artificial Sequence
  Synthetic
ccagcaaugaacaacagu

SEQ ID NO: 656401 - RNA, 19 nt, Artificial Sequence
  Synthetic
gccagcaaugaacaacagu

SEQ ID NO: 656402 - RNA, 20 nt, Artificial Sequence
  Synthetic
agccagcaaugaacaacagu

SEQ ID NO: 656403 - RNA, 21 nt, Artificial Sequence
  Synthetic
cagccagcaaugaacaacagu

SEQ ID NO: 656404 - RNA, 22 nt, Artificial Sequence
  Synthetic
ucagccagcaaugaacaacagu

SEQ ID NO: 656405 - RNA, 23 nt, Artificial Sequence
  Synthetic
uucagccagcaaugaacaacagu

SEQ ID NO: 656406 - RNA, 24 nt, Artificial Sequence
  Synthetic
uuucagccagcaaugaacaacagu

SEQ ID NO: 656407 - RNA, 18 nt, Artificial Sequence
  Synthetic
uccagcccgggcaacagu

SEQ ID NO: 656408 - RNA, 19 nt, Artificial Sequence
  Synthetic
cuccagcccgggcaacagu

SEQ ID NO: 656409 - RNA, 20 nt, Artificial Sequence
  Synthetic
acuccagcccgggcaacagu

SEQ ID NO: 656410 - RNA, 21 nt, Artificial Sequence
  Synthetic
cacuccagcccgggcaacagu

SEQ ID NO: 656411 - RNA, 22 nt, Artificial Sequence
  Synthetic
gcacuccagcccgggcaacagu

SEQ ID NO: 656412 - RNA, 23 nt, Artificial Sequence
  Synthetic
ugcacuccagcccgggcaacagu

SEQ ID NO: 656413 - RNA, 24 nt, Artificial Sequence
  Synthetic
cugcacuccagcccgggcaacagu

SEQ ID NO: 656414 - RNA, 18 nt, Artificial Sequence
  Synthetic
ggcaaaaaccagaacagu

SEQ ID NO: 656415 - RNA, 19 nt, Artificial Sequence
  Synthetic
aggcaaaaaccagaacagu

SEQ ID NO: 656416 - RNA, 20 nt, Artificial Sequence
  Synthetic
caggcaaaaaccagaacagu

SEQ ID NO: 656417 - RNA, 21 nt, Artificial Sequence
  Synthetic
acaggcaaaaaccagaacagu

SEQ ID NO: 656418 - RNA, 22 nt, Artificial Sequence
  Synthetic
aacaggcaaaaaccagaacagu

SEQ ID NO: 656419 - RNA, 23 nt, Artificial Sequence
  Synthetic
uaacaggcaaaaaccagaacagu

SEQ ID NO: 656420 - RNA, 24 nt, Artificial Sequence
  Synthetic
auaacaggcaaaaaccagaacagu

SEQ ID NO: 656421 - RNA, 18 nt, Artificial Sequence
  Synthetic
cucaaccuccagaacagu

SEQ ID NO: 656422 - RNA, 19 nt, Artificial Sequence
  Synthetic
ucucaaccuccagaacagu

SEQ ID NO: 656423 - RNA, 20 nt, Artificial Sequence
  Synthetic
uucucaaccuccagaacagu

SEQ ID NO: 656424 - RNA, 21 nt, Artificial Sequence
  Synthetic
cuucucaaccuccagaacagu

SEQ ID NO: 656425 - RNA, 22 nt, Artificial Sequence
  Synthetic
acuucucaaccuccagaacagu

SEQ ID NO: 656426 - RNA, 23 nt, Artificial Sequence
  Synthetic
gacuucucaaccuccagaacagu

SEQ ID NO: 656427 - RNA, 24 nt, Artificial Sequence
  Synthetic
ggacuucucaaccuccagaacagu

SEQ ID NO: 656428 - RNA, 18 nt, Artificial Sequence
  Synthetic
accacuauagagaacagu

SEQ ID NO: 656429 - RNA, 19 nt, Artificial Sequence
  Synthetic
aaccacuauagagaacagu

SEQ ID NO: 656430 - RNA, 20 nt, Artificial Sequence
  Synthetic
caaccacuauagagaacagu

SEQ ID NO: 656431 - RNA, 21 nt, Artificial Sequence
  Synthetic
acaaccacuauagagaacagu

SEQ ID NO: 656432 - RNA, 22 nt, Artificial Sequence
  Synthetic
uacaaccacuauagagaacagu

SEQ ID NO: 656433 - RNA, 23 nt, Artificial Sequence
  Synthetic
guacaaccacuauagagaacagu

SEQ ID NO: 656434 - RNA, 24 nt, Artificial Sequence
  Synthetic
aguacaaccacuauagagaacagu

SEQ ID NO: 656435 - RNA, 18 nt, Artificial Sequence
  Synthetic
gauuaucaggagaacagu

SEQ ID NO: 656436 - RNA, 19 nt, Artificial Sequence
  Synthetic
ugauuaucaggagaacagu

SEQ ID NO: 656437 - RNA, 20 nt, Artificial Sequence
  Synthetic
cugauuaucaggagaacagu

SEQ ID NO: 656438 - RNA, 21 nt, Artificial Sequence
  Synthetic
acugauuaucaggagaacagu

SEQ ID NO: 656439 - RNA, 22 nt, Artificial Sequence
  Synthetic
uacugauuaucaggagaacagu

SEQ ID NO: 656440 - RNA, 23 nt, Artificial Sequence
  Synthetic
uuacugauuaucaggagaacagu

SEQ ID NO: 656441 - RNA, 24 nt, Artificial Sequence
  Synthetic
cuuacugauuaucaggagaacagu

SEQ ID NO: 656442 - RNA, 18 nt, Artificial Sequence
  Synthetic
caguaccaugagaacagu

SEQ ID NO: 656443 - RNA, 19 nt, Artificial Sequence
  Synthetic
ucaguaccaugagaacagu

SEQ ID NO: 656444 - RNA, 20 nt, Artificial Sequence
  Synthetic
uucaguaccaugagaacagu

SEQ ID NO: 656445 - RNA, 21 nt, Artificial Sequence
  Synthetic
auucaguaccaugagaacagu

SEQ ID NO: 656446 - RNA, 22 nt, Artificial Sequence
  Synthetic
uauucaguaccaugagaacagu

SEQ ID NO: 656447 - RNA, 23 nt, Artificial Sequence
  Synthetic
uuauucaguaccaugagaacagu

SEQ ID NO: 656448 - RNA, 24 nt, Artificial Sequence
  Synthetic
cuuauucaguaccaugagaacagu

SEQ ID NO: 656449 - RNA, 18 nt, Artificial Sequence
  Synthetic
agcauucuagggaacagu

SEQ ID NO: 656450 - RNA, 19 nt, Artificial Sequence
  Synthetic
aagcauucuagggaacagu

SEQ ID NO: 656451 - RNA, 20 nt, Artificial Sequence
  Synthetic
caagcauucuagggaacagu

SEQ ID NO: 656452 - RNA, 21 nt, Artificial Sequence
  Synthetic
acaagcauucuagggaacagu

SEQ ID NO: 656453 - RNA, 22 nt, Artificial Sequence
  Synthetic
aacaagcauucuagggaacagu

SEQ ID NO: 656454 - RNA, 23 nt, Artificial Sequence
  Synthetic
aaacaagcauucuagggaacagu

SEQ ID NO: 656455 - RNA, 24 nt, Artificial Sequence
  Synthetic
gaaacaagcauucuagggaacagu

SEQ ID NO: 656456 - RNA, 18 nt, Artificial Sequence
  Synthetic
aagugggaguggaacagu

SEQ ID NO: 656457 - RNA, 19 nt, Artificial Sequence
  Synthetic
uaagugggaguggaacagu

SEQ ID NO: 656458 - RNA, 20 nt, Artificial Sequence
  Synthetic
guaagugggaguggaacagu

SEQ ID NO: 656459 - RNA, 21 nt, Artificial Sequence
  Synthetic
cguaagugggaguggaacagu

SEQ ID NO: 656460 - RNA, 22 nt, Artificial Sequence
  Synthetic
ucguaagugggaguggaacagu

SEQ ID NO: 656461 - RNA, 23 nt, Artificial Sequence
  Synthetic
cucguaagugggaguggaacagu

SEQ ID NO: 656462 - RNA, 24 nt, Artificial Sequence
  Synthetic
acucguaagugggaguggaacagu

SEQ ID NO: 656463 - RNA, 18 nt, Artificial Sequence
  Synthetic
ggcagggguuggaacagu

SEQ ID NO: 656464 - RNA, 19 nt, Artificial Sequence
  Synthetic
aggcagggguuggaacagu

SEQ ID NO: 656465 - RNA, 20 nt, Artificial Sequence
  Synthetic
uaggcagggguuggaacagu

SEQ ID NO: 656466 - RNA, 21 nt, Artificial Sequence
  Synthetic
auaggcagggguuggaacagu

SEQ ID NO: 656467 - RNA, 22 nt, Artificial Sequence
  Synthetic
aauaggcagggguuggaacagu

SEQ ID NO: 656468 - RNA, 23 nt, Artificial Sequence
  Synthetic
uaauaggcagggguuggaacagu

SEQ ID NO: 656469 - RNA, 24 nt, Artificial Sequence
  Synthetic
guaauaggcagggguuggaacagu

SEQ ID NO: 656470 - RNA, 18 nt, Artificial Sequence
  Synthetic
cauugugcccugaacagu

SEQ ID NO: 656471 - RNA, 19 nt, Artificial Sequence
  Synthetic
acauugugcccugaacagu

SEQ ID NO: 656472 - RNA, 20 nt, Artificial Sequence
  Synthetic
aacauugugcccugaacagu

SEQ ID NO: 656473 - RNA, 21 nt, Artificial Sequence
  Synthetic
gaacauugugcccugaacagu

SEQ ID NO: 656474 - RNA, 22 nt, Artificial Sequence
  Synthetic
agaacauugugcccugaacagu

SEQ ID NO: 656475 - RNA, 23 nt, Artificial Sequence
  Synthetic
cagaacauugugcccugaacagu

SEQ ID NO: 656476 - RNA, 24 nt, Artificial Sequence
  Synthetic
acagaacauugugcccugaacagu

SEQ ID NO: 656477 - RNA, 18 nt, Artificial Sequence
  Synthetic
uaaugguucaauaacagu

SEQ ID NO: 656478 - RNA, 19 nt, Artificial Sequence
  Synthetic
guaaugguucaauaacagu

SEQ ID NO: 656479 - RNA, 20 nt, Artificial Sequence
  Synthetic
aguaaugguucaauaacagu

SEQ ID NO: 656480 - RNA, 21 nt, Artificial Sequence
  Synthetic
gaguaaugguucaauaacagu

SEQ ID NO: 656481 - RNA, 22 nt, Artificial Sequence
  Synthetic
ggaguaaugguucaauaacagu

SEQ ID NO: 656482 - RNA, 23 nt, Artificial Sequence
  Synthetic
gggaguaaugguucaauaacagu

SEQ ID NO: 656483 - RNA, 24 nt, Artificial Sequence
  Synthetic
agggaguaaugguucaauaacagu

SEQ ID NO: 656484 - RNA, 18 nt, Artificial Sequence
  Synthetic
gaaggaaaaucacacagu

SEQ ID NO: 656485 - RNA, 19 nt, Artificial Sequence
  Synthetic
ugaaggaaaaucacacagu

SEQ ID NO: 656486 - RNA, 20 nt, Artificial Sequence
  Synthetic
uugaaggaaaaucacacagu

SEQ ID NO: 656487 - RNA, 21 nt, Artificial Sequence
  Synthetic
cuugaaggaaaaucacacagu

SEQ ID NO: 656488 - RNA, 22 nt, Artificial Sequence
  Synthetic
acuugaaggaaaaucacacagu

SEQ ID NO: 656489 - RNA, 23 nt, Artificial Sequence
  Synthetic
aacuugaaggaaaaucacacagu

SEQ ID NO: 656490 - RNA, 24 nt, Artificial Sequence
  Synthetic
aaacuugaaggaaaaucacacagu

SEQ ID NO: 656491 - RNA, 18 nt, Artificial Sequence
  Synthetic
ugaccagggucacacagu

SEQ ID NO: 656492 - RNA, 19 nt, Artificial Sequence
  Synthetic
uugaccagggucacacagu

SEQ ID NO: 656493 - RNA, 20 nt, Artificial Sequence
  Synthetic
auugaccagggucacacagu

SEQ ID NO: 656494 - RNA, 21 nt, Artificial Sequence
  Synthetic
aauugaccagggucacacagu

SEQ ID NO: 656495 - RNA, 22 nt, Artificial Sequence
  Synthetic
uaauugaccagggucacacagu

SEQ ID NO: 656496 - RNA, 23 nt, Artificial Sequence
  Synthetic
auaauugaccagggucacacagu

SEQ ID NO: 656497 - RNA, 24 nt, Artificial Sequence
  Synthetic
cauaauugaccagggucacacagu

SEQ ID NO: 656498 - RNA, 18 nt, Artificial Sequence
  Synthetic
cuuggaauacaccacagu

SEQ ID NO: 656499 - RNA, 19 nt, Artificial Sequence
  Synthetic
ucuuggaauacaccacagu

SEQ ID NO: 656500 - RNA, 20 nt, Artificial Sequence
  Synthetic
aucuuggaauacaccacagu

SEQ ID NO: 656501 - RNA, 21 nt, Artificial Sequence
  Synthetic
uaucuuggaauacaccacagu

SEQ ID NO: 656502 - RNA, 22 nt, Artificial Sequence
  Synthetic
guaucuuggaauacaccacagu

SEQ ID NO: 656503 - RNA, 23 nt, Artificial Sequence
  Synthetic
gguaucuuggaauacaccacagu

SEQ ID NO: 656504 - RNA, 24 nt, Artificial Sequence
  Synthetic
agguaucuuggaauacaccacagu

SEQ ID NO: 656505 - RNA, 18 nt, Artificial Sequence
  Synthetic
uccuccugcuaccacagu

SEQ ID NO: 656506 - RNA, 19 nt, Artificial Sequence
  Synthetic
cuccuccugcuaccacagu

SEQ ID NO: 656507 - RNA, 20 nt, Artificial Sequence
  Synthetic
ccuccuccugcuaccacagu

SEQ ID NO: 656508 - RNA, 21 nt, Artificial Sequence
  Synthetic
cccuccuccugcuaccacagu

SEQ ID NO: 656509 - RNA, 22 nt, Artificial Sequence
  Synthetic
acccuccuccugcuaccacagu

SEQ ID NO: 656510 - RNA, 23 nt, Artificial Sequence
  Synthetic
aacccuccuccugcuaccacagu

SEQ ID NO: 656511 - RNA, 24 nt, Artificial Sequence
  Synthetic
caacccuccuccugcuaccacagu

SEQ ID NO: 656512 - RNA, 18 nt, Artificial Sequence
  Synthetic
acuccuuguccccacagu

SEQ ID NO: 656513 - RNA, 19 nt, Artificial Sequence
  Synthetic
cacuccuuguccccacagu

SEQ ID NO: 656514 - RNA, 20 nt, Artificial Sequence
  Synthetic
ccacuccuuguccccacagu

SEQ ID NO: 656515 - RNA, 21 nt, Artificial Sequence
  Synthetic
accacuccuuguccccacagu

SEQ ID NO: 656516 - RNA, 22 nt, Artificial Sequence
  Synthetic
caccacuccuuguccccacagu

SEQ ID NO: 656517 - RNA, 23 nt, Artificial Sequence
  Synthetic
ccaccacuccuuguccccacagu

SEQ ID NO: 656518 - RNA, 24 nt, Artificial Sequence
  Synthetic
accaccacuccuuguccccacagu

SEQ ID NO: 656519 - RNA, 18 nt, Artificial Sequence
  Synthetic
aacuauauuccccacagu

SEQ ID NO: 656520 - RNA, 19 nt, Artificial Sequence
  Synthetic
aaacuauauuccccacagu

SEQ ID NO: 656521 - RNA, 20 nt, Artificial Sequence
  Synthetic
caaacuauauuccccacagu

SEQ ID NO: 656522 - RNA, 21 nt, Artificial Sequence
  Synthetic
ucaaacuauauuccccacagu

SEQ ID NO: 656523 - RNA, 22 nt, Artificial Sequence
  Synthetic
gucaaacuauauuccccacagu

SEQ ID NO: 656524 - RNA, 23 nt, Artificial Sequence
  Synthetic
agucaaacuauauuccccacagu

SEQ ID NO: 656525 - RNA, 24 nt, Artificial Sequence
  Synthetic
gagucaaacuauauuccccacagu

SEQ ID NO: 656526 - RNA, 18 nt, Artificial Sequence
  Synthetic
caaguucacuagcacagu

SEQ ID NO: 656527 - RNA, 19 nt, Artificial Sequence
  Synthetic
ccaaguucacuagcacagu

SEQ ID NO: 656528 - RNA, 20 nt, Artificial Sequence
  Synthetic
uccaaguucacuagcacagu

SEQ ID NO: 656529 - RNA, 21 nt, Artificial Sequence
  Synthetic
auccaaguucacuagcacagu

SEQ ID NO: 656530 - RNA, 22 nt, Artificial Sequence
  Synthetic
uauccaaguucacuagcacagu

SEQ ID NO: 656531 - RNA, 23 nt, Artificial Sequence
  Synthetic
auauccaaguucacuagcacagu

SEQ ID NO: 656532 - RNA, 24 nt, Artificial Sequence
  Synthetic
aauauccaaguucacuagcacagu

SEQ ID NO: 656533 - RNA, 18 nt, Artificial Sequence
  Synthetic
uccccuaacgugcacagu

SEQ ID NO: 656534 - RNA, 19 nt, Artificial Sequence
  Synthetic
uuccccuaacgugcacagu

SEQ ID NO: 656535 - RNA, 20 nt, Artificial Sequence
  Synthetic
auuccccuaacgugcacagu

SEQ ID NO: 656536 - RNA, 21 nt, Artificial Sequence
  Synthetic
aauuccccuaacgugcacagu

SEQ ID NO: 656537 - RNA, 22 nt, Artificial Sequence
  Synthetic
caauuccccuaacgugcacagu

SEQ ID NO: 656538 - RNA, 23 nt, Artificial Sequence
  Synthetic
ccaauuccccuaacgugcacagu

SEQ ID NO: 656539 - RNA, 24 nt, Artificial Sequence
  Synthetic
accaauuccccuaacgugcacagu

SEQ ID NO: 656540 - RNA, 18 nt, Artificial Sequence
  Synthetic
ugagagagggugcacagu

SEQ ID NO: 656541 - RNA, 19 nt, Artificial Sequence
  Synthetic
gugagagagggugcacagu

SEQ ID NO: 656542 - RNA, 20 nt, Artificial Sequence
  Synthetic
agugagagagggugcacagu

SEQ ID NO: 656543 - RNA, 21 nt, Artificial Sequence
  Synthetic
gagugagagagggugcacagu

SEQ ID NO: 656544 - RNA, 22 nt, Artificial Sequence
  Synthetic
ugagugagagagggugcacagu

SEQ ID NO: 656545 - RNA, 23 nt, Artificial Sequence
  Synthetic
cugagugagagagggugcacagu

SEQ ID NO: 656546 - RNA, 24 nt, Artificial Sequence
  Synthetic
ucugagugagagagggugcacagu

SEQ ID NO: 656547 - RNA, 18 nt, Artificial Sequence
  Synthetic
ugcauaacacaucacagu

SEQ ID NO: 656548 - RNA, 19 nt, Artificial Sequence
  Synthetic
augcauaacacaucacagu

SEQ ID NO: 656549 - RNA, 20 nt, Artificial Sequence
  Synthetic
uaugcauaacacaucacagu

SEQ ID NO: 656550 - RNA, 21 nt, Artificial Sequence
  Synthetic
guaugcauaacacaucacagu

SEQ ID NO: 656551 - RNA, 22 nt, Artificial Sequence
  Synthetic
uguaugcauaacacaucacagu

SEQ ID NO: 656552 - RNA, 23 nt, Artificial Sequence
  Synthetic
uuguaugcauaacacaucacagu

SEQ ID NO: 656553 - RNA, 24 nt, Artificial Sequence
  Synthetic
auuguaugcauaacacaucacagu

SEQ ID NO: 656554 - RNA, 18 nt, Artificial Sequence
  Synthetic
gaguuuaugauucacagu

SEQ ID NO: 656555 - RNA, 19 nt, Artificial Sequence
  Synthetic
ugaguuuaugauucacagu

SEQ ID NO: 656556 - RNA, 20 nt, Artificial Sequence
  Synthetic
cugaguuuaugauucacagu

SEQ ID NO: 656557 - RNA, 21 nt, Artificial Sequence
  Synthetic
acugaguuuaugauucacagu

SEQ ID NO: 656558 - RNA, 22 nt, Artificial Sequence
  Synthetic
aacugaguuuaugauucacagu

SEQ ID NO: 656559 - RNA, 23 nt, Artificial Sequence
  Synthetic
aaacugaguuuaugauucacagu

SEQ ID NO: 656560 - RNA, 24 nt, Artificial Sequence
  Synthetic
caaacugaguuuaugauucacagu

SEQ ID NO: 656561 - RNA, 18 nt, Artificial Sequence
  Synthetic
gcccugacuuuucacagu

SEQ ID NO: 656562 - RNA, 19 nt, Artificial Sequence
  Synthetic
ugcccugacuuuucacagu

SEQ ID NO: 656563 - RNA, 20 nt, Artificial Sequence
  Synthetic
cugcccugacuuuucacagu

SEQ ID NO: 656564 - RNA, 21 nt, Artificial Sequence
  Synthetic
ccugcccugacuuuucacagu

SEQ ID NO: 656565 - RNA, 22 nt, Artificial Sequence
  Synthetic
cccugcccugacuuuucacagu

SEQ ID NO: 656566 - RNA, 23 nt, Artificial Sequence
  Synthetic
ucccugcccugacuuuucacagu

SEQ ID NO: 656567 - RNA, 24 nt, Artificial Sequence
  Synthetic
aucccugcccugacuuuucacagu

SEQ ID NO: 656568 - RNA, 18 nt, Artificial Sequence
  Synthetic
gccaucuacuaagacagu

SEQ ID NO: 656569 - RNA, 19 nt, Artificial Sequence
  Synthetic
ggccaucuacuaagacagu

SEQ ID NO: 656570 - RNA, 20 nt, Artificial Sequence
  Synthetic
uggccaucuacuaagacagu

SEQ ID NO: 656571 - RNA, 21 nt, Artificial Sequence
  Synthetic
uuggccaucuacuaagacagu

SEQ ID NO: 656572 - RNA, 22 nt, Artificial Sequence
  Synthetic
auuggccaucuacuaagacagu

SEQ ID NO: 656573 - RNA, 23 nt, Artificial Sequence
  Synthetic
uauuggccaucuacuaagacagu

SEQ ID NO: 656574 - RNA, 24 nt, Artificial Sequence
  Synthetic
auauuggccaucuacuaagacagu

SEQ ID NO: 656575 - RNA, 18 nt, Artificial Sequence
  Synthetic
uacagguugguagacagu

SEQ ID NO: 656576 - RNA, 19 nt, Artificial Sequence
  Synthetic
cuacagguugguagacagu

SEQ ID NO: 656577 - RNA, 20 nt, Artificial Sequence
  Synthetic
ucuacagguugguagacagu

SEQ ID NO: 656578 - RNA, 21 nt, Artificial Sequence
  Synthetic
gucuacagguugguagacagu

SEQ ID NO: 656579 - RNA, 22 nt, Artificial Sequence
  Synthetic
agucuacagguugguagacagu

SEQ ID NO: 656580 - RNA, 23 nt, Artificial Sequence
  Synthetic
aagucuacagguugguagacagu

SEQ ID NO: 656581 - RNA, 24 nt, Artificial Sequence
  Synthetic
caagucuacagguugguagacagu

SEQ ID NO: 656582 - RNA, 18 nt, Artificial Sequence
  Synthetic
aaagcugaacaggacagu

SEQ ID NO: 656583 - RNA, 19 nt, Artificial Sequence
  Synthetic
aaaagcugaacaggacagu

SEQ ID NO: 656584 - RNA, 20 nt, Artificial Sequence
  Synthetic
gaaaagcugaacaggacagu

SEQ ID NO: 656585 - RNA, 21 nt, Artificial Sequence
  Synthetic
ggaaaagcugaacaggacagu

SEQ ID NO: 656586 - RNA, 22 nt, Artificial Sequence
  Synthetic
aggaaaagcugaacaggacagu

SEQ ID NO: 656587 - RNA, 23 nt, Artificial Sequence
  Synthetic
caggaaaagcugaacaggacagu

SEQ ID NO: 656588 - RNA, 24 nt, Artificial Sequence
  Synthetic
ucaggaaaagcugaacaggacagu

SEQ ID NO: 656589 - RNA, 18 nt, Artificial Sequence
  Synthetic
uaacucuuucaggacagu

SEQ ID NO: 656590 - RNA, 19 nt, Artificial Sequence
  Synthetic
guaacucuuucaggacagu

SEQ ID NO: 656591 - RNA, 20 nt, Artificial Sequence
  Synthetic
aguaacucuuucaggacagu

SEQ ID NO: 656592 - RNA, 21 nt, Artificial Sequence
  Synthetic
caguaacucuuucaggacagu

SEQ ID NO: 656593 - RNA, 22 nt, Artificial Sequence
  Synthetic
acaguaacucuuucaggacagu

SEQ ID NO: 656594 - RNA, 23 nt, Artificial Sequence
  Synthetic
aacaguaacucuuucaggacagu

SEQ ID NO: 656595 - RNA, 24 nt, Artificial Sequence
  Synthetic
gaacaguaacucuuucaggacagu

SEQ ID NO: 656596 - RNA, 18 nt, Artificial Sequence
  Synthetic
aaccucggcuaggacagu

SEQ ID NO: 656597 - RNA, 19 nt, Artificial Sequence
  Synthetic
gaaccucggcuaggacagu

SEQ ID NO: 656598 - RNA, 20 nt, Artificial Sequence
  Synthetic
agaaccucggcuaggacagu

SEQ ID NO: 656599 - RNA, 21 nt, Artificial Sequence
  Synthetic
gagaaccucggcuaggacagu

SEQ ID NO: 656600 - RNA, 22 nt, Artificial Sequence
  Synthetic
ggagaaccucggcuaggacagu

SEQ ID NO: 656601 - RNA, 23 nt, Artificial Sequence
  Synthetic
uggagaaccucggcuaggacagu

SEQ ID NO: 656602 - RNA, 24 nt, Artificial Sequence
  Synthetic
auggagaaccucggcuaggacagu

SEQ ID NO: 656603 - RNA, 18 nt, Artificial Sequence
  Synthetic
ugguaguugacggacagu

SEQ ID NO: 656604 - RNA, 19 nt, Artificial Sequence
  Synthetic
augguaguugacggacagu

SEQ ID NO: 656605 - RNA, 20 nt, Artificial Sequence
  Synthetic
aaugguaguugacggacagu

SEQ ID NO: 656606 - RNA, 21 nt, Artificial Sequence
  Synthetic
uaaugguaguugacggacagu

SEQ ID NO: 656607 - RNA, 22 nt, Artificial Sequence
  Synthetic
auaaugguaguugacggacagu

SEQ ID NO: 656608 - RNA, 23 nt, Artificial Sequence
  Synthetic
aauaaugguaguugacggacagu

SEQ ID NO: 656609 - RNA, 24 nt, Artificial Sequence
  Synthetic
uaauaaugguaguugacggacagu

SEQ ID NO: 656610 - RNA, 18 nt, Artificial Sequence
  Synthetic
aaaacaaaaagggacagu

SEQ ID NO: 656611 - RNA, 19 nt, Artificial Sequence
  Synthetic
aaaaacaaaaagggacagu

SEQ ID NO: 656612 - RNA, 20 nt, Artificial Sequence
  Synthetic
gaaaaacaaaaagggacagu

SEQ ID NO: 656613 - RNA, 21 nt, Artificial Sequence
  Synthetic
agaaaaacaaaaagggacagu

SEQ ID NO: 656614 - RNA, 22 nt, Artificial Sequence
  Synthetic
uagaaaaacaaaaagggacagu

SEQ ID NO: 656615 - RNA, 23 nt, Artificial Sequence
  Synthetic
cuagaaaaacaaaaagggacagu

SEQ ID NO: 656616 - RNA, 24 nt, Artificial Sequence
  Synthetic
ucuagaaaaacaaaaagggacagu

SEQ ID NO: 656617 - RNA, 18 nt, Artificial Sequence
  Synthetic
aacaugggaggggacagu

SEQ ID NO: 656618 - RNA, 19 nt, Artificial Sequence
  Synthetic
gaacaugggaggggacagu

SEQ ID NO: 656619 - RNA, 20 nt, Artificial Sequence
  Synthetic
ggaacaugggaggggacagu

SEQ ID NO: 656620 - RNA, 21 nt, Artificial Sequence
  Synthetic
uggaacaugggaggggacagu

SEQ ID NO: 656621 - RNA, 22 nt, Artificial Sequence
  Synthetic
auggaacaugggaggggacagu

SEQ ID NO: 656622 - RNA, 23 nt, Artificial Sequence
  Synthetic
aauggaacaugggaggggacagu

SEQ ID NO: 656623 - RNA, 24 nt, Artificial Sequence
  Synthetic
aaauggaacaugggaggggacagu

SEQ ID NO: 656624 - RNA, 18 nt, Artificial Sequence
  Synthetic
aggaaaaugugggacagu

SEQ ID NO: 656625 - RNA, 19 nt, Artificial Sequence
  Synthetic
aaggaaaaugugggacagu

SEQ ID NO: 656626 - RNA, 20 nt, Artificial Sequence
  Synthetic
aaaggaaaaugugggacagu

SEQ ID NO: 656627 - RNA, 21 nt, Artificial Sequence
  Synthetic
gaaaggaaaaugugggacagu

SEQ ID NO: 656628 - RNA, 22 nt, Artificial Sequence
  Synthetic
agaaaggaaaaugugggacagu

SEQ ID NO: 656629 - RNA, 23 nt, Artificial Sequence
  Synthetic
aagaaaggaaaaugugggacagu

SEQ ID NO: 656630 - RNA, 24 nt, Artificial Sequence
  Synthetic
gaagaaaggaaaaugugggacagu

SEQ ID NO: 656631 - RNA, 18 nt, Artificial Sequence
  Synthetic
aucuuccuuugugacagu

SEQ ID NO: 656632 - RNA, 19 nt, Artificial Sequence
  Synthetic
gaucuuccuuugugacagu

SEQ ID NO: 656633 - RNA, 20 nt, Artificial Sequence
  Synthetic
ugaucuuccuuugugacagu

SEQ ID NO: 656634 - RNA, 21 nt, Artificial Sequence
  Synthetic
cugaucuuccuuugugacagu

SEQ ID NO: 656635 - RNA, 22 nt, Artificial Sequence
  Synthetic
ucugaucuuccuuugugacagu

SEQ ID NO: 656636 - RNA, 23 nt, Artificial Sequence
  Synthetic
uucugaucuuccuuugugacagu

SEQ ID NO: 656637 - RNA, 24 nt, Artificial Sequence
  Synthetic
cuucugaucuuccuuugugacagu

SEQ ID NO: 656638 - RNA, 18 nt, Artificial Sequence
  Synthetic
agaggccaauuugacagu

SEQ ID NO: 656639 - RNA, 19 nt, Artificial Sequence
  Synthetic
uagaggccaauuugacagu

SEQ ID NO: 656640 - RNA, 20 nt, Artificial Sequence
  Synthetic
uuagaggccaauuugacagu

SEQ ID NO: 656641 - RNA, 21 nt, Artificial Sequence
  Synthetic
cuuagaggccaauuugacagu

SEQ ID NO: 656642 - RNA, 22 nt, Artificial Sequence
  Synthetic
ucuuagaggccaauuugacagu

SEQ ID NO: 656643 - RNA, 23 nt, Artificial Sequence
  Synthetic
cucuuagaggccaauuugacagu

SEQ ID NO: 656644 - RNA, 24 nt, Artificial Sequence
  Synthetic
ccucuuagaggccaauuugacagu

SEQ ID NO: 656645 - RNA, 18 nt, Artificial Sequence
  Synthetic
augccaugaaaauacagu

SEQ ID NO: 656646 - RNA, 19 nt, Artificial Sequence
  Synthetic
gaugccaugaaaauacagu

SEQ ID NO: 656647 - RNA, 20 nt, Artificial Sequence
  Synthetic
agaugccaugaaaauacagu

SEQ ID NO: 656648 - RNA, 21 nt, Artificial Sequence
  Synthetic
aagaugccaugaaaauacagu

SEQ ID NO: 656649 - RNA, 22 nt, Artificial Sequence
  Synthetic
aaagaugccaugaaaauacagu

SEQ ID NO: 656650 - RNA, 23 nt, Artificial Sequence
  Synthetic
caaagaugccaugaaaauacagu

SEQ ID NO: 656651 - RNA, 24 nt, Artificial Sequence
  Synthetic
acaaagaugccaugaaaauacagu

SEQ ID NO: 656652 - RNA, 18 nt, Artificial Sequence
  Synthetic
gugccaagaacauacagu

SEQ ID NO: 656653 - RNA, 19 nt, Artificial Sequence
  Synthetic
ggugccaagaacauacagu

SEQ ID NO: 656654 - RNA, 20 nt, Artificial Sequence
  Synthetic
aggugccaagaacauacagu

SEQ ID NO: 656655 - RNA, 21 nt, Artificial Sequence
  Synthetic
aaggugccaagaacauacagu

SEQ ID NO: 656656 - RNA, 22 nt, Artificial Sequence
  Synthetic
aaaggugccaagaacauacagu

SEQ ID NO: 656657 - RNA, 23 nt, Artificial Sequence
  Synthetic
caaaggugccaagaacauacagu

SEQ ID NO: 656658 - RNA, 24 nt, Artificial Sequence
  Synthetic
acaaaggugccaagaacauacagu

SEQ ID NO: 656659 - RNA, 18 nt, Artificial Sequence
  Synthetic
aaauguccuacauacagu

SEQ ID NO: 656660 - RNA, 19 nt, Artificial Sequence
  Synthetic
gaaauguccuacauacagu

SEQ ID NO: 656661 - RNA, 20 nt, Artificial Sequence
  Synthetic
agaaauguccuacauacagu

SEQ ID NO: 656662 - RNA, 21 nt, Artificial Sequence
  Synthetic
aagaaauguccuacauacagu

SEQ ID NO: 656663 - RNA, 22 nt, Artificial Sequence
  Synthetic
uaagaaauguccuacauacagu

SEQ ID NO: 656664 - RNA, 23 nt, Artificial Sequence
  Synthetic
guaagaaauguccuacauacagu

SEQ ID NO: 656665 - RNA, 24 nt, Artificial Sequence
  Synthetic
aguaagaaauguccuacauacagu

SEQ ID NO: 656666 - RNA, 18 nt, Artificial Sequence
  Synthetic
aaggggccaagguacagu

SEQ ID NO: 656667 - RNA, 19 nt, Artificial Sequence
  Synthetic
aaaggggccaagguacagu

SEQ ID NO: 656668 - RNA, 20 nt, Artificial Sequence
  Synthetic
aaaaggggccaagguacagu

SEQ ID NO: 656669 - RNA, 21 nt, Artificial Sequence
  Synthetic
uaaaaggggccaagguacagu

SEQ ID NO: 656670 - RNA, 22 nt, Artificial Sequence
  Synthetic
auaaaaggggccaagguacagu

SEQ ID NO: 656671 - RNA, 23 nt, Artificial Sequence
  Synthetic
gauaaaaggggccaagguacagu

SEQ ID NO: 656672 - RNA, 24 nt, Artificial Sequence
  Synthetic
ggauaaaaggggccaagguacagu

SEQ ID NO: 656673 - RNA, 18 nt, Artificial Sequence
  Synthetic
ugcagagucugguacagu

SEQ ID NO: 656674 - RNA, 19 nt, Artificial Sequence
  Synthetic
augcagagucugguacagu

SEQ ID NO: 656675 - RNA, 20 nt, Artificial Sequence
  Synthetic
caugcagagucugguacagu

SEQ ID NO: 656676 - RNA, 21 nt, Artificial Sequence
  Synthetic
acaugcagagucugguacagu

SEQ ID NO: 656677 - RNA, 22 nt, Artificial Sequence
  Synthetic
aacaugcagagucugguacagu

SEQ ID NO: 656678 - RNA, 23 nt, Artificial Sequence
  Synthetic
uaacaugcagagucugguacagu

SEQ ID NO: 656679 - RNA, 24 nt, Artificial Sequence
  Synthetic
guaacaugcagagucugguacagu

SEQ ID NO: 656680 - RNA, 18 nt, Artificial Sequence
  Synthetic
uuuauguuuauguacagu

SEQ ID NO: 656681 - RNA, 19 nt, Artificial Sequence
  Synthetic
uuuuauguuuauguacagu

SEQ ID NO: 656682 - RNA, 20 nt, Artificial Sequence
  Synthetic
uuuuuauguuuauguacagu

SEQ ID NO: 656683 - RNA, 21 nt, Artificial Sequence
  Synthetic
auuuuuauguuuauguacagu

SEQ ID NO: 656684 - RNA, 22 nt, Artificial Sequence
  Synthetic
cauuuuuauguuuauguacagu

SEQ ID NO: 656685 - RNA, 23 nt, Artificial Sequence
  Synthetic
ccauuuuuauguuuauguacagu

SEQ ID NO: 656686 - RNA, 24 nt, Artificial Sequence
  Synthetic
accauuuuuauguuuauguacagu

SEQ ID NO: 656687 - RNA, 18 nt, Artificial Sequence
  Synthetic
cauaugucuuuguacagu

SEQ ID NO: 656688 - RNA, 19 nt, Artificial Sequence
  Synthetic
ccauaugucuuuguacagu

SEQ ID NO: 656689 - RNA, 20 nt, Artificial Sequence
  Synthetic
accauaugucuuuguacagu

SEQ ID NO: 656690 - RNA, 21 nt, Artificial Sequence
  Synthetic
caccauaugucuuuguacagu

SEQ ID NO: 656691 - RNA, 22 nt, Artificial Sequence
  Synthetic
ccaccauaugucuuuguacagu

SEQ ID NO: 656692 - RNA, 23 nt, Artificial Sequence
  Synthetic
gccaccauaugucuuuguacagu

SEQ ID NO: 656693 - RNA, 24 nt, Artificial Sequence
  Synthetic
agccaccauaugucuuuguacagu

SEQ ID NO: 656694 - RNA, 18 nt, Artificial Sequence
  Synthetic
uuagugguuuuguacagu

SEQ ID NO: 656695 - RNA, 19 nt, Artificial Sequence
  Synthetic
guuagugguuuuguacagu

SEQ ID NO: 656696 - RNA, 20 nt, Artificial Sequence
  Synthetic
uguuagugguuuuguacagu

SEQ ID NO: 656697 - RNA, 21 nt, Artificial Sequence
  Synthetic
uuguuagugguuuuguacagu

SEQ ID NO: 656698 - RNA, 22 nt, Artificial Sequence
  Synthetic
uuuguuagugguuuuguacagu

SEQ ID NO: 656699 - RNA, 23 nt, Artificial Sequence
  Synthetic
auuuguuagugguuuuguacagu

SEQ ID NO: 656700 - RNA, 24 nt, Artificial Sequence
  Synthetic
gauuuguuagugguuuuguacagu

SEQ ID NO: 656701 - RNA, 18 nt, Artificial Sequence
  Synthetic
gggcauacaccuuacagu

SEQ ID NO: 656702 - RNA, 19 nt, Artificial Sequence
  Synthetic
ugggcauacaccuuacagu

SEQ ID NO: 656703 - RNA, 20 nt, Artificial Sequence
  Synthetic
uugggcauacaccuuacagu

SEQ ID NO: 656704 - RNA, 21 nt, Artificial Sequence
  Synthetic
auugggcauacaccuuacagu

SEQ ID NO: 656705 - RNA, 22 nt, Artificial Sequence
  Synthetic
aauugggcauacaccuuacagu

SEQ ID NO: 656706 - RNA, 23 nt, Artificial Sequence
  Synthetic
caauugggcauacaccuuacagu

SEQ ID NO: 656707 - RNA, 24 nt, Artificial Sequence
  Synthetic
acaauugggcauacaccuuacagu

SEQ ID NO: 656708 - RNA, 18 nt, Artificial Sequence
  Synthetic
gccuugugagguuacagu

SEQ ID NO: 656709 - RNA, 19 nt, Artificial Sequence
  Synthetic
ugccuugugagguuacagu

SEQ ID NO: 656710 - RNA, 20 nt, Artificial Sequence
  Synthetic
cugccuugugagguuacagu

SEQ ID NO: 656711 - RNA, 21 nt, Artificial Sequence
  Synthetic
gcugccuugugagguuacagu

SEQ ID NO: 656712 - RNA, 22 nt, Artificial Sequence
  Synthetic
ugcugccuugugagguuacagu

SEQ ID NO: 656713 - RNA, 23 nt, Artificial Sequence
  Synthetic
cugcugccuugugagguuacagu

SEQ ID NO: 656714 - RNA, 24 nt, Artificial Sequence
  Synthetic
ccugcugccuugugagguuacagu

SEQ ID NO: 656715 - RNA, 18 nt, Artificial Sequence
  Synthetic
gucauugugaaaaccagu

SEQ ID NO: 656716 - RNA, 19 nt, Artificial Sequence
  Synthetic
agucauugugaaaaccagu

SEQ ID NO: 656717 - RNA, 20 nt, Artificial Sequence
  Synthetic
cagucauugugaaaaccagu

SEQ ID NO: 656718 - RNA, 21 nt, Artificial Sequence
  Synthetic
ucagucauugugaaaaccagu

SEQ ID NO: 656719 - RNA, 22 nt, Artificial Sequence
  Synthetic
uucagucauugugaaaaccagu

SEQ ID NO: 656720 - RNA, 23 nt, Artificial Sequence
  Synthetic
uuucagucauugugaaaaccagu

SEQ ID NO: 656721 - RNA, 24 nt, Artificial Sequence
  Synthetic
auuucagucauugugaaaaccagu

SEQ ID NO: 656722 - RNA, 18 nt, Artificial Sequence
  Synthetic
ugagugaaaaugaccagu

SEQ ID NO: 656723 - RNA, 19 nt, Artificial Sequence
  Synthetic
cugagugaaaaugaccagu

SEQ ID NO: 656724 - RNA, 20 nt, Artificial Sequence
  Synthetic
ccugagugaaaaugaccagu

SEQ ID NO: 656725 - RNA, 21 nt, Artificial Sequence
  Synthetic
gccugagugaaaaugaccagu

SEQ ID NO: 656726 - RNA, 22 nt, Artificial Sequence
  Synthetic
agccugagugaaaaugaccagu

SEQ ID NO: 656727 - RNA, 23 nt, Artificial Sequence
  Synthetic
cagccugagugaaaaugaccagu

SEQ ID NO: 656728 - RNA, 24 nt, Artificial Sequence
  Synthetic
gcagccugagugaaaaugaccagu

SEQ ID NO: 656729 - RNA, 18 nt, Artificial Sequence
  Synthetic
agauacagaacacccagu

SEQ ID NO: 656730 - RNA, 19 nt, Artificial Sequence
  Synthetic
aagauacagaacacccagu

SEQ ID NO: 656731 - RNA, 20 nt, Artificial Sequence
  Synthetic
uaagauacagaacacccagu

SEQ ID NO: 656732 - RNA, 21 nt, Artificial Sequence
  Synthetic
cuaagauacagaacacccagu

SEQ ID NO: 656733 - RNA, 22 nt, Artificial Sequence
  Synthetic
acuaagauacagaacacccagu

SEQ ID NO: 656734 - RNA, 23 nt, Artificial Sequence
  Synthetic
gacuaagauacagaacacccagu

SEQ ID NO: 656735 - RNA, 24 nt, Artificial Sequence
  Synthetic
ugacuaagauacagaacacccagu

SEQ ID NO: 656736 - RNA, 18 nt, Artificial Sequence
  Synthetic
guuacugucacacccagu

SEQ ID NO: 656737 - RNA, 19 nt, Artificial Sequence
  Synthetic
aguuacugucacacccagu

SEQ ID NO: 656738 - RNA, 20 nt, Artificial Sequence
  Synthetic
aaguuacugucacacccagu

SEQ ID NO: 656739 - RNA, 21 nt, Artificial Sequence
  Synthetic
uaaguuacugucacacccagu

SEQ ID NO: 656740 - RNA, 22 nt, Artificial Sequence
  Synthetic
auaaguuacugucacacccagu

SEQ ID NO: 656741 - RNA, 23 nt, Artificial Sequence
  Synthetic
uauaaguuacugucacacccagu

SEQ ID NO: 656742 - RNA, 24 nt, Artificial Sequence
  Synthetic
guauaaguuacugucacacccagu

SEQ ID NO: 656743 - RNA, 18 nt, Artificial Sequence
  Synthetic
cucgcucugucacccagu

SEQ ID NO: 656744 - RNA, 19 nt, Artificial Sequence
  Synthetic
ucucgcucugucacccagu

SEQ ID NO: 656745 - RNA, 20 nt, Artificial Sequence
  Synthetic
gucucgcucugucacccagu

SEQ ID NO: 656746 - RNA, 21 nt, Artificial Sequence
  Synthetic
agucucgcucugucacccagu

SEQ ID NO: 656747 - RNA, 22 nt, Artificial Sequence
  Synthetic
gagucucgcucugucacccagu

SEQ ID NO: 656748 - RNA, 23 nt, Artificial Sequence
  Synthetic
ggagucucgcucugucacccagu

SEQ ID NO: 656749 - RNA, 24 nt, Artificial Sequence
  Synthetic
cggagucucgcucugucacccagu

SEQ ID NO: 656750 - RNA, 18 nt, Artificial Sequence
  Synthetic
uuaugggagggacccagu

SEQ ID NO: 656751 - RNA, 19 nt, Artificial Sequence
  Synthetic
guuaugggagggacccagu

SEQ ID NO: 656752 - RNA, 20 nt, Artificial Sequence
  Synthetic
uguuaugggagggacccagu

SEQ ID NO: 656753 - RNA, 21 nt, Artificial Sequence
  Synthetic
guguuaugggagggacccagu

SEQ ID NO: 656754 - RNA, 22 nt, Artificial Sequence
  Synthetic
uguguuaugggagggacccagu

SEQ ID NO: 656755 - RNA, 23 nt, Artificial Sequence
  Synthetic
auguguuaugggagggacccagu

SEQ ID NO: 656756 - RNA, 24 nt, Artificial Sequence
  Synthetic
cauguguuaugggagggacccagu

SEQ ID NO: 656757 - RNA, 18 nt, Artificial Sequence
  Synthetic
ucaugugagggacccagu

SEQ ID NO: 656758 - RNA, 19 nt, Artificial Sequence
  Synthetic
gucaugugagggacccagu

SEQ ID NO: 656759 - RNA, 20 nt, Artificial Sequence
  Synthetic
ugucaugugagggacccagu

SEQ ID NO: 656760 - RNA, 21 nt, Artificial Sequence
  Synthetic
gugucaugugagggacccagu

SEQ ID NO: 656761 - RNA, 22 nt, Artificial Sequence
  Synthetic
ugugucaugugagggacccagu

SEQ ID NO: 656762 - RNA, 23 nt, Artificial Sequence
  Synthetic
augugucaugugagggacccagu

SEQ ID NO: 656763 - RNA, 24 nt, Artificial Sequence
  Synthetic
caugugucaugugagggacccagu

SEQ ID NO: 656764 - RNA, 18 nt, Artificial Sequence
  Synthetic
auguccauaugacccagu

SEQ ID NO: 656765 - RNA, 19 nt, Artificial Sequence
  Synthetic
aauguccauaugacccagu

SEQ ID NO: 656766 - RNA, 20 nt, Artificial Sequence
  Synthetic
aaauguccauaugacccagu

SEQ ID NO: 656767 - RNA, 21 nt, Artificial Sequence
  Synthetic
gaaauguccauaugacccagu

SEQ ID NO: 656768 - RNA, 22 nt, Artificial Sequence
  Synthetic
ggaaauguccauaugacccagu

SEQ ID NO: 656769 - RNA, 23 nt, Artificial Sequence
  Synthetic
gggaaauguccauaugacccagu

SEQ ID NO: 656770 - RNA, 24 nt, Artificial Sequence
  Synthetic
agggaaauguccauaugacccagu

SEQ ID NO: 656771 - RNA, 19 nt, Artificial Sequence
  Synthetic
cacuaggcagugccccagu

SEQ ID NO: 656772 - RNA, 20 nt, Artificial Sequence
  Synthetic
ccacuaggcagugccccagu

SEQ ID NO: 656773 - RNA, 21 nt, Artificial Sequence
  Synthetic
uccacuaggcagugccccagu

SEQ ID NO: 656774 - RNA, 22 nt, Artificial Sequence
  Synthetic
cuccacuaggcagugccccagu

SEQ ID NO: 656775 - RNA, 23 nt, Artificial Sequence
  Synthetic
gcuccacuaggcagugccccagu

SEQ ID NO: 656776 - RNA, 24 nt, Artificial Sequence
  Synthetic
agcuccacuaggcagugccccagu

SEQ ID NO: 656777 - RNA, 18 nt, Artificial Sequence
  Synthetic
agccaacucguccccagu

SEQ ID NO: 656778 - RNA, 19 nt, Artificial Sequence
  Synthetic
gagccaacucguccccagu

SEQ ID NO: 656779 - RNA, 20 nt, Artificial Sequence
  Synthetic
cgagccaacucguccccagu

SEQ ID NO: 656780 - RNA, 21 nt, Artificial Sequence
  Synthetic
ccgagccaacucguccccagu

SEQ ID NO: 656781 - RNA, 22 nt, Artificial Sequence
  Synthetic
cccgagccaacucguccccagu

SEQ ID NO: 656782 - RNA, 23 nt, Artificial Sequence
  Synthetic
ucccgagccaacucguccccagu

SEQ ID NO: 656783 - RNA, 24 nt, Artificial Sequence
  Synthetic
aucccgagccaacucguccccagu

SEQ ID NO: 656784 - RNA, 18 nt, Artificial Sequence
  Synthetic
uucccaagggagcccagu

SEQ ID NO: 656785 - RNA, 19 nt, Artificial Sequence
  Synthetic
auucccaagggagcccagu

SEQ ID NO: 656786 - RNA, 20 nt, Artificial Sequence
  Synthetic
gauucccaagggagcccagu

SEQ ID NO: 656787 - RNA, 21 nt, Artificial Sequence
  Synthetic
agauucccaagggagcccagu

SEQ ID NO: 656788 - RNA, 22 nt, Artificial Sequence
  Synthetic
cagauucccaagggagcccagu

SEQ ID NO: 656789 - RNA, 23 nt, Artificial Sequence
  Synthetic
ccagauucccaagggagcccagu

SEQ ID NO: 656790 - RNA, 24 nt, Artificial Sequence
  Synthetic
uccagauucccaagggagcccagu

SEQ ID NO: 656791 - RNA, 18 nt, Artificial Sequence
  Synthetic
cggugagcuccgcccagu

SEQ ID NO: 656792 - RNA, 19 nt, Artificial Sequence
  Synthetic
gcggugagcuccgcccagu

SEQ ID NO: 656793 - RNA, 20 nt, Artificial Sequence
  Synthetic
ugcggugagcuccgcccagu

SEQ ID NO: 656794 - RNA, 21 nt, Artificial Sequence
  Synthetic
cugcggugagcuccgcccagu

SEQ ID NO: 656795 - RNA, 22 nt, Artificial Sequence
  Synthetic
gcugcggugagcuccgcccagu

SEQ ID NO: 656796 - RNA, 23 nt, Artificial Sequence
  Synthetic
agcugcggugagcuccgcccagu

SEQ ID NO: 656797 - RNA, 24 nt, Artificial Sequence
  Synthetic
gagcugcggugagcuccgcccagu

SEQ ID NO: 656798 - RNA, 18 nt, Artificial Sequence
  Synthetic
uuuuucucacugcccagu

SEQ ID NO: 656799 - RNA, 19 nt, Artificial Sequence
  Synthetic
uuuuuucucacugcccagu

SEQ ID NO: 656800 - RNA, 20 nt, Artificial Sequence
  Synthetic
auuuuuucucacugcccagu

SEQ ID NO: 656801 - RNA, 21 nt, Artificial Sequence
  Synthetic
aauuuuuucucacugcccagu

SEQ ID NO: 656802 - RNA, 22 nt, Artificial Sequence
  Synthetic
uaauuuuuucucacugcccagu

SEQ ID NO: 656803 - RNA, 23 nt, Artificial Sequence
  Synthetic
auaauuuuuucucacugcccagu

SEQ ID NO: 656804 - RNA, 24 nt, Artificial Sequence
  Synthetic
gauaauuuuuucucacugcccagu

SEQ ID NO: 656805 - RNA, 18 nt, Artificial Sequence
  Synthetic
ucucaaaauuaucccagu

SEQ ID NO: 656806 - RNA, 19 nt, Artificial Sequence
  Synthetic
aucucaaaauuaucccagu

SEQ ID NO: 656807 - RNA, 20 nt, Artificial Sequence
  Synthetic
uaucucaaaauuaucccagu

SEQ ID NO: 656808 - RNA, 21 nt, Artificial Sequence
  Synthetic
auaucucaaaauuaucccagu

SEQ ID NO: 656809 - RNA, 22 nt, Artificial Sequence
  Synthetic
uauaucucaaaauuaucccagu

SEQ ID NO: 656810 - RNA, 23 nt, Artificial Sequence
  Synthetic
auauaucucaaaauuaucccagu

SEQ ID NO: 656811 - RNA, 24 nt, Artificial Sequence
  Synthetic
aauauaucucaaaauuaucccagu

SEQ ID NO: 656812 - RNA, 18 nt, Artificial Sequence
  Synthetic
ugggaggugucucccagu

SEQ ID NO: 656813 - RNA, 19 nt, Artificial Sequence
  Synthetic
cugggaggugucucccagu

SEQ ID NO: 656814 - RNA, 20 nt, Artificial Sequence
  Synthetic
gcugggaggugucucccagu

SEQ ID NO: 656815 - RNA, 21 nt, Artificial Sequence
  Synthetic
ugcugggaggugucucccagu

SEQ ID NO: 656816 - RNA, 22 nt, Artificial Sequence
  Synthetic
cugcugggaggugucucccagu

SEQ ID NO: 656817 - RNA, 23 nt, Artificial Sequence
  Synthetic
ccugcugggaggugucucccagu

SEQ ID NO: 656818 - RNA, 24 nt, Artificial Sequence
  Synthetic
cccugcugggaggugucucccagu

SEQ ID NO: 656819 - RNA, 18 nt, Artificial Sequence
  Synthetic
aaaagcccaugucccagu

SEQ ID NO: 656820 - RNA, 19 nt, Artificial Sequence
  Synthetic
aaaaagcccaugucccagu

SEQ ID NO: 656821 - RNA, 20 nt, Artificial Sequence
  Synthetic
gaaaaagcccaugucccagu

SEQ ID NO: 656822 - RNA, 21 nt, Artificial Sequence
  Synthetic
ggaaaaagcccaugucccagu

SEQ ID NO: 656823 - RNA, 22 nt, Artificial Sequence
  Synthetic
aggaaaaagcccaugucccagu

SEQ ID NO: 656824 - RNA, 23 nt, Artificial Sequence
  Synthetic
caggaaaaagcccaugucccagu

SEQ ID NO: 656825 - RNA, 24 nt, Artificial Sequence
  Synthetic
gcaggaaaaagcccaugucccagu

SEQ ID NO: 656826 - RNA, 18 nt, Artificial Sequence
  Synthetic
aaggacuuuugucccagu

SEQ ID NO: 656827 - RNA, 19 nt, Artificial Sequence
  Synthetic
caaggacuuuugucccagu

SEQ ID NO: 656828 - RNA, 20 nt, Artificial Sequence
  Synthetic
gcaaggacuuuugucccagu

SEQ ID NO: 656829 - RNA, 21 nt, Artificial Sequence
  Synthetic
ugcaaggacuuuugucccagu

SEQ ID NO: 656830 - RNA, 22 nt, Artificial Sequence
  Synthetic
uugcaaggacuuuugucccagu

SEQ ID NO: 656831 - RNA, 23 nt, Artificial Sequence
  Synthetic
cuugcaaggacuuuugucccagu

SEQ ID NO: 656832 - RNA, 24 nt, Artificial Sequence
  Synthetic
acuugcaaggacuuuugucccagu

SEQ ID NO: 656833 - RNA, 18 nt, Artificial Sequence
  Synthetic
caaauaaaaggagccagu

SEQ ID NO: 656834 - RNA, 19 nt, Artificial Sequence
  Synthetic
ccaaauaaaaggagccagu

SEQ ID NO: 656835 - RNA, 20 nt, Artificial Sequence
  Synthetic
uccaaauaaaaggagccagu

SEQ ID NO: 656836 - RNA, 21 nt, Artificial Sequence
  Synthetic
cuccaaauaaaaggagccagu

SEQ ID NO: 656837 - RNA, 22 nt, Artificial Sequence
  Synthetic
acuccaaauaaaaggagccagu

SEQ ID NO: 656838 - RNA, 23 nt, Artificial Sequence
  Synthetic
cacuccaaauaaaaggagccagu

SEQ ID NO: 656839 - RNA, 24 nt, Artificial Sequence
  Synthetic
ccacuccaaauaaaaggagccagu

SEQ ID NO: 656840 - RNA, 18 nt, Artificial Sequence
  Synthetic
gauaccaaugcugccagu

SEQ ID NO: 656841 - RNA, 19 nt, Artificial Sequence
  Synthetic
ugauaccaaugcugccagu

SEQ ID NO: 656842 - RNA, 20 nt, Artificial Sequence
  Synthetic
gugauaccaaugcugccagu

SEQ ID NO: 656843 - RNA, 21 nt, Artificial Sequence
  Synthetic
ggugauaccaaugcugccagu

SEQ ID NO: 656844 - RNA, 22 nt, Artificial Sequence
  Synthetic
aggugauaccaaugcugccagu

SEQ ID NO: 656845 - RNA, 23 nt, Artificial Sequence
  Synthetic
uaggugauaccaaugcugccagu

SEQ ID NO: 656846 - RNA, 24 nt, Artificial Sequence
  Synthetic
auaggugauaccaaugcugccagu

SEQ ID NO: 656847 - RNA, 18 nt, Artificial Sequence
  Synthetic
auaaacuaugaauccagu

SEQ ID NO: 656848 - RNA, 19 nt, Artificial Sequence
  Synthetic
cauaaacuaugaauccagu

SEQ ID NO: 656849 - RNA, 20 nt, Artificial Sequence
  Synthetic
acauaaacuaugaauccagu

SEQ ID NO: 656850 - RNA, 21 nt, Artificial Sequence
  Synthetic
cacauaaacuaugaauccagu

SEQ ID NO: 656851 - RNA, 22 nt, Artificial Sequence
  Synthetic
ucacauaaacuaugaauccagu

SEQ ID NO: 656852 - RNA, 23 nt, Artificial Sequence
  Synthetic
uucacauaaacuaugaauccagu

SEQ ID NO: 656853 - RNA, 24 nt, Artificial Sequence
  Synthetic
uuucacauaaacuaugaauccagu

SEQ ID NO: 656854 - RNA, 18 nt, Artificial Sequence
  Synthetic
ucaugggagggauccagu

SEQ ID NO: 656855 - RNA, 19 nt, Artificial Sequence
  Synthetic
gucaugggagggauccagu

SEQ ID NO: 656856 - RNA, 20 nt, Artificial Sequence
  Synthetic
ugucaugggagggauccagu

SEQ ID NO: 656857 - RNA, 21 nt, Artificial Sequence
  Synthetic
augucaugggagggauccagu

SEQ ID NO: 656858 - RNA, 22 nt, Artificial Sequence
  Synthetic
gaugucaugggagggauccagu

SEQ ID NO: 656859 - RNA, 23 nt, Artificial Sequence
  Synthetic
agaugucaugggagggauccagu

SEQ ID NO: 656860 - RNA, 24 nt, Artificial Sequence
  Synthetic
cagaugucaugggagggauccagu

SEQ ID NO: 656861 - RNA, 18 nt, Artificial Sequence
  Synthetic
acuaauaugaucuccagu

SEQ ID NO: 656862 - RNA, 19 nt, Artificial Sequence
  Synthetic
gacuaauaugaucuccagu

SEQ ID NO: 656863 - RNA, 20 nt, Artificial Sequence
  Synthetic
agacuaauaugaucuccagu

SEQ ID NO: 656864 - RNA, 21 nt, Artificial Sequence
  Synthetic
uagacuaauaugaucuccagu

SEQ ID NO: 656865 - RNA, 22 nt, Artificial Sequence
  Synthetic
cuagacuaauaugaucuccagu

SEQ ID NO: 656866 - RNA, 23 nt, Artificial Sequence
  Synthetic
ucuagacuaauaugaucuccagu

SEQ ID NO: 656867 - RNA, 24 nt, Artificial Sequence
  Synthetic
aucuagacuaauaugaucuccagu

SEQ ID NO: 656868 - RNA, 18 nt, Artificial Sequence
  Synthetic
ccaugaagaccuuccagu

SEQ ID NO: 656869 - RNA, 19 nt, Artificial Sequence
  Synthetic
cccaugaagaccuuccagu

SEQ ID NO: 656870 - RNA, 20 nt, Artificial Sequence
  Synthetic
gcccaugaagaccuuccagu

SEQ ID NO: 656871 - RNA, 21 nt, Artificial Sequence
  Synthetic
ugcccaugaagaccuuccagu

SEQ ID NO: 656872 - RNA, 22 nt, Artificial Sequence
  Synthetic
uugcccaugaagaccuuccagu

SEQ ID NO: 656873 - RNA, 23 nt, Artificial Sequence
  Synthetic
auugcccaugaagaccuuccagu

SEQ ID NO: 656874 - RNA, 24 nt, Artificial Sequence
  Synthetic
cauugcccaugaagaccuuccagu

SEQ ID NO: 656875 - RNA, 18 nt, Artificial Sequence
  Synthetic
cauuuucauucuuccagu

SEQ ID NO: 656876 - RNA, 19 nt, Artificial Sequence
  Synthetic
ccauuuucauucuuccagu

SEQ ID NO: 656877 - RNA, 20 nt, Artificial Sequence
  Synthetic
uccauuuucauucuuccagu

SEQ ID NO: 656878 - RNA, 21 nt, Artificial Sequence
  Synthetic
uuccauuuucauucuuccagu

SEQ ID NO: 656879 - RNA, 22 nt, Artificial Sequence
  Synthetic
auuccauuuucauucuuccagu

SEQ ID NO: 656880 - RNA, 23 nt, Artificial Sequence
  Synthetic
uauuccauuuucauucuuccagu

SEQ ID NO: 656881 - RNA, 24 nt, Artificial Sequence
  Synthetic
auauuccauuuucauucuuccagu

SEQ ID NO: 656882 - RNA, 18 nt, Artificial Sequence
  Synthetic
gccacuguggaaagcagu

SEQ ID NO: 656883 - RNA, 19 nt, Artificial Sequence
  Synthetic
agccacuguggaaagcagu

SEQ ID NO: 656884 - RNA, 20 nt, Artificial Sequence
  Synthetic
cagccacuguggaaagcagu

SEQ ID NO: 656885 - RNA, 21 nt, Artificial Sequence
  Synthetic
ucagccacuguggaaagcagu

SEQ ID NO: 656886 - RNA, 22 nt, Artificial Sequence
  Synthetic
uucagccacuguggaaagcagu

SEQ ID NO: 656887 - RNA, 23 nt, Artificial Sequence
  Synthetic
guucagccacuguggaaagcagu

SEQ ID NO: 656888 - RNA, 24 nt, Artificial Sequence
  Synthetic
aguucagccacuguggaaagcagu

SEQ ID NO: 656889 - RNA, 18 nt, Artificial Sequence
  Synthetic
acucauccuagaagcagu

SEQ ID NO: 656890 - RNA, 19 nt, Artificial Sequence
  Synthetic
cacucauccuagaagcagu

SEQ ID NO: 656891 - RNA, 20 nt, Artificial Sequence
  Synthetic
ccacucauccuagaagcagu

SEQ ID NO: 656892 - RNA, 21 nt, Artificial Sequence
  Synthetic
gccacucauccuagaagcagu

SEQ ID NO: 656893 - RNA, 22 nt, Artificial Sequence
  Synthetic
ggccacucauccuagaagcagu

SEQ ID NO: 656894 - RNA, 23 nt, Artificial Sequence
  Synthetic
aggccacucauccuagaagcagu

SEQ ID NO: 656895 - RNA, 24 nt, Artificial Sequence
  Synthetic
gaggccacucauccuagaagcagu

SEQ ID NO: 656896 - RNA, 18 nt, Artificial Sequence
  Synthetic
aagggauggggaagcagu

SEQ ID NO: 656897 - RNA, 19 nt, Artificial Sequence
  Synthetic
gaagggauggggaagcagu

SEQ ID NO: 656898 - RNA, 20 nt, Artificial Sequence
  Synthetic
ggaagggauggggaagcagu

SEQ ID NO: 656899 - RNA, 21 nt, Artificial Sequence
  Synthetic
gggaagggauggggaagcagu

SEQ ID NO: 656900 - RNA, 22 nt, Artificial Sequence
  Synthetic
ggggaagggauggggaagcagu

SEQ ID NO: 656901 - RNA, 23 nt, Artificial Sequence
  Synthetic
gggggaagggauggggaagcagu

SEQ ID NO: 656902 - RNA, 24 nt, Artificial Sequence
  Synthetic
agggggaagggauggggaagcagu

SEQ ID NO: 656903 - RNA, 18 nt, Artificial Sequence
  Synthetic
agugaaauuugaagcagu

SEQ ID NO: 656904 - RNA, 19 nt, Artificial Sequence
  Synthetic
gagugaaauuugaagcagu

SEQ ID NO: 656905 - RNA, 20 nt, Artificial Sequence
  Synthetic
agagugaaauuugaagcagu

SEQ ID NO: 656906 - RNA, 21 nt, Artificial Sequence
  Synthetic
gagagugaaauuugaagcagu

SEQ ID NO: 656907 - RNA, 22 nt, Artificial Sequence
  Synthetic
ggagagugaaauuugaagcagu

SEQ ID NO: 656908 - RNA, 23 nt, Artificial Sequence
  Synthetic
gggagagugaaauuugaagcagu

SEQ ID NO: 656909 - RNA, 24 nt, Artificial Sequence
  Synthetic
ugggagagugaaauuugaagcagu

SEQ ID NO: 656910 - RNA, 18 nt, Artificial Sequence
  Synthetic
uguugaggacacagcagu

SEQ ID NO: 656911 - RNA, 19 nt, Artificial Sequence
  Synthetic
guguugaggacacagcagu

SEQ ID NO: 656912 - RNA, 20 nt, Artificial Sequence
  Synthetic
gguguugaggacacagcagu

SEQ ID NO: 656913 - RNA, 21 nt, Artificial Sequence
  Synthetic
ggguguugaggacacagcagu

SEQ ID NO: 656914 - RNA, 22 nt, Artificial Sequence
  Synthetic
uggguguugaggacacagcagu

SEQ ID NO: 656915 - RNA, 23 nt, Artificial Sequence
  Synthetic
uuggguguugaggacacagcagu

SEQ ID NO: 656916 - RNA, 24 nt, Artificial Sequence
  Synthetic
uuuggguguugaggacacagcagu

SEQ ID NO: 656917 - RNA, 18 nt, Artificial Sequence
  Synthetic
aucgcccaucccagcagu

SEQ ID NO: 656918 - RNA, 19 nt, Artificial Sequence
  Synthetic
aaucgcccaucccagcagu

SEQ ID NO: 656919 - RNA, 20 nt, Artificial Sequence
  Synthetic
gaaucgcccaucccagcagu

SEQ ID NO: 656920 - RNA, 21 nt, Artificial Sequence
  Synthetic
ggaaucgcccaucccagcagu

SEQ ID NO: 656921 - RNA, 22 nt, Artificial Sequence
  Synthetic
gggaaucgcccaucccagcagu

SEQ ID NO: 656922 - RNA, 23 nt, Artificial Sequence
  Synthetic
agggaaucgcccaucccagcagu

SEQ ID NO: 656923 - RNA, 24 nt, Artificial Sequence
  Synthetic
aagggaaucgcccaucccagcagu

SEQ ID NO: 656924 - RNA, 18 nt, Artificial Sequence
  Synthetic
auacacggagccagcagu

SEQ ID NO: 656925 - RNA, 19 nt, Artificial Sequence
  Synthetic
gauacacggagccagcagu

SEQ ID NO: 656926 - RNA, 20 nt, Artificial Sequence
  Synthetic
ggauacacggagccagcagu

SEQ ID NO: 656927 - RNA, 21 nt, Artificial Sequence
  Synthetic
gggauacacggagccagcagu

SEQ ID NO: 656928 - RNA, 22 nt, Artificial Sequence
  Synthetic
agggauacacggagccagcagu

SEQ ID NO: 656929 - RNA, 23 nt, Artificial Sequence
  Synthetic
aagggauacacggagccagcagu

SEQ ID NO: 656930 - RNA, 24 nt, Artificial Sequence
  Synthetic
aaagggauacacggagccagcagu

SEQ ID NO: 656931 - RNA, 18 nt, Artificial Sequence
  Synthetic
ucacuugaggucagcagu

SEQ ID NO: 656932 - RNA, 19 nt, Artificial Sequence
  Synthetic
aucacuugaggucagcagu

SEQ ID NO: 656933 - RNA, 20 nt, Artificial Sequence
  Synthetic
gaucacuugaggucagcagu

SEQ ID NO: 656934 - RNA, 21 nt, Artificial Sequence
  Synthetic
ggaucacuugaggucagcagu

SEQ ID NO: 656935 - RNA, 22 nt, Artificial Sequence
  Synthetic
uggaucacuugaggucagcagu

SEQ ID NO: 656936 - RNA, 23 nt, Artificial Sequence
  Synthetic
guggaucacuugaggucagcagu

SEQ ID NO: 656937 - RNA, 24 nt, Artificial Sequence
  Synthetic
gguggaucacuugaggucagcagu

SEQ ID NO: 656938 - RNA, 18 nt, Artificial Sequence
  Synthetic
acacuugaacagagcagu

SEQ ID NO: 656939 - RNA, 19 nt, Artificial Sequence
  Synthetic
aacacuugaacagagcagu

SEQ ID NO: 656940 - RNA, 20 nt, Artificial Sequence
  Synthetic
aaacacuugaacagagcagu

SEQ ID NO: 656941 - RNA, 21 nt, Artificial Sequence
  Synthetic
uaaacacuugaacagagcagu

SEQ ID NO: 656942 - RNA, 22 nt, Artificial Sequence
  Synthetic
auaaacacuugaacagagcagu

SEQ ID NO: 656943 - RNA, 23 nt, Artificial Sequence
  Synthetic
cauaaacacuugaacagagcagu

SEQ ID NO: 656944 - RNA, 24 nt, Artificial Sequence
  Synthetic
acauaaacacuugaacagagcagu

SEQ ID NO: 656945 - RNA, 18 nt, Artificial Sequence
  Synthetic
aauaaaacaaauagcagu

SEQ ID NO: 656946 - RNA, 19 nt, Artificial Sequence
  Synthetic
gaauaaaacaaauagcagu

SEQ ID NO: 656947 - RNA, 20 nt, Artificial Sequence
  Synthetic
agaauaaaacaaauagcagu

SEQ ID NO: 656948 - RNA, 21 nt, Artificial Sequence
  Synthetic
aagaauaaaacaaauagcagu

SEQ ID NO: 656949 - RNA, 22 nt, Artificial Sequence
  Synthetic
aaagaauaaaacaaauagcagu

SEQ ID NO: 656950 - RNA, 23 nt, Artificial Sequence
  Synthetic
caaagaauaaaacaaauagcagu

SEQ ID NO: 656951 - RNA, 24 nt, Artificial Sequence
  Synthetic
gcaaagaauaaaacaaauagcagu

SEQ ID NO: 656952 - RNA, 21 nt, Artificial Sequence
  Synthetic
cggguauuucuucauagcagu

SEQ ID NO: 656953 - RNA, 22 nt, Artificial Sequence
  Synthetic
ucggguauuucuucauagcagu

SEQ ID NO: 656954 - RNA, 23 nt, Artificial Sequence
  Synthetic
cucggguauuucuucauagcagu

SEQ ID NO: 656955 - RNA, 24 nt, Artificial Sequence
  Synthetic
ucucggguauuucuucauagcagu

SEQ ID NO: 656956 - RNA, 21 nt, Artificial Sequence
  Synthetic
uggguauuucuucauagcagu

SEQ ID NO: 656957 - RNA, 22 nt, Artificial Sequence
  Synthetic
uuggguauuucuucauagcagu

SEQ ID NO: 656958 - RNA, 23 nt, Artificial Sequence
  Synthetic
cuuggguauuucuucauagcagu

SEQ ID NO: 656959 - RNA, 24 nt, Artificial Sequence
  Synthetic
ucuuggguauuucuucauagcagu

SEQ ID NO: 656960 - RNA, 18 nt, Artificial Sequence
  Synthetic
gaaguucuuuauagcagu

SEQ ID NO: 656961 - RNA, 19 nt, Artificial Sequence
  Synthetic
ggaaguucuuuauagcagu

SEQ ID NO: 656962 - RNA, 20 nt, Artificial Sequence
  Synthetic
gggaaguucuuuauagcagu

SEQ ID NO: 656963 - RNA, 21 nt, Artificial Sequence
  Synthetic
agggaaguucuuuauagcagu

SEQ ID NO: 656964 - RNA, 22 nt, Artificial Sequence
  Synthetic
cagggaaguucuuuauagcagu

SEQ ID NO: 656965 - RNA, 23 nt, Artificial Sequence
  Synthetic
ucagggaaguucuuuauagcagu

SEQ ID NO: 656966 - RNA, 24 nt, Artificial Sequence
  Synthetic
cucagggaaguucuuuauagcagu

SEQ ID NO: 656967 - RNA, 18 nt, Artificial Sequence
  Synthetic
gcaguucuuuauagcagu

SEQ ID NO: 656968 - RNA, 19 nt, Artificial Sequence
  Synthetic
ggcaguucuuuauagcagu

SEQ ID NO: 656969 - RNA, 20 nt, Artificial Sequence
  Synthetic
gggcaguucuuuauagcagu

SEQ ID NO: 656970 - RNA, 21 nt, Artificial Sequence
  Synthetic
cgggcaguucuuuauagcagu

SEQ ID NO: 656971 - RNA, 22 nt, Artificial Sequence
  Synthetic
ucgggcaguucuuuauagcagu

SEQ ID NO: 656972 - RNA, 23 nt, Artificial Sequence
  Synthetic
cucgggcaguucuuuauagcagu

SEQ ID NO: 656973 - RNA, 24 nt, Artificial Sequence
  Synthetic
ucucgggcaguucuuuauagcagu

SEQ ID NO: 656974 - RNA, 18 nt, Artificial Sequence
  Synthetic
gauguugaugcuagcagu

SEQ ID NO: 656975 - RNA, 19 nt, Artificial Sequence
  Synthetic
ugauguugaugcuagcagu

SEQ ID NO: 656976 - RNA, 20 nt, Artificial Sequence
  Synthetic
uugauguugaugcuagcagu

SEQ ID NO: 656977 - RNA, 21 nt, Artificial Sequence
  Synthetic
guugauguugaugcuagcagu

SEQ ID NO: 656978 - RNA, 22 nt, Artificial Sequence
  Synthetic
uguugauguugaugcuagcagu

SEQ ID NO: 656979 - RNA, 23 nt, Artificial Sequence
  Synthetic
uuguugauguugaugcuagcagu

SEQ ID NO: 656980 - RNA, 24 nt, Artificial Sequence
  Synthetic
uuuguugauguugaugcuagcagu

SEQ ID NO: 656981 - RNA, 18 nt, Artificial Sequence
  Synthetic
uuggggaaaucuagcagu

SEQ ID NO: 656982 - RNA, 19 nt, Artificial Sequence
  Synthetic
auuggggaaaucuagcagu

SEQ ID NO: 656983 - RNA, 20 nt, Artificial Sequence
  Synthetic
aauuggggaaaucuagcagu

SEQ ID NO: 656984 - RNA, 21 nt, Artificial Sequence
  Synthetic
aaauuggggaaaucuagcagu

SEQ ID NO: 656985 - RNA, 22 nt, Artificial Sequence
  Synthetic
aaaauuggggaaaucuagcagu

SEQ ID NO: 656986 - RNA, 23 nt, Artificial Sequence
  Synthetic
uaaaauuggggaaaucuagcagu

SEQ ID NO: 656987 - RNA, 24 nt, Artificial Sequence
  Synthetic
cuaaaauuggggaaaucuagcagu

SEQ ID NO: 656988 - RNA, 18 nt, Artificial Sequence
  Synthetic
uaugucuuuauuagcagu

SEQ ID NO: 656989 - RNA, 19 nt, Artificial Sequence
  Synthetic
guaugucuuuauuagcagu

SEQ ID NO: 656990 - RNA, 20 nt, Artificial Sequence
  Synthetic
gguaugucuuuauuagcagu

SEQ ID NO: 656991 - RNA, 21 nt, Artificial Sequence
  Synthetic
agguaugucuuuauuagcagu

SEQ ID NO: 656992 - RNA, 22 nt, Artificial Sequence
  Synthetic
cagguaugucuuuauuagcagu

SEQ ID NO: 656993 - RNA, 23 nt, Artificial Sequence
  Synthetic
ucagguaugucuuuauuagcagu

SEQ ID NO: 656994 - RNA, 24 nt, Artificial Sequence
  Synthetic
cucagguaugucuuuauuagcagu

SEQ ID NO: 656995 - RNA, 18 nt, Artificial Sequence
  Synthetic
uaugucuuuauccgcagu

SEQ ID NO: 656996 - RNA, 19 nt, Artificial Sequence
  Synthetic
guaugucuuuauccgcagu

SEQ ID NO: 656997 - RNA, 20 nt, Artificial Sequence
  Synthetic
gguaugucuuuauccgcagu

SEQ ID NO: 656998 - RNA, 21 nt, Artificial Sequence
  Synthetic
ggguaugucuuuauccgcagu

SEQ ID NO: 656999 - RNA, 22 nt, Artificial Sequence
  Synthetic
cggguaugucuuuauccgcagu

SEQ ID NO: 657000 - RNA, 23 nt, Artificial Sequence
  Synthetic
ucggguaugucuuuauccgcagu

SEQ ID NO: 657001 - RNA, 24 nt, Artificial Sequence
  Synthetic
cucggguaugucuuuauccgcagu

SEQ ID NO: 657002 - RNA, 18 nt, Artificial Sequence
  Synthetic
gucaggaagccaggcagu

SEQ ID NO: 657003 - RNA, 19 nt, Artificial Sequence
  Synthetic
agucaggaagccaggcagu

SEQ ID NO: 657004 - RNA, 20 nt, Artificial Sequence
  Synthetic
aagucaggaagccaggcagu

SEQ ID NO: 657005 - RNA, 21 nt, Artificial Sequence
  Synthetic
gaagucaggaagccaggcagu

SEQ ID NO: 657006 - RNA, 22 nt, Artificial Sequence
  Synthetic
ggaagucaggaagccaggcagu

SEQ ID NO: 657007 - RNA, 23 nt, Artificial Sequence
  Synthetic
aggaagucaggaagccaggcagu

SEQ ID NO: 657008 - RNA, 24 nt, Artificial Sequence
  Synthetic
aaggaagucaggaagccaggcagu

SEQ ID NO: 657009 - RNA, 18 nt, Artificial Sequence
  Synthetic
guaaaccugagaggcagu

SEQ ID NO: 657010 - RNA, 19 nt, Artificial Sequence
  Synthetic
gguaaaccugagaggcagu

SEQ ID NO: 657011 - RNA, 20 nt, Artificial Sequence
  Synthetic
agguaaaccugagaggcagu

SEQ ID NO: 657012 - RNA, 21 nt, Artificial Sequence
  Synthetic
cagguaaaccugagaggcagu

SEQ ID NO: 657013 - RNA, 22 nt, Artificial Sequence
  Synthetic
ccagguaaaccugagaggcagu

SEQ ID NO: 657014 - RNA, 23 nt, Artificial Sequence
  Synthetic
cccagguaaaccugagaggcagu

SEQ ID NO: 657015 - RNA, 24 nt, Artificial Sequence
  Synthetic
ucccagguaaaccugagaggcagu

SEQ ID NO: 657016 - RNA, 18 nt, Artificial Sequence
  Synthetic
auagagaauagaggcagu

SEQ ID NO: 657017 - RNA, 19 nt, Artificial Sequence
  Synthetic
aauagagaauagaggcagu

SEQ ID NO: 657018 - RNA, 20 nt, Artificial Sequence
  Synthetic
aaauagagaauagaggcagu

SEQ ID NO: 657019 - RNA, 21 nt, Artificial Sequence
  Synthetic
gaaauagagaauagaggcagu

SEQ ID NO: 657020 - RNA, 22 nt, Artificial Sequence
  Synthetic
ugaaauagagaauagaggcagu

SEQ ID NO: 657021 - RNA, 23 nt, Artificial Sequence
  Synthetic
cugaaauagagaauagaggcagu

SEQ ID NO: 657022 - RNA, 24 nt, Artificial Sequence
  Synthetic
ucugaaauagagaauagaggcagu

SEQ ID NO: 657023 - RNA, 18 nt, Artificial Sequence
  Synthetic
uuguguaucaacggcagu

SEQ ID NO: 657024 - RNA, 19 nt, Artificial Sequence
  Synthetic
guuguguaucaacggcagu

SEQ ID NO: 657025 - RNA, 20 nt, Artificial Sequence
  Synthetic
uguuguguaucaacggcagu

SEQ ID NO: 657026 - RNA, 21 nt, Artificial Sequence
  Synthetic
auguuguguaucaacggcagu

SEQ ID NO: 657027 - RNA, 22 nt, Artificial Sequence
  Synthetic
aauguuguguaucaacggcagu

SEQ ID NO: 657028 - RNA, 23 nt, Artificial Sequence
  Synthetic
aaauguuguguaucaacggcagu

SEQ ID NO: 657029 - RNA, 24 nt, Artificial Sequence
  Synthetic
uaaauguuguguaucaacggcagu

SEQ ID NO: 657030 - RNA, 18 nt, Artificial Sequence
  Synthetic
cugcucuaugguggcagu

SEQ ID NO: 657031 - RNA, 19 nt, Artificial Sequence
  Synthetic
ccugcucuaugguggcagu

SEQ ID NO: 657032 - RNA, 20 nt, Artificial Sequence
  Synthetic
gccugcucuaugguggcagu

SEQ ID NO: 657033 - RNA, 21 nt, Artificial Sequence
  Synthetic
ggccugcucuaugguggcagu

SEQ ID NO: 657034 - RNA, 22 nt, Artificial Sequence
  Synthetic
aggccugcucuaugguggcagu

SEQ ID NO: 657035 - RNA, 23 nt, Artificial Sequence
  Synthetic
caggccugcucuaugguggcagu

SEQ ID NO: 657036 - RNA, 24 nt, Artificial Sequence
  Synthetic
acaggccugcucuaugguggcagu

SEQ ID NO: 657037 - RNA, 18 nt, Artificial Sequence
  Synthetic
uccuagcuacuuggcagu

SEQ ID NO: 657038 - RNA, 19 nt, Artificial Sequence
  Synthetic
auccuagcuacuuggcagu

SEQ ID NO: 657039 - RNA, 20 nt, Artificial Sequence
  Synthetic
aauccuagcuacuuggcagu

SEQ ID NO: 657040 - RNA, 21 nt, Artificial Sequence
  Synthetic
uaauccuagcuacuuggcagu

SEQ ID NO: 657041 - RNA, 22 nt, Artificial Sequence
  Synthetic
guaauccuagcuacuuggcagu

SEQ ID NO: 657042 - RNA, 23 nt, Artificial Sequence
  Synthetic
aguaauccuagcuacuuggcagu

SEQ ID NO: 657043 - RNA, 24 nt, Artificial Sequence
  Synthetic
caguaauccuagcuacuuggcagu

SEQ ID NO: 657044 - RNA, 18 nt, Artificial Sequence
  Synthetic
guuuuuuuucuuggcagu

SEQ ID NO: 657045 - RNA, 19 nt, Artificial Sequence
  Synthetic
aguuuuuuuucuuggcagu

SEQ ID NO: 657046 - RNA, 20 nt, Artificial Sequence
  Synthetic
aaguuuuuuuucuuggcagu

SEQ ID NO: 657047 - RNA, 21 nt, Artificial Sequence
  Synthetic
aaaguuuuuuuucuuggcagu

SEQ ID NO: 657048 - RNA, 22 nt, Artificial Sequence
  Synthetic
aaaaguuuuuuuucuuggcagu

SEQ ID NO: 657049 - RNA, 23 nt, Artificial Sequence
  Synthetic
aaaaaguuuuuuuucuuggcagu

SEQ ID NO: 657050 - RNA, 24 nt, Artificial Sequence
  Synthetic
aaaaaaguuuuuuuucuuggcagu

SEQ ID NO: 657051 - RNA, 18 nt, Artificial Sequence
  Synthetic
augaacuuucaaugcagu

SEQ ID NO: 657052 - RNA, 19 nt, Artificial Sequence
  Synthetic
gaugaacuuucaaugcagu

SEQ ID NO: 657053 - RNA, 20 nt, Artificial Sequence
  Synthetic
ugaugaacuuucaaugcagu

SEQ ID NO: 657054 - RNA, 21 nt, Artificial Sequence
  Synthetic
gugaugaacuuucaaugcagu

SEQ ID NO: 657055 - RNA, 22 nt, Artificial Sequence
  Synthetic
ugugaugaacuuucaaugcagu

SEQ ID NO: 657056 - RNA, 23 nt, Artificial Sequence
  Synthetic
uugugaugaacuuucaaugcagu

SEQ ID NO: 657057 - RNA, 24 nt, Artificial Sequence
  Synthetic
cuugugaugaacuuucaaugcagu

SEQ ID NO: 657058 - RNA, 18 nt, Artificial Sequence
  Synthetic
cggaagcacggaugcagu

SEQ ID NO: 657059 - RNA, 19 nt, Artificial Sequence
  Synthetic
gcggaagcacggaugcagu

SEQ ID NO: 657060 - RNA, 20 nt, Artificial Sequence
  Synthetic
ugcggaagcacggaugcagu

SEQ ID NO: 657061 - RNA, 21 nt, Artificial Sequence
  Synthetic
uugcggaagcacggaugcagu

SEQ ID NO: 657062 - RNA, 22 nt, Artificial Sequence
  Synthetic
uuugcggaagcacggaugcagu

SEQ ID NO: 657063 - RNA, 23 nt, Artificial Sequence
  Synthetic
cuuugcggaagcacggaugcagu

SEQ ID NO: 657064 - RNA, 24 nt, Artificial Sequence
  Synthetic
ccuuugcggaagcacggaugcagu

SEQ ID NO: 657065 - RNA, 18 nt, Artificial Sequence
  Synthetic
ggcaguuaaauaugcagu

SEQ ID NO: 657066 - RNA, 19 nt, Artificial Sequence
  Synthetic
aggcaguuaaauaugcagu

SEQ ID NO: 657067 - RNA, 20 nt, Artificial Sequence
  Synthetic
uaggcaguuaaauaugcagu

SEQ ID NO: 657068 - RNA, 21 nt, Artificial Sequence
  Synthetic
guaggcaguuaaauaugcagu

SEQ ID NO: 657069 - RNA, 22 nt, Artificial Sequence
  Synthetic
aguaggcaguuaaauaugcagu

SEQ ID NO: 657070 - RNA, 23 nt, Artificial Sequence
  Synthetic
gaguaggcaguuaaauaugcagu

SEQ ID NO: 657071 - RNA, 24 nt, Artificial Sequence
  Synthetic
ugaguaggcaguuaaauaugcagu

SEQ ID NO: 657072 - RNA, 18 nt, Artificial Sequence
  Synthetic
ugagccggguacugcagu

SEQ ID NO: 657073 - RNA, 19 nt, Artificial Sequence
  Synthetic
augagccggguacugcagu

SEQ ID NO: 657074 - RNA, 20 nt, Artificial Sequence
  Synthetic
gaugagccggguacugcagu

SEQ ID NO: 657075 - RNA, 21 nt, Artificial Sequence
  Synthetic
agaugagccggguacugcagu

SEQ ID NO: 657076 - RNA, 22 nt, Artificial Sequence
  Synthetic
gagaugagccggguacugcagu

SEQ ID NO: 657077 - RNA, 23 nt, Artificial Sequence
  Synthetic
ugagaugagccggguacugcagu

SEQ ID NO: 657078 - RNA, 24 nt, Artificial Sequence
  Synthetic
gugagaugagccggguacugcagu

SEQ ID NO: 657079 - RNA, 18 nt, Artificial Sequence
  Synthetic
agcaugugagggugcagu

SEQ ID NO: 657080 - RNA, 19 nt, Artificial Sequence
  Synthetic
cagcaugugagggugcagu

SEQ ID NO: 657081 - RNA, 20 nt, Artificial Sequence
  Synthetic
ucagcaugugagggugcagu

SEQ ID NO: 657082 - RNA, 21 nt, Artificial Sequence
  Synthetic
uucagcaugugagggugcagu

SEQ ID NO: 657083 - RNA, 22 nt, Artificial Sequence
  Synthetic
uuucagcaugugagggugcagu

SEQ ID NO: 657084 - RNA, 23 nt, Artificial Sequence
  Synthetic
cuuucagcaugugagggugcagu

SEQ ID NO: 657085 - RNA, 24 nt, Artificial Sequence
  Synthetic
ccuuucagcaugugagggugcagu

SEQ ID NO: 657086 - RNA, 18 nt, Artificial Sequence
  Synthetic
gaaauguauuggugcagu

SEQ ID NO: 657087 - RNA, 19 nt, Artificial Sequence
  Synthetic
agaaauguauuggugcagu

SEQ ID NO: 657088 - RNA, 20 nt, Artificial Sequence
  Synthetic
uagaaauguauuggugcagu

SEQ ID NO: 657089 - RNA, 21 nt, Artificial Sequence
  Synthetic
guagaaauguauuggugcagu

SEQ ID NO: 657090 - RNA, 22 nt, Artificial Sequence
  Synthetic
aguagaaauguauuggugcagu

SEQ ID NO: 657091 - RNA, 23 nt, Artificial Sequence
  Synthetic
uaguagaaauguauuggugcagu

SEQ ID NO: 657092 - RNA, 24 nt, Artificial Sequence
  Synthetic
auaguagaaauguauuggugcagu

SEQ ID NO: 657093 - RNA, 18 nt, Artificial Sequence
  Synthetic
aaaagcauucugugcagu

SEQ ID NO: 657094 - RNA, 19 nt, Artificial Sequence
  Synthetic
uaaaagcauucugugcagu

SEQ ID NO: 657095 - RNA, 20 nt, Artificial Sequence
  Synthetic
uuaaaagcauucugugcagu

SEQ ID NO: 657096 - RNA, 21 nt, Artificial Sequence
  Synthetic
auuaaaagcauucugugcagu

SEQ ID NO: 657097 - RNA, 22 nt, Artificial Sequence
  Synthetic
gauuaaaagcauucugugcagu

SEQ ID NO: 657098 - RNA, 23 nt, Artificial Sequence
  Synthetic
ggauuaaaagcauucugugcagu

SEQ ID NO: 657099 - RNA, 24 nt, Artificial Sequence
  Synthetic
uggauuaaaagcauucugugcagu

SEQ ID NO: 657100 - RNA, 18 nt, Artificial Sequence
  Synthetic
gauuuuuaaauuugcagu

SEQ ID NO: 657101 - RNA, 19 nt, Artificial Sequence
  Synthetic
agauuuuuaaauuugcagu

SEQ ID NO: 657102 - RNA, 20 nt, Artificial Sequence
  Synthetic
gagauuuuuaaauuugcagu

SEQ ID NO: 657103 - RNA, 21 nt, Artificial Sequence
  Synthetic
agagauuuuuaaauuugcagu

SEQ ID NO: 657104 - RNA, 22 nt, Artificial Sequence
  Synthetic
gagagauuuuuaaauuugcagu

SEQ ID NO: 657105 - RNA, 23 nt, Artificial Sequence
  Synthetic
agagagauuuuuaaauuugcagu

SEQ ID NO: 657106 - RNA, 24 nt, Artificial Sequence
  Synthetic
gagagagauuuuuaaauuugcagu

SEQ ID NO: 657107 - RNA, 18 nt, Artificial Sequence
  Synthetic
uugaaucucuuuugcagu

SEQ ID NO: 657108 - RNA, 19 nt, Artificial Sequence
  Synthetic
guugaaucucuuuugcagu

SEQ ID NO: 657109 - RNA, 20 nt, Artificial Sequence
  Synthetic
aguugaaucucuuuugcagu

SEQ ID NO: 657110 - RNA, 21 nt, Artificial Sequence
  Synthetic
caguugaaucucuuuugcagu

SEQ ID NO: 657111 - RNA, 22 nt, Artificial Sequence
  Synthetic
gcaguugaaucucuuuugcagu

SEQ ID NO: 657112 - RNA, 23 nt, Artificial Sequence
  Synthetic
ugcaguugaaucucuuuugcagu

SEQ ID NO: 657113 - RNA, 24 nt, Artificial Sequence
  Synthetic
uugcaguugaaucucuuuugcagu

SEQ ID NO: 657114 - RNA, 18 nt, Artificial Sequence
  Synthetic
ggcuuuuuaaaaaucagu

SEQ ID NO: 657115 - RNA, 19 nt, Artificial Sequence
  Synthetic
uggcuuuuuaaaaaucagu

SEQ ID NO: 657116 - RNA, 20 nt, Artificial Sequence
  Synthetic
uuggcuuuuuaaaaaucagu

SEQ ID NO: 657117 - RNA, 21 nt, Artificial Sequence
  Synthetic
guuggcuuuuuaaaaaucagu

SEQ ID NO: 657118 - RNA, 22 nt, Artificial Sequence
  Synthetic
aguuggcuuuuuaaaaaucagu

SEQ ID NO: 657119 - RNA, 23 nt, Artificial Sequence
  Synthetic
uaguuggcuuuuuaaaaaucagu

SEQ ID NO: 657120 - RNA, 24 nt, Artificial Sequence
  Synthetic
auaguuggcuuuuuaaaaaucagu

SEQ ID NO: 657121 - RNA, 18 nt, Artificial Sequence
  Synthetic
uuuauuguuuaaaucagu

SEQ ID NO: 657122 - RNA, 19 nt, Artificial Sequence
  Synthetic
auuuauuguuuaaaucagu

SEQ ID NO: 657123 - RNA, 20 nt, Artificial Sequence
  Synthetic
uauuuauuguuuaaaucagu

SEQ ID NO: 657124 - RNA, 21 nt, Artificial Sequence
  Synthetic
auauuuauuguuuaaaucagu

SEQ ID NO: 657125 - RNA, 22 nt, Artificial Sequence
  Synthetic
cauauuuauuguuuaaaucagu

SEQ ID NO: 657126 - RNA, 23 nt, Artificial Sequence
  Synthetic
ucauauuuauuguuuaaaucagu

SEQ ID NO: 657127 - RNA, 24 nt, Artificial Sequence
  Synthetic
aucauauuuauuguuuaaaucagu

SEQ ID NO: 657128 - RNA, 18 nt, Artificial Sequence
  Synthetic
agugcucuuacaaucagu

SEQ ID NO: 657129 - RNA, 19 nt, Artificial Sequence
  Synthetic
gagugcucuuacaaucagu

SEQ ID NO: 657130 - RNA, 20 nt, Artificial Sequence
  Synthetic
ugagugcucuuacaaucagu

SEQ ID NO: 657131 - RNA, 21 nt, Artificial Sequence
  Synthetic
cugagugcucuuacaaucagu

SEQ ID NO: 657132 - RNA, 22 nt, Artificial Sequence
  Synthetic
ccugagugcucuuacaaucagu

SEQ ID NO: 657133 - RNA, 23 nt, Artificial Sequence
  Synthetic
cccugagugcucuuacaaucagu

SEQ ID NO: 657134 - RNA, 24 nt, Artificial Sequence
  Synthetic
ucccugagugcucuuacaaucagu

SEQ ID NO: 657135 - RNA, 18 nt, Artificial Sequence
  Synthetic
aaugucacuggaaucagu

SEQ ID NO: 657136 - RNA, 19 nt, Artificial Sequence
  Synthetic
gaaugucacuggaaucagu

SEQ ID NO: 657137 - RNA, 20 nt, Artificial Sequence
  Synthetic
ggaaugucacuggaaucagu

SEQ ID NO: 657138 - RNA, 21 nt, Artificial Sequence
  Synthetic
uggaaugucacuggaaucagu

SEQ ID NO: 657139 - RNA, 22 nt, Artificial Sequence
  Synthetic
guggaaugucacuggaaucagu

SEQ ID NO: 657140 - RNA, 23 nt, Artificial Sequence
  Synthetic
aguggaaugucacuggaaucagu

SEQ ID NO: 657141 - RNA, 24 nt, Artificial Sequence
  Synthetic
uaguggaaugucacuggaaucagu

SEQ ID NO: 657142 - RNA, 18 nt, Artificial Sequence
  Synthetic
uuaugcuucauaaucagu

SEQ ID NO: 657143 - RNA, 19 nt, Artificial Sequence
  Synthetic
cuuaugcuucauaaucagu

SEQ ID NO: 657144 - RNA, 20 nt, Artificial Sequence
  Synthetic
ucuuaugcuucauaaucagu

SEQ ID NO: 657145 - RNA, 21 nt, Artificial Sequence
  Synthetic
uucuuaugcuucauaaucagu

SEQ ID NO: 657146 - RNA, 22 nt, Artificial Sequence
  Synthetic
guucuuaugcuucauaaucagu

SEQ ID NO: 657147 - RNA, 23 nt, Artificial Sequence
  Synthetic
aguucuuaugcuucauaaucagu

SEQ ID NO: 657148 - RNA, 24 nt, Artificial Sequence
  Synthetic
gaguucuuaugcuucauaaucagu

SEQ ID NO: 657149 - RNA, 18 nt, Artificial Sequence
  Synthetic
auaacaauuauaaucagu

SEQ ID NO: 657150 - RNA, 19 nt, Artificial Sequence
  Synthetic
uauaacaauuauaaucagu

SEQ ID NO: 657151 - RNA, 20 nt, Artificial Sequence
  Synthetic
auauaacaauuauaaucagu

SEQ ID NO: 657152 - RNA, 21 nt, Artificial Sequence
  Synthetic
aauauaacaauuauaaucagu

SEQ ID NO: 657153 - RNA, 22 nt, Artificial Sequence
  Synthetic
caauauaacaauuauaaucagu

SEQ ID NO: 657154 - RNA, 23 nt, Artificial Sequence
  Synthetic
ccaauauaacaauuauaaucagu

SEQ ID NO: 657155 - RNA, 24 nt, Artificial Sequence
  Synthetic
accaauauaacaauuauaaucagu

SEQ ID NO: 657156 - RNA, 18 nt, Artificial Sequence
  Synthetic
gaggaguuuauaaucagu

SEQ ID NO: 657157 - RNA, 19 nt, Artificial Sequence
  Synthetic
ggaggaguuuauaaucagu

SEQ ID NO: 657158 - RNA, 20 nt, Artificial Sequence
  Synthetic
uggaggaguuuauaaucagu

SEQ ID NO: 657159 - RNA, 21 nt, Artificial Sequence
  Synthetic
cuggaggaguuuauaaucagu

SEQ ID NO: 657160 - RNA, 22 nt, Artificial Sequence
  Synthetic
ccuggaggaguuuauaaucagu

SEQ ID NO: 657161 - RNA, 23 nt, Artificial Sequence
  Synthetic
cccuggaggaguuuauaaucagu

SEQ ID NO: 657162 - RNA, 24 nt, Artificial Sequence
  Synthetic
gcccuggaggaguuuauaaucagu

SEQ ID NO: 657163 - RNA, 18 nt, Artificial Sequence
  Synthetic
aauaacuucuacaucagu

SEQ ID NO: 657164 - RNA, 19 nt, Artificial Sequence
  Synthetic
aaauaacuucuacaucagu

SEQ ID NO: 657165 - RNA, 20 nt, Artificial Sequence
  Synthetic
caaauaacuucuacaucagu

SEQ ID NO: 657166 - RNA, 21 nt, Artificial Sequence
  Synthetic
ccaaauaacuucuacaucagu

SEQ ID NO: 657167 - RNA, 22 nt, Artificial Sequence
  Synthetic
uccaaauaacuucuacaucagu

SEQ ID NO: 657168 - RNA, 23 nt, Artificial Sequence
  Synthetic
auccaaauaacuucuacaucagu

SEQ ID NO: 657169 - RNA, 24 nt, Artificial Sequence
  Synthetic
uauccaaauaacuucuacaucagu

SEQ ID NO: 657170 - RNA, 18 nt, Artificial Sequence
  Synthetic
aaucuauucaccaucagu

SEQ ID NO: 657171 - RNA, 19 nt, Artificial Sequence
  Synthetic
uaaucuauucaccaucagu

SEQ ID NO: 657172 - RNA, 20 nt, Artificial Sequence
  Synthetic
auaaucuauucaccaucagu

SEQ ID NO: 657173 - RNA, 21 nt, Artificial Sequence
  Synthetic
gauaaucuauucaccaucagu

SEQ ID NO: 657174 - RNA, 22 nt, Artificial Sequence
  Synthetic
agauaaucuauucaccaucagu

SEQ ID NO: 657175 - RNA, 23 nt, Artificial Sequence
  Synthetic
uagauaaucuauucaccaucagu

SEQ ID NO: 657176 - RNA, 24 nt, Artificial Sequence
  Synthetic
uuagauaaucuauucaccaucagu

SEQ ID NO: 657177 - RNA, 18 nt, Artificial Sequence
  Synthetic
ucaaugucaggcaucagu

SEQ ID NO: 657178 - RNA, 19 nt, Artificial Sequence
  Synthetic
aucaaugucaggcaucagu

SEQ ID NO: 657179 - RNA, 20 nt, Artificial Sequence
  Synthetic
aaucaaugucaggcaucagu

SEQ ID NO: 657180 - RNA, 21 nt, Artificial Sequence
  Synthetic
uaaucaaugucaggcaucagu

SEQ ID NO: 657181 - RNA, 22 nt, Artificial Sequence
  Synthetic
uuaaucaaugucaggcaucagu

SEQ ID NO: 657182 - RNA, 23 nt, Artificial Sequence
  Synthetic
auuaaucaaugucaggcaucagu

SEQ ID NO: 657183 - RNA, 24 nt, Artificial Sequence
  Synthetic
aauuaaucaaugucaggcaucagu

SEQ ID NO: 657184 - RNA, 18 nt, Artificial Sequence
  Synthetic
aucuagaacuucaucagu

SEQ ID NO: 657185 - RNA, 19 nt, Artificial Sequence
  Synthetic
aaucuagaacuucaucagu

SEQ ID NO: 657186 - RNA, 20 nt, Artificial Sequence
  Synthetic
caaucuagaacuucaucagu

SEQ ID NO: 657187 - RNA, 21 nt, Artificial Sequence
  Synthetic
ucaaucuagaacuucaucagu

SEQ ID NO: 657188 - RNA, 22 nt, Artificial Sequence
  Synthetic
uucaaucuagaacuucaucagu

SEQ ID NO: 657189 - RNA, 23 nt, Artificial Sequence
  Synthetic
uuucaaucuagaacuucaucagu

SEQ ID NO: 657190 - RNA, 24 nt, Artificial Sequence
  Synthetic
guuucaaucuagaacuucaucagu

SEQ ID NO: 657191 - RNA, 18 nt, Artificial Sequence
  Synthetic
aaaagaacaaagaucagu

SEQ ID NO: 657192 - RNA, 19 nt, Artificial Sequence
  Synthetic
aaaaagaacaaagaucagu

SEQ ID NO: 657193 - RNA, 20 nt, Artificial Sequence
  Synthetic
aaaaaagaacaaagaucagu

SEQ ID NO: 657194 - RNA, 21 nt, Artificial Sequence
  Synthetic
aaaaaaagaacaaagaucagu

SEQ ID NO: 657195 - RNA, 22 nt, Artificial Sequence
  Synthetic
aaaaaaaagaacaaagaucagu

SEQ ID NO: 657196 - RNA, 23 nt, Artificial Sequence
  Synthetic
gaaaaaaaagaacaaagaucagu

SEQ ID NO: 657197 - RNA, 24 nt, Artificial Sequence
  Synthetic
ggaaaaaaaagaacaaagaucagu

SEQ ID NO: 657198 - RNA, 18 nt, Artificial Sequence
  Synthetic
caggcguuugagaucagu

SEQ ID NO: 657199 - RNA, 19 nt, Artificial Sequence
  Synthetic
ucaggcguuugagaucagu

SEQ ID NO: 657200 - RNA, 20 nt, Artificial Sequence
  Synthetic
gucaggcguuugagaucagu

SEQ ID NO: 657201 - RNA, 21 nt, Artificial Sequence
  Synthetic
ggucaggcguuugagaucagu

SEQ ID NO: 657202 - RNA, 22 nt, Artificial Sequence
  Synthetic
aggucaggcguuugagaucagu

SEQ ID NO: 657203 - RNA, 23 nt, Artificial Sequence
  Synthetic
gaggucaggcguuugagaucagu

SEQ ID NO: 657204 - RNA, 24 nt, Artificial Sequence
  Synthetic
ugaggucaggcguuugagaucagu

SEQ ID NO: 657205 - RNA, 18 nt, Artificial Sequence
  Synthetic
ugacagcaaaggaucagu

SEQ ID NO: 657206 - RNA, 19 nt, Artificial Sequence
  Synthetic
cugacagcaaaggaucagu

SEQ ID NO: 657207 - RNA, 20 nt, Artificial Sequence
  Synthetic
gcugacagcaaaggaucagu

SEQ ID NO: 657208 - RNA, 21 nt, Artificial Sequence
  Synthetic
agcugacagcaaaggaucagu

SEQ ID NO: 657209 - RNA, 22 nt, Artificial Sequence
  Synthetic
aagcugacagcaaaggaucagu

SEQ ID NO: 657210 - RNA, 23 nt, Artificial Sequence
  Synthetic
uaagcugacagcaaaggaucagu

SEQ ID NO: 657211 - RNA, 24 nt, Artificial Sequence
  Synthetic
guaagcugacagcaaaggaucagu

SEQ ID NO: 657212 - RNA, 18 nt, Artificial Sequence
  Synthetic
ccuccugccgcuaucagu

SEQ ID NO: 657213 - RNA, 19 nt, Artificial Sequence
  Synthetic
gccuccugccgcuaucagu

SEQ ID NO: 657214 - RNA, 20 nt, Artificial Sequence
  Synthetic
ugccuccugccgcuaucagu

SEQ ID NO: 657215 - RNA, 21 nt, Artificial Sequence
  Synthetic
cugccuccugccgcuaucagu

SEQ ID NO: 657216 - RNA, 22 nt, Artificial Sequence
  Synthetic
ucugccuccugccgcuaucagu

SEQ ID NO: 657217 - RNA, 23 nt, Artificial Sequence
  Synthetic
cucugccuccugccgcuaucagu

SEQ ID NO: 657218 - RNA, 24 nt, Artificial Sequence
  Synthetic
ucucugccuccugccgcuaucagu

SEQ ID NO: 657219 - RNA, 18 nt, Artificial Sequence
  Synthetic
cucacucugucacucagu

SEQ ID NO: 657220 - RNA, 19 nt, Artificial Sequence
  Synthetic
ucucacucugucacucagu

SEQ ID NO: 657221 - RNA, 20 nt, Artificial Sequence
  Synthetic
gucucacucugucacucagu

SEQ ID NO: 657222 - RNA, 21 nt, Artificial Sequence
  Synthetic
agucucacucugucacucagu

SEQ ID NO: 657223 - RNA, 22 nt, Artificial Sequence
  Synthetic
gagucucacucugucacucagu

SEQ ID NO: 657224 - RNA, 23 nt, Artificial Sequence
  Synthetic
ggagucucacucugucacucagu

SEQ ID NO: 657225 - RNA, 24 nt, Artificial Sequence
  Synthetic
uggagucucacucugucacucagu

SEQ ID NO: 657226 - RNA, 18 nt, Artificial Sequence
  Synthetic
aaaguucuaugacucagu

SEQ ID NO: 657227 - RNA, 19 nt, Artificial Sequence
  Synthetic
caaaguucuaugacucagu

SEQ ID NO: 657228 - RNA, 20 nt, Artificial Sequence
  Synthetic
ucaaaguucuaugacucagu

SEQ ID NO: 657229 - RNA, 21 nt, Artificial Sequence
  Synthetic
uucaaaguucuaugacucagu

SEQ ID NO: 657230 - RNA, 22 nt, Artificial Sequence
  Synthetic
uuucaaaguucuaugacucagu

SEQ ID NO: 657231 - RNA, 23 nt, Artificial Sequence
  Synthetic
auuucaaaguucuaugacucagu

SEQ ID NO: 657232 - RNA, 24 nt, Artificial Sequence
  Synthetic
aauuucaaaguucuaugacucagu

SEQ ID NO: 657233 - RNA, 18 nt, Artificial Sequence
  Synthetic
uguuugucuuaccucagu

SEQ ID NO: 657234 - RNA, 19 nt, Artificial Sequence
  Synthetic
auguuugucuuaccucagu

SEQ ID NO: 657235 - RNA, 20 nt, Artificial Sequence
  Synthetic
aauguuugucuuaccucagu

SEQ ID NO: 657236 - RNA, 21 nt, Artificial Sequence
  Synthetic
uaauguuugucuuaccucagu

SEQ ID NO: 657237 - RNA, 22 nt, Artificial Sequence
  Synthetic
auaauguuugucuuaccucagu

SEQ ID NO: 657238 - RNA, 23 nt, Artificial Sequence
  Synthetic
aauaauguuugucuuaccucagu

SEQ ID NO: 657239 - RNA, 24 nt, Artificial Sequence
  Synthetic
uaauaauguuugucuuaccucagu

SEQ ID NO: 657240 - RNA, 18 nt, Artificial Sequence
  Synthetic
ccuuuuccucuccucagu

SEQ ID NO: 657241 - RNA, 19 nt, Artificial Sequence
  Synthetic
accuuuuccucuccucagu

SEQ ID NO: 657242 - RNA, 20 nt, Artificial Sequence
  Synthetic
aaccuuuuccucuccucagu

SEQ ID NO: 657243 - RNA, 21 nt, Artificial Sequence
  Synthetic
caaccuuuuccucuccucagu

SEQ ID NO: 657244 - RNA, 22 nt, Artificial Sequence
  Synthetic
acaaccuuuuccucuccucagu

SEQ ID NO: 657245 - RNA, 23 nt, Artificial Sequence
  Synthetic
aacaaccuuuuccucuccucagu

SEQ ID NO: 657246 - RNA, 24 nt, Artificial Sequence
  Synthetic
gaacaaccuuuuccucuccucagu

SEQ ID NO: 657247 - RNA, 18 nt, Artificial Sequence
  Synthetic
augaaaguggcucucagu

SEQ ID NO: 657248 - RNA, 19 nt, Artificial Sequence
  Synthetic
gaugaaaguggcucucagu

SEQ ID NO: 657249 - RNA, 20 nt, Artificial Sequence
  Synthetic
cgaugaaaguggcucucagu

SEQ ID NO: 657250 - RNA, 21 nt, Artificial Sequence
  Synthetic
ccgaugaaaguggcucucagu

SEQ ID NO: 657251 - RNA, 22 nt, Artificial Sequence
  Synthetic
gccgaugaaaguggcucucagu

SEQ ID NO: 657252 - RNA, 23 nt, Artificial Sequence
  Synthetic
ugccgaugaaaguggcucucagu

SEQ ID NO: 657253 - RNA, 24 nt, Artificial Sequence
  Synthetic
cugccgaugaaaguggcucucagu

SEQ ID NO: 657254 - RNA, 18 nt, Artificial Sequence
  Synthetic
guucucuuucuucucagu

SEQ ID NO: 657255 - RNA, 19 nt, Artificial Sequence
  Synthetic
aguucucuuucuucucagu

SEQ ID NO: 657256 - RNA, 20 nt, Artificial Sequence
  Synthetic
gaguucucuuucuucucagu

SEQ ID NO: 657257 - RNA, 21 nt, Artificial Sequence
  Synthetic
ugaguucucuuucuucucagu

SEQ ID NO: 657258 - RNA, 22 nt, Artificial Sequence
  Synthetic
uugaguucucuuucuucucagu

SEQ ID NO: 657259 - RNA, 23 nt, Artificial Sequence
  Synthetic
uuugaguucucuuucuucucagu

SEQ ID NO: 657260 - RNA, 24 nt, Artificial Sequence
  Synthetic
uuuugaguucucuuucuucucagu

SEQ ID NO: 657261 - RNA, 18 nt, Artificial Sequence
  Synthetic
acuucugaauuucucagu

SEQ ID NO: 657262 - RNA, 19 nt, Artificial Sequence
  Synthetic
cacuucugaauuucucagu

SEQ ID NO: 657263 - RNA, 20 nt, Artificial Sequence
  Synthetic
acacuucugaauuucucagu

SEQ ID NO: 657264 - RNA, 21 nt, Artificial Sequence
  Synthetic
cacacuucugaauuucucagu

SEQ ID NO: 657265 - RNA, 22 nt, Artificial Sequence
  Synthetic
ucacacuucugaauuucucagu

SEQ ID NO: 657266 - RNA, 23 nt, Artificial Sequence
  Synthetic
uucacacuucugaauuucucagu

SEQ ID NO: 657267 - RNA, 24 nt, Artificial Sequence
  Synthetic
auucacacuucugaauuucucagu

SEQ ID NO: 657268 - RNA, 18 nt, Artificial Sequence
  Synthetic
aacaccaaauaagucagu

SEQ ID NO: 657269 - RNA, 19 nt, Artificial Sequence
  Synthetic
aaacaccaaauaagucagu

SEQ ID NO: 657270 - RNA, 20 nt, Artificial Sequence
  Synthetic
aaaacaccaaauaagucagu

SEQ ID NO: 657271 - RNA, 21 nt, Artificial Sequence
  Synthetic
gaaaacaccaaauaagucagu

SEQ ID NO: 657272 - RNA, 22 nt, Artificial Sequence
  Synthetic
agaaaacaccaaauaagucagu

SEQ ID NO: 657273 - RNA, 23 nt, Artificial Sequence
  Synthetic
aagaaaacaccaaauaagucagu

SEQ ID NO: 657274 - RNA, 24 nt, Artificial Sequence
  Synthetic
caagaaaacaccaaauaagucagu

SEQ ID NO: 657275 - RNA, 18 nt, Artificial Sequence
  Synthetic
agguaaaguguagucagu

SEQ ID NO: 657276 - RNA, 19 nt, Artificial Sequence
  Synthetic
aagguaaaguguagucagu

SEQ ID NO: 657277 - RNA, 20 nt, Artificial Sequence
  Synthetic
aaagguaaaguguagucagu

SEQ ID NO: 657278 - RNA, 21 nt, Artificial Sequence
  Synthetic
gaaagguaaaguguagucagu

SEQ ID NO: 657279 - RNA, 22 nt, Artificial Sequence
  Synthetic
agaaagguaaaguguagucagu

SEQ ID NO: 657280 - RNA, 23 nt, Artificial Sequence
  Synthetic
uagaaagguaaaguguagucagu

SEQ ID NO: 657281 - RNA, 24 nt, Artificial Sequence
  Synthetic
auagaaagguaaaguguagucagu

SEQ ID NO: 657282 - RNA, 18 nt, Artificial Sequence
  Synthetic
aaagcacagaaggucagu

SEQ ID NO: 657283 - RNA, 19 nt, Artificial Sequence
  Synthetic
caaagcacagaaggucagu

SEQ ID NO: 657284 - RNA, 20 nt, Artificial Sequence
  Synthetic
gcaaagcacagaaggucagu

SEQ ID NO: 657285 - RNA, 21 nt, Artificial Sequence
  Synthetic
ugcaaagcacagaaggucagu

SEQ ID NO: 657286 - RNA, 22 nt, Artificial Sequence
  Synthetic
cugcaaagcacagaaggucagu

SEQ ID NO: 657287 - RNA, 23 nt, Artificial Sequence
  Synthetic
acugcaaagcacagaaggucagu

SEQ ID NO: 657288 - RNA, 24 nt, Artificial Sequence
  Synthetic
uacugcaaagcacagaaggucagu

SEQ ID NO: 657289 - RNA, 18 nt, Artificial Sequence
  Synthetic
gggcuguugcaggucagu

SEQ ID NO: 657290 - RNA, 19 nt, Artificial Sequence
  Synthetic
ugggcuguugcaggucagu

SEQ ID NO: 657291 - RNA, 20 nt, Artificial Sequence
  Synthetic
cugggcuguugcaggucagu

SEQ ID NO: 657292 - RNA, 21 nt, Artificial Sequence
  Synthetic
ccugggcuguugcaggucagu

SEQ ID NO: 657293 - RNA, 22 nt, Artificial Sequence
  Synthetic
gccugggcuguugcaggucagu

SEQ ID NO: 657294 - RNA, 23 nt, Artificial Sequence
  Synthetic
agccugggcuguugcaggucagu

SEQ ID NO: 657295 - RNA, 24 nt, Artificial Sequence
  Synthetic
cagccugggcuguugcaggucagu

SEQ ID NO: 657296 - RNA, 18 nt, Artificial Sequence
  Synthetic
gaauucaaacaugucagu

SEQ ID NO: 657297 - RNA, 19 nt, Artificial Sequence
  Synthetic
ugaauucaaacaugucagu

SEQ ID NO: 657298 - RNA, 20 nt, Artificial Sequence
  Synthetic
augaauucaaacaugucagu

SEQ ID NO: 657299 - RNA, 21 nt, Artificial Sequence
  Synthetic
aaugaauucaaacaugucagu

SEQ ID NO: 657300 - RNA, 22 nt, Artificial Sequence
  Synthetic
aaaugaauucaaacaugucagu

SEQ ID NO: 657301 - RNA, 23 nt, Artificial Sequence
  Synthetic
aaaaugaauucaaacaugucagu

SEQ ID NO: 657302 - RNA, 24 nt, Artificial Sequence
  Synthetic
uaaaaugaauucaaacaugucagu

SEQ ID NO: 657303 - RNA, 18 nt, Artificial Sequence
  Synthetic
aauaaaccucaugucagu

SEQ ID NO: 657304 - RNA, 19 nt, Artificial Sequence
  Synthetic
uaauaaaccucaugucagu

SEQ ID NO: 657305 - RNA, 20 nt, Artificial Sequence
  Synthetic
guaauaaaccucaugucagu

SEQ ID NO: 657306 - RNA, 21 nt, Artificial Sequence
  Synthetic
aguaauaaaccucaugucagu

SEQ ID NO: 657307 - RNA, 22 nt, Artificial Sequence
  Synthetic
uaguaauaaaccucaugucagu

SEQ ID NO: 657308 - RNA, 23 nt, Artificial Sequence
  Synthetic
cuaguaauaaaccucaugucagu

SEQ ID NO: 657309 - RNA, 24 nt, Artificial Sequence
  Synthetic
ccuaguaauaaaccucaugucagu

SEQ ID NO: 657310 - RNA, 18 nt, Artificial Sequence
  Synthetic
gaggccagagcugucagu

SEQ ID NO: 657311 - RNA, 19 nt, Artificial Sequence
  Synthetic
agaggccagagcugucagu

SEQ ID NO: 657312 - RNA, 20 nt, Artificial Sequence
  Synthetic
gagaggccagagcugucagu

SEQ ID NO: 657313 - RNA, 21 nt, Artificial Sequence
  Synthetic
ugagaggccagagcugucagu

SEQ ID NO: 657314 - RNA, 22 nt, Artificial Sequence
  Synthetic
gugagaggccagagcugucagu

SEQ ID NO: 657315 - RNA, 23 nt, Artificial Sequence
  Synthetic
ggugagaggccagagcugucagu

SEQ ID NO: 657316 - RNA, 24 nt, Artificial Sequence
  Synthetic
aggugagaggccagagcugucagu

SEQ ID NO: 657317 - RNA, 18 nt, Artificial Sequence
  Synthetic
gaaguguuguuugucagu

SEQ ID NO: 657318 - RNA, 19 nt, Artificial Sequence
  Synthetic
agaaguguuguuugucagu

SEQ ID NO: 657319 - RNA, 20 nt, Artificial Sequence
  Synthetic
cagaaguguuguuugucagu

SEQ ID NO: 657320 - RNA, 21 nt, Artificial Sequence
  Synthetic
gcagaaguguuguuugucagu

SEQ ID NO: 657321 - RNA, 22 nt, Artificial Sequence
  Synthetic
agcagaaguguuguuugucagu

SEQ ID NO: 657322 - RNA, 23 nt, Artificial Sequence
  Synthetic
gagcagaaguguuguuugucagu

SEQ ID NO: 657323 - RNA, 24 nt, Artificial Sequence
  Synthetic
ugagcagaaguguuguuugucagu

SEQ ID NO: 657324 - RNA, 18 nt, Artificial Sequence
  Synthetic
acuuauacuuaauucagu

SEQ ID NO: 657325 - RNA, 19 nt, Artificial Sequence
  Synthetic
uacuuauacuuaauucagu

SEQ ID NO: 657326 - RNA, 20 nt, Artificial Sequence
  Synthetic
auacuuauacuuaauucagu

SEQ ID NO: 657327 - RNA, 21 nt, Artificial Sequence
  Synthetic
cauacuuauacuuaauucagu

SEQ ID NO: 657328 - RNA, 22 nt, Artificial Sequence
  Synthetic
acauacuuauacuuaauucagu

SEQ ID NO: 657329 - RNA, 23 nt, Artificial Sequence
  Synthetic
cacauacuuauacuuaauucagu

SEQ ID NO: 657330 - RNA, 24 nt, Artificial Sequence
  Synthetic
acacauacuuauacuuaauucagu

SEQ ID NO: 657331 - RNA, 18 nt, Artificial Sequence
  Synthetic
ccauaauguagauucagu

SEQ ID NO: 657332 - RNA, 19 nt, Artificial Sequence
  Synthetic
accauaauguagauucagu

SEQ ID NO: 657333 - RNA, 20 nt, Artificial Sequence
  Synthetic
caccauaauguagauucagu

SEQ ID NO: 657334 - RNA, 21 nt, Artificial Sequence
  Synthetic
ucaccauaauguagauucagu

SEQ ID NO: 657335 - RNA, 22 nt, Artificial Sequence
  Synthetic
cucaccauaauguagauucagu

SEQ ID NO: 657336 - RNA, 23 nt, Artificial Sequence
  Synthetic
acucaccauaauguagauucagu

SEQ ID NO: 657337 - RNA, 24 nt, Artificial Sequence
  Synthetic
aacucaccauaauguagauucagu

SEQ ID NO: 657338 - RNA, 18 nt, Artificial Sequence
  Synthetic
aauagaauauuauucagu

SEQ ID NO: 657339 - RNA, 19 nt, Artificial Sequence
  Synthetic
caauagaauauuauucagu

SEQ ID NO: 657340 - RNA, 20 nt, Artificial Sequence
  Synthetic
ucaauagaauauuauucagu

SEQ ID NO: 657341 - RNA, 21 nt, Artificial Sequence
  Synthetic
aucaauagaauauuauucagu

SEQ ID NO: 657342 - RNA, 22 nt, Artificial Sequence
  Synthetic
uaucaauagaauauuauucagu

SEQ ID NO: 657343 - RNA, 23 nt, Artificial Sequence
  Synthetic
guaucaauagaauauuauucagu

SEQ ID NO: 657344 - RNA, 24 nt, Artificial Sequence
  Synthetic
gguaucaauagaauauuauucagu

SEQ ID NO: 657345 - RNA, 18 nt, Artificial Sequence
  Synthetic
aguauauuauacuucagu

SEQ ID NO: 657346 - RNA, 19 nt, Artificial Sequence
  Synthetic
aaguauauuauacuucagu

SEQ ID NO: 657347 - RNA, 20 nt, Artificial Sequence
  Synthetic
gaaguauauuauacuucagu

SEQ ID NO: 657348 - RNA, 21 nt, Artificial Sequence
  Synthetic
ugaaguauauuauacuucagu

SEQ ID NO: 657349 - RNA, 22 nt, Artificial Sequence
  Synthetic
cugaaguauauuauacuucagu

SEQ ID NO: 657350 - RNA, 23 nt, Artificial Sequence
  Synthetic
acugaaguauauuauacuucagu

SEQ ID NO: 657351 - RNA, 24 nt, Artificial Sequence
  Synthetic
uacugaaguauauuauacuucagu

SEQ ID NO: 657352 - RNA, 18 nt, Artificial Sequence
  Synthetic
cuuuuuuuuugcuucagu

SEQ ID NO: 657353 - RNA, 19 nt, Artificial Sequence
  Synthetic
acuuuuuuuuugcuucagu

SEQ ID NO: 657354 - RNA, 20 nt, Artificial Sequence
  Synthetic
gacuuuuuuuuugcuucagu

SEQ ID NO: 657355 - RNA, 21 nt, Artificial Sequence
  Synthetic
agacuuuuuuuuugcuucagu

SEQ ID NO: 657356 - RNA, 22 nt, Artificial Sequence
  Synthetic
uagacuuuuuuuuugcuucagu

SEQ ID NO: 657357 - RNA, 23 nt, Artificial Sequence
  Synthetic
guagacuuuuuuuuugcuucagu

SEQ ID NO: 657358 - RNA, 24 nt, Artificial Sequence
  Synthetic
uguagacuuuuuuuuugcuucagu

SEQ ID NO: 657359 - RNA, 18 nt, Artificial Sequence
  Synthetic
aaacaaagaaucuucagu

SEQ ID NO: 657360 - RNA, 19 nt, Artificial Sequence
  Synthetic
aaaacaaagaaucuucagu

SEQ ID NO: 657361 - RNA, 20 nt, Artificial Sequence
  Synthetic
gaaaacaaagaaucuucagu

SEQ ID NO: 657362 - RNA, 21 nt, Artificial Sequence
  Synthetic
agaaaacaaagaaucuucagu

SEQ ID NO: 657363 - RNA, 22 nt, Artificial Sequence
  Synthetic
aagaaaacaaagaaucuucagu

SEQ ID NO: 657364 - RNA, 23 nt, Artificial Sequence
  Synthetic
caagaaaacaaagaaucuucagu

SEQ ID NO: 657365 - RNA, 24 nt, Artificial Sequence
  Synthetic
ucaagaaaacaaagaaucuucagu

SEQ ID NO: 657366 - RNA, 18 nt, Artificial Sequence
  Synthetic
uauuugcuuuucuucagu

SEQ ID NO: 657367 - RNA, 19 nt, Artificial Sequence
  Synthetic
uuauuugcuuuucuucagu

SEQ ID NO: 657368 - RNA, 20 nt, Artificial Sequence
  Synthetic
auuauuugcuuuucuucagu

SEQ ID NO: 657369 - RNA, 21 nt, Artificial Sequence
  Synthetic
uauuauuugcuuuucuucagu

SEQ ID NO: 657370 - RNA, 22 nt, Artificial Sequence
  Synthetic
uuauuauuugcuuuucuucagu

SEQ ID NO: 657371 - RNA, 23 nt, Artificial Sequence
  Synthetic
uuuauuauuugcuuuucuucagu

SEQ ID NO: 657372 - RNA, 24 nt, Artificial Sequence
  Synthetic
guuuauuauuugcuuuucuucagu

SEQ ID NO: 657373 - RNA, 18 nt, Artificial Sequence
  Synthetic
ugauaugcaaaguucagu

SEQ ID NO: 657374 - RNA, 19 nt, Artificial Sequence
  Synthetic
uugauaugcaaaguucagu

SEQ ID NO: 657375 - RNA, 20 nt, Artificial Sequence
  Synthetic
uuugauaugcaaaguucagu

SEQ ID NO: 657376 - RNA, 21 nt, Artificial Sequence
  Synthetic
uuuugauaugcaaaguucagu

SEQ ID NO: 657377 - RNA, 22 nt, Artificial Sequence
  Synthetic
cuuuugauaugcaaaguucagu

SEQ ID NO: 657378 - RNA, 23 nt, Artificial Sequence
  Synthetic
ucuuuugauaugcaaaguucagu

SEQ ID NO: 657379 - RNA, 24 nt, Artificial Sequence
  Synthetic
cucuuuugauaugcaaaguucagu

SEQ ID NO: 657380 - RNA, 18 nt, Artificial Sequence
  Synthetic
guucauugaguguucagu

SEQ ID NO: 657381 - RNA, 19 nt, Artificial Sequence
  Synthetic
aguucauugaguguucagu

SEQ ID NO: 657382 - RNA, 20 nt, Artificial Sequence
  Synthetic
aaguucauugaguguucagu

SEQ ID NO: 657383 - RNA, 21 nt, Artificial Sequence
  Synthetic
gaaguucauugaguguucagu

SEQ ID NO: 657384 - RNA, 22 nt, Artificial Sequence
  Synthetic
ugaaguucauugaguguucagu

SEQ ID NO: 657385 - RNA, 23 nt, Artificial Sequence
  Synthetic
uugaaguucauugaguguucagu

SEQ ID NO: 657386 - RNA, 24 nt, Artificial Sequence
  Synthetic
auugaaguucauugaguguucagu

SEQ ID NO: 657387 - RNA, 18 nt, Artificial Sequence
  Synthetic
ggagaauacaauuucagu

SEQ ID NO: 657388 - RNA, 19 nt, Artificial Sequence
  Synthetic
aggagaauacaauuucagu

SEQ ID NO: 657389 - RNA, 20 nt, Artificial Sequence
  Synthetic
aaggagaauacaauuucagu

SEQ ID NO: 657390 - RNA, 21 nt, Artificial Sequence
  Synthetic
aaaggagaauacaauuucagu

SEQ ID NO: 657391 - RNA, 22 nt, Artificial Sequence
  Synthetic
uaaaggagaauacaauuucagu

SEQ ID NO: 657392 - RNA, 23 nt, Artificial Sequence
  Synthetic
cuaaaggagaauacaauuucagu

SEQ ID NO: 657393 - RNA, 24 nt, Artificial Sequence
  Synthetic
ucuaaaggagaauacaauuucagu

SEQ ID NO: 657394 - RNA, 18 nt, Artificial Sequence
  Synthetic
ggaaugcuuaauuucagu

SEQ ID NO: 657395 - RNA, 19 nt, Artificial Sequence
  Synthetic
aggaaugcuuaauuucagu

SEQ ID NO: 657396 - RNA, 20 nt, Artificial Sequence
  Synthetic
aaggaaugcuuaauuucagu

SEQ ID NO: 657397 - RNA, 21 nt, Artificial Sequence
  Synthetic
aaaggaaugcuuaauuucagu

SEQ ID NO: 657398 - RNA, 22 nt, Artificial Sequence
  Synthetic
aaaaggaaugcuuaauuucagu

SEQ ID NO: 657399 - RNA, 23 nt, Artificial Sequence
  Synthetic
gaaaaggaaugcuuaauuucagu

SEQ ID NO: 657400 - RNA, 24 nt, Artificial Sequence
  Synthetic
ugaaaaggaaugcuuaauuucagu

SEQ ID NO: 657401 - RNA, 18 nt, Artificial Sequence
  Synthetic
cuuacagcacauuucagu

SEQ ID NO: 657402 - RNA, 19 nt, Artificial Sequence
  Synthetic
acuuacagcacauuucagu

SEQ ID NO: 657403 - RNA, 20 nt, Artificial Sequence
  Synthetic
uacuuacagcacauuucagu

SEQ ID NO: 657404 - RNA, 21 nt, Artificial Sequence
  Synthetic
auacuuacagcacauuucagu

SEQ ID NO: 657405 - RNA, 22 nt, Artificial Sequence
  Synthetic
uauacuuacagcacauuucagu

SEQ ID NO: 657406 - RNA, 23 nt, Artificial Sequence
  Synthetic
uuauacuuacagcacauuucagu

SEQ ID NO: 657407 - RNA, 24 nt, Artificial Sequence
  Synthetic
uuuauacuuacagcacauuucagu

SEQ ID NO: 657408 - RNA, 18 nt, Artificial Sequence
  Synthetic
gcaguaggggauuucagu

SEQ ID NO: 657409 - RNA, 19 nt, Artificial Sequence
  Synthetic
ggcaguaggggauuucagu

SEQ ID NO: 657410 - RNA, 20 nt, Artificial Sequence
  Synthetic
aggcaguaggggauuucagu

SEQ ID NO: 657411 - RNA, 21 nt, Artificial Sequence
  Synthetic
gaggcaguaggggauuucagu

SEQ ID NO: 657412 - RNA, 22 nt, Artificial Sequence
  Synthetic
agaggcaguaggggauuucagu

SEQ ID NO: 657413 - RNA, 23 nt, Artificial Sequence
  Synthetic
uagaggcaguaggggauuucagu

SEQ ID NO: 657414 - RNA, 24 nt, Artificial Sequence
  Synthetic
auagaggcaguaggggauuucagu

SEQ ID NO: 657415 - RNA, 18 nt, Artificial Sequence
  Synthetic
guaguuucauguuucagu

SEQ ID NO: 657416 - RNA, 19 nt, Artificial Sequence
  Synthetic
uguaguuucauguuucagu

SEQ ID NO: 657417 - RNA, 20 nt, Artificial Sequence
  Synthetic
uuguaguuucauguuucagu

SEQ ID NO: 657418 - RNA, 21 nt, Artificial Sequence
  Synthetic
uuuguaguuucauguuucagu

SEQ ID NO: 657419 - RNA, 22 nt, Artificial Sequence
  Synthetic
cuuuguaguuucauguuucagu

SEQ ID NO: 657420 - RNA, 23 nt, Artificial Sequence
  Synthetic
gcuuuguaguuucauguuucagu

SEQ ID NO: 657421 - RNA, 24 nt, Artificial Sequence
  Synthetic
ggcuuuguaguuucauguuucagu

SEQ ID NO: 657422 - RNA, 18 nt, Artificial Sequence
  Synthetic
auagagaaguguuucagu

SEQ ID NO: 657423 - RNA, 19 nt, Artificial Sequence
  Synthetic
cauagagaaguguuucagu

SEQ ID NO: 657424 - RNA, 20 nt, Artificial Sequence
  Synthetic
ucauagagaaguguuucagu

SEQ ID NO: 657425 - RNA, 21 nt, Artificial Sequence
  Synthetic
uucauagagaaguguuucagu

SEQ ID NO: 657426 - RNA, 22 nt, Artificial Sequence
  Synthetic
uuucauagagaaguguuucagu

SEQ ID NO: 657427 - RNA, 23 nt, Artificial Sequence
  Synthetic
auuucauagagaaguguuucagu

SEQ ID NO: 657428 - RNA, 24 nt, Artificial Sequence
  Synthetic
gauuucauagagaaguguuucagu

SEQ ID NO: 657429 - RNA, 18 nt, Artificial Sequence
  Synthetic
uguaggauuuuuuucagu

SEQ ID NO: 657430 - RNA, 19 nt, Artificial Sequence
  Synthetic
auguaggauuuuuuucagu

SEQ ID NO: 657431 - RNA, 20 nt, Artificial Sequence
  Synthetic
uauguaggauuuuuuucagu

SEQ ID NO: 657432 - RNA, 21 nt, Artificial Sequence
  Synthetic
auauguaggauuuuuuucagu

SEQ ID NO: 657433 - RNA, 22 nt, Artificial Sequence
  Synthetic
cauauguaggauuuuuuucagu

SEQ ID NO: 657434 - RNA, 23 nt, Artificial Sequence
  Synthetic
ccauauguaggauuuuuuucagu

SEQ ID NO: 657435 - RNA, 24 nt, Artificial Sequence
  Synthetic
uccauauguaggauuuuuuucagu

SEQ ID NO: 657436 - RNA, 21 nt, Artificial Sequence
  Synthetic
ugcuggccucauaaaaagagu

SEQ ID NO: 657437 - RNA, 22 nt, Artificial Sequence
  Synthetic
augcuggccucauaaaaagagu

SEQ ID NO: 657438 - RNA, 23 nt, Artificial Sequence
  Synthetic
gaugcuggccucauaaaaagagu

SEQ ID NO: 657439 - RNA, 24 nt, Artificial Sequence
  Synthetic
ugaugcuggccucauaaaaagagu

SEQ ID NO: 657440 - RNA, 18 nt, Artificial Sequence
  Synthetic
gugaauuaccaaaagagu

SEQ ID NO: 657441 - RNA, 19 nt, Artificial Sequence
  Synthetic
ggugaauuaccaaaagagu

SEQ ID NO: 657442 - RNA, 20 nt, Artificial Sequence
  Synthetic
aggugaauuaccaaaagagu

SEQ ID NO: 657443 - RNA, 21 nt, Artificial Sequence
  Synthetic
gaggugaauuaccaaaagagu

SEQ ID NO: 657444 - RNA, 22 nt, Artificial Sequence
  Synthetic
ggaggugaauuaccaaaagagu

SEQ ID NO: 657445 - RNA, 23 nt, Artificial Sequence
  Synthetic
uggaggugaauuaccaaaagagu

SEQ ID NO: 657446 - RNA, 24 nt, Artificial Sequence
  Synthetic
cuggaggugaauuaccaaaagagu

SEQ ID NO: 657447 - RNA, 18 nt, Artificial Sequence
  Synthetic
ccugucccugaaaagagu

SEQ ID NO: 657448 - RNA, 19 nt, Artificial Sequence
  Synthetic
uccugucccugaaaagagu

SEQ ID NO: 657449 - RNA, 20 nt, Artificial Sequence
  Synthetic
uuccugucccugaaaagagu

SEQ ID NO: 657450 - RNA, 21 nt, Artificial Sequence
  Synthetic
uuuccugucccugaaaagagu

SEQ ID NO: 657451 - RNA, 22 nt, Artificial Sequence
  Synthetic
uuuuccugucccugaaaagagu

SEQ ID NO: 657452 - RNA, 23 nt, Artificial Sequence
  Synthetic
uuuuuccugucccugaaaagagu

SEQ ID NO: 657453 - RNA, 24 nt, Artificial Sequence
  Synthetic
auuuuuccugucccugaaaagagu

SEQ ID NO: 657454 - RNA, 18 nt, Artificial Sequence
  Synthetic
guuuagggugaaaagagu

SEQ ID NO: 657455 - RNA, 19 nt, Artificial Sequence
  Synthetic
uguuuagggugaaaagagu

SEQ ID NO: 657456 - RNA, 20 nt, Artificial Sequence
  Synthetic
guguuuagggugaaaagagu

SEQ ID NO: 657457 - RNA, 21 nt, Artificial Sequence
  Synthetic
gguguuuagggugaaaagagu

SEQ ID NO: 657458 - RNA, 22 nt, Artificial Sequence
  Synthetic
agguguuuagggugaaaagagu

SEQ ID NO: 657459 - RNA, 23 nt, Artificial Sequence
  Synthetic
aagguguuuagggugaaaagagu

SEQ ID NO: 657460 - RNA, 24 nt, Artificial Sequence
  Synthetic
aaagguguuuagggugaaaagagu

SEQ ID NO: 657461 - RNA, 18 nt, Artificial Sequence
  Synthetic
gugcagaguacaaagagu

SEQ ID NO: 657462 - RNA, 19 nt, Artificial Sequence
  Synthetic
agugcagaguacaaagagu

SEQ ID NO: 657463 - RNA, 20 nt, Artificial Sequence
  Synthetic
gagugcagaguacaaagagu

SEQ ID NO: 657464 - RNA, 21 nt, Artificial Sequence
  Synthetic
agagugcagaguacaaagagu

SEQ ID NO: 657465 - RNA, 22 nt, Artificial Sequence
  Synthetic
aagagugcagaguacaaagagu

SEQ ID NO: 657466 - RNA, 23 nt, Artificial Sequence
  Synthetic
aaagagugcagaguacaaagagu

SEQ ID NO: 657467 - RNA, 24 nt, Artificial Sequence
  Synthetic
aaaagagugcagaguacaaagagu

SEQ ID NO: 657468 - RNA, 18 nt, Artificial Sequence
  Synthetic
uauauaaaaucaaagagu

SEQ ID NO: 657469 - RNA, 19 nt, Artificial Sequence
  Synthetic
auauauaaaaucaaagagu

SEQ ID NO: 657470 - RNA, 20 nt, Artificial Sequence
  Synthetic
uauauauaaaaucaaagagu

SEQ ID NO: 657471 - RNA, 21 nt, Artificial Sequence
  Synthetic
auauauauaaaaucaaagagu

SEQ ID NO: 657472 - RNA, 22 nt, Artificial Sequence
  Synthetic
uauauauauaaaaucaaagagu

SEQ ID NO: 657473 - RNA, 23 nt, Artificial Sequence
  Synthetic
auauauauauaaaaucaaagagu

SEQ ID NO: 657474 - RNA, 24 nt, Artificial Sequence
  Synthetic
uauauauauauaaaaucaaagagu

SEQ ID NO: 657475 - RNA, 18 nt, Artificial Sequence
  Synthetic
agcaauaaaucaaagagu

SEQ ID NO: 657476 - RNA, 19 nt, Artificial Sequence
  Synthetic
gagcaauaaaucaaagagu

SEQ ID NO: 657477 - RNA, 20 nt, Artificial Sequence
  Synthetic
ugagcaauaaaucaaagagu

SEQ ID NO: 657478 - RNA, 21 nt, Artificial Sequence
  Synthetic
gugagcaauaaaucaaagagu

SEQ ID NO: 657479 - RNA, 22 nt, Artificial Sequence
  Synthetic
ugugagcaauaaaucaaagagu

SEQ ID NO: 657480 - RNA, 23 nt, Artificial Sequence
  Synthetic
augugagcaauaaaucaaagagu

SEQ ID NO: 657481 - RNA, 24 nt, Artificial Sequence
  Synthetic
uaugugagcaauaaaucaaagagu

SEQ ID NO: 657482 - RNA, 18 nt, Artificial Sequence
  Synthetic
gagugguugagaaagagu

SEQ ID NO: 657483 - RNA, 19 nt, Artificial Sequence
  Synthetic
agagugguugagaaagagu

SEQ ID NO: 657484 - RNA, 20 nt, Artificial Sequence
  Synthetic
cagagugguugagaaagagu

SEQ ID NO: 657485 - RNA, 21 nt, Artificial Sequence
  Synthetic
gcagagugguugagaaagagu

SEQ ID NO: 657486 - RNA, 22 nt, Artificial Sequence
  Synthetic
agcagagugguugagaaagagu

SEQ ID NO: 657487 - RNA, 23 nt, Artificial Sequence
  Synthetic
cagcagagugguugagaaagagu

SEQ ID NO: 657488 - RNA, 24 nt, Artificial Sequence
  Synthetic
acagcagagugguugagaaagagu

SEQ ID NO: 657489 - RNA, 18 nt, Artificial Sequence
  Synthetic
aaaugaagggacaagagu

SEQ ID NO: 657490 - RNA, 19 nt, Artificial Sequence
  Synthetic
aaaaugaagggacaagagu

SEQ ID NO: 657491 - RNA, 20 nt, Artificial Sequence
  Synthetic
aaaaaugaagggacaagagu

SEQ ID NO: 657492 - RNA, 21 nt, Artificial Sequence
  Synthetic
gaaaaaugaagggacaagagu

SEQ ID NO: 657493 - RNA, 22 nt, Artificial Sequence
  Synthetic
ggaaaaaugaagggacaagagu

SEQ ID NO: 657494 - RNA, 23 nt, Artificial Sequence
  Synthetic
gggaaaaaugaagggacaagagu

SEQ ID NO: 657495 - RNA, 24 nt, Artificial Sequence
  Synthetic
ugggaaaaaugaagggacaagagu

SEQ ID NO: 657496 - RNA, 18 nt, Artificial Sequence
  Synthetic
aaauaaagguacaagagu

SEQ ID NO: 657497 - RNA, 19 nt, Artificial Sequence
  Synthetic
aaaauaaagguacaagagu

SEQ ID NO: 657498 - RNA, 20 nt, Artificial Sequence
  Synthetic
uaaaauaaagguacaagagu

SEQ ID NO: 657499 - RNA, 21 nt, Artificial Sequence
  Synthetic
auaaaauaaagguacaagagu

SEQ ID NO: 657500 - RNA, 22 nt, Artificial Sequence
  Synthetic
aauaaaauaaagguacaagagu

SEQ ID NO: 657501 - RNA, 23 nt, Artificial Sequence
  Synthetic
aaauaaaauaaagguacaagagu

SEQ ID NO: 657502 - RNA, 24 nt, Artificial Sequence
  Synthetic
aaaauaaaauaaagguacaagagu

SEQ ID NO: 657503 - RNA, 18 nt, Artificial Sequence
  Synthetic
ucgcuugaguccaagagu

SEQ ID NO: 657504 - RNA, 19 nt, Artificial Sequence
  Synthetic
aucgcuugaguccaagagu

SEQ ID NO: 657505 - RNA, 20 nt, Artificial Sequence
  Synthetic
gaucgcuugaguccaagagu

SEQ ID NO: 657506 - RNA, 21 nt, Artificial Sequence
  Synthetic
ggaucgcuugaguccaagagu

SEQ ID NO: 657507 - RNA, 22 nt, Artificial Sequence
  Synthetic
uggaucgcuugaguccaagagu

SEQ ID NO: 657508 - RNA, 23 nt, Artificial Sequence
  Synthetic
guggaucgcuugaguccaagagu

SEQ ID NO: 657509 - RNA, 24 nt, Artificial Sequence
  Synthetic
aguggaucgcuugaguccaagagu

SEQ ID NO: 657510 - RNA, 18 nt, Artificial Sequence
  Synthetic
uuaauuggaugcaagagu

SEQ ID NO: 657511 - RNA, 19 nt, Artificial Sequence
  Synthetic
uuuaauuggaugcaagagu

SEQ ID NO: 657512 - RNA, 20 nt, Artificial Sequence
  Synthetic
guuuaauuggaugcaagagu

SEQ ID NO: 657513 - RNA, 21 nt, Artificial Sequence
  Synthetic
uguuuaauuggaugcaagagu

SEQ ID NO: 657514 - RNA, 22 nt, Artificial Sequence
  Synthetic
uuguuuaauuggaugcaagagu

SEQ ID NO: 657515 - RNA, 23 nt, Artificial Sequence
  Synthetic
auuguuuaauuggaugcaagagu

SEQ ID NO: 657516 - RNA, 24 nt, Artificial Sequence
  Synthetic
cauuguuuaauuggaugcaagagu

SEQ ID NO: 657517 - RNA, 18 nt, Artificial Sequence
  Synthetic
ucaccugaagucaagagu

SEQ ID NO: 657518 - RNA, 19 nt, Artificial Sequence
  Synthetic
aucaccugaagucaagagu

SEQ ID NO: 657519 - RNA, 20 nt, Artificial Sequence
  Synthetic
gaucaccugaagucaagagu

SEQ ID NO: 657520 - RNA, 21 nt, Artificial Sequence
  Synthetic
ggaucaccugaagucaagagu

SEQ ID NO: 657521 - RNA, 22 nt, Artificial Sequence
  Synthetic
uggaucaccugaagucaagagu

SEQ ID NO: 657522 - RNA, 23 nt, Artificial Sequence
  Synthetic
guggaucaccugaagucaagagu

SEQ ID NO: 657523 - RNA, 24 nt, Artificial Sequence
  Synthetic
gguggaucaccugaagucaagagu

SEQ ID NO: 657524 - RNA, 18 nt, Artificial Sequence
  Synthetic
auuuuuuuauucaagagu

SEQ ID NO: 657525 - RNA, 19 nt, Artificial Sequence
  Synthetic
gauuuuuuuauucaagagu

SEQ ID NO: 657526 - RNA, 20 nt, Artificial Sequence
  Synthetic
ggauuuuuuuauucaagagu

SEQ ID NO: 657527 - RNA, 21 nt, Artificial Sequence
  Synthetic
uggauuuuuuuauucaagagu

SEQ ID NO: 657528 - RNA, 22 nt, Artificial Sequence
  Synthetic
cuggauuuuuuuauucaagagu

SEQ ID NO: 657529 - RNA, 23 nt, Artificial Sequence
  Synthetic
ucuggauuuuuuuauucaagagu

SEQ ID NO: 657530 - RNA, 24 nt, Artificial Sequence
  Synthetic
uucuggauuuuuuuauucaagagu

SEQ ID NO: 657531 - RNA, 18 nt, Artificial Sequence
  Synthetic
cggacagugaggaagagu

SEQ ID NO: 657532 - RNA, 19 nt, Artificial Sequence
  Synthetic
acggacagugaggaagagu

SEQ ID NO: 657533 - RNA, 20 nt, Artificial Sequence
  Synthetic
gacggacagugaggaagagu

SEQ ID NO: 657534 - RNA, 21 nt, Artificial Sequence
  Synthetic
ugacggacagugaggaagagu

SEQ ID NO: 657535 - RNA, 22 nt, Artificial Sequence
  Synthetic
uugacggacagugaggaagagu

SEQ ID NO: 657536 - RNA, 23 nt, Artificial Sequence
  Synthetic
guugacggacagugaggaagagu

SEQ ID NO: 657537 - RNA, 24 nt, Artificial Sequence
  Synthetic
aguugacggacagugaggaagagu

SEQ ID NO: 657538 - RNA, 18 nt, Artificial Sequence
  Synthetic
uccuuacuggugaagagu

SEQ ID NO: 657539 - RNA, 19 nt, Artificial Sequence
  Synthetic
guccuuacuggugaagagu

SEQ ID NO: 657540 - RNA, 20 nt, Artificial Sequence
  Synthetic
aguccuuacuggugaagagu

SEQ ID NO: 657541 - RNA, 21 nt, Artificial Sequence
  Synthetic
aaguccuuacuggugaagagu

SEQ ID NO: 657542 - RNA, 22 nt, Artificial Sequence
  Synthetic
uaaguccuuacuggugaagagu

SEQ ID NO: 657543 - RNA, 23 nt, Artificial Sequence
  Synthetic
cuaaguccuuacuggugaagagu

SEQ ID NO: 657544 - RNA, 24 nt, Artificial Sequence
  Synthetic
ccuaaguccuuacuggugaagagu

SEQ ID NO: 657545 - RNA, 18 nt, Artificial Sequence
  Synthetic
uuacaauguuuuaagagu

SEQ ID NO: 657546 - RNA, 19 nt, Artificial Sequence
  Synthetic
guuacaauguuuuaagagu

SEQ ID NO: 657547 - RNA, 20 nt, Artificial Sequence
  Synthetic
gguuacaauguuuuaagagu

SEQ ID NO: 657548 - RNA, 21 nt, Artificial Sequence
  Synthetic
ggguuacaauguuuuaagagu

SEQ ID NO: 657549 - RNA, 22 nt, Artificial Sequence
  Synthetic
uggguuacaauguuuuaagagu

SEQ ID NO: 657550 - RNA, 23 nt, Artificial Sequence
  Synthetic
auggguuacaauguuuuaagagu

SEQ ID NO: 657551 - RNA, 24 nt, Artificial Sequence
  Synthetic
aauggguuacaauguuuuaagagu

SEQ ID NO: 657552 - RNA, 18 nt, Artificial Sequence
  Synthetic
guucuuggaacacagagu

SEQ ID NO: 657553 - RNA, 19 nt, Artificial Sequence
  Synthetic
aguucuuggaacacagagu

SEQ ID NO: 657554 - RNA, 20 nt, Artificial Sequence
  Synthetic
caguucuuggaacacagagu

SEQ ID NO: 657555 - RNA, 21 nt, Artificial Sequence
  Synthetic
ucaguucuuggaacacagagu

SEQ ID NO: 657556 - RNA, 22 nt, Artificial Sequence
  Synthetic
gucaguucuuggaacacagagu

SEQ ID NO: 657557 - RNA, 23 nt, Artificial Sequence
  Synthetic
ugucaguucuuggaacacagagu

SEQ ID NO: 657558 - RNA, 24 nt, Artificial Sequence
  Synthetic
cugucaguucuuggaacacagagu

SEQ ID NO: 657559 - RNA, 18 nt, Artificial Sequence
  Synthetic
uacacaugcgcacagagu

SEQ ID NO: 657560 - RNA, 19 nt, Artificial Sequence
  Synthetic
guacacaugcgcacagagu

SEQ ID NO: 657561 - RNA, 20 nt, Artificial Sequence
  Synthetic
uguacacaugcgcacagagu

SEQ ID NO: 657562 - RNA, 21 nt, Artificial Sequence
  Synthetic
guguacacaugcgcacagagu

SEQ ID NO: 657563 - RNA, 22 nt, Artificial Sequence
  Synthetic
uguguacacaugcgcacagagu

SEQ ID NO: 657564 - RNA, 23 nt, Artificial Sequence
  Synthetic
auguguacacaugcgcacagagu

SEQ ID NO: 657565 - RNA, 24 nt, Artificial Sequence
  Synthetic
aauguguacacaugcgcacagagu

SEQ ID NO: 657566 - RNA, 18 nt, Artificial Sequence
  Synthetic
gugcaugggggacagagu

SEQ ID NO: 657567 - RNA, 19 nt, Artificial Sequence
  Synthetic
ugugcaugggggacagagu

SEQ ID NO: 657568 - RNA, 20 nt, Artificial Sequence
  Synthetic
cugugcaugggggacagagu

SEQ ID NO: 657569 - RNA, 21 nt, Artificial Sequence
  Synthetic
ucugugcaugggggacagagu

SEQ ID NO: 657570 - RNA, 22 nt, Artificial Sequence
  Synthetic
uucugugcaugggggacagagu

SEQ ID NO: 657571 - RNA, 23 nt, Artificial Sequence
  Synthetic
guucugugcaugggggacagagu

SEQ ID NO: 657572 - RNA, 24 nt, Artificial Sequence
  Synthetic
uguucugugcaugggggacagagu

SEQ ID NO: 657573 - RNA, 18 nt, Artificial Sequence
  Synthetic
gggaggaagauacagagu

SEQ ID NO: 657574 - RNA, 19 nt, Artificial Sequence
  Synthetic
ggggaggaagauacagagu

SEQ ID NO: 657575 - RNA, 20 nt, Artificial Sequence
  Synthetic
uggggaggaagauacagagu

SEQ ID NO: 657576 - RNA, 21 nt, Artificial Sequence
  Synthetic
cuggggaggaagauacagagu

SEQ ID NO: 657577 - RNA, 22 nt, Artificial Sequence
  Synthetic
gcuggggaggaagauacagagu

SEQ ID NO: 657578 - RNA, 23 nt, Artificial Sequence
  Synthetic
agcuggggaggaagauacagagu

SEQ ID NO: 657579 - RNA, 24 nt, Artificial Sequence
  Synthetic
uagcuggggaggaagauacagagu

SEQ ID NO: 657580 - RNA, 18 nt, Artificial Sequence
  Synthetic
uucauggaguuacagagu

SEQ ID NO: 657581 - RNA, 19 nt, Artificial Sequence
  Synthetic
cuucauggaguuacagagu

SEQ ID NO: 657582 - RNA, 20 nt, Artificial Sequence
  Synthetic
ucuucauggaguuacagagu

SEQ ID NO: 657583 - RNA, 21 nt, Artificial Sequence
  Synthetic
cucuucauggaguuacagagu

SEQ ID NO: 657584 - RNA, 22 nt, Artificial Sequence
  Synthetic
ucucuucauggaguuacagagu

SEQ ID NO: 657585 - RNA, 23 nt, Artificial Sequence
  Synthetic
aucucuucauggaguuacagagu

SEQ ID NO: 657586 - RNA, 24 nt, Artificial Sequence
  Synthetic
aaucucuucauggaguuacagagu

SEQ ID NO: 657587 - RNA, 18 nt, Artificial Sequence
  Synthetic
gugauaaaaguccagagu

SEQ ID NO: 657588 - RNA, 19 nt, Artificial Sequence
  Synthetic
agugauaaaaguccagagu

SEQ ID NO: 657589 - RNA, 20 nt, Artificial Sequence
  Synthetic
aagugauaaaaguccagagu

SEQ ID NO: 657590 - RNA, 21 nt, Artificial Sequence
  Synthetic
aaagugauaaaaguccagagu

SEQ ID NO: 657591 - RNA, 22 nt, Artificial Sequence
  Synthetic
uaaagugauaaaaguccagagu

SEQ ID NO: 657592 - RNA, 23 nt, Artificial Sequence
  Synthetic
uuaaagugauaaaaguccagagu

SEQ ID NO: 657593 - RNA, 24 nt, Artificial Sequence
  Synthetic
cuuaaagugauaaaaguccagagu

SEQ ID NO: 657594 - RNA, 18 nt, Artificial Sequence
  Synthetic
aguacauuuuagcagagu

SEQ ID NO: 657595 - RNA, 19 nt, Artificial Sequence
  Synthetic
aaguacauuuuagcagagu

SEQ ID NO: 657596 - RNA, 20 nt, Artificial Sequence
  Synthetic
aaaguacauuuuagcagagu

SEQ ID NO: 657597 - RNA, 21 nt, Artificial Sequence
  Synthetic
uaaaguacauuuuagcagagu

SEQ ID NO: 657598 - RNA, 22 nt, Artificial Sequence
  Synthetic
uuaaaguacauuuuagcagagu

SEQ ID NO: 657599 - RNA, 23 nt, Artificial Sequence
  Synthetic
cuuaaaguacauuuuagcagagu

SEQ ID NO: 657600 - RNA, 24 nt, Artificial Sequence
  Synthetic
ucuuaaaguacauuuuagcagagu

SEQ ID NO: 657601 - RNA, 18 nt, Artificial Sequence
  Synthetic
guuuugauaaugcagagu

SEQ ID NO: 657602 - RNA, 19 nt, Artificial Sequence
  Synthetic
cguuuugauaaugcagagu

SEQ ID NO: 657603 - RNA, 20 nt, Artificial Sequence
  Synthetic
ucguuuugauaaugcagagu

SEQ ID NO: 657604 - RNA, 21 nt, Artificial Sequence
  Synthetic
gucguuuugauaaugcagagu

SEQ ID NO: 657605 - RNA, 22 nt, Artificial Sequence
  Synthetic
ugucguuuugauaaugcagagu

SEQ ID NO: 657606 - RNA, 23 nt, Artificial Sequence
  Synthetic
cugucguuuugauaaugcagagu

SEQ ID NO: 657607 - RNA, 24 nt, Artificial Sequence
  Synthetic
gcugucguuuugauaaugcagagu

SEQ ID NO: 657608 - RNA, 18 nt, Artificial Sequence
  Synthetic
agucugaagaaucagagu

SEQ ID NO: 657609 - RNA, 19 nt, Artificial Sequence
  Synthetic
uagucugaagaaucagagu

SEQ ID NO: 657610 - RNA, 20 nt, Artificial Sequence
  Synthetic
cuagucugaagaaucagagu

SEQ ID NO: 657611 - RNA, 21 nt, Artificial Sequence
  Synthetic
ucuagucugaagaaucagagu

SEQ ID NO: 657612 - RNA, 22 nt, Artificial Sequence
  Synthetic
uucuagucugaagaaucagagu

SEQ ID NO: 657613 - RNA, 23 nt, Artificial Sequence
  Synthetic
uuucuagucugaagaaucagagu

SEQ ID NO: 657614 - RNA, 24 nt, Artificial Sequence
  Synthetic
auuucuagucugaagaaucagagu

SEQ ID NO: 657615 - RNA, 18 nt, Artificial Sequence
  Synthetic
caaaggugaggucagagu

SEQ ID NO: 657616 - RNA, 19 nt, Artificial Sequence
  Synthetic
acaaaggugaggucagagu

SEQ ID NO: 657617 - RNA, 20 nt, Artificial Sequence
  Synthetic
aacaaaggugaggucagagu

SEQ ID NO: 657618 - RNA, 21 nt, Artificial Sequence
  Synthetic
aaacaaaggugaggucagagu

SEQ ID NO: 657619 - RNA, 22 nt, Artificial Sequence
  Synthetic
uaaacaaaggugaggucagagu

SEQ ID NO: 657620 - RNA, 23 nt, Artificial Sequence
  Synthetic
guaaacaaaggugaggucagagu

SEQ ID NO: 657621 - RNA, 24 nt, Artificial Sequence
  Synthetic
uguaaacaaaggugaggucagagu

SEQ ID NO: 657622 - RNA, 18 nt, Artificial Sequence
  Synthetic
cacaaguuuauucagagu

SEQ ID NO: 657623 - RNA, 19 nt, Artificial Sequence
  Synthetic
ucacaaguuuauucagagu

SEQ ID NO: 657624 - RNA, 20 nt, Artificial Sequence
  Synthetic
aucacaaguuuauucagagu

SEQ ID NO: 657625 - RNA, 21 nt, Artificial Sequence
  Synthetic
uaucacaaguuuauucagagu

SEQ ID NO: 657626 - RNA, 22 nt, Artificial Sequence
  Synthetic
auaucacaaguuuauucagagu

SEQ ID NO: 657627 - RNA, 23 nt, Artificial Sequence
  Synthetic
gauaucacaaguuuauucagagu

SEQ ID NO: 657628 - RNA, 24 nt, Artificial Sequence
  Synthetic
agauaucacaaguuuauucagagu

SEQ ID NO: 657629 - RNA, 18 nt, Artificial Sequence
  Synthetic
aacagagacuuucagagu

SEQ ID NO: 657630 - RNA, 19 nt, Artificial Sequence
  Synthetic
aaacagagacuuucagagu

SEQ ID NO: 657631 - RNA, 20 nt, Artificial Sequence
  Synthetic
uaaacagagacuuucagagu

SEQ ID NO: 657632 - RNA, 21 nt, Artificial Sequence
  Synthetic
auaaacagagacuuucagagu

SEQ ID NO: 657633 - RNA, 22 nt, Artificial Sequence
  Synthetic
gauaaacagagacuuucagagu

SEQ ID NO: 657634 - RNA, 23 nt, Artificial Sequence
  Synthetic
ggauaaacagagacuuucagagu

SEQ ID NO: 657635 - RNA, 24 nt, Artificial Sequence
  Synthetic
aggauaaacagagacuuucagagu

SEQ ID NO: 657636 - RNA, 18 nt, Artificial Sequence
  Synthetic
ggaaaaaaguaagagagu

SEQ ID NO: 657637 - RNA, 19 nt, Artificial Sequence
  Synthetic
aggaaaaaaguaagagagu

SEQ ID NO: 657638 - RNA, 20 nt, Artificial Sequence
  Synthetic
caggaaaaaaguaagagagu

SEQ ID NO: 657639 - RNA, 21 nt, Artificial Sequence
  Synthetic
ccaggaaaaaaguaagagagu

SEQ ID NO: 657640 - RNA, 22 nt, Artificial Sequence
  Synthetic
gccaggaaaaaaguaagagagu

SEQ ID NO: 657641 - RNA, 23 nt, Artificial Sequence
  Synthetic
agccaggaaaaaaguaagagagu

SEQ ID NO: 657642 - RNA, 24 nt, Artificial Sequence
  Synthetic
gagccaggaaaaaaguaagagagu

SEQ ID NO: 657643 - RNA, 18 nt, Artificial Sequence
  Synthetic
cgaaguuccccagagagu

SEQ ID NO: 657644 - RNA, 19 nt, Artificial Sequence
  Synthetic
ccgaaguuccccagagagu

SEQ ID NO: 657645 - RNA, 20 nt, Artificial Sequence
  Synthetic
cccgaaguuccccagagagu

SEQ ID NO: 657646 - RNA, 21 nt, Artificial Sequence
  Synthetic
acccgaaguuccccagagagu

SEQ ID NO: 657647 - RNA, 22 nt, Artificial Sequence
  Synthetic
aacccgaaguuccccagagagu

SEQ ID NO: 657648 - RNA, 23 nt, Artificial Sequence
  Synthetic
aaacccgaaguuccccagagagu

SEQ ID NO: 657649 - RNA, 24 nt, Artificial Sequence
  Synthetic
gaaacccgaaguuccccagagagu

SEQ ID NO: 657650 - RNA, 18 nt, Artificial Sequence
  Synthetic
caaacaugugcagagagu

SEQ ID NO: 657651 - RNA, 19 nt, Artificial Sequence
  Synthetic
acaaacaugugcagagagu

SEQ ID NO: 657652 - RNA, 20 nt, Artificial Sequence
  Synthetic
uacaaacaugugcagagagu

SEQ ID NO: 657653 - RNA, 21 nt, Artificial Sequence
  Synthetic
uuacaaacaugugcagagagu

SEQ ID NO: 657654 - RNA, 22 nt, Artificial Sequence
  Synthetic
guuacaaacaugugcagagagu

SEQ ID NO: 657655 - RNA, 23 nt, Artificial Sequence
  Synthetic
gguuacaaacaugugcagagagu

SEQ ID NO: 657656 - RNA, 24 nt, Artificial Sequence
  Synthetic
agguuacaaacaugugcagagagu

SEQ ID NO: 657657 - RNA, 18 nt, Artificial Sequence
  Synthetic
acaaaugcuggagagagu

SEQ ID NO: 657658 - RNA, 19 nt, Artificial Sequence
  Synthetic
uacaaaugcuggagagagu

SEQ ID NO: 657659 - RNA, 20 nt, Artificial Sequence
  Synthetic
uuacaaaugcuggagagagu

SEQ ID NO: 657660 - RNA, 21 nt, Artificial Sequence
  Synthetic
auuacaaaugcuggagagagu

SEQ ID NO: 657661 - RNA, 22 nt, Artificial Sequence
  Synthetic
aauuacaaaugcuggagagagu

SEQ ID NO: 657662 - RNA, 23 nt, Artificial Sequence
  Synthetic
caauuacaaaugcuggagagagu

SEQ ID NO: 657663 - RNA, 24 nt, Artificial Sequence
  Synthetic
gcaauuacaaaugcuggagagagu

SEQ ID NO: 657664 - RNA, 18 nt, Artificial Sequence
  Synthetic
ccgaaauauuuagagagu

SEQ ID NO: 657665 - RNA, 19 nt, Artificial Sequence
  Synthetic
uccgaaauauuuagagagu

SEQ ID NO: 657666 - RNA, 20 nt, Artificial Sequence
  Synthetic
uuccgaaauauuuagagagu

SEQ ID NO: 657667 - RNA, 21 nt, Artificial Sequence
  Synthetic
auuccgaaauauuuagagagu

SEQ ID NO: 657668 - RNA, 22 nt, Artificial Sequence
  Synthetic
aauuccgaaauauuuagagagu

SEQ ID NO: 657669 - RNA, 23 nt, Artificial Sequence
  Synthetic
aaauuccgaaauauuuagagagu

SEQ ID NO: 657670 - RNA, 24 nt, Artificial Sequence
  Synthetic
uaaauuccgaaauauuuagagagu

SEQ ID NO: 657671 - RNA, 18 nt, Artificial Sequence
  Synthetic
auacucauaugggagagu

SEQ ID NO: 657672 - RNA, 19 nt, Artificial Sequence
  Synthetic
cauacucauaugggagagu

SEQ ID NO: 657673 - RNA, 20 nt, Artificial Sequence
  Synthetic
acauacucauaugggagagu

SEQ ID NO: 657674 - RNA, 21 nt, Artificial Sequence
  Synthetic
uacauacucauaugggagagu

SEQ ID NO: 657675 - RNA, 22 nt, Artificial Sequence
  Synthetic
guacauacucauaugggagagu

SEQ ID NO: 657676 - RNA, 23 nt, Artificial Sequence
  Synthetic
gguacauacucauaugggagagu

SEQ ID NO: 657677 - RNA, 24 nt, Artificial Sequence
  Synthetic
ggguacauacucauaugggagagu

SEQ ID NO: 657678 - RNA, 18 nt, Artificial Sequence
  Synthetic
uguaaggaaguggagagu

SEQ ID NO: 657679 - RNA, 19 nt, Artificial Sequence
  Synthetic
guguaaggaaguggagagu

SEQ ID NO: 657680 - RNA, 20 nt, Artificial Sequence
  Synthetic
aguguaaggaaguggagagu

SEQ ID NO: 657681 - RNA, 21 nt, Artificial Sequence
  Synthetic
caguguaaggaaguggagagu

SEQ ID NO: 657682 - RNA, 22 nt, Artificial Sequence
  Synthetic
gcaguguaaggaaguggagagu

SEQ ID NO: 657683 - RNA, 23 nt, Artificial Sequence
  Synthetic
cgcaguguaaggaaguggagagu

SEQ ID NO: 657684 - RNA, 24 nt, Artificial Sequence
  Synthetic
acgcaguguaaggaaguggagagu

SEQ ID NO: 657685 - RNA, 18 nt, Artificial Sequence
  Synthetic
agaagagaauaugagagu

SEQ ID NO: 657686 - RNA, 19 nt, Artificial Sequence
  Synthetic
aagaagagaauaugagagu

SEQ ID NO: 657687 - RNA, 20 nt, Artificial Sequence
  Synthetic
gaagaagagaauaugagagu

SEQ ID NO: 657688 - RNA, 21 nt, Artificial Sequence
  Synthetic
agaagaagagaauaugagagu

SEQ ID NO: 657689 - RNA, 22 nt, Artificial Sequence
  Synthetic
gagaagaagagaauaugagagu

SEQ ID NO: 657690 - RNA, 23 nt, Artificial Sequence
  Synthetic
cgagaagaagagaauaugagagu

SEQ ID NO: 657691 - RNA, 24 nt, Artificial Sequence
  Synthetic
gcgagaagaagagaauaugagagu

SEQ ID NO: 657692 - RNA, 18 nt, Artificial Sequence
  Synthetic
uuagaauuuuaugagagu

SEQ ID NO: 657693 - RNA, 19 nt, Artificial Sequence
  Synthetic
auuagaauuuuaugagagu

SEQ ID NO: 657694 - RNA, 20 nt, Artificial Sequence
  Synthetic
aauuagaauuuuaugagagu

SEQ ID NO: 657695 - RNA, 21 nt, Artificial Sequence
  Synthetic
uaauuagaauuuuaugagagu

SEQ ID NO: 657696 - RNA, 22 nt, Artificial Sequence
  Synthetic
auaauuagaauuuuaugagagu

SEQ ID NO: 657697 - RNA, 23 nt, Artificial Sequence
  Synthetic
cauaauuagaauuuuaugagagu

SEQ ID NO: 657698 - RNA, 24 nt, Artificial Sequence
  Synthetic
acauaauuagaauuuuaugagagu

SEQ ID NO: 657699 - RNA, 18 nt, Artificial Sequence
  Synthetic
aguggcuaaauugagagu

SEQ ID NO: 657700 - RNA, 19 nt, Artificial Sequence
  Synthetic
aaguggcuaaauugagagu

SEQ ID NO: 657701 - RNA, 20 nt, Artificial Sequence
  Synthetic
uaaguggcuaaauugagagu

SEQ ID NO: 657702 - RNA, 21 nt, Artificial Sequence
  Synthetic
cuaaguggcuaaauugagagu

SEQ ID NO: 657703 - RNA, 22 nt, Artificial Sequence
  Synthetic
ccuaaguggcuaaauugagagu

SEQ ID NO: 657704 - RNA, 23 nt, Artificial Sequence
  Synthetic
uccuaaguggcuaaauugagagu

SEQ ID NO: 657705 - RNA, 24 nt, Artificial Sequence
  Synthetic
auccuaaguggcuaaauugagagu

SEQ ID NO: 657706 - RNA, 18 nt, Artificial Sequence
  Synthetic
gcuuuucauauugagagu

SEQ ID NO: 657707 - RNA, 19 nt, Artificial Sequence
  Synthetic
ugcuuuucauauugagagu

SEQ ID NO: 657708 - RNA, 20 nt, Artificial Sequence
  Synthetic
gugcuuuucauauugagagu

SEQ ID NO: 657709 - RNA, 21 nt, Artificial Sequence
  Synthetic
ugugcuuuucauauugagagu

SEQ ID NO: 657710 - RNA, 22 nt, Artificial Sequence
  Synthetic
augugcuuuucauauugagagu

SEQ ID NO: 657711 - RNA, 23 nt, Artificial Sequence
  Synthetic
aaugugcuuuucauauugagagu

SEQ ID NO: 657712 - RNA, 24 nt, Artificial Sequence
  Synthetic
caaugugcuuuucauauugagagu

SEQ ID NO: 657713 - RNA, 18 nt, Artificial Sequence
  Synthetic
uauaagauccuugagagu

SEQ ID NO: 657714 - RNA, 19 nt, Artificial Sequence
  Synthetic
auauaagauccuugagagu

SEQ ID NO: 657715 - RNA, 20 nt, Artificial Sequence
  Synthetic
cauauaagauccuugagagu

SEQ ID NO: 657716 - RNA, 21 nt, Artificial Sequence
  Synthetic
gcauauaagauccuugagagu

SEQ ID NO: 657717 - RNA, 22 nt, Artificial Sequence
  Synthetic
agcauauaagauccuugagagu

SEQ ID NO: 657718 - RNA, 23 nt, Artificial Sequence
  Synthetic
uagcauauaagauccuugagagu

SEQ ID NO: 657719 - RNA, 24 nt, Artificial Sequence
  Synthetic
uuagcauauaagauccuugagagu

SEQ ID NO: 657720 - RNA, 18 nt, Artificial Sequence
  Synthetic
cuuggcccuuuugagagu

SEQ ID NO: 657721 - RNA, 19 nt, Artificial Sequence
  Synthetic
acuuggcccuuuugagagu

SEQ ID NO: 657722 - RNA, 20 nt, Artificial Sequence
  Synthetic
aacuuggcccuuuugagagu

SEQ ID NO: 657723 - RNA, 21 nt, Artificial Sequence
  Synthetic
aaacuuggcccuuuugagagu

SEQ ID NO: 657724 - RNA, 22 nt, Artificial Sequence
  Synthetic
aaaacuuggcccuuuugagagu

SEQ ID NO: 657725 - RNA, 23 nt, Artificial Sequence
  Synthetic
uaaaacuuggcccuuuugagagu

SEQ ID NO: 657726 - RNA, 24 nt, Artificial Sequence
  Synthetic
auaaaacuuggcccuuuugagagu

SEQ ID NO: 657727 - RNA, 18 nt, Artificial Sequence
  Synthetic
ucuaccaagaaauagagu

SEQ ID NO: 657728 - RNA, 19 nt, Artificial Sequence
  Synthetic
aucuaccaagaaauagagu

SEQ ID NO: 657729 - RNA, 20 nt, Artificial Sequence
  Synthetic
uaucuaccaagaaauagagu

SEQ ID NO: 657730 - RNA, 21 nt, Artificial Sequence
  Synthetic
auaucuaccaagaaauagagu

SEQ ID NO: 657731 - RNA, 22 nt, Artificial Sequence
  Synthetic
aauaucuaccaagaaauagagu

SEQ ID NO: 657732 - RNA, 23 nt, Artificial Sequence
  Synthetic
gaauaucuaccaagaaauagagu

SEQ ID NO: 657733 - RNA, 24 nt, Artificial Sequence
  Synthetic
agaauaucuaccaagaaauagagu

SEQ ID NO: 657734 - RNA, 18 nt, Artificial Sequence
  Synthetic
cucagauucuaauagagu

SEQ ID NO: 657735 - RNA, 19 nt, Artificial Sequence
  Synthetic
gcucagauucuaauagagu

SEQ ID NO: 657736 - RNA, 20 nt, Artificial Sequence
  Synthetic
ugcucagauucuaauagagu

SEQ ID NO: 657737 - RNA, 21 nt, Artificial Sequence
  Synthetic
gugcucagauucuaauagagu

SEQ ID NO: 657738 - RNA, 22 nt, Artificial Sequence
  Synthetic
ggugcucagauucuaauagagu

SEQ ID NO: 657739 - RNA, 23 nt, Artificial Sequence
  Synthetic
aggugcucagauucuaauagagu

SEQ ID NO: 657740 - RNA, 24 nt, Artificial Sequence
  Synthetic
aaggugcucagauucuaauagagu

SEQ ID NO: 657741 - RNA, 18 nt, Artificial Sequence
  Synthetic
gaaugauagucauagagu

SEQ ID NO: 657742 - RNA, 19 nt, Artificial Sequence
  Synthetic
ggaaugauagucauagagu

SEQ ID NO: 657743 - RNA, 20 nt, Artificial Sequence
  Synthetic
aggaaugauagucauagagu

SEQ ID NO: 657744 - RNA, 21 nt, Artificial Sequence
  Synthetic
uaggaaugauagucauagagu

SEQ ID NO: 657745 - RNA, 22 nt, Artificial Sequence
  Synthetic
guaggaaugauagucauagagu

SEQ ID NO: 657746 - RNA, 23 nt, Artificial Sequence
  Synthetic
aguaggaaugauagucauagagu

SEQ ID NO: 657747 - RNA, 24 nt, Artificial Sequence
  Synthetic
uaguaggaaugauagucauagagu

SEQ ID NO: 657748 - RNA, 18 nt, Artificial Sequence
  Synthetic
acuagaaaguuauagagu

SEQ ID NO: 657749 - RNA, 19 nt, Artificial Sequence
  Synthetic
cacuagaaaguuauagagu

SEQ ID NO: 657750 - RNA, 20 nt, Artificial Sequence
  Synthetic
gcacuagaaaguuauagagu

SEQ ID NO: 657751 - RNA, 21 nt, Artificial Sequence
  Synthetic
cgcacuagaaaguuauagagu

SEQ ID NO: 657752 - RNA, 22 nt, Artificial Sequence
  Synthetic
acgcacuagaaaguuauagagu

SEQ ID NO: 657753 - RNA, 23 nt, Artificial Sequence
  Synthetic
aacgcacuagaaaguuauagagu

SEQ ID NO: 657754 - RNA, 24 nt, Artificial Sequence
  Synthetic
aaacgcacuagaaaguuauagagu

SEQ ID NO: 657755 - RNA, 18 nt, Artificial Sequence
  Synthetic
ucaauauauuuauagagu

SEQ ID NO: 657756 - RNA, 19 nt, Artificial Sequence
  Synthetic
gucaauauauuuauagagu

SEQ ID NO: 657757 - RNA, 20 nt, Artificial Sequence
  Synthetic
agucaauauauuuauagagu

SEQ ID NO: 657758 - RNA, 21 nt, Artificial Sequence
  Synthetic
cagucaauauauuuauagagu

SEQ ID NO: 657759 - RNA, 22 nt, Artificial Sequence
  Synthetic
ucagucaauauauuuauagagu

SEQ ID NO: 657760 - RNA, 23 nt, Artificial Sequence
  Synthetic
cucagucaauauauuuauagagu

SEQ ID NO: 657761 - RNA, 24 nt, Artificial Sequence
  Synthetic
ucucagucaauauauuuauagagu

SEQ ID NO: 657762 - RNA, 18 nt, Artificial Sequence
  Synthetic
ccugaagagaacuagagu

SEQ ID NO: 657763 - RNA, 19 nt, Artificial Sequence
  Synthetic
accugaagagaacuagagu

SEQ ID NO: 657764 - RNA, 20 nt, Artificial Sequence
  Synthetic
aaccugaagagaacuagagu

SEQ ID NO: 657765 - RNA, 21 nt, Artificial Sequence
  Synthetic
gaaccugaagagaacuagagu

SEQ ID NO: 657766 - RNA, 22 nt, Artificial Sequence
  Synthetic
agaaccugaagagaacuagagu

SEQ ID NO: 657767 - RNA, 23 nt, Artificial Sequence
  Synthetic
cagaaccugaagagaacuagagu

SEQ ID NO: 657768 - RNA, 24 nt, Artificial Sequence
  Synthetic
gcagaaccugaagagaacuagagu

SEQ ID NO: 657769 - RNA, 18 nt, Artificial Sequence
  Synthetic
uguuacaggaacuagagu

SEQ ID NO: 657770 - RNA, 19 nt, Artificial Sequence
  Synthetic
uuguuacaggaacuagagu

SEQ ID NO: 657771 - RNA, 20 nt, Artificial Sequence
  Synthetic
uuuguuacaggaacuagagu

SEQ ID NO: 657772 - RNA, 21 nt, Artificial Sequence
  Synthetic
auuuguuacaggaacuagagu

SEQ ID NO: 657773 - RNA, 22 nt, Artificial Sequence
  Synthetic
cauuuguuacaggaacuagagu

SEQ ID NO: 657774 - RNA, 23 nt, Artificial Sequence
  Synthetic
ucauuuguuacaggaacuagagu

SEQ ID NO: 657775 - RNA, 24 nt, Artificial Sequence
  Synthetic
uucauuuguuacaggaacuagagu

SEQ ID NO: 657776 - RNA, 18 nt, Artificial Sequence
  Synthetic
guuuaagauaacuagagu

SEQ ID NO: 657777 - RNA, 19 nt, Artificial Sequence
  Synthetic
aguuuaagauaacuagagu

SEQ ID NO: 657778 - RNA, 20 nt, Artificial Sequence
  Synthetic
aaguuuaagauaacuagagu

SEQ ID NO: 657779 - RNA, 21 nt, Artificial Sequence
  Synthetic
aaaguuuaagauaacuagagu

SEQ ID NO: 657780 - RNA, 22 nt, Artificial Sequence
  Synthetic
caaaguuuaagauaacuagagu

SEQ ID NO: 657781 - RNA, 23 nt, Artificial Sequence
  Synthetic
gcaaaguuuaagauaacuagagu

SEQ ID NO: 657782 - RNA, 24 nt, Artificial Sequence
  Synthetic
cgcaaaguuuaagauaacuagagu

SEQ ID NO: 657783 - RNA, 18 nt, Artificial Sequence
  Synthetic
acggaggacuacuagagu

SEQ ID NO: 657784 - RNA, 19 nt, Artificial Sequence
  Synthetic
aacggaggacuacuagagu

SEQ ID NO: 657785 - RNA, 20 nt, Artificial Sequence
  Synthetic
aaacggaggacuacuagagu

SEQ ID NO: 657786 - RNA, 21 nt, Artificial Sequence
  Synthetic
gaaacggaggacuacuagagu

SEQ ID NO: 657787 - RNA, 22 nt, Artificial Sequence
  Synthetic
agaaacggaggacuacuagagu

SEQ ID NO: 657788 - RNA, 23 nt, Artificial Sequence
  Synthetic
uagaaacggaggacuacuagagu

SEQ ID NO: 657789 - RNA, 24 nt, Artificial Sequence
  Synthetic
auagaaacggaggacuacuagagu

SEQ ID NO: 657790 - RNA, 18 nt, Artificial Sequence
  Synthetic
caaaaucugaucuagagu

SEQ ID NO: 657791 - RNA, 19 nt, Artificial Sequence
  Synthetic
gcaaaaucugaucuagagu

SEQ ID NO: 657792 - RNA, 20 nt, Artificial Sequence
  Synthetic
ugcaaaaucugaucuagagu

SEQ ID NO: 657793 - RNA, 21 nt, Artificial Sequence
  Synthetic
augcaaaaucugaucuagagu

SEQ ID NO: 657794 - RNA, 22 nt, Artificial Sequence
  Synthetic
aaugcaaaaucugaucuagagu

SEQ ID NO: 657795 - RNA, 23 nt, Artificial Sequence
  Synthetic
uaaugcaaaaucugaucuagagu

SEQ ID NO: 657796 - RNA, 24 nt, Artificial Sequence
  Synthetic
auaaugcaaaaucugaucuagagu

SEQ ID NO: 657797 - RNA, 18 nt, Artificial Sequence
  Synthetic
agaaacugaauguagagu

SEQ ID NO: 657798 - RNA, 19 nt, Artificial Sequence
  Synthetic
cagaaacugaauguagagu

SEQ ID NO: 657799 - RNA, 20 nt, Artificial Sequence
  Synthetic
acagaaacugaauguagagu

SEQ ID NO: 657800 - RNA, 21 nt, Artificial Sequence
  Synthetic
aacagaaacugaauguagagu

SEQ ID NO: 657801 - RNA, 22 nt, Artificial Sequence
  Synthetic
aaacagaaacugaauguagagu

SEQ ID NO: 657802 - RNA, 23 nt, Artificial Sequence
  Synthetic
aaaacagaaacugaauguagagu

SEQ ID NO: 657803 - RNA, 24 nt, Artificial Sequence
  Synthetic
uaaaacagaaacugaauguagagu

SEQ ID NO: 657804 - RNA, 18 nt, Artificial Sequence
  Synthetic
gcuagggacuauuagagu

SEQ ID NO: 657805 - RNA, 19 nt, Artificial Sequence
  Synthetic
ugcuagggacuauuagagu

SEQ ID NO: 657806 - RNA, 20 nt, Artificial Sequence
  Synthetic
augcuagggacuauuagagu

SEQ ID NO: 657807 - RNA, 21 nt, Artificial Sequence
  Synthetic
caugcuagggacuauuagagu

SEQ ID NO: 657808 - RNA, 22 nt, Artificial Sequence
  Synthetic
acaugcuagggacuauuagagu

SEQ ID NO: 657809 - RNA, 23 nt, Artificial Sequence
  Synthetic
cacaugcuagggacuauuagagu

SEQ ID NO: 657810 - RNA, 24 nt, Artificial Sequence
  Synthetic
acacaugcuagggacuauuagagu

SEQ ID NO: 657811 - RNA, 18 nt, Artificial Sequence
  Synthetic
cccaacaacacuuagagu

SEQ ID NO: 657812 - RNA, 19 nt, Artificial Sequence
  Synthetic
acccaacaacacuuagagu

SEQ ID NO: 657813 - RNA, 20 nt, Artificial Sequence
  Synthetic
gacccaacaacacuuagagu

SEQ ID NO: 657814 - RNA, 21 nt, Artificial Sequence
  Synthetic
ugacccaacaacacuuagagu

SEQ ID NO: 657815 - RNA, 22 nt, Artificial Sequence
  Synthetic
augacccaacaacacuuagagu

SEQ ID NO: 657816 - RNA, 23 nt, Artificial Sequence
  Synthetic
aaugacccaacaacacuuagagu

SEQ ID NO: 657817 - RNA, 24 nt, Artificial Sequence
  Synthetic
uaaugacccaacaacacuuagagu

SEQ ID NO: 657818 - RNA, 18 nt, Artificial Sequence
  Synthetic
uugccuaggccuuagagu

SEQ ID NO: 657819 - RNA, 19 nt, Artificial Sequence
  Synthetic
cuugccuaggccuuagagu

SEQ ID NO: 657820 - RNA, 20 nt, Artificial Sequence
  Synthetic
acuugccuaggccuuagagu

SEQ ID NO: 657821 - RNA, 21 nt, Artificial Sequence
  Synthetic
aacuugccuaggccuuagagu

SEQ ID NO: 657822 - RNA, 22 nt, Artificial Sequence
  Synthetic
uaacuugccuaggccuuagagu

SEQ ID NO: 657823 - RNA, 23 nt, Artificial Sequence
  Synthetic
auaacuugccuaggccuuagagu

SEQ ID NO: 657824 - RNA, 24 nt, Artificial Sequence
  Synthetic
aauaacuugccuaggccuuagagu

SEQ ID NO: 657825 - RNA, 18 nt, Artificial Sequence
  Synthetic
agacagcaacuuuagagu

SEQ ID NO: 657826 - RNA, 19 nt, Artificial Sequence
  Synthetic
cagacagcaacuuuagagu

SEQ ID NO: 657827 - RNA, 20 nt, Artificial Sequence
  Synthetic
acagacagcaacuuuagagu

SEQ ID NO: 657828 - RNA, 21 nt, Artificial Sequence
  Synthetic
gacagacagcaacuuuagagu

SEQ ID NO: 657829 - RNA, 22 nt, Artificial Sequence
  Synthetic
ggacagacagcaacuuuagagu

SEQ ID NO: 657830 - RNA, 23 nt, Artificial Sequence
  Synthetic
gggacagacagcaacuuuagagu

SEQ ID NO: 657831 - RNA, 24 nt, Artificial Sequence
  Synthetic
ugggacagacagcaacuuuagagu

SEQ ID NO: 657832 - RNA, 18 nt, Artificial Sequence
  Synthetic
aucgaggaaaccacgagu

SEQ ID NO: 657833 - RNA, 19 nt, Artificial Sequence
  Synthetic
uaucgaggaaaccacgagu

SEQ ID NO: 657834 - RNA, 20 nt, Artificial Sequence
  Synthetic
cuaucgaggaaaccacgagu

SEQ ID NO: 657835 - RNA, 21 nt, Artificial Sequence
  Synthetic
ccuaucgaggaaaccacgagu

SEQ ID NO: 657836 - RNA, 22 nt, Artificial Sequence
  Synthetic
cccuaucgaggaaaccacgagu

SEQ ID NO: 657837 - RNA, 23 nt, Artificial Sequence
  Synthetic
ccccuaucgaggaaaccacgagu

SEQ ID NO: 657838 - RNA, 24 nt, Artificial Sequence
  Synthetic
uccccuaucgaggaaaccacgagu

SEQ ID NO: 657839 - RNA, 18 nt, Artificial Sequence
  Synthetic
caacucccacuuacgagu

SEQ ID NO: 657840 - RNA, 19 nt, Artificial Sequence
  Synthetic
ucaacucccacuuacgagu

SEQ ID NO: 657841 - RNA, 20 nt, Artificial Sequence
  Synthetic
uucaacucccacuuacgagu

SEQ ID NO: 657842 - RNA, 21 nt, Artificial Sequence
  Synthetic
guucaacucccacuuacgagu

SEQ ID NO: 657843 - RNA, 22 nt, Artificial Sequence
  Synthetic
uguucaacucccacuuacgagu

SEQ ID NO: 657844 - RNA, 23 nt, Artificial Sequence
  Synthetic
uuguucaacucccacuuacgagu

SEQ ID NO: 657845 - RNA, 24 nt, Artificial Sequence
  Synthetic
guuguucaacucccacuuacgagu

SEQ ID NO: 657846 - RNA, 18 nt, Artificial Sequence
  Synthetic
aaguuauaaguuacgagu

SEQ ID NO: 657847 - RNA, 19 nt, Artificial Sequence
  Synthetic
caaguuauaaguuacgagu

SEQ ID NO: 657848 - RNA, 20 nt, Artificial Sequence
  Synthetic
acaaguuauaaguuacgagu

SEQ ID NO: 657849 - RNA, 21 nt, Artificial Sequence
  Synthetic
cacaaguuauaaguuacgagu

SEQ ID NO: 657850 - RNA, 22 nt, Artificial Sequence
  Synthetic
acacaaguuauaaguuacgagu

SEQ ID NO: 657851 - RNA, 23 nt, Artificial Sequence
  Synthetic
aacacaaguuauaaguuacgagu

SEQ ID NO: 657852 - RNA, 24 nt, Artificial Sequence
  Synthetic
uaacacaaguuauaaguuacgagu

SEQ ID NO: 657853 - RNA, 18 nt, Artificial Sequence
  Synthetic
uguaugacgcucccgagu

SEQ ID NO: 657854 - RNA, 19 nt, Artificial Sequence
  Synthetic
auguaugacgcucccgagu

SEQ ID NO: 657855 - RNA, 20 nt, Artificial Sequence
  Synthetic
cauguaugacgcucccgagu

SEQ ID NO: 657856 - RNA, 21 nt, Artificial Sequence
  Synthetic
gcauguaugacgcucccgagu

SEQ ID NO: 657857 - RNA, 22 nt, Artificial Sequence
  Synthetic
agcauguaugacgcucccgagu

SEQ ID NO: 657858 - RNA, 23 nt, Artificial Sequence
  Synthetic
cagcauguaugacgcucccgagu

SEQ ID NO: 657859 - RNA, 24 nt, Artificial Sequence
  Synthetic
acagcauguaugacgcucccgagu

SEQ ID NO: 657860 - RNA, 18 nt, Artificial Sequence
  Synthetic
gcugcuaaaaugccgagu

SEQ ID NO: 657861 - RNA, 19 nt, Artificial Sequence
  Synthetic
cgcugcuaaaaugccgagu

SEQ ID NO: 657862 - RNA, 20 nt, Artificial Sequence
  Synthetic
acgcugcuaaaaugccgagu

SEQ ID NO: 657863 - RNA, 21 nt, Artificial Sequence
  Synthetic
aacgcugcuaaaaugccgagu

SEQ ID NO: 657864 - RNA, 22 nt, Artificial Sequence
  Synthetic
aaacgcugcuaaaaugccgagu

SEQ ID NO: 657865 - RNA, 23 nt, Artificial Sequence
  Synthetic
gaaacgcugcuaaaaugccgagu

SEQ ID NO: 657866 - RNA, 24 nt, Artificial Sequence
  Synthetic
agaaacgcugcuaaaaugccgagu

SEQ ID NO: 657867 - RNA, 18 nt, Artificial Sequence
  Synthetic
cucucaugguuuccgagu

SEQ ID NO: 657868 - RNA, 19 nt, Artificial Sequence
  Synthetic
acucucaugguuuccgagu

SEQ ID NO: 657869 - RNA, 20 nt, Artificial Sequence
  Synthetic
gacucucaugguuuccgagu

SEQ ID NO: 657870 - RNA, 21 nt, Artificial Sequence
  Synthetic
agacucucaugguuuccgagu

SEQ ID NO: 657871 - RNA, 22 nt, Artificial Sequence
  Synthetic
uagacucucaugguuuccgagu

SEQ ID NO: 657872 - RNA, 23 nt, Artificial Sequence
  Synthetic
auagacucucaugguuuccgagu

SEQ ID NO: 657873 - RNA, 24 nt, Artificial Sequence
  Synthetic
uauagacucucaugguuuccgagu

SEQ ID NO: 657874 - RNA, 18 nt, Artificial Sequence
  Synthetic
uuuacaaugcuagcgagu

SEQ ID NO: 657875 - RNA, 19 nt, Artificial Sequence
  Synthetic
cuuuacaaugcuagcgagu

SEQ ID NO: 657876 - RNA, 20 nt, Artificial Sequence
  Synthetic
ucuuuacaaugcuagcgagu

SEQ ID NO: 657877 - RNA, 21 nt, Artificial Sequence
  Synthetic
uucuuuacaaugcuagcgagu

SEQ ID NO: 657878 - RNA, 22 nt, Artificial Sequence
  Synthetic
cuucuuuacaaugcuagcgagu

SEQ ID NO: 657879 - RNA, 23 nt, Artificial Sequence
  Synthetic
ucuucuuuacaaugcuagcgagu

SEQ ID NO: 657880 - RNA, 24 nt, Artificial Sequence
  Synthetic
aucuucuuuacaaugcuagcgagu

SEQ ID NO: 657881 - RNA, 18 nt, Artificial Sequence
  Synthetic
aagaaauacuuagcgagu

SEQ ID NO: 657882 - RNA, 19 nt, Artificial Sequence
  Synthetic
gaagaaauacuuagcgagu

SEQ ID NO: 657883 - RNA, 20 nt, Artificial Sequence
  Synthetic
agaagaaauacuuagcgagu

SEQ ID NO: 657884 - RNA, 21 nt, Artificial Sequence
  Synthetic
uagaagaaauacuuagcgagu

SEQ ID NO: 657885 - RNA, 22 nt, Artificial Sequence
  Synthetic
guagaagaaauacuuagcgagu

SEQ ID NO: 657886 - RNA, 23 nt, Artificial Sequence
  Synthetic
gguagaagaaauacuuagcgagu

SEQ ID NO: 657887 - RNA, 24 nt, Artificial Sequence
  Synthetic
agguagaagaaauacuuagcgagu

SEQ ID NO: 657888 - RNA, 18 nt, Artificial Sequence
  Synthetic
ggacuuucugggucgagu

SEQ ID NO: 657889 - RNA, 19 nt, Artificial Sequence
  Synthetic
uggacuuucugggucgagu

SEQ ID NO: 657890 - RNA, 20 nt, Artificial Sequence
  Synthetic
cuggacuuucugggucgagu

SEQ ID NO: 657891 - RNA, 21 nt, Artificial Sequence
  Synthetic
gcuggacuuucugggucgagu

SEQ ID NO: 657892 - RNA, 22 nt, Artificial Sequence
  Synthetic
agcuggacuuucugggucgagu

SEQ ID NO: 657893 - RNA, 23 nt, Artificial Sequence
  Synthetic
cagcuggacuuucugggucgagu

SEQ ID NO: 657894 - RNA, 24 nt, Artificial Sequence
  Synthetic
ccagcuggacuuucugggucgagu

SEQ ID NO: 657895 - RNA, 18 nt, Artificial Sequence
  Synthetic
uacucacauauuucgagu

SEQ ID NO: 657896 - RNA, 19 nt, Artificial Sequence
  Synthetic
auacucacauauuucgagu

SEQ ID NO: 657897 - RNA, 20 nt, Artificial Sequence
  Synthetic
cauacucacauauuucgagu

SEQ ID NO: 657898 - RNA, 21 nt, Artificial Sequence
  Synthetic
ccauacucacauauuucgagu

SEQ ID NO: 657899 - RNA, 22 nt, Artificial Sequence
  Synthetic
accauacucacauauuucgagu

SEQ ID NO: 657900 - RNA, 23 nt, Artificial Sequence
  Synthetic
uaccauacucacauauuucgagu

SEQ ID NO: 657901 - RNA, 24 nt, Artificial Sequence
  Synthetic
cuaccauacucacauauuucgagu

SEQ ID NO: 657902 - RNA, 18 nt, Artificial Sequence
  Synthetic
aaaaacaguuaaaggagu

SEQ ID NO: 657903 - RNA, 19 nt, Artificial Sequence
  Synthetic
aaaaaacaguuaaaggagu

SEQ ID NO: 657904 - RNA, 20 nt, Artificial Sequence
  Synthetic
aaaaaaacaguuaaaggagu

SEQ ID NO: 657905 - RNA, 21 nt, Artificial Sequence
  Synthetic
uaaaaaaacaguuaaaggagu

SEQ ID NO: 657906 - RNA, 22 nt, Artificial Sequence
  Synthetic
auaaaaaaacaguuaaaggagu

SEQ ID NO: 657907 - RNA, 23 nt, Artificial Sequence
  Synthetic
aauaaaaaaacaguuaaaggagu

SEQ ID NO: 657908 - RNA, 24 nt, Artificial Sequence
  Synthetic
aaauaaaaaaacaguuaaaggagu

SEQ ID NO: 657909 - RNA, 18 nt, Artificial Sequence
  Synthetic
uuaacucucccaaggagu

SEQ ID NO: 657910 - RNA, 19 nt, Artificial Sequence
  Synthetic
uuuaacucucccaaggagu

SEQ ID NO: 657911 - RNA, 20 nt, Artificial Sequence
  Synthetic
cuuuaacucucccaaggagu

SEQ ID NO: 657912 - RNA, 21 nt, Artificial Sequence
  Synthetic
ucuuuaacucucccaaggagu

SEQ ID NO: 657913 - RNA, 22 nt, Artificial Sequence
  Synthetic
aucuuuaacucucccaaggagu

SEQ ID NO: 657914 - RNA, 23 nt, Artificial Sequence
  Synthetic
aaucuuuaacucucccaaggagu

SEQ ID NO: 657915 - RNA, 24 nt, Artificial Sequence
  Synthetic
gaaucuuuaacucucccaaggagu

SEQ ID NO: 657916 - RNA, 18 nt, Artificial Sequence
  Synthetic
aaaacagucccaaggagu

SEQ ID NO: 657917 - RNA, 19 nt, Artificial Sequence
  Synthetic
aaaaacagucccaaggagu

SEQ ID NO: 657918 - RNA, 20 nt, Artificial Sequence
  Synthetic
aaaaaacagucccaaggagu

SEQ ID NO: 657919 - RNA, 21 nt, Artificial Sequence
  Synthetic
aaaaaaacagucccaaggagu

SEQ ID NO: 657920 - RNA, 22 nt, Artificial Sequence
  Synthetic
gaaaaaaacagucccaaggagu

SEQ ID NO: 657921 - RNA, 23 nt, Artificial Sequence
  Synthetic
ggaaaaaaacagucccaaggagu

SEQ ID NO: 657922 - RNA, 24 nt, Artificial Sequence
  Synthetic
uggaaaaaaacagucccaaggagu

SEQ ID NO: 657923 - RNA, 18 nt, Artificial Sequence
  Synthetic
cauuuuugagcaaggagu

SEQ ID NO: 657924 - RNA, 19 nt, Artificial Sequence
  Synthetic
ccauuuuugagcaaggagu

SEQ ID NO: 657925 - RNA, 20 nt, Artificial Sequence
  Synthetic
uccauuuuugagcaaggagu

SEQ ID NO: 657926 - RNA, 21 nt, Artificial Sequence
  Synthetic
guccauuuuugagcaaggagu

SEQ ID NO: 657927 - RNA, 22 nt, Artificial Sequence
  Synthetic
uguccauuuuugagcaaggagu

SEQ ID NO: 657928 - RNA, 23 nt, Artificial Sequence
  Synthetic
guguccauuuuugagcaaggagu

SEQ ID NO: 657929 - RNA, 24 nt, Artificial Sequence
  Synthetic
aguguccauuuuugagcaaggagu

SEQ ID NO: 657930 - RNA, 18 nt, Artificial Sequence
  Synthetic
uucuauuucucaaggagu

SEQ ID NO: 657931 - RNA, 19 nt, Artificial Sequence
  Synthetic
guucuauuucucaaggagu

SEQ ID NO: 657932 - RNA, 20 nt, Artificial Sequence
  Synthetic
aguucuauuucucaaggagu

SEQ ID NO: 657933 - RNA, 21 nt, Artificial Sequence
  Synthetic
aaguucuauuucucaaggagu

SEQ ID NO: 657934 - RNA, 22 nt, Artificial Sequence
  Synthetic
aaaguucuauuucucaaggagu

SEQ ID NO: 657935 - RNA, 23 nt, Artificial Sequence
  Synthetic
uaaaguucuauuucucaaggagu

SEQ ID NO: 657936 - RNA, 24 nt, Artificial Sequence
  Synthetic
uuaaaguucuauuucucaaggagu

SEQ ID NO: 657937 - RNA, 18 nt, Artificial Sequence
  Synthetic
aaccaaaaaggaaggagu

SEQ ID NO: 657938 - RNA, 19 nt, Artificial Sequence
  Synthetic
aaaccaaaaaggaaggagu

SEQ ID NO: 657939 - RNA, 20 nt, Artificial Sequence
  Synthetic
aaaaccaaaaaggaaggagu

SEQ ID NO: 657940 - RNA, 21 nt, Artificial Sequence
  Synthetic
aaaaaccaaaaaggaaggagu

SEQ ID NO: 657941 - RNA, 22 nt, Artificial Sequence
  Synthetic
gaaaaaccaaaaaggaaggagu

SEQ ID NO: 657942 - RNA, 23 nt, Artificial Sequence
  Synthetic
agaaaaaccaaaaaggaaggagu

SEQ ID NO: 657943 - RNA, 24 nt, Artificial Sequence
  Synthetic
uagaaaaaccaaaaaggaaggagu

SEQ ID NO: 657944 - RNA, 18 nt, Artificial Sequence
  Synthetic
acacugccccuaaggagu

SEQ ID NO: 657945 - RNA, 19 nt, Artificial Sequence
  Synthetic
aacacugccccuaaggagu

SEQ ID NO: 657946 - RNA, 20 nt, Artificial Sequence
  Synthetic
caacacugccccuaaggagu

SEQ ID NO: 657947 - RNA, 21 nt, Artificial Sequence
  Synthetic
acaacacugccccuaaggagu

SEQ ID NO: 657948 - RNA, 22 nt, Artificial Sequence
  Synthetic
gacaacacugccccuaaggagu

SEQ ID NO: 657949 - RNA, 23 nt, Artificial Sequence
  Synthetic
agacaacacugccccuaaggagu

SEQ ID NO: 657950 - RNA, 24 nt, Artificial Sequence
  Synthetic
aagacaacacugccccuaaggagu

SEQ ID NO: 657951 - RNA, 18 nt, Artificial Sequence
  Synthetic
uaaucaacuuuaaggagu

SEQ ID NO: 657952 - RNA, 19 nt, Artificial Sequence
  Synthetic
uuaaucaacuuuaaggagu

SEQ ID NO: 657953 - RNA, 20 nt, Artificial Sequence
  Synthetic
auuaaucaacuuuaaggagu

SEQ ID NO: 657954 - RNA, 21 nt, Artificial Sequence
  Synthetic
uauuaaucaacuuuaaggagu

SEQ ID NO: 657955 - RNA, 22 nt, Artificial Sequence
  Synthetic
auauuaaucaacuuuaaggagu

SEQ ID NO: 657956 - RNA, 23 nt, Artificial Sequence
  Synthetic
uauauuaaucaacuuuaaggagu

SEQ ID NO: 657957 - RNA, 24 nt, Artificial Sequence
  Synthetic
uuauauuaaucaacuuuaaggagu

SEQ ID NO: 657958 - RNA, 18 nt, Artificial Sequence
  Synthetic
ucacuuuaggacaggagu

SEQ ID NO: 657959 - RNA, 19 nt, Artificial Sequence
  Synthetic
aucacuuuaggacaggagu

SEQ ID NO: 657960 - RNA, 20 nt, Artificial Sequence
  Synthetic
gaucacuuuaggacaggagu

SEQ ID NO: 657961 - RNA, 21 nt, Artificial Sequence
  Synthetic
ggaucacuuuaggacaggagu

SEQ ID NO: 657962 - RNA, 22 nt, Artificial Sequence
  Synthetic
uggaucacuuuaggacaggagu

SEQ ID NO: 657963 - RNA, 23 nt, Artificial Sequence
  Synthetic
guggaucacuuuaggacaggagu

SEQ ID NO: 657964 - RNA, 24 nt, Artificial Sequence
  Synthetic
gguggaucacuuuaggacaggagu

SEQ ID NO: 657965 - RNA, 18 nt, Artificial Sequence
  Synthetic
cugcuugagaccaggagu

SEQ ID NO: 657966 - RNA, 19 nt, Artificial Sequence
  Synthetic
acugcuugagaccaggagu

SEQ ID NO: 657967 - RNA, 20 nt, Artificial Sequence
  Synthetic
gacugcuugagaccaggagu

SEQ ID NO: 657968 - RNA, 21 nt, Artificial Sequence
  Synthetic
agacugcuugagaccaggagu

SEQ ID NO: 657969 - RNA, 22 nt, Artificial Sequence
  Synthetic
cagacugcuugagaccaggagu

SEQ ID NO: 657970 - RNA, 23 nt, Artificial Sequence
  Synthetic
gcagacugcuugagaccaggagu

SEQ ID NO: 657971 - RNA, 24 nt, Artificial Sequence
  Synthetic
ggcagacugcuugagaccaggagu

SEQ ID NO: 657972 - RNA, 18 nt, Artificial Sequence
  Synthetic
uugcuugagcccaggagu

SEQ ID NO: 657973 - RNA, 19 nt, Artificial Sequence
  Synthetic
auugcuugagcccaggagu

SEQ ID NO: 657974 - RNA, 20 nt, Artificial Sequence
  Synthetic
gauugcuugagcccaggagu

SEQ ID NO: 657975 - RNA, 21 nt, Artificial Sequence
  Synthetic
ggauugcuugagcccaggagu

SEQ ID NO: 657976 - RNA, 22 nt, Artificial Sequence
  Synthetic
aggauugcuugagcccaggagu

SEQ ID NO: 657977 - RNA, 23 nt, Artificial Sequence
  Synthetic
gaggauugcuugagcccaggagu

SEQ ID NO: 657978 - RNA, 24 nt, Artificial Sequence
  Synthetic
ggaggauugcuugagcccaggagu

SEQ ID NO: 657979 - RNA, 18 nt, Artificial Sequence
  Synthetic
uugcuugaagccaggagu

SEQ ID NO: 657980 - RNA, 19 nt, Artificial Sequence
  Synthetic
auugcuugaagccaggagu

SEQ ID NO: 657981 - RNA, 20 nt, Artificial Sequence
  Synthetic
uauugcuugaagccaggagu

SEQ ID NO: 657982 - RNA, 21 nt, Artificial Sequence
  Synthetic
guauugcuugaagccaggagu

SEQ ID NO: 657983 - RNA, 22 nt, Artificial Sequence
  Synthetic
aguauugcuugaagccaggagu

SEQ ID NO: 657984 - RNA, 23 nt, Artificial Sequence
  Synthetic
gaguauugcuugaagccaggagu

SEQ ID NO: 657985 - RNA, 24 nt, Artificial Sequence
  Synthetic
ggaguauugcuugaagccaggagu

SEQ ID NO: 657986 - RNA, 18 nt, Artificial Sequence
  Synthetic
ccagaggaaugcaggagu

SEQ ID NO: 657987 - RNA, 19 nt, Artificial Sequence
  Synthetic
uccagaggaaugcaggagu

SEQ ID NO: 657988 - RNA, 20 nt, Artificial Sequence
  Synthetic
auccagaggaaugcaggagu

SEQ ID NO: 657989 - RNA, 21 nt, Artificial Sequence
  Synthetic
gauccagaggaaugcaggagu

SEQ ID NO: 657990 - RNA, 22 nt, Artificial Sequence
  Synthetic
ggauccagaggaaugcaggagu

SEQ ID NO: 657991 - RNA, 23 nt, Artificial Sequence
  Synthetic
aggauccagaggaaugcaggagu

SEQ ID NO: 657992 - RNA, 24 nt, Artificial Sequence
  Synthetic
caggauccagaggaaugcaggagu

SEQ ID NO: 657993 - RNA, 18 nt, Artificial Sequence
  Synthetic
ucacuugaccucaggagu

SEQ ID NO: 657994 - RNA, 19 nt, Artificial Sequence
  Synthetic
aucacuugaccucaggagu

SEQ ID NO: 657995 - RNA, 20 nt, Artificial Sequence
  Synthetic
gaucacuugaccucaggagu

SEQ ID NO: 657996 - RNA, 21 nt, Artificial Sequence
  Synthetic
ggaucacuugaccucaggagu

SEQ ID NO: 657997 - RNA, 22 nt, Artificial Sequence
  Synthetic
uggaucacuugaccucaggagu

SEQ ID NO: 657998 - RNA, 23 nt, Artificial Sequence
  Synthetic
guggaucacuugaccucaggagu

SEQ ID NO: 657999 - RNA, 24 nt, Artificial Sequence
  Synthetic
gguggaucacuugaccucaggagu

SEQ ID NO: 658000 - RNA, 18 nt, Artificial Sequence
  Synthetic
uugcuugagcucaggagu

SEQ ID NO: 658001 - RNA, 19 nt, Artificial Sequence
  Synthetic
auugcuugagcucaggagu

SEQ ID NO: 658002 - RNA, 20 nt, Artificial Sequence
  Synthetic
gauugcuugagcucaggagu

SEQ ID NO: 658003 - RNA, 21 nt, Artificial Sequence
  Synthetic
agauugcuugagcucaggagu

SEQ ID NO: 658004 - RNA, 22 nt, Artificial Sequence
  Synthetic
cagauugcuugagcucaggagu

SEQ ID NO: 658005 - RNA, 23 nt, Artificial Sequence
  Synthetic
gcagauugcuugagcucaggagu

SEQ ID NO: 658006 - RNA, 24 nt, Artificial Sequence
  Synthetic
ggcagauugcuugagcucaggagu

SEQ ID NO: 658007 - RNA, 21 nt, Artificial Sequence
  Synthetic
ggauugcuugagcucaggagu

SEQ ID NO: 658008 - RNA, 22 nt, Artificial Sequence
  Synthetic
aggauugcuugagcucaggagu

SEQ ID NO: 658009 - RNA, 23 nt, Artificial Sequence
  Synthetic
gaggauugcuugagcucaggagu

SEQ ID NO: 658010 - RNA, 24 nt, Artificial Sequence
  Synthetic
ggaggauugcuugagcucaggagu

SEQ ID NO: 658011 - RNA, 18 nt, Artificial Sequence
  Synthetic
acacucgaggucaggagu

SEQ ID NO: 658012 - RNA, 19 nt, Artificial Sequence
  Synthetic
aacacucgaggucaggagu

SEQ ID NO: 658013 - RNA, 20 nt, Artificial Sequence
  Synthetic
gaacacucgaggucaggagu

SEQ ID NO: 658014 - RNA, 21 nt, Artificial Sequence
  Synthetic
ggaacacucgaggucaggagu

SEQ ID NO: 658015 - RNA, 22 nt, Artificial Sequence
  Synthetic
cggaacacucgaggucaggagu

SEQ ID NO: 658016 - RNA, 23 nt, Artificial Sequence
  Synthetic
gcggaacacucgaggucaggagu

SEQ ID NO: 658017 - RNA, 24 nt, Artificial Sequence
  Synthetic
ggcggaacacucgaggucaggagu

SEQ ID NO: 658018 - RNA, 18 nt, Artificial Sequence
  Synthetic
gaucaugaggucaggagu

SEQ ID NO: 658019 - RNA, 19 nt, Artificial Sequence
  Synthetic
agaucaugaggucaggagu

SEQ ID NO: 658020 - RNA, 20 nt, Artificial Sequence
  Synthetic
cagaucaugaggucaggagu

SEQ ID NO: 658021 - RNA, 21 nt, Artificial Sequence
  Synthetic
gcagaucaugaggucaggagu

SEQ ID NO: 658022 - RNA, 22 nt, Artificial Sequence
  Synthetic
agcagaucaugaggucaggagu

SEQ ID NO: 658023 - RNA, 23 nt, Artificial Sequence
  Synthetic
gagcagaucaugaggucaggagu

SEQ ID NO: 658024 - RNA, 24 nt, Artificial Sequence
  Synthetic
ugagcagaucaugaggucaggagu

SEQ ID NO: 658025 - RNA, 19 nt, Artificial Sequence
  Synthetic
ggaucaugaggucaggagu

SEQ ID NO: 658026 - RNA, 20 nt, Artificial Sequence
  Synthetic
uggaucaugaggucaggagu

SEQ ID NO: 658027 - RNA, 21 nt, Artificial Sequence
  Synthetic
guggaucaugaggucaggagu

SEQ ID NO: 658028 - RNA, 22 nt, Artificial Sequence
  Synthetic
gguggaucaugaggucaggagu

SEQ ID NO: 658029 - RNA, 23 nt, Artificial Sequence
  Synthetic
ggguggaucaugaggucaggagu

SEQ ID NO: 658030 - RNA, 24 nt, Artificial Sequence
  Synthetic
cggguggaucaugaggucaggagu

SEQ ID NO: 658031 - RNA, 22 nt, Artificial Sequence
  Synthetic
cggaucaccugaggucaggagu

SEQ ID NO: 658032 - RNA, 23 nt, Artificial Sequence
  Synthetic
gcggaucaccugaggucaggagu

SEQ ID NO: 658033 - RNA, 24 nt, Artificial Sequence
  Synthetic
ggcggaucaccugaggucaggagu

SEQ ID NO: 658034 - RNA, 24 nt, Artificial Sequence
  Synthetic
gguggaucaccugaggucaggagu

SEQ ID NO: 658035 - RNA, 18 nt, Artificial Sequence
  Synthetic
ucaucugaggucaggagu

SEQ ID NO: 658036 - RNA, 19 nt, Artificial Sequence
  Synthetic
aucaucugaggucaggagu

SEQ ID NO: 658037 - RNA, 20 nt, Artificial Sequence
  Synthetic
gaucaucugaggucaggagu

SEQ ID NO: 658038 - RNA, 21 nt, Artificial Sequence
  Synthetic
ggaucaucugaggucaggagu

SEQ ID NO: 658039 - RNA, 22 nt, Artificial Sequence
  Synthetic
uggaucaucugaggucaggagu

SEQ ID NO: 658040 - RNA, 23 nt, Artificial Sequence
  Synthetic
auggaucaucugaggucaggagu

SEQ ID NO: 658041 - RNA, 24 nt, Artificial Sequence
  Synthetic
gauggaucaucugaggucaggagu

SEQ ID NO: 658042 - RNA, 21 nt, Artificial Sequence
  Synthetic
ggaucacuugaggucaggagu

SEQ ID NO: 658043 - RNA, 22 nt, Artificial Sequence
  Synthetic
cggaucacuugaggucaggagu

SEQ ID NO: 658044 - RNA, 23 nt, Artificial Sequence
  Synthetic
acggaucacuugaggucaggagu

SEQ ID NO: 658045 - RNA, 24 nt, Artificial Sequence
  Synthetic
gacggaucacuugaggucaggagu

SEQ ID NO: 658046 - RNA, 22 nt, Artificial Sequence
  Synthetic
uggaucacuugaggucaggagu

SEQ ID NO: 658047 - RNA, 23 nt, Artificial Sequence
  Synthetic
guggaucacuugaggucaggagu

SEQ ID NO: 658048 - RNA, 24 nt, Artificial Sequence
  Synthetic
gguggaucacuugaggucaggagu

SEQ ID NO: 658049 - RNA, 18 nt, Artificial Sequence
  Synthetic
gaucacuaggucaggagu

SEQ ID NO: 658050 - RNA, 19 nt, Artificial Sequence
  Synthetic
ggaucacuaggucaggagu

SEQ ID NO: 658051 - RNA, 20 nt, Artificial Sequence
  Synthetic
uggaucacuaggucaggagu

SEQ ID NO: 658052 - RNA, 21 nt, Artificial Sequence
  Synthetic
guggaucacuaggucaggagu

SEQ ID NO: 658053 - RNA, 22 nt, Artificial Sequence
  Synthetic
gguggaucacuaggucaggagu

SEQ ID NO: 658054 - RNA, 23 nt, Artificial Sequence
  Synthetic
agguggaucacuaggucaggagu

SEQ ID NO: 658055 - RNA, 24 nt, Artificial Sequence
  Synthetic
cagguggaucacuaggucaggagu

SEQ ID NO: 658056 - RNA, 18 nt, Artificial Sequence
  Synthetic
ccagauguucagaggagu

SEQ ID NO: 658057 - RNA, 19 nt, Artificial Sequence
  Synthetic
uccagauguucagaggagu

SEQ ID NO: 658058 - RNA, 20 nt, Artificial Sequence
  Synthetic
uuccagauguucagaggagu

SEQ ID NO: 658059 - RNA, 21 nt, Artificial Sequence
  Synthetic
guuccagauguucagaggagu

SEQ ID NO: 658060 - RNA, 22 nt, Artificial Sequence
  Synthetic
uguuccagauguucagaggagu

SEQ ID NO: 658061 - RNA, 23 nt, Artificial Sequence
  Synthetic
auguuccagauguucagaggagu

SEQ ID NO: 658062 - RNA, 24 nt, Artificial Sequence
  Synthetic
aauguuccagauguucagaggagu

SEQ ID NO: 658063 - RNA, 18 nt, Artificial Sequence
  Synthetic
auguguauggagaggagu

SEQ ID NO: 658064 - RNA, 19 nt, Artificial Sequence
  Synthetic
aauguguauggagaggagu

SEQ ID NO: 658065 - RNA, 20 nt, Artificial Sequence
  Synthetic
caauguguauggagaggagu

SEQ ID NO: 658066 - RNA, 21 nt, Artificial Sequence
  Synthetic
acaauguguauggagaggagu

SEQ ID NO: 658067 - RNA, 22 nt, Artificial Sequence
  Synthetic
cacaauguguauggagaggagu

SEQ ID NO: 658068 - RNA, 23 nt, Artificial Sequence
  Synthetic
ucacaauguguauggagaggagu

SEQ ID NO: 658069 - RNA, 24 nt, Artificial Sequence
  Synthetic
gucacaauguguauggagaggagu

SEQ ID NO: 658070 - RNA, 18 nt, Artificial Sequence
  Synthetic
gaaggauaguggaggagu

SEQ ID NO: 658071 - RNA, 19 nt, Artificial Sequence
  Synthetic
ggaaggauaguggaggagu

SEQ ID NO: 658072 - RNA, 20 nt, Artificial Sequence
  Synthetic
gggaaggauaguggaggagu

SEQ ID NO: 658073 - RNA, 21 nt, Artificial Sequence
  Synthetic
ugggaaggauaguggaggagu

SEQ ID NO: 658074 - RNA, 22 nt, Artificial Sequence
  Synthetic
cugggaaggauaguggaggagu

SEQ ID NO: 658075 - RNA, 23 nt, Artificial Sequence
  Synthetic
gcugggaaggauaguggaggagu

SEQ ID NO: 658076 - RNA, 24 nt, Artificial Sequence
  Synthetic
ggcugggaaggauaguggaggagu

SEQ ID NO: 658077 - RNA, 18 nt, Artificial Sequence
  Synthetic
caggaugguaugaggagu

SEQ ID NO: 658078 - RNA, 19 nt, Artificial Sequence
  Synthetic
ccaggaugguaugaggagu

SEQ ID NO: 658079 - RNA, 20 nt, Artificial Sequence
  Synthetic
accaggaugguaugaggagu

SEQ ID NO: 658080 - RNA, 21 nt, Artificial Sequence
  Synthetic
gaccaggaugguaugaggagu

SEQ ID NO: 658081 - RNA, 22 nt, Artificial Sequence
  Synthetic
agaccaggaugguaugaggagu

SEQ ID NO: 658082 - RNA, 23 nt, Artificial Sequence
  Synthetic
cagaccaggaugguaugaggagu

SEQ ID NO: 658083 - RNA, 24 nt, Artificial Sequence
  Synthetic
ccagaccaggaugguaugaggagu

SEQ ID NO: 658084 - RNA, 18 nt, Artificial Sequence
  Synthetic
gagaucagaaauaggagu

SEQ ID NO: 658085 - RNA, 19 nt, Artificial Sequence
  Synthetic
agagaucagaaauaggagu

SEQ ID NO: 658086 - RNA, 20 nt, Artificial Sequence
  Synthetic
cagagaucagaaauaggagu

SEQ ID NO: 658087 - RNA, 21 nt, Artificial Sequence
  Synthetic
ccagagaucagaaauaggagu

SEQ ID NO: 658088 - RNA, 22 nt, Artificial Sequence
  Synthetic
accagagaucagaaauaggagu

SEQ ID NO: 658089 - RNA, 23 nt, Artificial Sequence
  Synthetic
uaccagagaucagaaauaggagu

SEQ ID NO: 658090 - RNA, 24 nt, Artificial Sequence
  Synthetic
uuaccagagaucagaaauaggagu

SEQ ID NO: 658091 - RNA, 18 nt, Artificial Sequence
  Synthetic
ugacuugaggcuaggagu

SEQ ID NO: 658092 - RNA, 19 nt, Artificial Sequence
  Synthetic
augacuugaggcuaggagu

SEQ ID NO: 658093 - RNA, 20 nt, Artificial Sequence
  Synthetic
gaugacuugaggcuaggagu

SEQ ID NO: 658094 - RNA, 21 nt, Artificial Sequence
  Synthetic
ggaugacuugaggcuaggagu

SEQ ID NO: 658095 - RNA, 22 nt, Artificial Sequence
  Synthetic
uggaugacuugaggcuaggagu

SEQ ID NO: 658096 - RNA, 23 nt, Artificial Sequence
  Synthetic
guggaugacuugaggcuaggagu

SEQ ID NO: 658097 - RNA, 24 nt, Artificial Sequence
  Synthetic
gguggaugacuugaggcuaggagu

SEQ ID NO: 658098 - RNA, 18 nt, Artificial Sequence
  Synthetic
uuuguugucucuaggagu

SEQ ID NO: 658099 - RNA, 19 nt, Artificial Sequence
  Synthetic
auuuguugucucuaggagu

SEQ ID NO: 658100 - RNA, 20 nt, Artificial Sequence
  Synthetic
gauuuguugucucuaggagu

SEQ ID NO: 658101 - RNA, 21 nt, Artificial Sequence
  Synthetic
ggauuuguugucucuaggagu

SEQ ID NO: 658102 - RNA, 22 nt, Artificial Sequence
  Synthetic
uggauuuguugucucuaggagu

SEQ ID NO: 658103 - RNA, 23 nt, Artificial Sequence
  Synthetic
cuggauuuguugucucuaggagu

SEQ ID NO: 658104 - RNA, 24 nt, Artificial Sequence
  Synthetic
ucuggauuuguugucucuaggagu

SEQ ID NO: 658105 - RNA, 18 nt, Artificial Sequence
  Synthetic
uauagcaguuuuaggagu

SEQ ID NO: 658106 - RNA, 19 nt, Artificial Sequence
  Synthetic
guauagcaguuuuaggagu

SEQ ID NO: 658107 - RNA, 20 nt, Artificial Sequence
  Synthetic
aguauagcaguuuuaggagu

SEQ ID NO: 658108 - RNA, 21 nt, Artificial Sequence
  Synthetic
caguauagcaguuuuaggagu

SEQ ID NO: 658109 - RNA, 22 nt, Artificial Sequence
  Synthetic
acaguauagcaguuuuaggagu

SEQ ID NO: 658110 - RNA, 23 nt, Artificial Sequence
  Synthetic
cacaguauagcaguuuuaggagu

SEQ ID NO: 658111 - RNA, 24 nt, Artificial Sequence
  Synthetic
ucacaguauagcaguuuuaggagu

SEQ ID NO: 658112 - RNA, 18 nt, Artificial Sequence
  Synthetic
ugaguggucacacggagu

SEQ ID NO: 658113 - RNA, 19 nt, Artificial Sequence
  Synthetic
uugaguggucacacggagu

SEQ ID NO: 658114 - RNA, 20 nt, Artificial Sequence
  Synthetic
cuugaguggucacacggagu

SEQ ID NO: 658115 - RNA, 21 nt, Artificial Sequence
  Synthetic
gcuugaguggucacacggagu

SEQ ID NO: 658116 - RNA, 22 nt, Artificial Sequence
  Synthetic
ggcuugaguggucacacggagu

SEQ ID NO: 658117 - RNA, 23 nt, Artificial Sequence
  Synthetic
aggcuugaguggucacacggagu

SEQ ID NO: 658118 - RNA, 24 nt, Artificial Sequence
  Synthetic
aaggcuugaguggucacacggagu

SEQ ID NO: 658119 - RNA, 18 nt, Artificial Sequence
  Synthetic
ucuuaagaaaaagggagu

SEQ ID NO: 658120 - RNA, 19 nt, Artificial Sequence
  Synthetic
cucuuaagaaaaagggagu

SEQ ID NO: 658121 - RNA, 20 nt, Artificial Sequence
  Synthetic
gcucuuaagaaaaagggagu

SEQ ID NO: 658122 - RNA, 21 nt, Artificial Sequence
  Synthetic
ugcucuuaagaaaaagggagu

SEQ ID NO: 658123 - RNA, 22 nt, Artificial Sequence
  Synthetic
gugcucuuaagaaaaagggagu

SEQ ID NO: 658124 - RNA, 23 nt, Artificial Sequence
  Synthetic
agugcucuuaagaaaaagggagu

SEQ ID NO: 658125 - RNA, 24 nt, Artificial Sequence
  Synthetic
gagugcucuuaagaaaaagggagu

SEQ ID NO: 658126 - RNA, 18 nt, Artificial Sequence
  Synthetic
ucccuugaaccagggagu

SEQ ID NO: 658127 - RNA, 19 nt, Artificial Sequence
  Synthetic
aucccuugaaccagggagu

SEQ ID NO: 658128 - RNA, 20 nt, Artificial Sequence
  Synthetic
aaucccuugaaccagggagu

SEQ ID NO: 658129 - RNA, 21 nt, Artificial Sequence
  Synthetic
gaaucccuugaaccagggagu

SEQ ID NO: 658130 - RNA, 22 nt, Artificial Sequence
  Synthetic
agaaucccuugaaccagggagu

SEQ ID NO: 658131 - RNA, 23 nt, Artificial Sequence
  Synthetic
gagaaucccuugaaccagggagu

SEQ ID NO: 658132 - RNA, 24 nt, Artificial Sequence
  Synthetic
ggagaaucccuugaaccagggagu

SEQ ID NO: 658133 - RNA, 18 nt, Artificial Sequence
  Synthetic
uuacuucauccagggagu

SEQ ID NO: 658134 - RNA, 19 nt, Artificial Sequence
  Synthetic
auuacuucauccagggagu

SEQ ID NO: 658135 - RNA, 20 nt, Artificial Sequence
  Synthetic
gauuacuucauccagggagu

SEQ ID NO: 658136 - RNA, 21 nt, Artificial Sequence
  Synthetic
ggauuacuucauccagggagu

SEQ ID NO: 658137 - RNA, 22 nt, Artificial Sequence
  Synthetic
aggauuacuucauccagggagu

SEQ ID NO: 658138 - RNA, 23 nt, Artificial Sequence
  Synthetic
gaggauuacuucauccagggagu

SEQ ID NO: 658139 - RNA, 24 nt, Artificial Sequence
  Synthetic
ggaggauuacuucauccagggagu

SEQ ID NO: 658140 - RNA, 21 nt, Artificial Sequence
  Synthetic
ugaucaccugaggucgggagu

SEQ ID NO: 658141 - RNA, 22 nt, Artificial Sequence
  Synthetic
cugaucaccugaggucgggagu

SEQ ID NO: 658142 - RNA, 23 nt, Artificial Sequence
  Synthetic
ccugaucaccugaggucgggagu

SEQ ID NO: 658143 - RNA, 24 nt, Artificial Sequence
  Synthetic
gccugaucaccugaggucgggagu

SEQ ID NO: 658144 - RNA, 18 nt, Artificial Sequence
  Synthetic
ccuugaaugaaggggagu

SEQ ID NO: 658145 - RNA, 19 nt, Artificial Sequence
  Synthetic
cccuugaaugaaggggagu

SEQ ID NO: 658146 - RNA, 20 nt, Artificial Sequence
  Synthetic
ccccuugaaugaaggggagu

SEQ ID NO: 658147 - RNA, 21 nt, Artificial Sequence
  Synthetic
gccccuugaaugaaggggagu

SEQ ID NO: 658148 - RNA, 22 nt, Artificial Sequence
  Synthetic
agccccuugaaugaaggggagu

SEQ ID NO: 658149 - RNA, 23 nt, Artificial Sequence
  Synthetic
gagccccuugaaugaaggggagu

SEQ ID NO: 658150 - RNA, 24 nt, Artificial Sequence
  Synthetic
ggagccccuugaaugaaggggagu

SEQ ID NO: 658151 - RNA, 18 nt, Artificial Sequence
  Synthetic
uaggauacauuggggagu

SEQ ID NO: 658152 - RNA, 19 nt, Artificial Sequence
  Synthetic
cuaggauacauuggggagu

SEQ ID NO: 658153 - RNA, 20 nt, Artificial Sequence
  Synthetic
ucuaggauacauuggggagu

SEQ ID NO: 658154 - RNA, 21 nt, Artificial Sequence
  Synthetic
cucuaggauacauuggggagu

SEQ ID NO: 658155 - RNA, 22 nt, Artificial Sequence
  Synthetic
ucucuaggauacauuggggagu

SEQ ID NO: 658156 - RNA, 23 nt, Artificial Sequence
  Synthetic
gucucuaggauacauuggggagu

SEQ ID NO: 658157 - RNA, 24 nt, Artificial Sequence
  Synthetic
agucucuaggauacauuggggagu

SEQ ID NO: 658158 - RNA, 18 nt, Artificial Sequence
  Synthetic
aaagaggcaaaugggagu

SEQ ID NO: 658159 - RNA, 19 nt, Artificial Sequence
  Synthetic
aaaagaggcaaaugggagu

SEQ ID NO: 658160 - RNA, 20 nt, Artificial Sequence
  Synthetic
uaaaagaggcaaaugggagu

SEQ ID NO: 658161 - RNA, 21 nt, Artificial Sequence
  Synthetic
auaaaagaggcaaaugggagu

SEQ ID NO: 658162 - RNA, 22 nt, Artificial Sequence
  Synthetic
gauaaaagaggcaaaugggagu

SEQ ID NO: 658163 - RNA, 23 nt, Artificial Sequence
  Synthetic
agauaaaagaggcaaaugggagu

SEQ ID NO: 658164 - RNA, 24 nt, Artificial Sequence
  Synthetic
gagauaaaagaggcaaaugggagu

SEQ ID NO: 658165 - RNA, 18 nt, Artificial Sequence
  Synthetic
cuugaccaagcugggagu

SEQ ID NO: 658166 - RNA, 19 nt, Artificial Sequence
  Synthetic
gcuugaccaagcugggagu

SEQ ID NO: 658167 - RNA, 20 nt, Artificial Sequence
  Synthetic
ugcuugaccaagcugggagu

SEQ ID NO: 658168 - RNA, 21 nt, Artificial Sequence
  Synthetic
augcuugaccaagcugggagu

SEQ ID NO: 658169 - RNA, 22 nt, Artificial Sequence
  Synthetic
uaugcuugaccaagcugggagu

SEQ ID NO: 658170 - RNA, 23 nt, Artificial Sequence
  Synthetic
uuaugcuugaccaagcugggagu

SEQ ID NO: 658171 - RNA, 24 nt, Artificial Sequence
  Synthetic
auuaugcuugaccaagcugggagu

SEQ ID NO: 658172 - RNA, 18 nt, Artificial Sequence
  Synthetic
cuucugcuuggugggagu

SEQ ID NO: 658173 - RNA, 19 nt, Artificial Sequence
  Synthetic
ucuucugcuuggugggagu

SEQ ID NO: 658174 - RNA, 20 nt, Artificial Sequence
  Synthetic
uucuucugcuuggugggagu

SEQ ID NO: 658175 - RNA, 21 nt, Artificial Sequence
  Synthetic
uuucuucugcuuggugggagu

SEQ ID NO: 658176 - RNA, 22 nt, Artificial Sequence
  Synthetic
guuucuucugcuuggugggagu

SEQ ID NO: 658177 - RNA, 23 nt, Artificial Sequence
  Synthetic
aguuucuucugcuuggugggagu

SEQ ID NO: 658178 - RNA, 24 nt, Artificial Sequence
  Synthetic
caguuucuucugcuuggugggagu

SEQ ID NO: 658179 - RNA, 18 nt, Artificial Sequence
  Synthetic
ucccagauacuugggagu

SEQ ID NO: 658180 - RNA, 19 nt, Artificial Sequence
  Synthetic
aucccagauacuugggagu

SEQ ID NO: 658181 - RNA, 20 nt, Artificial Sequence
  Synthetic
aaucccagauacuugggagu

SEQ ID NO: 658182 - RNA, 21 nt, Artificial Sequence
  Synthetic
uaaucccagauacuugggagu

SEQ ID NO: 658183 - RNA, 22 nt, Artificial Sequence
  Synthetic
guaaucccagauacuugggagu

SEQ ID NO: 658184 - RNA, 23 nt, Artificial Sequence
  Synthetic
uguaaucccagauacuugggagu

SEQ ID NO: 658185 - RNA, 24 nt, Artificial Sequence
  Synthetic
cuguaaucccagauacuugggagu

SEQ ID NO: 658186 - RNA, 18 nt, Artificial Sequence
  Synthetic
aguucagggcuugggagu

SEQ ID NO: 658187 - RNA, 19 nt, Artificial Sequence
  Synthetic
gaguucagggcuugggagu

SEQ ID NO: 658188 - RNA, 20 nt, Artificial Sequence
  Synthetic
agaguucagggcuugggagu

SEQ ID NO: 658189 - RNA, 21 nt, Artificial Sequence
  Synthetic
cagaguucagggcuugggagu

SEQ ID NO: 658190 - RNA, 22 nt, Artificial Sequence
  Synthetic
ucagaguucagggcuugggagu

SEQ ID NO: 658191 - RNA, 23 nt, Artificial Sequence
  Synthetic
cucagaguucagggcuugggagu

SEQ ID NO: 658192 - RNA, 24 nt, Artificial Sequence
  Synthetic
ccucagaguucagggcuugggagu

SEQ ID NO: 658193 - RNA, 18 nt, Artificial Sequence
  Synthetic
gaaguucagaaauggagu

SEQ ID NO: 658194 - RNA, 19 nt, Artificial Sequence
  Synthetic
agaaguucagaaauggagu

SEQ ID NO: 658195 - RNA, 20 nt, Artificial Sequence
  Synthetic
aagaaguucagaaauggagu

SEQ ID NO: 658196 - RNA, 21 nt, Artificial Sequence
  Synthetic
caagaaguucagaaauggagu

SEQ ID NO: 658197 - RNA, 22 nt, Artificial Sequence
  Synthetic
acaagaaguucagaaauggagu

SEQ ID NO: 658198 - RNA, 23 nt, Artificial Sequence
  Synthetic
aacaagaaguucagaaauggagu

SEQ ID NO: 658199 - RNA, 24 nt, Artificial Sequence
  Synthetic
gaacaagaaguucagaaauggagu

SEQ ID NO: 658200 - RNA, 18 nt, Artificial Sequence
  Synthetic
aguucgagccaauggagu

SEQ ID NO: 658201 - RNA, 19 nt, Artificial Sequence
  Synthetic
gaguucgagccaauggagu

SEQ ID NO: 658202 - RNA, 20 nt, Artificial Sequence
  Synthetic
ugaguucgagccaauggagu

SEQ ID NO: 658203 - RNA, 21 nt, Artificial Sequence
  Synthetic
cugaguucgagccaauggagu

SEQ ID NO: 658204 - RNA, 22 nt, Artificial Sequence
  Synthetic
acugaguucgagccaauggagu

SEQ ID NO: 658205 - RNA, 23 nt, Artificial Sequence
  Synthetic
gacugaguucgagccaauggagu

SEQ ID NO: 658206 - RNA, 24 nt, Artificial Sequence
  Synthetic
ugacugaguucgagccaauggagu

SEQ ID NO: 658207 - RNA, 18 nt, Artificial Sequence
  Synthetic
acuacaaagucauggagu

SEQ ID NO: 658208 - RNA, 19 nt, Artificial Sequence
  Synthetic
cacuacaaagucauggagu

SEQ ID NO: 658209 - RNA, 20 nt, Artificial Sequence
  Synthetic
acacuacaaagucauggagu

SEQ ID NO: 658210 - RNA, 21 nt, Artificial Sequence
  Synthetic
uacacuacaaagucauggagu

SEQ ID NO: 658211 - RNA, 22 nt, Artificial Sequence
  Synthetic
auacacuacaaagucauggagu

SEQ ID NO: 658212 - RNA, 23 nt, Artificial Sequence
  Synthetic
aauacacuacaaagucauggagu

SEQ ID NO: 658213 - RNA, 24 nt, Artificial Sequence
  Synthetic
caauacacuacaaagucauggagu

SEQ ID NO: 658214 - RNA, 18 nt, Artificial Sequence
  Synthetic
cugagaauuugauggagu

SEQ ID NO: 658215 - RNA, 19 nt, Artificial Sequence
  Synthetic
gcugagaauuugauggagu

SEQ ID NO: 658216 - RNA, 20 nt, Artificial Sequence
  Synthetic
agcugagaauuugauggagu

SEQ ID NO: 658217 - RNA, 21 nt, Artificial Sequence
  Synthetic
uagcugagaauuugauggagu

SEQ ID NO: 658218 - RNA, 22 nt, Artificial Sequence
  Synthetic
auagcugagaauuugauggagu

SEQ ID NO: 658219 - RNA, 23 nt, Artificial Sequence
  Synthetic
aauagcugagaauuugauggagu

SEQ ID NO: 658220 - RNA, 24 nt, Artificial Sequence
  Synthetic
aaauagcugagaauuugauggagu

SEQ ID NO: 658221 - RNA, 18 nt, Artificial Sequence
  Synthetic
uaaguauugguauggagu

SEQ ID NO: 658222 - RNA, 19 nt, Artificial Sequence
  Synthetic
uuaaguauugguauggagu

SEQ ID NO: 658223 - RNA, 20 nt, Artificial Sequence
  Synthetic
auuaaguauugguauggagu

SEQ ID NO: 658224 - RNA, 21 nt, Artificial Sequence
  Synthetic
gauuaaguauugguauggagu

SEQ ID NO: 658225 - RNA, 22 nt, Artificial Sequence
  Synthetic
cgauuaaguauugguauggagu

SEQ ID NO: 658226 - RNA, 23 nt, Artificial Sequence
  Synthetic
ucgauuaaguauugguauggagu

SEQ ID NO: 658227 - RNA, 24 nt, Artificial Sequence
  Synthetic
aucgauuaaguauugguauggagu

SEQ ID NO: 658228 - RNA, 18 nt, Artificial Sequence
  Synthetic
uaacaugguaacuggagu

SEQ ID NO: 658229 - RNA, 19 nt, Artificial Sequence
  Synthetic
cuaacaugguaacuggagu

SEQ ID NO: 658230 - RNA, 20 nt, Artificial Sequence
  Synthetic
gcuaacaugguaacuggagu

SEQ ID NO: 658231 - RNA, 21 nt, Artificial Sequence
  Synthetic
ggcuaacaugguaacuggagu

SEQ ID NO: 658232 - RNA, 22 nt, Artificial Sequence
  Synthetic
aggcuaacaugguaacuggagu

SEQ ID NO: 658233 - RNA, 23 nt, Artificial Sequence
  Synthetic
gaggcuaacaugguaacuggagu

SEQ ID NO: 658234 - RNA, 24 nt, Artificial Sequence
  Synthetic
ggaggcuaacaugguaacuggagu

SEQ ID NO: 658235 - RNA, 18 nt, Artificial Sequence
  Synthetic
guggaagccuacuggagu

SEQ ID NO: 658236 - RNA, 19 nt, Artificial Sequence
  Synthetic
cguggaagccuacuggagu

SEQ ID NO: 658237 - RNA, 20 nt, Artificial Sequence
  Synthetic
acguggaagccuacuggagu

SEQ ID NO: 658238 - RNA, 21 nt, Artificial Sequence
  Synthetic
gacguggaagccuacuggagu

SEQ ID NO: 658239 - RNA, 22 nt, Artificial Sequence
  Synthetic
agacguggaagccuacuggagu

SEQ ID NO: 658240 - RNA, 23 nt, Artificial Sequence
  Synthetic
cagacguggaagccuacuggagu

SEQ ID NO: 658241 - RNA, 24 nt, Artificial Sequence
  Synthetic
acagacguggaagccuacuggagu

SEQ ID NO: 658242 - RNA, 18 nt, Artificial Sequence
  Synthetic
cauuauuaguauuggagu

SEQ ID NO: 658243 - RNA, 19 nt, Artificial Sequence
  Synthetic
gcauuauuaguauuggagu

SEQ ID NO: 658244 - RNA, 20 nt, Artificial Sequence
  Synthetic
ggcauuauuaguauuggagu

SEQ ID NO: 658245 - RNA, 21 nt, Artificial Sequence
  Synthetic
aggcauuauuaguauuggagu

SEQ ID NO: 658246 - RNA, 22 nt, Artificial Sequence
  Synthetic
gaggcauuauuaguauuggagu

SEQ ID NO: 658247 - RNA, 23 nt, Artificial Sequence
  Synthetic
ugaggcauuauuaguauuggagu

SEQ ID NO: 658248 - RNA, 24 nt, Artificial Sequence
  Synthetic
uugaggcauuauuaguauuggagu

SEQ ID NO: 658249 - RNA, 18 nt, Artificial Sequence
  Synthetic
ucaaauguuccuuggagu

SEQ ID NO: 658250 - RNA, 19 nt, Artificial Sequence
  Synthetic
uucaaauguuccuuggagu

SEQ ID NO: 658251 - RNA, 20 nt, Artificial Sequence
  Synthetic
auucaaauguuccuuggagu

SEQ ID NO: 658252 - RNA, 21 nt, Artificial Sequence
  Synthetic
cauucaaauguuccuuggagu

SEQ ID NO: 658253 - RNA, 22 nt, Artificial Sequence
  Synthetic
gcauucaaauguuccuuggagu

SEQ ID NO: 658254 - RNA, 23 nt, Artificial Sequence
  Synthetic
ugcauucaaauguuccuuggagu

SEQ ID NO: 658255 - RNA, 24 nt, Artificial Sequence
  Synthetic
augcauucaaauguuccuuggagu

SEQ ID NO: 658256 - RNA, 18 nt, Artificial Sequence
  Synthetic
aaucccaaggcuuggagu

SEQ ID NO: 658257 - RNA, 19 nt, Artificial Sequence
  Synthetic
aaaucccaaggcuuggagu

SEQ ID NO: 658258 - RNA, 20 nt, Artificial Sequence
  Synthetic
aaaaucccaaggcuuggagu

SEQ ID NO: 658259 - RNA, 21 nt, Artificial Sequence
  Synthetic
uaaaaucccaaggcuuggagu

SEQ ID NO: 658260 - RNA, 22 nt, Artificial Sequence
  Synthetic
auaaaaucccaaggcuuggagu

SEQ ID NO: 658261 - RNA, 23 nt, Artificial Sequence
  Synthetic
aauaaaaucccaaggcuuggagu

SEQ ID NO: 658262 - RNA, 24 nt, Artificial Sequence
  Synthetic
aaauaaaaucccaaggcuuggagu

SEQ ID NO: 658263 - RNA, 18 nt, Artificial Sequence
  Synthetic
ggugugagcguuuggagu

SEQ ID NO: 658264 - RNA, 19 nt, Artificial Sequence
  Synthetic
uggugugagcguuuggagu

SEQ ID NO: 658265 - RNA, 20 nt, Artificial Sequence
  Synthetic
guggugugagcguuuggagu

SEQ ID NO: 658266 - RNA, 21 nt, Artificial Sequence
  Synthetic
uguggugugagcguuuggagu

SEQ ID NO: 658267 - RNA, 22 nt, Artificial Sequence
  Synthetic
cuguggugugagcguuuggagu

SEQ ID NO: 658268 - RNA, 23 nt, Artificial Sequence
  Synthetic
ccuguggugugagcguuuggagu

SEQ ID NO: 658269 - RNA, 24 nt, Artificial Sequence
  Synthetic
uccuguggugugagcguuuggagu

SEQ ID NO: 658270 - RNA, 18 nt, Artificial Sequence
  Synthetic
uugcuauuggaaaugagu

SEQ ID NO: 658271 - RNA, 19 nt, Artificial Sequence
  Synthetic
auugcuauuggaaaugagu

SEQ ID NO: 658272 - RNA, 20 nt, Artificial Sequence
  Synthetic
uauugcuauuggaaaugagu

SEQ ID NO: 658273 - RNA, 21 nt, Artificial Sequence
  Synthetic
cuauugcuauuggaaaugagu

SEQ ID NO: 658274 - RNA, 22 nt, Artificial Sequence
  Synthetic
ccuauugcuauuggaaaugagu

SEQ ID NO: 658275 - RNA, 23 nt, Artificial Sequence
  Synthetic
cccuauugcuauuggaaaugagu

SEQ ID NO: 658276 - RNA, 24 nt, Artificial Sequence
  Synthetic
acccuauugcuauuggaaaugagu

SEQ ID NO: 658277 - RNA, 18 nt, Artificial Sequence
  Synthetic
agacccuucagaaugagu

SEQ ID NO: 658278 - RNA, 19 nt, Artificial Sequence
  Synthetic
gagacccuucagaaugagu

SEQ ID NO: 658279 - RNA, 20 nt, Artificial Sequence
  Synthetic
agagacccuucagaaugagu

SEQ ID NO: 658280 - RNA, 21 nt, Artificial Sequence
  Synthetic
gagagacccuucagaaugagu

SEQ ID NO: 658281 - RNA, 22 nt, Artificial Sequence
  Synthetic
ggagagacccuucagaaugagu

SEQ ID NO: 658282 - RNA, 23 nt, Artificial Sequence
  Synthetic
uggagagacccuucagaaugagu

SEQ ID NO: 658283 - RNA, 24 nt, Artificial Sequence
  Synthetic
uuggagagacccuucagaaugagu

SEQ ID NO: 658284 - RNA, 18 nt, Artificial Sequence
  Synthetic
gcaagaaggagaaugagu

SEQ ID NO: 658285 - RNA, 19 nt, Artificial Sequence
  Synthetic
ggcaagaaggagaaugagu

SEQ ID NO: 658286 - RNA, 20 nt, Artificial Sequence
  Synthetic
uggcaagaaggagaaugagu

SEQ ID NO: 658287 - RNA, 21 nt, Artificial Sequence
  Synthetic
guggcaagaaggagaaugagu

SEQ ID NO: 658288 - RNA, 22 nt, Artificial Sequence
  Synthetic
gguggcaagaaggagaaugagu

SEQ ID NO: 658289 - RNA, 23 nt, Artificial Sequence
  Synthetic
agguggcaagaaggagaaugagu

SEQ ID NO: 658290 - RNA, 24 nt, Artificial Sequence
  Synthetic
aagguggcaagaaggagaaugagu

SEQ ID NO: 658291 - RNA, 18 nt, Artificial Sequence
  Synthetic
agaauuucaaacaugagu

SEQ ID NO: 658292 - RNA, 19 nt, Artificial Sequence
  Synthetic
aagaauuucaaacaugagu

SEQ ID NO: 658293 - RNA, 20 nt, Artificial Sequence
  Synthetic
gaagaauuucaaacaugagu

SEQ ID NO: 658294 - RNA, 21 nt, Artificial Sequence
  Synthetic
ugaagaauuucaaacaugagu

SEQ ID NO: 658295 - RNA, 22 nt, Artificial Sequence
  Synthetic
uugaagaauuucaaacaugagu

SEQ ID NO: 658296 - RNA, 23 nt, Artificial Sequence
  Synthetic
auugaagaauuucaaacaugagu

SEQ ID NO: 658297 - RNA, 24 nt, Artificial Sequence
  Synthetic
uauugaagaauuucaaacaugagu

SEQ ID NO: 658298 - RNA, 18 nt, Artificial Sequence
  Synthetic
gaaugggcuaacaugagu

SEQ ID NO: 658299 - RNA, 19 nt, Artificial Sequence
  Synthetic
ugaaugggcuaacaugagu

SEQ ID NO: 658300 - RNA, 20 nt, Artificial Sequence
  Synthetic
augaaugggcuaacaugagu

SEQ ID NO: 658301 - RNA, 21 nt, Artificial Sequence
  Synthetic
aaugaaugggcuaacaugagu

SEQ ID NO: 658302 - RNA, 22 nt, Artificial Sequence
  Synthetic
aaaugaaugggcuaacaugagu

SEQ ID NO: 658303 - RNA, 23 nt, Artificial Sequence
  Synthetic
gaaaugaaugggcuaacaugagu

SEQ ID NO: 658304 - RNA, 24 nt, Artificial Sequence
  Synthetic
ugaaaugaaugggcuaacaugagu

SEQ ID NO: 658305 - RNA, 18 nt, Artificial Sequence
  Synthetic
aacuuuauagacaugagu

SEQ ID NO: 658306 - RNA, 19 nt, Artificial Sequence
  Synthetic
gaacuuuauagacaugagu

SEQ ID NO: 658307 - RNA, 20 nt, Artificial Sequence
  Synthetic
agaacuuuauagacaugagu

SEQ ID NO: 658308 - RNA, 21 nt, Artificial Sequence
  Synthetic
aagaacuuuauagacaugagu

SEQ ID NO: 658309 - RNA, 22 nt, Artificial Sequence
  Synthetic
gaagaacuuuauagacaugagu

SEQ ID NO: 658310 - RNA, 23 nt, Artificial Sequence
  Synthetic
ggaagaacuuuauagacaugagu

SEQ ID NO: 658311 - RNA, 24 nt, Artificial Sequence
  Synthetic
gggaagaacuuuauagacaugagu

SEQ ID NO: 658312 - RNA, 18 nt, Artificial Sequence
  Synthetic
gcuuauuagcccaugagu

SEQ ID NO: 658313 - RNA, 19 nt, Artificial Sequence
  Synthetic
ggcuuauuagcccaugagu

SEQ ID NO: 658314 - RNA, 20 nt, Artificial Sequence
  Synthetic
aggcuuauuagcccaugagu

SEQ ID NO: 658315 - RNA, 21 nt, Artificial Sequence
  Synthetic
uaggcuuauuagcccaugagu

SEQ ID NO: 658316 - RNA, 22 nt, Artificial Sequence
  Synthetic
cuaggcuuauuagcccaugagu

SEQ ID NO: 658317 - RNA, 23 nt, Artificial Sequence
  Synthetic
ucuaggcuuauuagcccaugagu

SEQ ID NO: 658318 - RNA, 24 nt, Artificial Sequence
  Synthetic
uucuaggcuuauuagcccaugagu

SEQ ID NO: 658319 - RNA, 18 nt, Artificial Sequence
  Synthetic
gacuuccuucugaugagu

SEQ ID NO: 658320 - RNA, 19 nt, Artificial Sequence
  Synthetic
agacuuccuucugaugagu

SEQ ID NO: 658321 - RNA, 20 nt, Artificial Sequence
  Synthetic
aagacuuccuucugaugagu

SEQ ID NO: 658322 - RNA, 21 nt, Artificial Sequence
  Synthetic
aaagacuuccuucugaugagu

SEQ ID NO: 658323 - RNA, 22 nt, Artificial Sequence
  Synthetic
gaaagacuuccuucugaugagu

SEQ ID NO: 658324 - RNA, 23 nt, Artificial Sequence
  Synthetic
ggaaagacuuccuucugaugagu

SEQ ID NO: 658325 - RNA, 24 nt, Artificial Sequence
  Synthetic
uggaaagacuuccuucugaugagu

SEQ ID NO: 658326 - RNA, 18 nt, Artificial Sequence
  Synthetic
gcauagaacuugaugagu

SEQ ID NO: 658327 - RNA, 19 nt, Artificial Sequence
  Synthetic
ugcauagaacuugaugagu

SEQ ID NO: 658328 - RNA, 20 nt, Artificial Sequence
  Synthetic
augcauagaacuugaugagu

SEQ ID NO: 658329 - RNA, 21 nt, Artificial Sequence
  Synthetic
aaugcauagaacuugaugagu

SEQ ID NO: 658330 - RNA, 22 nt, Artificial Sequence
  Synthetic
uaaugcauagaacuugaugagu

SEQ ID NO: 658331 - RNA, 23 nt, Artificial Sequence
  Synthetic
uuaaugcauagaacuugaugagu

SEQ ID NO: 658332 - RNA, 24 nt, Artificial Sequence
  Synthetic
uuuaaugcauagaacuugaugagu

SEQ ID NO: 658333 - RNA, 18 nt, Artificial Sequence
  Synthetic
gcaggugaaaauaugagu

SEQ ID NO: 658334 - RNA, 19 nt, Artificial Sequence
  Synthetic
agcaggugaaaauaugagu

SEQ ID NO: 658335 - RNA, 20 nt, Artificial Sequence
  Synthetic
cagcaggugaaaauaugagu

SEQ ID NO: 658336 - RNA, 21 nt, Artificial Sequence
  Synthetic
ucagcaggugaaaauaugagu

SEQ ID NO: 658337 - RNA, 22 nt, Artificial Sequence
  Synthetic
gucagcaggugaaaauaugagu

SEQ ID NO: 658338 - RNA, 23 nt, Artificial Sequence
  Synthetic
ugucagcaggugaaaauaugagu

SEQ ID NO: 658339 - RNA, 24 nt, Artificial Sequence
  Synthetic
uugucagcaggugaaaauaugagu

SEQ ID NO: 658340 - RNA, 21 nt, Artificial Sequence
  Synthetic
guucaauucccaccuaugagu

SEQ ID NO: 658341 - RNA, 22 nt, Artificial Sequence
  Synthetic
uguucaauucccaccuaugagu

SEQ ID NO: 658342 - RNA, 23 nt, Artificial Sequence
  Synthetic
uuguucaauucccaccuaugagu

SEQ ID NO: 658343 - RNA, 24 nt, Artificial Sequence
  Synthetic
auuguucaauucccaccuaugagu

SEQ ID NO: 658344 - RNA, 18 nt, Artificial Sequence
  Synthetic
caacucccaauuaugagu

SEQ ID NO: 658345 - RNA, 19 nt, Artificial Sequence
  Synthetic
ucaacucccaauuaugagu

SEQ ID NO: 658346 - RNA, 20 nt, Artificial Sequence
  Synthetic
cucaacucccaauuaugagu

SEQ ID NO: 658347 - RNA, 21 nt, Artificial Sequence
  Synthetic
gcucaacucccaauuaugagu

SEQ ID NO: 658348 - RNA, 22 nt, Artificial Sequence
  Synthetic
ugcucaacucccaauuaugagu

SEQ ID NO: 658349 - RNA, 23 nt, Artificial Sequence
  Synthetic
uugcucaacucccaauuaugagu

SEQ ID NO: 658350 - RNA, 24 nt, Artificial Sequence
  Synthetic
auugcucaacucccaauuaugagu

SEQ ID NO: 658351 - RNA, 18 nt, Artificial Sequence
  Synthetic
uuccuugccauuaugagu

SEQ ID NO: 658352 - RNA, 19 nt, Artificial Sequence
  Synthetic
auuccuugccauuaugagu

SEQ ID NO: 658353 - RNA, 20 nt, Artificial Sequence
  Synthetic
uauuccuugccauuaugagu

SEQ ID NO: 658354 - RNA, 21 nt, Artificial Sequence
  Synthetic
uuauuccuugccauuaugagu

SEQ ID NO: 658355 - RNA, 22 nt, Artificial Sequence
  Synthetic
uuuauuccuugccauuaugagu

SEQ ID NO: 658356 - RNA, 23 nt, Artificial Sequence
  Synthetic
auuuauuccuugccauuaugagu

SEQ ID NO: 658357 - RNA, 24 nt, Artificial Sequence
  Synthetic
gauuuauuccuugccauuaugagu

SEQ ID NO: 658358 - RNA, 18 nt, Artificial Sequence
  Synthetic
caacucccacuuaugagu

SEQ ID NO: 658359 - RNA, 19 nt, Artificial Sequence
  Synthetic
ucaacucccacuuaugagu

SEQ ID NO: 658360 - RNA, 20 nt, Artificial Sequence
  Synthetic
uucaacucccacuuaugagu

SEQ ID NO: 658361 - RNA, 21 nt, Artificial Sequence
  Synthetic
guucaacucccacuuaugagu

SEQ ID NO: 658362 - RNA, 22 nt, Artificial Sequence
  Synthetic
cguucaacucccacuuaugagu

SEQ ID NO: 658363 - RNA, 23 nt, Artificial Sequence
  Synthetic
ucguucaacucccacuuaugagu

SEQ ID NO: 658364 - RNA, 24 nt, Artificial Sequence
  Synthetic
aucguucaacucccacuuaugagu

SEQ ID NO: 658365 - RNA, 18 nt, Artificial Sequence
  Synthetic
ccaaucuuacaacugagu

SEQ ID NO: 658366 - RNA, 19 nt, Artificial Sequence
  Synthetic
cccaaucuuacaacugagu

SEQ ID NO: 658367 - RNA, 20 nt, Artificial Sequence
  Synthetic
ucccaaucuuacaacugagu

SEQ ID NO: 658368 - RNA, 21 nt, Artificial Sequence
  Synthetic
uucccaaucuuacaacugagu

SEQ ID NO: 658369 - RNA, 22 nt, Artificial Sequence
  Synthetic
auucccaaucuuacaacugagu

SEQ ID NO: 658370 - RNA, 23 nt, Artificial Sequence
  Synthetic
aauucccaaucuuacaacugagu

SEQ ID NO: 658371 - RNA, 24 nt, Artificial Sequence
  Synthetic
gaauucccaaucuuacaacugagu

SEQ ID NO: 658372 - RNA, 18 nt, Artificial Sequence
  Synthetic
ccaguguaauaacugagu

SEQ ID NO: 658373 - RNA, 19 nt, Artificial Sequence
  Synthetic
cccaguguaauaacugagu

SEQ ID NO: 658374 - RNA, 20 nt, Artificial Sequence
  Synthetic
ccccaguguaauaacugagu

SEQ ID NO: 658375 - RNA, 21 nt, Artificial Sequence
  Synthetic
gccccaguguaauaacugagu

SEQ ID NO: 658376 - RNA, 22 nt, Artificial Sequence
  Synthetic
agccccaguguaauaacugagu

SEQ ID NO: 658377 - RNA, 23 nt, Artificial Sequence
  Synthetic
aagccccaguguaauaacugagu

SEQ ID NO: 658378 - RNA, 24 nt, Artificial Sequence
  Synthetic
caagccccaguguaauaacugagu

SEQ ID NO: 658379 - RNA, 18 nt, Artificial Sequence
  Synthetic
ggacagagaacacugagu

SEQ ID NO: 658380 - RNA, 19 nt, Artificial Sequence
  Synthetic
aggacagagaacacugagu

SEQ ID NO: 658381 - RNA, 20 nt, Artificial Sequence
  Synthetic
aaggacagagaacacugagu

SEQ ID NO: 658382 - RNA, 21 nt, Artificial Sequence
  Synthetic
aaaggacagagaacacugagu

SEQ ID NO: 658383 - RNA, 22 nt, Artificial Sequence
  Synthetic
caaaggacagagaacacugagu

SEQ ID NO: 658384 - RNA, 23 nt, Artificial Sequence
  Synthetic
acaaaggacagagaacacugagu

SEQ ID NO: 658385 - RNA, 24 nt, Artificial Sequence
  Synthetic
uacaaaggacagagaacacugagu

SEQ ID NO: 658386 - RNA, 18 nt, Artificial Sequence
  Synthetic
uuggcuacaugacugagu

SEQ ID NO: 658387 - RNA, 19 nt, Artificial Sequence
  Synthetic
uuuggcuacaugacugagu

SEQ ID NO: 658388 - RNA, 20 nt, Artificial Sequence
  Synthetic
guuuggcuacaugacugagu

SEQ ID NO: 658389 - RNA, 21 nt, Artificial Sequence
  Synthetic
aguuuggcuacaugacugagu

SEQ ID NO: 658390 - RNA, 22 nt, Artificial Sequence
  Synthetic
uaguuuggcuacaugacugagu

SEQ ID NO: 658391 - RNA, 23 nt, Artificial Sequence
  Synthetic
uuaguuuggcuacaugacugagu

SEQ ID NO: 658392 - RNA, 24 nt, Artificial Sequence
  Synthetic
auuaguuuggcuacaugacugagu

SEQ ID NO: 658393 - RNA, 18 nt, Artificial Sequence
  Synthetic
uuauuucaguuacugagu

SEQ ID NO: 658394 - RNA, 19 nt, Artificial Sequence
  Synthetic
uuuauuucaguuacugagu

SEQ ID NO: 658395 - RNA, 20 nt, Artificial Sequence
  Synthetic
uuuuauuucaguuacugagu

SEQ ID NO: 658396 - RNA, 21 nt, Artificial Sequence
  Synthetic
auuuuauuucaguuacugagu

SEQ ID NO: 658397 - RNA, 22 nt, Artificial Sequence
  Synthetic
aauuuuauuucaguuacugagu

SEQ ID NO: 658398 - RNA, 23 nt, Artificial Sequence
  Synthetic
caauuuuauuucaguuacugagu

SEQ ID NO: 658399 - RNA, 24 nt, Artificial Sequence
  Synthetic
ucaauuuuauuucaguuacugagu

SEQ ID NO: 658400 - RNA, 18 nt, Artificial Sequence
  Synthetic
uauuaaaaacaccugagu

SEQ ID NO: 658401 - RNA, 19 nt, Artificial Sequence
  Synthetic
auauuaaaaacaccugagu

SEQ ID NO: 658402 - RNA, 20 nt, Artificial Sequence
  Synthetic
aauauuaaaaacaccugagu

SEQ ID NO: 658403 - RNA, 21 nt, Artificial Sequence
  Synthetic
aaauauuaaaaacaccugagu

SEQ ID NO: 658404 - RNA, 22 nt, Artificial Sequence
  Synthetic
uaaauauuaaaaacaccugagu

SEQ ID NO: 658405 - RNA, 23 nt, Artificial Sequence
  Synthetic
auaaauauuaaaaacaccugagu

SEQ ID NO: 658406 - RNA, 24 nt, Artificial Sequence
  Synthetic
gauaaauauuaaaaacaccugagu

SEQ ID NO: 658407 - RNA, 18 nt, Artificial Sequence
  Synthetic
cuucauaacacccugagu

SEQ ID NO: 658408 - RNA, 19 nt, Artificial Sequence
  Synthetic
gcuucauaacacccugagu

SEQ ID NO: 658409 - RNA, 20 nt, Artificial Sequence
  Synthetic
ugcuucauaacacccugagu

SEQ ID NO: 658410 - RNA, 21 nt, Artificial Sequence
  Synthetic
cugcuucauaacacccugagu

SEQ ID NO: 658411 - RNA, 22 nt, Artificial Sequence
  Synthetic
ucugcuucauaacacccugagu

SEQ ID NO: 658412 - RNA, 23 nt, Artificial Sequence
  Synthetic
aucugcuucauaacacccugagu

SEQ ID NO: 658413 - RNA, 24 nt, Artificial Sequence
  Synthetic
aaucugcuucauaacacccugagu

SEQ ID NO: 658414 - RNA, 18 nt, Artificial Sequence
  Synthetic
auuuuacauauccugagu

SEQ ID NO: 658415 - RNA, 19 nt, Artificial Sequence
  Synthetic
aauuuuacauauccugagu

SEQ ID NO: 658416 - RNA, 20 nt, Artificial Sequence
  Synthetic
caauuuuacauauccugagu

SEQ ID NO: 658417 - RNA, 21 nt, Artificial Sequence
  Synthetic
ucaauuuuacauauccugagu

SEQ ID NO: 658418 - RNA, 22 nt, Artificial Sequence
  Synthetic
aucaauuuuacauauccugagu

SEQ ID NO: 658419 - RNA, 23 nt, Artificial Sequence
  Synthetic
caucaauuuuacauauccugagu

SEQ ID NO: 658420 - RNA, 24 nt, Artificial Sequence
  Synthetic
acaucaauuuuacauauccugagu

SEQ ID NO: 658421 - RNA, 18 nt, Artificial Sequence
  Synthetic
gucaugagauuccugagu

SEQ ID NO: 658422 - RNA, 19 nt, Artificial Sequence
  Synthetic
ugucaugagauuccugagu

SEQ ID NO: 658423 - RNA, 20 nt, Artificial Sequence
  Synthetic
uugucaugagauuccugagu

SEQ ID NO: 658424 - RNA, 21 nt, Artificial Sequence
  Synthetic
uuugucaugagauuccugagu

SEQ ID NO: 658425 - RNA, 22 nt, Artificial Sequence
  Synthetic
cuuugucaugagauuccugagu

SEQ ID NO: 658426 - RNA, 23 nt, Artificial Sequence
  Synthetic
ucuuugucaugagauuccugagu

SEQ ID NO: 658427 - RNA, 24 nt, Artificial Sequence
  Synthetic
uucuuugucaugagauuccugagu

SEQ ID NO: 658428 - RNA, 18 nt, Artificial Sequence
  Synthetic
ccugucuaccagcugagu

SEQ ID NO: 658429 - RNA, 19 nt, Artificial Sequence
  Synthetic
uccugucuaccagcugagu

SEQ ID NO: 658430 - RNA, 20 nt, Artificial Sequence
  Synthetic
guccugucuaccagcugagu

SEQ ID NO: 658431 - RNA, 21 nt, Artificial Sequence
  Synthetic
aguccugucuaccagcugagu

SEQ ID NO: 658432 - RNA, 22 nt, Artificial Sequence
  Synthetic
uaguccugucuaccagcugagu

SEQ ID NO: 658433 - RNA, 23 nt, Artificial Sequence
  Synthetic
guaguccugucuaccagcugagu

SEQ ID NO: 658434 - RNA, 24 nt, Artificial Sequence
  Synthetic
uguaguccugucuaccagcugagu

SEQ ID NO: 658435 - RNA, 18 nt, Artificial Sequence
  Synthetic
guacaaggcaugcugagu

SEQ ID NO: 658436 - RNA, 19 nt, Artificial Sequence
  Synthetic
aguacaaggcaugcugagu

SEQ ID NO: 658437 - RNA, 20 nt, Artificial Sequence
  Synthetic
gaguacaaggcaugcugagu

SEQ ID NO: 658438 - RNA, 21 nt, Artificial Sequence
  Synthetic
agaguacaaggcaugcugagu

SEQ ID NO: 658439 - RNA, 22 nt, Artificial Sequence
  Synthetic
cagaguacaaggcaugcugagu

SEQ ID NO: 658440 - RNA, 23 nt, Artificial Sequence
  Synthetic
ucagaguacaaggcaugcugagu

SEQ ID NO: 658441 - RNA, 24 nt, Artificial Sequence
  Synthetic
gucagaguacaaggcaugcugagu

SEQ ID NO: 658442 - RNA, 18 nt, Artificial Sequence
  Synthetic
auuaaagaaaaucugagu

SEQ ID NO: 658443 - RNA, 19 nt, Artificial Sequence
  Synthetic
cauuaaagaaaaucugagu

SEQ ID NO: 658444 - RNA, 20 nt, Artificial Sequence
  Synthetic
ucauuaaagaaaaucugagu

SEQ ID NO: 658445 - RNA, 21 nt, Artificial Sequence
  Synthetic
uucauuaaagaaaaucugagu

SEQ ID NO: 658446 - RNA, 22 nt, Artificial Sequence
  Synthetic
auucauuaaagaaaaucugagu

SEQ ID NO: 658447 - RNA, 23 nt, Artificial Sequence
  Synthetic
aauucauuaaagaaaaucugagu

SEQ ID NO: 658448 - RNA, 24 nt, Artificial Sequence
  Synthetic
aaauucauuaaagaaaaucugagu

SEQ ID NO: 658449 - RNA, 18 nt, Artificial Sequence
  Synthetic
uauuccaccucucugagu

SEQ ID NO: 658450 - RNA, 19 nt, Artificial Sequence
  Synthetic
uuauuccaccucucugagu

SEQ ID NO: 658451 - RNA, 20 nt, Artificial Sequence
  Synthetic
auuauuccaccucucugagu

SEQ ID NO: 658452 - RNA, 21 nt, Artificial Sequence
  Synthetic
gauuauuccaccucucugagu

SEQ ID NO: 658453 - RNA, 22 nt, Artificial Sequence
  Synthetic
agauuauuccaccucucugagu

SEQ ID NO: 658454 - RNA, 23 nt, Artificial Sequence
  Synthetic
aagauuauuccaccucucugagu

SEQ ID NO: 658455 - RNA, 24 nt, Artificial Sequence
  Synthetic
uaagauuauuccaccucucugagu

SEQ ID NO: 658456 - RNA, 18 nt, Artificial Sequence
  Synthetic
cagaguaacagucugagu

SEQ ID NO: 658457 - RNA, 19 nt, Artificial Sequence
  Synthetic
ccagaguaacagucugagu

SEQ ID NO: 658458 - RNA, 20 nt, Artificial Sequence
  Synthetic
accagaguaacagucugagu

SEQ ID NO: 658459 - RNA, 21 nt, Artificial Sequence
  Synthetic
caccagaguaacagucugagu

SEQ ID NO: 658460 - RNA, 22 nt, Artificial Sequence
  Synthetic
ucaccagaguaacagucugagu

SEQ ID NO: 658461 - RNA, 23 nt, Artificial Sequence
  Synthetic
gucaccagaguaacagucugagu

SEQ ID NO: 658462 - RNA, 24 nt, Artificial Sequence
  Synthetic
ugucaccagaguaacagucugagu

SEQ ID NO: 658463 - RNA, 18 nt, Artificial Sequence
  Synthetic
aggagaggcugucugagu

SEQ ID NO: 658464 - RNA, 19 nt, Artificial Sequence
  Synthetic
aaggagaggcugucugagu

SEQ ID NO: 658465 - RNA, 20 nt, Artificial Sequence
  Synthetic
gaaggagaggcugucugagu

SEQ ID NO: 658466 - RNA, 21 nt, Artificial Sequence
  Synthetic
ugaaggagaggcugucugagu

SEQ ID NO: 658467 - RNA, 22 nt, Artificial Sequence
  Synthetic
cugaaggagaggcugucugagu

SEQ ID NO: 658468 - RNA, 23 nt, Artificial Sequence
  Synthetic
ucugaaggagaggcugucugagu

SEQ ID NO: 658469 - RNA, 24 nt, Artificial Sequence
  Synthetic
aucugaaggagaggcugucugagu

SEQ ID NO: 658470 - RNA, 18 nt, Artificial Sequence
  Synthetic
caaagugcuuuucugagu

SEQ ID NO: 658471 - RNA, 19 nt, Artificial Sequence
  Synthetic
ccaaagugcuuuucugagu

SEQ ID NO: 658472 - RNA, 20 nt, Artificial Sequence
  Synthetic
uccaaagugcuuuucugagu

SEQ ID NO: 658473 - RNA, 21 nt, Artificial Sequence
  Synthetic
uuccaaagugcuuuucugagu

SEQ ID NO: 658474 - RNA, 22 nt, Artificial Sequence
  Synthetic
auuccaaagugcuuuucugagu

SEQ ID NO: 658475 - RNA, 23 nt, Artificial Sequence
  Synthetic
cauuccaaagugcuuuucugagu

SEQ ID NO: 658476 - RNA, 24 nt, Artificial Sequence
  Synthetic
gcauuccaaagugcuuuucugagu

SEQ ID NO: 658477 - RNA, 18 nt, Artificial Sequence
  Synthetic
aauaaaaauggagugagu

SEQ ID NO: 658478 - RNA, 19 nt, Artificial Sequence
  Synthetic
aaauaaaaauggagugagu

SEQ ID NO: 658479 - RNA, 20 nt, Artificial Sequence
  Synthetic
aaaauaaaaauggagugagu

SEQ ID NO: 658480 - RNA, 21 nt, Artificial Sequence
  Synthetic
uaaaauaaaaauggagugagu

SEQ ID NO: 658481 - RNA, 22 nt, Artificial Sequence
  Synthetic
uuaaaauaaaaauggagugagu

SEQ ID NO: 658482 - RNA, 23 nt, Artificial Sequence
  Synthetic
uuuaaaauaaaaauggagugagu

SEQ ID NO: 658483 - RNA, 24 nt, Artificial Sequence
  Synthetic
uuuuaaaauaaaaauggagugagu

SEQ ID NO: 658484 - RNA, 18 nt, Artificial Sequence
  Synthetic
agacaagcaaacgugagu

SEQ ID NO: 658485 - RNA, 19 nt, Artificial Sequence
  Synthetic
aagacaagcaaacgugagu

SEQ ID NO: 658486 - RNA, 20 nt, Artificial Sequence
  Synthetic
gaagacaagcaaacgugagu

SEQ ID NO: 658487 - RNA, 21 nt, Artificial Sequence
  Synthetic
ugaagacaagcaaacgugagu

SEQ ID NO: 658488 - RNA, 22 nt, Artificial Sequence
  Synthetic
uugaagacaagcaaacgugagu

SEQ ID NO: 658489 - RNA, 23 nt, Artificial Sequence
  Synthetic
uuugaagacaagcaaacgugagu

SEQ ID NO: 658490 - RNA, 24 nt, Artificial Sequence
  Synthetic
auuugaagacaagcaaacgugagu

SEQ ID NO: 658491 - RNA, 18 nt, Artificial Sequence
  Synthetic
uaccaacaacaggugagu

SEQ ID NO: 658492 - RNA, 19 nt, Artificial Sequence
  Synthetic
uuaccaacaacaggugagu

SEQ ID NO: 658493 - RNA, 20 nt, Artificial Sequence
  Synthetic
cuuaccaacaacaggugagu

SEQ ID NO: 658494 - RNA, 21 nt, Artificial Sequence
  Synthetic
acuuaccaacaacaggugagu

SEQ ID NO: 658495 - RNA, 22 nt, Artificial Sequence
  Synthetic
aacuuaccaacaacaggugagu

SEQ ID NO: 658496 - RNA, 23 nt, Artificial Sequence
  Synthetic
aaacuuaccaacaacaggugagu

SEQ ID NO: 658497 - RNA, 24 nt, Artificial Sequence
  Synthetic
gaaacuuaccaacaacaggugagu

SEQ ID NO: 658498 - RNA, 18 nt, Artificial Sequence
  Synthetic
ucuuugcaugaggugagu

SEQ ID NO: 658499 - RNA, 19 nt, Artificial Sequence
  Synthetic
aucuuugcaugaggugagu

SEQ ID NO: 658500 - RNA, 20 nt, Artificial Sequence
  Synthetic
aaucuuugcaugaggugagu

SEQ ID NO: 658501 - RNA, 21 nt, Artificial Sequence
  Synthetic
aaaucuuugcaugaggugagu

SEQ ID NO: 658502 - RNA, 22 nt, Artificial Sequence
  Synthetic
uaaaucuuugcaugaggugagu

SEQ ID NO: 658503 - RNA, 23 nt, Artificial Sequence
  Synthetic
guaaaucuuugcaugaggugagu

SEQ ID NO: 658504 - RNA, 24 nt, Artificial Sequence
  Synthetic
gguaaaucuuugcaugaggugagu

SEQ ID NO: 658505 - RNA, 21 nt, Artificial Sequence
  Synthetic
guucaauucccaccugugagu

SEQ ID NO: 658506 - RNA, 22 nt, Artificial Sequence
  Synthetic
uguucaauucccaccugugagu

SEQ ID NO: 658507 - RNA, 23 nt, Artificial Sequence
  Synthetic
uuguucaauucccaccugugagu

SEQ ID NO: 658508 - RNA, 24 nt, Artificial Sequence
  Synthetic
auuguucaauucccaccugugagu

SEQ ID NO: 658509 - RNA, 18 nt, Artificial Sequence
  Synthetic
caauucccgccugugagu

SEQ ID NO: 658510 - RNA, 19 nt, Artificial Sequence
  Synthetic
ucaauucccgccugugagu

SEQ ID NO: 658511 - RNA, 20 nt, Artificial Sequence
  Synthetic
cucaauucccgccugugagu

SEQ ID NO: 658512 - RNA, 21 nt, Artificial Sequence
  Synthetic
gcucaauucccgccugugagu

SEQ ID NO: 658513 - RNA, 22 nt, Artificial Sequence
  Synthetic
ugcucaauucccgccugugagu

SEQ ID NO: 658514 - RNA, 23 nt, Artificial Sequence
  Synthetic
uugcucaauucccgccugugagu

SEQ ID NO: 658515 - RNA, 24 nt, Artificial Sequence
  Synthetic
auugcucaauucccgccugugagu

SEQ ID NO: 658516 - RNA, 18 nt, Artificial Sequence
  Synthetic
agaagcucacaauugagu

SEQ ID NO: 658517 - RNA, 19 nt, Artificial Sequence
  Synthetic
aagaagcucacaauugagu

SEQ ID NO: 658518 - RNA, 20 nt, Artificial Sequence
  Synthetic
caagaagcucacaauugagu

SEQ ID NO: 658519 - RNA, 21 nt, Artificial Sequence
  Synthetic
ucaagaagcucacaauugagu

SEQ ID NO: 658520 - RNA, 22 nt, Artificial Sequence
  Synthetic
cucaagaagcucacaauugagu

SEQ ID NO: 658521 - RNA, 23 nt, Artificial Sequence
  Synthetic
ccucaagaagcucacaauugagu

SEQ ID NO: 658522 - RNA, 24 nt, Artificial Sequence
  Synthetic
uccucaagaagcucacaauugagu

SEQ ID NO: 658523 - RNA, 18 nt, Artificial Sequence
  Synthetic
uauaaguaaacauugagu

SEQ ID NO: 658524 - RNA, 19 nt, Artificial Sequence
  Synthetic
auauaaguaaacauugagu

SEQ ID NO: 658525 - RNA, 20 nt, Artificial Sequence
  Synthetic
aauauaaguaaacauugagu

SEQ ID NO: 658526 - RNA, 21 nt, Artificial Sequence
  Synthetic
gaauauaaguaaacauugagu

SEQ ID NO: 658527 - RNA, 22 nt, Artificial Sequence
  Synthetic
ugaauauaaguaaacauugagu

SEQ ID NO: 658528 - RNA, 23 nt, Artificial Sequence
  Synthetic
augaauauaaguaaacauugagu

SEQ ID NO: 658529 - RNA, 24 nt, Artificial Sequence
  Synthetic
gaugaauauaaguaaacauugagu

SEQ ID NO: 658530 - RNA, 18 nt, Artificial Sequence
  Synthetic
cagcaccguuuauugagu

SEQ ID NO: 658531 - RNA, 19 nt, Artificial Sequence
  Synthetic
ccagcaccguuuauugagu

SEQ ID NO: 658532 - RNA, 20 nt, Artificial Sequence
  Synthetic
cccagcaccguuuauugagu

SEQ ID NO: 658533 - RNA, 21 nt, Artificial Sequence
  Synthetic
ucccagcaccguuuauugagu

SEQ ID NO: 658534 - RNA, 22 nt, Artificial Sequence
  Synthetic
aucccagcaccguuuauugagu

SEQ ID NO: 658535 - RNA, 23 nt, Artificial Sequence
  Synthetic
uaucccagcaccguuuauugagu

SEQ ID NO: 658536 - RNA, 24 nt, Artificial Sequence
  Synthetic
cuaucccagcaccguuuauugagu

SEQ ID NO: 658537 - RNA, 18 nt, Artificial Sequence
  Synthetic
caagugagagacuugagu

SEQ ID NO: 658538 - RNA, 19 nt, Artificial Sequence
  Synthetic
ucaagugagagacuugagu

SEQ ID NO: 658539 - RNA, 20 nt, Artificial Sequence
  Synthetic
aucaagugagagacuugagu

SEQ ID NO: 658540 - RNA, 21 nt, Artificial Sequence
  Synthetic
caucaagugagagacuugagu

SEQ ID NO: 658541 - RNA, 22 nt, Artificial Sequence
  Synthetic
gcaucaagugagagacuugagu

SEQ ID NO: 658542 - RNA, 23 nt, Artificial Sequence
  Synthetic
ugcaucaagugagagacuugagu

SEQ ID NO: 658543 - RNA, 24 nt, Artificial Sequence
  Synthetic
cugcaucaagugagagacuugagu

SEQ ID NO: 658544 - RNA, 18 nt, Artificial Sequence
  Synthetic
ugucugaaugccuugagu

SEQ ID NO: 658545 - RNA, 19 nt, Artificial Sequence
  Synthetic
cugucugaaugccuugagu

SEQ ID NO: 658546 - RNA, 20 nt, Artificial Sequence
  Synthetic
acugucugaaugccuugagu

SEQ ID NO: 658547 - RNA, 21 nt, Artificial Sequence
  Synthetic
cacugucugaaugccuugagu

SEQ ID NO: 658548 - RNA, 22 nt, Artificial Sequence
  Synthetic
ccacugucugaaugccuugagu

SEQ ID NO: 658549 - RNA, 23 nt, Artificial Sequence
  Synthetic
accacugucugaaugccuugagu

SEQ ID NO: 658550 - RNA, 24 nt, Artificial Sequence
  Synthetic
aaccacugucugaaugccuugagu

SEQ ID NO: 658551 - RNA, 18 nt, Artificial Sequence
  Synthetic
guggcagccaaguugagu

SEQ ID NO: 658552 - RNA, 19 nt, Artificial Sequence
  Synthetic
uguggcagccaaguugagu

SEQ ID NO: 658553 - RNA, 20 nt, Artificial Sequence
  Synthetic
uuguggcagccaaguugagu

SEQ ID NO: 658554 - RNA, 21 nt, Artificial Sequence
  Synthetic
auuguggcagccaaguugagu

SEQ ID NO: 658555 - RNA, 22 nt, Artificial Sequence
  Synthetic
gauuguggcagccaaguugagu

SEQ ID NO: 658556 - RNA, 23 nt, Artificial Sequence
  Synthetic
ugauuguggcagccaaguugagu

SEQ ID NO: 658557 - RNA, 24 nt, Artificial Sequence
  Synthetic
cugauuguggcagccaaguugagu

SEQ ID NO: 658558 - RNA, 18 nt, Artificial Sequence
  Synthetic
uuugugagacauuugagu

SEQ ID NO: 658559 - RNA, 19 nt, Artificial Sequence
  Synthetic
auuugugagacauuugagu

SEQ ID NO: 658560 - RNA, 20 nt, Artificial Sequence
  Synthetic
cauuugugagacauuugagu

SEQ ID NO: 658561 - RNA, 21 nt, Artificial Sequence
  Synthetic
ucauuugugagacauuugagu

SEQ ID NO: 658562 - RNA, 22 nt, Artificial Sequence
  Synthetic
gucauuugugagacauuugagu

SEQ ID NO: 658563 - RNA, 23 nt, Artificial Sequence
  Synthetic
ugucauuugugagacauuugagu

SEQ ID NO: 658564 - RNA, 24 nt, Artificial Sequence
  Synthetic
augucauuugugagacauuugagu

SEQ ID NO: 658565 - RNA, 18 nt, Artificial Sequence
  Synthetic
ucaaaaugagauuugagu

SEQ ID NO: 658566 - RNA, 19 nt, Artificial Sequence
  Synthetic
uucaaaaugagauuugagu

SEQ ID NO: 658567 - RNA, 20 nt, Artificial Sequence
  Synthetic
auucaaaaugagauuugagu

SEQ ID NO: 658568 - RNA, 21 nt, Artificial Sequence
  Synthetic
aauucaaaaugagauuugagu

SEQ ID NO: 658569 - RNA, 22 nt, Artificial Sequence
  Synthetic
uaauucaaaaugagauuugagu

SEQ ID NO: 658570 - RNA, 23 nt, Artificial Sequence
  Synthetic
auaauucaaaaugagauuugagu

SEQ ID NO: 658571 - RNA, 24 nt, Artificial Sequence
  Synthetic
uauaauucaaaaugagauuugagu

SEQ ID NO: 658572 - RNA, 18 nt, Artificial Sequence
  Synthetic
acaguggcauauuugagu

SEQ ID NO: 658573 - RNA, 19 nt, Artificial Sequence
  Synthetic
aacaguggcauauuugagu

SEQ ID NO: 658574 - RNA, 20 nt, Artificial Sequence
  Synthetic
caacaguggcauauuugagu

SEQ ID NO: 658575 - RNA, 21 nt, Artificial Sequence
  Synthetic
acaacaguggcauauuugagu

SEQ ID NO: 658576 - RNA, 22 nt, Artificial Sequence
  Synthetic
gacaacaguggcauauuugagu

SEQ ID NO: 658577 - RNA, 23 nt, Artificial Sequence
  Synthetic
agacaacaguggcauauuugagu

SEQ ID NO: 658578 - RNA, 24 nt, Artificial Sequence
  Synthetic
cagacaacaguggcauauuugagu

SEQ ID NO: 658579 - RNA, 18 nt, Artificial Sequence
  Synthetic
uuuaaacucuauuugagu

SEQ ID NO: 658580 - RNA, 19 nt, Artificial Sequence
  Synthetic
uuuuaaacucuauuugagu

SEQ ID NO: 658581 - RNA, 20 nt, Artificial Sequence
  Synthetic
guuuuaaacucuauuugagu

SEQ ID NO: 658582 - RNA, 21 nt, Artificial Sequence
  Synthetic
aguuuuaaacucuauuugagu

SEQ ID NO: 658583 - RNA, 22 nt, Artificial Sequence
  Synthetic
uaguuuuaaacucuauuugagu

SEQ ID NO: 658584 - RNA, 23 nt, Artificial Sequence
  Synthetic
auaguuuuaaacucuauuugagu

SEQ ID NO: 658585 - RNA, 24 nt, Artificial Sequence
  Synthetic
uauaguuuuaaacucuauuugagu

SEQ ID NO: 658586 - RNA, 18 nt, Artificial Sequence
  Synthetic
auauuacagcuuuugagu

SEQ ID NO: 658587 - RNA, 19 nt, Artificial Sequence
  Synthetic
aauauuacagcuuuugagu

SEQ ID NO: 658588 - RNA, 20 nt, Artificial Sequence
  Synthetic
gaauauuacagcuuuugagu

SEQ ID NO: 658589 - RNA, 21 nt, Artificial Sequence
  Synthetic
agaauauuacagcuuuugagu

SEQ ID NO: 658590 - RNA, 22 nt, Artificial Sequence
  Synthetic
uagaauauuacagcuuuugagu

SEQ ID NO: 658591 - RNA, 23 nt, Artificial Sequence
  Synthetic
cuagaauauuacagcuuuugagu

SEQ ID NO: 658592 - RNA, 24 nt, Artificial Sequence
  Synthetic
ucuagaauauuacagcuuuugagu

SEQ ID NO: 658593 - RNA, 18 nt, Artificial Sequence
  Synthetic
gcggcuacaaaaaauagu

SEQ ID NO: 658594 - RNA, 19 nt, Artificial Sequence
  Synthetic
agcggcuacaaaaaauagu

SEQ ID NO: 658595 - RNA, 20 nt, Artificial Sequence
  Synthetic
uagcggcuacaaaaaauagu

SEQ ID NO: 658596 - RNA, 21 nt, Artificial Sequence
  Synthetic
uuagcggcuacaaaaaauagu

SEQ ID NO: 658597 - RNA, 22 nt, Artificial Sequence
  Synthetic
guuagcggcuacaaaaaauagu

SEQ ID NO: 658598 - RNA, 23 nt, Artificial Sequence
  Synthetic
uguuagcggcuacaaaaaauagu

SEQ ID NO: 658599 - RNA, 24 nt, Artificial Sequence
  Synthetic
uuguuagcggcuacaaaaaauagu

SEQ ID NO: 658600 - RNA, 18 nt, Artificial Sequence
  Synthetic
cuugguacaaaaaauagu

SEQ ID NO: 658601 - RNA, 19 nt, Artificial Sequence
  Synthetic
acuugguacaaaaaauagu

SEQ ID NO: 658602 - RNA, 20 nt, Artificial Sequence
  Synthetic
uacuugguacaaaaaauagu

SEQ ID NO: 658603 - RNA, 21 nt, Artificial Sequence
  Synthetic
uuacuugguacaaaaaauagu

SEQ ID NO: 658604 - RNA, 22 nt, Artificial Sequence
  Synthetic
guuacuugguacaaaaaauagu

SEQ ID NO: 658605 - RNA, 23 nt, Artificial Sequence
  Synthetic
gguuacuugguacaaaaaauagu

SEQ ID NO: 658606 - RNA, 24 nt, Artificial Sequence
  Synthetic
ugguuacuugguacaaaaaauagu

SEQ ID NO: 658607 - RNA, 18 nt, Artificial Sequence
  Synthetic
ccacaacagaaaaauagu

SEQ ID NO: 658608 - RNA, 19 nt, Artificial Sequence
  Synthetic
cccacaacagaaaaauagu

SEQ ID NO: 658609 - RNA, 20 nt, Artificial Sequence
  Synthetic
gcccacaacagaaaaauagu

SEQ ID NO: 658610 - RNA, 21 nt, Artificial Sequence
  Synthetic
agcccacaacagaaaaauagu

SEQ ID NO: 658611 - RNA, 22 nt, Artificial Sequence
  Synthetic
aagcccacaacagaaaaauagu

SEQ ID NO: 658612 - RNA, 23 nt, Artificial Sequence
  Synthetic
gaagcccacaacagaaaaauagu

SEQ ID NO: 658613 - RNA, 24 nt, Artificial Sequence
  Synthetic
ugaagcccacaacagaaaaauagu

SEQ ID NO: 658614 - RNA, 18 nt, Artificial Sequence
  Synthetic
guuaagcauaaaaauagu

SEQ ID NO: 658615 - RNA, 19 nt, Artificial Sequence
  Synthetic
uguuaagcauaaaaauagu

SEQ ID NO: 658616 - RNA, 20 nt, Artificial Sequence
  Synthetic
guguuaagcauaaaaauagu

SEQ ID NO: 658617 - RNA, 21 nt, Artificial Sequence
  Synthetic
aguguuaagcauaaaaauagu

SEQ ID NO: 658618 - RNA, 22 nt, Artificial Sequence
  Synthetic
aaguguuaagcauaaaaauagu

SEQ ID NO: 658619 - RNA, 23 nt, Artificial Sequence
  Synthetic
aaaguguuaagcauaaaaauagu

SEQ ID NO: 658620 - RNA, 24 nt, Artificial Sequence
  Synthetic
uaaaguguuaagcauaaaaauagu

SEQ ID NO: 658621 - RNA, 18 nt, Artificial Sequence
  Synthetic
gacguaucucaaaauagu

SEQ ID NO: 658622 - RNA, 19 nt, Artificial Sequence
  Synthetic
ggacguaucucaaaauagu

SEQ ID NO: 658623 - RNA, 20 nt, Artificial Sequence
  Synthetic
gggacguaucucaaaauagu

SEQ ID NO: 658624 - RNA, 21 nt, Artificial Sequence
  Synthetic
ugggacguaucucaaaauagu

SEQ ID NO: 658625 - RNA, 22 nt, Artificial Sequence
  Synthetic
augggacguaucucaaaauagu

SEQ ID NO: 658626 - RNA, 23 nt, Artificial Sequence
  Synthetic
gaugggacguaucucaaaauagu

SEQ ID NO: 658627 - RNA, 24 nt, Artificial Sequence
  Synthetic
ugaugggacguaucucaaaauagu

SEQ ID NO: 658628 - RNA, 18 nt, Artificial Sequence
  Synthetic
gauaaguacucaaauagu

SEQ ID NO: 658629 - RNA, 19 nt, Artificial Sequence
  Synthetic
ugauaaguacucaaauagu

SEQ ID NO: 658630 - RNA, 20 nt, Artificial Sequence
  Synthetic
uugauaaguacucaaauagu

SEQ ID NO: 658631 - RNA, 21 nt, Artificial Sequence
  Synthetic
auugauaaguacucaaauagu

SEQ ID NO: 658632 - RNA, 22 nt, Artificial Sequence
  Synthetic
aauugauaaguacucaaauagu

SEQ ID NO: 658633 - RNA, 23 nt, Artificial Sequence
  Synthetic
aaauugauaaguacucaaauagu

SEQ ID NO: 658634 - RNA, 24 nt, Artificial Sequence
  Synthetic
uaaauugauaaguacucaaauagu

SEQ ID NO: 658635 - RNA, 18 nt, Artificial Sequence
  Synthetic
ugguuguuuucaaauagu

SEQ ID NO: 658636 - RNA, 19 nt, Artificial Sequence
  Synthetic
augguuguuuucaaauagu

SEQ ID NO: 658637 - RNA, 20 nt, Artificial Sequence
  Synthetic
uaugguuguuuucaaauagu

SEQ ID NO: 658638 - RNA, 21 nt, Artificial Sequence
  Synthetic
auaugguuguuuucaaauagu

SEQ ID NO: 658639 - RNA, 22 nt, Artificial Sequence
  Synthetic
gauaugguuguuuucaaauagu

SEQ ID NO: 658640 - RNA, 23 nt, Artificial Sequence
  Synthetic
ugauaugguuguuuucaaauagu

SEQ ID NO: 658641 - RNA, 24 nt, Artificial Sequence
  Synthetic
uugauaugguuguuuucaaauagu

SEQ ID NO: 658642 - RNA, 18 nt, Artificial Sequence
  Synthetic
uuuugccuuauaaauagu

SEQ ID NO: 658643 - RNA, 19 nt, Artificial Sequence
  Synthetic
auuuugccuuauaaauagu

SEQ ID NO: 658644 - RNA, 20 nt, Artificial Sequence
  Synthetic
aauuuugccuuauaaauagu

SEQ ID NO: 658645 - RNA, 21 nt, Artificial Sequence
  Synthetic
aaauuuugccuuauaaauagu

SEQ ID NO: 658646 - RNA, 22 nt, Artificial Sequence
  Synthetic
gaaauuuugccuuauaaauagu

SEQ ID NO: 658647 - RNA, 23 nt, Artificial Sequence
  Synthetic
agaaauuuugccuuauaaauagu

SEQ ID NO: 658648 - RNA, 24 nt, Artificial Sequence
  Synthetic
uagaaauuuugccuuauaaauagu

SEQ ID NO: 658649 - RNA, 18 nt, Artificial Sequence
  Synthetic
gcuguagcuuuaaauagu

SEQ ID NO: 658650 - RNA, 19 nt, Artificial Sequence
  Synthetic
agcuguagcuuuaaauagu

SEQ ID NO: 658651 - RNA, 20 nt, Artificial Sequence
  Synthetic
cagcuguagcuuuaaauagu

SEQ ID NO: 658652 - RNA, 21 nt, Artificial Sequence
  Synthetic
ccagcuguagcuuuaaauagu

SEQ ID NO: 658653 - RNA, 22 nt, Artificial Sequence
  Synthetic
accagcuguagcuuuaaauagu

SEQ ID NO: 658654 - RNA, 23 nt, Artificial Sequence
  Synthetic
caccagcuguagcuuuaaauagu

SEQ ID NO: 658655 - RNA, 24 nt, Artificial Sequence
  Synthetic
ucaccagcuguagcuuuaaauagu

SEQ ID NO: 658656 - RNA, 18 nt, Artificial Sequence
  Synthetic
uaacaguguggcaauagu

SEQ ID NO: 658657 - RNA, 19 nt, Artificial Sequence
  Synthetic
cuaacaguguggcaauagu

SEQ ID NO: 658658 - RNA, 20 nt, Artificial Sequence
  Synthetic
acuaacaguguggcaauagu

SEQ ID NO: 658659 - RNA, 21 nt, Artificial Sequence
  Synthetic
aacuaacaguguggcaauagu

SEQ ID NO: 658660 - RNA, 22 nt, Artificial Sequence
  Synthetic
aaacuaacaguguggcaauagu

SEQ ID NO: 658661 - RNA, 23 nt, Artificial Sequence
  Synthetic
caaacuaacaguguggcaauagu

SEQ ID NO: 658662 - RNA, 24 nt, Artificial Sequence
  Synthetic
acaaacuaacaguguggcaauagu

SEQ ID NO: 658663 - RNA, 18 nt, Artificial Sequence
  Synthetic
accaaaauggagaauagu

SEQ ID NO: 658664 - RNA, 19 nt, Artificial Sequence
  Synthetic
aaccaaaauggagaauagu

SEQ ID NO: 658665 - RNA, 20 nt, Artificial Sequence
  Synthetic
caaccaaaauggagaauagu

SEQ ID NO: 658666 - RNA, 21 nt, Artificial Sequence
  Synthetic
acaaccaaaauggagaauagu

SEQ ID NO: 658667 - RNA, 22 nt, Artificial Sequence
  Synthetic
uacaaccaaaauggagaauagu

SEQ ID NO: 658668 - RNA, 23 nt, Artificial Sequence
  Synthetic
guacaaccaaaauggagaauagu

SEQ ID NO: 658669 - RNA, 24 nt, Artificial Sequence
  Synthetic
aguacaaccaaaauggagaauagu

SEQ ID NO: 658670 - RNA, 18 nt, Artificial Sequence
  Synthetic
agagggcaucugaauagu

SEQ ID NO: 658671 - RNA, 19 nt, Artificial Sequence
  Synthetic
gagagggcaucugaauagu

SEQ ID NO: 658672 - RNA, 20 nt, Artificial Sequence
  Synthetic
agagagggcaucugaauagu

SEQ ID NO: 658673 - RNA, 21 nt, Artificial Sequence
  Synthetic
gagagagggcaucugaauagu

SEQ ID NO: 658674 - RNA, 22 nt, Artificial Sequence
  Synthetic
agagagagggcaucugaauagu

SEQ ID NO: 658675 - RNA, 23 nt, Artificial Sequence
  Synthetic
gagagagagggcaucugaauagu

SEQ ID NO: 658676 - RNA, 24 nt, Artificial Sequence
  Synthetic
agagagagagggcaucugaauagu

SEQ ID NO: 658677 - RNA, 18 nt, Artificial Sequence
  Synthetic
cagcaaugcaauaauagu

SEQ ID NO: 658678 - RNA, 19 nt, Artificial Sequence
  Synthetic
acagcaaugcaauaauagu

SEQ ID NO: 658679 - RNA, 20 nt, Artificial Sequence
  Synthetic
gacagcaaugcaauaauagu

SEQ ID NO: 658680 - RNA, 21 nt, Artificial Sequence
  Synthetic
agacagcaaugcaauaauagu

SEQ ID NO: 658681 - RNA, 22 nt, Artificial Sequence
  Synthetic
uagacagcaaugcaauaauagu

SEQ ID NO: 658682 - RNA, 23 nt, Artificial Sequence
  Synthetic
auagacagcaaugcaauaauagu

SEQ ID NO: 658683 - RNA, 24 nt, Artificial Sequence
  Synthetic
gauagacagcaaugcaauaauagu

SEQ ID NO: 658684 - RNA, 18 nt, Artificial Sequence
  Synthetic
augggaguacauaauagu

SEQ ID NO: 658685 - RNA, 19 nt, Artificial Sequence
  Synthetic
gaugggaguacauaauagu

SEQ ID NO: 658686 - RNA, 20 nt, Artificial Sequence
  Synthetic
ggaugggaguacauaauagu

SEQ ID NO: 658687 - RNA, 21 nt, Artificial Sequence
  Synthetic
aggaugggaguacauaauagu

SEQ ID NO: 658688 - RNA, 22 nt, Artificial Sequence
  Synthetic
aaggaugggaguacauaauagu

SEQ ID NO: 658689 - RNA, 23 nt, Artificial Sequence
  Synthetic
gaaggaugggaguacauaauagu

SEQ ID NO: 658690 - RNA, 24 nt, Artificial Sequence
  Synthetic
agaaggaugggaguacauaauagu

SEQ ID NO: 658691 - RNA, 18 nt, Artificial Sequence
  Synthetic
ugcugauaaacuaauagu

SEQ ID NO: 658692 - RNA, 19 nt, Artificial Sequence
  Synthetic
gugcugauaaacuaauagu

SEQ ID NO: 658693 - RNA, 20 nt, Artificial Sequence
  Synthetic
agugcugauaaacuaauagu

SEQ ID NO: 658694 - RNA, 21 nt, Artificial Sequence
  Synthetic
cagugcugauaaacuaauagu

SEQ ID NO: 658695 - RNA, 22 nt, Artificial Sequence
  Synthetic
acagugcugauaaacuaauagu

SEQ ID NO: 658696 - RNA, 23 nt, Artificial Sequence
  Synthetic
aacagugcugauaaacuaauagu

SEQ ID NO: 658697 - RNA, 24 nt, Artificial Sequence
  Synthetic
aaacagugcugauaaacuaauagu

SEQ ID NO: 658698 - RNA, 18 nt, Artificial Sequence
  Synthetic
acaaauuauagacauagu

SEQ ID NO: 658699 - RNA, 19 nt, Artificial Sequence
  Synthetic
cacaaauuauagacauagu

SEQ ID NO: 658700 - RNA, 20 nt, Artificial Sequence
  Synthetic
ucacaaauuauagacauagu

SEQ ID NO: 658701 - RNA, 21 nt, Artificial Sequence
  Synthetic
uucacaaauuauagacauagu

SEQ ID NO: 658702 - RNA, 22 nt, Artificial Sequence
  Synthetic
cuucacaaauuauagacauagu

SEQ ID NO: 658703 - RNA, 23 nt, Artificial Sequence
  Synthetic
acuucacaaauuauagacauagu

SEQ ID NO: 658704 - RNA, 24 nt, Artificial Sequence
  Synthetic
aacuucacaaauuauagacauagu

SEQ ID NO: 658705 - RNA, 18 nt, Artificial Sequence
  Synthetic
uuuauugugauccauagu

SEQ ID NO: 658706 - RNA, 19 nt, Artificial Sequence
  Synthetic
guuuauugugauccauagu

SEQ ID NO: 658707 - RNA, 20 nt, Artificial Sequence
  Synthetic
aguuuauugugauccauagu

SEQ ID NO: 658708 - RNA, 21 nt, Artificial Sequence
  Synthetic
uaguuuauugugauccauagu

SEQ ID NO: 658709 - RNA, 22 nt, Artificial Sequence
  Synthetic
uuaguuuauugugauccauagu

SEQ ID NO: 658710 - RNA, 23 nt, Artificial Sequence
  Synthetic
uuuaguuuauugugauccauagu

SEQ ID NO: 658711 - RNA, 24 nt, Artificial Sequence
  Synthetic
cuuuaguuuauugugauccauagu

SEQ ID NO: 658712 - RNA, 18 nt, Artificial Sequence
  Synthetic
auaaagaggaagcauagu

SEQ ID NO: 658713 - RNA, 19 nt, Artificial Sequence
  Synthetic
gauaaagaggaagcauagu

SEQ ID NO: 658714 - RNA, 20 nt, Artificial Sequence
  Synthetic
ugauaaagaggaagcauagu

SEQ ID NO: 658715 - RNA, 21 nt, Artificial Sequence
  Synthetic
cugauaaagaggaagcauagu

SEQ ID NO: 658716 - RNA, 22 nt, Artificial Sequence
  Synthetic
acugauaaagaggaagcauagu

SEQ ID NO: 658717 - RNA, 23 nt, Artificial Sequence
  Synthetic
aacugauaaagaggaagcauagu

SEQ ID NO: 658718 - RNA, 24 nt, Artificial Sequence
  Synthetic
aaacugauaaagaggaagcauagu

SEQ ID NO: 658719 - RNA, 18 nt, Artificial Sequence
  Synthetic
uggauuauucaucauagu

SEQ ID NO: 658720 - RNA, 19 nt, Artificial Sequence
  Synthetic
uuggauuauucaucauagu

SEQ ID NO: 658721 - RNA, 20 nt, Artificial Sequence
  Synthetic
guuggauuauucaucauagu

SEQ ID NO: 658722 - RNA, 21 nt, Artificial Sequence
  Synthetic
uguuggauuauucaucauagu

SEQ ID NO: 658723 - RNA, 22 nt, Artificial Sequence
  Synthetic
cuguuggauuauucaucauagu

SEQ ID NO: 658724 - RNA, 23 nt, Artificial Sequence
  Synthetic
ucuguuggauuauucaucauagu

SEQ ID NO: 658725 - RNA, 24 nt, Artificial Sequence
  Synthetic
aucuguuggauuauucaucauagu

SEQ ID NO: 658726 - RNA, 18 nt, Artificial Sequence
  Synthetic
auuauaugcuaucauagu

SEQ ID NO: 658727 - RNA, 19 nt, Artificial Sequence
  Synthetic
aauuauaugcuaucauagu

SEQ ID NO: 658728 - RNA, 20 nt, Artificial Sequence
  Synthetic
caauuauaugcuaucauagu

SEQ ID NO: 658729 - RNA, 21 nt, Artificial Sequence
  Synthetic
ucaauuauaugcuaucauagu

SEQ ID NO: 658730 - RNA, 22 nt, Artificial Sequence
  Synthetic
uucaauuauaugcuaucauagu

SEQ ID NO: 658731 - RNA, 23 nt, Artificial Sequence
  Synthetic
cuucaauuauaugcuaucauagu

SEQ ID NO: 658732 - RNA, 24 nt, Artificial Sequence
  Synthetic
ccuucaauuauaugcuaucauagu

SEQ ID NO: 658733 - RNA, 18 nt, Artificial Sequence
  Synthetic
auucauguaauucauagu

SEQ ID NO: 658734 - RNA, 19 nt, Artificial Sequence
  Synthetic
aauucauguaauucauagu

SEQ ID NO: 658735 - RNA, 20 nt, Artificial Sequence
  Synthetic
gaauucauguaauucauagu

SEQ ID NO: 658736 - RNA, 21 nt, Artificial Sequence
  Synthetic
ugaauucauguaauucauagu

SEQ ID NO: 658737 - RNA, 22 nt, Artificial Sequence
  Synthetic
augaauucauguaauucauagu

SEQ ID NO: 658738 - RNA, 23 nt, Artificial Sequence
  Synthetic
uaugaauucauguaauucauagu

SEQ ID NO: 658739 - RNA, 24 nt, Artificial Sequence
  Synthetic
auaugaauucauguaauucauagu

SEQ ID NO: 658740 - RNA, 18 nt, Artificial Sequence
  Synthetic
cuuaacuugauucauagu

SEQ ID NO: 658741 - RNA, 19 nt, Artificial Sequence
  Synthetic
ccuuaacuugauucauagu

SEQ ID NO: 658742 - RNA, 20 nt, Artificial Sequence
  Synthetic
accuuaacuugauucauagu

SEQ ID NO: 658743 - RNA, 21 nt, Artificial Sequence
  Synthetic
gaccuuaacuugauucauagu

SEQ ID NO: 658744 - RNA, 22 nt, Artificial Sequence
  Synthetic
agaccuuaacuugauucauagu

SEQ ID NO: 658745 - RNA, 23 nt, Artificial Sequence
  Synthetic
aagaccuuaacuugauucauagu

SEQ ID NO: 658746 - RNA, 24 nt, Artificial Sequence
  Synthetic
aaagaccuuaacuugauucauagu

SEQ ID NO: 658747 - RNA, 18 nt, Artificial Sequence
  Synthetic
cauuucccauuucauagu

SEQ ID NO: 658748 - RNA, 19 nt, Artificial Sequence
  Synthetic
acauuucccauuucauagu

SEQ ID NO: 658749 - RNA, 20 nt, Artificial Sequence
  Synthetic
aacauuucccauuucauagu

SEQ ID NO: 658750 - RNA, 21 nt, Artificial Sequence
  Synthetic
gaacauuucccauuucauagu

SEQ ID NO: 658751 - RNA, 22 nt, Artificial Sequence
  Synthetic
agaacauuucccauuucauagu

SEQ ID NO: 658752 - RNA, 23 nt, Artificial Sequence
  Synthetic
uagaacauuucccauuucauagu

SEQ ID NO: 658753 - RNA, 24 nt, Artificial Sequence
  Synthetic
uuagaacauuucccauuucauagu

SEQ ID NO: 658754 - RNA, 18 nt, Artificial Sequence
  Synthetic
ucucaucacuuucauagu

SEQ ID NO: 658755 - RNA, 19 nt, Artificial Sequence
  Synthetic
aucucaucacuuucauagu

SEQ ID NO: 658756 - RNA, 20 nt, Artificial Sequence
  Synthetic
caucucaucacuuucauagu

SEQ ID NO: 658757 - RNA, 21 nt, Artificial Sequence
  Synthetic
ucaucucaucacuuucauagu

SEQ ID NO: 658758 - RNA, 22 nt, Artificial Sequence
  Synthetic
uucaucucaucacuuucauagu

SEQ ID NO: 658759 - RNA, 23 nt, Artificial Sequence
  Synthetic
auucaucucaucacuuucauagu

SEQ ID NO: 658760 - RNA, 24 nt, Artificial Sequence
  Synthetic
aauucaucucaucacuuucauagu

SEQ ID NO: 658761 - RNA, 18 nt, Artificial Sequence
  Synthetic
guacuaaacauagauagu

SEQ ID NO: 658762 - RNA, 19 nt, Artificial Sequence
  Synthetic
uguacuaaacauagauagu

SEQ ID NO: 658763 - RNA, 20 nt, Artificial Sequence
  Synthetic
guguacuaaacauagauagu

SEQ ID NO: 658764 - RNA, 21 nt, Artificial Sequence
  Synthetic
uguguacuaaacauagauagu

SEQ ID NO: 658765 - RNA, 22 nt, Artificial Sequence
  Synthetic
guguguacuaaacauagauagu

SEQ ID NO: 658766 - RNA, 23 nt, Artificial Sequence
  Synthetic
uguguguacuaaacauagauagu

SEQ ID NO: 658767 - RNA, 24 nt, Artificial Sequence
  Synthetic
auguguguacuaaacauagauagu

SEQ ID NO: 658768 - RNA, 18 nt, Artificial Sequence
  Synthetic
accuagacuuuagauagu

SEQ ID NO: 658769 - RNA, 19 nt, Artificial Sequence
  Synthetic
caccuagacuuuagauagu

SEQ ID NO: 658770 - RNA, 20 nt, Artificial Sequence
  Synthetic
ucaccuagacuuuagauagu

SEQ ID NO: 658771 - RNA, 21 nt, Artificial Sequence
  Synthetic
aucaccuagacuuuagauagu

SEQ ID NO: 658772 - RNA, 22 nt, Artificial Sequence
  Synthetic
uaucaccuagacuuuagauagu

SEQ ID NO: 658773 - RNA, 23 nt, Artificial Sequence
  Synthetic
auaucaccuagacuuuagauagu

SEQ ID NO: 658774 - RNA, 24 nt, Artificial Sequence
  Synthetic
cauaucaccuagacuuuagauagu

SEQ ID NO: 658775 - RNA, 18 nt, Artificial Sequence
  Synthetic
ggagcaccugaggauagu

SEQ ID NO: 658776 - RNA, 19 nt, Artificial Sequence
  Synthetic
gggagcaccugaggauagu

SEQ ID NO: 658777 - RNA, 20 nt, Artificial Sequence
  Synthetic
ugggagcaccugaggauagu

SEQ ID NO: 658778 - RNA, 21 nt, Artificial Sequence
  Synthetic
gugggagcaccugaggauagu

SEQ ID NO: 658779 - RNA, 22 nt, Artificial Sequence
  Synthetic
ugugggagcaccugaggauagu

SEQ ID NO: 658780 - RNA, 23 nt, Artificial Sequence
  Synthetic
uugugggagcaccugaggauagu

SEQ ID NO: 658781 - RNA, 24 nt, Artificial Sequence
  Synthetic
cuugugggagcaccugaggauagu

SEQ ID NO: 658782 - RNA, 18 nt, Artificial Sequence
  Synthetic
uacacuagaaaugauagu

SEQ ID NO: 658783 - RNA, 19 nt, Artificial Sequence
  Synthetic
guacacuagaaaugauagu

SEQ ID NO: 658784 - RNA, 20 nt, Artificial Sequence
  Synthetic
uguacacuagaaaugauagu

SEQ ID NO: 658785 - RNA, 21 nt, Artificial Sequence
  Synthetic
auguacacuagaaaugauagu

SEQ ID NO: 658786 - RNA, 22 nt, Artificial Sequence
  Synthetic
cauguacacuagaaaugauagu

SEQ ID NO: 658787 - RNA, 23 nt, Artificial Sequence
  Synthetic
ucauguacacuagaaaugauagu

SEQ ID NO: 658788 - RNA, 24 nt, Artificial Sequence
  Synthetic
uucauguacacuagaaaugauagu

SEQ ID NO: 658789 - RNA, 18 nt, Artificial Sequence
  Synthetic
aacuuugauauugauagu

SEQ ID NO: 658790 - RNA, 19 nt, Artificial Sequence
  Synthetic
uaacuuugauauugauagu

SEQ ID NO: 658791 - RNA, 20 nt, Artificial Sequence
  Synthetic
auaacuuugauauugauagu

SEQ ID NO: 658792 - RNA, 21 nt, Artificial Sequence
  Synthetic
uauaacuuugauauugauagu

SEQ ID NO: 658793 - RNA, 22 nt, Artificial Sequence
  Synthetic
auauaacuuugauauugauagu

SEQ ID NO: 658794 - RNA, 23 nt, Artificial Sequence
  Synthetic
aauauaacuuugauauugauagu

SEQ ID NO: 658795 - RNA, 24 nt, Artificial Sequence
  Synthetic
aaauauaacuuugauauugauagu

SEQ ID NO: 658796 - RNA, 18 nt, Artificial Sequence
  Synthetic
uuccauaguaaauauagu

SEQ ID NO: 658797 - RNA, 19 nt, Artificial Sequence
  Synthetic
cuuccauaguaaauauagu

SEQ ID NO: 658798 - RNA, 20 nt, Artificial Sequence
  Synthetic
gcuuccauaguaaauauagu

SEQ ID NO: 658799 - RNA, 21 nt, Artificial Sequence
  Synthetic
ugcuuccauaguaaauauagu

SEQ ID NO: 658800 - RNA, 22 nt, Artificial Sequence
  Synthetic
augcuuccauaguaaauauagu

SEQ ID NO: 658801 - RNA, 23 nt, Artificial Sequence
  Synthetic
caugcuuccauaguaaauauagu

SEQ ID NO: 658802 - RNA, 24 nt, Artificial Sequence
  Synthetic
ccaugcuuccauaguaaauauagu

SEQ ID NO: 658803 - RNA, 18 nt, Artificial Sequence
  Synthetic
gagugucaucaauauagu

SEQ ID NO: 658804 - RNA, 19 nt, Artificial Sequence
  Synthetic
ggagugucaucaauauagu

SEQ ID NO: 658805 - RNA, 20 nt, Artificial Sequence
  Synthetic
aggagugucaucaauauagu

SEQ ID NO: 658806 - RNA, 21 nt, Artificial Sequence
  Synthetic
aaggagugucaucaauauagu

SEQ ID NO: 658807 - RNA, 22 nt, Artificial Sequence
  Synthetic
caaggagugucaucaauauagu

SEQ ID NO: 658808 - RNA, 23 nt, Artificial Sequence
  Synthetic
gcaaggagugucaucaauauagu

SEQ ID NO: 658809 - RNA, 24 nt, Artificial Sequence
  Synthetic
agcaaggagugucaucaauauagu

SEQ ID NO: 658810 - RNA, 18 nt, Artificial Sequence
  Synthetic
aaaaauagggaauauagu

SEQ ID NO: 658811 - RNA, 19 nt, Artificial Sequence
  Synthetic
caaaaauagggaauauagu

SEQ ID NO: 658812 - RNA, 20 nt, Artificial Sequence
  Synthetic
acaaaaauagggaauauagu

SEQ ID NO: 658813 - RNA, 21 nt, Artificial Sequence
  Synthetic
cacaaaaauagggaauauagu

SEQ ID NO: 658814 - RNA, 22 nt, Artificial Sequence
  Synthetic
ucacaaaaauagggaauauagu

SEQ ID NO: 658815 - RNA, 23 nt, Artificial Sequence
  Synthetic
uucacaaaaauagggaauauagu

SEQ ID NO: 658816 - RNA, 24 nt, Artificial Sequence
  Synthetic
auucacaaaaauagggaauauagu

SEQ ID NO: 658817 - RNA, 18 nt, Artificial Sequence
  Synthetic
acuaaauauauauauagu

SEQ ID NO: 658818 - RNA, 19 nt, Artificial Sequence
  Synthetic
gacuaaauauauauauagu

SEQ ID NO: 658819 - RNA, 20 nt, Artificial Sequence
  Synthetic
ugacuaaauauauauauagu

SEQ ID NO: 658820 - RNA, 21 nt, Artificial Sequence
  Synthetic
gugacuaaauauauauauagu

SEQ ID NO: 658821 - RNA, 22 nt, Artificial Sequence
  Synthetic
ugugacuaaauauauauauagu

SEQ ID NO: 658822 - RNA, 23 nt, Artificial Sequence
  Synthetic
augugacuaaauauauauauagu

SEQ ID NO: 658823 - RNA, 24 nt, Artificial Sequence
  Synthetic
uaugugacuaaauauauauauagu

SEQ ID NO: 658824 - RNA, 18 nt, Artificial Sequence
  Synthetic
uuuauuuuuguauauagu

SEQ ID NO: 658825 - RNA, 19 nt, Artificial Sequence
  Synthetic
uuuuauuuuuguauauagu

SEQ ID NO: 658826 - RNA, 20 nt, Artificial Sequence
  Synthetic
auuuuauuuuuguauauagu

SEQ ID NO: 658827 - RNA, 21 nt, Artificial Sequence
  Synthetic
gauuuuauuuuuguauauagu

SEQ ID NO: 658828 - RNA, 22 nt, Artificial Sequence
  Synthetic
ggauuuuauuuuuguauauagu

SEQ ID NO: 658829 - RNA, 23 nt, Artificial Sequence
  Synthetic
gggauuuuauuuuuguauauagu

SEQ ID NO: 658830 - RNA, 24 nt, Artificial Sequence
  Synthetic
ugggauuuuauuuuuguauauagu

SEQ ID NO: 658831 - RNA, 18 nt, Artificial Sequence
  Synthetic
caagaagcaaacuauagu

SEQ ID NO: 658832 - RNA, 19 nt, Artificial Sequence
  Synthetic
ucaagaagcaaacuauagu

SEQ ID NO: 658833 - RNA, 20 nt, Artificial Sequence
  Synthetic
cucaagaagcaaacuauagu

SEQ ID NO: 658834 - RNA, 21 nt, Artificial Sequence
  Synthetic
acucaagaagcaaacuauagu

SEQ ID NO: 658835 - RNA, 22 nt, Artificial Sequence
  Synthetic
aacucaagaagcaaacuauagu

SEQ ID NO: 658836 - RNA, 23 nt, Artificial Sequence
  Synthetic
gaacucaagaagcaaacuauagu

SEQ ID NO: 658837 - RNA, 24 nt, Artificial Sequence
  Synthetic
ugaacucaagaagcaaacuauagu

SEQ ID NO: 658838 - RNA, 18 nt, Artificial Sequence
  Synthetic
guagccuuauaguauagu

SEQ ID NO: 658839 - RNA, 19 nt, Artificial Sequence
  Synthetic
uguagccuuauaguauagu

SEQ ID NO: 658840 - RNA, 20 nt, Artificial Sequence
  Synthetic
cuguagccuuauaguauagu

SEQ ID NO: 658841 - RNA, 21 nt, Artificial Sequence
  Synthetic
acuguagccuuauaguauagu

SEQ ID NO: 658842 - RNA, 22 nt, Artificial Sequence
  Synthetic
aacuguagccuuauaguauagu

SEQ ID NO: 658843 - RNA, 23 nt, Artificial Sequence
  Synthetic
uaacuguagccuuauaguauagu

SEQ ID NO: 658844 - RNA, 24 nt, Artificial Sequence
  Synthetic
guaacuguagccuuauaguauagu

SEQ ID NO: 658845 - RNA, 18 nt, Artificial Sequence
  Synthetic
gaagccuuguaguauagu

SEQ ID NO: 658846 - RNA, 19 nt, Artificial Sequence
  Synthetic
ugaagccuuguaguauagu

SEQ ID NO: 658847 - RNA, 20 nt, Artificial Sequence
  Synthetic
cugaagccuuguaguauagu

SEQ ID NO: 658848 - RNA, 21 nt, Artificial Sequence
  Synthetic
acugaagccuuguaguauagu

SEQ ID NO: 658849 - RNA, 22 nt, Artificial Sequence
  Synthetic
uacugaagccuuguaguauagu

SEQ ID NO: 658850 - RNA, 23 nt, Artificial Sequence
  Synthetic
uuacugaagccuuguaguauagu

SEQ ID NO: 658851 - RNA, 24 nt, Artificial Sequence
  Synthetic
guuacugaagccuuguaguauagu

SEQ ID NO: 658852 - RNA, 21 nt, Artificial Sequence
  Synthetic
acuguagccuuguaguauagu

SEQ ID NO: 658853 - RNA, 22 nt, Artificial Sequence
  Synthetic
uacuguagccuuguaguauagu

SEQ ID NO: 658854 - RNA, 23 nt, Artificial Sequence
  Synthetic
uuacuguagccuuguaguauagu

SEQ ID NO: 658855 - RNA, 24 nt, Artificial Sequence
  Synthetic
guuacuguagccuuguaguauagu

SEQ ID NO: 658856 - RNA, 18 nt, Artificial Sequence
  Synthetic
gcaggaacaagguauagu

SEQ ID NO: 658857 - RNA, 19 nt, Artificial Sequence
  Synthetic
agcaggaacaagguauagu

SEQ ID NO: 658858 - RNA, 20 nt, Artificial Sequence
  Synthetic
gagcaggaacaagguauagu

SEQ ID NO: 658859 - RNA, 21 nt, Artificial Sequence
  Synthetic
agagcaggaacaagguauagu

SEQ ID NO: 658860 - RNA, 22 nt, Artificial Sequence
  Synthetic
aagagcaggaacaagguauagu

SEQ ID NO: 658861 - RNA, 23 nt, Artificial Sequence
  Synthetic
gaagagcaggaacaagguauagu

SEQ ID NO: 658862 - RNA, 24 nt, Artificial Sequence
  Synthetic
ggaagagcaggaacaagguauagu

SEQ ID NO: 658863 - RNA, 18 nt, Artificial Sequence
  Synthetic
auaacauagcgguauagu

SEQ ID NO: 658864 - RNA, 19 nt, Artificial Sequence
  Synthetic
aauaacauagcgguauagu

SEQ ID NO: 658865 - RNA, 20 nt, Artificial Sequence
  Synthetic
uaauaacauagcgguauagu

SEQ ID NO: 658866 - RNA, 21 nt, Artificial Sequence
  Synthetic
uuaauaacauagcgguauagu

SEQ ID NO: 658867 - RNA, 22 nt, Artificial Sequence
  Synthetic
auuaauaacauagcgguauagu

SEQ ID NO: 658868 - RNA, 23 nt, Artificial Sequence
  Synthetic
gauuaauaacauagcgguauagu

SEQ ID NO: 658869 - RNA, 24 nt, Artificial Sequence
  Synthetic
agauuaauaacauagcgguauagu

SEQ ID NO: 658870 - RNA, 18 nt, Artificial Sequence
  Synthetic
auuccugagcauuauagu

SEQ ID NO: 658871 - RNA, 19 nt, Artificial Sequence
  Synthetic
uauuccugagcauuauagu

SEQ ID NO: 658872 - RNA, 20 nt, Artificial Sequence
  Synthetic
guauuccugagcauuauagu

SEQ ID NO: 658873 - RNA, 21 nt, Artificial Sequence
  Synthetic
aguauuccugagcauuauagu

SEQ ID NO: 658874 - RNA, 22 nt, Artificial Sequence
  Synthetic
gaguauuccugagcauuauagu

SEQ ID NO: 658875 - RNA, 23 nt, Artificial Sequence
  Synthetic
ugaguauuccugagcauuauagu

SEQ ID NO: 658876 - RNA, 24 nt, Artificial Sequence
  Synthetic
uugaguauuccugagcauuauagu

SEQ ID NO: 658877 - RNA, 18 nt, Artificial Sequence
  Synthetic
caucaggauuauuauagu

SEQ ID NO: 658878 - RNA, 19 nt, Artificial Sequence
  Synthetic
ucaucaggauuauuauagu

SEQ ID NO: 658879 - RNA, 20 nt, Artificial Sequence
  Synthetic
uucaucaggauuauuauagu

SEQ ID NO: 658880 - RNA, 21 nt, Artificial Sequence
  Synthetic
auucaucaggauuauuauagu

SEQ ID NO: 658881 - RNA, 22 nt, Artificial Sequence
  Synthetic
aauucaucaggauuauuauagu

SEQ ID NO: 658882 - RNA, 23 nt, Artificial Sequence
  Synthetic
uaauucaucaggauuauuauagu

SEQ ID NO: 658883 - RNA, 24 nt, Artificial Sequence
  Synthetic
guaauucaucaggauuauuauagu

SEQ ID NO: 658884 - RNA, 18 nt, Artificial Sequence
  Synthetic
caauauuucauuuauagu

SEQ ID NO: 658885 - RNA, 19 nt, Artificial Sequence
  Synthetic
ucaauauuucauuuauagu

SEQ ID NO: 658886 - RNA, 20 nt, Artificial Sequence
  Synthetic
cucaauauuucauuuauagu

SEQ ID NO: 658887 - RNA, 21 nt, Artificial Sequence
  Synthetic
acucaauauuucauuuauagu

SEQ ID NO: 658888 - RNA, 22 nt, Artificial Sequence
  Synthetic
aacucaauauuucauuuauagu

SEQ ID NO: 658889 - RNA, 23 nt, Artificial Sequence
  Synthetic
aaacucaauauuucauuuauagu

SEQ ID NO: 658890 - RNA, 24 nt, Artificial Sequence
  Synthetic
aaaacucaauauuucauuuauagu

SEQ ID NO: 658891 - RNA, 18 nt, Artificial Sequence
  Synthetic
uuugaagguauuuauagu

SEQ ID NO: 658892 - RNA, 19 nt, Artificial Sequence
  Synthetic
guuugaagguauuuauagu

SEQ ID NO: 658893 - RNA, 20 nt, Artificial Sequence
  Synthetic
uguuugaagguauuuauagu

SEQ ID NO: 658894 - RNA, 21 nt, Artificial Sequence
  Synthetic
uuguuugaagguauuuauagu

SEQ ID NO: 658895 - RNA, 22 nt, Artificial Sequence
  Synthetic
guuguuugaagguauuuauagu

SEQ ID NO: 658896 - RNA, 23 nt, Artificial Sequence
  Synthetic
aguuguuugaagguauuuauagu

SEQ ID NO: 658897 - RNA, 24 nt, Artificial Sequence
  Synthetic
caguuguuugaagguauuuauagu

SEQ ID NO: 658898 - RNA, 18 nt, Artificial Sequence
  Synthetic
gaaacuaugguuuauagu

SEQ ID NO: 658899 - RNA, 19 nt, Artificial Sequence
  Synthetic
agaaacuaugguuuauagu

SEQ ID NO: 658900 - RNA, 20 nt, Artificial Sequence
  Synthetic
gagaaacuaugguuuauagu

SEQ ID NO: 658901 - RNA, 21 nt, Artificial Sequence
  Synthetic
agagaaacuaugguuuauagu

SEQ ID NO: 658902 - RNA, 22 nt, Artificial Sequence
  Synthetic
cagagaaacuaugguuuauagu

SEQ ID NO: 658903 - RNA, 23 nt, Artificial Sequence
  Synthetic
acagagaaacuaugguuuauagu

SEQ ID NO: 658904 - RNA, 24 nt, Artificial Sequence
  Synthetic
uacagagaaacuaugguuuauagu

SEQ ID NO: 658905 - RNA, 18 nt, Artificial Sequence
  Synthetic
uccuaacaccaaacuagu

SEQ ID NO: 658906 - RNA, 19 nt, Artificial Sequence
  Synthetic
auccuaacaccaaacuagu

SEQ ID NO: 658907 - RNA, 20 nt, Artificial Sequence
  Synthetic
aauccuaacaccaaacuagu

SEQ ID NO: 658908 - RNA, 21 nt, Artificial Sequence
  Synthetic
gaauccuaacaccaaacuagu

SEQ ID NO: 658909 - RNA, 22 nt, Artificial Sequence
  Synthetic
ugaauccuaacaccaaacuagu

SEQ ID NO: 658910 - RNA, 23 nt, Artificial Sequence
  Synthetic
uugaauccuaacaccaaacuagu

SEQ ID NO: 658911 - RNA, 24 nt, Artificial Sequence
  Synthetic
auugaauccuaacaccaaacuagu

SEQ ID NO: 658912 - RNA, 18 nt, Artificial Sequence
  Synthetic
gaguaggccgaaacuagu

SEQ ID NO: 658913 - RNA, 19 nt, Artificial Sequence
  Synthetic
ugaguaggccgaaacuagu

SEQ ID NO: 658914 - RNA, 20 nt, Artificial Sequence
  Synthetic
cugaguaggccgaaacuagu

SEQ ID NO: 658915 - RNA, 21 nt, Artificial Sequence
  Synthetic
ucugaguaggccgaaacuagu

SEQ ID NO: 658916 - RNA, 22 nt, Artificial Sequence
  Synthetic
aucugaguaggccgaaacuagu

SEQ ID NO: 658917 - RNA, 23 nt, Artificial Sequence
  Synthetic
aaucugaguaggccgaaacuagu

SEQ ID NO: 658918 - RNA, 24 nt, Artificial Sequence
  Synthetic
aaaucugaguaggccgaaacuagu

SEQ ID NO: 658919 - RNA, 18 nt, Artificial Sequence
  Synthetic
accuggagggcaacuagu

SEQ ID NO: 658920 - RNA, 19 nt, Artificial Sequence
  Synthetic
aaccuggagggcaacuagu

SEQ ID NO: 658921 - RNA, 20 nt, Artificial Sequence
  Synthetic
gaaccuggagggcaacuagu

SEQ ID NO: 658922 - RNA, 21 nt, Artificial Sequence
  Synthetic
ggaaccuggagggcaacuagu

SEQ ID NO: 658923 - RNA, 22 nt, Artificial Sequence
  Synthetic
uggaaccuggagggcaacuagu

SEQ ID NO: 658924 - RNA, 23 nt, Artificial Sequence
  Synthetic
uuggaaccuggagggcaacuagu

SEQ ID NO: 658925 - RNA, 24 nt, Artificial Sequence
  Synthetic
cuuggaaccuggagggcaacuagu

SEQ ID NO: 658926 - RNA, 18 nt, Artificial Sequence
  Synthetic
gucaugagacacacuagu

SEQ ID NO: 658927 - RNA, 19 nt, Artificial Sequence
  Synthetic
agucaugagacacacuagu

SEQ ID NO: 658928 - RNA, 20 nt, Artificial Sequence
  Synthetic
aagucaugagacacacuagu

SEQ ID NO: 658929 - RNA, 21 nt, Artificial Sequence
  Synthetic
uaagucaugagacacacuagu

SEQ ID NO: 658930 - RNA, 22 nt, Artificial Sequence
  Synthetic
uuaagucaugagacacacuagu

SEQ ID NO: 658931 - RNA, 23 nt, Artificial Sequence
  Synthetic
guuaagucaugagacacacuagu

SEQ ID NO: 658932 - RNA, 24 nt, Artificial Sequence
  Synthetic
gguuaagucaugagacacacuagu

SEQ ID NO: 658933 - RNA, 18 nt, Artificial Sequence
  Synthetic
ugcucauuauccacuagu

SEQ ID NO: 658934 - RNA, 19 nt, Artificial Sequence
  Synthetic
gugcucauuauccacuagu

SEQ ID NO: 658935 - RNA, 20 nt, Artificial Sequence
  Synthetic
ugugcucauuauccacuagu

SEQ ID NO: 658936 - RNA, 21 nt, Artificial Sequence
  Synthetic
uugugcucauuauccacuagu

SEQ ID NO: 658937 - RNA, 22 nt, Artificial Sequence
  Synthetic
auugugcucauuauccacuagu

SEQ ID NO: 658938 - RNA, 23 nt, Artificial Sequence
  Synthetic
cauugugcucauuauccacuagu

SEQ ID NO: 658939 - RNA, 24 nt, Artificial Sequence
  Synthetic
acauugugcucauuauccacuagu

SEQ ID NO: 658940 - RNA, 18 nt, Artificial Sequence
  Synthetic
aguguugggauuacuagu

SEQ ID NO: 658941 - RNA, 19 nt, Artificial Sequence
  Synthetic
caguguugggauuacuagu

SEQ ID NO: 658942 - RNA, 20 nt, Artificial Sequence
  Synthetic
ccaguguugggauuacuagu

SEQ ID NO: 658943 - RNA, 21 nt, Artificial Sequence
  Synthetic
cccaguguugggauuacuagu

SEQ ID NO: 658944 - RNA, 22 nt, Artificial Sequence
  Synthetic
ccccaguguugggauuacuagu

SEQ ID NO: 658945 - RNA, 23 nt, Artificial Sequence
  Synthetic
cccccaguguugggauuacuagu

SEQ ID NO: 658946 - RNA, 24 nt, Artificial Sequence
  Synthetic
ccccccaguguugggauuacuagu

SEQ ID NO: 658947 - RNA, 18 nt, Artificial Sequence
  Synthetic
uaauccaaauuuacuagu

SEQ ID NO: 658948 - RNA, 19 nt, Artificial Sequence
  Synthetic
cuaauccaaauuuacuagu

SEQ ID NO: 658949 - RNA, 20 nt, Artificial Sequence
  Synthetic
acuaauccaaauuuacuagu

SEQ ID NO: 658950 - RNA, 21 nt, Artificial Sequence
  Synthetic
gacuaauccaaauuuacuagu

SEQ ID NO: 658951 - RNA, 22 nt, Artificial Sequence
  Synthetic
agacuaauccaaauuuacuagu

SEQ ID NO: 658952 - RNA, 23 nt, Artificial Sequence
  Synthetic
cagacuaauccaaauuuacuagu

SEQ ID NO: 658953 - RNA, 24 nt, Artificial Sequence
  Synthetic
ccagacuaauccaaauuuacuagu

SEQ ID NO: 658954 - RNA, 18 nt, Artificial Sequence
  Synthetic
acacuuuaaaaaccuagu

SEQ ID NO: 658955 - RNA, 19 nt, Artificial Sequence
  Synthetic
uacacuuuaaaaaccuagu

SEQ ID NO: 658956 - RNA, 20 nt, Artificial Sequence
  Synthetic
auacacuuuaaaaaccuagu

SEQ ID NO: 658957 - RNA, 21 nt, Artificial Sequence
  Synthetic
aauacacuuuaaaaaccuagu

SEQ ID NO: 658958 - RNA, 22 nt, Artificial Sequence
  Synthetic
aaauacacuuuaaaaaccuagu

SEQ ID NO: 658959 - RNA, 23 nt, Artificial Sequence
  Synthetic
caaauacacuuuaaaaaccuagu

SEQ ID NO: 658960 - RNA, 24 nt, Artificial Sequence
  Synthetic
ucaaauacacuuuaaaaaccuagu

SEQ ID NO: 658961 - RNA, 18 nt, Artificial Sequence
  Synthetic
cauuuacacuaaccuagu

SEQ ID NO: 658962 - RNA, 19 nt, Artificial Sequence
  Synthetic
ccauuuacacuaaccuagu

SEQ ID NO: 658963 - RNA, 20 nt, Artificial Sequence
  Synthetic
gccauuuacacuaaccuagu

SEQ ID NO: 658964 - RNA, 21 nt, Artificial Sequence
  Synthetic
ugccauuuacacuaaccuagu

SEQ ID NO: 658965 - RNA, 22 nt, Artificial Sequence
  Synthetic
gugccauuuacacuaaccuagu

SEQ ID NO: 658966 - RNA, 23 nt, Artificial Sequence
  Synthetic
agugccauuuacacuaaccuagu

SEQ ID NO: 658967 - RNA, 24 nt, Artificial Sequence
  Synthetic
uagugccauuuacacuaaccuagu

SEQ ID NO: 658968 - RNA, 18 nt, Artificial Sequence
  Synthetic
guauugggaagaccuagu

SEQ ID NO: 658969 - RNA, 19 nt, Artificial Sequence
  Synthetic
aguauugggaagaccuagu

SEQ ID NO: 658970 - RNA, 20 nt, Artificial Sequence
  Synthetic
uaguauugggaagaccuagu

SEQ ID NO: 658971 - RNA, 21 nt, Artificial Sequence
  Synthetic
auaguauugggaagaccuagu

SEQ ID NO: 658972 - RNA, 22 nt, Artificial Sequence
  Synthetic
aauaguauugggaagaccuagu

SEQ ID NO: 658973 - RNA, 23 nt, Artificial Sequence
  Synthetic
gaauaguauugggaagaccuagu

SEQ ID NO: 658974 - RNA, 24 nt, Artificial Sequence
  Synthetic
agaauaguauugggaagaccuagu

SEQ ID NO: 658975 - RNA, 18 nt, Artificial Sequence
  Synthetic
ccaccacuccacccuagu

SEQ ID NO: 658976 - RNA, 19 nt, Artificial Sequence
  Synthetic
cccaccacuccacccuagu

SEQ ID NO: 658977 - RNA, 20 nt, Artificial Sequence
  Synthetic
ccccaccacuccacccuagu

SEQ ID NO: 658978 - RNA, 21 nt, Artificial Sequence
  Synthetic
accccaccacuccacccuagu

SEQ ID NO: 658979 - RNA, 22 nt, Artificial Sequence
  Synthetic
gaccccaccacuccacccuagu

SEQ ID NO: 658980 - RNA, 23 nt, Artificial Sequence
  Synthetic
ugaccccaccacuccacccuagu

SEQ ID NO: 658981 - RNA, 24 nt, Artificial Sequence
  Synthetic
cugaccccaccacuccacccuagu

SEQ ID NO: 658982 - RNA, 18 nt, Artificial Sequence
  Synthetic
auuugguuaaugccuagu

SEQ ID NO: 658983 - RNA, 19 nt, Artificial Sequence
  Synthetic
gauuugguuaaugccuagu

SEQ ID NO: 658984 - RNA, 20 nt, Artificial Sequence
  Synthetic
ugauuugguuaaugccuagu

SEQ ID NO: 658985 - RNA, 21 nt, Artificial Sequence
  Synthetic
gugauuugguuaaugccuagu

SEQ ID NO: 658986 - RNA, 22 nt, Artificial Sequence
  Synthetic
ugugauuugguuaaugccuagu

SEQ ID NO: 658987 - RNA, 23 nt, Artificial Sequence
  Synthetic
cugugauuugguuaaugccuagu

SEQ ID NO: 658988 - RNA, 24 nt, Artificial Sequence
  Synthetic
acugugauuugguuaaugccuagu

SEQ ID NO: 658989 - RNA, 18 nt, Artificial Sequence
  Synthetic
uuugaucucacuccuagu

SEQ ID NO: 658990 - RNA, 19 nt, Artificial Sequence
  Synthetic
auuugaucucacuccuagu

SEQ ID NO: 658991 - RNA, 20 nt, Artificial Sequence
  Synthetic
cauuugaucucacuccuagu

SEQ ID NO: 658992 - RNA, 21 nt, Artificial Sequence
  Synthetic
ucauuugaucucacuccuagu

SEQ ID NO: 658993 - RNA, 22 nt, Artificial Sequence
  Synthetic
uucauuugaucucacuccuagu

SEQ ID NO: 658994 - RNA, 23 nt, Artificial Sequence
  Synthetic
cuucauuugaucucacuccuagu

SEQ ID NO: 658995 - RNA, 24 nt, Artificial Sequence
  Synthetic
ucuucauuugaucucacuccuagu

SEQ ID NO: 658996 - RNA, 18 nt, Artificial Sequence
  Synthetic
cuuguacauguuccuagu

SEQ ID NO: 658997 - RNA, 19 nt, Artificial Sequence
  Synthetic
acuuguacauguuccuagu

SEQ ID NO: 658998 - RNA, 20 nt, Artificial Sequence
  Synthetic
cacuuguacauguuccuagu

SEQ ID NO: 658999 - RNA, 21 nt, Artificial Sequence
  Synthetic
ccacuuguacauguuccuagu

SEQ ID NO: 659000 - RNA, 22 nt, Artificial Sequence
  Synthetic
gccacuuguacauguuccuagu

SEQ ID NO: 659001 - RNA, 23 nt, Artificial Sequence
  Synthetic
ggccacuuguacauguuccuagu

SEQ ID NO: 659002 - RNA, 24 nt, Artificial Sequence
  Synthetic
gggccacuuguacauguuccuagu

SEQ ID NO: 659003 - RNA, 18 nt, Artificial Sequence
  Synthetic
agagaugacacagcuagu

SEQ ID NO: 659004 - RNA, 19 nt, Artificial Sequence
  Synthetic
gagagaugacacagcuagu

SEQ ID NO: 659005 - RNA, 20 nt, Artificial Sequence
  Synthetic
agagagaugacacagcuagu

SEQ ID NO: 659006 - RNA, 21 nt, Artificial Sequence
  Synthetic
cagagagaugacacagcuagu

SEQ ID NO: 659007 - RNA, 22 nt, Artificial Sequence
  Synthetic
acagagagaugacacagcuagu

SEQ ID NO: 659008 - RNA, 23 nt, Artificial Sequence
  Synthetic
cacagagagaugacacagcuagu

SEQ ID NO: 659009 - RNA, 24 nt, Artificial Sequence
  Synthetic
ccacagagagaugacacagcuagu

SEQ ID NO: 659010 - RNA, 18 nt, Artificial Sequence
  Synthetic
gcuaaccauguagcuagu

SEQ ID NO: 659011 - RNA, 19 nt, Artificial Sequence
  Synthetic
ugcuaaccauguagcuagu

SEQ ID NO: 659012 - RNA, 20 nt, Artificial Sequence
  Synthetic
augcuaaccauguagcuagu

SEQ ID NO: 659013 - RNA, 21 nt, Artificial Sequence
  Synthetic
uaugcuaaccauguagcuagu

SEQ ID NO: 659014 - RNA, 22 nt, Artificial Sequence
  Synthetic
auaugcuaaccauguagcuagu

SEQ ID NO: 659015 - RNA, 23 nt, Artificial Sequence
  Synthetic
uauaugcuaaccauguagcuagu

SEQ ID NO: 659016 - RNA, 24 nt, Artificial Sequence
  Synthetic
auauaugcuaaccauguagcuagu

SEQ ID NO: 659017 - RNA, 18 nt, Artificial Sequence
  Synthetic
aauuuaaauuuagcuagu

SEQ ID NO: 659018 - RNA, 19 nt, Artificial Sequence
  Synthetic
uaauuuaaauuuagcuagu

SEQ ID NO: 659019 - RNA, 20 nt, Artificial Sequence
  Synthetic
auaauuuaaauuuagcuagu

SEQ ID NO: 659020 - RNA, 21 nt, Artificial Sequence
  Synthetic
gauaauuuaaauuuagcuagu

SEQ ID NO: 659021 - RNA, 22 nt, Artificial Sequence
  Synthetic
ugauaauuuaaauuuagcuagu

SEQ ID NO: 659022 - RNA, 23 nt, Artificial Sequence
  Synthetic
gugauaauuuaaauuuagcuagu

SEQ ID NO: 659023 - RNA, 24 nt, Artificial Sequence
  Synthetic
ugugauaauuuaaauuuagcuagu

SEQ ID NO: 659024 - RNA, 18 nt, Artificial Sequence
  Synthetic
uggagguaaggggcuagu

SEQ ID NO: 659025 - RNA, 19 nt, Artificial Sequence
  Synthetic
guggagguaaggggcuagu

SEQ ID NO: 659026 - RNA, 20 nt, Artificial Sequence
  Synthetic
aguggagguaaggggcuagu

SEQ ID NO: 659027 - RNA, 21 nt, Artificial Sequence
  Synthetic
gaguggagguaaggggcuagu

SEQ ID NO: 659028 - RNA, 22 nt, Artificial Sequence
  Synthetic
agaguggagguaaggggcuagu

SEQ ID NO: 659029 - RNA, 23 nt, Artificial Sequence
  Synthetic
gagaguggagguaaggggcuagu

SEQ ID NO: 659030 - RNA, 24 nt, Artificial Sequence
  Synthetic
ugagaguggagguaaggggcuagu

SEQ ID NO: 659031 - RNA, 18 nt, Artificial Sequence
  Synthetic
uuccauaucauggcuagu

SEQ ID NO: 659032 - RNA, 19 nt, Artificial Sequence
  Synthetic
auuccauaucauggcuagu

SEQ ID NO: 659033 - RNA, 20 nt, Artificial Sequence
  Synthetic
gauuccauaucauggcuagu

SEQ ID NO: 659034 - RNA, 21 nt, Artificial Sequence
  Synthetic
ugauuccauaucauggcuagu

SEQ ID NO: 659035 - RNA, 22 nt, Artificial Sequence
  Synthetic
uugauuccauaucauggcuagu

SEQ ID NO: 659036 - RNA, 23 nt, Artificial Sequence
  Synthetic
guugauuccauaucauggcuagu

SEQ ID NO: 659037 - RNA, 24 nt, Artificial Sequence
  Synthetic
gguugauuccauaucauggcuagu

SEQ ID NO: 659038 - RNA, 18 nt, Artificial Sequence
  Synthetic
uauaaacgccuggcuagu

SEQ ID NO: 659039 - RNA, 19 nt, Artificial Sequence
  Synthetic
uuauaaacgccuggcuagu

SEQ ID NO: 659040 - RNA, 20 nt, Artificial Sequence
  Synthetic
uuuauaaacgccuggcuagu

SEQ ID NO: 659041 - RNA, 21 nt, Artificial Sequence
  Synthetic
uuuuauaaacgccuggcuagu

SEQ ID NO: 659042 - RNA, 22 nt, Artificial Sequence
  Synthetic
uuuuuauaaacgccuggcuagu

SEQ ID NO: 659043 - RNA, 23 nt, Artificial Sequence
  Synthetic
guuuuuauaaacgccuggcuagu

SEQ ID NO: 659044 - RNA, 24 nt, Artificial Sequence
  Synthetic
uguuuuuauaaacgccuggcuagu

SEQ ID NO: 659045 - RNA, 18 nt, Artificial Sequence
  Synthetic
auaguaguaaaugcuagu

SEQ ID NO: 659046 - RNA, 19 nt, Artificial Sequence
  Synthetic
uauaguaguaaaugcuagu

SEQ ID NO: 659047 - RNA, 20 nt, Artificial Sequence
  Synthetic
auauaguaguaaaugcuagu

SEQ ID NO: 659048 - RNA, 21 nt, Artificial Sequence
  Synthetic
uauauaguaguaaaugcuagu

SEQ ID NO: 659049 - RNA, 22 nt, Artificial Sequence
  Synthetic
auauauaguaguaaaugcuagu

SEQ ID NO: 659050 - RNA, 23 nt, Artificial Sequence
  Synthetic
aauauauaguaguaaaugcuagu

SEQ ID NO: 659051 - RNA, 24 nt, Artificial Sequence
  Synthetic
aaauauauaguaguaaaugcuagu

SEQ ID NO: 659052 - RNA, 18 nt, Artificial Sequence
  Synthetic
uucuuuccaugugcuagu

SEQ ID NO: 659053 - RNA, 19 nt, Artificial Sequence
  Synthetic
cuucuuuccaugugcuagu

SEQ ID NO: 659054 - RNA, 20 nt, Artificial Sequence
  Synthetic
ucuucuuuccaugugcuagu

SEQ ID NO: 659055 - RNA, 21 nt, Artificial Sequence
  Synthetic
uucuucuuuccaugugcuagu

SEQ ID NO: 659056 - RNA, 22 nt, Artificial Sequence
  Synthetic
auucuucuuuccaugugcuagu

SEQ ID NO: 659057 - RNA, 23 nt, Artificial Sequence
  Synthetic
aauucuucuuuccaugugcuagu

SEQ ID NO: 659058 - RNA, 24 nt, Artificial Sequence
  Synthetic
gaauucuucuuuccaugugcuagu

SEQ ID NO: 659059 - RNA, 18 nt, Artificial Sequence
  Synthetic
agcuuugccauugcuagu

SEQ ID NO: 659060 - RNA, 19 nt, Artificial Sequence
  Synthetic
aagcuuugccauugcuagu

SEQ ID NO: 659061 - RNA, 20 nt, Artificial Sequence
  Synthetic
aaagcuuugccauugcuagu

SEQ ID NO: 659062 - RNA, 21 nt, Artificial Sequence
  Synthetic
caaagcuuugccauugcuagu

SEQ ID NO: 659063 - RNA, 22 nt, Artificial Sequence
  Synthetic
acaaagcuuugccauugcuagu

SEQ ID NO: 659064 - RNA, 23 nt, Artificial Sequence
  Synthetic
cacaaagcuuugccauugcuagu

SEQ ID NO: 659065 - RNA, 24 nt, Artificial Sequence
  Synthetic
gcacaaagcuuugccauugcuagu

SEQ ID NO: 659066 - RNA, 18 nt, Artificial Sequence
  Synthetic
cuucuuuaaaacucuagu

SEQ ID NO: 659067 - RNA, 19 nt, Artificial Sequence
  Synthetic
ccuucuuuaaaacucuagu

SEQ ID NO: 659068 - RNA, 20 nt, Artificial Sequence
  Synthetic
uccuucuuuaaaacucuagu

SEQ ID NO: 659069 - RNA, 21 nt, Artificial Sequence
  Synthetic
auccuucuuuaaaacucuagu

SEQ ID NO: 659070 - RNA, 22 nt, Artificial Sequence
  Synthetic
cauccuucuuuaaaacucuagu

SEQ ID NO: 659071 - RNA, 23 nt, Artificial Sequence
  Synthetic
ccauccuucuuuaaaacucuagu

SEQ ID NO: 659072 - RNA, 24 nt, Artificial Sequence
  Synthetic
cccauccuucuuuaaaacucuagu

SEQ ID NO: 659073 - RNA, 18 nt, Artificial Sequence
  Synthetic
cucaauuuagacucuagu

SEQ ID NO: 659074 - RNA, 19 nt, Artificial Sequence
  Synthetic
acucaauuuagacucuagu

SEQ ID NO: 659075 - RNA, 20 nt, Artificial Sequence
  Synthetic
cacucaauuuagacucuagu

SEQ ID NO: 659076 - RNA, 21 nt, Artificial Sequence
  Synthetic
ucacucaauuuagacucuagu

SEQ ID NO: 659077 - RNA, 22 nt, Artificial Sequence
  Synthetic
aucacucaauuuagacucuagu

SEQ ID NO: 659078 - RNA, 23 nt, Artificial Sequence
  Synthetic
aaucacucaauuuagacucuagu

SEQ ID NO: 659079 - RNA, 24 nt, Artificial Sequence
  Synthetic
aaaucacucaauuuagacucuagu

SEQ ID NO: 659080 - RNA, 18 nt, Artificial Sequence
  Synthetic
ggagauguuaccucuagu

SEQ ID NO: 659081 - RNA, 19 nt, Artificial Sequence
  Synthetic
aggagauguuaccucuagu

SEQ ID NO: 659082 - RNA, 20 nt, Artificial Sequence
  Synthetic
aaggagauguuaccucuagu

SEQ ID NO: 659083 - RNA, 21 nt, Artificial Sequence
  Synthetic
gaaggagauguuaccucuagu

SEQ ID NO: 659084 - RNA, 22 nt, Artificial Sequence
  Synthetic
ggaaggagauguuaccucuagu

SEQ ID NO: 659085 - RNA, 23 nt, Artificial Sequence
  Synthetic
gggaaggagauguuaccucuagu

SEQ ID NO: 659086 - RNA, 24 nt, Artificial Sequence
  Synthetic
ggggaaggagauguuaccucuagu

SEQ ID NO: 659087 - RNA, 18 nt, Artificial Sequence
  Synthetic
gaagaacacuucucuagu

SEQ ID NO: 659088 - RNA, 19 nt, Artificial Sequence
  Synthetic
ugaagaacacuucucuagu

SEQ ID NO: 659089 - RNA, 20 nt, Artificial Sequence
  Synthetic
uugaagaacacuucucuagu

SEQ ID NO: 659090 - RNA, 21 nt, Artificial Sequence
  Synthetic
uuugaagaacacuucucuagu

SEQ ID NO: 659091 - RNA, 22 nt, Artificial Sequence
  Synthetic
guuugaagaacacuucucuagu

SEQ ID NO: 659092 - RNA, 23 nt, Artificial Sequence
  Synthetic
uguuugaagaacacuucucuagu

SEQ ID NO: 659093 - RNA, 24 nt, Artificial Sequence
  Synthetic
guguuugaagaacacuucucuagu

SEQ ID NO: 659094 - RNA, 18 nt, Artificial Sequence
  Synthetic
aaaggauagaagucuagu

SEQ ID NO: 659095 - RNA, 19 nt, Artificial Sequence
  Synthetic
aaaaggauagaagucuagu

SEQ ID NO: 659096 - RNA, 20 nt, Artificial Sequence
  Synthetic
gaaaaggauagaagucuagu

SEQ ID NO: 659097 - RNA, 21 nt, Artificial Sequence
  Synthetic
agaaaaggauagaagucuagu

SEQ ID NO: 659098 - RNA, 22 nt, Artificial Sequence
  Synthetic
aagaaaaggauagaagucuagu

SEQ ID NO: 659099 - RNA, 23 nt, Artificial Sequence
  Synthetic
caagaaaaggauagaagucuagu

SEQ ID NO: 659100 - RNA, 24 nt, Artificial Sequence
  Synthetic
ucaagaaaaggauagaagucuagu

SEQ ID NO: 659101 - RNA, 18 nt, Artificial Sequence
  Synthetic
auggaccagaggucuagu

SEQ ID NO: 659102 - RNA, 19 nt, Artificial Sequence
  Synthetic
uauggaccagaggucuagu

SEQ ID NO: 659103 - RNA, 20 nt, Artificial Sequence
  Synthetic
cuauggaccagaggucuagu

SEQ ID NO: 659104 - RNA, 21 nt, Artificial Sequence
  Synthetic
ccuauggaccagaggucuagu

SEQ ID NO: 659105 - RNA, 22 nt, Artificial Sequence
  Synthetic
cccuauggaccagaggucuagu

SEQ ID NO: 659106 - RNA, 23 nt, Artificial Sequence
  Synthetic
gcccuauggaccagaggucuagu

SEQ ID NO: 659107 - RNA, 24 nt, Artificial Sequence
  Synthetic
ugcccuauggaccagaggucuagu

SEQ ID NO: 659108 - RNA, 18 nt, Artificial Sequence
  Synthetic
uucugcgauucuucuagu

SEQ ID NO: 659109 - RNA, 19 nt, Artificial Sequence
  Synthetic
cuucugcgauucuucuagu

SEQ ID NO: 659110 - RNA, 20 nt, Artificial Sequence
  Synthetic
ucuucugcgauucuucuagu

SEQ ID NO: 659111 - RNA, 21 nt, Artificial Sequence
  Synthetic
uucuucugcgauucuucuagu

SEQ ID NO: 659112 - RNA, 22 nt, Artificial Sequence
  Synthetic
uuucuucugcgauucuucuagu

SEQ ID NO: 659113 - RNA, 23 nt, Artificial Sequence
  Synthetic
uuuucuucugcgauucuucuagu

SEQ ID NO: 659114 - RNA, 24 nt, Artificial Sequence
  Synthetic
guuuucuucugcgauucuucuagu

SEQ ID NO: 659115 - RNA, 18 nt, Artificial Sequence
  Synthetic
agaaauugcauuucuagu

SEQ ID NO: 659116 - RNA, 19 nt, Artificial Sequence
  Synthetic
cagaaauugcauuucuagu

SEQ ID NO: 659117 - RNA, 20 nt, Artificial Sequence
  Synthetic
gcagaaauugcauuucuagu

SEQ ID NO: 659118 - RNA, 21 nt, Artificial Sequence
  Synthetic
agcagaaauugcauuucuagu

SEQ ID NO: 659119 - RNA, 22 nt, Artificial Sequence
  Synthetic
uagcagaaauugcauuucuagu

SEQ ID NO: 659120 - RNA, 23 nt, Artificial Sequence
  Synthetic
uuagcagaaauugcauuucuagu

SEQ ID NO: 659121 - RNA, 24 nt, Artificial Sequence
  Synthetic
auuagcagaaauugcauuucuagu

SEQ ID NO: 659122 - RNA, 18 nt, Artificial Sequence
  Synthetic
auuuuauuauuuucuagu

SEQ ID NO: 659123 - RNA, 19 nt, Artificial Sequence
  Synthetic
uauuuuauuauuuucuagu

SEQ ID NO: 659124 - RNA, 20 nt, Artificial Sequence
  Synthetic
cuauuuuauuauuuucuagu

SEQ ID NO: 659125 - RNA, 21 nt, Artificial Sequence
  Synthetic
acuauuuuauuauuuucuagu

SEQ ID NO: 659126 - RNA, 22 nt, Artificial Sequence
  Synthetic
aacuauuuuauuauuuucuagu

SEQ ID NO: 659127 - RNA, 23 nt, Artificial Sequence
  Synthetic
gaacuauuuuauuauuuucuagu

SEQ ID NO: 659128 - RNA, 24 nt, Artificial Sequence
  Synthetic
agaacuauuuuauuauuuucuagu

SEQ ID NO: 659129 - RNA, 18 nt, Artificial Sequence
  Synthetic
uuagguuuuuuuucuagu

SEQ ID NO: 659130 - RNA, 19 nt, Artificial Sequence
  Synthetic
auuagguuuuuuuucuagu

SEQ ID NO: 659131 - RNA, 20 nt, Artificial Sequence
  Synthetic
cauuagguuuuuuuucuagu

SEQ ID NO: 659132 - RNA, 21 nt, Artificial Sequence
  Synthetic
gcauuagguuuuuuuucuagu

SEQ ID NO: 659133 - RNA, 22 nt, Artificial Sequence
  Synthetic
ugcauuagguuuuuuuucuagu

SEQ ID NO: 659134 - RNA, 23 nt, Artificial Sequence
  Synthetic
uugcauuagguuuuuuuucuagu

SEQ ID NO: 659135 - RNA, 24 nt, Artificial Sequence
  Synthetic
auugcauuagguuuuuuuucuagu

SEQ ID NO: 659136 - RNA, 18 nt, Artificial Sequence
  Synthetic
ccucaguuauuaaguagu

SEQ ID NO: 659137 - RNA, 19 nt, Artificial Sequence
  Synthetic
uccucaguuauuaaguagu

SEQ ID NO: 659138 - RNA, 20 nt, Artificial Sequence
  Synthetic
uuccucaguuauuaaguagu

SEQ ID NO: 659139 - RNA, 21 nt, Artificial Sequence
  Synthetic
uuuccucaguuauuaaguagu

SEQ ID NO: 659140 - RNA, 22 nt, Artificial Sequence
  Synthetic
uuuuccucaguuauuaaguagu

SEQ ID NO: 659141 - RNA, 23 nt, Artificial Sequence
  Synthetic
uuuuuccucaguuauuaaguagu

SEQ ID NO: 659142 - RNA, 24 nt, Artificial Sequence
  Synthetic
auuuuuccucaguuauuaaguagu

SEQ ID NO: 659143 - RNA, 18 nt, Artificial Sequence
  Synthetic
gagaauaacaacaguagu

SEQ ID NO: 659144 - RNA, 19 nt, Artificial Sequence
  Synthetic
agagaauaacaacaguagu

SEQ ID NO: 659145 - RNA, 20 nt, Artificial Sequence
  Synthetic
aagagaauaacaacaguagu

SEQ ID NO: 659146 - RNA, 21 nt, Artificial Sequence
  Synthetic
gaagagaauaacaacaguagu

SEQ ID NO: 659147 - RNA, 22 nt, Artificial Sequence
  Synthetic
ggaagagaauaacaacaguagu

SEQ ID NO: 659148 - RNA, 23 nt, Artificial Sequence
  Synthetic
aggaagagaauaacaacaguagu

SEQ ID NO: 659149 - RNA, 24 nt, Artificial Sequence
  Synthetic
uaggaagagaauaacaacaguagu

SEQ ID NO: 659150 - RNA, 18 nt, Artificial Sequence
  Synthetic
gcuucuucacacaguagu

SEQ ID NO: 659151 - RNA, 19 nt, Artificial Sequence
  Synthetic
ugcuucuucacacaguagu

SEQ ID NO: 659152 - RNA, 20 nt, Artificial Sequence
  Synthetic
cugcuucuucacacaguagu

SEQ ID NO: 659153 - RNA, 21 nt, Artificial Sequence
  Synthetic
ccugcuucuucacacaguagu

SEQ ID NO: 659154 - RNA, 22 nt, Artificial Sequence
  Synthetic
cccugcuucuucacacaguagu

SEQ ID NO: 659155 - RNA, 23 nt, Artificial Sequence
  Synthetic
acccugcuucuucacacaguagu

SEQ ID NO: 659156 - RNA, 24 nt, Artificial Sequence
  Synthetic
gacccugcuucuucacacaguagu

SEQ ID NO: 659157 - RNA, 18 nt, Artificial Sequence
  Synthetic
uccuaugaggccaguagu

SEQ ID NO: 659158 - RNA, 19 nt, Artificial Sequence
  Synthetic
auccuaugaggccaguagu

SEQ ID NO: 659159 - RNA, 20 nt, Artificial Sequence
  Synthetic
aauccuaugaggccaguagu

SEQ ID NO: 659160 - RNA, 21 nt, Artificial Sequence
  Synthetic
caauccuaugaggccaguagu

SEQ ID NO: 659161 - RNA, 22 nt, Artificial Sequence
  Synthetic
acaauccuaugaggccaguagu

SEQ ID NO: 659162 - RNA, 23 nt, Artificial Sequence
  Synthetic
aacaauccuaugaggccaguagu

SEQ ID NO: 659163 - RNA, 24 nt, Artificial Sequence
  Synthetic
caacaauccuaugaggccaguagu

SEQ ID NO: 659164 - RNA, 18 nt, Artificial Sequence
  Synthetic
ggguuuugccucaguagu

SEQ ID NO: 659165 - RNA, 19 nt, Artificial Sequence
  Synthetic
aggguuuugccucaguagu

SEQ ID NO: 659166 - RNA, 20 nt, Artificial Sequence
  Synthetic
aaggguuuugccucaguagu

SEQ ID NO: 659167 - RNA, 21 nt, Artificial Sequence
  Synthetic
gaaggguuuugccucaguagu

SEQ ID NO: 659168 - RNA, 22 nt, Artificial Sequence
  Synthetic
agaaggguuuugccucaguagu

SEQ ID NO: 659169 - RNA, 23 nt, Artificial Sequence
  Synthetic
cagaaggguuuugccucaguagu

SEQ ID NO: 659170 - RNA, 24 nt, Artificial Sequence
  Synthetic
ucagaaggguuuugccucaguagu

SEQ ID NO: 659171 - RNA, 18 nt, Artificial Sequence
  Synthetic
uuuuugguguucaguagu

SEQ ID NO: 659172 - RNA, 19 nt, Artificial Sequence
  Synthetic
auuuuugguguucaguagu

SEQ ID NO: 659173 - RNA, 20 nt, Artificial Sequence
  Synthetic
uauuuuugguguucaguagu

SEQ ID NO: 659174 - RNA, 21 nt, Artificial Sequence
  Synthetic
uuauuuuugguguucaguagu

SEQ ID NO: 659175 - RNA, 22 nt, Artificial Sequence
  Synthetic
uuuauuuuugguguucaguagu

SEQ ID NO: 659176 - RNA, 23 nt, Artificial Sequence
  Synthetic
uuuuauuuuugguguucaguagu

SEQ ID NO: 659177 - RNA, 24 nt, Artificial Sequence
  Synthetic
auuuuauuuuugguguucaguagu

SEQ ID NO: 659178 - RNA, 18 nt, Artificial Sequence
  Synthetic
uuaaaaacacagaguagu

SEQ ID NO: 659179 - RNA, 19 nt, Artificial Sequence
  Synthetic
uuuaaaaacacagaguagu

SEQ ID NO: 659180 - RNA, 20 nt, Artificial Sequence
  Synthetic
cuuuaaaaacacagaguagu

SEQ ID NO: 659181 - RNA, 21 nt, Artificial Sequence
  Synthetic
ucuuuaaaaacacagaguagu

SEQ ID NO: 659182 - RNA, 22 nt, Artificial Sequence
  Synthetic
aucuuuaaaaacacagaguagu

SEQ ID NO: 659183 - RNA, 23 nt, Artificial Sequence
  Synthetic
aaucuuuaaaaacacagaguagu

SEQ ID NO: 659184 - RNA, 24 nt, Artificial Sequence
  Synthetic
gaaucuuuaaaaacacagaguagu

SEQ ID NO: 659185 - RNA, 18 nt, Artificial Sequence
  Synthetic
auaagauugcagaguagu

SEQ ID NO: 659186 - RNA, 19 nt, Artificial Sequence
  Synthetic
aauaagauugcagaguagu

SEQ ID NO: 659187 - RNA, 20 nt, Artificial Sequence
  Synthetic
aaauaagauugcagaguagu

SEQ ID NO: 659188 - RNA, 21 nt, Artificial Sequence
  Synthetic
gaaauaagauugcagaguagu

SEQ ID NO: 659189 - RNA, 22 nt, Artificial Sequence
  Synthetic
ggaaauaagauugcagaguagu

SEQ ID NO: 659190 - RNA, 23 nt, Artificial Sequence
  Synthetic
aggaaauaagauugcagaguagu

SEQ ID NO: 659191 - RNA, 24 nt, Artificial Sequence
  Synthetic
gaggaaauaagauugcagaguagu

SEQ ID NO: 659192 - RNA, 18 nt, Artificial Sequence
  Synthetic
ccacaacaguagaguagu

SEQ ID NO: 659193 - RNA, 19 nt, Artificial Sequence
  Synthetic
uccacaacaguagaguagu

SEQ ID NO: 659194 - RNA, 20 nt, Artificial Sequence
  Synthetic
auccacaacaguagaguagu

SEQ ID NO: 659195 - RNA, 21 nt, Artificial Sequence
  Synthetic
uauccacaacaguagaguagu

SEQ ID NO: 659196 - RNA, 22 nt, Artificial Sequence
  Synthetic
uuauccacaacaguagaguagu

SEQ ID NO: 659197 - RNA, 23 nt, Artificial Sequence
  Synthetic
uuuauccacaacaguagaguagu

SEQ ID NO: 659198 - RNA, 24 nt, Artificial Sequence
  Synthetic
uuuuauccacaacaguagaguagu

SEQ ID NO: 659199 - RNA, 18 nt, Artificial Sequence
  Synthetic
acauuauuucauaguagu

SEQ ID NO: 659200 - RNA, 19 nt, Artificial Sequence
  Synthetic
aacauuauuucauaguagu

SEQ ID NO: 659201 - RNA, 20 nt, Artificial Sequence
  Synthetic
uaacauuauuucauaguagu

SEQ ID NO: 659202 - RNA, 21 nt, Artificial Sequence
  Synthetic
auaacauuauuucauaguagu

SEQ ID NO: 659203 - RNA, 22 nt, Artificial Sequence
  Synthetic
aauaacauuauuucauaguagu

SEQ ID NO: 659204 - RNA, 23 nt, Artificial Sequence
  Synthetic
uaauaacauuauuucauaguagu

SEQ ID NO: 659205 - RNA, 24 nt, Artificial Sequence
  Synthetic
guaauaacauuauuucauaguagu

SEQ ID NO: 659206 - RNA, 18 nt, Artificial Sequence
  Synthetic
agugguaguaguaguagu

SEQ ID NO: 659207 - RNA, 19 nt, Artificial Sequence
  Synthetic
uagugguaguaguaguagu

SEQ ID NO: 659208 - RNA, 20 nt, Artificial Sequence
  Synthetic
guagugguaguaguaguagu

SEQ ID NO: 659209 - RNA, 21 nt, Artificial Sequence
  Synthetic
aguagugguaguaguaguagu

SEQ ID NO: 659210 - RNA, 22 nt, Artificial Sequence
  Synthetic
uaguagugguaguaguaguagu

SEQ ID NO: 659211 - RNA, 23 nt, Artificial Sequence
  Synthetic
guaguagugguaguaguaguagu

SEQ ID NO: 659212 - RNA, 24 nt, Artificial Sequence
  Synthetic
aguaguagugguaguaguaguagu

SEQ ID NO: 659213 - RNA, 18 nt, Artificial Sequence
  Synthetic
agguuuuauuguaguagu

SEQ ID NO: 659214 - RNA, 19 nt, Artificial Sequence
  Synthetic
uagguuuuauuguaguagu

SEQ ID NO: 659215 - RNA, 20 nt, Artificial Sequence
  Synthetic
guagguuuuauuguaguagu

SEQ ID NO: 659216 - RNA, 21 nt, Artificial Sequence
  Synthetic
aguagguuuuauuguaguagu

SEQ ID NO: 659217 - RNA, 22 nt, Artificial Sequence
  Synthetic
aaguagguuuuauuguaguagu

SEQ ID NO: 659218 - RNA, 23 nt, Artificial Sequence
  Synthetic
uaaguagguuuuauuguaguagu

SEQ ID NO: 659219 - RNA, 24 nt, Artificial Sequence
  Synthetic
uuaaguagguuuuauuguaguagu

SEQ ID NO: 659220 - RNA, 18 nt, Artificial Sequence
  Synthetic
gcaaugccuauuaguagu

SEQ ID NO: 659221 - RNA, 19 nt, Artificial Sequence
  Synthetic
ugcaaugccuauuaguagu

SEQ ID NO: 659222 - RNA, 20 nt, Artificial Sequence
  Synthetic
cugcaaugccuauuaguagu

SEQ ID NO: 659223 - RNA, 21 nt, Artificial Sequence
  Synthetic
acugcaaugccuauuaguagu

SEQ ID NO: 659224 - RNA, 22 nt, Artificial Sequence
  Synthetic
aacugcaaugccuauuaguagu

SEQ ID NO: 659225 - RNA, 23 nt, Artificial Sequence
  Synthetic
aaacugcaaugccuauuaguagu

SEQ ID NO: 659226 - RNA, 24 nt, Artificial Sequence
  Synthetic
caaacugcaaugccuauuaguagu

SEQ ID NO: 659227 - RNA, 18 nt, Artificial Sequence
  Synthetic
ggauaaaaugcacguagu

SEQ ID NO: 659228 - RNA, 19 nt, Artificial Sequence
  Synthetic
uggauaaaaugcacguagu

SEQ ID NO: 659229 - RNA, 20 nt, Artificial Sequence
  Synthetic
uuggauaaaaugcacguagu

SEQ ID NO: 659230 - RNA, 21 nt, Artificial Sequence
  Synthetic
uuuggauaaaaugcacguagu

SEQ ID NO: 659231 - RNA, 22 nt, Artificial Sequence
  Synthetic
uuuuggauaaaaugcacguagu

SEQ ID NO: 659232 - RNA, 23 nt, Artificial Sequence
  Synthetic
cuuuuggauaaaaugcacguagu

SEQ ID NO: 659233 - RNA, 24 nt, Artificial Sequence
  Synthetic
ucuuuuggauaaaaugcacguagu

SEQ ID NO: 659234 - RNA, 18 nt, Artificial Sequence
  Synthetic
aacuuuuugugagguagu

SEQ ID NO: 659235 - RNA, 19 nt, Artificial Sequence
  Synthetic
caacuuuuugugagguagu

SEQ ID NO: 659236 - RNA, 20 nt, Artificial Sequence
  Synthetic
ucaacuuuuugugagguagu

SEQ ID NO: 659237 - RNA, 21 nt, Artificial Sequence
  Synthetic
aucaacuuuuugugagguagu

SEQ ID NO: 659238 - RNA, 22 nt, Artificial Sequence
  Synthetic
caucaacuuuuugugagguagu

SEQ ID NO: 659239 - RNA, 23 nt, Artificial Sequence
  Synthetic
gcaucaacuuuuugugagguagu

SEQ ID NO: 659240 - RNA, 24 nt, Artificial Sequence
  Synthetic
ggcaucaacuuuuugugagguagu

SEQ ID NO: 659241 - RNA, 18 nt, Artificial Sequence
  Synthetic
gaggcuacaaaggguagu

SEQ ID NO: 659242 - RNA, 19 nt, Artificial Sequence
  Synthetic
agaggcuacaaaggguagu

SEQ ID NO: 659243 - RNA, 20 nt, Artificial Sequence
  Synthetic
cagaggcuacaaaggguagu

SEQ ID NO: 659244 - RNA, 21 nt, Artificial Sequence
  Synthetic
ccagaggcuacaaaggguagu

SEQ ID NO: 659245 - RNA, 22 nt, Artificial Sequence
  Synthetic
accagaggcuacaaaggguagu

SEQ ID NO: 659246 - RNA, 23 nt, Artificial Sequence
  Synthetic
uaccagaggcuacaaaggguagu

SEQ ID NO: 659247 - RNA, 24 nt, Artificial Sequence
  Synthetic
uuaccagaggcuacaaaggguagu

SEQ ID NO: 659248 - RNA, 18 nt, Artificial Sequence
  Synthetic
gaggcugugaaggguagu

SEQ ID NO: 659249 - RNA, 19 nt, Artificial Sequence
  Synthetic
agaggcugugaaggguagu

SEQ ID NO: 659250 - RNA, 20 nt, Artificial Sequence
  Synthetic
cagaggcugugaaggguagu

SEQ ID NO: 659251 - RNA, 21 nt, Artificial Sequence
  Synthetic
ccagaggcugugaaggguagu

SEQ ID NO: 659252 - RNA, 22 nt, Artificial Sequence
  Synthetic
accagaggcugugaaggguagu

SEQ ID NO: 659253 - RNA, 23 nt, Artificial Sequence
  Synthetic
uaccagaggcugugaaggguagu

SEQ ID NO: 659254 - RNA, 24 nt, Artificial Sequence
  Synthetic
uuaccagaggcugugaaggguagu

SEQ ID NO: 659255 - RNA, 18 nt, Artificial Sequence
  Synthetic
ugcccggaagcugguagu

SEQ ID NO: 659256 - RNA, 19 nt, Artificial Sequence
  Synthetic
uugcccggaagcugguagu

SEQ ID NO: 659257 - RNA, 20 nt, Artificial Sequence
  Synthetic
auugcccggaagcugguagu

SEQ ID NO: 659258 - RNA, 21 nt, Artificial Sequence
  Synthetic
uauugcccggaagcugguagu

SEQ ID NO: 659259 - RNA, 22 nt, Artificial Sequence
  Synthetic
auauugcccggaagcugguagu

SEQ ID NO: 659260 - RNA, 23 nt, Artificial Sequence
  Synthetic
gauauugcccggaagcugguagu

SEQ ID NO: 659261 - RNA, 24 nt, Artificial Sequence
  Synthetic
ugauauugcccggaagcugguagu

SEQ ID NO: 659262 - RNA, 18 nt, Artificial Sequence
  Synthetic
aauaaucauaaauguagu

SEQ ID NO: 659263 - RNA, 19 nt, Artificial Sequence
  Synthetic
aaauaaucauaaauguagu

SEQ ID NO: 659264 - RNA, 20 nt, Artificial Sequence
  Synthetic
caaauaaucauaaauguagu

SEQ ID NO: 659265 - RNA, 21 nt, Artificial Sequence
  Synthetic
gcaaauaaucauaaauguagu

SEQ ID NO: 659266 - RNA, 22 nt, Artificial Sequence
  Synthetic
ggcaaauaaucauaaauguagu

SEQ ID NO: 659267 - RNA, 23 nt, Artificial Sequence
  Synthetic
uggcaaauaaucauaaauguagu

SEQ ID NO: 659268 - RNA, 24 nt, Artificial Sequence
  Synthetic
cuggcaaauaaucauaaauguagu

SEQ ID NO: 659269 - RNA, 18 nt, Artificial Sequence
  Synthetic
auaauaauaucauguagu

SEQ ID NO: 659270 - RNA, 19 nt, Artificial Sequence
  Synthetic
aauaauaauaucauguagu

SEQ ID NO: 659271 - RNA, 20 nt, Artificial Sequence
  Synthetic
caauaauaauaucauguagu

SEQ ID NO: 659272 - RNA, 21 nt, Artificial Sequence
  Synthetic
ucaauaauaauaucauguagu

SEQ ID NO: 659273 - RNA, 22 nt, Artificial Sequence
  Synthetic
aucaauaauaauaucauguagu

SEQ ID NO: 659274 - RNA, 23 nt, Artificial Sequence
  Synthetic
caucaauaauaauaucauguagu

SEQ ID NO: 659275 - RNA, 24 nt, Artificial Sequence
  Synthetic
ucaucaauaauaauaucauguagu

SEQ ID NO: 659276 - RNA, 18 nt, Artificial Sequence
  Synthetic
auuauuggacuauguagu

SEQ ID NO: 659277 - RNA, 19 nt, Artificial Sequence
  Synthetic
aauuauuggacuauguagu

SEQ ID NO: 659278 - RNA, 20 nt, Artificial Sequence
  Synthetic
aaauuauuggacuauguagu

SEQ ID NO: 659279 - RNA, 21 nt, Artificial Sequence
  Synthetic
aaaauuauuggacuauguagu

SEQ ID NO: 659280 - RNA, 22 nt, Artificial Sequence
  Synthetic
caaaauuauuggacuauguagu

SEQ ID NO: 659281 - RNA, 23 nt, Artificial Sequence
  Synthetic
gcaaaauuauuggacuauguagu

SEQ ID NO: 659282 - RNA, 24 nt, Artificial Sequence
  Synthetic
ggcaaaauuauuggacuauguagu

SEQ ID NO: 659283 - RNA, 18 nt, Artificial Sequence
  Synthetic
agauuacagcacuguagu

SEQ ID NO: 659284 - RNA, 19 nt, Artificial Sequence
  Synthetic
gagauuacagcacuguagu

SEQ ID NO: 659285 - RNA, 20 nt, Artificial Sequence
  Synthetic
agagauuacagcacuguagu

SEQ ID NO: 659286 - RNA, 21 nt, Artificial Sequence
  Synthetic
aagagauuacagcacuguagu

SEQ ID NO: 659287 - RNA, 22 nt, Artificial Sequence
  Synthetic
aaagagauuacagcacuguagu

SEQ ID NO: 659288 - RNA, 23 nt, Artificial Sequence
  Synthetic
aaaagagauuacagcacuguagu

SEQ ID NO: 659289 - RNA, 24 nt, Artificial Sequence
  Synthetic
aaaaagagauuacagcacuguagu

SEQ ID NO: 659290 - RNA, 18 nt, Artificial Sequence
  Synthetic
uguucucacuacuguagu

SEQ ID NO: 659291 - RNA, 19 nt, Artificial Sequence
  Synthetic
uuguucucacuacuguagu

SEQ ID NO: 659292 - RNA, 20 nt, Artificial Sequence
  Synthetic
cuuguucucacuacuguagu

SEQ ID NO: 659293 - RNA, 21 nt, Artificial Sequence
  Synthetic
ucuuguucucacuacuguagu

SEQ ID NO: 659294 - RNA, 22 nt, Artificial Sequence
  Synthetic
uucuuguucucacuacuguagu

SEQ ID NO: 659295 - RNA, 23 nt, Artificial Sequence
  Synthetic
auucuuguucucacuacuguagu

SEQ ID NO: 659296 - RNA, 24 nt, Artificial Sequence
  Synthetic
aauucuuguucucacuacuguagu

SEQ ID NO: 659297 - RNA, 18 nt, Artificial Sequence
  Synthetic
uugaggcaggaguguagu

SEQ ID NO: 659298 - RNA, 19 nt, Artificial Sequence
  Synthetic
cuugaggcaggaguguagu

SEQ ID NO: 659299 - RNA, 20 nt, Artificial Sequence
  Synthetic
ccuugaggcaggaguguagu

SEQ ID NO: 659300 - RNA, 21 nt, Artificial Sequence
  Synthetic
gccuugaggcaggaguguagu

SEQ ID NO: 659301 - RNA, 22 nt, Artificial Sequence
  Synthetic
ggccuugaggcaggaguguagu

SEQ ID NO: 659302 - RNA, 23 nt, Artificial Sequence
  Synthetic
aggccuugaggcaggaguguagu

SEQ ID NO: 659303 - RNA, 24 nt, Artificial Sequence
  Synthetic
aaggccuugaggcaggaguguagu

SEQ ID NO: 659304 - RNA, 18 nt, Artificial Sequence
  Synthetic
uggguacaaaaaauuagu

SEQ ID NO: 659305 - RNA, 19 nt, Artificial Sequence
  Synthetic
cuggguacaaaaaauuagu

SEQ ID NO: 659306 - RNA, 20 nt, Artificial Sequence
  Synthetic
acuggguacaaaaaauuagu

SEQ ID NO: 659307 - RNA, 21 nt, Artificial Sequence
  Synthetic
uacuggguacaaaaaauuagu

SEQ ID NO: 659308 - RNA, 22 nt, Artificial Sequence
  Synthetic
uuacuggguacaaaaaauuagu

SEQ ID NO: 659309 - RNA, 23 nt, Artificial Sequence
  Synthetic
guuacuggguacaaaaaauuagu

SEQ ID NO: 659310 - RNA, 24 nt, Artificial Sequence
  Synthetic
aguuacuggguacaaaaaauuagu

SEQ ID NO: 659311 - RNA, 18 nt, Artificial Sequence
  Synthetic
uccuacaaaucaauuagu

SEQ ID NO: 659312 - RNA, 19 nt, Artificial Sequence
  Synthetic
guccuacaaaucaauuagu

SEQ ID NO: 659313 - RNA, 20 nt, Artificial Sequence
  Synthetic
uguccuacaaaucaauuagu

SEQ ID NO: 659314 - RNA, 21 nt, Artificial Sequence
  Synthetic
auguccuacaaaucaauuagu

SEQ ID NO: 659315 - RNA, 22 nt, Artificial Sequence
  Synthetic
aauguccuacaaaucaauuagu

SEQ ID NO: 659316 - RNA, 23 nt, Artificial Sequence
  Synthetic
uaauguccuacaaaucaauuagu

SEQ ID NO: 659317 - RNA, 24 nt, Artificial Sequence
  Synthetic
auaauguccuacaaaucaauuagu

SEQ ID NO: 659318 - RNA, 18 nt, Artificial Sequence
  Synthetic
cccucucaguucauuagu

SEQ ID NO: 659319 - RNA, 19 nt, Artificial Sequence
  Synthetic
ucccucucaguucauuagu

SEQ ID NO: 659320 - RNA, 20 nt, Artificial Sequence
  Synthetic
uucccucucaguucauuagu

SEQ ID NO: 659321 - RNA, 21 nt, Artificial Sequence
  Synthetic
guucccucucaguucauuagu

SEQ ID NO: 659322 - RNA, 22 nt, Artificial Sequence
  Synthetic
uguucccucucaguucauuagu

SEQ ID NO: 659323 - RNA, 23 nt, Artificial Sequence
  Synthetic
cuguucccucucaguucauuagu

SEQ ID NO: 659324 - RNA, 24 nt, Artificial Sequence
  Synthetic
ccuguucccucucaguucauuagu

SEQ ID NO: 659325 - RNA, 18 nt, Artificial Sequence
  Synthetic
auaaugccucugauuagu

SEQ ID NO: 659326 - RNA, 19 nt, Artificial Sequence
  Synthetic
aauaaugccucugauuagu

SEQ ID NO: 659327 - RNA, 20 nt, Artificial Sequence
  Synthetic
aaauaaugccucugauuagu

SEQ ID NO: 659328 - RNA, 21 nt, Artificial Sequence
  Synthetic
aaaauaaugccucugauuagu

SEQ ID NO: 659329 - RNA, 22 nt, Artificial Sequence
  Synthetic
aaaaauaaugccucugauuagu

SEQ ID NO: 659330 - RNA, 23 nt, Artificial Sequence
  Synthetic
aaaaaauaaugccucugauuagu

SEQ ID NO: 659331 - RNA, 24 nt, Artificial Sequence
  Synthetic
caaaaaauaaugccucugauuagu

SEQ ID NO: 659332 - RNA, 18 nt, Artificial Sequence
  Synthetic
acuuacaggcauauuagu

SEQ ID NO: 659333 - RNA, 19 nt, Artificial Sequence
  Synthetic
uacuuacaggcauauuagu

SEQ ID NO: 659334 - RNA, 20 nt, Artificial Sequence
  Synthetic
uuacuuacaggcauauuagu

SEQ ID NO: 659335 - RNA, 21 nt, Artificial Sequence
  Synthetic
guuacuuacaggcauauuagu

SEQ ID NO: 659336 - RNA, 22 nt, Artificial Sequence
  Synthetic
aguuacuuacaggcauauuagu

SEQ ID NO: 659337 - RNA, 23 nt, Artificial Sequence
  Synthetic
caguuacuuacaggcauauuagu

SEQ ID NO: 659338 - RNA, 24 nt, Artificial Sequence
  Synthetic
ucaguuacuuacaggcauauuagu

SEQ ID NO: 659339 - RNA, 18 nt, Artificial Sequence
  Synthetic
ccuuucaaaauuauuagu

SEQ ID NO: 659340 - RNA, 19 nt, Artificial Sequence
  Synthetic
uccuuucaaaauuauuagu

SEQ ID NO: 659341 - RNA, 20 nt, Artificial Sequence
  Synthetic
uuccuuucaaaauuauuagu

SEQ ID NO: 659342 - RNA, 21 nt, Artificial Sequence
  Synthetic
auuccuuucaaaauuauuagu

SEQ ID NO: 659343 - RNA, 22 nt, Artificial Sequence
  Synthetic
cauuccuuucaaaauuauuagu

SEQ ID NO: 659344 - RNA, 23 nt, Artificial Sequence
  Synthetic
acauuccuuucaaaauuauuagu

SEQ ID NO: 659345 - RNA, 24 nt, Artificial Sequence
  Synthetic
gacauuccuuucaaaauuauuagu

SEQ ID NO: 659346 - RNA, 18 nt, Artificial Sequence
  Synthetic
auguucucacuuauuagu

SEQ ID NO: 659347 - RNA, 19 nt, Artificial Sequence
  Synthetic
cauguucucacuuauuagu

SEQ ID NO: 659348 - RNA, 20 nt, Artificial Sequence
  Synthetic
gcauguucucacuuauuagu

SEQ ID NO: 659349 - RNA, 21 nt, Artificial Sequence
  Synthetic
ugcauguucucacuuauuagu

SEQ ID NO: 659350 - RNA, 22 nt, Artificial Sequence
  Synthetic
cugcauguucucacuuauuagu

SEQ ID NO: 659351 - RNA, 23 nt, Artificial Sequence
  Synthetic
acugcauguucucacuuauuagu

SEQ ID NO: 659352 - RNA, 24 nt, Artificial Sequence
  Synthetic
uacugcauguucucacuuauuagu

SEQ ID NO: 659353 - RNA, 18 nt, Artificial Sequence
  Synthetic
cugaaaaagagccuuagu

SEQ ID NO: 659354 - RNA, 19 nt, Artificial Sequence
  Synthetic
ccugaaaaagagccuuagu

SEQ ID NO: 659355 - RNA, 20 nt, Artificial Sequence
  Synthetic
cccugaaaaagagccuuagu

SEQ ID NO: 659356 - RNA, 21 nt, Artificial Sequence
  Synthetic
acccugaaaaagagccuuagu

SEQ ID NO: 659357 - RNA, 22 nt, Artificial Sequence
  Synthetic
gacccugaaaaagagccuuagu

SEQ ID NO: 659358 - RNA, 23 nt, Artificial Sequence
  Synthetic
agacccugaaaaagagccuuagu

SEQ ID NO: 659359 - RNA, 24 nt, Artificial Sequence
  Synthetic
aagacccugaaaaagagccuuagu

SEQ ID NO: 659360 - RNA, 18 nt, Artificial Sequence
  Synthetic
aacuauauuugccuuagu

SEQ ID NO: 659361 - RNA, 19 nt, Artificial Sequence
  Synthetic
aaacuauauuugccuuagu

SEQ ID NO: 659362 - RNA, 20 nt, Artificial Sequence
  Synthetic
uaaacuauauuugccuuagu

SEQ ID NO: 659363 - RNA, 21 nt, Artificial Sequence
  Synthetic
guaaacuauauuugccuuagu

SEQ ID NO: 659364 - RNA, 22 nt, Artificial Sequence
  Synthetic
uguaaacuauauuugccuuagu

SEQ ID NO: 659365 - RNA, 23 nt, Artificial Sequence
  Synthetic
uuguaaacuauauuugccuuagu

SEQ ID NO: 659366 - RNA, 24 nt, Artificial Sequence
  Synthetic
guuguaaacuauauuugccuuagu

SEQ ID NO: 659367 - RNA, 18 nt, Artificial Sequence
  Synthetic
aaggauacaaggcuuagu

SEQ ID NO: 659368 - RNA, 19 nt, Artificial Sequence
  Synthetic
uaaggauacaaggcuuagu

SEQ ID NO: 659369 - RNA, 20 nt, Artificial Sequence
  Synthetic
auaaggauacaaggcuuagu

SEQ ID NO: 659370 - RNA, 21 nt, Artificial Sequence
  Synthetic
aauaaggauacaaggcuuagu

SEQ ID NO: 659371 - RNA, 22 nt, Artificial Sequence
  Synthetic
uaauaaggauacaaggcuuagu

SEQ ID NO: 659372 - RNA, 23 nt, Artificial Sequence
  Synthetic
auaauaaggauacaaggcuuagu

SEQ ID NO: 659373 - RNA, 24 nt, Artificial Sequence
  Synthetic
uauaauaaggauacaaggcuuagu

SEQ ID NO: 659374 - RNA, 18 nt, Artificial Sequence
  Synthetic
gucagcccuugucuuagu

SEQ ID NO: 659375 - RNA, 19 nt, Artificial Sequence
  Synthetic
ugucagcccuugucuuagu

SEQ ID NO: 659376 - RNA, 20 nt, Artificial Sequence
  Synthetic
cugucagcccuugucuuagu

SEQ ID NO: 659377 - RNA, 21 nt, Artificial Sequence
  Synthetic
gcugucagcccuugucuuagu

SEQ ID NO: 659378 - RNA, 22 nt, Artificial Sequence
  Synthetic
agcugucagcccuugucuuagu

SEQ ID NO: 659379 - RNA, 23 nt, Artificial Sequence
  Synthetic
cagcugucagcccuugucuuagu

SEQ ID NO: 659380 - RNA, 24 nt, Artificial Sequence
  Synthetic
ucagcugucagcccuugucuuagu

SEQ ID NO: 659381 - RNA, 18 nt, Artificial Sequence
  Synthetic
ugagaauaauuucuuagu

SEQ ID NO: 659382 - RNA, 19 nt, Artificial Sequence
  Synthetic
augagaauaauuucuuagu

SEQ ID NO: 659383 - RNA, 20 nt, Artificial Sequence
  Synthetic
uaugagaauaauuucuuagu

SEQ ID NO: 659384 - RNA, 21 nt, Artificial Sequence
  Synthetic
uuaugagaauaauuucuuagu

SEQ ID NO: 659385 - RNA, 22 nt, Artificial Sequence
  Synthetic
auuaugagaauaauuucuuagu

SEQ ID NO: 659386 - RNA, 23 nt, Artificial Sequence
  Synthetic
uauuaugagaauaauuucuuagu

SEQ ID NO: 659387 - RNA, 24 nt, Artificial Sequence
  Synthetic
guauuaugagaauaauuucuuagu

SEQ ID NO: 659388 - RNA, 18 nt, Artificial Sequence
  Synthetic
gcuauugauuuucuuagu

SEQ ID NO: 659389 - RNA, 19 nt, Artificial Sequence
  Synthetic
ggcuauugauuuucuuagu

SEQ ID NO: 659390 - RNA, 20 nt, Artificial Sequence
  Synthetic
aggcuauugauuuucuuagu

SEQ ID NO: 659391 - RNA, 21 nt, Artificial Sequence
  Synthetic
uaggcuauugauuuucuuagu

SEQ ID NO: 659392 - RNA, 22 nt, Artificial Sequence
  Synthetic
guaggcuauugauuuucuuagu

SEQ ID NO: 659393 - RNA, 23 nt, Artificial Sequence
  Synthetic
gguaggcuauugauuuucuuagu

SEQ ID NO: 659394 - RNA, 24 nt, Artificial Sequence
  Synthetic
ggguaggcuauugauuuucuuagu

SEQ ID NO: 659395 - RNA, 18 nt, Artificial Sequence
  Synthetic
uuuagagcuugaguuagu

SEQ ID NO: 659396 - RNA, 19 nt, Artificial Sequence
  Synthetic
cuuuagagcuugaguuagu

SEQ ID NO: 659397 - RNA, 20 nt, Artificial Sequence
  Synthetic
gcuuuagagcuugaguuagu

SEQ ID NO: 659398 - RNA, 21 nt, Artificial Sequence
  Synthetic
agcuuuagagcuugaguuagu

SEQ ID NO: 659399 - RNA, 22 nt, Artificial Sequence
  Synthetic
aagcuuuagagcuugaguuagu

SEQ ID NO: 659400 - RNA, 23 nt, Artificial Sequence
  Synthetic
aaagcuuuagagcuugaguuagu

SEQ ID NO: 659401 - RNA, 24 nt, Artificial Sequence
  Synthetic
aaaagcuuuagagcuugaguuagu

SEQ ID NO: 659402 - RNA, 18 nt, Artificial Sequence
  Synthetic
cuaacauuuaagguuagu

SEQ ID NO: 659403 - RNA, 19 nt, Artificial Sequence
  Synthetic
ccuaacauuuaagguuagu

SEQ ID NO: 659404 - RNA, 20 nt, Artificial Sequence
  Synthetic
gccuaacauuuaagguuagu

SEQ ID NO: 659405 - RNA, 21 nt, Artificial Sequence
  Synthetic
agccuaacauuuaagguuagu

SEQ ID NO: 659406 - RNA, 22 nt, Artificial Sequence
  Synthetic
uagccuaacauuuaagguuagu

SEQ ID NO: 659407 - RNA, 23 nt, Artificial Sequence
  Synthetic
uuagccuaacauuuaagguuagu

SEQ ID NO: 659408 - RNA, 24 nt, Artificial Sequence
  Synthetic
auuagccuaacauuuaagguuagu

SEQ ID NO: 659409 - RNA, 18 nt, Artificial Sequence
  Synthetic
auaaagaaguugguuagu

SEQ ID NO: 659410 - RNA, 19 nt, Artificial Sequence
  Synthetic
aauaaagaaguugguuagu

SEQ ID NO: 659411 - RNA, 20 nt, Artificial Sequence
  Synthetic
aaauaaagaaguugguuagu

SEQ ID NO: 659412 - RNA, 21 nt, Artificial Sequence
  Synthetic
aaaauaaagaaguugguuagu

SEQ ID NO: 659413 - RNA, 22 nt, Artificial Sequence
  Synthetic
gaaaauaaagaaguugguuagu

SEQ ID NO: 659414 - RNA, 23 nt, Artificial Sequence
  Synthetic
agaaaauaaagaaguugguuagu

SEQ ID NO: 659415 - RNA, 24 nt, Artificial Sequence
  Synthetic
aagaaaauaaagaaguugguuagu

SEQ ID NO: 659416 - RNA, 18 nt, Artificial Sequence
  Synthetic
gauuuccugaauguuagu

SEQ ID NO: 659417 - RNA, 19 nt, Artificial Sequence
  Synthetic
ugauuuccugaauguuagu

SEQ ID NO: 659418 - RNA, 20 nt, Artificial Sequence
  Synthetic
augauuuccugaauguuagu

SEQ ID NO: 659419 - RNA, 21 nt, Artificial Sequence
  Synthetic
caugauuuccugaauguuagu

SEQ ID NO: 659420 - RNA, 22 nt, Artificial Sequence
  Synthetic
acaugauuuccugaauguuagu

SEQ ID NO: 659421 - RNA, 23 nt, Artificial Sequence
  Synthetic
gacaugauuuccugaauguuagu

SEQ ID NO: 659422 - RNA, 24 nt, Artificial Sequence
  Synthetic
ugacaugauuuccugaauguuagu

SEQ ID NO: 659423 - RNA, 18 nt, Artificial Sequence
  Synthetic
auuuauuaaugauuuagu

SEQ ID NO: 659424 - RNA, 19 nt, Artificial Sequence
  Synthetic
gauuuauuaaugauuuagu

SEQ ID NO: 659425 - RNA, 20 nt, Artificial Sequence
  Synthetic
agauuuauuaaugauuuagu

SEQ ID NO: 659426 - RNA, 21 nt, Artificial Sequence
  Synthetic
aagauuuauuaaugauuuagu

SEQ ID NO: 659427 - RNA, 22 nt, Artificial Sequence
  Synthetic
uaagauuuauuaaugauuuagu

SEQ ID NO: 659428 - RNA, 23 nt, Artificial Sequence
  Synthetic
guaagauuuauuaaugauuuagu

SEQ ID NO: 659429 - RNA, 24 nt, Artificial Sequence
  Synthetic
aguaagauuuauuaaugauuuagu

SEQ ID NO: 659430 - RNA, 18 nt, Artificial Sequence
  Synthetic
aggguccaagacuuuagu
